United States Patent Application Publication US 2025/0084491 A1 - sequence listing, part 5

SEQ ID NO: 77610 - DNA, 75 bp, synthetic construct
  source 1..75: mol_type = other DNA
gtgattcgaccgaagaggaaggcgatgcctggtatctacgtccgggagacgtggttcatcagcctgagttacgtc

SEQ ID NO: 77611 - DNA, 75 bp, synthetic construct
  source 1..75: mol_type = other DNA
aatgtgccgtgtgctccgggtggcccgcagcggctggtatacatggtgtcagcggcgtacaaggataagcaagcg

SEQ ID NO: 77612 - DNA, 75 bp, synthetic construct
  source 1..75: mol_type = other DNA
gcagacgtcactgcgctgggcagcggcccgcaaaccatcactgccagcattaccgatgcggcaggtaatagcgac

SEQ ID NO: 77613 - DNA, 75 bp, synthetic construct
  source 1..75: mol_type = other DNA
ttttatttataagggtcattgcgaattatctgatgcaaagttatgttatgttaggcaaagtaatcttctattatt

SEQ ID NO: 77614 - DNA, 75 bp, synthetic construct
  source 1..75: mol_type = other DNA
ttctggtctattgaaattattcgcagagatttacgaaacagaattactcatgagccagaccctgagatcccttta

SEQ ID NO: 77615 - DNA, 75 bp, synthetic construct
  source 1..75: mol_type = other DNA
cttcaagtctgttaactacggtcctctgggttacattcacaacggtaagattgactaccagcgtaccccggcacg

SEQ ID NO: 77616 - DNA, 75 bp, synthetic construct
  source 1..75: mol_type = other DNA
ccgccatccccctgtttgttatatccggggcagacgctgctgtttcgctggacagaacccgcgcggtgtttgacg

SEQ ID NO: 77617 - DNA, 75 bp, synthetic construct
  source 1..75: mol_type = other DNA
tacactcagcgcattgagcggcataacctgaatctgagacagcatctggcaaggctgggcaggaagtcactgtcg

SEQ ID NO: 77618 - DNA, 75 bp, synthetic construct
  source 1..75: mol_type = other DNA
tgaaaaaacaaatcgggaatcatcaccgttgggtatttgtgtacaaggaaagctgtaccaaaccagacggaacga

SEQ ID NO: 77619 - DNA, 75 bp, synthetic construct
  source 1..75: mol_type = other DNA
gtaacggccatcgtgtcagtctgccgttatcggttttcaatccccaggactaccatccactgctgattaccgttt

SEQ ID NO: 77620 - DNA, 75 bp, synthetic construct
  source 1..75: mol_type = other DNA
gttgatcaaaccgttcagttgggccaggttcgtaccgctagcctgaagcaggctggagcaaccagctctgccgtt

SEQ ID NO: 77621 - DNA, 75 bp, synthetic construct
  source 1..75: mol_type = other DNA
gtccgcctgccgttaccagtcaaccttcacgtccgggatatgacgttttccaatacgttgagacttattgaagcc

SEQ ID NO: 77622 - DNA, 75 bp, synthetic construct
  source 1..75: mol_type = other DNA
ccgaagtccgtcaacgggcagtccgtatggttctggaaagtcaggacgaatatgactcacaatgggcggcaattt

SEQ ID NO: 77623 - DNA, 75 bp, synthetic construct
  source 1..75: mol_type = other DNA
gtgaagcgatggtgagtcgcgcagtcactgtgccgcccgtttaccagattgaggcaccaacgcagatcatcatcc

SEQ ID NO: 77624 - DNA, 75 bp, synthetic construct
  source 1..75: mol_type = other DNA
aacgttttgcgggtgaggcagaaaacagcgcacagtcatcaggcacagcgcgggacgaatcagtcgatgccgccg

SEQ ID NO: 77625 - DNA, 75 bp, synthetic construct
  source 1..75: mol_type = other DNA
ggggcggtgatggtgggctcaccagcgctgaacgtcagcgtctgaaagagccggaacgtgaaaatcgtgaactgc

SEQ ID NO: 77626 - DNA, 75 bp, synthetic construct
  source 1..75: mol_type = other DNA
ttattttccttgattctcacgaagccatatcaaaactgacggcattccgcaggaaatggaaacagaaagtacgcg

SEQ ID NO: 77627 - DNA, 75 bp, synthetic construct
  source 1..75: mol_type = other DNA
ggcgaagattatattgcgatgcttgaggaagctcttgcgggttacggacgttatctggatctgctgcaagcgcgt

SEQ ID NO: 77628 - DNA, 75 bp, synthetic construct
  source 1..75: mol_type = other DNA
cagtgacataagtatacctgttggtcatggaggagtttctgccggatggcgtgctgaactttcggcagcagccac

SEQ ID NO: 77629 - DNA, 75 bp, synthetic construct
  source 1..75: mol_type = other DNA
gagtgcacaggttagtgatacagggacatacgcatcctcaccgcaggttgtgattggcggtgccggtgaatacaa

SEQ ID NO: 77630 - DNA, 75 bp, synthetic construct
  source 1..75: mol_type = other DNA
ggtatttcgctcgcttctggattcatggttttcctcattgggagcgacaacggtactggcggctgatggggtgga

SEQ ID NO: 77631 - DNA, 75 bp, synthetic construct
  source 1..75: mol_type = other DNA
gtgtcgcgtgcgcagttgcacgtcattctcagacgaaccgatgactggaaagatggtcgccgcagccgtcactca

SEQ ID NO: 77632 - DNA, 75 bp, synthetic construct
  source 1..75: mol_type = other DNA
gatgcagttaatgtgctgtgcctgtgtctggatatcgctgaccaggatggcattggtccggatgaagaagcacag

SEQ ID NO: 77633 - DNA, 75 bp, synthetic construct
  source 1..75: mol_type = other DNA
atgcgtaaactttatgccgccattttgtccgcagccatctgtctggccgtatccggtgcgcctgcatgggcgtct

SEQ ID NO: 77634 - DNA, 75 bp, synthetic construct
  source 1..75: mol_type = other DNA
gacagggtcagttcactggtcagtgatactgccaggctggcgcattattcggctgacacgcgggagcagttactc

SEQ ID NO: 77635 - DNA, 75 bp, synthetic construct
  source 1..75: mol_type = other DNA
tacagaaaagtttcagcagaactttgcgcttgtcttgcctgactggcaggtgggcgtgaaacgtatgctcaacga

SEQ ID NO: 77636 - DNA, 75 bp, synthetic construct
  source 1..75: mol_type = other DNA
tgtgagtaattatgcttggggaaattatgagtctggtgggaccatatcagtcacatgcctcaatcttcctggtgc

SEQ ID NO: 77637 - DNA, 75 bp, synthetic construct
  source 1..75: mol_type = other DNA
actcagttgccttcctgaaaaatttgtggttgattttgcaaacggtattgatgttgcacaggagcataaccgcac

SEQ ID NO: 77638 - DNA, 75 bp, synthetic construct
  source 1..75: mol_type = other DNA
catatccctgctccgcgtgatggtcgtgattacgatccggaagtactgaagcaggtggtgaatgatgctgtcggg

SEQ ID NO: 77639 - DNA, 75 bp, synthetic construct
  source 1..75: mol_type = other DNA
ttcacagcctcagctaatgagcaggcttcaaaagtgcttaagtcgggtaatgctttacggaagttttctgtgaat

SEQ ID NO: 77640 - DNA, 75 bp, synthetic construct
  source 1..75: mol_type = other DNA
cggtaacctgcaggtgagcgtggaagatctcgtcagaaccggcgcgtttctggtggcgatgtccctgtggcataa

SEQ ID NO: 77641 - DNA, 75 bp, synthetic construct
  source 1..75: mol_type = other DNA
ttaccagcagcgtgctaaaacgcgcagttacatatcatctgaatgctggtgacaaaccgtcaaaaatgctttcgg

SEQ ID NO: 77642 - DNA, 75 bp, synthetic construct
  source 1..75: mol_type = other DNA
cccgaccgaatccgtggccattgatattgcttatgaaggttctggcagtggtgactggcgcactgacgggttcat

SEQ ID NO: 77643 - DNA, 75 bp, synthetic construct
  source 1..75: mol_type = other DNA
atgggaaacagccattaagcgtgcagggatcaggcatcgaaaggcataccagtcacgacacacttatgcgtgctg

SEQ ID NO: 77644 - DNA, 75 bp, synthetic construct
  source 1..75: mol_type = other DNA
gcaggccgggctgttctcgatgagcgccaaaaaagccatgctcgagcaccccgaactggactacaacctgcagca

SEQ ID NO: 77645 - DNA, 75 bp, synthetic construct
  source 1..75: mol_type = other DNA
atcatgatgactgcactgttactgaactggcggcaggcggcgggttacacgattctggccccgactgtggaggtg

SEQ ID NO: 77646 - DNA, 75 bp, synthetic construct
  source 1..75: mol_type = other DNA
atgtcagatccgggtagggcagaggccattatcgggagagttcaggccagagttgcctacgaagagatcaccgac

SEQ ID NO: 77647 - DNA, 75 bp, synthetic construct
  source 1..75: mol_type = other DNA
gtgctgaccggaagtgatgacggtcgccacagcaacacgtctctggcgtggggagctggcgtgcagtttaacccg

SEQ ID NO: 77648 - DNA, 75 bp, synthetic construct
  source 1..75: mol_type = other DNA
gcgtcgaaaaccacggtggcacattacgcatctggtttaattttaaaggtaagcgtgtcagggaaagtctcggtg

SEQ ID NO: 77649 - DNA, 75 bp, synthetic construct
  source 1..75: mol_type = other DNA
gaaacagcgaataacaaaaatattttatgagcccgatgcaagactggttgcagaagagattaaattccggattca

SEQ ID NO: 77650 - DNA, 75 bp, synthetic construct
  source 1..75: mol_type = other DNA
ggcggtccagagacaacgtcaggcacttaaagaatcagggattgataccagacaactcagtagtgcccagcgaga

SEQ ID NO: 77651 - DNA, 75 bp, synthetic construct
  source 1..75: mol_type = other DNA
taaggcaattggcagactcggcaacggctggatgatgcacgttgatgcgattcgcaatccggctccgtcatacag

SEQ ID NO: 77652 - DNA, 75 bp, synthetic construct
  source 1..75: mol_type = other DNA
ttgcgctgatagggctgatcttgcttggcatgatgctggcttactatcagcgtatggtgaaggaatatcacctta

SEQ ID NO: 77653 - DNA, 75 bp, synthetic construct
  source 1..75: mol_type = other DNA
gggcagtttggcatcgtcggtgaaaacgggccggaaattgttaacggcccggcaaatgtgaccagccggagaaat

SEQ ID NO: 77654 - DNA, 75 bp, synthetic construct
  source 1..75: mol_type = other DNA
gggaagatttttcagtgcctacagaaggggctgaatcgccctggggcggcgcacaactgacgtttatcgcccgcc

SEQ ID NO: 77655 - DNA, 75 bp, synthetic construct
  source 1..75: mol_type = other DNA
cgccatgtcgaaaggggcagacatcattgatgtgatgcaacgtctgggcggtgtggctgatcgtctggattatcg

SEQ ID NO: 77656 - DNA, 75 bp, synthetic construct
  source 1..75: mol_type = other DNA
cctttggcacttcccgcgaaaggtggagaagcaattgtgagtcgcgcagccactgtgccgctcgttcaacggatt

SEQ ID NO: 77657 - DNA, 75 bp, synthetic construct
  source 1..75: mol_type = other DNA
tgcttatgatcatcgtaaagccgaactgacaatgaaaaagttatatgacaaagttcctgcgagtgtgtggacctt

SEQ ID NO: 77658 - DNA, 75 bp, synthetic construct
  source 1..75: mol_type = other DNA
tatccgcttgctttgttcatttcgatagctaacatcgccgatgatgagaaagcagccatgtataatgatcttgtc

SEQ ID NO: 77659 - DNA, 75 bp, synthetic construct
  source 1..75: mol_type = other DNA
agcctgggaaactctgcgcgaagggttagagacaacgccgtttctgacgctcaccggctacggacggcaactggt

SEQ ID NO: 77660 - DNA, 75 bp, synthetic construct
  source 1..75: mol_type = other DNA
gaaatctcctgtcacgggctgggcgcacggtttcttgcgccagcaacgcgcgcggtaatcgacatcggtggtcag

SEQ ID NO: 77661 - DNA, 75 bp, synthetic construct
  source 1..75: mol_type = other DNA
tcagggtacctgtcacagaatccgtaacagaaacagcaccattacacatcgacaaggaaattgtccggtcagtag

SEQ ID NO: 77662 - DNA, 75 bp, synthetic construct
  source 1..75: mol_type = other DNA
ccgtgattggcggggagtccagtacaaagcggactgctccgctgctgtgtgaaccggactcacaaaaacgggcga

SEQ ID NO: 77663 - DNA, 75 bp, synthetic construct
  source 1..75: mol_type = other DNA
cttaaggataaatgggatgagagtgaaatactggagcgaggtaaaaagttgggggaaattgcattgaaagtatgg

SEQ ID NO: 77664 - DNA, 75 bp, synthetic construct
  source 1..75: mol_type = other DNA
ctgacgtatgttgccacacaggagggatggttgtacctcgctggcatcaaagatgtttatacgtgcgaaattgtc

SEQ ID NO: 77665 - DNA, 75 bp, synthetic construct
  source 1..75: mol_type = other DNA
acgaccagaccatccgcgagcgagtacaagcagcaggtgtcgtgggtgctggcggcgcaggttttccaacccata

SEQ ID NO: 77666 - DNA, 75 bp, synthetic construct
  source 1..75: mol_type = other DNA
agggagggttttgaatgcagaaaaagcgattagtatgttttgcaagaaaaattatattcctgtccgtcagggaag

SEQ ID NO: 77667 - DNA, 75 bp, synthetic construct
  source 1..75: mol_type = other DNA
atacccgctggcatgaggattctgtgcgtaaccgctggttcagcgtgatggcggggccatctgtgcgcgtgaatg

SEQ ID NO: 77668 - DNA, 75 bp, synthetic construct
  source 1..75: mol_type = other DNA
taatgcagataaatacggttaccctctgttatcacgcattggcgcttattgtgcgctgatactgatcttctcgtc

SEQ ID NO: 77669 - DNA, 75 bp, synthetic construct
  source 1..75: mol_type = other DNA
gttgattccggagtggcatttattggaggtctcagcgatagtgaatttgcaaaatttagttttactcaggatggt

SEQ ID NO: 77670 - DNA, 75 bp, synthetic construct
  source 1..75: mol_type = other DNA
atcaaacgtctggctcgcaaaaccatctgttcctcgcgctttgtggaacttcatgaaaaagtcatcggtgctttt

SEQ ID NO: 77671 - DNA, 75 bp, synthetic construct
  source 1..75: mol_type = other DNA
gggatatggtacgacgggacgatgatctggatgacctctgtcaggtgcagacacatatccggaccatcacccatc

SEQ ID NO: 77672 - DNA, 75 bp, synthetic construct
  source 1..75: mol_type = other DNA
catatccctgctccgcgtgacggtcgtgattacgatccggaagtactgaagctggcggtgaatgatgcggtcgcg

SEQ ID NO: 77673 - DNA, 75 bp, synthetic construct
  source 1..75: mol_type = other DNA
aagtgcgtgacgggcgatgatatgcgtccgatgcttgagcagatggtgaaggaggcggtaagccatatccctgtt

SEQ ID NO: 77674 - DNA, 75 bp, synthetic construct
  source 1..75: mol_type = other DNA
taagaaatgctttagcttgtgcattgtcaacttgttataatagaaaatatctcattaaagttgcaaaaggaaaat

SEQ ID NO: 77675 - DNA, 75 bp, synthetic construct
  source 1..75: mol_type = other DNA
agcggcccgcgacagacgcgggaatacggctacagcgccacgggcaggctggagagcgtgcgtaccctcgcaccg

SEQ ID NO: 77676 - DNA, 75 bp, synthetic construct
  source 1..75: mol_type = other DNA
gttattcatcttgttcaaccagctgttgatgccctgaaaagccaggctgaaatgacaaggtttgaccagcaatat

SEQ ID NO: 77677 - DNA, 75 bp, synthetic construct
  source 1..75: mol_type = other DNA
cagtctggctccagggcgacggttgcaaagccaatacctgcggctgggactttatcgtaacactctataacccaa

SEQ ID NO: 77678 - DNA, 75 bp, synthetic construct
  source 1..75: mol_type = other DNA
cgttgtgttcgcccggatgtaattgtcaatgctgccgcccatacggccgtcgataaagcagaaagtgagattgat

SEQ ID NO: 77679 - DNA, 75 bp, synthetic construct
  source 1..75: mol_type = other DNA
actaactcccgatgccataaaattaattaaagaatcaatacatgattgcttatctgagaaggaaagtttcagcgg

SEQ ID NO: 77680 - DNA, 75 bp, synthetic construct
  source 1..75: mol_type = other DNA
atgaagtcgaaagatgaaatttttgacgaaattctgggaaaagagggcggttacgtcaatcacccggatgataaa

SEQ ID NO: 77681 - DNA, 75 bp, synthetic construct
  source 1..75: mol_type = other DNA
catattcctgttccgcgtgatggtcgtgactacgatccggatgttctgcagaaggcggttctggaggcggtgagt

SEQ ID NO: 77682 - DNA, 75 bp, synthetic construct
  source 1..75: mol_type = other DNA
agccgtggcgtcaaaaatgcttcaacgctggctgaacgttttcaacctgcgcgggaaactgtatccggatatgga

SEQ ID NO: 77683 - DNA, 75 bp, synthetic construct
  source 1..75: mol_type = other DNA
atggacaggtaggatgggaactacaacgttcgctcgctcctcttggaaatcttatagcgctggatgttcattcaa

SEQ ID NO: 77684 - DNA, 75 bp, synthetic construct
  source 1..75: mol_type = other DNA
acgacgttttcaccggtggatgcgcagacggtggaacaactgaagatgaccgctgaaattgtctgttcggtgttc

SEQ ID NO: 77685 - DNA, 75 bp, synthetic construct
  source 1..75: mol_type = other DNA
ccggttcaatattccagacagactcgtggttcatttgagcctccatgctcgccctgaactccgggcacacaatac

SEQ ID NO: 77686 - DNA, 75 bp, synthetic construct
  source 1..75: mol_type = other DNA
ggatgacgccaccggaaaactggttgtctgggatggtcagaaagccggaacggctgtgggtgtgctggctctggc

SEQ ID NO: 77687 - DNA, 75 bp, synthetic construct
  source 1..75: mol_type = other DNA
tagcgtcacggtaagcgcagtcacgaccgctggtggaatgcaaacagtagatataacgctggtggctggcccggc

SEQ ID NO: 77688 - DNA, 75 bp, synthetic construct
  source 1..75: mol_type = other DNA
ttttcggcctggaaccctacgaaatctccacgctgtttgagcaacgccaggccatgttgcagtctatcaaagaag

SEQ ID NO: 77689 - DNA, 75 bp, synthetic construct
  source 1..75: mol_type = other DNA
ggctgattgtacggcacatgccattcgtgtggcactgaataaaccggaagtcgcaggtttgtaccatctggtagc

SEQ ID NO: 77690 - DNA, 75 bp, synthetic construct
  source 1..75: mol_type = other DNA
tcaatgatattctttatagcgtgcgattaaaaaacattagtaaactggagaatatggagttctgcgctaaaaaac

SEQ ID NO: 77691 - DNA, 75 bp, synthetic construct
  source 1..75: mol_type = other DNA
aataacctgctgggtggcagtgaatggctccagacggaaaaagccagagagcatggcgctgatgttctctcctgt

SEQ ID NO: 77692 - DNA, 75 bp, synthetic construct
  source 1..75: mol_type = other DNA
gagctgcctaccctgcacaagctgccggacctggttgagatcctgccggaggcgcgtaagtttggcggctgctac

SEQ ID NO: 77693 - DNA, 75 bp, synthetic construct
  source 1..75: mol_type = other DNA
tttactggtggtgtaccacgctggaaggcatgcgggatttaatcaagtcccagccagtatatgagatccagtatt

SEQ ID NO: 77694 - DNA, 75 bp, synthetic construct
  source 1..75: mol_type = other DNA
tcctgaacgtccagctgctgcagaacagcatggacgcgccgaaaatcattggatctttcccgtgtaaaaaagtga

SEQ ID NO: 77695 - DNA, 75 bp, synthetic construct
  source 1..75: mol_type = other DNA
ggaccttatcctgccgtgaaaatggcgctgaagtatcagcagcgtccaaaggtggcaccggaattcattccgcgc

SEQ ID NO: 77696 - DNA, 75 bp, synthetic construct
  source 1..75: mol_type = other DNA
gggtttcctggagagtgttttatctgtgaactcaggctgccagatcatcgtttccgatggaagcataataagctt

SEQ ID NO: 77697 - DNA, 75 bp, synthetic construct
  source 1..75: mol_type = other DNA
tgcctgaacttttgtcgcgtattggcagttacaaggggcaacctgtcacccagcttgccgttatgctgaatttac

SEQ ID NO: 77698 - DNA, 75 bp, synthetic construct
  source 1..75: mol_type = other DNA
gccgacaccctcggcagttgtggctacgtttatatggctgtttatccgacaccagcagttcccgcaacaacagca

SEQ ID NO: 77699 - DNA, 75 bp, synthetic construct
  source 1..75: mol_type = other DNA
cctgagacaatttataaaacgctgtactttcgtagccgtgaagcgctacaccacctgaatatacagcatctgcgg

SEQ ID NO: 77700 - DNA, 75 bp, synthetic construct
  source 1..75: mol_type = other DNA
catgtgggacagcagctctctcagcatgattatccagccggaagcgattctctttggcaacatcatcgcccaggg

SEQ ID NO: 77701 - DNA, 75 bp, synthetic construct
  source 1..75: mol_type = other DNA
gggctgcaaagcacactgacaaggcttataaactcactgacggggctggcatgttcctgctggtacatcctaatg

SEQ ID NO: 77702 - DNA, 75 bp, synthetic construct
  source 1..75: mol_type = other DNA
gtatctggctggttgccggtatcaccgatatgcgaaatggttttaacggcctggcatcaaaagttcagaacgtcc

SEQ ID NO: 77703 - DNA, 75 bp, synthetic construct
  source 1..75: mol_type = other DNA
agaaggccatgaaactaccacgaagttcccttgtctggtgtgtgttgatcgtgtgtctcacactgttgatattca

SEQ ID NO: 77704 - DNA, 75 bp, synthetic construct
  source 1..75: mol_type = other DNA
cttgataggttgcttgaattgtgatggtgaaactacggctgtagttaaaaattcaatattatttgcatgtcttgc

SEQ ID NO: 77705 - DNA, 75 bp, synthetic construct
  source 1..75: mol_type = other DNA
acagaacgccccctgtcacagccagtaccaaccgcacagataaccagtcagatggccggaaatatcagggcgtta

SEQ ID NO: 77706 - DNA, 75 bp, synthetic construct
  source 1..75: mol_type = other DNA
tacgtggtggaagactacgccgccggttgtctggtggaaaaaattaaggtcggtgacttctccacaccgactaaa

SEQ ID NO: 77707 - DNA, 75 bp, synthetic construct
  source 1..75: mol_type = other DNA
ggcatggccttgtgggttttcagttatgtggcctcagcgtcgtgtgcgggctgtgccgtgcctccatcgtagccg

SEQ ID NO: 77708 - DNA, 75 bp, synthetic construct
  source 1..75: mol_type = other DNA
aaatcgttcgcgccattgagctggcgaatcttcgcaacgaatgtgacgtactgatcgtcgggcgtggcggtggtt

SEQ ID NO: 77709 - DNA, 75 bp, synthetic construct
  source 1..75: mol_type = other DNA
atggctaatgaaaaaaagacatcccgcaaaaagtttcgcgtggctgtctccggatcaactgttgatggccgcgaa

SEQ ID NO: 77710 - DNA, 75 bp, synthetic construct
  source 1..75: mol_type = other DNA
gtatcgaactgcacccgcagttctccgttaacgggcgcgcctatctggtcgggctggcgatgaccgacaccccgg

SEQ ID NO: 77711 - DNA, 75 bp, synthetic construct
  source 1..75: mol_type = other DNA
gaggagaatatgctcctgccggtttcaggtcagattctgcctgttcgatggctggcacagcacggcagcgaaaaa

SEQ ID NO: 77712 - DNA, 75 bp, synthetic construct
  source 1..75: mol_type = other DNA
tgtgaagccgacaccctcggctcctgtggttacgtttatctggctgtttatccgacgcccgaaatgaaaaattaa

SEQ ID NO: 77713 - DNA, 75 bp, synthetic construct
  source 1..75: mol_type = other DNA
atggaaagagtaaatgattccgccctgaaccgcctgctgatgccgttgatgcgtcgtgtacggctgatggtggcc

SEQ ID NO: 77714 - DNA, 75 bp, synthetic construct
  source 1..75: mol_type = other DNA
cagaccggtgacagtgaaagctggcgtcagtgggaaaatggcaaatgcgccattcctgatcgtgtagtcgagcaa

SEQ ID NO: 77715 - DNA, 75 bp, synthetic construct
  source 1..75: mol_type = other DNA
atattgcacgacgctggcatgccagtaataaacaatgggcacaatcacacagcgataaagtactcaaaagcctcg

SEQ ID NO: 77716 - DNA, 75 bp, synthetic construct
  source 1..75: mol_type = other DNA
ttatcaggtgataccagagtgcattaaactgccgtcacggataagaatatacaacatttctgataacaaaacatc

SEQ ID NO: 77717 - DNA, 75 bp, synthetic construct
  source 1..75: mol_type = other DNA
agatatctggatataccatgccaggagtggagctatatataatcccttgtatgatctgatgtatcgggccggagt

SEQ ID NO: 77718 - DNA, 75 bp, synthetic construct
  source 1..75: mol_type = other DNA
gtaattgattcaattttgcatgcaatgcaggggcgggttctggatggtgaccttatttccggatgggaaaaacgt

SEQ ID NO: 77719 - DNA, 75 bp, synthetic construct
  source 1..75: mol_type = other DNA
tagatctggttgctgctcagctaaacaacagaccgagaaagacactgaagttcaaaacaccgaaagagataattg

SEQ ID NO: 77720 - DNA, 75 bp, synthetic construct
  source 1..75: mol_type = other DNA
tcgttacagtgggcgggaagacgatccgcaggttccccgccagttgcgacagtctcgtcatcgtcgcccgttacc

SEQ ID NO: 77721 - DNA, 75 bp, synthetic construct
  source 1..75: mol_type = other DNA
atacataccggtatcatctgtctcaccgtattcgtcgcgtggttgggaatgaaaacacatcattgccatatcagc

SEQ ID NO: 77722 - DNA, 75 bp, synthetic construct
  source 1..75: mol_type = other DNA
gtggcgcaggcaggttttatcttaacccgacactggcgggataccccgcaaggaacagaggtctccttctggctg

SEQ ID NO: 77723 - DNA, 75 bp, synthetic construct
  source 1..75: mol_type = other DNA
cctatatggggcccgcatttgtcggcattattaccggttcgatggtcatcgaaaccatttatggtttaccgggga

SEQ ID NO: 77724 - DNA, 75 bp, synthetic construct
  source 1..75: mol_type = other DNA
gggacatgcgagcattcagcagacgatggcctatgcgcaccttgcgcctgactatctgcaaaatgccgtcgctct

SEQ ID NO: 77725 - DNA, 75 bp, synthetic construct
  source 1..75: mol_type = other DNA
agttcaggtgaaatggggagaagaggaaaatgctcactgtgtcgccaattatcaactgccaccagagagtcagca

SEQ ID NO: 77726 - DNA, 75 bp, synthetic construct
  source 1..75: mol_type = other DNA
actcggccacaccatccgtgaacaattcaaaaagaaactggcagaacggctggaaaatccacgcgtacccgcagc

SEQ ID NO: 77727 - DNA, 75 bp, synthetic construct
  source 1..75: mol_type = other DNA
ggttcgcgaacgcgtaggagaagggcgctttatcgaagtgtttgtcgatacgccgctggcgatttgcgaagcccg

SEQ ID NO: 77728 - DNA, 75 bp, synthetic construct
  source 1..75: mol_type = other DNA
atgatcactcactatgatataaaaacggagacacagaaactaaaggatgtactctctgtagagggagttaatatt

SEQ ID NO: 77729 - DNA, 75 bp, synthetic construct
  source 1..75: mol_type = other DNA
acccacagcgggaaaagcagtgccccgtcgctcagcctcagtgcgccggaactgaccagcagcggcgtacttgtt

SEQ ID NO: 77730 - DNA, 75 bp, synthetic construct
  source 1..75: mol_type = other DNA
tagaacgtgatgaatatggctgctggatacatccagaatatgaaaaattctgtgacggtcgggaatatatttcaa

SEQ ID NO: 77731 - DNA, 75 bp, synthetic construct
  source 1..75: mol_type = other DNA
aatccgcgttttctgtctgatgacccggaagcggttgcggacctgtctgcatttacacaggggcaggagcttccg

SEQ ID NO: 77732 - DNA, 75 bp, synthetic construct
  source 1..75: mol_type = other DNA
acttctgatgttagtgagaatatccgtctgtatgcccatcaaatcaagagcgccatcgaaaaacagttcggggat

SEQ ID NO: 77733 - DNA, 75 bp, synthetic construct
  source 1..75: mol_type = other DNA
tcctggttctgacgtccggcgcggagtattgattttctcaatggaaatgagcgcattgcagattgcagagcgaag

SEQ ID NO: 77734 - DNA, 75 bp, synthetic construct
  source 1..75: mol_type = other DNA
agccacgtttggtacaaggaaataagcgactacctgatcaagtctgggcgcactgacgcaacgcctgcatgggta

SEQ ID NO: 77735 - DNA, 75 bp, synthetic construct
  source 1..75: mol_type = other DNA
acccgctggtctgacagtgttcaggattaccgacgtgatgaattgaaaccggggtatgtgaaggagacgaccacc

SEQ ID NO: 77736 - DNA, 75 bp, synthetic construct
  source 1..75: mol_type = other DNA
tactgcggcgggatggtctggctggattactactctggtattgatgatgccgttcttacttacaagaaaggccag

SEQ ID NO: 77737 - DNA, 75 bp, synthetic construct
  source 1..75: mol_type = other DNA
gcatcatccgcaagagaggggctgaaggtaaatcgctggatcagatttatcggatgctttttaacccggagttat

SEQ ID NO: 77738 - DNA, 75 bp, synthetic construct
  source 1..75: mol_type = other DNA
ctatcgtgatgattgagcagtgggaaagcatcgcgcatcttgaagcgcacttgcagaccccgcacatgaaagcgt

SEQ ID NO: 77739 - DNA, 75 bp, synthetic construct
  source 1..75: mol_type = other DNA
tgctgccaaatctttgctggcagatctgaaagtcggactggatatggtttccagtggatatatttctttcgggaa

SEQ ID NO: 77740 - DNA, 75 bp, synthetic construct
  source 1..75: mol_type = other DNA
catgacggaggatgatgtccgaccggaggcactgcgccgctttgagcagatggtggaagaggtggcgcgtaacgc

SEQ ID NO: 77741 - DNA, 75 bp, synthetic construct
  source 1..75: mol_type = other DNA
cacaacctgccggaagagatgcagttaagccggacgggcttaaaccgctatgccatccgcatggaaaaagtcggg

SEQ ID NO: 77742 - DNA, 75 bp, synthetic construct
  source 1..75: mol_type = other DNA
cgtgacggtcaatccgctgctttcgccgtacatgacgaaggttgtgaagatgtggcgtaagctgggagcgtggct

SEQ ID NO: 77743 - DNA, 75 bp, synthetic construct
  source 1..75: mol_type = other DNA
gtgtgtctcacactgttgatattcacttatctgacacgaaaatcgctgtgcgagattcgttacagagacggatac

SEQ ID NO: 77744 - DNA, 75 bp, synthetic construct
  source 1..75: mol_type = other DNA
ggcggcaactggcagcaccagaacgcccgtcggggccaacaccaattgagttgctgaaacaggaatatgaacgcc

SEQ ID NO: 77745 - DNA, 75 bp, synthetic construct
  source 1..75: mol_type = other DNA
atccgcgaaagagtagaacaacagaatttctgtttctcattctgtttatcgtgttgatgataccgataaacctgc

SEQ ID NO: 77746 - DNA, 75 bp, synthetic construct
  source 1..75: mol_type = other DNA
gctgatgtcggcgagtaagctgtccggctgttataccgaaggcgtggtgctggcgaaacagattgaggcgctgtt

SEQ ID NO: 77747 - DNA, 75 bp, synthetic construct
  source 1..75: mol_type = other DNA
caactcaagttggtaaagcatgccagtttacaacggggcttgctgtgcttatttcaactaaagataatgaaactc

SEQ ID NO: 77748 - DNA, 75 bp, synthetic construct
  source 1..75: mol_type = other DNA
atgataacgctgccaaccggtatcagaatctggatcatcgctggcatcacagatatgcgttgtggcttcaacggc

SEQ ID NO: 77749 - DNA, 75 bp, synthetic construct
  source 1..75: mol_type = other DNA
gtttccctcgcgttggcctgcgtcgcgagctgaaaaaagcgcaagagagttattgggcggggaactccacgcgtg

SEQ ID NO: 77750 - DNA, 75 bp, synthetic construct
  source 1..75: mol_type = other DNA
atttttatatccgctacaaaacgctggacctgtgggcgcgttatcaggatttccagctccgtgtccgtaacgcca

SEQ ID NO: 77751 - DNA, 75 bp, synthetic construct
  source 1..75: mol_type = other DNA
cggaccgtgaaaaagaatctccacgatatcgagctggaaggccaccatttgattcgctcggcggtgccgctggag

SEQ ID NO: 77752 - DNA, 75 bp, synthetic construct
  source 1..75: mol_type = other DNA
tagcgtttgcgagtgaaaatataagttcttatcgtctaatggaggcgtggaaagcaaatgagaacattgacttca

SEQ ID NO: 77753 - DNA, 75 bp, synthetic construct
  source 1..75: mol_type = other DNA
gacataggcagtcaggtggcggatattgcgcgtacacagggagaactgaatgcgttgaaggccgcgaaggaagca

SEQ ID NO: 77754 - DNA, 75 bp, synthetic construct
  source 1..75: mol_type = other DNA
tcgggctggctggttttggcctgcttacgtgcggggtttacctgcagtttggtatggctccggctctgatgctgt

SEQ ID NO: 77755 - DNA, 75 bp, synthetic construct
  source 1..75: mol_type = other DNA
cagtcctaaagcgaatgggatacaccgatttaacgcagcatgggtttagatcgacattccgtgattgggctggtg

SEQ ID NO: 77756 - DNA, 75 bp, synthetic construct
  source 1..75: mol_type = other DNA
catgctggcgaacacctgtatgtgggattaccggggcgatgagtgcgggtataacggtccggcagtggcggatga

SEQ ID NO: 77757 - DNA, 75 bp, synthetic construct
  source 1..75: mol_type = other DNA
gaattggcgaagaagatccccgctcatatgatcatcattgcttcccatcgaccggatatcaccacttatctgctc

SEQ ID NO: 77758 - DNA, 75 bp, synthetic construct
  source 1..75: mol_type = other DNA
ctggttgcggggtatttccatcagagcaggcgtatcgcgtatggcgtaagacaccggagaaggctgctgacccga

SEQ ID NO: 77759 - DNA, 75 bp, synthetic construct
  source 1..75: mol_type = other DNA
gccttatagcccccgttatgcgtggggtgcgtcttctgattggacggggggttcttaccggtatccgtgatgagc

SEQ ID NO: 77760 - DNA, 75 bp, synthetic construct
  source 1..75: mol_type = other DNA
atgtcagccatcgactgtataattaccgctgccggattatcatcaagaatggggcaatggaaaatgatgttaccc

SEQ ID NO: 77761 - DNA, 75 bp, synthetic construct
  source 1..75: mol_type = other DNA
tcagcggaaatgctgtacttgcaaaaaacgttggggctacaagggttaccgctgattgccgaaaatggcgcagtg

SEQ ID NO: 77762 - DNA, 75 bp, synthetic construct
  source 1..75: mol_type = other DNA
ccaccaacatcaaactggcatggatggaagatggtgcggtcaaaacgttgatcagtccgaacagcttcaagcccg

SEQ ID NO: 77763 - DNA, 75 bp, synthetic construct
  source 1..75: mol_type = other DNA
acttgctgcaaacccagagtttgtagaattgacggttgatgtggcggcgggaaaagtatcgttagaagatatcgt

SEQ ID NO: 77764 - DNA, 75 bp, synthetic construct
  source 1..75: mol_type = other DNA
ttaacatttcgccactgggttcagcaaatgcacgttatttctgcagtgacgcttcttgatgatggatattcgttg

SEQ ID NO: 77765 - DNA, 75 bp, synthetic construct
  source 1..75: mol_type = other DNA
gatgcagcaacggtgacatatccaacagaactgcttgaatatgtcaccacctacaacgcccccgttaaatatcct

SEQ ID NO: 77766 - DNA, 75 bp, synthetic construct
  source 1..75: mol_type = other DNA
aagccaaagactggacccggcagaatttacacgtacatgtggaagcaagcggtgagcagtatcgttttgttatgc

SEQ ID NO: 77767 - DNA, 75 bp, synthetic construct
  source 1..75: mol_type = other DNA
gaaaatgtccccgtcgctactgtagaagccaaagactggacccggcagaatttacacgtacatgtggaagcaagc

SEQ ID NO: 77768 - DNA, 75 bp, synthetic construct
  source 1..75: mol_type = other DNA
gccagtgcagcccgctcttatatagggaaaaactacacaactctccaggccagtagtaccacaacaacccctgcc

SEQ ID NO: 77769 - DNA, 75 bp, synthetic construct
  source 1..75: mol_type = other DNA
atcagccaataactcatggtcggctgcgtgcgatacaaccgaagatcagaatggttcaataactgtatatgccat

SEQ ID NO: 77770 - DNA, 75 bp, synthetic construct
  source 1..75: mol_type = other DNA
agaactgattgctgcaaagaagctgcttaaagcaggccagtcgccggctgcggctaaacgtgacggtatcaaaaa

SEQ ID NO: 77771 - DNA, 75 bp, synthetic construct
  source 1..75: mol_type = other DNA
cagacccgtccggtggcaccgcaggagcagtcgtttctcgacgcgcaggcacagcagttccggcaatccatgcag

SEQ ID NO: 77772 - DNA, 75 bp, synthetic construct
  source 1..75: mol_type = other DNA
tgcctgcatagctccccggacagactggcagcagcagtttgcccgaaaaagggctgaacactgccaccggcgctg

SEQ ID NO: 77773 - DNA, 75 bp, synthetic construct
  source 1..75: mol_type = other DNA
ccgttcaggggcgtgagagctttaccgtgcgtaaagtcagcgtactgccagagtcggtccctgcaggcttcagtg

SEQ ID NO: 77774 - DNA, 75 bp, synthetic construct
  source 1..75: mol_type = other DNA
gaccgaacattaacgccggctgagatcggtttgatgtaccggtacatggaaaaagtaggaacaacgcctcagatt

SEQ ID NO: 77775 - DNA, 75 bp, synthetic construct
  source 1..75: mol_type = other DNA
actgacagtgtttttcccgtccccgtaaattcggaactagggataatgaccgctttcatcgaagcatacctggac

SEQ ID NO: 77776 - DNA, 75 bp, synthetic construct
  source 1..75: mol_type = other DNA
taaccgggaccggctgtacagccaacggcaactgtatcagtggtggtaacggggactggcaggtttatcaatcgc

SEQ ID NO: 77777 - DNA, 75 bp, synthetic construct
  source 1..75: mol_type = other DNA
acatataagtgaagttcaacaaccccttcattctattatttcacggcagaaagaacatgtaaaaaacttactatc

SEQ ID NO: 77778 - DNA, 75 bp, synthetic construct
  source 1..75: mol_type = other DNA
cgcaatgcattgctgaaagccatcgccgctatccagatattcagtttgtcctgcacgatcgtccgcagcagtggg

SEQ ID NO: 77779 - DNA, 75 bp, synthetic construct
  source 1..75: mol_type = other DNA
aaactggaagaagaactgggttatcacgatggttttctcgacaccgctgaacacttttacctgtttgtgattcag

SEQ ID NO: 77780 - DNA, 75 bp, synthetic construct
  source 1..75: mol_type = other DNA
atagggcgctgtatctgattttagttatgtctgcaggacctattgcagttgcgacatttgttggtttattggtag

SEQ ID NO: 77781 - DNA, 75 bp, synthetic construct
  source 1..75: mol_type = other DNA
atcaacgacccggtgaaccagatatcctgaccgggaacacgtttgctgatctggagatttgtgattctgatgggc

SEQ ID NO: 77782 - DNA, 75 bp, synthetic construct
  source 1..75: mol_type = other DNA
tgaaatggagccaggcacctataaagaccgcctgctgatggagcaactgccgcacctgctggtggaaggtatgct

SEQ ID NO: 77783 - DNA, 75 bp, synthetic construct
  source 1..75: mol_type = other DNA
ccgtatgttcagactaaacgagagtattgatcaggctctacaccatttcttaagcaaagaaggtggtaaaaaatg

SEQ ID NO: 77784 - DNA, 75 bp, synthetic construct
  source 1..75: mol_type = other DNA
gtgttttttccgggacagacagttggtggcgcgtttttgatttttccgttctgaacggatcgtttgggcaactgc

SEQ ID NO: 77785 - DNA, 75 bp, synthetic construct
  source 1..75: mol_type = other DNA
cctgttaatgcctatattacttcacatggcgatgaatgtagccatagcaggaatacaatatctggcttatatcaa

SEQ ID NO: 77786 - DNA, 75 bp, synthetic construct
  source 1..75: mol_type = other DNA
ctgcctgtgtcagaaaatctgttggagcaggatttttacgccagtggcccgaaccagaagtgggcaggagacatc

SEQ ID NO: 77787 - DNA, 75 bp, synthetic construct
  source 1..75: mol_type = other DNA
gatgccgtctccgccgtcacgccgttctactatcctttcagctttgaagaacactgcgatcactatcgggcaatt

SEQ ID NO: 77788 - DNA, 75 bp, synthetic construct
  source 1..75: mol_type = other DNA
tcttcgtttcgtagccggtggcctcaagtatgccctggccgtttctgttagtgcgactagaaatgaccctatatc

SEQ ID NO: 77789 - DNA, 75 bp, synthetic construct
  source 1..75: mol_type = other DNA
gattgaagtcttcttgctggcgtcaaaactgggtaactccgaagcgctggtggtaaagaaaactatcagcaaacc

SEQ ID NO: 77790 - DNA, 75 bp, synthetic construct
  source 1..75: mol_type = other DNA
gcttgagctgcttgccagaacagagcgggataaggttgcagaactgaaacagcagcgcagactttcaggattacg

SEQ ID NO: 77791 - DNA, 75 bp, synthetic construct
  source 1..75: mol_type = other DNA
aaattccagagcgcggcgtgcgcagcaatagttgagcagttacgtcgtctgccgaaaccaacgtcggcacctgct

SEQ ID NO: 77792 - DNA, 75 bp, synthetic construct
  source 1..75: mol_type = other DNA
gattattcagttatttgtcccttatctgctggcagtgaggaaaacggaagaatggatgatctcgcaaatgtcttt

SEQ ID NO: 77793 - DNA, 75 bp, synthetic construct
  source 1..75: mol_type = other DNA
ggcggcaactggcagcaccaaaacgcccgtcggggccaacaccaattgagttgctgaaacaggagtatgaacgcc

SEQ ID NO: 77794 - DNA, 75 bp, synthetic construct
  source 1..75: mol_type = other DNA
ttccgtgggtggttttcagcctgatttcatcggtgtctgcggacgtgatgggcgggcaggcggagtcctcagtgt

SEQ ID NO: 77795 - DNA, 75 bp, synthetic construct
  source 1..75: mol_type = other DNA
cccctggtgggggctgccctgcaccgtgacgccctgttttggcgcccgtctggtgcaggagggtaaccgcctgca

SEQ ID NO: 77796 - DNA, 75 bp, synthetic construct
  source 1..75: mol_type = other DNA
ctcgctgttatgctgaatttactggtttttattcgttccagtgaactcagataagcccgttggtctgaaattgat

SEQ ID NO: 77797 - DNA, 75 bp, synthetic construct
  source 1..75: mol_type = other DNA
acgcggtgatggaacagaccgccgacgcggtggtggtgccgatggacgcgggctggagcgacgtgggttcctggt

SEQ ID NO: 77798 - DNA, 75 bp, synthetic construct
  source 1..75: mol_type = other DNA
ccggacccggaactgcacccggacagcaccctcacggcatggccggataaccgcatcgcggaagatgcgcactat

SEQ ID NO: 77799 - DNA, 75 bp, synthetic construct
  source 1..75: mol_type = other DNA
aagctgctgggtgaaaatgaatctatttatatcccgctcggcgcgacccacagcctcgagaaccccggcaagatc

SEQ ID NO: 77800 - DNA, 75 bp, synthetic construct
  source 1..75: mol_type = other DNA
tcaccattgtcgtgcacgacgacatcattccgtggcgttatccagctaagcgagaactgcaatttggagaatggc

SEQ ID NO: 77801 - DNA, 75 bp, synthetic construct
  source 1..75: mol_type = other DNA
agcgcctcgattcatcggggcgcgatagcctttatccacaaacgatttcgctgcttaaagcatgcgagaatcatc

SEQ ID NO: 77802 - DNA, 75 bp, synthetic construct
  source 1..75: mol_type = other DNA
tccggacctgcttatcccagttcgcgctgcagaggctaaacagatttatgaaatcgccagtcgtctgcagcaaag

SEQ ID NO: 77803 - DNA, 75 bp, synthetic construct
  source 1..75: mol_type = other DNA
acagtggtgggcggattttctggatgcaaatcgagaagagcacatcagcccctttgagtatgcaaagattaacaa

SEQ ID NO: 77804 - DNA, 75 bp, synthetic construct
  source 1..75: mol_type = other DNA
agaaaagagctaaaaaagtagtccctgatttacaactctcttttgaacatattgcacgacgctggcatgccagta

SEQ ID NO: 77805 - DNA, 75 bp, synthetic construct
  source 1..75: mol_type = other DNA
agcaacacggacgatctgttcaccaagccagcgaagaaacaaacagaagactacatcaccggtcgttacggttga

SEQ ID NO: 77806 - DNA, 75 bp, synthetic construct
  source 1..75: mol_type = other DNA
gaacgagaaaggagagtctgtcacctggcagagtcggcagtatcaggcctatcccattcaggggagtggatttga

SEQ ID NO: 77807 - DNA, 75 bp, synthetic construct
  source 1..75: mol_type = other DNA
gtatgcaaaagggctgacctgcgaagccgacaccctcggctcctgtggttacgtttatctggcacaggcacccgc

SEQ ID NO: 77808 - DNA, 75 bp, synthetic construct
  source 1..75: mol_type = other DNA
tgatggtgatgaatttttcgaaacacagagccgcaatgtaaccgactggatgccgctaccagaaccgccgcagga

SEQ ID NO: 77809 - DNA, 75 bp, synthetic construct
  source 1..75: mol_type = other DNA
gcaaaccggtggttttcagaccttcgatgttcctcaagcaggtcaggtgctggcgaatgtcgcagatcagtatgc

SEQ ID NO: 77810 - DNA, 75 bp, synthetic construct
  source 1..75: mol_type = other DNA
tacaccgctgaatttaaccgcctttccgccatcttctcgcaggagtggcagcgcgtgacgggataccagccatga

SEQ ID NO: 77811 - DNA, 75 bp, synthetic construct
  source 1..75: mol_type = other DNA
accatgctgctgctgcaactgccacatatcggccaggttcagtgtggtgtatggccggcagctgttcgcgagagc

SEQ ID NO: 77812 - DNA, 75 bp, synthetic construct
  source 1..75: mol_type = other DNA
ctggaggaacatccctgccacgaccgcattattgcgcttcgaatcggcggcaacgatcttatgaacgttgtgtcg

SEQ ID NO: 77813 - DNA, 75 bp, synthetic construct
  source 1..75: mol_type = other DNA
gactttttgcacaatccgggcattttactgaacttgataacgggcatgacttttatgcaccacaaagctttttag

SEQ ID NO: 77814 - DNA, 75 bp, synthetic construct
  source 1..75: mol_type = other DNA
cgaggatgaattcgaagtggatgatgatgcgacgcctgatgaaatacatgacgaagcaaaagatattttctttaa

SEQ ID NO: 77815 - DNA, 75 bp, synthetic construct
  source 1..75: mol_type = other DNA
accggcttgccgtcagactgtcgataattataagtcgtctggtggcaggtgaaacgctggatatacgcaaactgg

SEQ ID NO: 77816 - DNA, 75 bp, synthetic construct
  source 1..75: mol_type = other DNA
cttctgccggaggagtatggcccagccttcccagcaatcgtcgattgttataccagtccacccacgttagtgtgg

SEQ ID NO: 77817 - DNA, 75 bp, synthetic construct
  source 1..75: mol_type = other DNA
ttcccgcacactcgcgcagaaggagttccccgtcgggctacggtctctgttaatacgggaatacggcgacgatac

SEQ ID NO: 77818 - DNA, 75 bp, synthetic construct
  source 1..75: mol_type = other DNA
atgccttcgacaagcaccaaaaaagaaatggcgattagtgatgtgctttacgcgctttcgattatgtgtgacgga

SEQ ID NO: 77819 - DNA, 75 bp, synthetic construct
  source 1..75: mol_type = other DNA
gcgatattctggtgtggaacccggtactggaagatgcgtttgagctttcttccatggggatccgcgtggatgccg

SEQ ID NO: 77820 - DNA, 75 bp, synthetic construct
  source 1..75: mol_type = other DNA
ggttatatatcgaaaatatataatgaacttttgggcattaatattataaatatagaatcaaacaatatcggagat

SEQ ID NO: 77821 - DNA, 75 bp, synthetic construct
  source 1..75: mol_type = other DNA
atgaacgtgagtaaatatgtcgctatcttttcctttgtttttattcagttaatcagcgttggtaaagtttttgct

SEQ ID NO: 77822 - DNA, 75 bp, synthetic construct
  source 1..75: mol_type = other DNA
gataagacacatgcaaaacagagattattgttggaatataatggtaacaaactctggatgaatgctattgatggc

SEQ ID NO: 77823 - DNA, 75 bp, synthetic construct
  source 1..75: mol_type = other DNA
cccgccatcagcataccgtcacgctgtatgccaaagggctgacctgcaaagccgacaccctcggtagttgtggtt

SEQ ID NO: 77824 - DNA, 75 bp, synthetic construct
  source 1..75: mol_type = other DNA
gccagtgacgatgttcacgctaacagccgcgcctattttctcgctgagaagcgtgccggagtacccggattatga

SEQ ID NO: 77825 - DNA, 75 bp, synthetic construct
  source 1..75: mol_type = other DNA
gttactgccggatgagcagcatgacgattaccgctggctgacgccggacgcgctgctcgccagtgacaatgttca

SEQ ID NO: 77826 - DNA, 75 bp, synthetic construct
  source 1..75: mol_type = other DNA
ggcggtcatcaaaccggagcggctattattcttggcttcggtcgttcaacagattacgacggatttccttattgc

SEQ ID NO: 77827 - DNA, 75 bp, synthetic construct
  source 1..75: mol_type = other DNA
cagaaaccatgcgccgtacagggtatggaagggcatggatctataaactcattgcccaagggcgttttcctaaac

SEQ ID NO: 77828 - DNA, 75 bp, synthetic construct
  source 1..75: mol_type = other DNA
acattactggcggttttggtcagttgcgcgtaaacagcgaaattaatgcaattgtcgatgttcaaagtgtgagtg

SEQ ID NO: 77829 - DNA, 75 bp, synthetic construct
  source 1..75: mol_type = other DNA
ttaaaagatacctatagccataaaataaatctgaatggcaataatgtaaccattaaaaacacagatataacatta

SEQ ID NO: 77830 - DNA, 75 bp, synthetic construct
  source 1..75: mol_type = other DNA
tgacggatatcggcgcggcgaaactggtaagcgccgccgcgctcggtgtcccactaaaaattacccatatggcgg

SEQ ID NO: 77831 - DNA, 75 bp, synthetic construct
  source 1..75: mol_type = other DNA
catcctggacgcaacacatcagaaccgcattattgcggagctggttattcctccagaaacgggcggattctggat

SEQ ID NO: 77832 - DNA, 75 bp, synthetic construct
  source 1..75: mol_type = other DNA
gccgcggcgggtgaaggcgcaaaggtgatttatctttcaccacaggggcgcaagcttgatcaagcgggcgtcagc

SEQ ID NO: 77833 - DNA, 75 bp, synthetic construct
  source 1..75: mol_type = other DNA
tttattcgataaagacggcgatatgattgccgtagccaactgtgcggaaacgtataagccgcagttacaggaggg

SEQ ID NO: 77834 - DNA, 75 bp, synthetic construct
  source 1..75: mol_type = other DNA
cacactacccggatatctggctgcatatgtgggaatccccgtccttcagagcagggagctgtcaaccagcactcc

SEQ ID NO: 77835 - DNA, 75 bp, synthetic construct
  source 1..75: mol_type = other DNA
gcggaagcagtcgataacattctgaacatactggcatcgagtatgctggcagtgaccacattttcgctgagtatc

SEQ ID NO: 77836 - DNA, 75 bp, synthetic construct
  source 1..75: mol_type = other DNA
gaaaaccgcaacggactttatggcgtcaggttataaatccttcctgacagaggtcaataacctgaacaagcgtat

SEQ ID NO: 77837 - DNA, 75 bp, synthetic construct
  source 1..75: mol_type = other DNA
acgcgactgcggtttgttcttttgccgctgtcagggggaataatacgattgtgttcaaagtcgacaaaccactga

SEQ ID NO: 77838 - DNA, 75 bp, synthetic construct
  source 1..75: mol_type = other DNA
tttaccggcacaggtaccggattcagagcttgatcagtggatggaaagccggatttacccggcgatgaccgcgat

SEQ ID NO: 77839 - DNA, 75 bp, synthetic construct
  source 1..75: mol_type = other DNA
ttatgtgggtaaagaatgtggatcatcagctgcgtcatgaagcggacagcgatgaattgcgtgctgtggcggaag

SEQ ID NO: 77840 - DNA, 75 bp, synthetic construct
  source 1..75: mol_type = other DNA
cgctgactaatttgagtggaaaggatgtcgctggtcttctcgcataccttggtttgggagaagcggcgaaaaggg

SEQ ID NO: 77841 - DNA, 75 bp, synthetic construct
  source 1..75: mol_type = other DNA
acccttgccgatccgctgcatctgatcctcggcgcacgttataccaactggcgggttgatacgctgacttacagc

SEQ ID NO: 77842 - DNA, 75 bp, synthetic construct
  source 1..75: mol_type = other DNA
cgctgaatatgctctatatcgacccgcagaacagcagtcagattattgctgaacaggtgatccccgaaaacgagg

SEQ ID NO: 77843 - DNA, 75 bp, synthetic construct
  source 1..75: mol_type = other DNA
tccctccattctggtcgaaacggcgtttatcagtaacgttgaggaagagcgtaaactgaaaacggcgaccttcca

SEQ ID NO: 77844 - DNA, 75 bp, synthetic construct
  source 1..75: mol_type = other DNA
tcaatgatcgtggatgatcaagtaacaaataccggcttttatgcccgctgccagatgtacgacggcagaccatca

SEQ ID NO: 77845 - DNA, 75 bp, synthetic construct
  source 1..75: mol_type = other DNA
tatgtctcgcgtgccggattttacgtttcgacgcagccgaccttgtttacgcgcaatgttccaacgcgttattac

SEQ ID NO: 77846 - DNA, 75 bp, synthetic construct
  source 1..75: mol_type = other DNA
gtgcgctgctggattatccggtgagtaaagtagtctgtgttggcagtaactatgccaaacatattaaagagatgg

SEQ ID NO: 77847 - DNA, 75 bp, synthetic construct
  source 1..75: mol_type = other DNA
acgccaggaattgaagatttaaccaccactgcactaaccggtgatggtggcatggttttgtttgaatactccccg

SEQ ID NO: 77848 - DNA, 75 bp, synthetic construct
  source 1..75: mol_type = other DNA
ggggccgggaaacattattgagacaaacagccatggctggttcccggatacagatggcgcactcatcaccggact

SEQ ID NO: 77849 - DNA, 75 bp, synthetic construct
  source 1..75: mol_type = other DNA
cactggcaatcagtggcctggttgtgctcacacttatctggagttatagctggattttcatgaagcaagtcacca

SEQ ID NO: 77850 - DNA, 75 bp, synthetic construct
  source 1..75: mol_type = other DNA
attattggctcgacagcggtatgatattttatccaggagatggtcatctctcgatagcgtcacgttcatccgcat

SEQ ID NO: 77851 - DNA, 75 bp, synthetic construct
  source 1..75: mol_type = other DNA
tcactcaggcggtcaattcactgctgaccgcgcttaaattaccggatgaatccgcaaaggccaatgaagttctgg

SEQ ID NO: 77852 - DNA, 75 bp, synthetic construct
  source 1..75: mol_type = other DNA
ggcggtgactgcggcggtattatcaaaaagtacgaagagttgagtacggcacagcaaaagcaactgatcagtgac

SEQ ID NO: 77853 - DNA, 75 bp, synthetic construct
  source 1..75: mol_type = other DNA
cacaacacggggacatcgttatcgctgagatcgacggtgagttcaccgtcaaacgactgctgttgcgcccacgcc

SEQ ID NO: 77854 - DNA, 75 bp, synthetic construct
  source 1..75: mol_type = other DNA
agaaaacaaagaccgggcggttatggacctacgttcgtgatgaccgtaacgccgggtcaacgctggcgccggcgg

SEQ ID NO: 77855 - DNA, 75 bp, synthetic construct
  source 1..75: mol_type = other DNA
aaatgcgttgcggatggtcagtctgggccgcaaaaactacctgttcttcggttcggatcatggaggagagcgggg

SEQ ID NO: 77856 - DNA, 75 bp, synthetic construct
  source 1..75: mol_type = other DNA
gatgtgaccacgctctgctccacagagcaggagaacatcaacggtctgggggcgtcgtccgagatttccatgtcg

SEQ ID NO: 77857 - DNA, 75 bp, synthetic construct
  source 1..75: mol_type = other DNA
ccaatagttattccttatgatataaaaaatcttcctgcttacaataagattcagggtaattttttatctgtaatg

SEQ ID NO: 77858 - DNA, 75 bp, synthetic construct
  source 1..75: mol_type = other DNA
tggagattacgcctgtttatcttcaggatgaaaatgatcaacacgtcctgaccggtgcggtggtgatgttgcgat

SEQ ID NO: 77859 - DNA, 75 bp, synthetic construct
  source 1..75: mol_type = other DNA
attttcgcaaagaggtccagcggctgcgggaagagtctgacggttggtttttcgatatctggcaaccgccgcagg

SEQ ID NO: 77860 - DNA, 75 bp, synthetic construct
  source 1..75: mol_type = other DNA
gattgcccgtattgctggtgaaaccgcgccgctgctgtttaccgcgctctccaaccagttctggagcacggacat

SEQ ID NO: 77861 - DNA, 75 bp, synthetic construct
  source 1..75: mol_type = other DNA
tactggaacaacgcgaaaaccgttattaaccaggtaacctatttgcctattgcttctgaagttaccgatgtcaac

SEQ ID NO: 77862 - DNA, 75 bp, synthetic construct
  source 1..75: mol_type = other DNA
ccgatggaattgcgtctgttcaactatctggtcgagcgtaaagatctgattcagatcccagtgtatccgttcgaa

SEQ ID NO: 77863 - DNA, 75 bp, synthetic construct
  source 1..75: mol_type = other DNA
tatcgttttggcaaaagcacgttcagaaaaattattgaatatcgtcttatcccgatgatggacctgatcttctgg

SEQ ID NO: 77864 - DNA, 75 bp, synthetic construct
  source 1..75: mol_type = other DNA
cacctccgccccttccggggtatcctgcaggcggatgcgttcacaggttatgacaggctgttcagtgcagaacgt

SEQ ID NO: 77865 - DNA, 75 bp, synthetic construct
  source 1..75: mol_type = other DNA
ggttgctgctttccgtgacctcggtgctgaccctgaaacagtacgcgcaaaaaaacctggcactgacagcagcaa

SEQ ID NO: 77866 - DNA, 75 bp, synthetic construct
  source 1..75: mol_type = other DNA
accaactcaacggttgatttgctgcttaccggcgcggccggtacgaccatttcgaatggctccgtcagggataag

SEQ ID NO: 77867 - DNA, 75 bp, synthetic construct
  source 1..75: mol_type = other DNA
gacggcgacggtcactgccacctgctcaaatagcggcgcagtggccgcgctgtccggaacggtcacgaccattaa

SEQ ID NO: 77868 - DNA, 75 bp, synthetic construct
  source 1..75: mol_type = other DNA
aaaccattatcactgatactggtgccaaaaaattagctcaggcagccgcgccaggtggtaatcctgtccgcctga

SEQ ID NO: 77869 - DNA, 75 bp, synthetic construct
  source 1..75: mol_type = other DNA
gggctgggtggatgcatgctgccggcagctgtctccgctggaagaggcgcttcatggctatgtgctgactgacgg

SEQ ID NO: 77870 - DNA, 75 bp, synthetic construct
  source 1..75: mol_type = other DNA
ggtttctggttgttcatttttgcctttcttcaaactcttaacacgcgctaagtttattactaatattgatggctt

SEQ ID NO: 77871 - DNA, 75 bp, synthetic construct
  source 1..75: mol_type = other DNA
gattatggatcgcatgaccatgaacggcgggcgatgggtgaattttaactgggagagctggcgtccgaatgttgg

SEQ ID NO: 77872 - DNA, 75 bp, synthetic construct
  source 1..75: mol_type = other DNA
agtttctggatgcatggtactacctttgtttcgtctgttttcaaggtcccgggtggttacaaatatagatgggct

SEQ ID NO: 77873 - DNA, 75 bp, synthetic construct
  source 1..75: mol_type = other DNA
gaacagaaaatgcagctggaacaacagctggtggccgcagcccctaaagtcgattttgccgaccgggtatcagtg

SEQ ID NO: 77874 - DNA, 75 bp, synthetic construct
  source 1..75: mol_type = other DNA
gccgaacaggaggcgctgaaccgtgccctgctggaaaagctgaacgagcgtgaacgcgaaatagaccatctgcag

SEQ ID NO: 77875 - DNA, 75 bp, synthetic construct
  source 1..75: mol_type = other DNA
agattaccagcacgggaggggatatcgtcgctgtggatggtgaggctgccattaagctgggggcgggcgcgtcac

SEQ ID NO: 77876 - DNA, 75 bp, synthetic construct
  source 1..75: mol_type = other DNA
gaaaaggcatccatccgcagacccatcttgcggggttcagtggtgtactgcaggcggatgcatacgccgggttca

SEQ ID NO: 77877 - DNA, 75 bp, synthetic construct
  source 1..75: mol_type = other DNA
atatcagcgaatgcgatgcaagggatgagggcgttccgcctgctggaagtttgcttcctgatcacccgggaacat

SEQ ID NO: 77878 - DNA, 75 bp, synthetic construct
  source 1..75: mol_type = other DNA
gattggtcgcatgttcatgtcgacgggctttatcaccgtcacggacaccccacaggtactggaaacggtccggac

SEQ ID NO: 77879 - DNA, 75 bp, synthetic construct
  source 1..75: mol_type = other DNA
tcggatccccggcggaaaccgacgcagagctgcgcatccggcaggggcagagtgtcgcgctaccctccatcacgc

SEQ ID NO: 77880 - DNA, 75 bp, synthetic construct
  source 1..75: mol_type = other DNA
ctactggcaccgctttgctcctgaaagccgcatgatgcgtaaagtcactgatgcgttactcgattatggtcacaa

SEQ ID NO: 77881 - DNA, 75 bp, synthetic construct
  source 1..75: mol_type = other DNA
gtttaattcctatccttctgattctggtgcttttacaaccagcgtcatcggagatgcttcatctgattcaattaa

SEQ ID NO: 77882 - DNA, 75 bp, synthetic construct
  source 1..75: mol_type = other DNA
gtacggcggcgtggacgttcgcctgtatcgtattcctgacccgatggcatttttgcgccagcagaaaaacctgca

SEQ ID NO: 77883 - DNA, 75 bp, synthetic construct
  source 1..75: mol_type = other DNA
ccgcgtttgttcaggcggcactgacagcccttattaatggtgcgccagccacactggacacactgaaagaaatag

SEQ ID NO: 77884 - DNA, 75 bp, synthetic construct
  source 1..75: mol_type = other DNA
gccagtcaaactgcgactggcaatggcatcaatgggacaatcagaaacaaaggtcagtacgctatgccaggaact

SEQ ID NO: 77885 - DNA, 75 bp, synthetic construct
  source 1..75: mol_type = other DNA
ggggggagggttgtacgcttcagcactctttgattccggggcttattttgacctgattggtaaatatctccatca

SEQ ID NO: 77886 - DNA, 75 bp, synthetic construct
  source 1..75: mol_type = other DNA
atgataagtaaatacagattctctttaccccggctggatattaccggtgtatgggtgttctccctggggctctgg

SEQ ID NO: 77887 - DNA, 75 bp, synthetic construct
  source 1..75: mol_type = other DNA
aaagaatagcaccacagtacataagatataatgatatgctgaagtctaactttatcggtaatcttacagggatct

SEQ ID NO: 77888 - DNA, 75 bp, synthetic construct
  source 1..75: mol_type = other DNA
ctttaaaaaagtgccggcttactggtttcatcccggactgacttatctgaaagggcggtttggggagaggttatc

SEQ ID NO: 77889 - DNA, 75 bp, synthetic construct
  source 1..75: mol_type = other DNA
tggctgggaacgctgctgattctgtcatcggtgattttgatttcaatggattcccgccgccgcgccagagcggca

SEQ ID NO: 77890 - DNA, 75 bp, synthetic construct
  source 1..75: mol_type = other DNA
gcaatggggttcggaagccttgccgataaagtcaatactatcgcattaggaaatggcagccaggctctggcagat

SEQ ID NO: 77891 - DNA, 75 bp, synthetic construct
  source 1..75: mol_type = other DNA
tcccggctcggtatctcgtaccgttacgacagtgaccggcgcgccatcaccttttactggctggagacacgcacc

SEQ ID NO: 77892 - DNA, 75 bp, synthetic construct
  source 1..75: mol_type = other DNA
cttgaagattacatgatggaaaacaaccacttgaaagactcccctgttgaaaagcatgtagaagacgacaggaat

SEQ ID NO: 77893 - DNA, 75 bp, synthetic construct
  source 1..75: mol_type = other DNA
gcggctatctgcaaacgctcgacgactttaatcacatcgttttaaaagccagtgaaaatggcgtgcctgtttatc

SEQ ID NO: 77894 - DNA, 75 bp, synthetic construct
  source 1..75: mol_type = other DNA
ccctgctcagaacagagcacggcaacgtgattgcccgcgacaaccgggataatcaggagtttgtgtttgcagagt

SEQ ID NO: 77895 - DNA, 75 bp, synthetic construct
  source 1..75: mol_type = other DNA
ttggcacagctctggaagccccaggcgcgtttgccaacggcgcggaaggcgttgggctgtttcgtaccgaaatgc

SEQ ID NO: 77896 - DNA, 75 bp, synthetic construct
  source 1..75: mol_type = other DNA
gtacgggaaaaacatgcctgtactcagtgcgataccatcgtgcaggcacctgcaccttcgcggcccatcgagcgg

SEQ ID NO: 77897 - DNA, 75 bp, synthetic construct
  source 1..75: mol_type = other DNA
aaaggcatccatccgcagactcatcttgcttgcttcagcggtgtgctgcaagcggatgcgtacgccgggttcaac

SEQ ID NO: 77898 - DNA, 75 bp, synthetic construct
  source 1..75: mol_type = other DNA
tggtgtcaaccatgatgcgctgtctgccggaccgggccaccagtccggtggcgacgcagttacacgggaggctct

SEQ ID NO: 77899 - DNA, 75 bp, synthetic construct
  source 1..75: mol_type = other DNA
gcagtcttatgtcatgcgcgcaatgcgtgaactcggcgaactggcgagcggcgcggtatctgatgaacgtctgac

SEQ ID NO: 77900 - DNA, 75 bp, synthetic construct
  source 1..75: mol_type = other DNA
acagtgtatgaagattctcaacccggtacgctgaatgattttctcggtgccatgacggaggatgatgcccgtccg

SEQ ID NO: 77901 - DNA, 75 bp, synthetic construct
  source 1..75: mol_type = other DNA
aggctgaagcacagttccggcctgaactggaaaaaatcgtcaggggtatcgaaacaggttttcgtggtacggccc

SEQ ID NO: 77902 - DNA, 75 bp, synthetic construct
  source 1..75: mol_type = other DNA
ccggatttttcccggaggaaaccacatggggcgggctgctcccctcactggtacgggagtaccgttacgacagcg

SEQ ID NO: 77903 - DNA, 75 bp, synthetic construct
  source 1..75: mol_type = other DNA
gggtaaaagcggtgcgggtaagtcctcgctctgcaacgaactcttccggggcgaggtctcccccgtcagtgatgt

SEQ ID NO: 77904 - DNA, 75 bp, synthetic construct
  source 1..75: mol_type = other DNA
atggagcaaagtagtcggcaagcgcacacgagtgtagctcacgcagaggaagcagctacagctcttgatggaatt

SEQ ID NO: 77905 - DNA, 75 bp, synthetic construct
  source 1..75: mol_type = other DNA
tggatacccccggccctaatgaagccggacaaccgcagatggaagtgatgatgcgggatcaactgcagaaagcct

SEQ ID NO: 77906 - DNA, 75 bp, synthetic construct
  source 1..75: mol_type = other DNA
atgaacgaaagaaaaagatttatccgtttacctgaagtattaaatagaactggcctttgtaaggcttggatttat

SEQ ID NO: 77907 - DNA, 75 bp, synthetic construct
  source 1..75: mol_type = other DNA
ctcgatagcgtgaacagcattctgtcgaattcctgggcagcatccggttattccatcgtgccttctgatctgcgc

SEQ ID NO: 77908 - DNA, 75 bp, synthetic construct
  source 1..75: mol_type = other DNA
ggtccacagggtccaaagggagataccggtgcggcaggcccggcaggcccacagggaccgaaaggagaaacaggt

SEQ ID NO: 77909 - DNA, 75 bp, synthetic construct
  source 1..75: mol_type = other DNA
acaccaagacaacaaagttccggggggaaagcacggttagggagaataactaaagccggcgacagctatctcaga

SEQ ID NO: 77910 - DNA, 75 bp, synthetic construct
  source 1..75: mol_type = other DNA
atgtgcttggcgtcatagcagactggccggtcaaccgggtcagcgaactgcttccgtggcgcatagcactgccag

SEQ ID NO: 77911 - DNA, 75 bp, synthetic construct
  source 1..75: mol_type = other DNA
attagggatgatgggagagcaacttgccattaaagaagcggaacctgttccacgacatgaacttgaaaaagcaca

SEQ ID NO: 77912 - DNA, 75 bp, synthetic construct
  source 1..75: mol_type = other DNA
ctcaaaaagccagtgagtcattacaaagtgcaacagatgccgagttgtcaaaaaagacggcagaaagtgcagccg

SEQ ID NO: 77913 - DNA, 75 bp, synthetic construct
  source 1..75: mol_type = other DNA
atgaatccgtctgatgccattgaggcaattgaaaaaccgctctcctccctgccttacccgatttcccgtcacatc

SEQ ID NO: 77914 - DNA, 75 bp, synthetic construct
  source 1..75: mol_type = other DNA
gaaaatggtgattcggaccgtgcgtgatgctgtggtatcggttgcacgggctgtctgggactggattttcttctg

SEQ ID NO: 77915 - DNA, 75 bp, synthetic construct
  source 1..75: mol_type = other DNA
cagatatttctcaacagcacctaaccgaggagaaagaaaaggatcatatccattcaatagcccttgccctaatgg

SEQ ID NO: 77916 - DNA, 75 bp, synthetic construct
  source 1..75: mol_type = other DNA
gtgtcgacggtaaagtctctgatgctgacctcacttacctggaagaggtggcaaacagcaccgggcaggaggtgg

SEQ ID NO: 77917 - DNA, 75 bp, synthetic construct
  source 1..75: mol_type = other DNA
cgacttcaggcattaaatgaaagggttcctgagctcattactgacagtaaggcgctgagggaagagctggagaca

SEQ ID NO: 77918 - DNA, 75 bp, synthetic construct
  source 1..75: mol_type = other DNA
tctctgataaaggtaatttagttacgtatggcattgtgcctacaaaaccagaaaccggatatggatatattctgc

SEQ ID NO: 77919 - DNA, 75 bp, synthetic construct
  source 1..75: mol_type = other DNA
aacagataaagcccgttttcttggatacgatattcaggttggtcaatgtgatacgttccgtaacagaaagaaaag

SEQ ID NO: 77920 - DNA, 75 bp, synthetic construct
  source 1..75: mol_type = other DNA
ggagttaccgacgaaaccgttgatggaatgtcgcacaaaaagatccatgacattatcagtcttctgcgtaatgag

SEQ ID NO: 77921 - DNA, 75 bp, synthetic construct
  source 1..75: mol_type = other DNA
gacaccatcggcatgttgatgtcccacggcaatatctcgccctacatcatggcatggctgatcactgtgctaatt

SEQ ID NO: 77922 - DNA, 75 bp, synthetic construct
  source 1..75: mol_type = other DNA
agacacactgaccaccacagaaaaatcggtcacaaacagtgacggtaacctcatgctgaacagcgcgtcttccac

SEQ ID NO: 77923 - DNA, 75 bp, synthetic construct
  source 1..75: mol_type = other DNA
gaggaggaaatctttaccggactggcatcgttaaacgatctggttcgtcttgctgcggcaatggagactgaattt

SEQ ID NO: 77924 - DNA, 75 bp, synthetic construct
  source 1..75: mol_type = other DNA
catgtcggaggatgacgtccgtccggaggcactgcgtcgttttgaactgatggtggaagaagcagcgcgtcacgc

SEQ ID NO: 77925 - DNA, 75 bp, synthetic construct
  source 1..75: mol_type = other DNA
tggtccggcaggcccgcaggggccgaaaggcgacaggggagagcggggagagaccggtctgacgggagatgcagg

SEQ ID NO: 77926 - DNA, 75 bp, synthetic construct
  source 1..75: mol_type = other DNA
tatctgacagtaagaacgaaaacagactgctttttgataaacagaaagcactgaaaagaattgaggagctggagg

SEQ ID NO: 77927 - DNA, 75 bp, synthetic construct
  source 1..75: mol_type = other DNA
ccttgccggagggctaagtgcgctgcaaacggtgacaatagcgagtgcattgcccttctcagtgatcttactaat

SEQ ID NO: 77928 - DNA, 75 bp, synthetic construct
  source 1..75: mol_type = other DNA
ccgggtgagctcattgcaggagcgccgcttacggctgccgatgcgccggatactggacattatgcaccgctcgga

SEQ ID NO: 77929 - DNA, 75 bp, synthetic construct
  source 1..75: mol_type = other DNA
atgcccgttttctggatgcggtgaattttgtggcgggcaatccggaagcggacccggagcaggagctgagcgacc

SEQ ID NO: 77930 - DNA, 75 bp, synthetic construct
  source 1..75: mol_type = other DNA
cctgggtaaacctgagttttacgacgtggtgaccactgcaacgggcatcccggcctggcgcatccatcacagccg

SEQ ID NO: 77931 - DNA, 75 bp, synthetic construct
  source 1..75: mol_type = other DNA
ttcacgtttgagtttaacccgctatggcaaatgtctgacgttgaccgctcaacggtggccgtaaacaccaccaac

SEQ ID NO: 77932 - DNA, 75 bp, synthetic construct
  source 1..75: mol_type = other DNA
gttctggctgatctggattttaatgtccaccatcactcgcggtatcgacggtatgtcgctggcgctgttcactga

SEQ ID NO: 77933 - DNA, 75 bp, synthetic construct
  source 1..75: mol_type = other DNA
ttaccgggctggcagaccgtttcgggcggacgctgacgtaccggcgtgaggccgcaggcgacctggccggggaaa

SEQ ID NO: 77934 - DNA, 75 bp, synthetic construct
  source 1..75: mol_type = other DNA
actgaacctgctcaacctcagcgacagcaccgcccatacgctgggagtgaacctgacgaggctacgtttggtcat

SEQ ID NO: 77935 - DNA, 75 bp, synthetic construct
  source 1..75: mol_type = other DNA
tcctgggcaaaggcgtaaccaaagctgttgctgcggttaacggcccgatcgctcaggcgctgattggcaaagatg

SEQ ID NO: 77936 - DNA, 75 bp, synthetic construct
  source 1..75: mol_type = other DNA
catgcggagatggcgaaggcgttcgactatatcctgaatcactggaatgcgctgaacgagttctgtcgtgacggc

SEQ ID NO: 77937 - DNA, 75 bp, synthetic construct
  source 1..75: mol_type = other DNA
ccccaaaagtaactatattgttacacaaccagggagatcggctgtaactgtaaataattacatgacaaatcttaa

SEQ ID NO: 77938 - DNA, 75 bp, synthetic construct
  source 1..75: mol_type = other DNA
ctatgtcatgactgacggcaaactccatgccgatgataccccggtccaggtactgctgccgggtaataagaagac

SEQ ID NO: 77939 - DNA, 75 bp, synthetic construct
  source 1..75: mol_type = other DNA
cagcgttggcacctgcagtgtggttcgcttacagcccggacagaaaaggcatccatccgcagactcatcttgctt

SEQ ID NO: 77940 - DNA, 75 bp, synthetic construct
  source 1..75: mol_type = other DNA
ccaacagtggtccttcacaaatcctctacactgttcgatattaagatggccgtaaccaatctggcttctgtagat

SEQ ID NO: 77941 - DNA, 75 bp, synthetic construct
  source 1..75: mol_type = other DNA
gaccatgaggtgcatgtcgatgtgcgggtgatttgcgctacgcagaagaatctggtcgaactggtgcaaaaaggc

SEQ ID NO: 77942 - DNA, 75 bp, synthetic construct
  source 1..75: mol_type = other DNA
aagccagcatagtaaaaattcctttgttcacagagcgatgccctgcgggttttccgtcaccggcagcagactata

SEQ ID NO: 77943 - DNA, 75 bp, synthetic construct
  source 1..75: mol_type = other DNA
atgaaagaagatgatgtcgggctttatgtcaggggacgattactcattgatgatgatcccctggcaaaacgtgca

SEQ ID NO: 77944 - DNA, 75 bp, synthetic construct
  source 1..75: mol_type = other DNA
aggcggatgctgtcacgaacggtgcaatagtgctccacacccaacgcctgaaatcagatccagggggtaatctgc

SEQ ID NO: 77945 - DNA, 75 bp, synthetic construct
  source 1..75: mol_type = other DNA
atgagtacgcgtatttatttgtggcgggcgcttttttgcgaaaaacctcgtatcttgctggaaaatagtgatttt

SEQ ID NO: 77946 - DNA, 75 bp, synthetic construct
  source 1..75: mol_type = other DNA
gatcatgcttacggcatcttttactggctggcaggcggagtgtcccacgcccgctggcaggatgtctggcagctc

SEQ ID NO: 77947 - DNA, 75 bp, synthetic construct
  source 1..75: mol_type = other DNA
ctgccgttataccgatatctacaaagtcgccgtggtcggtggcgatgccgggtatctcgtcaccaacatcgtgaa

SEQ ID NO: 77948 - DNA, 75 bp, synthetic construct
  source 1..75: mol_type = other DNA
ctgcgccagcggctgggctccggtcagtcttctgtcgtgtcctacttcctcaacatcacagcattctgcaaggac

SEQ ID NO: 77949 - DNA, 75 bp, synthetic construct
  source 1..75: mol_type = other DNA
tgctgacgcagaaggccaccagtgcccttccgcatccggtcaatgccgccaccggggccaaatacctggccgatg

SEQ ID NO: 77950 - DNA, 75 bp, synthetic construct
  source 1..75: mol_type = other DNA
tcaccgcaaacttatctcaatccgcagttcctggaacgttgcgccggagtacccgtcattatcgaccatcccgaa

SEQ ID NO: 77951 - DNA, 75 bp, synthetic construct
  source 1..75: mol_type = other DNA
tccggatgaagccggacgttacagcatggatgttgagcatggtcagtacagcgtcaccctgctggttgaaggttt

SEQ ID NO: 77952 - DNA, 75 bp, synthetic construct
  source 1..75: mol_type = other DNA
ctgaattgaaaaaaagcgccccaacaaaaaatgaggtgcttgcagcagatgaaatgaaagaagctattcttgatc

SEQ ID NO: 77953 - DNA, 75 bp, synthetic construct
  source 1..75: mol_type = other DNA
acctggcgatggctgcaggccataatctggatgtcacggcatcctctgtttctgccgggcacagcgccctgcttt

SEQ ID NO: 77954 - DNA, 75 bp, synthetic construct
  source 1..75: mol_type = other DNA
tcaatcagaattggctcggaagctcacagccagcagcggtcatttagtaaagcaacaacatgtctggaactggtt

SEQ ID NO: 77955 - DNA, 75 bp, synthetic construct
  source 1..75: mol_type = other DNA
gcctgctgggctcatgcccgccgaaagatccacgatgtgcacgtccgcatcccgtcagcactgacggaagaagcc

SEQ ID NO: 77956 - DNA, 75 bp, synthetic construct
  source 1..75: mol_type = other DNA
acgctgccattgcccggttcagctttccggcctggatgctgcagcttctgcgcaaagcccgtgatcgcattatcc

SEQ ID NO: 77957 - DNA, 75 bp, synthetic construct
  source 1..75: mol_type = other DNA
aacaggcgaagcagtttttcatggatattgctgccgctttatgtgaaggggatgagcagtcgccggaaaagcgcc

SEQ ID NO: 77958 - DNA, 75 bp, synthetic construct
  source 1..75: mol_type = other DNA
cttacagcccggacagaaaaggcatccatccgcagactcatcttgcctgcttcagcggtgtgctgcaagcggatg

SEQ ID NO: 77959 - DNA, 75 bp, synthetic construct
  source 1..75: mol_type = other DNA
atcgtgcaaacgctgacacaacgcggcgtgcatatcgaattcgtcaaggaaggcactgttgcaaagttagcgatg

SEQ ID NO: 77960 - DNA, 75 bp, synthetic construct
  source 1..75: mol_type = other DNA
attatatgaaagcggcagcgacacagtttccgctgccggaggggatgaatctgcccctgaccctgcgccattacc

SEQ ID NO: 77961 - DNA, 75 bp, synthetic construct
  source 1..75: mol_type = other DNA
cagtaaacaatggcccggtaaagccgctattggtcgtctgaaaggcgaggaactggcgcaatataattcgtggct

SEQ ID NO: 77962 - DNA, 75 bp, synthetic construct
  source 1..75: mol_type = other DNA
gatccgctatgccgtaatgtgtgtgccaacgccattaacgctggcagtagaaaaatttagcgtgatggacaaaca

SEQ ID NO: 77963 - DNA, 75 bp, synthetic construct
  source 1..75: mol_type = other DNA
aaatgcctcactgcatcatggtgtgggggagagtgcccgacaggtggtgccgggtctgatgatacgggaggcgtc

SEQ ID NO: 77964 - DNA, 75 bp, synthetic construct
  source 1..75: mol_type = other DNA
attgttctgcttcggtgcgtatcttctccgtggtcattttgaccatgcaccacacgaaaaaaaacggggggtatt

SEQ ID NO: 77965 - DNA, 75 bp, synthetic construct
  source 1..75: mol_type = other DNA
cggtgatggcggcctgtttgtggcagttacccggcattcgtacccatctggtggcgtttgacacaagcgtcgttg

SEQ ID NO: 77966 - DNA, 75 bp, synthetic construct
  source 1..75: mol_type = other DNA
gctgcacttcaatgcccgatgtccagcgagcggaaagaccggcaccggcagcttgggcgatgcttccagccccgg

SEQ ID NO: 77967 - DNA, 75 bp, synthetic construct
  source 1..75: mol_type = other DNA
gtttaccagcagcgataaagccatcgcgccggagtcggtgctgatgcaggatggcgcattcagcctgacggcacc

SEQ ID NO: 77968 - DNA, 75 bp, synthetic construct
  source 1..75: mol_type = other DNA
gggaacatccatgcgtctgtcgtggtcgctgggccgggagaacgccagaaacgaagcgcaggccagcaccctgaa

SEQ ID NO: 77969 - DNA, 75 bp, synthetic construct
  source 1..75: mol_type = other DNA
tgaagcagcaggaaaatttaagcagacaactgcgagaaaaacctgaccatcagctgaaagcctgggcggagaaac

SEQ ID NO: 77970 - DNA, 75 bp, synthetic construct
  source 1..75: mol_type = other DNA
atatactcctgaaatattttatgaggcctgcagaaatctccagtcattttatgctcatcaggagacgtcacaaaa

SEQ ID NO: 77971 - DNA, 75 bp, synthetic construct
  source 1..75: mol_type = other DNA
gggtcaccagcacggtgaagaacgatatttatgcccatatcgacaaggacgggcgctaccgggtcaacctcgact

SEQ ID NO: 77972 - DNA, 75 bp, synthetic construct
  source 1..75: mol_type = other DNA
cgatcatgcagatcttatcgaccgtttcagcactctggagcagaaacatgccctcgacaaaacggcgctggatga

SEQ ID NO: 77973 - DNA, 75 bp, synthetic construct
  source 1..75: mol_type = other DNA
aacctcaaaaacgctacaaagatgcccacggagcactcgttactgtcgaaagcgtgtctcacaaccgagtgacgt

SEQ ID NO: 77974 - DNA, 75 bp, synthetic construct
  source 1..75: mol_type = other DNA
aaaagcgatcccgcctttgcttactggctggctgaatggcaggaagaggaagcaataccaccaagaaataacatc

SEQ ID NO: 77975 - DNA, 75 bp, synthetic construct
  source 1..75: mol_type = other DNA
ccttactgacttttgtgcgctccagtgagttacgtttcgcgcgttggaatgaattcgacttcgataaatctcttt

SEQ ID NO: 77976 - DNA, 75 bp, synthetic construct
  source 1..75: mol_type = other DNA
aaaatgaatccggcagaggcttaccgactggctgcatgggctgacgatgaggcgttatcagtgacacaaaccagg

SEQ ID NO: 77977 - DNA, 75 bp, synthetic construct
  source 1..75: mol_type = other DNA
gcggggagtttgtcttcacgaaggaggcaaccagccggattggcgtcggcaacctgtatcgtctgatgcgcgggt

SEQ ID NO: 77978 - DNA, 75 bp, synthetic construct
  source 1..75: mol_type = other DNA
atgctctggttatttgcatcatcgtctgcctgtcatgggcagtcaattattatcgtgataacgccatcgcctaca

SEQ ID NO: 77979 - DNA, 75 bp, synthetic construct
  source 1..75: mol_type = other DNA
ggatttttacgccagcggccaaaccagaagtggacaggtgacatcacctacttacgtacggatgaaggctggctg

SEQ ID NO: 77980 - DNA, 75 bp, synthetic construct
  source 1..75: mol_type = other DNA
ttcaccctcagagagcggctgatgacgatgcagaagcaactggaaggggcgcaggaatatatccgtactcagtgc

SEQ ID NO: 77981 - DNA, 75 bp, synthetic construct
  source 1..75: mol_type = other DNA
cgaactaccacgccaccaaacctaaatttcttgcgcatgttgatctgatgacccggccgcttattgatgttgcgg

SEQ ID NO: 77982 - DNA, 75 bp, synthetic construct
  source 1..75: mol_type = other DNA
ctgcggagataatgtaaaggaatttatacttttattaccctataataaatcactggagatgtatgaacttaacga

SEQ ID NO: 77983 - DNA, 75 bp, synthetic construct
  source 1..75: mol_type = other DNA
attttctacaatcgtcagcgtcgtcactctcgtctggggaatatctccccggcagccttcagggaaaaatatcat

SEQ ID NO: 77984 - DNA, 75 bp, synthetic construct
  source 1..75: mol_type = other DNA
ggatttacccggcgatgaccgcgatcccggcactggcaggactgattaccacgatggttacgcagggctatgagt

SEQ ID NO: 77985 - DNA, 75 bp, synthetic construct
  source 1..75: mol_type = other DNA
cactcatctggtgtgggcgacgggaggtggaatggtgccggaagaagaaatggaacaatatctggctaagggcac

SEQ ID NO: 77986 - DNA, 75 bp, synthetic construct
  source 1..75: mol_type = other DNA
gcggcaacctgcccgccataaaactgggggctgcacaggtcagaatgacccggcgtggtggcaggttacattacc

SEQ ID NO: 77987 - DNA, 75 bp, synthetic construct
  source 1..75: mol_type = other DNA
cgccgttctgtctcttgaagaacatcataaagcctggctgctgtggtgttacagcggtagcatttgctgggagca

SEQ ID NO: 77988 - DNA, 75 bp, synthetic construct
  source 1..75: mol_type = other DNA
tgccgggaataccgttgcgggagataaccaggtgaaagggatccccctgaaactggtacgtcagcgtgtccgggt

SEQ ID NO: 77989 - DNA, 75 bp, synthetic construct
  source 1..75: mol_type = other DNA
tggcgcgaccgatggtgttcagatcgacccgacgttgttttcacagtacggcatccgcagcgtgccggccctggt

SEQ ID NO: 77990 - DNA, 75 bp, synthetic construct
  source 1..75: mol_type = other DNA
attatccggggaaacctgcgggtcggccaggcgctggagaaagtggccgccacgggtgactgccggcaggtggct

SEQ ID NO: 77991 - DNA, 75 bp, synthetic construct
  source 1..75: mol_type = other DNA
gtgacgacaaatgtagaaatttcttgtcaaactagcgatgaggcaagtttcgaaaacgaagccaaacgcaaaagc

SEQ ID NO: 77992 - DNA, 75 bp, synthetic construct
  source 1..75: mol_type = other DNA
gaacttattgatttcacgtttgaatggaaagggctgaagaaattatgcgtggcagtctcctttcggtccataata

SEQ ID NO: 77993 - DNA, 75 bp, synthetic construct
  source 1..75: mol_type = other DNA
aaaggccgcgacatacttcgcgaagcgcctgaaatgaagtatgtctttattgaaaaacatcaggctgagttcagc

SEQ ID NO: 77994 - DNA, 75 bp, synthetic construct
  source 1..75: mol_type = other DNA
tttgcgccgttatttctggtgcagaaggttgggaagatatagaggattttggggaaacacatctcgattttttga

SEQ ID NO: 77995 - DNA, 75 bp, synthetic construct
  source 1..75: mol_type = other DNA
tgcagtacggtgaggacgacctgacgtttgtctcacgcctgctgtcggaagtgggtatctggttccgctttgcca

SEQ ID NO: 77996 - DNA, 75 bp, synthetic construct
  source 1..75: mol_type = other DNA
cccgaagaggggctgaaacggatgctgggtgaaacccggcactacggtattccggccacgctgcgcggcatggtg

SEQ ID NO: 77997 - DNA, 75 bp, synthetic construct
  source 1..75: mol_type = other DNA
tccggccacactgcggggtatggtgaacaacgacctgaaagccacggctgaagcagtgctgtctctggtgaaaga

SEQ ID NO: 77998 - DNA, 75 bp, synthetic construct
  source 1..75: mol_type = other DNA
gtcggtacacggaagggccctgaataccacactgaatggcggttaccagtatgtgcacaaggacggacttgcgct

SEQ ID NO: 77999 - DNA, 75 bp, synthetic construct
  source 1..75: mol_type = other DNA
cacccgtgccctgacgtccctggctgagctgggtctgattacctaccagacggaatatgacccgcttattggttg

SEQ ID NO: 78000 - DNA, 75 bp, synthetic construct
  source 1..75: mol_type = other DNA
aactcgggcgtggtgatgtgcttccacatgacatggtcgaatcctccgcgactgcatggcgggatgaaatgagca

SEQ ID NO: 78001 - DNA, 75 bp, synthetic construct
  source 1..75: mol_type = other DNA
tactggagatgctcggtgattaccgctggcggctggttgaaccttttgagttctggcagacagagcgtccggatg

SEQ ID NO: 78002 - DNA, 75 bp, synthetic construct
  source 1..75: mol_type = other DNA
tggtgtgcagtttgataaaacaatgatgcagaatatttttgaaacaaatgcaggtgaaatgacatcatatttcaa

SEQ ID NO: 78003 - DNA, 75 bp, synthetic construct
  source 1..75: mol_type = other DNA
ttattgacctgagtctggatgcggtccgtttcgatgagcagatgacccgcgtaaggcgtcatttttcaggactgg

SEQ ID NO: 78004 - DNA, 75 bp, synthetic construct
  source 1..75: mol_type = other DNA
agaccgcaaagccaaaagaaaaaacctacaaaatggccgacggcggcggtttgtatctcgagatttcgcctaagg

SEQ ID NO: 78005 - DNA, 75 bp, synthetic construct
  source 1..75: mol_type = other DNA
aaaacgtgcccgtgcgcgtcgtgatgcggacagggaacgtcaggatattgtcaccctggtgaaacggcagctgac

SEQ ID NO: 78006 - DNA, 75 bp, synthetic construct
  source 1..75: mol_type = other DNA
gttgatctggctggcgaactggctgacgttgaaatcatgattgaacagttccgcctcaacgggatgggcctgatg

SEQ ID NO: 78007 - DNA, 75 bp, synthetic construct
  source 1..75: mol_type = other DNA
caaaatttttaaacagtaaaaaaacgtttgaatgggatgaactcgttgttttgttttcttctctaggatatgtca

SEQ ID NO: 78008 - DNA, 75 bp, synthetic construct
  source 1..75: mol_type = other DNA
ttctataaccgaacttgcacttgattgcggattagccagaaaaaatgctcatggtcatttagccattgagcgagc

SEQ ID NO: 78009 - DNA, 75 bp, synthetic construct
  source 1..75: mol_type = other DNA
tctgcgtgcgcgcgcgctaatggtaaacgtaaacgcaagccttccgttcttcgtcgcagagctattgatgcactg

SEQ ID NO: 78010 - DNA, 75 bp, synthetic construct
  source 1..75: mol_type = other DNA
atgaaagcgttacgcattgtttatggtgatgaggtcatcaccgtacagtgtgttccgcgtcaggtcgtaaagggc

SEQ ID NO: 78011 - DNA, 75 bp, synthetic construct
  source 1..75: mol_type = other DNA
gcagaggaaatggcagacgcagcccagagtgcaatgcttgccgccaccgggtttgatgccgatctgttgctgcag

SEQ ID NO: 78012 - DNA, 75 bp, synthetic construct
  source 1..75: mol_type = other DNA
cgctcagcaaacgcatcacctatgtgagcgcagaacaagacgatacccgcgaactgaaactgttcccgctgaaag

SEQ ID NO: 78013 - DNA, 75 bp, synthetic construct
  source 1..75: mol_type = other DNA
ccgactttccttgaccacgagcacgacgttcagacttttgaagagtgtgatgacttcctgcttggtcgcgatatt

SEQ ID NO: 78014 - DNA, 75 bp, synthetic construct
  source 1..75: mol_type = other DNA
gcagcgtgtcacggctattatgcgttatgcagtacagaacgattacatcgactcaaatccagccagtgatatggc

SEQ ID NO: 78015 - DNA, 75 bp, synthetic construct
  source 1..75: mol_type = other DNA
ggacggccattcaggctgcggcggcgaacttccatttcgcgaccgggggatttacggggacggggggtaaatatg

SEQ ID NO: 78016 - DNA, 75 bp, synthetic construct
  source 1..75: mol_type = other DNA
aaagcgtgcccgtgcgcgtcgcgatgcggacaggcagcgtcaggatatcgtcaccctggtgaaacggcagctgac

SEQ ID NO: 78017 - DNA, 75 bp, synthetic construct
  source 1..75: mol_type = other DNA
tggtatggcaatgatgtgttctttgagtcatatggttgatatgttatctcctaatacatcaactaattggatgtc

SEQ ID NO: 78018 - DNA, 75 bp, synthetic construct
  source 1..75: mol_type = other DNA
gtggggatacattcacaataaaagatgtaaaagtcatgcctgaatctataccagcaggttatgaagttctacaag

SEQ ID NO: 78019 - DNA, 75 bp, synthetic construct
  source 1..75: mol_type = other DNA
ttgatgatatcagcgaaaaacaatggtacatgctttccgcacagggaacggacacaatcgaggtggcttatcttg

SEQ ID NO: 78020 - DNA, 75 bp, synthetic construct
  source 1..75: mol_type = other DNA
ctgacgcgaaccacgcgcagcgttgtacccactgaagcgggcgagcatcttttgtctgttcttggccctatgttg

SEQ ID NO: 78021 - DNA, 75 bp, synthetic construct
  source 1..75: mol_type = other DNA
cagggttaagacgtaagatgcaaaaagcagccatggagagaaactatctggcgtcagtccttgcggggaacgggc

SEQ ID NO: 78022 - DNA, 75 bp, synthetic construct
  source 1..75: mol_type = other DNA
attcaccagaacgcgtttcgttgttgccgatcgccccgggcgttgattttgcgaccgccgtggcattacgacgca

SEQ ID NO: 78023 - DNA, 75 bp, synthetic construct
  source 1..75: mol_type = other DNA
atggaaaaaaatagtctgtttagtcagcgcatccgtttgcgccaccttcatacattcgtagctgtcgcacaacaa

SEQ ID NO: 78024 - DNA, 75 bp, synthetic construct
  source 1..75: mol_type = other DNA
acggtcaaaaaagcggaaattaaggtggaactgctgccgaagtacgccgcctgggcagagggtgtcctgactgcc

SEQ ID NO: 78025 - DNA, 75 bp, synthetic construct
  source 1..75: mol_type = other DNA
tcacggcggcagtatcaatattctgacctctcaccgcccttcaccgctggcaaagggaaacccgtcgcacagcaa

SEQ ID NO: 78026 - DNA, 75 bp, synthetic construct
  source 1..75: mol_type = other DNA
atcccggggcagagggatttctgaatcgcctgggcgttcagacacgggatgccagcggcaacatgcgtgacatgg

SEQ ID NO: 78027 - DNA, 75 bp, synthetic construct
  source 1..75: mol_type = other DNA
tgattaaagaaatcaaagagcgtatcagcagtttggatgtgcgagacaatgttgagcgccgggcttatgaaattg

SEQ ID NO: 78028 - DNA, 75 bp, synthetic construct
  source 1..75: mol_type = other DNA
agagaaagcaaaggaagagtgtcgctcatttagcgcagaagtaattaaacgggtgttggacagcctgaaaagaga

SEQ ID NO: 78029 - DNA, 75 bp, synthetic construct
  source 1..75: mol_type = other DNA
gctatcgcctgcaccgcttcccgccgcgccagcgtgcggtgaccggagaaccgctcaccgccagcattagcgccg

SEQ ID NO: 78030 - DNA, 75 bp, synthetic construct
  source 1..75: mol_type = other DNA
ggttttgctcagggaatgaccgaaggtcaggagcagggctttagcgaaggtcatcagcaaggttttgccgagggg

SEQ ID NO: 78031 - DNA, 75 bp, synthetic construct
  source 1..75: mol_type = other DNA
ggcacagttgcaaaactcaccatatacacctgcactgggaacagccacctcagccagtgaataccaggcatctaa

SEQ ID NO: 78032 - DNA, 75 bp, synthetic construct
  source 1..75: mol_type = other DNA
gagattgaactgcataacccgtgggatttcgaagaggtttacgcctgcctgcatgatttcgcccgtggttacgcg

SEQ ID NO: 78033 - DNA, 75 bp, synthetic construct
  source 1..75: mol_type = other DNA
cagcactgacaccacgaagatttttaaagaatttgatcagattgctactgacattatcgaaaaagcacaaagcca

SEQ ID NO: 78034 - DNA, 75 bp, synthetic construct
  source 1..75: mol_type = other DNA
gcggttctccgataaggccgcgattgagtacgaccgcaaacagcaccagttgaccattaatggcggcattgaaaa

SEQ ID NO: 78035 - DNA, 75 bp, synthetic construct
  source 1..75: mol_type = other DNA
cccaacatgaaatgcgtcttgatggctcactgctggatgatggtcgcctgagctatagcctggaacaaagtctgg

SEQ ID NO: 78036 - DNA, 75 bp, synthetic construct
  source 1..75: mol_type = other DNA
gatccgcaacgctgaaggccagttgcgctggcggtgctggaattttgaacctgatgccggaaaacagctaaatcc

SEQ ID NO: 78037 - DNA, 75 bp, synthetic construct
  source 1..75: mol_type = other DNA
atcatagccagttaacgctggcgcagcagatgcgagctgaaaaattacgccagcgactggttgaaagcaaactga

SEQ ID NO: 78038 - DNA, 75 bp, synthetic construct
  source 1..75: mol_type = other DNA
aactcttcaatttaaaagtttgatgctcaaagaattaaacttcgtaatgaattacgtgttcactcttgagacttg

SEQ ID NO: 78039 - DNA, 75 bp, synthetic construct
  source 1..75: mol_type = other DNA
acttcctgcgggtgaaaaaagcgcatccggtgctgttaatcggcgtgacttttgtgctctctattgtttgttccg

SEQ ID NO: 78040 - DNA, 75 bp, synthetic construct
  source 1..75: mol_type = other DNA
taattcacatcaccaccggtacccacgtcgcgcagatttgctggtttctgctggcagaagcgcgttacctgcccg

SEQ ID NO: 78041 - DNA, 75 bp, synthetic construct
  source 1..75: mol_type = other DNA
acaaaaggccgcgttactttccgaagcagaaagcgttattcagccactggaacgcgctgtcaggctgaatatggc

SEQ ID NO: 78042 - DNA, 75 bp, synthetic construct
  source 1..75: mol_type = other DNA
caggaattaaattatgagttaccagagttaaaggcagtaaaatctgaaatgattatcgcacgtgaaatgggagaa

SEQ ID NO: 78043 - DNA, 75 bp, synthetic construct
  source 1..75: mol_type = other DNA
aaatgcccgtctggggctggcagcggccacgctgcagtcggatatggaaaaagccggtgaactggccgccaggga

SEQ ID NO: 78044 - DNA, 75 bp, synthetic construct
  source 1..75: mol_type = other DNA
atggatttcgacacaatcatggaaaaggcttacgaagaatacttcgatggtcttgccgaaggcgaagaagctctc

SEQ ID NO: 78045 - DNA, 75 bp, synthetic construct
  source 1..75: mol_type = other DNA
gtgaagcgggtcagaaaagaagaattggatcggatgcagggcaaactgtttgatggtgactctgattcagagaag

SEQ ID NO: 78046 - DNA, 75 bp, synthetic construct
  source 1..75: mol_type = other DNA
gtgaagcgcgtaagaaaggaagaaatcagccggttgcaggggcagttattcgaagacgatgatgaaccggatgac

SEQ ID NO: 78047 - DNA, 75 bp, synthetic construct
  source 1..75: mol_type = other DNA
accaacttgtgtcacaacgctatcgatcgctggctggagaaacagccagaggcgctggcattgattgccgtctct

SEQ ID NO: 78048 - DNA, 75 bp, synthetic construct
  source 1..75: mol_type = other DNA
attacccgaaaaaaagcggggcgagtaatacgctattaccgcaaattaattatgttctgcaaggtcagatttggc

SEQ ID NO: 78049 - DNA, 75 bp, synthetic construct
  source 1..75: mol_type = other DNA
gctatggcgaaggcgacgagtcctatggctatgacagttgtggctacctgaaggcgcagtctgcgggcaggcacc

SEQ ID NO: 78050 - DNA, 75 bp, synthetic construct
  source 1..75: mol_type = other DNA
ggccttcctgcgcgggcataataggctggccacactcccggccctggacacgctgctggacatcactggcaacct

SEQ ID NO: 78051 - DNA, 75 bp, synthetic construct
  source 1..75: mol_type = other DNA
tacaaaaacagggaggtgattatttattcgctgtaaaaggaaaccaggggcggctaaataaagcctttgaggaaa

SEQ ID NO: 78052 - DNA, 75 bp, synthetic construct
  source 1..75: mol_type = other DNA
aacaacaacaccaagacagaactagcccaaaagacttatataaatatgacagagagggctaaaaaaagacaaaaa

SEQ ID NO: 78053 - DNA, 75 bp, synthetic construct
  source 1..75: mol_type = other DNA
gcgcctgcaccgcgcccgtgcgcccaccaccgcgcagttgacccagctggcagctaccatcgcgcaccgggtgtg

SEQ ID NO: 78054 - DNA, 75 bp, synthetic construct
  source 1..75: mol_type = other DNA
tgggcgttttcggttgatcgctgggatgagagctggccggaagaaaccaaacgcgaggttatccgcagcacgtgg

SEQ ID NO: 78055 - DNA, 75 bp, synthetic construct
  source 1..75: mol_type = other DNA
taagtatcacgggtggttttttgttcggactgctcacggcctctttccactggtggcgcaggaaagttaaccggc

SEQ ID NO: 78056 - DNA, 75 bp, synthetic construct
  source 1..75: mol_type = other DNA
aaaaactgatgaatcagaaataaaacccccgaatgatgaagagaaaacatcaccggactgggatgtttttggaga

SEQ ID NO: 78057 - DNA, 75 bp, synthetic construct
  source 1..75: mol_type = other DNA
aaagatgtggcggagcaattatgcccctcctcttctgcgtattctctggcggctgggtatccggcttccgccatt

SEQ ID NO: 78058 - DNA, 75 bp, synthetic construct
  source 1..75: mol_type = other DNA
taagtatcacgggggggtttttgtccggactgctcatggcctctttccactggtggcgcaggaaagttaaccggc

SEQ ID NO: 78059 - DNA, 75 bp, synthetic construct
  source 1..75: mol_type = other DNA
ttcgctcaacaacttggtacgccttatcctatttctgacaagcgtattttgcaggcgatggagcagattagcgga

SEQ ID NO: 78060 - DNA, 75 bp, synthetic construct
  source 1..75: mol_type = other DNA
tcggaaaggcagacttcttgcagatgctgaatccgtgattttgccgctggagcgcgctgtcaggctgaatatggc

SEQ ID NO: 78061 - DNA, 75 bp, synthetic construct
  source 1..75: mol_type = other DNA
gttcgccttgatggcagcaatgcctctgaccagctggtgattaatggtggtcaggcaaccggcaaaacctggctt

SEQ ID NO: 78062 - DNA, 75 bp, synthetic construct
  source 1..75: mol_type = other DNA
atgccaaaattactccctttgacggggctgcttcttgccgtcctgtcaggccaggtactggccgaatccacagga

SEQ ID NO: 78063 - DNA, 75 bp, synthetic construct
  source 1..75: mol_type = other DNA
aacgtgctgtcaggctgaatatggcaactaatgaggaacgcgcacgactggagtcatgggaacgctacagtgttc

SEQ ID NO: 78064 - DNA, 75 bp, synthetic construct
  source 1..75: mol_type = other DNA
acccgcagacggaagcactgctctggcagcatgagaccagacatgcgtacaacgcgcaggggctggcgaaccgct

SEQ ID NO: 78065 - DNA, 75 bp, synthetic construct
  source 1..75: mol_type = other DNA
acgccggaaagcagcggcagctatggcttcgtccgtctggagggtgacctgctcagaacagaggttgccggtatg

SEQ ID NO: 78066 - DNA, 75 bp, synthetic construct
  source 1..75: mol_type = other DNA
ccgtgattcaaaaagcggcggtgcatggatgggcaattttgttgagcaatcaacgcttaatgaaacgcacccggt

SEQ ID NO: 78067 - DNA, 75 bp, synthetic construct
  source 1..75: mol_type = other DNA
atggttgcctccggcgcagtttgcggtgatgccgttcccgggaatggattgccagtgcggggactgtggagctta

SEQ ID NO: 78068 - DNA, 75 bp, synthetic construct
  source 1..75: mol_type = other DNA
gcagtctcctttcggtccataatagcagaacaaaagaaagagccagaaatgacggtcagatattatatcagttct

SEQ ID NO: 78069 - DNA, 75 bp, synthetic construct
  source 1..75: mol_type = other DNA
acatccagcaatcaaactttgctctttgacgcacatatgtgacgagttagtcgcagagcttcgcaaaggaggcaa

SEQ ID NO: 78070 - DNA, 75 bp, synthetic construct
  source 1..75: mol_type = other DNA
acgacagccagcaccgcctggtgttctacacgcggatacagcacggcgagccacaggtggagagccgctacctct

SEQ ID NO: 78071 - DNA, 75 bp, synthetic construct
  source 1..75: mol_type = other DNA
taagaactatgcgcatgaaggcctgaaaaaatcatatagcgctgatattcatctttggcataacgggaaatggga

SEQ ID NO: 78072 - DNA, 75 bp, synthetic construct
  source 1..75: mol_type = other DNA
cacgatgaaaaaagagattgaagcgctggatgatgcggaagctatactggcgtataaaatcggtatcacagacgg

SEQ ID NO: 78073 - DNA, 75 bp, synthetic construct
  source 1..75: mol_type = other DNA
ttaactgcattcagtttgacgagaaatttaccgggcagctactggtccatgtggagaacgggcgcatagtgcgta

SEQ ID NO: 78074 - DNA, 75 bp, synthetic construct
  source 1..75: mol_type = other DNA
cacgggtaacggcaacctgccggatattgaaagccgtattcagaaggctgccaacaggtatgaagaaacggtgca

SEQ ID NO: 78075 - DNA, 75 bp, synthetic construct
  source 1..75: mol_type = other DNA
tgcacagtctggtcatcggacagatcaagacggatgagaaatctaatgagattacagctatcccagaacttctta

SEQ ID NO: 78076 - DNA, 75 bp, synthetic construct
  source 1..75: mol_type = other DNA
gatgattgtgcccaccgcttccggctggagtctggcgcaactggtcatgctgtggggcgcatccatcatgggcat

SEQ ID NO: 78077 - DNA, 75 bp, synthetic construct
  source 1..75: mol_type = other DNA
caatgcacagtctggtcatcggacagatcaggacggatgagaaatccaatgaaattacagctatccctgaacttc

SEQ ID NO: 78078 - DNA, 75 bp, synthetic construct
  source 1..75: mol_type = other DNA
tgcacagtctggtcctcggacagatcaagacggatgagaaatccaatgagattacagccattcctgaacttctta

SEQ ID NO: 78079 - DNA, 75 bp, synthetic construct
  source 1..75: mol_type = other DNA
cactcatctggtgtgggcgacgggaggtggaatggtgccggaagaagagatgaatcaatatctggcaaaaggccg

SEQ ID NO: 78080 - DNA, 75 bp, synthetic construct
  source 1..75: mol_type = other DNA
gtttcgcgccagggcaaagccagcgtcaatgacgcggatcggctacgcaaatacctggcgcgttttggtctgacg

SEQ ID NO: 78081 - DNA, 75 bp, synthetic construct
  source 1..75: mol_type = other DNA
ccatccttggcaaagagggcggctatgttaaccatcccgacgataaaggcggcccaacgaattggggtatcactc

SEQ ID NO: 78082 - DNA, 75 bp, synthetic construct
  source 1..75: mol_type = other DNA
ctggatgcgtgattgtcattcttcagatgataaagacgtcattgcaattgatggaaaaacgctccggcactctta

SEQ ID NO: 78083 - DNA, 75 bp, synthetic construct
  source 1..75: mol_type = other DNA
ttgatgaactggcaagctaatgttagtcactcagattatagagaatatggagattcaaataataacaatatctgg

SEQ ID NO: 78084 - DNA, 75 bp, synthetic construct
  source 1..75: mol_type = other DNA
ccgctgacggatgtcagttttgtgcgtcagatggagagctggatggtgaccacccgcccccgccggcgggagccg

SEQ ID NO: 78085 - DNA, 75 bp, synthetic construct
  source 1..75: mol_type = other DNA
gaagcgggctgaagctgatggcgtgcatttttcgattccggtcacaccacataccttccggcacagctatatcat

SEQ ID NO: 78086 - DNA, 75 bp, synthetic construct
  source 1..75: mol_type = other DNA
ccgggcaggcggcagggctgacgtttaaccaggcgggagagtcactggcagccctggtcagtgccggtgtgcgtg

SEQ ID NO: 78087 - DNA, 75 bp, synthetic construct
  source 1..75: mol_type = other DNA
ggagaaagatgcggagggtaagacttatctgaaaacctgtctgacccgggaaatgctggcccgctatggtgtcat

SEQ ID NO: 78088 - DNA, 75 bp, synthetic construct
  source 1..75: mol_type = other DNA
tttgacgtgtttgccgatcttgcggaattactcaaacctggcggaaaagagatctataccgaaggtaaagatgaa

SEQ ID NO: 78089 - DNA, 75 bp, synthetic construct
  source 1..75: mol_type = other DNA
tgatgattgctgtttcggaacactgccggaatttagcgaactgctgacccgttgcgattaccggatcattcaggg

SEQ ID NO: 78090 - DNA, 75 bp, synthetic construct
  source 1..75: mol_type = other DNA
cgaaggaggcaaccagccggattggtgtcggcaacctgtaccgcctgatgcggggctatgcggaaggtggttatg

SEQ ID NO: 78091 - DNA, 75 bp, synthetic construct
  source 1..75: mol_type = other DNA
ggcccgcaagggggcgcaggatgagattcaggcgcagatgcgtgatggcggcgtcttttccggaggcaggcgatg

SEQ ID NO: 78092 - DNA, 75 bp, synthetic construct
  source 1..75: mol_type = other DNA
gttcagcaattaagccaggcattatggctgggcgggataagtcaaccgccaatccattacgaggccgctttcagt

SEQ ID NO: 78093 - DNA, 75 bp, synthetic construct
  source 1..75: mol_type = other DNA
ggactttcatagcctgtatccggaaggtcgatggggagttgaatttaatgatcatgaatttgctctatttgattt

SEQ ID NO: 78094 - DNA, 75 bp, synthetic construct
  source 1..75: mol_type = other DNA
atgtatttacctgtcacggcatgttcagcgagcggcgccggacagaaatatcgcttttactcaattattatgaaa

SEQ ID NO: 78095 - DNA, 75 bp, synthetic construct
  source 1..75: mol_type = other DNA
tcttaatgagttaggatatgtttatggtaatgaagaaaaaacaaatgaaattgtaaaaaaacatccgggttatgt

SEQ ID NO: 78096 - DNA, 75 bp, synthetic construct
  source 1..75: mol_type = other DNA
atgacgatgtgtaccgcgctatcgacttcatttacgaaggcaatcagataacgtgcggcgataagctggaatccg

SEQ ID NO: 78097 - DNA, 75 bp, synthetic construct
  source 1..75: mol_type = other DNA
cggacatcacaggcggtaggcgttaatggtcaactggtcgagtatcgctatgatggcacggttaaaaccgtctca

SEQ ID NO: 78098 - DNA, 75 bp, synthetic construct
  source 1..75: mol_type = other DNA
tttttctctctgcaaccactgacggcataaattacggtcgtgagcagatgattgagcagaatgaaccgttcgttt

SEQ ID NO: 78099 - DNA, 75 bp, synthetic construct
  source 1..75: mol_type = other DNA
gttactgctggaagacgtggtgagcgtcagcgatgacagcgcggtgtgccgcgtgacggtttcgcccagtggcgt

SEQ ID NO: 78100 - DNA, 75 bp, synthetic construct
  source 1..75: mol_type = other DNA
aatctcttgagtggcttaatcgcctgcgtgcgaatccgaaaattccattgattgttgccggttccgcggcagtgg

SEQ ID NO: 78101 - DNA, 75 bp, synthetic construct
  source 1..75: mol_type = other DNA
attacgggtttataaatcgcaactggagcaaattgagagtgagatattgtctgcaaaagaagaatatcagcttgt

SEQ ID NO: 78102 - DNA, 75 bp, synthetic construct
  source 1..75: mol_type = other DNA
ctgctgatgaactggctgatggcgtgatggaatcgttgcgctttgatgctcatgagttgctgattatccaccttc

SEQ ID NO: 78103 - DNA, 75 bp, synthetic construct
  source 1..75: mol_type = other DNA
ctgatacgttaaaaacacagtcatcactgttacagaccaggctggaacaaactcggtatcaaattctgagcaggt

SEQ ID NO: 78104 - DNA, 75 bp, synthetic construct
  source 1..75: mol_type = other DNA
ccggtgttgcgtctgacctgcccggagggttacgagctgaagcccgatgatgtccgctggagcgagacgcaggag

SEQ ID NO: 78105 - DNA, 75 bp, synthetic construct
  source 1..75: mol_type = other DNA
aggccattcggcatcaacttaagaacaggagttgtgtctgttggtaatggtgccaggattgatggcgggctggca

SEQ ID NO: 78106 - DNA, 75 bp, synthetic construct
  source 1..75: mol_type = other DNA
tccgatgacgtgctgaccgcagcctcttcagcccctgcgggtgggatgaacgtgtattacatcgcctataaccag

SEQ ID NO: 78107 - DNA, 75 bp, synthetic construct
  source 1..75: mol_type = other DNA
tagccgagatgcaggctgaacagttcaagtctgtggtatttgagacacttaaaaacatgtatggcaaggatgcaa

SEQ ID NO: 78108 - DNA, 75 bp, synthetic construct
  source 1..75: mol_type = other DNA
gttcagccagcctgccagccagttactggccggtgcccgtatggacgtctacgtcattcgtgacggggagggcaa

SEQ ID NO: 78109 - DNA, 75 bp, synthetic construct
  source 1..75: mol_type = other DNA
atggaattcgaaatcaaaggcgtgaaatatcgcgcggcaaaactcagcgtttttgatcagctgaaagtgacccgc

SEQ ID NO: 78110 - DNA, 75 bp, synthetic construct
  source 1..75: mol_type = other DNA
ttttgcgccgcgcggcattgcgatgctgactattgatatgccgtcggtgggcttttcttcaaaatggaagctcac

SEQ ID NO: 78111 - DNA, 75 bp, synthetic construct
  source 1..75: mol_type = other DNA
ccgccttataaacacgcctggaagaaggatggtcagccggtagagggacagactactgacactttcagtaaagcc

SEQ ID NO: 78112 - DNA, 75 bp, synthetic construct
  source 1..75: mol_type = other DNA
atccgggaaccggaaaaaatcatctggcggcggctgtgggtaatcgtctgctgaaggccggtaaatccgtgatag

SEQ ID NO: 78113 - DNA, 75 bp, synthetic construct
  source 1..75: mol_type = other DNA
ttccatccgccctgctcaacgagtctgccacgctgttccgccgcaagtattacattaacggcagtcatgcaggct

SEQ ID NO: 78114 - DNA, 75 bp, synthetic construct
  source 1..75: mol_type = other DNA
actacaacatcaaatatcgcagctaaatacttggataggtgatgaaattgtgaaattcaataaatatatattaga

SEQ ID NO: 78115 - DNA, 75 bp, synthetic construct
  source 1..75: mol_type = other DNA
gctggatctgcagaaatcccgggtgccgtttgatgttgttaccggcaagcgcacctacagcaatatgctgatacg

SEQ ID NO: 78116 - DNA, 75 bp, synthetic construct
  source 1..75: mol_type = other DNA
ccctgttctggtatggtctcgtggggtggtgtactgctgaactgcaccgccgctcaggtttttactcacgttaca

SEQ ID NO: 78117 - DNA, 75 bp, synthetic construct
  source 1..75: mol_type = other DNA
tgtcagaagtcgcggcgaaggatgagtttctgaacatcaagaacgtgagccgggatgacatgatggcggcgcatc

SEQ ID NO: 78118 - DNA, 75 bp, synthetic construct
  source 1..75: mol_type = other DNA
agcggagtgttgtcctgttagtggggaatttgttaaaagaatccagcatggtgaatctccctgtgcggctgtctc

SEQ ID NO: 78119 - DNA, 75 bp, synthetic construct
  source 1..75: mol_type = other DNA
ggggatgtggagaaggccagttgcgtctttgtccgtaacgaactgatgcctctacaaaaacaactcgaggggctc

SEQ ID NO: 78120 - DNA, 75 bp, synthetic construct
  source 1..75: mol_type = other DNA
cactgaacgcggtggtattcgcgcattgagcgagtggctgaatgaaaataccgatcttgatgtgacctttattga

SEQ ID NO: 78121 - DNA, 75 bp, synthetic construct
  source 1..75: mol_type = other DNA
ctctggtctggtcgagaaaatccaggtaacgggtagcgaaggggaactggggatctaccctggccacgcaccgct

SEQ ID NO: 78122 - DNA, 75 bp, synthetic construct
  source 1..75: mol_type = other DNA
ggcgttgcgcagtatgctgaccgcctttttctctctgcaaccactgacggcatcaattacgggcgtgagcagatg

SEQ ID NO: 78123 - DNA, 75 bp, synthetic construct
  source 1..75: mol_type = other DNA
atcgccgctggcgcaagcgcggtaatggtgggttccatgctggcgggtactgaagaatctccgggtgaaatcgaa

SEQ ID NO: 78124 - DNA, 75 bp, synthetic construct
  source 1..75: mol_type = other DNA
ttgggataagttggttgcatatgtcaatgattttaacttaagcaatcaagaaaaatcacgcttaatactaaggtt

SEQ ID NO: 78125 - DNA, 75 bp, synthetic construct
  source 1..75: mol_type = other DNA
tatcattgtgctcaccgccggtttgctgataagcctgctgttgattgtccttttctcccgtcgcctgagcgccaa

SEQ ID NO: 78126 - DNA, 75 bp, synthetic construct
  source 1..75: mol_type = other DNA
cagcagcatgatggccctgcgcgaccttgtgaacatgtaacccgctcttattctgaggaatattatggaaatgaa

SEQ ID NO: 78127 - DNA, 75 bp, synthetic construct
  source 1..75: mol_type = other DNA
gtgtcatggtggcagtgctgcagatgtgccgtggatttgtggtgacacgacgtattactggaaaaatacatacgc

SEQ ID NO: 78128 - DNA, 75 bp, synthetic construct
  source 1..75: mol_type = other DNA
aatgtcggcttcaaattgcgcgttatcacgaagtcacctgtcactctgtctggcgctcagataaggattgagtaa

SEQ ID NO: 78129 - DNA, 75 bp, synthetic construct
  source 1..75: mol_type = other DNA
gttgtacagaaaaacctgaatatcgcgcctacgctcgaaattcgtccgggttatcgcttcaatatcatggtcact

SEQ ID NO: 78130 - DNA, 75 bp, synthetic construct
  source 1..75: mol_type = other DNA
cggtctggttaccaataatcatattgctcgttgccatggcgtctattcagggtggagcctcgttagctaagtcac

SEQ ID NO: 78131 - DNA, 75 bp, synthetic construct
  source 1..75: mol_type = other DNA
atgagactgcaattctctgctctgtttttctttctttactgtgtgtttgttcgtggtgtttttgctggtccgttt

SEQ ID NO: 78132 - DNA, 75 bp, synthetic construct
  source 1..75: mol_type = other DNA
gctctactcgaaaggcaatggctgtccaaaagatattacatcaggcgggtgctacctgatcggtaataaagatct

SEQ ID NO: 78133 - DNA, 75 bp, synthetic construct
  source 1..75: mol_type = other DNA
ggataaccctcgcgataattagttttagcggcggcgttagtttcgacctggcttatttacgttatatttatcaaa

SEQ ID NO: 78134 - DNA, 75 bp, synthetic construct
  source 1..75: mol_type = other DNA
aacagtctggatgaactgcaaacgctggcgattgatgttgattatctcgagcccggtaacgggcctgacggcgat

SEQ ID NO: 78135 - DNA, 75 bp, synthetic construct
  source 1..75: mol_type = other DNA
gtgggggctgccaaaatggggatggatatccgtcttgtagccccaaaatccttctggccggatgtggtgcttgtt

SEQ ID NO: 78136 - DNA, 75 bp, synthetic construct
  source 1..75: mol_type = other DNA
atgtacgcaaaatcttttctcgcacttgatggcaacggacgtctgatcggtgcccgtaccgcacagactgctcct

SEQ ID NO: 78137 - DNA, 75 bp, synthetic construct
  source 1..75: mol_type = other DNA
ctacaggacagaatgttacagctgtacaaattgataacgcagctatgaaactgcgttataatgcacaatattatg

SEQ ID NO: 78138 - DNA, 75 bp, synthetic construct
  source 1..75: mol_type = other DNA
aataataccacgcaacttgcgaccaccgcgtttgttcaggcggcactgacgaccctgattaatggtgcgccagcc

SEQ ID NO: 78139 - DNA, 75 bp, synthetic construct
  source 1..75: mol_type = other DNA
ggaatagctgtactgcggagcaacaacgccagctgttaatgcgcccggcgatctccgcttctgaaagcattaccc

SEQ ID NO: 78140 - DNA, 75 bp, synthetic construct
  source 1..75: mol_type = other DNA
cgtgaaagcacgcggcgatgaggccctgcgggaatacagcgcgaagtttgataaaaccacggttaccgcactgaa

SEQ ID NO: 78141 - DNA, 75 bp, synthetic construct
  source 1..75: mol_type = other DNA
cgaccgtcaatactcgccacaccgtttcgtggtagcggcgcggtatttgatccggacgatgaagcggtgcgcggg

SEQ ID NO: 78142 - DNA, 75 bp, synthetic construct
  source 1..75: mol_type = other DNA
atgtcggactgccaccctgttttattgcccgaaggccctttctcacgcgaacaggcgatggctgtcacaacagct

SEQ ID NO: 78143 - DNA, 75 bp, synthetic construct
  source 1..75: mol_type = other DNA
ccgcaaactaccttgctatcaaataacccgcgacggctttgcgtttcttgctatgggtttcacgggtaaacgtgc

SEQ ID NO: 78144 - DNA, 75 bp, synthetic construct
  source 1..75: mol_type = other DNA
tgtgcccgcaattttgcggagacatcgatttcggtaaatcaaccgaacggtggtacacgcaagctcccttgttac

SEQ ID NO: 78145 - DNA, 75 bp, synthetic construct
  source 1..75: mol_type = other DNA
gagcctctgttgcccgtattgccagggaacacgatatcaatgataacctccagttcaaatggctcaggctctggc

SEQ ID NO: 78146 - DNA, 75 bp, synthetic construct
  source 1..75: mol_type = other DNA
cagcatcagtattgagggcagggatatcaccacagtgctggataaccgcctgatgagtttgacgctgacggataa

SEQ ID NO: 78147 - DNA, 75 bp, synthetic construct
  source 1..75: mol_type = other DNA
ctgaaggggggatggaatttttatcagtatccgttgaatccgatctcaaatatagatccattaggattagaaaca

SEQ ID NO: 78148 - DNA, 75 bp, synthetic construct
  source 1..75: mol_type = other DNA
acgcggtcgctatcagcaaatcaacctgcgtgacgcttacgttgatcacctgttcggttatatcaacgtcaaaaa

SEQ ID NO: 78149 - DNA, 75 bp, synthetic construct
  source 1..75: mol_type = other DNA
tgatgcgattgctgattgtcgtcagtctcgcctggacggggtgggctcttaccctggtcttttatctactgaccg

SEQ ID NO: 78150 - DNA, 75 bp, synthetic construct
  source 1..75: mol_type = other DNA
gcgcatccgggcgcagtatgagccggcggctgcacacatcgacacaacggacgggatcagtattgaataccctga

SEQ ID NO: 78151 - DNA, 75 bp, synthetic construct
  source 1..75: mol_type = other DNA
aaaccgcgaagccaaaagaaaagccctataagctggctgatagcggcggtatgtatctgctgattaacgctaatg

SEQ ID NO: 78152 - DNA, 75 bp, synthetic construct
  source 1..75: mol_type = other DNA
atgaaaaagaaagtaatcagcgggctgtttctgatgttatggatggcgctgttgatcgcagcaatggtgtatccg

SEQ ID NO: 78153 - DNA, 75 bp, synthetic construct
  source 1..75: mol_type = other DNA
ggttctgcattcacccagggcgctgaggggacattcagtgcggacacgggggccagccaggattcggcacgctgg

SEQ ID NO: 78154 - DNA, 75 bp, synthetic construct
  source 1..75: mol_type = other DNA
aaccgtgtcagatgattttattcatgctgttctcagtaactgcgccacaagaatcgtacttcctgcaccggagaa

SEQ ID NO: 78155 - DNA, 75 bp, synthetic construct
  source 1..75: mol_type = other DNA
tgtttctgatgttatggatggggctgttaatcgaagcaatggtgtatccgcaggggatttttccggtactggcag

SEQ ID NO: 78156 - DNA, 75 bp, synthetic construct
  source 1..75: mol_type = other DNA
aaaaagacggcagaaagtgcagccggtaatgcagccagggatgcaacgaccgcaacagaaaaagcccgggagtca

SEQ ID NO: 78157 - DNA, 75 bp, synthetic construct
  source 1..75: mol_type = other DNA
tatctgcgccagcctggaatagcttttacctcaagtactgctgcccgtgactggcttcggttacagctggcagta

SEQ ID NO: 78158 - DNA, 75 bp, synthetic construct
  source 1..75: mol_type = other DNA
tatgcgtggtcaaaagacggtactgattcatggtttatcactgaccttgaagacgaatcgcatcctgaccgttac

SEQ ID NO: 78159 - DNA, 75 bp, synthetic construct
  source 1..75: mol_type = other DNA
aacccgtaaatgggaacctggcatgtcggaagaagaaacacgtttctttggcttaaaaagggaatgtggattgca

SEQ ID NO: 78160 - DNA, 75 bp, synthetic construct
  source 1..75: mol_type = other DNA
ccggcaaagtgaaatcgatcggcttttccagcagcagcactggtcgcgccagcgtgggtgttatggttgaaggcg

SEQ ID NO: 78161 - DNA, 75 bp, synthetic construct
  source 1..75: mol_type = other DNA
tggattttactcagggaaatttcggattatctatccattagaatggaaagacgccgttagcgccaccggaatatt

SEQ ID NO: 78162 - DNA, 75 bp, synthetic construct
  source 1..75: mol_type = other DNA
acgttgagtccagagctgatgtggcgcttatgaatgaaaaaacgaccgagctgttacacctgttaagcggggaat

SEQ ID NO: 78163 - DNA, 75 bp, synthetic construct
  source 1..75: mol_type = other DNA
agttgggcgcatcaggaaaaatgtcggcttcaaattgcgtgttatcactaagtcacctgtcactctgtcaggctg

SEQ ID NO: 78164 - DNA, 75 bp, synthetic construct
  source 1..75: mol_type = other DNA
ccgatactcccgccccccgtgaactcagtcaggatgtgcaggcgctgatcaacaatggtctggattttctggata

SEQ ID NO: 78165 - DNA, 75 bp, synthetic construct
  source 1..75: mol_type = other DNA
tttttgtcaggaatgagttaattccgctacaacacagaatatctgaaattaactcatggattggacttaatgaag

SEQ ID NO: 78166 - DNA, 75 bp, synthetic construct
  source 1..75: mol_type = other DNA
attatttacgacgatctgaaacccggcgaagaaatcggaatggtgaagtcggatcgccccaatcctaaccttgaa

SEQ ID NO: 78167 - DNA, 75 bp, synthetic construct
  source 1..75: mol_type = other DNA
cgatcctgtttcactacaccaatcttgccgaagggatgacagagcagcgactggaaacggatgtttatgtaccgt

SEQ ID NO: 78168 - DNA, 75 bp, synthetic construct
  source 1..75: mol_type = other DNA
cggttccggcaaaagtttgattgcgaaagcgatttgtggggtgaataaagataactggcgtgttactgctgaccg

SEQ ID NO: 78169 - DNA, 75 bp, synthetic construct
  source 1..75: mol_type = other DNA
gtggtgactgacggtgaacgtattctggggcttggtgaccagggcatcggcgggatgggcattccgatcggtaaa

SEQ ID NO: 78170 - DNA, 75 bp, synthetic construct
  source 1..75: mol_type = other DNA
tcgttcagcaattgaagacggtgtagtggaaccgcatgagaagacagcaattaacgatgagctgtacctctcaat

SEQ ID NO: 78171 - DNA, 75 bp, synthetic construct
  source 1..75: mol_type = other DNA
gatgggcaatggttttacagcgtgcggctggcactcactacattgcggatgctgtcgcacagtctgctggtgggg

SEQ ID NO: 78172 - DNA, 75 bp, synthetic construct
  source 1..75: mol_type = other DNA
tatagacttcgatgccagtgctgctcctggagttgtaactgcatctgaaaaccgtccaagaaatatcgcgtttaa

SEQ ID NO: 78173 - DNA, 75 bp, synthetic construct
  source 1..75: mol_type = other DNA
gtgggtaagcatcactggaaagtggaaaaacaacctgagtggtacgtgaaagctgtcagaaaaactatcgcggcg

SEQ ID NO: 78174 - DNA, 75 bp, synthetic construct
  source 1..75: mol_type = other DNA
gaattaactgaaatactgacaaaaatatcttttcctgaaaaatccgggagcaatttgcttaaaccggaggcggtc

SEQ ID NO: 78175 - DNA, 75 bp, synthetic construct
  source 1..75: mol_type = other DNA
atgtcaacttctatcagaatctgtagctacctgctgctgccgctgatttacctgctggttaacgtcaaaatcgcc

SEQ ID NO: 78176 - DNA, 75 bp, synthetic construct
  source 1..75: mol_type = other DNA
atacggcatattgctcgtaaactggacctgagcccttcagtaatagcaagatggagacttgaactggtgcaacaa

SEQ ID NO: 78177 - DNA, 75 bp, synthetic construct
  source 1..75: mol_type = other DNA
tgccccgctaccggctcctttattccgctatcaccagcagcttaaacagcagctcgacccttgcggcgtgtttaa

SEQ ID NO: 78178 - DNA, 75 bp, synthetic construct
  source 1..75: mol_type = other DNA
gagtcgctgaaaaaactggaagacgcggcggatgcggctgtcagcagggcagaggaagcggcgaggaaagcggaa

SEQ ID NO: 78179 - DNA, 75 bp, synthetic construct
  source 1..75: mol_type = other DNA
taccgcgctggcggcgggtattgccctcctgtgggaggactatcagacctggaaggaaggcggcgacagcctgat

SEQ ID NO: 78180 - DNA, 75 bp, synthetic construct
  source 1..75: mol_type = other DNA
atgggcgttatttttatcgccgtcggtttattaatcagtatgccctcctctaaaaagtcacgcaggaaacggaag

SEQ ID NO: 78181 - DNA, 75 bp, synthetic construct
  source 1..75: mol_type = other DNA
ttggccttgataccgttggtgatctctccgactttcttgatgcgtctgcaggtgctgagggtaaaccactgatgc

SEQ ID NO: 78182 - DNA, 75 bp, synthetic construct
  source 1..75: mol_type = other DNA
ttgtacgacctgcagcaggatgccctgttgtggaacggcactgcattcagcgccgcacacggtagtgataccacc

SEQ ID NO: 78183 - DNA, 75 bp, synthetic construct
  source 1..75: mol_type = other DNA
ggtatcaatgataacctgctgtttaaatggaaaagccagtacgaggacggcttactgagcgatgatgacatacag

SEQ ID NO: 78184 - DNA, 75 bp, synthetic construct
  source 1..75: mol_type = other DNA
tctttcaccatgtgcagtggcaacaaaaactggcgcgcagcctgcaaatcggtcgtgccagcaacggcggactgc

SEQ ID NO: 78185 - DNA, 75 bp, synthetic construct
  source 1..75: mol_type = other DNA
acgtcgttggtattgacgccctggtacacgatcaccaaaccgttctggcaaaagctgaaggcggtgtggttgccg

SEQ ID NO: 78186 - DNA, 75 bp, synthetic construct
  source 1..75: mol_type = other DNA
acgactggctgagctcagacgccgctgtggatgaggccctgctcatcaacgaatacaccttcaccgaagccggtc

SEQ ID NO: 78187 - DNA, 75 bp, synthetic construct
  source 1..75: mol_type = other DNA
tatttactctattttcttatccctgttttatcgactggattgagtatttggctgagtaagtatttgggtaaagac

SEQ ID NO: 78188 - DNA, 75 bp, synthetic construct
  source 1..75: mol_type = other DNA
cggcggacgatgcggacgcgaagctgttcccgctgaacaagcctgcattagtgacccgcgtcaatgacgtgctgg

SEQ ID NO: 78189 - DNA, 75 bp, synthetic construct
  source 1..75: mol_type = other DNA
agttactctatcgcttttggcgatcatgcgaagagtcagggcgactacggaatatctcttggagaaactgccggg

SEQ ID NO: 78190 - DNA, 75 bp, synthetic construct
  source 1..75: mol_type = other DNA
ccgtgttatcgattatgcagtaactctgccatatgttgatgctgaacgcattggcgtgctgggtgtgtgtggggg

SEQ ID NO: 78191 - DNA, 75 bp, synthetic construct
  source 1..75: mol_type = other DNA
gagtgggttgttgtcgtcgtttggagcgttagctaataactacgacgggcagccaactgattatggcgatggctc

SEQ ID NO: 78192 - DNA, 75 bp, synthetic construct
  source 1..75: mol_type = other DNA
gaaacaacgactggctgggcgaatttataaaacaggcatgcctcgctccaactattttagtgaacgttgcaaagg

SEQ ID NO: 78193 - DNA, 75 bp, synthetic construct
  source 1..75: mol_type = other DNA
aatactgataaggcaaataaaatacttaactggaaagccaagtatgatcttgaggaaatgttacaagacgtttgg

SEQ ID NO: 78194 - DNA, 75 bp, synthetic construct
  source 1..75: mol_type = other DNA
ctatgccaggattttatccttattgaatattcctcatgatttagcgtcttataaagccgttatggcaggtcagta

SEQ ID NO: 78195 - DNA, 75 bp, synthetic construct
  source 1..75: mol_type = other DNA
agttagagtggttcgctaaaaagacattaactgatatgttacgagatgcatggaaatggcaaacgttaaatccaa

SEQ ID NO: 78196 - DNA, 75 bp, synthetic construct
  source 1..75: mol_type = other DNA
atcaccttgataatcaggcggcacggatcatccttgagcaaaaaggcgcgtccggctggataaacggcgatcgca

SEQ ID NO: 78197 - DNA, 75 bp, synthetic construct
  source 1..75: mol_type = other DNA
attcaaaacagaaaaaccgtcagtattatttccggcggcaatatcgatctttctcgcgtctctcaaatcaccggt

SEQ ID NO: 78198 - DNA, 75 bp, synthetic construct
  source 1..75: mol_type = other DNA
cagcgactcaatagccaaaaggcttggaggaggctcatcggtaaaccctgacgacggtacagttaacgcaccaac

SEQ ID NO: 78199 - DNA, 75 bp, synthetic construct
  source 1..75: mol_type = other DNA
gctgtcgcacagtctgctggtggggtgttcgtatcgcttcctgaaattgaggaagtagagaacgccgatataaac

SEQ ID NO: 78200 - DNA, 75 bp, synthetic construct
  source 1..75: mol_type = other DNA
ttcggatgacagtactgacgcggttaatggctcgcaactgaaagacactaacgataacgtggcgaccaacaccac

SEQ ID NO: 78201 - DNA, 75 bp, synthetic construct
  source 1..75: mol_type = other DNA
acgataacgtggcgaccaacaccaccaatatcgctagcaacacggctaacattgccactaacaccagtaatattg

SEQ ID NO: 78202 - DNA, 75 bp, synthetic construct
  source 1..75: mol_type = other DNA
tatcactaacctgactgatacggtgactaacctcggtgaagacgccctgaaatgggacgatgccgcaggcgcatt

SEQ ID NO: 78203 - DNA, 75 bp, synthetic construct
  source 1..75: mol_type = other DNA
aacaggccaccgaacaggaacaggccaccgaacaggaacaggccaccgaacaggaacaggccaccgaacaggaac

SEQ ID NO: 78204 - DNA, 75 bp, synthetic construct
  source 1..75: mol_type = other DNA
cattgctaccaataccactaatatcgcggctaacaccacaagcataaatagcctgaacacgtctgtggatgctct

SEQ ID NO: 78205 - DNA, 75 bp, synthetic construct
  source 1..75: mol_type = other DNA
tttactgaagatgccattaacaagagaaaacacgaacgggagttattaaataaaatatgcattctttcaatgctg

SEQ ID NO: 78206 - DNA, 75 bp, synthetic construct
  source 1..75: mol_type = other DNA
tgtcattctcgcgggtcagtcaaatggcatggcctacggcgaggggctgccgttaccggattcgtttgaccgccc

SEQ ID NO: 78207 - DNA, 75 bp, synthetic construct
  source 1..75: mol_type = other DNA
ctctggaacgaaactaaaaaggcattcagtgcagctcacggccaggataccaccagcaaaatcaccaacgttaaa

SEQ ID NO: 78208 - DNA, 75 bp, synthetic construct
  source 1..75: mol_type = other DNA
gaaccgctaatatgctccgcacgctataccggaagcacctttcggcgcggagatgcaacgattaagccgggtaat

SEQ ID NO: 78209 - DNA, 75 bp, synthetic construct
  source 1..75: mol_type = other DNA
ttgactatttgtgccgttatttcgggtgcagaaggttgggaagatatagaggattttggggaaacacatctcgat

SEQ ID NO: 78210 - DNA, 75 bp, synthetic construct
  source 1..75: mol_type = other DNA
gatcagcgatatcaacaccaaagatctattcaactttcgctttcagaacaccacatcaccggagtctggctggta

SEQ ID NO: 78211 - DNA, 75 bp, synthetic construct
  source 1..75: mol_type = other DNA
gcttcacaaccaggagcctctgttgcccgtattgccagggaacacgatatcaatgataacctcctgttcaaatgg

SEQ ID NO: 78212 - DNA, 75 bp, synthetic construct
  source 1..75: mol_type = other DNA
tattcgtccgaaatgagctaatgccactacaaaagcgattacaggagatgaatgattggcttggcaaggaggcga

SEQ ID NO: 78213 - DNA, 75 bp, synthetic construct
  source 1..75: mol_type = other DNA
caagccgctgtataaggaccttatcggtcgaacaaaagcagcactgaagaagaacccgaaaaatgtgctgtttgc

SEQ ID NO: 78214 - DNA, 75 bp, synthetic construct
  source 1..75: mol_type = other DNA
ggaggccaatggacttaatagtatcgcattgggctctgggggtattgcagatgccgataacacgattgctctggg

SEQ ID NO: 78215 - DNA, 75 bp, synthetic construct
  source 1..75: mol_type = other DNA
tgctgaacgaataactcaaaaactgaaggaagggtggcagccttatggtagtgcgctgatttcgacagctggtta

SEQ ID NO: 78216 - DNA, 75 bp, synthetic construct
  source 1..75: mol_type = other DNA
tggtcgtgtatcaatggcgcatggtcggacatctcaggctgtaggcgttaatggtcaactggtcgagtatcgcta

SEQ ID NO: 78217 - DNA, 75 bp, synthetic construct
  source 1..75: mol_type = other DNA
atggcgtcgcgttcagcatcgagcagggtgcggcgaacaatatcctgctggcaaatggcggcgtgttaaccgtgg

SEQ ID NO: 78218 - DNA, 75 bp, synthetic construct
  source 1..75: mol_type = other DNA
ccaacaatcagttcgggctggggatttatctgtatacggacgctcccgttcctgatggtgtggcgatgacgggta

SEQ ID NO: 78219 - DNA, 75 bp, synthetic construct
  source 1..75: mol_type = other DNA
tgccaacacagcttgtcagaaggcggaccaacaacggaatgatgcaaatataaagattcgatactcattaaaata

SEQ ID NO: 78220 - DNA, 75 bp, synthetic construct
  source 1..75: mol_type = other DNA
ctgccgcagcggaacagaaaattcccggcaactgttatccggtcgataaagttattcacatggacaataacgaaa

SEQ ID NO: 78221 - DNA, 75 bp, synthetic construct
  source 1..75: mol_type = other DNA
gttattttcttcttttcattcctccgctctggttatatctgagaaccagagcgaagaaaaagaaagtccagcagg

SEQ ID NO: 78222 - DNA, 75 bp, synthetic construct
  source 1..75: mol_type = other DNA
gtgacggtaaaactgcgcctgactgtggctgcactcctgctgtttctggtggtgatggtggatttcaccagcaga

SEQ ID NO: 78223 - DNA, 75 bp, synthetic construct
  source 1..75: mol_type = other DNA
aggacagagctgccgaacctcggtaaagagcagatttttgttcgcctgaagccctggtgcgaacagcgctatctg

SEQ ID NO: 78224 - DNA, 75 bp, synthetic construct
  source 1..75: mol_type = other DNA
tactataaatcaaggggatggcaccacacagcttgtcgacgagaatggcaggggaattcaaatttgggctgtatc

SEQ ID NO: 78225 - DNA, 75 bp, synthetic construct
  source 1..75: mol_type = other DNA
agtgagcggttttgtacaacacattccagaaccggttctgggcggcgcaacgcttgtaatgtttggcaccatcgc

SEQ ID NO: 78226 - DNA, 75 bp, synthetic construct
  source 1..75: mol_type = other DNA
gcgattcatattgtgctggttggcgtggggttggggacgctattttcccgctcagtgattgcgtttgaagtgttg

SEQ ID NO: 78227 - DNA, 75 bp, synthetic construct
  source 1..75: mol_type = other DNA
atgaaaaaactgattctcatcgccatgatggcatcggggctggtggcttgtgcgcaatcaaccgcgccacaggaa

SEQ ID NO: 78228 - DNA, 75 bp, synthetic construct
  source 1..75: mol_type = other DNA
cttcctggtgggcatattattaccttgttcgcaatgcgtatttcatatttggcataccatgcttattattttatg

SEQ ID NO: 78229 - DNA, 75 bp, synthetic construct
  source 1..75: mol_type = other DNA
acgcaaatcgcccctccggtttagccgtgctttcagcttcgctgactgcatccggcgacggatggtgtcagttac

SEQ ID NO: 78230 - DNA, 75 bp, synthetic construct
  source 1..75: mol_type = other DNA
gaaaacacgaacgggagttattaaataaagtatgcattgtttcaatgctggcccgtttacgtttgatgccaaaag

SEQ ID NO: 78231 - DNA, 75 bp, synthetic construct
  source 1..75: mol_type = other DNA
gacgacaagtcacctcacgaagtccacattaaagaaccaaagcggagcaatcctcaaaaccgccttatgtgggcg

SEQ ID NO: 78232 - DNA, 75 bp, synthetic construct
  source 1..75: mol_type = other DNA
ggaagaagacccggatattccggcatcaggatattacggtgcggcctcccggacgtcggcaaactggacgtcagc

SEQ ID NO: 78233 - DNA, 75 bp, synthetic construct
  source 1..75: mol_type = other DNA
ctatgcgttatgcgcattttgctccgggtcatttagaggctgctgttgaattaaacccttttgacaatagagggt

SEQ ID NO: 78234 - DNA, 75 bp, synthetic construct
  source 1..75: mol_type = other DNA
acagcgataagccatcaatggatatggaccagcatttcaacggtattaaccatacatttgagtatggggatggga

SEQ ID NO: 78235 - DNA, 75 bp, synthetic construct
  source 1..75: mol_type = other DNA
ggcgcagaaaccgcacctgcaacgattcgggtatgggttcgctatcgtggcgacatatccgccgccagtcgcctg

SEQ ID NO: 78236 - DNA, 75 bp, synthetic construct
  source 1..75: mol_type = other DNA
tccggaaaatgattcaaacaccgtgcggcaaaagtattaccagtgtaacaacctggaatgcggcgtatgcttctc

SEQ ID NO: 78237 - DNA, 75 bp, synthetic construct
  source 1..75: mol_type = other DNA
tatcaggcgatcagaaaggtacgcgacacgcttcaggctctgcgggatgcgggctatggtgatgcgctggatcgc

SEQ ID NO: 78238 - DNA, 75 bp, synthetic construct
  source 1..75: mol_type = other DNA
acccgtcacgactacggccgcgaagctttcatcgacaaaatctgggaatggaaagcggaatccggcggcaccatt

SEQ ID NO: 78239 - DNA, 75 bp, synthetic construct
  source 1..75: mol_type = other DNA
gctgaaaactgggcgcgtattagcgagcatttcgacaccctatttaccaccgaagccagcgtggatgcgttaaaa

SEQ ID NO: 78240 - DNA, 75 bp, synthetic construct
  source 1..75: mol_type = other DNA
tgggcttacggtgcgatagccggttgtacgttcttcattgcgcgtgaacacacccaggcagaatatcgctggata

SEQ ID NO: 78241 - DNA, 75 bp, synthetic construct
  source 1..75: mol_type = other DNA
tatggaaaatcaacagctcctataaagcgaaaaactggtctaaccccgaaagcggtggctttatctggcacacca

SEQ ID NO: 78242 - DNA, 75 bp, synthetic construct
  source 1..75: mol_type = other DNA
ggtatcccgtggcatgagctgccagcttcacacaggggaaacaatcagatgagtttgcctttatctcagaattaa

SEQ ID NO: 78243 - DNA, 75 bp, synthetic construct
  source 1..75: mol_type = other DNA
acaaagaagatgagctggcgcgtctggcgaaagaagtggcgaagattgaaggcgaaatcagccgtatcgagaaca

SEQ ID NO: 78244 - DNA, 75 bp, synthetic construct
  source 1..75: mol_type = other DNA
ggtgccggtcggctgggtggtggtgccctgtgggccggtgccatggcggctcctgtactgctggacagcagcgcc

SEQ ID NO: 78245 - DNA, 75 bp, synthetic construct
  source 1..75: mol_type = other DNA
atggatataacaccttttcttcatgcgctttgtgctgtggctgcgcaggtaatgattggtctttttaccggaaac

SEQ ID NO: 78246 - DNA, 75 bp, synthetic construct
  source 1..75: mol_type = other DNA
acggcgcgctacctgggtcgttatctgaagaagccgccgatagcggcctcccggctggcacattacaacggaggg

SEQ ID NO: 78247 - DNA, 75 bp, synthetic construct
  source 1..75: mol_type = other DNA
caggagacagagcttgtcggctcccgtatgcagcgtacgcttgccggtgtccgtggcagtatccgcacggtaacg

SEQ ID NO: 78248 - DNA, 75 bp, synthetic construct
  source 1..75: mol_type = other DNA
agcgtcgcgtaaatgaaaaccgtggcttcctgcaaacgctggcgcgtctggaaagcatcaccgtgctgcctgccg

SEQ ID NO: 78249 - DNA, 75 bp, synthetic construct
  source 1..75: mol_type = other DNA
ccgatgctgaccgaccagtggtacgttcgtgccgatgtactggcgaaaccagcggttgaagcggttgagaacggc

SEQ ID NO: 78250 - DNA, 75 bp, synthetic construct
  source 1..75: mol_type = other DNA
cgaaatatctcctgtatatgtatctcgccacccgtgcgctgaaggctgtccgcgccataggtcttggggcactgc

SEQ ID NO: 78251 - DNA, 75 bp, synthetic construct
  source 1..75: mol_type = other DNA
tatggttgacggtatttcgctgccagaactgctggaaaaacgtaccggcaatatgatgcagccgcagctggcgga

SEQ ID NO: 78252 - DNA, 75 bp, synthetic construct
  source 1..75: mol_type = other DNA
tttcgtatttaacccccaggtggttagaaaaagcaaacaggtcggttttatctacaaggtagattctattggcga

SEQ ID NO: 78253 - DNA, 75 bp, synthetic construct
  source 1..75: mol_type = other DNA
taggttttactgaatatacttcaaatattaacagtgcagatgcggcaagcagacgacattttcttgtagtcataa

SEQ ID NO: 78254 - DNA, 75 bp, synthetic construct
  source 1..75: mol_type = other DNA
gcaatgatgcctatgaaaaaataaatgcgattattgagaagcgtcgacaggaaggggcaagggaaaaagatgtca

SEQ ID NO: 78255 - DNA, 75 bp, synthetic construct
  source 1..75: mol_type = other DNA
aatatcgtcactttccgggatctggaacgctcaactattgatgccataacgctgtttggtgacaaaaacaccaaa

SEQ ID NO: 78256 - DNA, 75 bp, synthetic construct
  source 1..75: mol_type = other DNA
tggtgcagcgcagttttctttaagcaggtaaaaggcgcgaaggtaaaagccagcgcagttattcagaatcaataa

SEQ ID NO: 78257 - DNA, 75 bp, synthetic construct
  source 1..75: mol_type = other DNA
ggatgtcgattctgaaagcgggctttgtggcttccgttccggcggtttgcggttttatcggcggtgtgctgggtg

SEQ ID NO: 78258 - DNA, 75 bp, synthetic construct
  source 1..75: mol_type = other DNA
ctcactgtcagcaacaccacactcacccagaaagccgtcaacctgaatgaaggcacgctgacgctgaacgacagt

SEQ ID NO: 78259 - DNA, 75 bp, synthetic construct
  source 1..75: mol_type = other DNA
gcgcagcatggggtatgacgctgccgggcgcatcaccgtgctgaccaacgagaacggcagccagtccacgttccg

SEQ ID NO: 78260 - DNA, 75 bp, synthetic construct
  source 1..75: mol_type = other DNA
gggcgcatcaccgtgctgaccaacgagaacggcagccagtccacgttccggtatgacccggtcgacaggctgacg

SEQ ID NO: 78261 - DNA, 75 bp, synthetic construct
  source 1..75: mol_type = other DNA
ttgatgcaacaggatatacctattgctgggatagatactacagacaaaaaatactaaggggttccaagccgcaac

SEQ ID NO: 78262 - DNA, 75 bp, synthetic construct
  source 1..75: mol_type = other DNA
gtctggtcgtggacgtgcgccaaaaccgattgctgaagcactggctggcggtcgctctcttgatgagtttctcat

SEQ ID NO: 78263 - DNA, 75 bp, synthetic construct
  source 1..75: mol_type = other DNA
ggtgaacgccggcaacagtgcgtcggggctggcgaccagcggtaagggtattcaggtggtggaagccattaacgg

SEQ ID NO: 78264 - DNA, 75 bp, synthetic construct
  source 1..75: mol_type = other DNA
ttatttgatgccgctgcattttctcgtttgactggtgaaggcttaccccacccactgacccgggaaccaataacg

SEQ ID NO: 78265 - DNA, 75 bp, synthetic construct
  source 1..75: mol_type = other DNA
aatttcagtactgatagcaagggttttcagaactactatcgggacctggctcagcgggttaaaaatcaggatgtt

SEQ ID NO: 78266 - DNA, 75 bp, synthetic construct
  source 1..75: mol_type = other DNA
tctgacggatgcagagtataccggtgaagagctggatgcagatacctggcgggccacactgcatattgaggtgtt

SEQ ID NO: 78267 - DNA, 75 bp, synthetic construct
  source 1..75: mol_type = other DNA
actggcaggctgttctgcatattgccgttttcgtccgtgcacaggcgccggattctgagctggatacgtggatgg

SEQ ID NO: 78268 - DNA, 75 bp, synthetic construct
  source 1..75: mol_type = other DNA
tgatattttttcttatggccctgatggcatatctgacacagaagacgatattgggaattggactattggtaacac

SEQ ID NO: 78269 - DNA, 75 bp, synthetic construct
  source 1..75: mol_type = other DNA
tccacggaaaacgcaaaaaagcacaatgtcctgaatgctttaagcgtagcgactctgttcatagttgtcgtcggc

SEQ ID NO: 78270 - DNA, 75 bp, synthetic construct
  source 1..75: mol_type = other DNA
ctttaccagccgtgaagaggccatccacgcgttgactcaacgtcttgctgctctggggaaaatttccagtactga

SEQ ID NO: 78271 - DNA, 75 bp, synthetic construct
  source 1..75: mol_type = other DNA
aaaaagcgcagctactgccagtttgattcgaagctggcgcagatagtccagcagcaggggcgtaacgggcagttg

SEQ ID NO: 78272 - DNA, 75 bp, synthetic construct
  source 1..75: mol_type = other DNA
tgctggcggcatctttctgcctggtacagccgcttgttgcaaatgagcagtttaaccagggaatgaatctgagta

SEQ ID NO: 78273 - DNA, 75 bp, synthetic construct
  source 1..75: mol_type = other DNA
tcagccagcaggtcacctactcctgtgagcgtaaaaaagagggaaacggccagatttgcggcggggagttcttct

SEQ ID NO: 78274 - DNA, 75 bp, synthetic construct
  source 1..75: mol_type = other DNA
agctggccgcactgccgaacaaatggcaggcagctcaagtgatggagcttctggtcattccggaaggtcagcgtg

SEQ ID NO: 78275 - DNA, 75 bp, synthetic construct
  source 1..75: mol_type = other DNA
tgtttgcacgttatatctcttctctgaaagatcagcgcgttgccgcgtctaaagttctctctggcccgcaagcgc

SEQ ID NO: 78276 - DNA, 75 bp, synthetic construct
  source 1..75: mol_type = other DNA
tatcggttcatgcagggctatatttccttaactcccgttacgactttatgaacacagcctttaatgtgcaactgg

SEQ ID NO: 78277 - DNA, 75 bp, synthetic construct
  source 1..75: mol_type = other DNA
aaacctgtggtacggggatctattccagagcggtatgtacaaagtctgtttacaggttccagccagatttgctcc

SEQ ID NO: 78278 - DNA, 75 bp, synthetic construct
  source 1..75: mol_type = other DNA
gggacgcctgccgtatggtcctgataccgtacctgtccgcagctttaactatgttgaagaggtgaaaggtccgga

SEQ ID NO: 78279 - DNA, 75 bp, synthetic construct
  source 1..75: mol_type = other DNA
ccaccaactactatgcgccggagagcgaccgcggcatccgctggaacgatgagaccattgggattacatggccgg

SEQ ID NO: 78280 - DNA, 75 bp, synthetic construct
  source 1..75: mol_type = other DNA
atgctgacgaaatatgcccttgtggcggtcatagtgctgtgtttgacagtgctgggatttacgcttctggtcggc

SEQ ID NO: 78281 - DNA, 75 bp, synthetic construct
  source 1..75: mol_type = other DNA
gctgttaaaacgcattctgaccattcccggcctgcggattgctcgccctggtgagttttccgaacgcgcgtttct

SEQ ID NO: 78282 - DNA, 75 bp, synthetic construct
  source 1..75: mol_type = other DNA
ttcctggaataaacgtctggcgttcagtaatcctaactggtttatgcgagtaaccacgcctttcgggttgatttc

SEQ ID NO: 78283 - DNA, 75 bp, synthetic construct
  source 1..75: mol_type = other DNA
cctgtcgtggtcggttgattttgcagacagatgctcagggggcgtggtttgagcacgatttacatgccctgagcg

SEQ ID NO: 78284 - DNA, 75 bp, synthetic construct
  source 1..75: mol_type = other DNA
ataatgaaaaaattgaagaggcaaggatttgtatagacaaatcactacaactcgaacccagaagacgaaaagcag

SEQ ID NO: 78285 - DNA, 75 bp, synthetic construct
  source 1..75: mol_type = other DNA
ggttgaatttgttcaggataatcattctaaatcatctaagggtgtgttacgcggactgcactatcagctggaacc

SEQ ID NO: 78286 - DNA, 75 bp, synthetic construct
  source 1..75: mol_type = other DNA
cgtaaatcctgatctggtgaaagtgacccgacgggcactggaaatctcggaagtggattttggtatcaccgaagg

SEQ ID NO: 78287 - DNA, 75 bp, synthetic construct
  source 1..75: mol_type = other DNA
cgaaatatctgctgtatatgtatctggccacccgggcactgaaactggtcagggctgttggtggaagtgcgctgc

SEQ ID NO: 78288 - DNA, 75 bp, synthetic construct
  source 1..75: mol_type = other DNA
acctcccccttccgcaaaccacagaccaccgttcccgaaaccataccggggcgtggcggtcggttcctgaatttt

SEQ ID NO: 78289 - DNA, 75 bp, synthetic construct
  source 1..75: mol_type = other DNA
ccttttgacagccttaaaaacagccttaaaggctttctggattatgctgatgaggcaaagtccagcggtcttcag

SEQ ID NO: 78290 - DNA, 75 bp, synthetic construct
  source 1..75: mol_type = other DNA
cagcattgccggtggagcgctgggagctgcggcaggacctgtcggcgtggctatcggttcaacggtgggaagtta

SEQ ID NO: 78291 - DNA, 75 bp, synthetic construct
  source 1..75: mol_type = other DNA
atgaataaattgaaatatcttatgacgcttcttatcaataatactttaccgcttccagctgtttataaagaccac

SEQ ID NO: 78292 - DNA, 75 bp, synthetic construct
  source 1..75: mol_type = other DNA
attcggataactctgccgcccctgccagcaggcacgggcggcgttctcatgcattcaaatctgactggtatcagc

SEQ ID NO: 78293 - DNA, 75 bp, synthetic construct
  source 1..75: mol_type = other DNA
cagcggcaacaaaaccacaaagcctccagatacttcactgctgaaaagcatcacgggtaacgtggcgtcattact

SEQ ID NO: 78294 - DNA, 75 bp, synthetic construct
  source 1..75: mol_type = other DNA
tggaagcattcgaagtagctctcgaaaacgtgcgcccgactgtagaagttaagtctcgccgcgttggtggttcta

SEQ ID NO: 78295 - DNA, 75 bp, synthetic construct
  source 1..75: mol_type = other DNA
gacagatgctcagggggcgtggtttgagcacgatttacatgccctgagcgagcaacagaaggcggactgtgtggt

SEQ ID NO: 78296 - DNA, 75 bp, synthetic construct
  source 1..75: mol_type = other DNA
cgactaattattatcatcctgaaagtgataggggaattatttgggatgattccttcataaatatccaatggccct

SEQ ID NO: 78297 - DNA, 75 bp, synthetic construct
  source 1..75: mol_type = other DNA
acggattcagcagcactgttgccctgtatcgaacaggccagagaggatatccgtaccctgcgccaactgcagctt

SEQ ID NO: 78298 - DNA, 75 bp, synthetic construct
  source 1..75: mol_type = other DNA
atggatataacacctttccttcatgcactttgtgctgtggctgcgcaggtactgattggcctttttaccggaaac

SEQ ID NO: 78299 - DNA, 75 bp, synthetic construct
  source 1..75: mol_type = other DNA
gttaacgcaggagagattcactttgataatcagacgacacaggatgccgtgctgagccgtgctgttgcaaaaggc

SEQ ID NO: 78300 - DNA, 75 bp, synthetic construct
  source 1..75: mol_type = other DNA
ggctcaacgtgactactttggtgcgcatacctataagcgtactgataaagaaggtgtgttccatactgaatggct

SEQ ID NO: 78301 - DNA, 75 bp, synthetic construct
  source 1..75: mol_type = other DNA
tgtatacgctggatgaactttcctgcccggcacgggaaaaagcccgcgacgggtaccgtcagcatcatgctgaca

SEQ ID NO: 78302 - DNA, 75 bp, synthetic construct
  source 1..75: mol_type = other DNA
tgacgcagctgcactgttacaacagtttgctgaactgaccagcgttccggtgatcccaacgctgatgggctgggg

SEQ ID NO: 78303 - DNA, 75 bp, synthetic construct
  source 1..75: mol_type = other DNA
gttaattttctttatgaaccatcggaaagaccatattgccatcatgcctctgtccgggttgatgaaaaagagcgt

SEQ ID NO: 78304 - DNA, 75 bp, synthetic construct
  source 1..75: mol_type = other DNA
acaactggaacaccggctacggcggcgcggagttaggcttaagttacccgatcaccaaacatgtgcgcctttata

SEQ ID NO: 78305 - DNA, 75 bp, synthetic construct
  source 1..75: mol_type = other DNA
cacaatcgaaaacacagaacgttacgctgagtttaaaagtggcaacttaagcgcgcgtgtcagcaaaggtgagtt

SEQ ID NO: 78306 - DNA, 75 bp, synthetic construct
  source 1..75: mol_type = other DNA
aaccgtctgggcaatttcactgtggaaaacggtaatgctgacggtgttgttctggagtccggcggtcgcctggat

SEQ ID NO: 78307 - DNA, 75 bp, synthetic construct
  source 1..75: mol_type = other DNA
ctcaggtttacagcggttacggcgaatcgctcatcgactataacttcaaccagacccgcgttggtgtgggagtta

SEQ ID NO: 78308 - DNA, 75 bp, synthetic construct
  source 1..75: mol_type = other DNA
tattatcgctgatataaattcgataaaagaactaatagatgatgtaaaatatgccagaaaattaacaagggtggc

SEQ ID NO: 78309 - DNA, 75 bp, synthetic construct
  source 1..75: mol_type = other DNA
ataacgagagtatcgaggtagctatgagaaatcataccatacacccgcaagggcgggattcgcacaacctgaata

SEQ ID NO: 78310 - DNA, 75 bp, synthetic construct
  source 1..75: mol_type = other DNA
gggaaggcgacagtctgggaaacatcaccatcacccggattgacccgtccagccgggcagtcatcacctctgccg

SEQ ID NO: 78311 - DNA, 75 bp, synthetic construct
  source 1..75: mol_type = other DNA
agttttgtaagatctacccagtgctggtcaatagaatcagattcaatgaagatggaacaaagattacgcttgaca

SEQ ID NO: 78312 - DNA, 75 bp, synthetic construct
  source 1..75: mol_type = other DNA
atgagtgctgttttggtggtcgcgaaagataaaaccgttacagatgtcaccgcgggtgatttcaccgctccggca

SEQ ID NO: 78313 - DNA, 75 bp, synthetic construct
  source 1..75: mol_type = other DNA
agggaaatcattaccccgtttctggcccgggcattttttcccgattttctatgcctgtcatctggcggtgctggg

SEQ ID NO: 78314 - DNA, 75 bp, synthetic construct
  source 1..75: mol_type = other DNA
tcattttactcatacgatgttcgttctacttcaatttatctgactgtatctggcagaagggttggatggcattca

SEQ ID NO: 78315 - DNA, 75 bp, synthetic construct
  source 1..75: mol_type = other DNA
tattagaagccaacctggcgctgccaaaacacaacctggtcacgctcacatggggcaacgtcagcgccgttgatc

SEQ ID NO: 78316 - DNA, 75 bp, synthetic construct
  source 1..75: mol_type = other DNA
atcctttacccgcccgcagctggcaatgctccttagtaagctgggctagcgtcagccaaaaacatcacgccttaa

SEQ ID NO: 78317 - DNA, 75 bp, synthetic construct
  source 1..75: mol_type = other DNA
taaagaaccagcttgcacttgacgccagagttgttgcgtttggcggtaaaaagaaaactgaggaagtggatcagt

SEQ ID NO: 78318 - DNA, 75 bp, synthetic construct
  source 1..75: mol_type = other DNA
atgagcggactgggtaatatatccggcgctctggggaaaagtattccggcgtttaatgtactctctgaatccatg

SEQ ID NO: 78319 - DNA, 75 bp, synthetic construct
  source 1..75: mol_type = other DNA
tcattttactcatgcgatgttcgttctacttcgatttatctgactgtatctggaagaagggttggctggcattca

SEQ ID NO: 78320 - DNA, 75 bp, synthetic construct
  source 1..75: mol_type = other DNA
ttgctaccaaaagaagcagataaagcaagtacagcacttcctgctttacgggtagaagatttgaataagatgatt

SEQ ID NO: 78321 - DNA, 75 bp, synthetic construct
  source 1..75: mol_type = other DNA
cagcagcttgcccgtgacctgaaagcagagctggacaggcgggatgaggaaatccgacgtaccctgaccatgctg

SEQ ID NO: 78322 - DNA, 75 bp, synthetic construct
  source 1..75: mol_type = other DNA
ctataacagaatcaatgattatgagaaaagacgaatgtcactttgattcaaaaaaagaatcctttgttgcaagtg

SEQ ID NO: 78323 - DNA, 75 bp, synthetic construct
  source 1..75: mol_type = other DNA
taacccgaacgataaatcctttatttcaccgggtgctcttattgcgggtggcgtccgttataacaccgatggaaa

SEQ ID NO: 78324 - DNA, 75 bp, synthetic construct
  source 1..75: mol_type = other DNA
caccggcaaaacaatctaccgcgatatgacgcgcttctggggtaagctcttcggtatcaactttgctcttggcgt

SEQ ID NO: 78325 - DNA, 75 bp, synthetic construct
  source 1..75: mol_type = other DNA
ccgcaggtgtggcgacagtggtgatggcatttgttgcaataattgcgttgattaacggtattatcggcggtgttg

SEQ ID NO: 78326 - DNA, 75 bp, synthetic construct
  source 1..75: mol_type = other DNA
ctcaaatgacaacgctcagagtccctcacgatgtcatgcaaggcatggaatccgttaagctggacggcgagagca

SEQ ID NO: 78327 - DNA, 75 bp, synthetic construct
  source 1..75: mol_type = other DNA
gtgggtgaaggaactatgtcagcattgtcatggtaagggagaagtcagcacagcgtgcagagggtgtaagggtaa

SEQ ID NO: 78328 - DNA, 75 bp, synthetic construct
  source 1..75: mol_type = other DNA
gtacggggcaatttgttactgcggcattaaaacgagaagttgaatatcgccagcggcgcaaggccagtgaatccg

SEQ ID NO: 78329 - DNA, 75 bp, synthetic construct
  source 1..75: mol_type = other DNA
cacgtttgtttttaatccgcaactggtgaaaaaatgccagcaagtcggtcaccactataaagcagattccatcag

SEQ ID NO: 78330 - DNA, 75 bp, synthetic construct
  source 1..75: mol_type = other DNA
gtggtgggacctcccgggccaaagggggaacaggggcccgcgggtcctcaggggccgaagggtgataagggagag

SEQ ID NO: 78331 - DNA, 75 bp, synthetic construct
  source 1..75: mol_type = other DNA
accggaatggcctcaggctggcagcgttggagtgacctttgttcaggataacaaccctgatattttccccggcga

SEQ ID NO: 78332 - DNA, 75 bp, synthetic construct
  source 1..75: mol_type = other DNA
gagtcagtcccggaattgctgtcccgcctggtgtttcgtgtacagaatccaccatccggtggtacgcagtatgat

SEQ ID NO: 78333 - DNA, 75 bp, synthetic construct
  source 1..75: mol_type = other DNA
acctcacagttaactcagttttattatgaaagtctagcaaaagatgctttaaaattagcggctgacaatactaaa

SEQ ID NO: 78334 - DNA, 75 bp, synthetic construct
  source 1..75: mol_type = other DNA
cgtcagaaaaacaggttgatttgcagtcgtatctggaagcgaacacgccgaaagcgacgctggctgatcaggtga

SEQ ID NO: 78335 - DNA, 75 bp, synthetic construct
  source 1..75: mol_type = other DNA
tcgcagccgggcgtgaatgaaaccaccctgaatgccattgcgtatgcactggcgggtctgtcagcacaggagcat

SEQ ID NO: 78336 - DNA, 75 bp, synthetic construct
  source 1..75: mol_type = other DNA
gcaggttatcgcagacagcgtaatcagtgcgcgaacggcgcgaccgggcggcaaaaaaggtcaacagggccaggc

SEQ ID NO: 78337 - DNA, 75 bp, synthetic construct
  source 1..75: mol_type = other DNA
agcatgtattttcccgctgatagcaatgtttataaatgaaaaaatcaccattacctctgtaagacttgatttcgc

SEQ ID NO: 78338 - DNA, 75 bp, synthetic construct
  source 1..75: mol_type = other DNA
actattcagaaagaagcgattattaattctgatgtcatacttctgcagctcgaaacaaattataccgctctgcaa

SEQ ID NO: 78339 - DNA, 75 bp, synthetic construct
  source 1..75: mol_type = other DNA
ttatcaggaaagatttactgaccggggaaaagggaagcaggaaaaccagcacgtcccgaaaaggaagaaccgtac

SEQ ID NO: 78340 - DNA, 75 bp, synthetic construct
  source 1..75: mol_type = other DNA
gaatatagcgactttggcgttccggcgacgattctggcgcactatctgcgtgagaacggcattgtgccggagaag

SEQ ID NO: 78341 - DNA, 75 bp, synthetic construct
  source 1..75: mol_type = other DNA
tgaacgcctggcacgccagacgctgtatcgcgccaatcgcctgttcatggaggcatataccgaaattcttgaact

SEQ ID NO: 78342 - DNA, 75 bp, synthetic construct
  source 1..75: mol_type = other DNA
ctgaacgccggtgatacggccacggataccacggtaaatggcggactgttcaccgccaggggcggcacactggcg

SEQ ID NO: 78343 - DNA, 75 bp, synthetic construct
  source 1..75: mol_type = other DNA
catacgacagccgtggacagttaactgcggtgaaagacacgcagggccatgaaacgcggtatgaatacaacgccg

SEQ ID NO: 78344 - DNA, 75 bp, synthetic construct
  source 1..75: mol_type = other DNA
tatcgggcaaatgaccgccgatatagaaggactctgttttgttcgtgacggcgaacctgtcacgttagactggaa

SEQ ID NO: 78345 - DNA, 75 bp, synthetic construct
  source 1..75: mol_type = other DNA
aggcacaacaggctgaattactggagcgccagattaacgcggcaagggtaaaacattgcggtgcttctgcgatgg

SEQ ID NO: 78346 - DNA, 75 bp, synthetic construct
  source 1..75: mol_type = other DNA
agcctggcgcgcgttaactgggatgattttaccgaatcggtgcctgcgtttattaccacggtgatgatgcccttt

SEQ ID NO: 78347 - DNA, 75 bp, synthetic construct
  source 1..75: mol_type = other DNA
gcgcgtacgggcagctgtcgaagcagaaacactgaaaatgacccgtcaacaatggttccgtatccgtaaagcggc

SEQ ID NO: 78348 - DNA, 75 bp, synthetic construct
  source 1..75: mol_type = other DNA
aaagataacaatatcgggcaaatagaactactcaataagcagttgacggagagtgtcccatacatgccccataga

SEQ ID NO: 78349 - DNA, 75 bp, synthetic construct
  source 1..75: mol_type = other DNA
gtgaaatcacggcactgctggcggtggtgctgctgtttgtattacccggttttctcgaccgccagtatttaagtg

SEQ ID NO: 78350 - DNA, 75 bp, synthetic construct
  source 1..75: mol_type = other DNA
agactggcagatgatgtaaggctattgcgccaggaggaacaggaaagacggaaaaatatagaaaagttaattcag

SEQ ID NO: 78351 - DNA, 75 bp, synthetic construct
  source 1..75: mol_type = other DNA
agcaactgctgagtgcacaaatcacccgacagattgcactggaccgtatcatgattggctttaacggtgagtcgc

SEQ ID NO: 78352 - DNA, 75 bp, synthetic construct
  source 1..75: mol_type = other DNA
aaagccagatgatacttaccgaatatcagtttgaccataaaaccaataaatcacgttcagtatatttgcttcggc

SEQ ID NO: 78353 - DNA, 75 bp, synthetic construct
  source 1..75: mol_type = other DNA
ttttaaccggcttcgatgctccaacattgaacacgctattcgtcgataaaaacttgcgttttcacggcctgatgc

SEQ ID NO: 78354 - DNA, 75 bp, synthetic construct
  source 1..75: mol_type = other DNA
tgaatggggcaaccagcttaatgaggagaacccgcatcacctgcaccagccgtaccggctgccggggcagcagta

SEQ ID NO: 78355 - DNA, 75 bp, synthetic construct
  source 1..75: mol_type = other DNA
ttaattccggatgaacatgagtggatattcagaaaacagaaatctttgtatatgcgccgggaaatggcgcgttaa

SEQ ID NO: 78356 - DNA, 75 bp, synthetic construct
  source 1..75: mol_type = other DNA
cattggtgagttaaactgcctgttcgaacatattgaccaccaggagtaccgcaaaattctcgcggacactgagca

SEQ ID NO: 78357 - DNA, 75 bp, synthetic construct
  source 1..75: mol_type = other DNA
cgcaggtggacgttaatatcgccgccttccgctcacaaaaggcctatatctccggtcaggtgaataaatccggtc

SEQ ID NO: 78358 - DNA, 75 bp, synthetic construct
  source 1..75: mol_type = other DNA
ttgccattccgatgtttgctgcttttgtggcgaactctatcggtggcaaactggcgttcccggctggttttatcg

SEQ ID NO: 78359 - DNA, 75 bp, synthetic construct
  source 1..75: mol_type = other DNA
gaacggctcgatcaccaggaataccgacaaattctggcagaaacagaacaggaaactcatctgaaaaaattacgg

SEQ ID NO: 78360 - DNA, 75 bp, synthetic construct
  source 1..75: mol_type = other DNA
gtcattcagctatgcaggagacaggaatcgccagcttacccgttacagcgatacccgctggcatgaagattccgt

SEQ ID NO: 78361 - DNA, 75 bp, synthetic construct
  source 1..75: mol_type = other DNA
gaataccgacaaattctggcagaaacagagcaggaagctcatctgaaaaaattacgggccatgaaaaggaagtaa

SEQ ID NO: 78362 - DNA, 75 bp, synthetic construct
  source 1..75: mol_type = other DNA
aaacggcggaactgaaagcggcagagatgtgtgaaaccatctcaatgaaaggtagcccggttaaatacgtaacta

SEQ ID NO: 78363 - DNA, 75 bp, synthetic construct
  source 1..75: mol_type = other DNA
gcaacagttgtggatggaaacgacacccggttggttaaacagcctgcaactgaagagatttagcgccagccgcaa

SEQ ID NO: 78364 - DNA, 75 bp, synthetic construct
  source 1..75: mol_type = other DNA
agacaaaaattagacatcgaaatgagatcaataaaacgcttgctcagttacctctttctgcaaagagggttttgt

SEQ ID NO: 78365 - DNA, 75 bp, synthetic construct
  source 1..75: mol_type = other DNA
acttaaccttgcctccagtgatgtggcggccgtagctggtcttgtaatgacggtgctgaccgttggtctggtgtc

SEQ ID NO: 78366 - DNA, 75 bp, synthetic construct
  source 1..75: mol_type = other DNA
cggtgctgaccgttggtctggtgtcgtgtgcaggaaaatcattaccccgtttctggcccggagattttttcccga

SEQ ID NO: 78367 - DNA, 75 bp, synthetic construct
  source 1..75: mol_type = other DNA
aatgctattttcaacaacgttatcacactggcgtcagttccaatatactacgagaagaattagatacaataaagc

SEQ ID NO: 78368 - DNA, 75 bp, synthetic construct
  source 1..75: mol_type = other DNA
gctactgacgcgctgaacagggcaaaacaacaggcggggaatgatgatccgtacggggataacataccgttttaa

SEQ ID NO: 78369 - DNA, 75 bp, synthetic construct
  source 1..75: mol_type = other DNA
ctggggcttgatgacagtgctctggacacagaattttccattggtggtactgaactgctgctgtttaaacagatg

SEQ ID NO: 78370 - DNA, 75 bp, synthetic construct
  source 1..75: mol_type = other DNA
atctgaacctgtttaacgacgggaacaactggcagggaatcgttgagtcgctgacgctgccgaaattcacccgca

SEQ ID NO: 78371 - DNA, 75 bp, synthetic construct
  source 1..75: mol_type = other DNA
gatgcacagatggagcgtaaagagtctgcgtttaaccagacagagtttaataaacttcttcttgaatgtgttgta

SEQ ID NO: 78372 - DNA, 75 bp, synthetic construct
  source 1..75: mol_type = other DNA
gcagactgacggagaagacggaccgcatcccggcgggtgtgatacggacggacgacgagcggacccaccactacc

SEQ ID NO: 78373 - DNA, 75 bp, synthetic construct
  source 1..75: mol_type = other DNA
ccgttacgctcaacgggcaaaattacaccaccactgccgatgcatccggtaactggagcgtgaccgttccggcgt

SEQ ID NO: 78374 - DNA, 75 bp, synthetic construct
  source 1..75: mol_type = other DNA
agtcccaccctacccgcatgcttcgccacaagacgctgatccagtgcgcgcgtctggcctttggtttcgctggca

SEQ ID NO: 78375 - DNA, 75 bp, synthetic construct
  source 1..75: mol_type = other DNA
ccggcgatttagctaacctcactgccagcccctatacggtgagcgcctcggtcagcgacaaagccggaaatccgg

SEQ ID NO: 78376 - DNA, 75 bp, synthetic construct
  source 1..75: mol_type = other DNA
gggcgatgtgaccattaccgccacggtcaccgactccgcaggcaacagcggcacggcctcgcacactgtcaccgt

SEQ ID NO: 78377 - DNA, 75 bp, synthetic construct
  source 1..75: mol_type = other DNA
aaaatcaccgacagacagaatcaaaaatgtgaaccgccccgggtttcctggagagtgttttatctgtgaactcag

SEQ ID NO: 78378 - DNA, 75 bp, synthetic construct
  source 1..75: mol_type = other DNA
atgttaactggggcttttctctatctgccgttggtgttcatgcccgaggcagatagcctcaagcacccgcagcca

SEQ ID NO: 78379 - DNA, 75 bp, synthetic construct
  source 1..75: mol_type = other DNA
atggccagaaaacgcaaatccagaaataacaaaaatatcggacatggggcaatcagtcgcattggtagaccgcat

SEQ ID NO: 78380 - DNA, 75 bp, synthetic construct
  source 1..75: mol_type = other DNA
catctcaacagattgcttttcaacactattgtcaaagtctggagcagattgaagatcgcatacttcaactcgacc

SEQ ID NO: 78381 - DNA, 75 bp, synthetic construct
  source 1..75: mol_type = other DNA
atcgtgaagccgggagaagtccacgccgtaaggccgcacccgttgccgtcagggcagcaaattatgtggatgtaa

SEQ ID NO: 78382 - DNA, 75 bp, synthetic construct
  source 1..75: mol_type = other DNA
ttcatccggcacacgctaaacgcattgaggaaattatcgctgaaaataaactgcccttttctgttttccgcgaca

SEQ ID NO: 78383 - DNA, 75 bp, synthetic construct
  source 1..75: mol_type = other DNA
tggcatctatgacaaggatgaagccgagcgtattgtcgaaaatactgcatatactacagaacgtcagccggaacg

SEQ ID NO: 78384 - DNA, 75 bp, synthetic construct
  source 1..75: mol_type = other DNA
agagcatgcaactcgtgctgaccatatagattctgatagatatctaataaaatcaatttattataatttatttag

SEQ ID NO: 78385 - DNA, 75 bp, synthetic construct
  source 1..75: mol_type = other DNA
tcttccggttgctgaagcggcaatatgaaaaagcgagaatcgttctgacgtcaaataaaggattcgccaactggg

SEQ ID NO: 78386 - DNA, 75 bp, synthetic construct
  source 1..75: mol_type = other DNA
ttgcaatgctggcagcatcatcgtgtggatacgcagccacaaaagaagtcccgatgaaccttgtgaatgctgatg

SEQ ID NO: 78387 - DNA, 75 bp, synthetic construct
  source 1..75: mol_type = other DNA
ccggtaacgcacgtttcacgcgacgaactccaggcattacacattgcacgggctgaggaactaccagctgttact

SEQ ID NO: 78388 - DNA, 75 bp, synthetic construct
  source 1..75: mol_type = other DNA
ccacgtacagcaacctgcgctgtttacagccatgctgacacagtttcgtgctgacctctccgtgtttaacgcgca

SEQ ID NO: 78389 - DNA, 75 bp, synthetic construct
  source 1..75: mol_type = other DNA
gtggggcgggttgttgtactggctggctgcattagtgacgctgctatgggcggccagccaaatccaggcgctgaa

SEQ ID NO: 78390 - DNA, 75 bp, synthetic construct
  source 1..75: mol_type = other DNA
ctcaacatgatgaatcaggacggcgtgcgtaacggttacgacctcgaacaactgaaaaaagtgcgtgaagtttgc

SEQ ID NO: 78391 - DNA, 75 bp, synthetic construct
  source 1..75: mol_type = other DNA
atgaatgagtttaagcgttttgaagaccggctggccggactgactgaatcgctgtcaccgtcagggcgtcggcgg

SEQ ID NO: 78392 - DNA, 75 bp, synthetic construct
  source 1..75: mol_type = other DNA
gagtggatgaagggtaatcgtgtttcacgcatcactcgcacggcttccggtgctaatgctggcggcgggaacctc

SEQ ID NO: 78393 - DNA, 75 bp, synthetic construct
  source 1..75: mol_type = other DNA
gtaaggctggcggcggcaactgtcctgactgtggcgcggtgatgggcgacgcaacgtatcagaaaacctttaatg

SEQ ID NO: 78394 - DNA, 75 bp, synthetic construct
  source 1..75: mol_type = other DNA
accattaaacatggcggactggtaaccggaaccatcgtcaacaccggtgcagaaggtggtccggattctgaaaat

SEQ ID NO: 78395 - DNA, 75 bp, synthetic construct
  source 1..75: mol_type = other DNA
aaaaacctgttcgcgtcaacttgcccgttgttgatgaccttccaccagaaggcgtatttgatacggaattctgca

SEQ ID NO: 78396 - DNA, 75 bp, synthetic construct
  source 1..75: mol_type = other DNA
ccctgcggcgtctgcggattctgcctgtgaggggcgttttgtaaacccgatcacggatatctgctggagctgtat

SEQ ID NO: 78397 - DNA, 75 bp, synthetic construct
  source 1..75: mol_type = other DNA
tgctctatttgaaggggtttctggaataacaacaacaggagcaactgtaattgatgatgttagttcattacctcg

SEQ ID NO: 78398 - DNA, 75 bp, synthetic construct
  source 1..75: mol_type = other DNA
ccgttgcaagcacatgcgcagcgggttgccatcgcttcaaccggaattattcgcgacggcagcttattggcgcta

SEQ ID NO: 78399 - DNA, 75 bp, synthetic construct
  source 1..75: mol_type = other DNA
ctgctggcggagtcattgatcgggacaccattaaatggtggcttaagcaatcacgcgaagcgcaatctgccatta

SEQ ID NO: 78400 - DNA, 75 bp, synthetic construct
  source 1..75: mol_type = other DNA
acaaacttgcggggttgattgcggcaatatcaccggcgggtcggcgtaagctggccgctgaaatagcaaagcaac

SEQ ID NO: 78401 - DNA, 75 bp, synthetic construct
  source 1..75: mol_type = other DNA
gactgcgatgaacaaagtgactctcagacagagaacgcagataaaagcgaatccccggacagcaacgatgactgc

SEQ ID NO: 78402 - DNA, 75 bp, synthetic construct
  source 1..75: mol_type = other DNA
cgatcttcacagactggttcgtgatactgacaaagttttccctaatccaggcaattcaagtctggggctgatgac

SEQ ID NO: 78403 - DNA, 75 bp, synthetic construct
  source 1..75: mol_type = other DNA
gtcgacaggaatatcgccggacgctacgccagataaacgaagccctagagacaaacaactggccagcaccgatta

SEQ ID NO: 78404 - DNA, 75 bp, synthetic construct
  source 1..75: mol_type = other DNA
cccccaaaaatcctgtcgatgcagataaattactggctgcttctcacggagaatttgttgaagggattagcgacc

SEQ ID NO: 78405 - DNA, 75 bp, synthetic construct
  source 1..75: mol_type = other DNA
ccgtatcagcccggcagaattcgacaagttcatttccacctggatgaagactgactaccttgatcaggggctgtt

SEQ ID NO: 78406 - DNA, 75 bp, synthetic construct
  source 1..75: mol_type = other DNA
gtcctcagtgaggttatttatgaatggcaacagtcagatatgtcagggaaaatgtttctggtccggctatatctg

SEQ ID NO: 78407 - DNA, 75 bp, synthetic construct
  source 1..75: mol_type = other DNA
tattaatttttacttcattattcatggtggtggtttcatgtaatgcacttgctaacgataccgtcgtggtcacat

SEQ ID NO: 78408 - DNA, 75 bp, synthetic construct
  source 1..75: mol_type = other DNA
aatggtctttgcggcacactatccgctatgataggtccagataaatttgattctatagatagcaccgcatatgac

SEQ ID NO: 78409 - DNA, 75 bp, synthetic construct
  source 1..75: mol_type = other DNA
cgcaggttagcgcctggcctgcggggacggtgacggttgccgtgtccggggaaagtagcgccggaaatccggtga

SEQ ID NO: 78410 - DNA, 75 bp, synthetic construct
  source 1..75: mol_type = other DNA
atgcatttgcattactttgctgaagcttataatttgagcagaaaacaggctgtaaaagtacagtgcctaatgccc

SEQ ID NO: 78411 - DNA, 75 bp, synthetic construct
  source 1..75: mol_type = other DNA
cggttcgggcttaggctccagcgcctgttcagtggtcgcggcgctgatggcgatgaatgaacactgcggcaagcc

SEQ ID NO: 78412 - DNA, 75 bp, synthetic construct
  source 1..75: mol_type = other DNA
catcaatgtcgcgtaaaggtaactgttacgacaacgctccgatggaaagcttctggggaacgctgaaaaatgaga

SEQ ID NO: 78413 - DNA, 75 bp, synthetic construct
  source 1..75: mol_type = other DNA
taatcagttaaaacgcatcaatgcggatgcaccgggcaatacgggcctgcaaaacaatctggcgctattgctgtt

SEQ ID NO: 78414 - DNA, 75 bp, synthetic construct
  source 1..75: mol_type = other DNA
atgtactggtgaccaaacagtcgggcagcgtgttcctgatccgcaacaccaacacggtgagctacggcacttcgc

SEQ ID NO: 78415 - DNA, 75 bp, synthetic construct
  source 1..75: mol_type = other DNA
aaacgcacctacagcgaaccgcactgggaacgggcgcagggcgcggtgatggcaacggaaaaagtcaccgtttac

SEQ ID NO: 78416 - DNA, 75 bp, synthetic construct
  source 1..75: mol_type = other DNA
acaacaggccattttccaggagatggcgaaagagattgaccatgcggcagggaaagtcctgctgcgtgaagcggc

SEQ ID NO: 78417 - DNA, 75 bp, synthetic construct
  source 1..75: mol_type = other DNA
atgaagaaattgctccccattcttatcggcctgagcctttctgggttcagttcgttgagccaggccgagaacctg

SEQ ID NO: 78418 - DNA, 75 bp, synthetic construct
  source 1..75: mol_type = other DNA
attatccaggacataccgggttatctcttcaccggagccctgacctgggacggcgacatcatcacggtttacccc

SEQ ID NO: 78419 - DNA, 75 bp, synthetic construct
  source 1..75: mol_type = other DNA
caaagaaacaactttgcttatggcaggcacaaagagagcgcatgaatgagcgtgagtttctttcctccccatccg

SEQ ID NO: 78420 - DNA, 75 bp, synthetic construct
  source 1..75: mol_type = other DNA
tactggcgtaaagcgggagataaatcaaagaaacaactttgcttatggcaggcacaaagagagcgcatgaatgag

SEQ ID NO: 78421 - DNA, 75 bp, synthetic construct
  source 1..75: mol_type = other DNA
tgacgacgtactgttcaagttttcgctcaacctgccggatgaacaaatcccgttagtgatcgacaaactgcacat

SEQ ID NO: 78422 - DNA, 75 bp, synthetic construct
  source 1..75: mol_type = other DNA
cgattgattacttcaatgttcaggacaagatggctggtcgtgaaattgaccgaggcagactggcagagacaatcc

SEQ ID NO: 78423 - DNA, 75 bp, synthetic construct
  source 1..75: mol_type = other DNA
atgctcaaagaattaaacttcgtaatgaattacgtgttcactcttgagacttggtattcatttttcgtcttgcga

SEQ ID NO: 78424 - DNA, 75 bp, synthetic construct
  source 1..75: mol_type = other DNA
gtgattaacagcatcgagcacactcaggcgttggtgatcaccggtagcagtagcggactggcggcgggcgcggcg

SEQ ID NO: 78425 - DNA, 75 bp, synthetic construct
  source 1..75: mol_type = other DNA
aaaatattccatttgctgcagatatttatgatgagcaaggcaatgtcattggtaatgttggacagggtggacaag

SEQ ID NO: 78426 - DNA, 75 bp, synthetic construct
  source 1..75: mol_type = other DNA
gtttgggctatatcatcaactcacagtgatgaatataaaatgcctggttattgcccccttcccgtatacccaaat

SEQ ID NO: 78427 - DNA, 75 bp, synthetic construct
  source 1..75: mol_type = other DNA
tccgctacagcgcacaaatccgcccttcttccgtggtgaccaaggactacacctttaaacgacccggctgggcag

SEQ ID NO: 78428 - DNA, 75 bp, synthetic construct
  source 1..75: mol_type = other DNA
aagaagcggcaaacgccgtcagtgaagaactgcgcgggcaggatggcatcagcgaagagctggagcagcgtatcc

SEQ ID NO: 78429 - DNA, 75 bp, synthetic construct
  source 1..75: mol_type = other DNA
aacattcgatgacaagaacctggttgaagttcaggaagacgattcggagaaaatggaaggcgctgaacatccaca

SEQ ID NO: 78430 - DNA, 75 bp, synthetic construct
  source 1..75: mol_type = other DNA
atgattggtgccattggccttgtatcgtggccggtaattactggcattaacgccatcatttcggcggctggtgcg

SEQ ID NO: 78431 - DNA, 75 bp, synthetic construct
  source 1..75: mol_type = other DNA
gattaaacgctgccgccaccaacctcgatgttattggcaacaatatcgccaactccgccacctacggctttaaat

SEQ ID NO: 78432 - DNA, 75 bp, synthetic construct
  source 1..75: mol_type = other DNA
ggatgaaaaacttcccgccgttaccgcgctggccatctcaaataaagcagcgcaactcgaaccgctggaaattcg

SEQ ID NO: 78433 - DNA, 75 bp, synthetic construct
  source 1..75: mol_type = other DNA
aaagcgggtaacccggcaagcgcggatcatgcgctggcggtggacgttaccgcaccggatctcaccattaatacc

SEQ ID NO: 78434 - DNA, 75 bp, synthetic construct
  source 1..75: mol_type = other DNA
acagcattgagcacactcaggcgctggtggtcaccggtagcagcactgggctggtagcgggggcggcgttgacgg

SEQ ID NO: 78435 - DNA, 75 bp, synthetic construct
  source 1..75: mol_type = other DNA
atgttcacggcaacagaggcagtcccggtagcaaaagtggtggcaggaaataagcgttaccccggcgtcgttgcg

SEQ ID NO: 78436 - DNA, 75 bp, synthetic construct
  source 1..75: mol_type = other DNA
gcaattagcagaaaaaagctcccggtaacaaaaaaatcaatccttgcctattcaacaggaatttttgagccattt

SEQ ID NO: 78437 - DNA, 75 bp, synthetic construct
  source 1..75: mol_type = other DNA
ttcgtgacggcggggggcagagcctgaacggactggcggtgaacaccacgctgattaacagaggcgagcagtggg

SEQ ID NO: 78438 - DNA, 75 bp, synthetic construct
  source 1..75: mol_type = other DNA
ccagtcataatgtgctggtcaacagcgccttgcctgccgtcaccattaacgcggtggcgactgacgatattatca

SEQ ID NO: 78439 - DNA, 75 bp, synthetic construct
  source 1..75: mol_type = other DNA
gcttttaccaccatactgctggtcacatcgtcagatagcccgtaagctgaagatcagtgcctcagttgtatcaaa

SEQ ID NO: 78440 - DNA, 75 bp, synthetic construct
  source 1..75: mol_type = other DNA
tgccatatatgggcgtgaagatgggatttactggcgatctgattcaatttattagctttggcgtattgcgtggca

SEQ ID NO: 78441 - DNA, 75 bp, synthetic construct
  source 1..75: mol_type = other DNA
gcgcgaactggatgaaaaaatcccgctgcgccacggcgttgttggtcaggaaacttgcggacccggcggaatagc

SEQ ID NO: 78442 - DNA, 75 bp, synthetic construct
  source 1..75: mol_type = other DNA
cgatatggcggttgccggctgcgtggtgctgcgtcgcctgagagacgcgctgctgtcaggcgatccgattatctc

SEQ ID NO: 78443 - DNA, 75 bp, synthetic construct
  source 1..75: mol_type = other DNA
atgagtaatatttgtgtttcttctcaggaagaaaagtttatatttgttgttgataaatatataacacaccatcgc

SEQ ID NO: 78444 - DNA, 75 bp, synthetic construct
  source 1..75: mol_type = other DNA
aatggcggggacgggaagccgtgccgtgttaagccgcctgcaggcaccgacgggaaaagcatgggatgcactcaa

SEQ ID NO: 78445 - DNA, 75 bp, synthetic construct
  source 1..75: mol_type = other DNA
aaataatgcacagcaaaaatcccggcttttactggatcttaaggctcaggatacaaatgtcagtgttccgattgg

SEQ ID NO: 78446 - DNA, 75 bp, synthetic construct
  source 1..75: mol_type = other DNA
taccagcatcagggctggattgttcgtcagattttcccggataccgctgatgctgagtatctctaccttcacgcg

SEQ ID NO: 78447 - DNA, 75 bp, synthetic construct
  source 1..75: mol_type = other DNA
gctgaccgccgcctgcctgctgccggacaccggggcgcgtaatatcgacagcctgctgaaccagcaaatcctgcc

SEQ ID NO: 78448 - DNA, 75 bp, synthetic construct
  source 1..75: mol_type = other DNA
gcgtaaagtctggcgtcagttgttacgggaaggtatcagagtggccagatgtacagtggcgcgcctcatggcagt

SEQ ID NO: 78449 - DNA, 75 bp, synthetic construct
  source 1..75: mol_type = other DNA
cacctttaccggacagcccaacacgacagcagcagcagggttagtttttaagcgtgacagccaggcatggacaac

SEQ ID NO: 78450 - DNA, 75 bp, synthetic construct
  source 1..75: mol_type = other DNA
tcaccgctgcgcagccgctatgagcagctggcagaggccatccgcgcaagaatggatggccatttcgataaagtg

SEQ ID NO: 78451 - DNA, 75 bp, synthetic construct
  source 1..75: mol_type = other DNA
gctgcatgggcctgtagtgactgccataatgaaatcgatcgccgtactcgcattctcgacaacaacgacgccaga

SEQ ID NO: 78452 - DNA, 75 bp, synthetic construct
  source 1..75: mol_type = other DNA
atggctaacctacgcaaagaagcgcgaggcagagcatgccaggtacgtatttacggcatatgcaatggcaaccct

SEQ ID NO: 78453 - DNA, 75 bp, synthetic construct
  source 1..75: mol_type = other DNA
gcgattatcggtggagggatgaaggctatacgaggcgtaggattaattaccctgatgtgcggtgtcagcacattg

SEQ ID NO: 78454 - DNA, 75 bp, synthetic construct
  source 1..75: mol_type = other DNA
cctgggccggtaatggtctcggctgcgtggttctgcgtcgcctgaaagacgcgctactgtcaggcgatccgatta

SEQ ID NO: 78455 - DNA, 75 bp, synthetic construct
  source 1..75: mol_type = other DNA
taaaaggcgcggcatcccaactggcttcggtgctgcatttcacgttggctgacggcaaaacgatggcactgaaag

SEQ ID NO: 78456 - DNA, 75 bp, synthetic construct
  source 1..75: mol_type = other DNA
tgatgcccggttatgagtttgcgcagaaaaactcagaattacaggctgtgctcggtgtggcaaaagactccgccg

SEQ ID NO: 78457 - DNA, 75 bp, synthetic construct
  source 1..75: mol_type = other DNA
aggcgaccaaagcgctggatattctgcgcgatattctcgccagcattagcgaagataagcgtattcaggtgctgc

SEQ ID NO: 78458 - DNA, 75 bp, synthetic construct
  source 1..75: mol_type = other DNA
gtacaaaatttgaaagccgcgataggctatggtgcactgaagggactatggccgatcgtaattgttatcctcggc

SEQ ID NO: 78459 - DNA, 75 bp, synthetic construct
  source 1..75: mol_type = other DNA
tgctgcgtcgccttaacccgtactgtgcacgggcgctggacgctgccgcctcactgtgtcagacccgcgcccatg

SEQ ID NO: 78460 - DNA, 75 bp, synthetic construct
  source 1..75: mol_type = other DNA
acccatgagcagattgttgaactgctggatgattgcaaacgtcaggacccaattctggcactggtagtcaagata

SEQ ID NO: 78461 - DNA, 75 bp, synthetic construct
  source 1..75: mol_type = other DNA
tgcgacagccttgctccctaccggctgattttcagttccggtgagtggtttctggcaggagaacacctcggcagg

SEQ ID NO: 78462 - DNA, 75 bp, synthetic construct
  source 1..75: mol_type = other DNA
tggagaacatgcgaaaattcaccatcgcagaaaaagagatggcatggcttacccatgagcagattgttgaattgc

SEQ ID NO: 78463 - DNA, 75 bp, synthetic construct
  source 1..75: mol_type = other DNA
cctggcagtgtctgccggtggtaaggcaacagatgtcaccatgacatccggtagtgccctgattgcagacagtgg

SEQ ID NO: 78464 - DNA, 75 bp, synthetic construct
  source 1..75: mol_type = other DNA
acccatgagcagattgttgaattactggctgattgcaaacgtcaggagccaattctggcactggtagttaagata

SEQ ID NO: 78465 - DNA, 75 bp, synthetic construct
  source 1..75: mol_type = other DNA
acggcgcatgtaaaattccaaccgtggcaggatgataagtggagcagggtattgccacatttgcgtcaggctaga

SEQ ID NO: 78466 - DNA, 75 bp, synthetic construct
  source 1..75: mol_type = other DNA
atgactgtaagtaagcaaaaaaatggcaaatggttatgcgagctctatccaaatggtcgagaagggcggcgtata

SEQ ID NO: 78467 - DNA, 75 bp, synthetic construct
  source 1..75: mol_type = other DNA
caggtggtgaaggatggtgcagtggctgagaataccaccgttaatcacaagggcaaactgcaggtgaatgccggt

SEQ ID NO: 78468 - DNA, 75 bp, synthetic construct
  source 1..75: mol_type = other DNA
tttcgtgtgactgattatcgtgggggaaataatggtgcccgcatcaggttacagcccgaaattaactgggaagtt

SEQ ID NO: 78469 - DNA, 75 bp, synthetic construct
  source 1..75: mol_type = other DNA
ctggcagacaaccagcaggttaatccggacaatatatcctggggctaccggggggggttctggatgttaacggga

SEQ ID NO: 78470 - DNA, 75 bp, synthetic construct
  source 1..75: mol_type = other DNA
ataatatgcgtttgggactggagctggagaaatcagcgttcgggaaatataatgtggataatgcgataaacgcca

SEQ ID NO: 78471 - DNA, 75 bp, synthetic construct
  source 1..75: mol_type = other DNA
attctgctaggggcgtgtttactgaaacaccgggagttcttgataatcagttcttcattaacttactggatatgt

SEQ ID NO: 78472 - DNA, 75 bp, synthetic construct
  source 1..75: mol_type = other DNA
taccatccttccttttgtggaagtcgagtcgctgagtgttaatggtgcaaaattcagggcggcagatggttttcc

SEQ ID NO: 78473 - DNA, 75 bp, synthetic construct
  source 1..75: mol_type = other DNA
aaagcagcaaatatagttcaggacgcgcatgatccgtctgtcctgcatccgttgatgatgtttacgacggatatt

SEQ ID NO: 78474 - DNA, 75 bp, synthetic construct
  source 1..75: mol_type = other DNA
ataaaaaaataacaacccgctttttgaatgatccaaaagcttttgagcaggcgtttgctagagcatggtttaaac

SEQ ID NO: 78475 - DNA, 75 bp, synthetic construct
  source 1..75: mol_type = other DNA
gttccaactccgccgataatattgcgggtgtttattacagacccgttcaaaagtatataaatggcacatggtata

SEQ ID NO: 78476 - DNA, 75 bp, synthetic construct
  source 1..75: mol_type = other DNA
gatcacgccgacattattaaagctgtttgatgtcaccgcggacaaagtcaaagaccgcaccgcattcatccgctg

SEQ ID NO: 78477 - DNA, 75 bp, synthetic construct
  source 1..75: mol_type = other DNA
atgaatatattacgcgaaaagttaagggagtaacgcagaccaacgcaattacaacagacgattgcgacgcgtttt

SEQ ID NO: 78478 - DNA, 75 bp, synthetic construct
  source 1..75: mol_type = other DNA
gccagaatgacgttatccctcatggtgcaacccggtctttttgaccgatatatggagcgaaaaggttctgttgcc

SEQ ID NO: 78479 - DNA, 75 bp, synthetic construct
  source 1..75: mol_type = other DNA
cctgggcgaccctatcgcctcagagctgaccgccggagattttacgaaataccgtgaagcgcgattaaaaggtga

SEQ ID NO: 78480 - DNA, 75 bp, synthetic construct
  source 1..75: mol_type = other DNA
tggcgtgtgcgcagtggatctgggggcggatcgtgggtctctacgaacaggccgccagtgatgatggcgagatca

SEQ ID NO: 78481 - DNA, 75 bp, synthetic construct
  source 1..75: mol_type = other DNA
ttgacagcaggtgatttcacaaagtaccgggaagccagattaaaaggtgagatcaaaaacgaagatggcgtgctc

SEQ ID NO: 78482 - DNA, 75 bp, synthetic construct
  source 1..75: mol_type = other DNA
atgcggatgctggatggcagaagccacagacaaatttgcgaaatgtttggtcgggtacagcgggatccattctgg

SEQ ID NO: 78483 - DNA, 75 bp, synthetic construct
  source 1..75: mol_type = other DNA
attatcgacatcgatccgatggcaatgtcactgcttaccgcctggtcatggccgggaaatattcgagagctttcc

SEQ ID NO: 78484 - DNA, 75 bp, synthetic construct
  source 1..75: mol_type = other DNA
cgacccgacatggacggacagcagcctgaccactattctcaacccggaggcggtcatttttgccaacccgatagc

SEQ ID NO: 78485 - DNA, 75 bp, synthetic construct
  source 1..75: mol_type = other DNA
gaacgcccccgcgccgaacatcaccgttaaaaatcctgtgaacggacacgctcacctgctctacgcactcaacat

SEQ ID NO: 78486 - DNA, 75 bp, synthetic construct
  source 1..75: mol_type = other DNA
ataataatgccagaaatggagcagacagactggtcagcggaacagaaatccagacgaaatattgttcaactgcag

SEQ ID NO: 78487 - DNA, 75 bp, synthetic construct
  source 1..75: mol_type = other DNA
ctggcccgtgttatcgatcagaatgctctggagatcattttcgccgccggtatacaacaacgggccgcgaccaat

SEQ ID NO: 78488 - DNA, 75 bp, synthetic construct
  source 1..75: mol_type = other DNA
caaacgatgaccacgctggcccacgagatcaatcagccgctaaatgcgctgtcgatgtatctgtttacagcccgc

SEQ ID NO: 78489 - DNA, 75 bp, synthetic construct
  source 1..75: mol_type = other DNA
tccaggtagtacagctaaaatgaccttcggttctgttttctttggtaatagcaaaggaacgctgaacaacgacat

SEQ ID NO: 78490 - DNA, 75 bp, synthetic construct
  source 1..75: mol_type = other DNA
cttcgtatctccggcaaagggcgtgcgctgcttgctcgctacatccagcagaatcagcctcatgcgcagttctgg

SEQ ID NO: 78491 - DNA, 75 bp, synthetic construct
  source 1..75: mol_type = other DNA
aagaaaatttacctcaccgtccctatcacacggatgatctcgctttcggtcttcgtatctccggcaaagggcgtg

SEQ ID NO: 78492 - DNA, 75 bp, synthetic construct
  source 1..75: mol_type = other DNA
ataaaacggattcggcagcactgctgccctgcattgaacagggaggatatccataccctgcgccaactgcagctt

SEQ ID NO: 78493 - DNA, 75 bp, synthetic construct
  source 1..75: mol_type = other DNA
tttacgcgaggctcttgctgtcagagcatcaaaaaatggtcgctctgttaactccgagatcgtcatgattttgca

SEQ ID NO: 78494 - DNA, 75 bp, synthetic construct
  source 1..75: mol_type = other DNA
aactcaacctgcacggcccggcgttatcggtacagaccgcctgctccagctcgctggttgccgtgcatctggcct

SEQ ID NO: 78495 - DNA, 75 bp, synthetic construct
  source 1..75: mol_type = other DNA
gcagcatccgttgctgcccgcgcttgagcacatagacgcccaggcacaacgaggagccgatacgctgcgcaatct

SEQ ID NO: 78496 - DNA, 75 bp, synthetic construct
  source 1..75: mol_type = other DNA
gaaaaatttccgctgaaagaattaaataatccagagcatgacagttacgcaattagtgaaaagagtcacggcaga

SEQ ID NO: 78497 - DNA, 75 bp, synthetic construct
  source 1..75: mol_type = other DNA
gaagattctttcgtatttaaagactgaaaatgacatacctttagagagggttcataagcttataaaaacagtttt

SEQ ID NO: 78498 - DNA, 75 bp, synthetic construct
  source 1..75: mol_type = other DNA
gatgcgctgacctatgccgcacctgtggcaaaaaatgccggtgtcagcattgaagaaaccgccgcaatggtcggg

SEQ ID NO: 78499 - DNA, 75 bp, synthetic construct
  source 1..75: mol_type = other DNA
aacaggtggcggctattgaagtacagctgcgcgagcaacttgcccccgcccgtgatgccgaaatggttgccgatg

SEQ ID NO: 78500 - DNA, 75 bp, synthetic construct
  source 1..75: mol_type = other DNA
gtgatgccggtgcctgggcgcgcatcatgagtggtgccggttctgcagacggtggttacagtgataattacaccc

SEQ ID NO: 78501 - DNA, 75 bp, synthetic construct
  source 1..75: mol_type = other DNA
atgcagaaacgagaacccgtcatcatcgcgccagactataccgatgatgaactttatgagtggatacaccagaaa

SEQ ID NO: 78502 - DNA, 75 bp, synthetic construct
  source 1..75: mol_type = other DNA
atgcagtatcgtgatgacggttatttgccagaagcactgctgaactatctggtgcgtctgggctggtcccacggc

SEQ ID NO: 78503 - DNA, 75 bp, synthetic construct
  source 1..75: mol_type = other DNA
gcggacattaccatcacagtaaaaatgagaagtttttggtcattcgaggtcaggcatgctttaaatttgaacatg

SEQ ID NO: 78504 - DNA, 75 bp, synthetic construct
  source 1..75: mol_type = other DNA
cggctactggatttgcccctatatttccagacacctgttatcacttaacccattactggcttgctgccgtagata

SEQ ID NO: 78505 - DNA, 75 bp, synthetic construct
  source 1..75: mol_type = other DNA
gcaagagcaactggtatttcaaatggcctgccgtgcttttgaggttattcgcggttctgatgtgatggacgccgt

SEQ ID NO: 78506 - DNA, 75 bp, synthetic construct
  source 1..75: mol_type = other DNA
ttatggtggcatggtcaaacagactgtagcagcgcgagttgacgtgcgaacgggtgagatcgattcaatactcga

SEQ ID NO: 78507 - DNA, 75 bp, synthetic construct
  source 1..75: mol_type = other DNA
tcgcgccagactataccgatgatgaactttatgagtggatgcgccagaaaattaatgcagcgcaggatttgaaat

SEQ ID NO: 78508 - DNA, 75 bp, synthetic construct
  source 1..75: mol_type = other DNA
gacattaaaacttgcgaagaaagcgttgggggagtggcaggaaaaccagattaagattgaaagaaaagcgcttgc

SEQ ID NO: 78509 - DNA, 75 bp, synthetic construct
  source 1..75: mol_type = other DNA
ggtggaaaaatcaggaagtggcacactcactgtcagcaacaccacactcacccagaaaaccgtcaacctgaatga

SEQ ID NO: 78510 - DNA, 75 bp, synthetic construct
  source 1..75: mol_type = other DNA
tgtttccggtgaggatgcacaaggcaatgcggttcaaaaggctgttggcttcgagtacaaacctcgtcaggtaat

SEQ ID NO: 78511 - DNA, 75 bp, synthetic construct
  source 1..75: mol_type = other DNA
atgagcgaaactaagaaaccaattccgcgcacttacctacacgttgaccctgaaatcttcaaggttttatttgct

SEQ ID NO: 78512 - DNA, 75 bp, synthetic construct
  source 1..75: mol_type = other DNA
atacccgcgtggatgatggcggaacgctggatgtccgcaacggtggcaccgccaccaccgtatccatgggaaatg

SEQ ID NO: 78513 - DNA, 75 bp, synthetic construct
  source 1..75: mol_type = other DNA
tcctatacgttattatatgaataatattgttgggcttttaaatttgttagagttaatgaagatctttcatgtaaa

SEQ ID NO: 78514 - DNA, 75 bp, synthetic construct
  source 1..75: mol_type = other DNA
gttcgagtggcagcagatccccgatggattggtccaagacccgttatcggaatcaccttcgctctctggttcatt

SEQ ID NO: 78515 - DNA, 75 bp, synthetic construct
  source 1..75: mol_type = other DNA
tgccatcaggtatgcgggttacggaaacacgctccagtggcattgatataaatcacgatgttggctatacccgat

SEQ ID NO: 78516 - DNA, 75 bp, synthetic construct
  source 1..75: mol_type = other DNA
cactaactgggatgttgtcggaccttattttaagaaactctgggaaaccattggtccttattttgaggctggctg

SEQ ID NO: 78517 - DNA, 75 bp, synthetic construct
  source 1..75: mol_type = other DNA
tccggataaatctcttcgctcgaatcctctttgggcagaggttaactggaacgatcagcactaccctcagctaag

SEQ ID NO: 78518 - DNA, 75 bp, synthetic construct
  source 1..75: mol_type = other DNA
tgccggaattctggcagttcccgaccgtatctatgggtctgggtccgattggtgctatttaccaggctaaattcc

SEQ ID NO: 78519 - DNA, 75 bp, synthetic construct
  source 1..75: mol_type = other DNA
ggttgttcctggctggcagcggcgacctcttacagcaccaacaatctgccgatgattccgttctacatctattac

SEQ ID NO: 78520 - DNA, 75 bp, synthetic construct
  source 1..75: mol_type = other DNA
ttccaatatctgaaaaacaccctgtcggtgaggtgatcaatccgtacggtcgttcaaagtttatggtggaacata

SEQ ID NO: 78521 - DNA, 75 bp, synthetic construct
  source 1..75: mol_type = other DNA
atgactgcgcgttatctcggaatgaatcgcagtgatggcctgactgtcactgaccttgagcatatcagccagagt

SEQ ID NO: 78522 - DNA, 75 bp, synthetic construct
  source 1..75: mol_type = other DNA
gtggtgggggcgctgggcggggcgggggtgcgctgtacccgtatgaacggtctgcaggtgcatggctggctgctc

SEQ ID NO: 78523 - DNA, 75 bp, synthetic construct
  source 1..75: mol_type = other DNA
tgccaccaggtatgcgggttacggaaacacgttccagtggcattgatattaatcacgatgttgggtacaccagat

SEQ ID NO: 78524 - DNA, 75 bp, synthetic construct
  source 1..75: mol_type = other DNA
aactggactggaaggctaggcgagatttgaccgaaatgctttcttctgcgtggaaatggcatacgctaaatcctg

SEQ ID NO: 78525 - DNA, 75 bp, synthetic construct
  source 1..75: mol_type = other DNA
gaaatgattgacgagcaactcaggcgctttaacgctcgctgtcatggtctggtgatgggatttccggcgctggtc

SEQ ID NO: 78526 - DNA, 75 bp, synthetic construct
  source 1..75: mol_type = other DNA
ctggctgctgacacggttgtacaggcaggggaaaccgtgaacggcggaacactgacaaatcatgacaaccagatt

SEQ ID NO: 78527 - DNA, 75 bp, synthetic construct
  source 1..75: mol_type = other DNA
ttcgaaccgctggacacagaagaacggggccgcaccttcgaagctctggattgcccagattggcgcgatgactga

SEQ ID NO: 78528 - DNA, 75 bp, synthetic construct
  source 1..75: mol_type = other DNA
cgttgaaactggatacgggccagttaattaaagcgccgcgcagaatgcctgttgccgaagcggtacaaaaattta

SEQ ID NO: 78529 - DNA, 75 bp, synthetic construct
  source 1..75: mol_type = other DNA
attgtcgctggcgtttgtggtgatcccccacgggcaacagttccgcgcgttgatgcaaaaagagctggagttcaa

SEQ ID NO: 78530 - DNA, 75 bp, synthetic construct
  source 1..75: mol_type = other DNA
cgtgacggtgtttgccctgagcggggcgattgccagcgtgttgcataacccggatttacaaccgctgattcagac

SEQ ID NO: 78531 - DNA, 75 bp, synthetic construct
  source 1..75: mol_type = other DNA
accaattcattactataataacaatgttgtagctagccttgttcttattaatgaaatgatgaaaagaggtattta

SEQ ID NO: 78532 - DNA, 75 bp, synthetic construct
  source 1..75: mol_type = other DNA
attagattgccagctaatcacagtagtagctcaaggcaagcatcgttattttcggctagcaggaaaagatattgc

SEQ ID NO: 78533 - DNA, 75 bp, synthetic construct
  source 1..75: mol_type = other DNA
attgtcgctggcgtttgtggtgatcccccacgggcaacagttccgcgcgttgatgcagaaggagctggagttcaa

SEQ ID NO: 78534 - DNA, 75 bp, synthetic construct
  source 1..75: mol_type = other DNA
atgaatgtggaaaaaataagcaatccgcaatgggcagataaagagcacactgctgtcaattgcatggtgaagttt

SEQ ID NO: 78535 - DNA, 75 bp, synthetic construct
  source 1..75: mol_type = other DNA
cgccagaacgtttcgcgtcagcccggaagtggtcagtcgcctgagtccgaacaaaaatgacaacaacgtttatga

SEQ ID NO: 78536 - DNA, 75 bp, synthetic construct
  source 1..75: mol_type = other DNA
agatacttcaacccaataggtgcccatgaatcagggatgattggagaaagcccatctgatataccgagcaattta

SEQ ID NO: 78537 - DNA, 75 bp, synthetic construct
  source 1..75: mol_type = other DNA
aggtatttcaaccctataggtgctcatcctagtggaagaataggcgagaatcctaatggtatacctaataatctg

SEQ ID NO: 78538 - DNA, 75 bp, synthetic construct
  source 1..75: mol_type = other DNA
tcagtgccggaggcggacagagccttcaggggcaggcagtgaacaccacgctgaacggcggcgagcagtggatgc

SEQ ID NO: 78539 - DNA, 75 bp, synthetic construct
  source 1..75: mol_type = other DNA
tggggtaatgtcagcgtggtgctgcgggagccttcggcagaggcctggtatctgtggcaggaagtgctcaatggt

SEQ ID NO: 78540 - DNA, 75 bp, synthetic construct
  source 1..75: mol_type = other DNA
aactgaatccgattatcacccgcgtgctgttcccggcatttgccaaaatccaggacgacacggcaaaactgcgcg

SEQ ID NO: 78541 - DNA, 75 bp, synthetic construct
  source 1..75: mol_type = other DNA
tgccatcaatgacgacgacagcaccgatatcctgctggaaatcccggtatgggagcgggtgattatccgccgtaa

SEQ ID NO: 78542 - DNA, 75 bp, synthetic construct
  source 1..75: mol_type = other DNA
cgtctgctgaaagacagcgagggtaactatctgtggcgtccggggctggagctggggcagccgtcctctctggcg

SEQ ID NO: 78543 - DNA, 75 bp, synthetic construct
  source 1..75: mol_type = other DNA
aacgcacgctggcagtccaggcggcactcatgcagcaaccggacaaatctctggcactgctggcatggacgctct

SEQ ID NO: 78544 - DNA, 75 bp, synthetic construct
  source 1..75: mol_type = other DNA
ttttttctgaaaagaatgattctcttgctttaaaaaagactgttaaattaaatatatacatggctattatatcaa

SEQ ID NO: 78545 - DNA, 75 bp, synthetic construct
  source 1..75: mol_type = other DNA
ggtgtatatttactaggtggctattttattgactttttctatggggcgaaatatcatgatgctgttgaaccttta

SEQ ID NO: 78546 - DNA, 75 bp, synthetic construct
  source 1..75: mol_type = other DNA
attatttttaaaagaatcagtaaaaataaacgatcagggattattttaattaatacaactgtgttaatgagagct

SEQ ID NO: 78547 - DNA, 75 bp, synthetic construct
  source 1..75: mol_type = other DNA
ctcacttctaattcttgctgttcttgaatctaaaacaagtgtaggtatatattctgtggcactaaatttagccgg

SEQ ID NO: 78548 - DNA, 75 bp, synthetic construct
  source 1..75: mol_type = other DNA
gctgagccgtgctgttgcaaaaggcgactccccggtaacgttccataaactgaccaccaccaacctcactggtca

SEQ ID NO: 78549 - DNA, 75 bp, synthetic construct
  source 1..75: mol_type = other DNA
ggcgacatgtccgccctcagttgttgtaatggaagcctgtgcgggtgcacactttatggctcgctgtatctctga

SEQ ID NO: 78550 - DNA, 75 bp, synthetic construct
  source 1..75: mol_type = other DNA
cattacttaagtctaaagttaatacattaatcaatatcgtgggtttgattatttcgcttttagttcgatggctta

SEQ ID NO: 78551 - DNA, 75 bp, synthetic construct
  source 1..75: mol_type = other DNA
ttttaaattcgataattgtatcaaccctcccgtcaattttttctgagaataataaagaacatgctttaaagcaaa

SEQ ID NO: 78552 - DNA, 75 bp, synthetic construct
  source 1..75: mol_type = other DNA
ttttatggtgttgaatatgacggggctttttatcctttaattattctctgtatgtcaacaatggtttcgacatta

SEQ ID NO: 78553 - DNA, 75 bp, synthetic construct
  source 1..75: mol_type = other DNA
ctatgggtttcacgggtaaacgtgctgcccagttcaaagaggcatacatcaatgcctttaaccagatggagaaac

SEQ ID NO: 78554 - DNA, 75 bp, synthetic construct
  source 1..75: mol_type = other DNA
cggcatcgtcgccatgccgctgtatccagtagcagagcgcctcgctatggcaaacaacattgagggcgcgatgat

SEQ ID NO: 78555 - DNA, 75 bp, synthetic construct
  source 1..75: mol_type = other DNA
gccattcactctgcataaaccgttgctcgaagagttacaggtgctggcgggcgtggcggtgccttccgtgattac

SEQ ID NO: 78556 - DNA, 75 bp, synthetic construct
  source 1..75: mol_type = other DNA
tggaaagagaggtcaggcgtggctgagtctgatgcaggaaaaagcccgtctggaggctctgttgccggagggctg

SEQ ID NO: 78557 - DNA, 75 bp, synthetic construct
  source 1..75: mol_type = other DNA
taaaacagctgataacctgcctgaaaataaagagtcgctgttctacattaatgttcgtgccattccagcaaagaa

SEQ ID NO: 78558 - DNA, 75 bp, synthetic construct
  source 1..75: mol_type = other DNA
gatgcccgtcatcaggcaaaatatgtttccgctatctggcagaaattaattcctgccaccagcacagaattatga

SEQ ID NO: 78559 - DNA, 75 bp, synthetic construct
  source 1..75: mol_type = other DNA
attgagaaggccgggatagaactgaataaagaagaacacgaccagctatataaggctatattattgctggtgggc

SEQ ID NO: 78560 - DNA, 75 bp, synthetic construct
  source 1..75: mol_type = other DNA
tgcatgtgctgtaaatatgaactcagtagatcagacggttttgcttggccaagtgcgaagcgccacattagggag

SEQ ID NO: 78561 - DNA, 75 bp, synthetic construct
  source 1..75: mol_type = other DNA
gtataagaacaaccaatgaccatcccttcctggctgttcggtggaaagcccaaaacacccggaaaaatggcacat

SEQ ID NO: 78562 - DNA, 75 bp, synthetic construct
  source 1..75: mol_type = other DNA
accattagaatattacgacacaaatcttttggggactctaatattacttgatgaaatgcagaaagcgaatatttc

SEQ ID NO: 78563 - DNA, 75 bp, synthetic construct
  source 1..75: mol_type = other DNA
agccattatgaaacgcaactgcgcccgcccttcttccgcgcactggtcgattatgtcaatcagggcaatagcgct

SEQ ID NO: 78564 - DNA, 75 bp, synthetic construct
  source 1..75: mol_type = other DNA
acaacgaatacacaggtaacggcgttacgacatcgtttccgtatacttttcgaattttcagaaaatcagacctgg

SEQ ID NO: 78565 - DNA, 75 bp, synthetic construct
  source 1..75: mol_type = other DNA
taccgttatggtgatgaacatcagcccgtcaccactgccgacattctgacaccacgacgccgggaggattacggt

SEQ ID NO: 78566 - DNA, 75 bp, synthetic construct
  source 1..75: mol_type = other DNA
aattgtcgcaaagtgagcagcagcgattagcgcaactggctgatgaagcaaaacggatgcgcgaacgtattcagg

SEQ ID NO: 78567 - DNA, 75 bp, synthetic construct
  source 1..75: mol_type = other DNA
tgttcgttaccacaccgtacgtggtgcgcttgactgctccggcgttaaagaccgtaagcaggctcgttccaagta

SEQ ID NO: 78568 - DNA, 75 bp, synthetic construct
  source 1..75: mol_type = other DNA
agttgcattgtctctggggttaccggttgtgaccggtattacccatcgcccggtacagcgctgtacattgattac

SEQ ID NO: 78569 - DNA, 75 bp, synthetic construct
  source 1..75: mol_type = other DNA
ttcgcgccctggaccgcgacggtaaaccatttgaactggaagcagacggtctgttagccatctgtattcagcatg

SEQ ID NO: 78570 - DNA, 75 bp, synthetic construct
  source 1..75: mol_type = other DNA
tcagcgaaaagaaatcagccaccttgaactcaccacgctgtactggctgaacgtcgggctggggcttgtggtgtg

SEQ ID NO: 78571 - DNA, 75 bp, synthetic construct
  source 1..75: mol_type = other DNA
accgtactatcttcaacaagacttcttttttgatacacttataggatttatgccaatcaatatattctttgtttt

SEQ ID NO: 78572 - DNA, 75 bp, synthetic construct
  source 1..75: mol_type = other DNA
tggagggtaaagctgataatgtcgtactggaaaatggcggacgtctggatgtgctgagcggacacacagccacca

SEQ ID NO: 78573 - DNA, 75 bp, synthetic construct
  source 1..75: mol_type = other DNA
acgcaatgcgctggtggtggagatgaagcgccagttttgccgtaacgaaaaaatgaaaacgctgcttcgcgcagg

SEQ ID NO: 78574 - DNA, 75 bp, synthetic construct
  source 1..75: mol_type = other DNA
ttgttgatgctttaacaaatgaagttcgctatgaagtatcacaaaattggcttgatacaggaaacctggcctttc

SEQ ID NO: 78575 - DNA, 75 bp, synthetic construct
  source 1..75: mol_type = other DNA
aggaatatgctgccgccctgactccgaaagatgcaggcaatcaggtgggccgggctgtgaaccgctttgcactgg

SEQ ID NO: 78576 - DNA, 75 bp, synthetic construct
  source 1..75: mol_type = other DNA
ggtttttcaggcataaaaaaagcggccccgaaatggagccgcctttctgaacagataacccgctgcgccgtttgt

SEQ ID NO: 78577 - DNA, 75 bp, synthetic construct
  source 1..75: mol_type = other DNA
ctatgcctatacgggatttccccgcagcctgaatgcactgaatgagctgatgaaagtcgttgaaacacgtaaaca

SEQ ID NO: 78578 - DNA, 75 bp, synthetic construct
  source 1..75: mol_type = other DNA
tatcaccctgggcgttcaggccggttatgcccacagcatcaacggcagcagcgctgaaggttataacagtcaggc

SEQ ID NO: 78579 - DNA, 75 bp, synthetic construct
  source 1..75: mol_type = other DNA
aaaattgatacgtatcgagatacaggttgctgaaggttttatcgatggctgcctaagtatgctggatgtgaaact

SEQ ID NO: 78580 - DNA, 75 bp, synthetic construct
  source 1..75: mol_type = other DNA
acgggacatgacgacgttcctgtcactcagccaggaggtactgttgtccctgctcagcttctgtaccgcgtgcag

SEQ ID NO: 78581 - DNA, 75 bp, synthetic construct
  source 1..75: mol_type = other DNA
atgaagctgatcttgcctttccctcccagcgtgaacacgtactggcgacaccccaacaaaggggcgtttgctggt

SEQ ID NO: 78582 - DNA, 75 bp, synthetic construct
  source 1..75: mol_type = other DNA
tctatgtatcacggttatgttcctgatttacatatccatgccgaggatactttactgccattttacttaggagaa

SEQ ID NO: 78583 - DNA, 75 bp, synthetic construct
  source 1..75: mol_type = other DNA
ggggatgtggagaaggctagtcgcgtatttgtacgtaatgaattaacgcccttgcaaaaaaggctacaagagctg

SEQ ID NO: 78584 - DNA, 75 bp, synthetic construct
  source 1..75: mol_type = other DNA
aggctcgcccaaagaccgcattctggaattggcgaagaagatccccgctcatatgatcatcattgcttcccatcg

SEQ ID NO: 78585 - DNA, 75 bp, synthetic construct
  source 1..75: mol_type = other DNA
atgaaagtcatattcacgtcgaaccgttttattgattttcttatccggcttgttattaccgcaattgtcatttcc

SEQ ID NO: 78586 - DNA, 75 bp, synthetic construct
  source 1..75: mol_type = other DNA
ccaccagcacaggaggcgatggcgaaagcggcattaacctatcgctttggtgaagagcatcaaccggtgacggaa

SEQ ID NO: 78587 - DNA, 75 bp, synthetic construct
  source 1..75: mol_type = other DNA
tggctgaacgtaagatagaggaagccgaaatcgaacgacagcagatagtgcgtacccgccaggtcgaagccgaac

SEQ ID NO: 78588 - DNA, 75 bp, synthetic construct
  source 1..75: mol_type = other DNA
gttcctgtcactcagtcaggaggtgctgttatcactgctcagtttctgcaccgcgtgcagtatccacggtgtcca

SEQ ID NO: 78589 - DNA, 75 bp, synthetic construct
  source 1..75: mol_type = other DNA
ctgaagtgagcgtgccgctggcctcgctgattaagtcaccgctgaatgtgcgcacggtgccgtattctgcggagt

SEQ ID NO: 78590 - DNA, 75 bp, synthetic construct
  source 1..75: mol_type = other DNA
aggatacagattgaagagaatcacagaaggctgacaagtgatgctcccggtggaaagagaggtcaggcgtggctg

SEQ ID NO: 78591 - DNA, 75 bp, synthetic construct
  source 1..75: mol_type = other DNA
gcagaaagatttcaccacattcttcacgcttgacggacagactctgatgaatctgatggttttctgtacagcctg

SEQ ID NO: 78592 - DNA, 75 bp, synthetic construct
  source 1..75: mol_type = other DNA
ggcggcactgatgcagcagccggacaaatccctgacactgctggcatggacactctgtctgaatgtgtttggcag

SEQ ID NO: 78593 - DNA, 75 bp, synthetic construct
  source 1..75: mol_type = other DNA
ttgacggactggcgcgaacattccgcgccgccgtacaccacagttcaccgattgcagtaaagtgcaacattctga

SEQ ID NO: 78594 - DNA, 75 bp, synthetic construct
  source 1..75: mol_type = other DNA
agaaaaaaatgtgattttgacttgatttattgctatcaggaaaataatggtaagcccatggctttaaacgctggt

SEQ ID NO: 78595 - DNA, 75 bp, synthetic construct
  source 1..75: mol_type = other DNA
atcttgtcagtcgaactaaagcggcacttgaggcgaatccaaagaatgtgctgttatctgtcgtatggattcagg

SEQ ID NO: 78596 - DNA, 75 bp, synthetic construct
  source 1..75: mol_type = other DNA
atgtcagctaactatctgcatggtccggaaaccattgaagtggaaaacggtgcccgcccggttaaaacggtgaaa

SEQ ID NO: 78597 - DNA, 75 bp, synthetic construct
  source 1..75: mol_type = other DNA
tatctggttaacaccgccgtgcgcaccctgctgtttggctactttggtcgcaaaatttaccgccctggcctgcgt

SEQ ID NO: 78598 - DNA, 75 bp, synthetic construct
  source 1..75: mol_type = other DNA
cagtaaaaacaatgtcttcccaaaaggtgttttcagcttatgacaccatgattcgtgctgattcctcaccactga

SEQ ID NO: 78599 - DNA, 75 bp, synthetic construct
  source 1..75: mol_type = other DNA
aaaaccttatcagcacacggatcattagtgaactcgaaatcgctcacggtctgacagtgaccaagccagcccctt

SEQ ID NO: 78600 - DNA, 75 bp, synthetic construct
  source 1..75: mol_type = other DNA
ggacgggaacaggaaatttctggtccttccgtacgggaaatcagcagaggtgattccccatcaggggaaggactg

SEQ ID NO: 78601 - DNA, 75 bp, synthetic construct
  source 1..75: mol_type = other DNA
gaaggttaatgttgcctctaccggtaagatgaacggcttttcattcgaatatgcaggaatcgctttcaaagcttc

SEQ ID NO: 78602 - DNA, 75 bp, synthetic construct
  source 1..75: mol_type = other DNA
ctcaaacgaatctttaatcaggaacgctatcaacgaccatacaacagccctgaaagaactgctggagaggtatca

SEQ ID NO: 78603 - DNA, 75 bp, synthetic construct
  source 1..75: mol_type = other DNA
ttacaacggcacggtacggaaccagctggcggcagaccaggcgcagcagcgacaggccattgcgaaactggctga

SEQ ID NO: 78604 - DNA, 75 bp, synthetic construct
  source 1..75: mol_type = other DNA
cgtgccattcacagcatcgacaccgatattaagctcaaccgcgcattgtgggtgatggcagaaacgctgctggag

SEQ ID NO: 78605 - DNA, 75 bp, synthetic construct
  source 1..75: mol_type = other DNA
aataccgcgatatcgctttcaaggcatccaaacttggaaaggcatactcttgggtaaatcttcaaaagcagctta

SEQ ID NO: 78606 - DNA, 75 bp, synthetic construct
  source 1..75: mol_type = other DNA
gtcttgttgattttcttatccggcttttgattacagcgattgtcatttctccggtaattatctggtcgtgggata

SEQ ID NO: 78607 - DNA, 75 bp, synthetic construct
  source 1..75: mol_type = other DNA
cccgtgaagcgttaaagatgcttcttgatggcgtgagtcgccgcaaggtaaagcaatacctggttggtaagcaaa

SEQ ID NO: 78608 - DNA, 75 bp, synthetic construct
  source 1..75: mol_type = other DNA
ttacttggcctactggtagtgtcagataacttcgtgccgctggtatttggcgagaagtggaacagcataattccc

SEQ ID NO: 78609 - DNA, 75 bp, synthetic construct
  source 1..75: mol_type = other DNA
ttccacattgctgaacagcaagttgacggcacaagtgactatctcaaggatggagaatggcctattgataatggg

SEQ ID NO: 78610 - DNA, 75 bp, synthetic construct
  source 1..75: mol_type = other DNA
tgtggcgatgtttttgctcagcgaggtgattggcgatgtgctcaataaccccggcctggcaccgttaatcaaaac

SEQ ID NO: 78611 - DNA, 75 bp, synthetic construct
  source 1..75: mol_type = other DNA
ggggcttacgaggtggtgggcgtgtttgaccggatagaggagaagcgtgatgccatgcagtcgctgctcttaccg

SEQ ID NO: 78612 - DNA, 75 bp, synthetic construct
  source 1..75: mol_type = other DNA
acactacggcatcatgtttttttaccgggggcaggaccccatcgacgggcagctggcgcaggtcattaatggctt

SEQ ID NO: 78613 - DNA, 75 bp, synthetic construct
  source 1..75: mol_type = other DNA
aaacggacaacatgtccctgaaatcattctgctcaactcccatgacggtacctccagctaccagatgctgccggg

SEQ ID NO: 78614 - DNA, 75 bp, synthetic construct
  source 1..75: mol_type = other DNA
taataacatttactctcttgaggttgatagtttttgtttataccgagattatgagattgcaagaaatagactaat

SEQ ID NO: 78615 - DNA, 75 bp, synthetic construct
  source 1..75: mol_type = other DNA
tttattgtttgacgttggcgtggctgatgcactttctaaacgcctggtcagtagcgtacttaacgccgcagtggt

SEQ ID NO: 78616 - DNA, 75 bp, synthetic construct
  source 1..75: mol_type = other DNA
tttcctggtgggatgcgtcagcctggataaggcgcgccagcttttcgatacagcttctcaggtctgtgaaattgt

SEQ ID NO: 78617 - DNA, 75 bp, synthetic construct
  source 1..75: mol_type = other DNA
atggcacggcacagaaagaatgtacgccctatactgctaacaattgggggacaggtggtaaaggaagtatcagta

SEQ ID NO: 78618 - DNA, 75 bp, synthetic construct
  source 1..75: mol_type = other DNA
cgggtgcagatcgtggccgccctgatggcaatcgacgcgggactggagcggctgcggcatgcggtgctggaaaaa

SEQ ID NO: 78619 - DNA, 75 bp, synthetic construct
  source 1..75: mol_type = other DNA
ttagggcgcaaattgcttaactggtttaactcccagggattaaacgtagaaatcctcggcgagtttgatgatgcc

SEQ ID NO: 78620 - DNA, 75 bp, synthetic construct
  source 1..75: mol_type = other DNA
taagtagtatcagcaatccagatgaatttaataccttcttattaagaaatcagaagatgatgccgttgtcatcgg

SEQ ID NO: 78621 - DNA, 75 bp, synthetic construct
  source 1..75: mol_type = other DNA
cgtgattaaccgcaaaccgttacagatggcgctagaaaaccggcttgatctggacgctcgtgcctttagcgtcat

SEQ ID NO: 78622 - DNA, 75 bp, synthetic construct
  source 1..75: mol_type = other DNA
aaagcgtggttgacaacacatcgaaatatcctgactggagtaaacgcgatgatattaaagcgaaactgaaagttg

SEQ ID NO: 78623 - DNA, 75 bp, synthetic construct
  source 1..75: mol_type = other DNA
gaaatgacgctatcttcggcaaccacgtatggcaaacatttgcgcaatacttcccgccaggacttgaaaaaccgt

SEQ ID NO: 78624 - DNA, 75 bp, synthetic construct
  source 1..75: mol_type = other DNA
tgtggcccggaaaaatgaaatgtgtccgggtgggaaccgcagatgaacatctgaaggaagtttatacggaagata

SEQ ID NO: 78625 - DNA, 75 bp, synthetic construct
  source 1..75: mol_type = other DNA
gaagagtttgatgcgaaggataaccaggaactggaatccttaaacattgaagtctcggttgctggccgaatgatg

SEQ ID NO: 78626 - DNA, 75 bp, synthetic construct
  source 1..75: mol_type = other DNA
gaaaacacgaacgggagttattaaatcaaatatgcattgtttcaatgctggcccgtttacgtctgatgcaaaaag

SEQ ID NO: 78627 - DNA, 75 bp, synthetic construct
  source 1..75: mol_type = other DNA
tttctttactgggaggcgctatcggggcgctgttcagtccggttggtcttatcgtggctgcgcttgccggagctg

SEQ ID NO: 78628 - DNA, 75 bp, synthetic construct
  source 1..75: mol_type = other DNA
tcaaaaccagatttagctattaaagagcttcattgggaagcaaagcgtacacttgaggatatgattactgatgct

SEQ ID NO: 78629 - DNA, 75 bp, synthetic construct
  source 1..75: mol_type = other DNA
gtacatcgccagtcagacgcgtcttggtcgggatattcgccgtagcgccatctttgccgccctgcatgttgaggg

SEQ ID NO: 78630 - DNA, 75 bp, synthetic construct
  source 1..75: mol_type = other DNA
tgccgggaaaaatcagggagtgccatgtttatttccctgatgacagaacaatcagaaacaacggagataaaaatg

SEQ ID NO: 78631 - DNA, 75 bp, synthetic construct
  source 1..75: mol_type = other DNA
gcagaatcaaaacactgaatacccgacgggtgaatattctgaagggggaacagcgtcgtgtcagtggcagtgcac

SEQ ID NO: 78632 - DNA, 75 bp, synthetic construct
  source 1..75: mol_type = other DNA
caagtacgaaagaggttaaatatatagaaactgcaagagaaattgataaaatattcagtgattttaacttgagtg

SEQ ID NO: 78633 - DNA, 75 bp, synthetic construct
  source 1..75: mol_type = other DNA
gcgatcctacaattgcccgtcgctcagtatccaaccattgcaccgcctgcggtttctgtttcggcaaactatcca

SEQ ID NO: 78634 - DNA, 75 bp, synthetic construct
  source 1..75: mol_type = other DNA
ccatacccgagccgttaacggcattgacggggacatcaggctaaaccgtgccctgtgggtgatggcggaacagat

SEQ ID NO: 78635 - DNA, 75 bp, synthetic construct
  source 1..75: mol_type = other DNA
gcggaatcctacgctaaggctttggccagcgatattctccggtgagattgatgtgttcccaggggataggagaag

SEQ ID NO: 78636 - DNA, 75 bp, synthetic construct
  source 1..75: mol_type = other DNA
cctgggagacagatccaggtagctcatcattaaagctcatactgctctcgatggctgacagagccgatgaatata

SEQ ID NO: 78637 - DNA, 75 bp, synthetic construct
  source 1..75: mol_type = other DNA
aactccaaccaggagatcctcggcatcactggtgtggaacgttcgctgtcggcgatgattgatgacccgcaaagc

SEQ ID NO: 78638 - DNA, 75 bp, synthetic construct
  source 1..75: mol_type = other DNA
tggttttcatgaaattgaagcggatgttaacgataccagcctcttgctgagtggagatcattcgatacagcaaca

SEQ ID NO: 78639 - DNA, 75 bp, synthetic construct
  source 1..75: mol_type = other DNA
aaggtgtcaatgtgaacttcgcattaaaaagaggctttgcctttgccacattaacgtcattaacagcggtgaccg

SEQ ID NO: 78640 - DNA, 75 bp, synthetic construct
  source 1..75: mol_type = other DNA
ggtggcaggatttccgggccgcaatgctggaacttcaggagcgccgcagggctgacagtacagagtcagtagtaa

SEQ ID NO: 78641 - DNA, 75 bp, synthetic construct
  source 1..75: mol_type = other DNA
tggcgtttgggaacccgacgcgtaacaccgggcgcttccgcgaatgcttccgcaagtacaagcaccgctggaagt

SEQ ID NO: 78642 - DNA, 75 bp, synthetic construct
  source 1..75: mol_type = other DNA
ctcgaaacgcataaatataccaggacagcaaagccagcagggaagggccattacagattacgatccctatgctta

SEQ ID NO: 78643 - DNA, 75 bp, synthetic construct
  source 1..75: mol_type = other DNA
ctagatgctgccattaacttgggccgctgggtgttatccagtaacatgaacatttcgcgctctgataacaaaaca

SEQ ID NO: 78644 - DNA, 75 bp, synthetic construct
  source 1..75: mol_type = other DNA
gactggttcaactcgctgggtgacaagaacattgccgacccgcgaccgtgggcaggtatgcaacccacacagaat

SEQ ID NO: 78645 - DNA, 75 bp, synthetic construct
  source 1..75: mol_type = other DNA
atttccctgacaggcagcgataacaccatccagcaggccatcagacgcaccgaacagtacaacaaccagcttgaa

SEQ ID NO: 78646 - DNA, 75 bp, synthetic construct
  source 1..75: mol_type = other DNA
atgaacggacaaatctcaattgttcgaccgggagcatgtgacgattgcgagatacgaatgattattcgtctggcg

SEQ ID NO: 78647 - DNA, 75 bp, synthetic construct
  source 1..75: mol_type = other DNA
ccgttcttatctggaaatactgggatcccatcagggcattttttgccggggtgttcagcgggattatggaaaggc

SEQ ID NO: 78648 - DNA, 75 bp, synthetic construct
  source 1..75: mol_type = other DNA
catggcgaatatcacacgcatattctggtgtggggggatcgtaatggcgaggacagagagaaaatttcacactgt

SEQ ID NO: 78649 - DNA, 75 bp, synthetic construct
  source 1..75: mol_type = other DNA
tcagatgccgctaatgagcaagcttcaaaggtgcttaataatgctggtacaggtagtactttgaagaagttttct

SEQ ID NO: 78650 - DNA, 75 bp, synthetic construct
  source 1..75: mol_type = other DNA
cggtgcattcgtcattacacgatggctgtgccggaaagttatcagtatttttcataaaaaatacctgattgggct

SEQ ID NO: 78651 - DNA, 75 bp, synthetic construct
  source 1..75: mol_type = other DNA
agcagctacatctgaataaaatggacgtcttcgaacgcagcatcattaacgtgttcaaaggcctgtcgtgggatt

SEQ ID NO: 78652 - DNA, 75 bp, synthetic construct
  source 1..75: mol_type = other DNA
attatcccaacgacaacaacgaccgcccctggtgggggctcccctgcaccgtgacgccctgtttcggggcacgtc

SEQ ID NO: 78653 - DNA, 75 bp, synthetic construct
  source 1..75: mol_type = other DNA
tctgctgtaggggatggtgtgaattttattgccgtcagaccgcgaaatattgcatttaactttctggtgagggct

SEQ ID NO: 78654 - DNA, 75 bp, synthetic construct
  source 1..75: mol_type = other DNA
aaccattcttaactgatttctgtgagaactttatcgtgtcagacacactttccgggacaacgcatcccgatgaca

SEQ ID NO: 78655 - DNA, 75 bp, synthetic construct
  source 1..75: mol_type = other DNA
cgcttaccaatttgagtggaaaggatgtggctggtcttctcgcataccttggtttgggagaaggtgctccagcta

SEQ ID NO: 78656 - DNA, 75 bp, synthetic construct
  source 1..75: mol_type = other DNA
aacatctggcggtcaaacatttcgagaaggtatgaccgcgaaaaatcctaaaactggtcagaaaattatttacag

SEQ ID NO: 78657 - DNA, 75 bp, synthetic construct
  source 1..75: mol_type = other DNA
ataggcggtggtacagcgcaagactgggcgatgaaagccgggcaccgttacgacagttggctgactgaaaatact

SEQ ID NO: 78658 - DNA, 75 bp, synthetic construct
  source 1..75: mol_type = other DNA
atgagccgcattgcagcggatgtgatactggaaatctgccatcaggcagatgtggagccggggatattcacggtg

SEQ ID NO: 78659 - DNA, 75 bp, synthetic construct
  source 1..75: mol_type = other DNA
attatcccgacgacaacaacgaccgcccctggtggggactgccgtgcaccgtgataccctgttttggcgcccgtc

SEQ ID NO: 78660 - DNA, 75 bp, synthetic construct
  source 1..75: mol_type = other DNA
tcctgtccgacagcgcgggtagcgacgacggcatggatgggctgcggatgagttcgatgacctaccgcatcgcca

SEQ ID NO: 78661 - DNA, 75 bp, synthetic construct
  source 1..75: mol_type = other DNA
cccctggtgggggctgccctgcaccataacaccctgttttggcgcccgtctggtgcaggagggtaaccggttgta

SEQ ID NO: 78662 - DNA, 75 bp, synthetic construct
  source 1..75: mol_type = other DNA
atatacaggtgtaattcgtattatccctagaatattgcctgtttcattactgaaattagtatacaatatattgcg

SEQ ID NO: 78663 - DNA, 75 bp, synthetic construct
  source 1..75: mol_type = other DNA
agatgagttcatggaaaggttctcctggcatgtggcggataaggggttccgtatggtgaggtactacggtttttt

SEQ ID NO: 78664 - DNA, 75 bp, synthetic construct
  source 1..75: mol_type = other DNA
cccgccatcagcataccgtcacgctgtatgccagagggctgacctgcaaagccgataccctcagcagttgtggtt

SEQ ID NO: 78665 - DNA, 75 bp, synthetic construct
  source 1..75: mol_type = other DNA
gcattgataaactttggtctgagtgatttagtgactgccggattagtacaggtggaatctggtacagactttatt

SEQ ID NO: 78666 - DNA, 75 bp, synthetic construct
  source 1..75: mol_type = other DNA
atggaaaacaataccatcaaatgcccgttttgcttcaaagagagtcagcgtggggttcacgtctgtaaaggctgt

SEQ ID NO: 78667 - DNA, 75 bp, synthetic construct
  source 1..75: mol_type = other DNA
tcgcaaagaagcggaaatgctcggatggaactattagaaaggagttgcaaagtgcacttggatttattgatggta

SEQ ID NO: 78668 - DNA, 75 bp, synthetic construct
  source 1..75: mol_type = other DNA
tgacgtacagggcggtaaaaaccgccggtttgtggtgcagatcaccggatacggagagcagggagaacgctggat

SEQ ID NO: 78669 - DNA, 75 bp, synthetic construct
  source 1..75: mol_type = other DNA
cagcgaggagattaaccgccagaatcaccagttgcgggtggaaaaaatcctgaatcgttcgggcatccagcctct

SEQ ID NO: 78670 - DNA, 75 bp, synthetic construct
  source 1..75: mol_type = other DNA
ctcagcctgtgctgtatcacatttgcctcgagatgcgttcaaaggggattgagcgccagatgaccgaaggggagt

SEQ ID NO: 78671 - DNA, 75 bp, synthetic construct
  source 1..75: mol_type = other DNA
cctgatacaactgaagtgggcgttgtggaagaaatcaaaagactcaaacctgtcattaaggctttaaaagaaaaa

SEQ ID NO: 78672 - DNA, 75 bp, synthetic construct
  source 1..75: mol_type = other DNA
ggcttctttttaggctctaatccagaaacatctattcttgttttgaagcgtttccctgaaattcaagaagctttt

SEQ ID NO: 78673 - DNA, 75 bp, synthetic construct
  source 1..75: mol_type = other DNA
gccaatccattcggtctgacggtggatgctgtgatggaggagtaccgccgctggcgcaacgagtcctggcgatac

SEQ ID NO: 78674 - DNA, 75 bp, synthetic construct
  source 1..75: mol_type = other DNA
tatacccacttccctgaaattgacccgcgcctgcgtaattaccgctcacgctatggcgctatcagtaatgactga

SEQ ID NO: 78675 - DNA, 75 bp, synthetic construct
  source 1..75: mol_type = other DNA
ttgccaagaagagaagatgttcagatggcacagttaggaaaaaattgcagactgccttggggtttgttgaaggat

SEQ ID NO: 78676 - DNA, 75 bp, synthetic construct
  source 1..75: mol_type = other DNA
atctatctggctaccacctattctgaaacccagaacatgactgtttttggtaataaccatattgccaacaaagca

SEQ ID NO: 78677 - DNA, 75 bp, synthetic construct
  source 1..75: mol_type = other DNA
ccaaaacagcaattcgtatccgtaagggcagcgccaacggcgttgagctgagcgggttaaaactggatgaagata

SEQ ID NO: 78678 - DNA, 75 bp, synthetic construct
  source 1..75: mol_type = other DNA
cttataatagtgaaaagactttaagggatactttagagtcaatagagttgcaaacctataaagatatagagtata

SEQ ID NO: 78679 - DNA, 75 bp, synthetic construct
  source 1..75: mol_type = other DNA
ttattacctgtagaaataacgtcggatgagcagaaagaacctgtggcgtccattacgccgtctttacccgcttcc

SEQ ID NO: 78680 - DNA, 75 bp, synthetic construct
  source 1..75: mol_type = other DNA
atgctcaccagcggtgaactgaatccccgacatcagcataccgtcacgctgtatgccagagggctgacctgcgaa

SEQ ID NO: 78681 - DNA, 75 bp, synthetic construct
  source 1..75: mol_type = other DNA
tatttcattttcactaatgctggttgctctttttctttccataacctggatggcgttgacttcggcagggctggt

SEQ ID NO: 78682 - DNA, 75 bp, synthetic construct
  source 1..75: mol_type = other DNA
tggagcaattagaaaagagcttcagggagctatagggtttatatcaggtattctattattgttaggcgaagccct

SEQ ID NO: 78683 - DNA, 75 bp, synthetic construct
  source 1..75: mol_type = other DNA
aagagcagaagattagccagtctaccctggacgctctggagtccgagctttaccgcaacctgcaccccctatatc

SEQ ID NO: 78684 - DNA, 75 bp, synthetic construct
  source 1..75: mol_type = other DNA
ttgttcccgccggctttacgctcatgtggatgacggtgtttggaaacagcgccatctatctcatcatgaaccagg

SEQ ID NO: 78685 - DNA, 75 bp, synthetic construct
  source 1..75: mol_type = other DNA
gtcaggatgaaattggtctgcgttacaacagtcaccggacaaaacgggaagaatacctggtgatgagtggtgatg

SEQ ID NO: 78686 - DNA, 75 bp, synthetic construct
  source 1..75: mol_type = other DNA
acgggcttaatctcgggaaaggcttttccgccatcagcgggagcagcacaccatacgtcagtaaggggctgaatt

SEQ ID NO: 78687 - DNA, 75 bp, synthetic construct
  source 1..75: mol_type = other DNA
tttcatcgactacacgcagcaacagaagattgctgccgggaaggcgatatctgccgacgccattcctggtggttc

SEQ ID NO: 78688 - DNA, 75 bp, synthetic construct
  source 1..75: mol_type = other DNA
tctgacagcgcttttctgggacaggagctggtcggtcaggtttactaccgcgatgagtcgttgcgattctacccg

SEQ ID NO: 78689 - DNA, 75 bp, synthetic construct
  source 1..75: mol_type = other DNA
aatctgcgtacccaaatcgcggcctactattcgatttctgataagagcgtggtggcgaataaagatctgaccatc

SEQ ID NO: 78690 - DNA, 75 bp, synthetic construct
  source 1..75: mol_type = other DNA
caggatatgccattctggcaggtcatcgcagaggctggtatggcggcaagggaggccggtcatgccgtccgtgag

SEQ ID NO: 78691 - DNA, 75 bp, synthetic construct
  source 1..75: mol_type = other DNA
ggcgtgccgctgccctggcaggtactaccgggatgatgcttcttgccattgtggctgtgccggttcaggccgccg

SEQ ID NO: 78692 - DNA, 75 bp, synthetic construct
  source 1..75: mol_type = other DNA
aaattattagcgaagctgaaaaagcacgtcaggttaatggcgataaaccctatctcgaaattatctgcatggatt

SEQ ID NO: 78693 - DNA, 75 bp, synthetic construct
  source 1..75: mol_type = other DNA
acgtaagattaatggcgatgaaccctatatcgaaattatttgtatggattcagaagctgaaattcagaaagcaga

SEQ ID NO: 78694 - DNA, 75 bp, synthetic construct
  source 1..75: mol_type = other DNA
ttgcattaccttgccgaccgcgccggtatcagaggcctgttcagcgatgcagatgcgtaccacctggaccaggcc

SEQ ID NO: 78695 - DNA, 75 bp, synthetic construct
  source 1..75: mol_type = other DNA
agcgcctgctcggcaaaaaaacgatggaaaatgaactccttaaagaagccgttgaatacgggcgtgcaaaaaagt

SEQ ID NO: 78696 - DNA, 75 bp, synthetic construct
  source 1..75: mol_type = other DNA
taacacccagaccggcctgcagtactccgatcggctggacatcatgggaaccggtacgctgaacatcgatgaatc

SEQ ID NO: 78697 - DNA, 75 bp, synthetic construct
  source 1..75: mol_type = other DNA
caattacatcaaatcagttccgcggtttttcaagcatagcgactgctgcaaatgctgtattaggtcgttatatcg

SEQ ID NO: 78698 - DNA, 75 bp, synthetic construct
  source 1..75: mol_type = other DNA
aaaggcttatccgacaaataaattgcctgatttacgtggtgagtttattcgcggctgggatgacgggcgcggggt

SEQ ID NO: 78699 - DNA, 75 bp, synthetic construct
  source 1..75: mol_type = other DNA
attcagtaccaccattaacaatgcgctggcactaaaagcgccgctgtcgagtccggcactcaccggaacgccaac

SEQ ID NO: 78700 - DNA, 75 bp, synthetic construct
  source 1..75: mol_type = other DNA
ttttgccgagcaggatgtcagcgatctgcaacaaatcagcaccacactgagccgtatactccagtccccggcaga

SEQ ID NO: 78701 - DNA, 75 bp, synthetic construct
  source 1..75: mol_type = other DNA
tggaagattgcttatgccgactttatgaccgcgatgatggccttttttctggtgatgtggctgatctccatctcc

SEQ ID NO: 78702 - DNA, 75 bp, synthetic construct
  source 1..75: mol_type = other DNA
gtacggggaacatatgccgttctccattagctgaacgtattctccgtaaatatttaccgggcaaaaagattgatt

SEQ ID NO: 78703 - DNA, 75 bp, synthetic construct
  source 1..75: mol_type = other DNA
gattgcgcctcaattgcttggaaaaacaatgctttatggttattgggttaacaatttagaaatacctgatcctta

SEQ ID NO: 78704 - DNA, 75 bp, synthetic construct
  source 1..75: mol_type = other DNA
gacgcaggctcgctggagggcgacgccggcaaggtcggcggcttctcgctgcatgccggcgtggccgcggaagca

SEQ ID NO: 78705 - DNA, 75 bp, synthetic construct
  source 1..75: mol_type = other DNA
gactatagcttcgcaaaactgtttgccgatgaagggcttaacgtcatgctggtcggcgattcactgggcatgacg

SEQ ID NO: 78706 - DNA, 75 bp, synthetic construct
  source 1..75: mol_type = other DNA
atggataacgccacacatgtggcggtgtacttcggctcttacctgaaaaaaccgccggtgccgatgagccgtctg

SEQ ID NO: 78707 - DNA, 75 bp, synthetic construct
  source 1..75: mol_type = other DNA
gtacaggtaatatctgcaggtcaccgattgctgaacgattactacgtcgaatgttaaaagagaagatgattgact

SEQ ID NO: 78708 - DNA, 75 bp, synthetic construct
  source 1..75: mol_type = other DNA
taaagagatcgaacagcagcaggtcaccgaaatcgccaaccagacgaaatcgatcgctattgccgccaaatcgga

SEQ ID NO: 78709 - DNA, 75 bp, synthetic construct
  source 1..75: mol_type = other DNA
atcaaaaaatatagatgatattggaatatttgcattggcaatgtgtaatggagaatcaattaacgagaataaaga

SEQ ID NO: 78710 - DNA, 75 bp, synthetic construct
  source 1..75: mol_type = other DNA
gatgatttgcgctctgtgttctatgttgatggcgctgctttccctgtttttgcgtttatcgaagatggcctgtca

SEQ ID NO: 78711 - DNA, 75 bp, synthetic construct
  source 1..75: mol_type = other DNA
gtgacaacccgctacacaggaatgaatccggacggaacgggaaacctgaacgatatggagcacctgaaacagtca

SEQ ID NO: 78712 - DNA, 75 bp, synthetic construct
  source 1..75: mol_type = other DNA
tcctgtgatatctgaacgatctcttaatatttatcgtaatcgtgttaatcattcatggagagggttggttccaca

SEQ ID NO: 78713 - DNA, 75 bp, synthetic construct
  source 1..75: mol_type = other DNA
gtcatgtaaatcgcctgaagatgttgaaacgccagatgtatggtcgagccggatttgaactgctcaggcagaggg

SEQ ID NO: 78714 - DNA, 75 bp, synthetic construct
  source 1..75: mol_type = other DNA
gtggaaggaaacagcaaacgggactggaatcgcttcctggacacgcattaccgccgcggctggaatgtcaacata

SEQ ID NO: 78715 - DNA, 75 bp, synthetic construct
  source 1..75: mol_type = other DNA
tcacggtaacatgacgctggaaaatccatcgccagagctgctcacggtgttgatccgtgaactgaccgggagggg

SEQ ID NO: 78716 - DNA, 75 bp, synthetic construct
  source 1..75: mol_type = other DNA
accactaccccggccagcatggccgcgaccctgcgcaagctgctgaccagccagcgtctgagcgcccgttcgcaa

SEQ ID NO: 78717 - DNA, 75 bp, synthetic construct
  source 1..75: mol_type = other DNA
gctggcaatgctcctcgataagctagactggcgtcagccaaaaacatcccgtcttaacgcactgacaatgttgta

SEQ ID NO: 78718 - DNA, 75 bp, synthetic construct
  source 1..75: mol_type = other DNA
tttgatttattcagagtgtcatgtatctataaaggggaaatagattcgctattaaatataattcgtgaattttat

SEQ ID NO: 78719 - DNA, 75 bp, synthetic construct
  source 1..75: mol_type = other DNA
cgcgaatgatggtatttctgttgcgcagaccactgaaggtgcgctgaatgaaattaacaacaacctgcagcgtat

SEQ ID NO: 78720 - DNA, 75 bp, synthetic construct
  source 1..75: mol_type = other DNA
cgccacgtctggcgcaggttgatccccccgcacaaccgacaatggaaacgcaggatcgggtagaaactgaaaaca

SEQ ID NO: 78721 - DNA, 75 bp, synthetic construct
  source 1..75: mol_type = other DNA
gaacgcaaggctgaatttgtggcgcttcatcctaaagatgaacaggaagccgtgatccgtacgctggaactggaa

SEQ ID NO: 78722 - DNA, 75 bp, synthetic construct
  source 1..75: mol_type = other DNA
tacactgatgctgacggtgtcaaacacgacaatgttaaagttgaactgggtggaagcgatggcaaaaccgaagtt

SEQ ID NO: 78723 - DNA, 75 bp, synthetic construct
  source 1..75: mol_type = other DNA
ggccacgccggaaagcagcggcagctatggcttcgtccgtctggagggtgacctgctcagaacagaggttgccgg

SEQ ID NO: 78724 - DNA, 75 bp, synthetic construct
  source 1..75: mol_type = other DNA
atgtcagttacagagtctaaggcaaaaacggagcgtaaatccagtcgtaaagctgcaaaaacgcaggaaactgca

SEQ ID NO: 78725 - DNA, 75 bp, synthetic construct
  source 1..75: mol_type = other DNA
catgaacagtaaacaatggcccggtaaagccgctattggtcgtctgaaaggtgacgaactggcgcaatataattt

SEQ ID NO: 78726 - DNA, 75 bp, synthetic construct
  source 1..75: mol_type = other DNA
gaacattaattcatttaggggcggaactgattacctcagatgaagttgctataaatgaacttgttaagaatgctt

SEQ ID NO: 78727 - DNA, 75 bp, synthetic construct
  source 1..75: mol_type = other DNA
agatccggaagtccgttacatccccaacgggggcgcagtggcaaacctgcaggtggccacgtcagaaacctggcg

SEQ ID NO: 78728 - DNA, 75 bp, synthetic construct
  source 1..75: mol_type = other DNA
cctgccgcttactatgcaaaggagcttcccacagatgacccccgccatgctggatggcctgaaaaaagaagttgt

SEQ ID NO: 78729 - DNA, 75 bp, synthetic construct
  source 1..75: mol_type = other DNA
gcctgtcgctgttgactcaaaataacctgaataaatcacagtcctctctgagttcggctattgaacgtctgtctt

SEQ ID NO: 78730 - DNA, 75 bp, synthetic construct
  source 1..75: mol_type = other DNA
atgaataaacacacattaacccgtatttcagaggaagcttttaacgagcttaccagaattaaacgagctactaac

SEQ ID NO: 78731 - DNA, 75 bp, synthetic construct
  source 1..75: mol_type = other DNA
cttgacgaaaacataccgctgatgctgtccgattatctgatggaaactgccggaaacgtaccggataagttgcag

SEQ ID NO: 78732 - DNA, 75 bp, synthetic construct
  source 1..75: mol_type = other DNA
tacccgggccattcacagcattgataccgacattaagctcaatcgcgcattgtgggtgatggcagaaacgatgct

SEQ ID NO: 78733 - DNA, 75 bp, synthetic construct
  source 1..75: mol_type = other DNA
aaggtctgactcaggccgcacgtaacgccaacgacggtatttctctggcgcagaccactgaaggcgcactgtctg

SEQ ID NO: 78734 - DNA, 75 bp, synthetic construct
  source 1..75: mol_type = other DNA
gaccagagcggtaagtatcatatcagtaaagataatggtgcaacctatgctaatgcaactgtgaatgccactact

SEQ ID NO: 78735 - DNA, 75 bp, synthetic construct
  source 1..75: mol_type = other DNA
tcagggaacgcattaaaagttagcgatgcgataactacagttcctggtgctaatgctggcgatgccccggttacg

SEQ ID NO: 78736 - DNA, 75 bp, synthetic construct
  source 1..75: mol_type = other DNA
tgatcaaagcctttggtctggaagatcgccagtcggcgttatttgccgcggatgccgaagataccggcaaaaaaa

SEQ ID NO: 78737 - DNA, 75 bp, synthetic construct
  source 1..75: mol_type = other DNA
agaatttgccggacgttattttaatggcgaacataaacccggtgcacgtttatctggctggtacgattttaacga

SEQ ID NO: 78738 - DNA, 75 bp, synthetic construct
  source 1..75: mol_type = other DNA
atgagcaataacgcaccgggtaatcagggattacgcatcgactacgccagcgtattacaggctcgtggtttacct

SEQ ID NO: 78739 - DNA, 75 bp, synthetic construct
  source 1..75: mol_type = other DNA
ctatggattcctgttcgcttcctgctgatcgcgaacgttgtcattcagtttttcaaaatgatgtttaaatggagt

SEQ ID NO: 78740 - DNA, 75 bp, synthetic construct
  source 1..75: mol_type = other DNA
ggctggtgaatatctgcgcaagggcgcgcaggtctacatcgagggacaactccgtacccgtagctgggacgacaa

SEQ ID NO: 78741 - DNA, 75 bp, synthetic construct
  source 1..75: mol_type = other DNA
ctcagccaggaggtactgttatccctgctcagtttctgcaccgcgtgcagcatccacggcgttcagacccgcgag

SEQ ID NO: 78742 - DNA, 75 bp, synthetic construct
  source 1..75: mol_type = other DNA
tggttatcgcgttaatcgccgccgcacttgggtttggtggtctggccggtactgctgcaggcgcagctaaaattg

SEQ ID NO: 78743 - DNA, 75 bp, synthetic construct
  source 1..75: mol_type = other DNA
cttcaccaacaaagcccgctcccggataaaagttctccggtgggacaaacatggcgtatggctgtgtacccgacg

SEQ ID NO: 78744 - DNA, 75 bp, synthetic construct
  source 1..75: mol_type = other DNA
agaacaactaaagggggtaacggctttgcgatcattacctctaacctcggcagtggtgcaaatgctgcttacaat

SEQ ID NO: 78745 - DNA, 75 bp, synthetic construct
  source 1..75: mol_type = other DNA
gtcaagagggaagtaaaccgcagcaaattcgggcggtcgaggatgtcgctggtccagcatcagaaaacacagtac

SEQ ID NO: 78746 - DNA, 75 bp, synthetic construct
  source 1..75: mol_type = other DNA
gccaaagatacgctgacactgacagatgtcaccaaaggggcaacttatggcgtgtcttttgagagcgttgtcctt

SEQ ID NO: 78747 - DNA, 75 bp, synthetic construct
  source 1..75: mol_type = other DNA
gccgggcgcatcaccgtgctgaccaacgagaacggcagccagtccacgttccggtatgacccggtggacaggctg

SEQ ID NO: 78748 - DNA, 75 bp, synthetic construct
  source 1..75: mol_type = other DNA
ctggctccgttcacgacagcccgccccgccagggggacgcccggaaaaggcataagcaggagaacaacaaaacag

SEQ ID NO: 78749 - DNA, 75 bp, synthetic construct
  source 1..75: mol_type = other DNA
tgcggtttcgtgtcagggaacgcagtcgccataaatccgcactggtcatgcagaagtacagccgtcagcaggcga

SEQ ID NO: 78750 - DNA, 75 bp, synthetic construct
  source 1..75: mol_type = other DNA
agacctgggaacaactgatttttaaactgctggcggcagaagaagagtatgagcgaaccggcagtgaagagaccc

SEQ ID NO: 78751 - DNA, 75 bp, synthetic construct
  source 1..75: mol_type = other DNA
tccagaaattggcggtatgctgacttttggcattcctcctttcaaactcgataaaacggtattaagccagcggcg

SEQ ID NO: 78752 - DNA, 75 bp, synthetic construct
  source 1..75: mol_type = other DNA
acagcacatctaacattaatacatctaacagcaaggttaaatctgataacggatttgccattatatgtagcaacc

SEQ ID NO: 78753 - DNA, 75 bp, synthetic construct
  source 1..75: mol_type = other DNA
actatctcccagaataatgcaaactttgttacaacaaaccgcccaaccggactaccacggcccacggatttactt

SEQ ID NO: 78754 - DNA, 75 bp, synthetic construct
  source 1..75: mol_type = other DNA
gtcagaaggaacggataacgggcgacaaccgacacgtaaccacggttatgacgttattgttggcggcgaactgtt

SEQ ID NO: 78755 - DNA, 75 bp, synthetic construct
  source 1..75: mol_type = other DNA
tagtttcaacatacactgatagtgttctcccgtatgatgtaccgaccccatatgtggggccaaaagtgcataact

SEQ ID NO: 78756 - DNA, 75 bp, synthetic construct
  source 1..75: mol_type = other DNA
aacgacagagcatgttctgacgttgttatgctgcttcgcaacagaatacaacaacgtggtaagcgcagactacat

SEQ ID NO: 78757 - DNA, 75 bp, synthetic construct
  source 1..75: mol_type = other DNA
cgtgtactggacggtgataccatcgaggtcatggactcacggaaggcggtgcggatcaggctggtaaatattgat

SEQ ID NO: 78758 - DNA, 75 bp, synthetic construct
  source 1..75: mol_type = other DNA
aacgttcagtaattttgaaagcctatggggctgagggcgacagactggtacgtgaaaatgaacgaaaagagatca

SEQ ID NO: 78759 - DNA, 75 bp, synthetic construct
  source 1..75: mol_type = other DNA
cgtcgtacactgctaaaccttgaagcacgtggagagttccccgaacgcgtgcaggttacggaagggcgtaaggcc

SEQ ID NO: 78760 - DNA, 75 bp, synthetic construct
  source 1..75: mol_type = other DNA
ctggctatttacttcgtgccgctgttctttgtgctggtgcgccgccgcttcccgctgaagccgcgcccggaataa

SEQ ID NO: 78761 - DNA, 75 bp, synthetic construct
  source 1..75: mol_type = other DNA
catcaaatggtcagacaggtaattcgatactggtgcctaatacttcaaccgcttctggtgatgggctgctcattt

SEQ ID NO: 78762 - DNA, 75 bp, synthetic construct
  source 1..75: mol_type = other DNA
agccctgagttgctcaactacagcgtggcgaaatttatcatgtggcgtaaagagacggggctttctcctgttaac

SEQ ID NO: 78763 - DNA, 75 bp, synthetic construct
  source 1..75: mol_type = other DNA
cgctgtagctctgcagcagattaaagagcgtggtgctttaccgatgattgaccgcggcagtattcgtcaggcaat

SEQ ID NO: 78764 - DNA, 75 bp, synthetic construct
  source 1..75: mol_type = other DNA
gggctaccggtgcgcctcttggtgtggcattactgcaagcgctgcgggagatgccgaatgtcgagactcatctgg

SEQ ID NO: 78765 - DNA, 75 bp, synthetic construct
  source 1..75: mol_type = other DNA
ggaagccaccatttttctctatccgggaccggaagctgagccggtaatggcagcggcaaaagccagtctgcagaa

SEQ ID NO: 78766 - DNA, 75 bp, synthetic construct
  source 1..75: mol_type = other DNA
ggcgaccgcgtagtctggcgtccgggtaaaccggcggcggaaggcgtaaatgtcaaagggatcgtggaagcggtg

SEQ ID NO: 78767 - DNA, 75 bp, synthetic construct
  source 1..75: mol_type = other DNA
aatgactgctgcatggatcaacaacgagctgataatggctgagcggaccagctaccctgaacgccgccgcgatat

SEQ ID NO: 78768 - DNA, 75 bp, synthetic construct
  source 1..75: mol_type = other DNA
atgaaaaacctgacactggatgtaaatattatcgatttcccatcaatccctgtggcgatgttgccacatcgctgt

SEQ ID NO: 78769 - DNA, 75 bp, synthetic construct
  source 1..75: mol_type = other DNA
atgaataaaaccgttatcgcggcggctgtattatgtatggccgcaggaaccccaatttattcctttgccgctgac

SEQ ID NO: 78770 - DNA, 75 bp, synthetic construct
  source 1..75: mol_type = other DNA
cccgaaggcgttaaccatggcgtgtacaaggaggccggcagtggcatgggtagtgtaggttatctggaactggtt

SEQ ID NO: 78771 - DNA, 75 bp, synthetic construct
  source 1..75: mol_type = other DNA
cgtaaaactttcgttgatcaccaacgagaaaattcttggtaatgataaggcaatatccagtagtaatgacacagt

SEQ ID NO: 78772 - DNA, 75 bp, synthetic construct
  source 1..75: mol_type = other DNA
ccggtgggcttacttttgaaaacgactcaatccttgcctggattagaaatactgactgggcaaagattggtttta

SEQ ID NO: 78773 - DNA, 75 bp, synthetic construct
  source 1..75: mol_type = other DNA
atgcaagtgcccagatggtattcaatgtatacggagcatggatgactgacagcaatgcagaacagatcgcaatgc

SEQ ID NO: 78774 - DNA, 75 bp, synthetic construct
  source 1..75: mol_type = other DNA
caacatgtgcgtgccggtttccgtctgggcagccacaacgatatgacctttggcgaaggcacctcatcccgtgcc

SEQ ID NO: 78775 - DNA, 75 bp, synthetic construct
  source 1..75: mol_type = other DNA
atcaaacgccattgtccgctatctggcggcacagtacgggcaaaaacgcctgtggatcgactcaccggcacgtcg

SEQ ID NO: 78776 - DNA, 75 bp, synthetic construct
  source 1..75: mol_type = other DNA
ctgcgcgacagtgcaaaacaccgtgtgcgtgaactgccggtgaactggtgggtacagccttctgttatccgcacc

SEQ ID NO: 78777 - DNA, 75 bp, synthetic construct
  source 1..75: mol_type = other DNA
tctgctggacaaagctatcgcatctgttgataaattccgttcttctctaggggcggtgcagaaccgtctgagctc

SEQ ID NO: 78778 - DNA, 75 bp, synthetic construct
  source 1..75: mol_type = other DNA
gtgcatcttatccagcccgctatcagtgtcctgaaaaatcaggctgaaatgacaagactgggtaagcagcaccac

SEQ ID NO: 78779 - DNA, 75 bp, synthetic construct
  source 1..75: mol_type = other DNA
cctggccggacagccgtataaaggccgcaactgcgtgtattgcatactgcacagaagtggccatagaggggctgt

SEQ ID NO: 78780 - DNA, 75 bp, synthetic construct
  source 1..75: mol_type = other DNA
cggtaatatgcctgtgtccgtcgaaacatttaataattatttaaagtcacacatgcgtgacgaatggaacaaaac

SEQ ID NO: 78781 - DNA, 75 bp, synthetic construct
  source 1..75: mol_type = other DNA
tgctgcgcatcagcctgctggcggccctttcggttgcgtttgtggggccaattggctttattggcctggttgcac

SEQ ID NO: 78782 - DNA, 75 bp, synthetic construct
  source 1..75: mol_type = other DNA
gaagtaattcggcggaaacgtatggatatctggaggcttttaagagagaaaaagcagcgtaaccggaatttcctt

SEQ ID NO: 78783 - DNA, 75 bp, synthetic construct
  source 1..75: mol_type = other DNA
ggaacctcgatgattgcaaaaaggatccccctgtttcgccagagcctgccgcgcatagagaaagtcgcagcagtt

SEQ ID NO: 78784 - DNA, 75 bp, synthetic construct
  source 1..75: mol_type = other DNA
tcacaaccgcatcaggatcaaatggagaaatcagcaaaagcgttaacccaacgttgggatgactggtttgccgat

SEQ ID NO: 78785 - DNA, 75 bp, synthetic construct
  source 1..75: mol_type = other DNA
gagcgtggcgctttaccgatgattgatcgcggtgatattcgtcaggcaattgaccgttgcagcaatatctgggct

SEQ ID NO: 78786 - DNA, 75 bp, synthetic construct
  source 1..75: mol_type = other DNA
agtattgctgctgccggtgagtctggtgcagacaaaagtaactgcctgaaacaaccttctgttcctgaaagtgat

SEQ ID NO: 78787 - DNA, 75 bp, synthetic construct
  source 1..75: mol_type = other DNA
agtatgaacatagaatcggtgacctgattgcccgatttaaagaagctggtggggtggtaaatgaagctgagatat

SEQ ID NO: 78788 - DNA, 75 bp, synthetic construct
  source 1..75: mol_type = other DNA
tgaatgacagaaaagaactggttgcggtagcggaaacggcgggcggcaggaaaaagtcgtccggcattcccggtg

SEQ ID NO: 78789 - DNA, 75 bp, synthetic construct
  source 1..75: mol_type = other DNA
atgtcagaaattacatccctggtcactgctgaagcagtgaaggaagtcctgcgctctgaagaagtcctgagcgca

SEQ ID NO: 78790 - DNA, 75 bp, synthetic construct
  source 1..75: mol_type = other DNA
taacggatacaatgctctcagattgcatcaggtaaatggtagccccggaacaataacagtttatgctttttctga

SEQ ID NO: 78791 - DNA, 75 bp, synthetic construct
  source 1..75: mol_type = other DNA
caccggtgaaccggatgagcttcagctggcacgatatttggcactgttgcaaatagtcggtggtgataaacttat

SEQ ID NO: 78792 - DNA, 75 bp, synthetic construct
  source 1..75: mol_type = other DNA
tatggagaaaatacgtcaggctggcggaaacatcagttttgatcccaatatccgcagcgatctctggcagagtga

SEQ ID NO: 78793 - DNA, 75 bp, synthetic construct
  source 1..75: mol_type = other DNA
gacccattgaaaggaaatattgacctttctgacagcaaatcttctacgttattgaaatttgttacgccattgtta

SEQ ID NO: 78794 - DNA, 75 bp, synthetic construct
  source 1..75: mol_type = other DNA
agacaaaaataatcaaagcagcattactggcttatcaggatctggacgaaaacgaactcattaatttgtggttca

SEQ ID NO: 78795 - DNA, 75 bp, synthetic construct
  source 1..75: mol_type = other DNA
acgctcgctctggcgcaaacctgcggtgccctggcaaccctggcgaaaggcgcgatgactgccctgccataccag

SEQ ID NO: 78796 - DNA, 75 bp, synthetic construct
  source 1..75: mol_type = other DNA
ttcgtaaacgatgacggcagccgcccggtgctggaagagctgaaaaagcacggcgttaaatatatcgccctgcgc

SEQ ID NO: 78797 - DNA, 75 bp, synthetic construct
  source 1..75: mol_type = other DNA
taggtgagttagctggtgtcaccagaaatggagacaaaacactcagtggtaaaagttatattgactattatgaag

SEQ ID NO: 78798 - DNA, 75 bp, synthetic construct
  source 1..75: mol_type = other DNA
tggaagcgcgtcttgatgcagaagtggatgccattctggatgaactgctgggcgcaccggcagctccggagccgg

SEQ ID NO: 78799 - DNA, 75 bp, synthetic construct
  source 1..75: mol_type = other DNA
agttcttctgaactggcaaaagcgagtattgagctaatcaaccaactcgtggacacagctgccagcattaataat

SEQ ID NO: 78800 - DNA, 75 bp, synthetic construct
  source 1..75: mol_type = other DNA
agtgcgggggctcgttatttggccgtaagaatacttactggagtgaacagctcgtcagccaccgctcgcgcaaaa

SEQ ID NO: 78801 - DNA, 75 bp, synthetic construct
  source 1..75: mol_type = other DNA
ggtgaacaggttccggttcttggcagcgtgtcttatgaggatggtaaagccgttcagtccgtgacgtatcgtgat

SEQ ID NO: 78802 - DNA, 75 bp, synthetic construct
  source 1..75: mol_type = other DNA
acggagtgagcagacagaaccgaactgaacctgaacgggttaaatcaccgtcacgtggattttctatgggattct

SEQ ID NO: 78803 - DNA, 75 bp, synthetic construct
  source 1..75: mol_type = other DNA
atcattgcacaagctcagatttgtggtgctctggcgaccacggctaaaggcgcgatgaccgccttaccccgacaa

SEQ ID NO: 78804 - DNA, 75 bp, synthetic construct
  source 1..75: mol_type = other DNA
tgcatatcatccctacacgagagaacgagggagaaaatggtgatatagggccactacgcccctttacgcttaatc

SEQ ID NO: 78805 - DNA, 75 bp, synthetic construct
  source 1..75: mol_type = other DNA
agcgggaaaaaattaaggagcagatcgttgaatttgtgcgccagagtggacgtgagacgttacgggctctggaag

SEQ ID NO: 78806 - DNA, 75 bp, synthetic construct
  source 1..75: mol_type = other DNA
ggcgtcataatataatttgtaatgagtgccgtaacagtgaagtgatgcagagagttttgatattttacacaggag

SEQ ID NO: 78807 - DNA, 75 bp, synthetic construct
  source 1..75: mol_type = other DNA
tatgtcaggtcgtttgctcaatcgctggggcagggtgaagaagcctcagttgctggcaaggctggacaggctgga

SEQ ID NO: 78808 - DNA, 75 bp, synthetic construct
  source 1..75: mol_type = other DNA
tgttgagctcgtgcgccagagtgggcgcgagacgttacgacaactggaagctaagacaggtgcatcaaggtatta

SEQ ID NO: 78809 - DNA, 75 bp, synthetic construct
  source 1..75: mol_type = other DNA
aagcccggaaaaacattccgccccaaaatcctgtcgatgcagacaaattactggctgcctctcgcggagaatttg

SEQ ID NO: 78810 - DNA, 75 bp, synthetic construct
  source 1..75: mol_type = other DNA
gcaattttgcgctttgctatgaaaacaatgagttacagaacggtaaaccccagcccatatatcgaatgacaaaag

SEQ ID NO: 78811 - DNA, 75 bp, synthetic construct
  source 1..75: mol_type = other DNA
tggcctggctggaaaaacatcctcaggcgttaaaggggatacagcgtgggctggagcgcgaaactttgcgtgtta

SEQ ID NO: 78812 - DNA, 75 bp, synthetic construct
  source 1..75: mol_type = other DNA
tgaaatctcctgatggtgaggcgatatcaggcgcaaatattaccctgacggcgctgacagtttcaccggatgcgc

SEQ ID NO: 78813 - DNA, 75 bp, synthetic construct
  source 1..75: mol_type = other DNA
aggcttaaggcacagacggatgccgcaggccggacgactgagtacagcccggatgtggtgacgggactcatcacg

SEQ ID NO: 78814 - DNA, 75 bp, synthetic construct
  source 1..75: mol_type = other DNA
gcaaggagtatttatctttactcccgtcaatgattgcatctcttttctctgctaacggtgccgcagcggtcattg

SEQ ID NO: 78815 - DNA, 75 bp, synthetic construct
  source 1..75: mol_type = other DNA
tttacttactatgggcattgtttcatttaccccagaaataataattccctttaaaatcatgctgtggtggtatat

SEQ ID NO: 78816 - DNA, 75 bp, synthetic construct
  source 1..75: mol_type = other DNA
ctgaacagccggagtgatatcaccatcagtggttttaccggcacggcaggcagtctgacaatgaatgtggccggt

SEQ ID NO: 78817 - DNA, 75 bp, synthetic construct
  source 1..75: mol_type = other DNA
agcgagaaaaaattaaagggcaggttgttgaactcgtacgccagagtgggcgtgagacgttacgacaactggaag

SEQ ID NO: 78818 - DNA, 75 bp, synthetic construct
  source 1..75: mol_type = other DNA
gtatggtaccggcagtgaaattcagcggggtatccaggccgcgacagcggcgcttcaggggctggcggggggtaa

SEQ ID NO: 78819 - DNA, 75 bp, synthetic construct
  source 1..75: mol_type = other DNA
ctacagtgactcttgctcaggcaagagcaaagcgcgatgaagctaaaaagcccttagtacagggcatagacccaa

SEQ ID NO: 78820 - DNA, 75 bp, synthetic construct
  source 1..75: mol_type = other DNA
gaaagtcatctgtatcccggcaacagaagatattaacattgcgattatgccttttcagacggcagacaatgccct

SEQ ID NO: 78821 - DNA, 75 bp, synthetic construct
  source 1..75: mol_type = other DNA
ctctcagggggtactggctgacggtcgggtgatgaatctggctgcggcatatgcctcagcagtgtcggattttga

SEQ ID NO: 78822 - DNA, 75 bp, synthetic construct
  source 1..75: mol_type = other DNA
tttataaaaagcagtaataaggcgaatatgatgttcgttcatgaatttagagatgggtataatgctctcagactg

SEQ ID NO: 78823 - DNA, 75 bp, synthetic construct
  source 1..75: mol_type = other DNA
gggattttgcgtggttataaagatacgcgttccattttctatatcacctttacggcttactgggtgctgggcttg

SEQ ID NO: 78824 - DNA, 75 bp, synthetic construct
  source 1..75: mol_type = other DNA
gaggtggatttcggacgctctgaaggaaataacattgagcaggccgacggtaaaaaatggtctgagcaggaccgt

SEQ ID NO: 78825 - DNA, 75 bp, synthetic construct
  source 1..75: mol_type = other DNA
cacagcttgaccagtcaagtttcgttgtccagcgggccagaccaatgctgaaaagcctgcgggcaaggcaattcg

SEQ ID NO: 78826 - DNA, 75 bp, synthetic construct
  source 1..75: mol_type = other DNA
cggtgaaactcgtgtactgcgcccgggctacgttaagccgaaacacgaatttaattaccagcaggcggtggagcg

SEQ ID NO: 78827 - DNA, 75 bp, synthetic construct
  source 1..75: mol_type = other DNA
ttcaccatgacgcagtccgcaccgctgatggtgctgccggatccggatgagtttgtggtggtgcaggtgaaataa

SEQ ID NO: 78828 - DNA, 75 bp, synthetic construct
  source 1..75: mol_type = other DNA
ctttacgcgatatttttaaacttgagactgatttacttaaaaaggcaaaaattaaagcaaaaaaaatagaagaaa

SEQ ID NO: 78829 - DNA, 75 bp, synthetic construct
  source 1..75: mol_type = other DNA
atcgtagctttacatccgcgcttaaaataaaaaaagaaaaagtagtagtatttaactcgatatcgaaaacattta

SEQ ID NO: 78830 - DNA, 75 bp, synthetic construct
  source 1..75: mol_type = other DNA
tgctacatgcaggtacagatggagaatgcacaggacatctgcaaacgcctgtacccgataatgaaggaacttaac

SEQ ID NO: 78831 - DNA, 75 bp, synthetic construct
  source 1..75: mol_type = other DNA
caggaaaatgatccggaggaaatggaaggcgctgaacatccacacaaggagaaccctggcggcaatcagcatcac

SEQ ID NO: 78832 - DNA, 75 bp, synthetic construct
  source 1..75: mol_type = other DNA
tatgatggggaggtaaggacatcaataggagcagcaaacctgaaccttaccacccgcataattagcaagacaggt

SEQ ID NO: 78833 - DNA, 75 bp, synthetic construct
  source 1..75: mol_type = other DNA
aaagcgagagtgccgcagctggttctgcaagcgcggcggctgcttctgccacggcatcagccaacagtcaaagag

SEQ ID NO: 78834 - DNA, 75 bp, synthetic construct
  source 1..75: mol_type = other DNA
ttccctgtggatatgaattttatattgcgaattacccagaagcaggtctttatcttgcagaaatgctttattatc

SEQ ID NO: 78835 - DNA, 75 bp, synthetic construct
  source 1..75: mol_type = other DNA
gattatcatcacgcgactgacaataagctcagtctccagatggtcagtgaggggcgaccgattattttaagggct

SEQ ID NO: 78836 - DNA, 75 bp, synthetic construct
  source 1..75: mol_type = other DNA
cttcaatttcgatcaagccaatcagcaactgaatattagtattccgcaagcctggctggcgtggcactcagaaaa

SEQ ID NO: 78837 - DNA, 75 bp, synthetic construct
  source 1..75: mol_type = other DNA
tggcggttggtctgatcgcggttcatatgcggctggttttttctcaatatattctactgctgagcgagctataca

SEQ ID NO: 78838 - DNA, 75 bp, synthetic construct
  source 1..75: mol_type = other DNA
tatcaccctctggcactacgatgcgtcggaccgcatcacgcaccggacggtgaacggcgacccggcagagcagtg

SEQ ID NO: 78839 - DNA, 75 bp, synthetic construct
  source 1..75: mol_type = other DNA
cggcgcaggccatcggcgatgaccgtttacaacagcaaagtcaggggcgagtagtaccagacagtttcactcatg

SEQ ID NO: 78840 - DNA, 75 bp, synthetic construct
  source 1..75: mol_type = other DNA
gaattgatgcaattgaggggcaatactatcgggcaattttgagcagtgagtggggaagtactcacctacagcaca

SEQ ID NO: 78841 - DNA, 75 bp, synthetic construct
  source 1..75: mol_type = other DNA
actggcgggctgttgtggccatcgccgccaaaaatgcgcggctgtgttgggcatcactacattacggtgatgatt

SEQ ID NO: 78842 - DNA, 75 bp, synthetic construct
  source 1..75: mol_type = other DNA
atggcctctactgacacgccggggcgtggctccttccgtggtgtgccgttcctggtttatcaggagcagcgggaa

SEQ ID NO: 78843 - DNA, 75 bp, synthetic construct
  source 1..75: mol_type = other DNA
cgtgtgatcaagtatttttaagtgatgcagatactttcgttccacctgataatgatggaatgggctatatgctgg

SEQ ID NO: 78844 - DNA, 75 bp, synthetic construct
  source 1..75: mol_type = other DNA
gggctatatgcaggcgtttgtgaagtatggtttgagaaacattatgctaggcacaaaattccgtggtaaaataga

SEQ ID NO: 78845 - DNA, 75 bp, synthetic construct
  source 1..75: mol_type = other DNA
gggctatatgcaagcgttcgtgaagtatgggctgcgcaacctgaaagatggggcgaaatttagagagagtattaa

SEQ ID NO: 78846 - DNA, 75 bp, synthetic construct
  source 1..75: mol_type = other DNA
caagctacgacaaaaataaatatacgaaaatatccctcgaaaaaagaataaatatcctttacgggcaaaacggag

SEQ ID NO: 78847 - DNA, 75 bp, synthetic construct
  source 1..75: mol_type = other DNA
cgtcagactggccggactgccgatatctctgaagatgcctggcagttcttcctgggcgattatctgcgaaacgaa

SEQ ID NO: 78848 - DNA, 75 bp, synthetic construct
  source 1..75: mol_type = other DNA
ttatccagcaccggtggtacttccacgcaaattaaaggcgttctggaacggcttcgcctggcaggtatgccggaa

SEQ ID NO: 78849 - DNA, 75 bp, synthetic construct
  source 1..75: mol_type = other DNA
taccgagatcgaaaaagagataagtaagaaaagagaaatagttaaaacattaaaaataaaactagaggcaacaaa

SEQ ID NO: 78850 - DNA, 75 bp, synthetic construct
  source 1..75: mol_type = other DNA
ggcttctgcaagcatttatgtcatggagatgccatacgatatatggcaaaaaaatactaaagtaatgttgtctca

SEQ ID NO: 78851 - DNA, 75 bp, synthetic construct
  source 1..75: mol_type = other DNA
aagaccggcatacttcccgcagtaaacgatatgcgtacattcccaccatcaccgtactggaaagcctgcagcggg

SEQ ID NO: 78852 - DNA, 75 bp, synthetic construct
  source 1..75: mol_type = other DNA
gaaaacgtatccacacccgtgccattcacagcatcgacaccgatattaagctcaaccgcgcattgtgggtaatgg

SEQ ID NO: 78853 - DNA, 75 bp, synthetic construct
  source 1..75: mol_type = other DNA
ctgctcagggaggcgacacgacttgaccagacaagcgcccttttcgaacgggcaagaccaatgctgaaaagcctt

SEQ ID NO: 78854 - DNA, 75 bp, synthetic construct
  source 1..75: mol_type = other DNA
tggctttgtggtctggcttacctttaattttcgtgcactggaagaactattttatcgtagaaagagaaaaggaga

SEQ ID NO: 78855 - DNA, 75 bp, synthetic construct
  source 1..75: mol_type = other DNA
ctgattctgttataaccgttggaaacccagctaatcctaaagcaggaaataatagcgattatgttcctgcatcag

SEQ ID NO: 78856 - DNA, 75 bp, synthetic construct
  source 1..75: mol_type = other DNA
ataagacgatccgcgaagagctgttccctgacgttgttgaggcgtttaagcgcattctcgctgagaagctgtcag

SEQ ID NO: 78857 - DNA, 75 bp, synthetic construct
  source 1..75: mol_type = other DNA
tgacgccctgttagcgcgtgttcgtgctcagttagccgtgcagttgccgtattacctgctgccccaacatttctt

SEQ ID NO: 78858 - DNA, 75 bp, synthetic construct
  source 1..75: mol_type = other DNA
gaggattgtatacctatacaagggctaaagtttgaactgaaatggaaaccagatcaggattcagaacctgatgac

SEQ ID NO: 78859 - DNA, 75 bp, synthetic construct
  source 1..75: mol_type = other DNA
aggcgatgaaaccatcgagcagtacgcaacgcgggtattcgatagctggaaaccgggtgataaagaccgcgatga

SEQ ID NO: 78860 - DNA, 75 bp, synthetic construct
  source 1..75: mol_type = other DNA
actttgatgaatggatgatacctgtttacgctccggcaccgtttataccggtacgtggcgaaggttcgcgcttgt

SEQ ID NO: 78861 - DNA, 75 bp, synthetic construct
  source 1..75: mol_type = other DNA
gcgtaaagccagctggtactgcagacaatgtcaccacgattattatggggagcagtactgcacacactgccagac

SEQ ID NO: 78862 - DNA, 75 bp, synthetic construct
  source 1..75: mol_type = other DNA
ctgatgaaaagacggcgtacgaagtcgaagcagcacttattgatgcctaccctgggttaacgaatatcatgaatg

SEQ ID NO: 78863 - DNA, 75 bp, synthetic construct
  source 1..75: mol_type = other DNA
atttgaacgctggaaggctatcgacaccagggataagcgtgaaaagttcacggcgctagtgcctgcaattatgga

SEQ ID NO: 78864 - DNA, 75 bp, synthetic construct
  source 1..75: mol_type = other DNA
tgtgtacggcatcatctgtgatccggcggatatgctggtggtgcagatgaccgagacaaaggcgcgtgagcattc

SEQ ID NO: 78865 - DNA, 75 bp, synthetic construct
  source 1..75: mol_type = other DNA
aaaacggcagctgcatcgtccgccagttcggcggcgtcatcggcatcatctgcgtctgcttcaaaagatgaggcg

SEQ ID NO: 78866 - DNA, 75 bp, synthetic construct
  source 1..75: mol_type = other DNA
taggattatatgaatttaaatcaaaaaatatagatgatattggaatatttgcattggcaatgtgtaatggagaat

SEQ ID NO: 78867 - DNA, 75 bp, synthetic construct
  source 1..75: mol_type = other DNA
gcgtaaagccagctggcactgcagacaatgtcatcacgattattatggggagcggtactgcactcactgccatac

SEQ ID NO: 78868 - DNA, 75 bp, synthetic construct
  source 1..75: mol_type = other DNA
tacccgataagggacgcttcctgaacaacattaacgcggtcagtaaaacagactttgctgataagcgtggtatgc

SEQ ID NO: 78869 - DNA, 75 bp, synthetic construct
  source 1..75: mol_type = other DNA
tattacagaccatgagcgcacaggaatatgaagatatccgggctgccggaagtgatgaacgccgtgagctgacac

SEQ ID NO: 78870 - DNA, 75 bp, synthetic construct
  source 1..75: mol_type = other DNA
acgtaaagccagctggtactgcaggcaatgtcaccacgattattatggggagcagtactgcacacactgccagac

SEQ ID NO: 78871 - DNA, 75 bp, synthetic construct
  source 1..75: mol_type = other DNA
gtctgagggctatgcttcagacatcattgaggcgtttgagaaagacattttcccgcatattggacacaaacctat

SEQ ID NO: 78872 - DNA, 75 bp, synthetic construct
  source 1..75: mol_type = other DNA
gcgtctggcagcgagtctggatgaggccggatattccacggccagcatcatcaacctgctggtcacggaaggagg

SEQ ID NO: 78873 - DNA, 75 bp, synthetic construct
  source 1..75: mol_type = other DNA
atgtacgcaaaatcctttctcgcacttgatggtaacggacgtctgacgggggcccgtaccgcacagactgcacct

SEQ ID NO: 78874 - DNA, 75 bp, synthetic construct
  source 1..75: mol_type = other DNA
tctcgatttatttaacgaacgcgtgttataccgtaaggccatttcagaaaagagtgatgaagaaatagtagcctt

SEQ ID NO: 78875 - DNA, 75 bp, synthetic construct
  source 1..75: mol_type = other DNA
agcacgggaatggctgattcttaacatggcgggactggagcgtgaagaattccgggtgctgtatctgaataacca

SEQ ID NO: 78876 - DNA, 75 bp, synthetic construct
  source 1..75: mol_type = other DNA
ttcccggaaacgggcgcggtcattaagggagaggctggcgataacattggccgtggtgaccgtaccacgctttat

SEQ ID NO: 78877 - DNA, 75 bp, synthetic construct
  source 1..75: mol_type = other DNA
gcaaggatgatgagtggtaccgcaacgaatgtctgaaaattgatgatccgattatcgttgctcaggaactggacc

SEQ ID NO: 78878 - DNA, 75 bp, synthetic construct
  source 1..75: mol_type = other DNA
cctgaaaaaggtatttttgtgaagaattcagatggttcagatgtatgtactttatttgatgccgctgcattttct

SEQ ID NO: 78879 - DNA, 75 bp, synthetic construct
  source 1..75: mol_type = other DNA
tgaactacagcgcatcagcggaaggcgtcctgattccatccgaatgggtacaggctgccgttgatgcgcatatca

SEQ ID NO: 78880 - DNA, 75 bp, synthetic construct
  source 1..75: mol_type = other DNA
cggacctgaaaaatgccgataaaattaatgtgactgaaaaagccactggttcagataacagcctgaacgtcagct

SEQ ID NO: 78881 - DNA, 75 bp, synthetic construct
  source 1..75: mol_type = other DNA
agcactgaacggtcttttcagcgacgggcatattcaggccggtaagaacggcaaaatcaccctgagcggtacacc

SEQ ID NO: 78882 - DNA, 75 bp, synthetic construct
  source 1..75: mol_type = other DNA
ggaagaacaggggttgaactgggcaagaccttcagtggtaaggactggagtgtgacggcccgtgccggaaccagc

SEQ ID NO: 78883 - DNA, 75 bp, synthetic construct
  source 1..75: mol_type = other DNA
gtaatcgagttcttcgactatcagtgtatttactgcatgcgggttacacctgttgttgaatcggtaatgaatcag

SEQ ID NO: 78884 - DNA, 75 bp, synthetic construct
  source 1..75: mol_type = other DNA
gcgggcagaatggtgcaattatcctgaaagacagtgtgactcagggtgccggttatctcgaatttaaagacagtt

SEQ ID NO: 78885 - DNA, 75 bp, synthetic construct
  source 1..75: mol_type = other DNA
cccggacgaaatcatctcaatcagcagcgccatggcgagcaaagacaaactcatcatcgagctgtcgcagccgac

SEQ ID NO: 78886 - DNA, 75 bp, synthetic construct
  source 1..75: mol_type = other DNA
acaggacaacctcgaagagtttcgctttgacgaggacgggctgggcgctggcgttcgcggcgatgcacgcgctat

SEQ ID NO: 78887 - DNA, 75 bp, synthetic construct
  source 1..75: mol_type = other DNA
tgagcggaaccggctctgccggtggtggtttcagtgacaaccacacacatgttcaggtcggtgtcgacaaaaaac

SEQ ID NO: 78888 - DNA, 75 bp, synthetic construct
  source 1..75: mol_type = other DNA
accacgaaagcgtcagaagctgccacctcagccagagatgcgtcggcttcaaaagaggcggcaaaatcatcagaa

SEQ ID NO: 78889 - DNA, 75 bp, synthetic construct
  source 1..75: mol_type = other DNA
aatctgtaaataaatacattcttaacgttcaaaatatctacaggaattctcctgttcctgtttgtgtccgtaaca

SEQ ID NO: 78890 - DNA, 75 bp, synthetic construct
  source 1..75: mol_type = other DNA
tggatatccgcgtccctgaccatctgattgtcggcggcaggcaaatctattcgttcgcagaacacggtttgctgt

SEQ ID NO: 78891 - DNA, 75 bp, synthetic construct
  source 1..75: mol_type = other DNA
tgcgtctgcggcgggccggagagataaccggacaacatgtccctgaaatcattctgctcaactcccatgacggta

SEQ ID NO: 78892 - DNA, 75 bp, synthetic construct
  source 1..75: mol_type = other DNA
gcagcacgacacggaacgtccctggtttgaacacactgacgacgggctgacggaacacggtcatgagtgccctta

SEQ ID NO: 78893 - DNA, 75 bp, synthetic construct
  source 1..75: mol_type = other DNA
cacaaggtaagacacggttacagattcaggaagagttaggaatttctaaagcaacttattaccgattagcgaagt

SEQ ID NO: 78894 - DNA, 75 bp, synthetic construct
  source 1..75: mol_type = other DNA
atgtgagcggcggcggtcacggtattgatatcaccggcgacagcgcaacggtggacaacaaaggcggcatgaccg

SEQ ID NO: 78895 - DNA, 75 bp, synthetic construct
  source 1..75: mol_type = other DNA
ctcaaaatgggtaactgccttatgtcatacagcaagcgtggaagtaacgcgcttattaaatttgattacaccgac

SEQ ID NO: 78896 - DNA, 75 bp, synthetic construct
  source 1..75: mol_type = other DNA
aacgggacaaacatttgctgggactttaccaacctttatggcggtacgatgatttttcccggtgacagcggatac

SEQ ID NO: 78897 - DNA, 75 bp, synthetic construct
  source 1..75: mol_type = other DNA
agggtagtcacggacgctggctgacggcgggcgacctctccctccggggtaaaacactgaataccgcagggacca

SEQ ID NO: 78898 - DNA, 75 bp, synthetic construct
  source 1..75: mol_type = other DNA
ataccccgacgcctcccaaaccaatttcgtttaataatgacgttatcctcgataaaacagcaaaaacgttaacta

SEQ ID NO: 78899 - DNA, 75 bp, synthetic construct
  source 1..75: mol_type = other DNA
gaagagcttaaacgcttaccctctgaatgctctcctttagtcgaacaaaacctgatgccatggcttgccacaggc

SEQ ID NO: 78900 - DNA, 75 bp, synthetic construct
  source 1..75: mol_type = other DNA
ggctggctaaccatcatcggtattgcgatttctattcccgtagggattgttggctactttgcagcgaaaataatc

SEQ ID NO: 78901 - DNA, 75 bp, synthetic construct
  source 1..75: mol_type = other DNA
agtcactgaatatctctcaaacaacacttgctaaggcagttggatgcacacagggagctatcggacattgggaat

SEQ ID NO: 78902 - DNA, 75 bp, synthetic construct
  source 1..75: mol_type = other DNA
gaatttaacattgccgccgataaaacgctggtaataggcaataccagcaacgatggcgcgattgattctcttgcc

SEQ ID NO: 78903 - DNA, 75 bp, synthetic construct
  source 1..75: mol_type = other DNA
tatcggtcagcagatccagccttatctggaggacggcaaatgctttcgcatggtgcttaaaccgtggcgcgagag

SEQ ID NO: 78904 - DNA, 75 bp, synthetic construct
  source 1..75: mol_type = other DNA
gggaaggttttcagccctttttcgcctgccagacccgtgtgcgcgacccgggccgccggggatacacaaaacaca

SEQ ID NO: 78905 - DNA, 75 bp, synthetic construct
  source 1..75: mol_type = other DNA
acattacaaatcaaatatgccaatcatgggtcaaccatgacattaaacacacaggggaccgctcattctggcgct

SEQ ID NO: 78906 - DNA, 75 bp, synthetic construct
  source 1..75: mol_type = other DNA
tagcgaacttgcctgtacacgcgttaactggaaccgggtgatcctcgaaggtcgcaaaccgggcctgacgctggg

SEQ ID NO: 78907 - DNA, 75 bp, synthetic construct
  source 1..75: mol_type = other DNA
cagttaactatcactgcatgagtatgggggttgtcagaaatcgcctttttgctgtaattgagacgcggaccgtga

SEQ ID NO: 78908 - DNA, 75 bp, synthetic construct
  source 1..75: mol_type = other DNA
tgttgatggtggcgcttatatgttctatgcgcaaaaaaataccgataacacctatatgttaagcgttaatggtgc

SEQ ID NO: 78909 - DNA, 75 bp, synthetic construct
  source 1..75: mol_type = other DNA
gtatccatacccgtgccattcacagcattgacactgacattaagctcaaccgcgcattgtgggtgatggcggaaa

SEQ ID NO: 78910 - DNA, 75 bp, synthetic construct
  source 1..75: mol_type = other DNA
acgaaaaactgataaatcaccaactcgatatggcggtgatttatgagcattcccctgtggctggggtatccagtc

SEQ ID NO: 78911 - DNA, 75 bp, synthetic construct
  source 1..75: mol_type = other DNA
tggctcactggttcgggcatctcgatgctgaactttttgctcatctcatttcgcaggtctgtcgtatgtataaca

SEQ ID NO: 78912 - DNA, 75 bp, synthetic construct
  source 1..75: mol_type = other DNA
gttatatctacaacgaacagcatcttgaccaggcatatgacgacgatacgccccgccttggctggctgacaaccc

SEQ ID NO: 78913 - DNA, 75 bp, synthetic construct
  source 1..75: mol_type = other DNA
gggttgtttggcgcacgttactcccattatccctgcgtggggggcctttatgctgttctgaggctgatcaaggac

SEQ ID NO: 78914 - DNA, 75 bp, synthetic construct
  source 1..75: mol_type = other DNA
acaaggccagcactcgggccggacaatttcagcgatattaaaaaagccgctgatcgtgtttatgctgaaatggga

SEQ ID NO: 78915 - DNA, 75 bp, synthetic construct
  source 1..75: mol_type = other DNA
ttacgcatacaattcacccttacatttcaaatctaattggcggtgaaaataaattcactactcaattgcttactt

SEQ ID NO: 78916 - DNA, 75 bp, synthetic construct
  source 1..75: mol_type = other DNA
cagaacccgcatccagacgatttatcagccggggagcttcacgccactcatcagggttgaaaccgccaccggtga

SEQ ID NO: 78917 - DNA, 75 bp, synthetic construct
  source 1..75: mol_type = other DNA
atgtggatatataaaaacaatggaaaagataatgcaaaaccaaacttaggagagcgagacgtaagaatgttcgaa

SEQ ID NO: 78918 - DNA, 75 bp, synthetic construct
  source 1..75: mol_type = other DNA
cattgtgagcgtaggaactcctgcggtgacgttattcatcactgtaaggaggctgccaacatggctactacccct

SEQ ID NO: 78919 - DNA, 75 bp, synthetic construct
  source 1..75: mol_type = other DNA
gaaacccaacttgcgcatgtcgataagaatgcgattcgtgggacgtataaccatgcgttatatttggaagggcgt

SEQ ID NO: 78920 - DNA, 75 bp, synthetic construct
  source 1..75: mol_type = other DNA
tatcaagcgcatcgggtatggtggcaagttaactgggcatggttttcgacattccatgtcaacaattttacatga

SEQ ID NO: 78921 - DNA, 75 bp, synthetic construct
  source 1..75: mol_type = other DNA
atgattttgaacaactccagtcattggccgaccgtcggctttacctcgcaaaacaggccgggcgcaatcgggtat

SEQ ID NO: 78922 - DNA, 75 bp, synthetic construct
  source 1..75: mol_type = other DNA
atgaaacttaatgcgcgacaggtagacgcagctaaacccagagagaaagcctataagctggcagatggtgctggt

SEQ ID NO: 78923 - DNA, 75 bp, synthetic construct
  source 1..75: mol_type = other DNA
ggctttgtcaggatatacaggaagcgcgttagtagttttagccgctcgtctgctgattataaccggcttgcgtac

SEQ ID NO: 78924 - DNA, 75 bp, synthetic construct
  source 1..75: mol_type = other DNA
caacatgtcgaaagcgcagattatccagcaggccggtaactccgtgctggcaaaagctaaccaggtaccacagca

SEQ ID NO: 78925 - DNA, 75 bp, synthetic construct
  source 1..75: mol_type = other DNA
tgctgaactttttgctcatctcatttcgcaggtctgtcgtatgtataacaacgcgtttgtggggccggagcgtaa

SEQ ID NO: 78926 - DNA, 75 bp, synthetic construct
  source 1..75: mol_type = other DNA
cgtttttaatacgtacaccggaagccagatcgtcaagctgggtatgcgattgttgattcttacaggactccgccc

SEQ ID NO: 78927 - DNA, 75 bp, synthetic construct
  source 1..75: mol_type = other DNA
cgcctgattaaagatgacagcgaggatattcccactttcgaagaacttggctacatgccgcaacaaatccagaca

SEQ ID NO: 78928 - DNA, 75 bp, synthetic construct
  source 1..75: mol_type = other DNA
gactggaagtcgatggcgctgaacgccgaggacagccagttcctggaaacccgcaagtttcagcttgaagaaatc

SEQ ID NO: 78929 - DNA, 75 bp, synthetic construct
  source 1..75: mol_type = other DNA
acctgctggacgtggtggaaaaagctctgaacagtgagaacgtccgcccggtggctgaccgtcttacggttcgca

SEQ ID NO: 78930 - DNA, 75 bp, synthetic construct
  source 1..75: mol_type = other DNA
gctgatgacccaacgattcgcgtcggtgggccgacctaccattgggtacgcgaaagtattctggctggcgaacag

SEQ ID NO: 78931 - DNA, 75 bp, synthetic construct
  source 1..75: mol_type = other DNA
tgtggtgacacgacgtattactggaaaaatacatacgctacccagtacgacaccgtgtacggcgggtataaaaac

SEQ ID NO: 78932 - DNA, 75 bp, synthetic construct
  source 1..75: mol_type = other DNA
aagttccgcctctcaggcgcactgaccaacaatcagttcgggctggggatttatctgtatacggacgctcccgtt

SEQ ID NO: 78933 - DNA, 75 bp, synthetic construct
  source 1..75: mol_type = other DNA
tgacgaacatcagcccgtcaccaccaccgacattctgacaccacgacgccgggaggattacggtaaggacctgtg

SEQ ID NO: 78934 - DNA, 75 bp, synthetic construct
  source 1..75: mol_type = other DNA
gaaaataacggtgtcgcatccgaagacctgctggccgtggtgcgtaacgcccttaatggcgaggacgtcaggccg

SEQ ID NO: 78935 - DNA, 75 bp, synthetic construct
  source 1..75: mol_type = other DNA
gttgtataaagacctgctgacacgcactcaggccgcgctgaaggcaaaccccaaaaacatactgctttgtgttgt

SEQ ID NO: 78936 - DNA, 75 bp, synthetic construct
  source 1..75: mol_type = other DNA
accatcctcgaaagcctgcaacgtgaggggtttgagccgttctttgcctgtcagacaaaggtgcatgacctgagc

SEQ ID NO: 78937 - DNA, 75 bp, synthetic construct
  source 1..75: mol_type = other DNA
aggtataaggccacacattatcccgtcaccgggggaaaggcaaatggacaggtatggttttctctgacctatctg

SEQ ID NO: 78938 - DNA, 75 bp, synthetic construct
  source 1..75: mol_type = other DNA
tggcgtgtcagatattcacgagccggagttgctgtcggtggatgaggagaatgatgcctcagacggaatcgctat

SEQ ID NO: 78939 - DNA, 75 bp, synthetic construct
  source 1..75: mol_type = other DNA
cgctgcgtcaggcgcgccttgatttattaaccggtaaacgggtggtgtctgtccagaaagatggacgaagaattg

SEQ ID NO: 78940 - DNA, 75 bp, synthetic construct
  source 1..75: mol_type = other DNA
aactacatcaccttgaaatgctggtggcgttgggtgaacagggcaatctgacccatgtcgcacgaatgatgaata

SEQ ID NO: 78941 - DNA, 75 bp, synthetic construct
  source 1..75: mol_type = other DNA
tggaaggtatcgttgaagatgatatggacatcatccaacagatcataatggatgatgatcttgaagatgacatcg

SEQ ID NO: 78942 - DNA, 75 bp, synthetic construct
  source 1..75: mol_type = other DNA
tgcacaaatccgcccttcttccgtggtgaccaaggactacacctttaaacgacccggctgggcagggcgttttga

SEQ ID NO: 78943 - DNA, 75 bp, synthetic construct
  source 1..75: mol_type = other DNA
acatatcaggtttatcaagtagttacagtataagaatatacgagttcctccagcaattccgcagtacgggagaga

SEQ ID NO: 78944 - DNA, 75 bp, synthetic construct
  source 1..75: mol_type = other DNA
ggccgtggacgtaaggccgcgcagccggagcctcagccgcaaccgccggagggtgacgattacgggttttcagac

SEQ ID NO: 78945 - DNA, 75 bp, synthetic construct
  source 1..75: mol_type = other DNA
gcggcactgatgccgacagtaatctgcagagtctgtgctggccgtgtcataaggcgaagacggcccgtgaacggt

SEQ ID NO: 78946 - DNA, 75 bp, synthetic construct
  source 1..75: mol_type = other DNA
ttcatcgccgccgcctcccgttcctgtggagtgggataaagccgctgacccattaaataccagtttaccgcaatg

SEQ ID NO: 78947 - DNA, 75 bp, synthetic construct
  source 1..75: mol_type = other DNA
aggtaacggcaaagggcgattcatcctgcaagacggttgtgaggtaagaggggagaagggggggaaactgaccaa

SEQ ID NO: 78948 - DNA, 75 bp, synthetic construct
  source 1..75: mol_type = other DNA
cagttaaacccgccgtcgacggcgaacatcttacgctccgggtgagctggaaaggctcagacggacagacccgga

SEQ ID NO: 78949 - DNA, 75 bp, synthetic construct
  source 1..75: mol_type = other DNA
gctgcgtgttgagctggaagccgcagagaagcgcaacgcaaaattacaaagcgagaatgcatacatccgcaaccg

SEQ ID NO: 78950 - DNA, 75 bp, synthetic construct
  source 1..75: mol_type = other DNA
aggcaatggtcgtgggcgttttgcgctgcaggatgggtgtaaagtggtgggggaggggaggctcaataatattac

SEQ ID NO: 78951 - DNA, 75 bp, synthetic construct
  source 1..75: mol_type = other DNA
atcgaagaactgaactgtctcttctttgacgaacatcctcatttttcctggcatccgggtatgctggtaccggat

SEQ ID NO: 78952 - DNA, 75 bp, synthetic construct
  source 1..75: mol_type = other DNA
ctttatgactggtcgagccaatggcgtcgcgacttatcgtaatactgatttcttcggtctggtaaatggtctgaa

SEQ ID NO: 78953 - DNA, 75 bp, synthetic construct
  source 1..75: mol_type = other DNA
gctgcttttgctgatgagtattttacacctgaatatatttcaggcttctccggactgaaggaagatattcgccat

SEQ ID NO: 78954 - DNA, 75 bp, synthetic construct
  source 1..75: mol_type = other DNA
tgctgattgaaacacagggcgaggtctgcctccttccccttcccggtgatgcagcagaacgcttgttcccgtcgg

SEQ ID NO: 78955 - DNA, 75 bp, synthetic construct
  source 1..75: mol_type = other DNA
atgccaccacgaactccaaaagcctgccgtgttcgcgggtgccgccgtaccaccactgacccgtcaggttattgc

SEQ ID NO: 78956 - DNA, 75 bp, synthetic construct
  source 1..75: mol_type = other DNA
gggctcggatttatcaactattcccttgtgccgtatctgacccgtattgaacaacggatcaatacagggctggtc

SEQ ID NO: 78957 - DNA, 75 bp, synthetic construct
  source 1..75: mol_type = other DNA
tacagagtacggtgccgataacggtatccggctggaggcggtatggctgacacacgacccggcatacccggatga

SEQ ID NO: 78958 - DNA, 75 bp, synthetic construct
  source 1..75: mol_type = other DNA
gaatgagcgtggccgggtctgtcggcgcttatcagtttcatggccgcagcgctgacgggcgggtcgcagatatct

SEQ ID NO: 78959 - DNA, 75 bp, synthetic construct
  source 1..75: mol_type = other DNA
tgacgaacatcggcccgtcaccaccgccgacattctgacaccacgacgccgggaggattacggtaaggacctgtg

SEQ ID NO: 78960 - DNA, 75 bp, synthetic construct
  source 1..75: mol_type = other DNA
acccgaacggcatggtgccgctggccgccgtcggcagtggcgcacaggtcatccccccgggcggcggtgccgtcc

SEQ ID NO: 78961 - DNA, 75 bp, synthetic construct
  source 1..75: mol_type = other DNA
tattccgcaggaactggcgactgccgcatcaatgactgaaaacggtcatcgtcgggatatgcaccctgccgaaca

SEQ ID NO: 78962 - DNA, 75 bp, synthetic construct
  source 1..75: mol_type = other DNA
attttgaggatgagccagagttatgggtttacgattccaatggcgaatctcgatataaaaactttaatgaatatc

SEQ ID NO: 78963 - DNA, 75 bp, synthetic construct
  source 1..75: mol_type = other DNA
tatcagaccatccaggagaacatgctgaaaggcgggatttccggccgcagcgctaaaggaaaacgtatccacacc

SEQ ID NO: 78964 - DNA, 75 bp, synthetic construct
  source 1..75: mol_type = other DNA
ccattgtcggcggaggaatggtcggcggcgcactggcgctggggctggcacagcacggattttcggtaacggtga

SEQ ID NO: 78965 - DNA, 75 bp, synthetic construct
  source 1..75: mol_type = other DNA
atgaagctgatcctgcctttcccgcccagcgtgaacacgtactggcgacaccccaacaaaggggcatttgctggt

SEQ ID NO: 78966 - DNA, 75 bp, synthetic construct
  source 1..75: mol_type = other DNA
accgtactggaaagcctgcagcgggaaggttttcagccattcttcgcctgccagacccgcgtgcgcgaccagagc

SEQ ID NO: 78967 - DNA, 75 bp, synthetic construct
  source 1..75: mol_type = other DNA
cccgttgccagtccgttcaggtttaccgtcacgagaagaccccaaaaggacatgagcgattccgctgccgtgatt

SEQ ID NO: 78968 - DNA, 75 bp, synthetic construct
  source 1..75: mol_type = other DNA
tccggataaccggatccgcgatctggacaactataacaaggcgctgtttgacgccctgacccacgcgggtgtgtg

SEQ ID NO: 78969 - DNA, 75 bp, synthetic construct
  source 1..75: mol_type = other DNA
tcaacgccgaaattcgcgataatcttcgcttcggtcttgagtttgagaaatcggcatttggtaaatacaacgtgg

SEQ ID NO: 78970 - DNA, 75 bp, synthetic construct
  source 1..75: mol_type = other DNA
gtcatggaacaggtgtataacctgggccactccaccattatgcaatcagcgtggaaacgcgggcagaaagtcacc

SEQ ID NO: 78971 - DNA, 75 bp, synthetic construct
  source 1..75: mol_type = other DNA
attccatacgctgacggtcgatgagctggcaaccagcaacagcgcctatgcgatgcgtacggacctgaaaaattc

SEQ ID NO: 78972 - DNA, 75 bp, synthetic construct
  source 1..75: mol_type = other DNA
cagtgttcgcccgttatcatacggttttatttcgcaggacgacctggcaaaacaattcctgaacgtttctgaaga

SEQ ID NO: 78973 - DNA, 75 bp, synthetic construct
  source 1..75: mol_type = other DNA
taatctcgggttaatggcggcggagcgtgctggcgtgttgaaacgtcaggcgctgaaatatgcgttagggttgta

SEQ ID NO: 78974 - DNA, 75 bp, synthetic construct
  source 1..75: mol_type = other DNA
tgaataatgcaccgttgctgattgcccacgtttgcggaacagaagctgatccgcaaatacgcagtcagcagataa

SEQ ID NO: 78975 - DNA, 75 bp, synthetic construct
  source 1..75: mol_type = other DNA
acgctctggtctggcggaaggtgaaaaggtggtttccagcggcctgttcctgattgattccgaagccaatatttc

SEQ ID NO: 78976 - DNA, 75 bp, synthetic construct
  source 1..75: mol_type = other DNA
gcagcatgatcgcgggcggtattatttctgcggcaggttttacctggtttgcaaaggcggaaccgcccgcagaaa

SEQ ID NO: 78977 - DNA, 75 bp, synthetic construct
  source 1..75: mol_type = other DNA
accgtactggaaagcctgcagcgggaaggttttcagccattcttcgcctgccagacccgcgtgcgcgacccgggc

SEQ ID NO: 78978 - DNA, 75 bp, synthetic construct
  source 1..75: mol_type = other DNA
ctggcccgctgatgggcggtccggcacggatgatgtcgccaaacgctgactgggcacccgtactgcccattcgcc

SEQ ID NO: 78979 - DNA, 75 bp, synthetic construct
  source 1..75: mol_type = other DNA
tccctgcaaacattgattgatttcgtaccggaacatctgactttactgaaacaagcacaaaagccaactgtacct

SEQ ID NO: 78980 - DNA, 75 bp, synthetic construct
  source 1..75: mol_type = other DNA
agacgcctgctacggcaaaaaaagcgtcgtctacgccatctcgcccggtgaatgctggtgcaaagaaacggccta

SEQ ID NO: 78981 - DNA, 75 bp, synthetic construct
  source 1..75: mol_type = other DNA
ccagtctggaaaatggtagctccacgcttagcacatcaattaatgtcaacgctgatgcgtctacggcacatctca

SEQ ID NO: 78982 - DNA, 75 bp, synthetic construct
  source 1..75: mol_type = other DNA
tccgctgacacatgaagaactgatgcactatgtacccagtatttttggggaagaccggcatacctcccgcagtga

SEQ ID NO: 78983 - DNA, 75 bp, synthetic construct
  source 1..75: mol_type = other DNA
ataccgaacattacaaggtaaagtcgtatggctatggatattgccatttgttattgaatggttaattgtgtgcac

SEQ ID NO: 78984 - DNA, 75 bp, synthetic construct
  source 1..75: mol_type = other DNA
gagagatgaaaatgacaaacctgttaaggagcaaaaacagcaactgaataccgcagtcagcatcgacaacgtgaa

SEQ ID NO: 78985 - DNA, 75 bp, synthetic construct
  source 1..75: mol_type = other DNA
cgaaaaaggggatagtacagctcagcagtgcgaccaacagcacgtctgaaacgctggcggcaacgccaaaggcag

SEQ ID NO: 78986 - DNA, 75 bp, synthetic construct
  source 1..75: mol_type = other DNA
ggcgaaccgctcaggggaaaagcagccgcacccgtgctgttaccggtattgatggcgatgtgaagctcaatcgcg

SEQ ID NO: 78987 - DNA, 75 bp, synthetic construct
  source 1..75: mol_type = other DNA
ctggtgaaagcgttagcaatagtagaggtacgggtgctggaccatcttattgttggtatcggtgatgtactttct

SEQ ID NO: 78988 - DNA, 75 bp, synthetic construct
  source 1..75: mol_type = other DNA
gcgctggcacaggcggcactgacttaccgttatggtgacgaacatcagcccgtcaccaccgccgacattctgacg

SEQ ID NO: 78989 - DNA, 75 bp, synthetic construct
  source 1..75: mol_type = other DNA
gaaggaaggtaccgcattcatggcgctgatggcagagcactttcgccttgctgccctgctgccggatgaatggga

SEQ ID NO: 78990 - DNA, 75 bp, synthetic construct
  source 1..75: mol_type = other DNA
catagatgaaacttcatttatgattgaagaaatcaatgaatggcctgaaggcgttaacacaagaaaaggttttat

SEQ ID NO: 78991 - DNA, 75 bp, synthetic construct
  source 1..75: mol_type = other DNA
ggtgccgcacgggacgcggagaagatgaagaaaggtgatgcggctgaacatgcagagcaccatatgaaagacaac

SEQ ID NO: 78992 - DNA, 75 bp, synthetic construct
  source 1..75: mol_type = other DNA
ccgtcgccgctggctaactcgaccactatgtattacaccggcaaaaacccgctggcgaagattggttataagagt

SEQ ID NO: 78993 - DNA, 75 bp, synthetic construct
  source 1..75: mol_type = other DNA
taatcttggtttgatggcggcggagcgtgctggcgtgttgaaacgtcaggcgctgaaatatgcgttagggttgta

SEQ ID NO: 78994 - DNA, 75 bp, synthetic construct
  source 1..75: mol_type = other DNA
gaaaattccagagcgcggcgtgcgcagcaatagttgagcagttacgtcgtctgccgaaaccaacgtcggcacctg

SEQ ID NO: 78995 - DNA, 75 bp, synthetic construct
  source 1..75: mol_type = other DNA
taccgtttactgccacctgcacggtgagccgacctggaacggtcgcatcctgcatacccactatgccaccggtca

SEQ ID NO: 78996 - DNA, 75 bp, synthetic construct
  source 1..75: mol_type = other DNA
aagcggaaatcattgggaatggcgtggatgagacaactctgacagcaacagtgaaagatccttttgataacgtgg

SEQ ID NO: 78997 - DNA, 75 bp, synthetic construct
  source 1..75: mol_type = other DNA
ttgcgctaatgatacgcataaaattctctacacccgcaccaccagcggtaacgtctctgctcccgcgcagtctac

SEQ ID NO: 78998 - DNA, 75 bp, synthetic construct
  source 1..75: mol_type = other DNA
ggcccagcggatctcggaaaactgtcatattcctgtaaggatcacccctgatgtacaggcgtatctgagcgtgac

SEQ ID NO: 78999 - DNA, 75 bp, synthetic construct
  source 1..75: mol_type = other DNA
gaacgtactcaacccggtgcatggggacgtatacaactgactgatgccattgcagaactggcgaaaaaacagtcc

SEQ ID NO: 79000 - DNA, 75 bp, synthetic construct
  source 1..75: mol_type = other DNA
agatgttcaggccgtatgtaatggtgaattatctgttgcggcaaaaacaacatggacttcaattgttccacgggc

SEQ ID NO: 79001 - DNA, 75 bp, synthetic construct
  source 1..75: mol_type = other DNA
gagcgcgtcatccacgagctactgcaaaagcggttcctgaccaagcagaagcgcagcctagcggcctttcaccgc

SEQ ID NO: 79002 - DNA, 75 bp, synthetic construct
  source 1..75: mol_type = other DNA
atgataaagcatacgttattaatgccgtttttttttagtgcattgcccgcttatgccgggttaacttccattacc

SEQ ID NO: 79003 - DNA, 75 bp, synthetic construct
  source 1..75: mol_type = other DNA
gagtggcaaccatcgcatgaaatgtgaggtcaaaactgacggacggcgttacctccaggcggaagcactgtggat

SEQ ID NO: 79004 - DNA, 75 bp, synthetic construct
  source 1..75: mol_type = other DNA
atggcagacatcattgattcggcatcagaaatcgaagaattacagcgcaatacagcaataaaaatgcgtcgtctg

SEQ ID NO: 79005 - DNA, 75 bp, synthetic construct
  source 1..75: mol_type = other DNA
gggttatatgcaggcatttgtgaagtatggattacgcaacctgaaagaaggtgcgaagttccgcaaaggtattga

SEQ ID NO: 79006 - DNA, 75 bp, synthetic construct
  source 1..75: mol_type = other DNA
ctggtcagggtggcagtacaggaggcggcgaagcagaatctggtcgctttttcccgtgagccgatgattgattac

SEQ ID NO: 79007 - DNA, 75 bp, synthetic construct
  source 1..75: mol_type = other DNA
agatatggcgaggggcaatattccttctccgctgccttcacaaagcggactggcagaaatgtataacatcagtcg

SEQ ID NO: 79008 - DNA, 75 bp, synthetic construct
  source 1..75: mol_type = other DNA
actcagcaacatcatgcgctatgccgttcagcagggacttaccgacagtaatccggcgcagcatctggaaggtgt

SEQ ID NO: 79009 - DNA, 75 bp, synthetic construct
  source 1..75: mol_type = other DNA
tgccatgctgctatctgctgctgacaacatcttttttaatcaaacacttgaaattatatcggtgatttttcactg

SEQ ID NO: 79010 - DNA, 75 bp, synthetic construct
  source 1..75: mol_type = other DNA
gcgcactgcttgccggtgaggagaacgccaggttgcgtgcagcccactggttacatgagaggggcctgaaagtat

SEQ ID NO: 79011 - DNA, 75 bp, synthetic construct
  source 1..75: mol_type = other DNA
ctggtattcctgattttcgccattatctctggcggctgggtggcagaaagcccgacctgggcaccgtactttgac

SEQ ID NO: 79012 - DNA, 75 bp, synthetic construct
  source 1..75: mol_type = other DNA
cgatgatgcaggtaattccaggtggggcatctgctcgcccgtttattacccatcataacgctctggatttagata

SEQ ID NO: 79013 - DNA, 75 bp, synthetic construct
  source 1..75: mol_type = other DNA
acaccgatggcgcagacgccaacgcgcagggtaaagacagtgttgcgattggttctggttccattgctgccgctg

SEQ ID NO: 79014 - DNA, 75 bp, synthetic construct
  source 1..75: mol_type = other DNA
atggatgttgagtatggccagtacagcgtcaccctgctggttgaaggttttccgccttcacatgccgggaccatt

SEQ ID NO: 79015 - DNA, 75 bp, synthetic construct
  source 1..75: mol_type = other DNA
tacagcagcgggctgctgtacgtggctcacgaacaccggagaaagtttttaaaaacgtggcgctggcgtggcata

SEQ ID NO: 79016 - DNA, 75 bp, synthetic construct
  source 1..75: mol_type = other DNA
atcactgactacactgacacgcttgacaggcgtctgaggaacggagaagagtcagataccctgaagaccggaatc

SEQ ID NO: 79017 - DNA, 75 bp, synthetic construct
  source 1..75: mol_type = other DNA
gcatgctgtagaactaatccgaagggcatggatatctggttatcgtagtcctgatgtaagttgggcgtatctgtc

SEQ ID NO: 79018 - DNA, 75 bp, synthetic construct
  source 1..75: mol_type = other DNA
tattggtccggatgactgtggctcctgtcatatctgtctgggtaacggctctccacctgcatcttcgcgtcgccg

SEQ ID NO: 79019 - DNA, 75 bp, synthetic construct
  source 1..75: mol_type = other DNA
ggctgaccgtgggcgatccggcccgtgaatttaccatgacgcagtccgcaccgctgatggtgctgccggatccgg

SEQ ID NO: 79020 - DNA, 75 bp, synthetic construct
  source 1..75: mol_type = other DNA
ggaaagtgcacctgacgccagctcagttatccatgctactggaggggatcgcgtggccacatcccaaacggacag

SEQ ID NO: 79021 - DNA, 75 bp, synthetic construct
  source 1..75: mol_type = other DNA
attagcctgttcagcgtagtatttgggatgagaagccaaagtggctttggtggtgtcccagcccaggtttttatt

SEQ ID NO: 79022 - DNA, 75 bp, synthetic construct
  source 1..75: mol_type = other DNA
gtccggcactcaccggaacgccaaccgcacctactgcggcacagtcggtcaacaatacacaaattgccaccacgg

SEQ ID NO: 79023 - DNA, 75 bp, synthetic construct
  source 1..75: mol_type = other DNA
gaccagttcgagaaaattgaggtcgattttggcaggtcgacgaagaataacatcactcagggtagtggtaaggag

SEQ ID NO: 79024 - DNA, 75 bp, synthetic construct
  source 1..75: mol_type = other DNA
ccacgggatttgactgtctggatgaaatgacctgtggcctgcagcccggtgacctggtcctgctggctgcccgtc

SEQ ID NO: 79025 - DNA, 75 bp, synthetic construct
  source 1..75: mol_type = other DNA
tgcgcctgcgccgtaacggagagataaacggagaacatgtccctgaaattattctgctcaactctcatgacggta

SEQ ID NO: 79026 - DNA, 75 bp, synthetic construct
  source 1..75: mol_type = other DNA
atgattctaggtaatgattacgttgatttagccccgcttttccaggcacacagcactagaaactatctgctctct

SEQ ID NO: 79027 - DNA, 75 bp, synthetic construct
  source 1..75: mol_type = other DNA
tgatgacatcatggcggatgcagagaatttcaatatcaggctggtgggcttcgatacatggaacgccacgcacct

SEQ ID NO: 79028 - DNA, 75 bp, synthetic construct
  source 1..75: mol_type = other DNA
ttgaccgcctggcatgagtacgcagaaggcgtaaaaaacggcaaaattacggcctgtaaacgactgaaacaggcc

SEQ ID NO: 79029 - DNA, 75 bp, synthetic construct
  source 1..75: mol_type = other DNA
atgggattgtttacgacccgccagttactcggttataccgaacaaaaagttaaattccgtgcgctgtttctggag

SEQ ID NO: 79030 - DNA, 75 bp, synthetic construct
  source 1..75: mol_type = other DNA
accagttgaaatacgttcggctatgaaggccacacatgcgagagacatatctgctgttgattcagagagtgcagc

SEQ ID NO: 79031 - DNA, 75 bp, synthetic construct
  source 1..75: mol_type = other DNA
caacttgttttaagtgctaccagccatgaatacagaaatgtaaatattcaaataagaactcttattgaaaaatac

SEQ ID NO: 79032 - DNA, 75 bp, synthetic construct
  source 1..75: mol_type = other DNA
aggtgtgggctgtgcatctggggtggagtggaaatcaccgcatgagatgtgaggcaaaaactgacggcaggcgtt

SEQ ID NO: 79033 - DNA, 75 bp, synthetic construct
  source 1..75: mol_type = other DNA
cacccgtgccattcacagcatcgacacggacattaagctcaatcgcgcattgtgggtgatggcagaaacgctgct

SEQ ID NO: 79034 - DNA, 75 bp, synthetic construct
  source 1..75: mol_type = other DNA
gctggttcagcggataccgatgcggttaacgtaggtcagttgaaagtcactgatgagcgcgtagcgcaaaatacc

SEQ ID NO: 79035 - DNA, 75 bp, synthetic construct
  source 1..75: mol_type = other DNA
atgacgacgttaactcaatgccagcagcaggtgctggatatgctgatttcttatcagaaagaacgtggtttcccg

SEQ ID NO: 79036 - DNA, 75 bp, synthetic construct
  source 1..75: mol_type = other DNA
cgtctggtacaggcgctggccctggttgatatccgggtgccggaccatctgatagtcggtggcagccaggttttc

SEQ ID NO: 79037 - DNA, 75 bp, synthetic construct
  source 1..75: mol_type = other DNA
tctggaatccgatcaggggcgtcgcctcaaaaaaactgagaaagattcgctgcgtgatgaagtgttgcactccct

SEQ ID NO: 79038 - DNA, 75 bp, synthetic construct
  source 1..75: mol_type = other DNA
aaggctttcagcccttcttcgcctgccagacccgcgtgcgcgacccgggccgccggggatacacaaaacacatgc

SEQ ID NO: 79039 - DNA, 75 bp, synthetic construct
  source 1..75: mol_type = other DNA
gttcccagaccacccgtggtgcgcagacggactacaccgcctacaacatggacgcgccgcagaattctgtcggtg

SEQ ID NO: 79040 - DNA, 75 bp, synthetic construct
  source 1..75: mol_type = other DNA
cctcattctgcgggccctgaaaaccctggaccgccatcttcatgaacccggcgtggccttcacctccacccgtgc

SEQ ID NO: 79041 - DNA, 75 bp, synthetic construct
  source 1..75: mol_type = other DNA
ccgcaccggggaaatgtggtggacagagtcattgaaggggcttacgaggtggtgggcgtgtttgaccggatagag

SEQ ID NO: 79042 - DNA, 75 bp, synthetic construct
  source 1..75: mol_type = other DNA
ttacttcaggttcgtctgccagaacggctgcgtctgtggtctgtctctgggggaagtgcgtgttccacaccgggg

SEQ ID NO: 79043 - DNA, 75 bp, synthetic construct
  source 1..75: mol_type = other DNA
aatgccatggcttacggtgaagggcttccgctgccggattcatacgatgctccggatccgcgcattaaacagctg

SEQ ID NO: 79044 - DNA, 75 bp, synthetic construct
  source 1..75: mol_type = other DNA
gagagatgacacccggtgagcgcagtctcattcagcgggccctgaaaaccctggaccgtcatcttcatgaacccg

SEQ ID NO: 79045 - DNA, 75 bp, synthetic construct
  source 1..75: mol_type = other DNA
ggcctggtctgcggtcagtctctgggagaattgcgtgttccacaccggggaaatgtggtggagaaagttattgaa

SEQ ID NO: 79046 - DNA, 75 bp, synthetic construct
  source 1..75: mol_type = other DNA
aaatggcctgataaggttaaaaaccttgagttgcttgggcgtcatgtttctgttcaggcgtttaaagacaacgtc

SEQ ID NO: 79047 - DNA, 75 bp, synthetic construct
  source 1..75: mol_type = other DNA
ctgacgccacgacgccgggaggattacggtaaggacctgtggagtgcttatcagaccattcaggagaatatgctg

SEQ ID NO: 79048 - DNA, 75 bp, synthetic construct
  source 1..75: mol_type = other DNA
atgaagattttgagctaggtggcacatttaaatacagcggctgggtggaagcatctgataacgatgagcactatg

SEQ ID NO: 79049 - DNA, 75 bp, synthetic construct
  source 1..75: mol_type = other DNA
gacagcgaggcggtcgggattatccgctcactgcttgccggtgaggaaaacgcaaggctgcgtgcagcccactgg

SEQ ID NO: 79050 - DNA, 75 bp, synthetic construct
  source 1..75: mol_type = other DNA
tgtcacgatgaactgcggcgtaagaaaatcagcgcgcttatcccgccccgaaaaggcgcgggttactggcccggt

SEQ ID NO: 79051 - DNA, 75 bp, synthetic construct
  source 1..75: mol_type = other DNA
cggccccggcattgtggcgatggggatgaaaagcggcaaaaaagtgattggcgctggagcgggtaatcccccctg

SEQ ID NO: 79052 - DNA, 75 bp, synthetic construct
  source 1..75: mol_type = other DNA
gtctgcaccatacagccatcatgcactcgcaaaatgtgtcccggctcaacctggccgcccgaacgttacaaacat

SEQ ID NO: 79053 - DNA, 75 bp, synthetic construct
  source 1..75: mol_type = other DNA
tcagcgttctggcgattaccggcggtccggggatcgtcgccatgggaatgaaaagtggcaagaaagtgattggtg

SEQ ID NO: 79054 - DNA, 75 bp, synthetic construct
  source 1..75: mol_type = other DNA
gggaagtgcgtgttccacaccggggaaatgtggtggagaaagttatcgaaggtgcttacgaggtggtgggcgtgt

SEQ ID NO: 79055 - DNA, 75 bp, synthetic construct
  source 1..75: mol_type = other DNA
ttgaccggattgaggaaaagcgtgatgccatgcagtctctggttctgccgccaccggcacgtcaggcactggcac

SEQ ID NO: 79056 - DNA, 75 bp, synthetic construct
  source 1..75: mol_type = other DNA
ggcattatggcggggatttatctggcggaatatggtcgtaaatcctggctggcagaagtgattcgcttcattaac

SEQ ID NO: 79057 - DNA, 75 bp, synthetic construct
  source 1..75: mol_type = other DNA
tgcaggtaatggtaatccgaaggggattactggtgctttatggcagcgcacatcgacagggtttacaaattttgc

SEQ ID NO: 79058 - DNA, 75 bp, synthetic construct
  source 1..75: mol_type = other DNA
atgaccatccgctccaaaacgtacatgggcagcggatttaatgagctgaagtttgatgatgcgacagggagagaa

SEQ ID NO: 79059 - DNA, 75 bp, synthetic construct
  source 1..75: mol_type = other DNA
aaagagggcaaagctccgtcgatatcgacaggattaatcaccatattgttaatgtggaaaagattaactttagat

SEQ ID NO: 79060 - DNA, 75 bp, synthetic construct
  source 1..75: mol_type = other DNA
ttacttcaggttcgtctgccagaacggatgcgtctgcggtcagtctctgggggaagtgcgtgttccacaccgggg

SEQ ID NO: 79061 - DNA, 75 bp, synthetic construct
  source 1..75: mol_type = other DNA
atgaatactgtattatccccggagtcatcgcagtctgaactctttccactggcgattatggcccagcatggttgt

SEQ ID NO: 79062 - DNA, 75 bp, synthetic construct
  source 1..75: mol_type = other DNA
ataaaaacagggagagtgagggcgtttattttgtgcccttcatgacagacggtaacggcgtcaataccgccacta

SEQ ID NO: 79063 - DNA, 75 bp, synthetic construct
  source 1..75: mol_type = other DNA
agctcatggagcttcacaagtggttttgggaacaaagtgaagccgagcgcgccgctgacattcgcatcaaaggag

SEQ ID NO: 79064 - DNA, 75 bp, synthetic construct
  source 1..75: mol_type = other DNA
tttatgggacgaaagccaaagtagcgaaagctgctggtgttgatccatctgctgtttctcaatgggggaaactgg

SEQ ID NO: 79065 - DNA, 75 bp, synthetic construct
  source 1..75: mol_type = other DNA
ggcagccaggtgacaggggaggagggcggcagtatgcataacatcaccctggatgtgcgtggctctgactgcacc

SEQ ID NO: 79066 - DNA, 75 bp, synthetic construct
  source 1..75: mol_type = other DNA
gggaagtgcgtgttccacaccggggagacgtggtggagaaagttattgaaggggcttacgaggtagtgggcgttt

SEQ ID NO: 79067 - DNA, 75 bp, synthetic construct
  source 1..75: mol_type = other DNA
atttttaccagtacggacaggtatcctgatgctgcctggttcctgcgtaaatccgcaaccctgataatgggaacc

SEQ ID NO: 79068 - DNA, 75 bp, synthetic construct
  source 1..75: mol_type = other DNA
cagctggcgaccgattctaactacctggaagtttgttacatcctgctgaatggtgaaaaaccgactcaggaacag

SEQ ID NO: 79069 - DNA, 75 bp, synthetic construct
  source 1..75: mol_type = other DNA
ccatcattttagaggcgcaggatgtgttgataatctacagaggaaaactaccgggaataattactggttctctga

SEQ ID NO: 79070 - DNA, 75 bp, synthetic construct
  source 1..75: mol_type = other DNA
ggtcccggttttcgcctgccaagcggtaaaggcgggctgattttactgatagtcgtgctggttgcaggctactat

SEQ ID NO: 79071 - DNA, 75 bp, synthetic construct
  source 1..75: mol_type = other DNA
gaacagtcagtctgacccctatttaagccaggcggtgctggatttacagttcggtcattcccagcgggtagggta

SEQ ID NO: 79072 - DNA, 75 bp, synthetic construct
  source 1..75: mol_type = other DNA
tcaatgagttcccaacagaatcttgatattcaaagttctgagggcaaagtgactgtttctgctaatcaggaactg

SEQ ID NO: 79073 - DNA, 75 bp, synthetic construct
  source 1..75: mol_type = other DNA
atgcggcaccggcaggataacttactggcaaacagaacattgttgcctggtatggtttccggtcagtgcgcattt

SEQ ID NO: 79074 - DNA, 75 bp, synthetic construct
  source 1..75: mol_type = other DNA
tattcaatttttacatactctatgtgcagccttttattgggctggctcttgtgggttatggcgcatgggaatttt

SEQ ID NO: 79075 - DNA, 75 bp, synthetic construct
  source 1..75: mol_type = other DNA
gatttatggcgtatgcaatggcaatcctgaaactacagttttggcgcattaccgaatggctggaatttgcggaac

SEQ ID NO: 79076 - DNA, 75 bp, synthetic construct
  source 1..75: mol_type = other DNA
tgaaaaccacgatcgtaaagaacgggtctatgttgacacttatacgattgaacatatcatgccgcagaaccctaa

SEQ ID NO: 79077 - DNA, 75 bp, synthetic construct
  source 1..75: mol_type = other DNA
agaaaaatgtggtgttcaacgataaacgctttggctgcgtgtacagcctgaaggccagtctttccggtgtgccgg

SEQ ID NO: 79078 - DNA, 75 bp, synthetic construct
  source 1..75: mol_type = other DNA
aacaatcgacgattgctgggaaggctgggtcatatccctccggcagaagcagaaaaagcttattatgcttccatc

SEQ ID NO: 79079 - DNA, 75 bp, synthetic construct
  source 1..75: mol_type = other DNA
gaaatggctgaccggcttcacccggcacgccgtattctggggcgtgtgtcatccgaatatctactacttccataa

SEQ ID NO: 79080 - DNA, 75 bp, synthetic construct
  source 1..75: mol_type = other DNA
aatggaagcgtccctgcatacctgattcgccctgatttatccgctttgttccccaatccgaacaaagcagcttaa

SEQ ID NO: 79081 - DNA, 75 bp, synthetic construct
  source 1..75: mol_type = other DNA
ttcctggaccgttcatcggtggaagtgttcgttaacgatggcgatgccaccctgtccagccgtatttacccgcag

SEQ ID NO: 79082 - DNA, 75 bp, synthetic construct
  source 1..75: mol_type = other DNA
gattacgtcgatgacaaaatcgcagagcatgagcagtcccgccgccatcctgacgccacgctgacagaaaaaggt

SEQ ID NO: 79083 - DNA, 75 bp, synthetic construct
  source 1..75: mol_type = other DNA
acaggcagatgcacaggaactgaaaaatgcccgtgacagtggacaggtcattgatacagggttttgcctttttgc

SEQ ID NO: 79084 - DNA, 75 bp, synthetic construct
  source 1..75: mol_type = other DNA
ggccgttctctggattggccgggcgctgctgatgaatcccattggtctcgccatcaccgccgtcgcggcagcagc

SEQ ID NO: 79085 - DNA, 75 bp, synthetic construct
  source 1..75: mol_type = other DNA
tgcagggggagattgtggcactggtccacagtcatcccggtggtctgccctggctgagcgaggcggaccggcggc

SEQ ID NO: 79086 - DNA, 75 bp, synthetic construct
  source 1..75: mol_type = other DNA
tagcgtgggcctgaaggtcctgaccggtcacggtgcggcggtcgacacgacgactgccgccggcaagcttgtgtt

SEQ ID NO: 79087 - DNA, 75 bp, synthetic construct
  source 1..75: mol_type = other DNA
caggccgaaaactctactcgactacgccagcaaaatcagggcaatccgaagaaaattgccggacaaaccgctcgc

SEQ ID NO: 79088 - DNA, 75 bp, synthetic construct
  source 1..75: mol_type = other DNA
accacagccagaaggcgctggagtgggagatcctcaaaggcgtgatggtggtggaagagcgggaaaatatcgccc

SEQ ID NO: 79089 - DNA, 75 bp, synthetic construct
  source 1..75: mol_type = other DNA
gctgaacgcctgaccgttacggctctgcccgccattaccacttatggcgaaccggaagggaacctgctaacaggg

SEQ ID NO: 79090 - DNA, 75 bp, synthetic construct
  source 1..75: mol_type = other DNA
gttgccacgaccgaaacgtatccgcgtgccaactcgtcgtgaactggcgtcttacggtattaagctgccctcaca

SEQ ID NO: 79091 - DNA, 75 bp, synthetic construct
  source 1..75: mol_type = other DNA
aatgcgctgaaagggccgattactgcgctggcggaagatctggcgcaacttcgcggtgtgctgggactggattaa

SEQ ID NO: 79092 - DNA, 75 bp, synthetic construct
  source 1..75: mol_type = other DNA
atgctgccgctaccggtttgctgattaagcgcctgctcccggcattgctggcctgctctcttccacaggaacata

SEQ ID NO: 79093 - DNA, 75 bp, synthetic construct
  source 1..75: mol_type = other DNA
acgatcgtcaccgcgagcagctgccggagctgatcctgcaagcgactaaagtcgagcgcgttcacgccgacaaac

SEQ ID NO: 79094 - DNA, 75 bp, synthetic construct
  source 1..75: mol_type = other DNA
agtcatttcatgatgaatgggggcaacataattgcactgcaacagattctggggcatgcgagcattcagcagacg

SEQ ID NO: 79095 - DNA, 75 bp, synthetic construct
  source 1..75: mol_type = other DNA
cggcattaatgaactgattgatgacctgatggatcacatcagcctggaaaacaatgtactgttcccacgcgcgct

SEQ ID NO: 79096 - DNA, 75 bp, synthetic construct
  source 1..75: mol_type = other DNA
ccaacaccaccggccatcagggctacgtcgcacccgataaggctgtcatgcagcaggtgaaatcatcgctggaac

SEQ ID NO: 79097 - DNA, 75 bp, synthetic construct
  source 1..75: mol_type = other DNA
tttttattagtaacaataagctatcggaaataccagcaataccagatactgctgaggtttttgaatgtaatggga

SEQ ID NO: 79098 - DNA, 75 bp, synthetic construct
  source 1..75: mol_type = other DNA
tgggtcgaaaaacctattgaacgtaaagcgttaagcgatcttctggaactgtggtgggtgtaccacggtaagaat

SEQ ID NO: 79099 - DNA, 75 bp, synthetic construct
  source 1..75: mol_type = other DNA
gtggtgacaacgtccgtggaagcgagcgataacctgacgggaacaacccgcaaaataccggcataccatctctga

SEQ ID NO: 79100 - DNA, 75 bp, synthetic construct
  source 1..75: mol_type = other DNA
gctaaggtttttgattgtagtgagaataatataaaggaaattagatggttccccaaaaatctgaaagaagtgcat

SEQ ID NO: 79101 - DNA, 75 bp, synthetic construct
  source 1..75: mol_type = other DNA
attagtggtttacacaactacgtgaagtatctgaagtcgagtggccaggacgccggacgttatcagctcaatatg

SEQ ID NO: 79102 - DNA, 75 bp, synthetic construct
  source 1..75: mol_type = other DNA
atgcaggaaaatatatcagtaaccgattcatacagcaccgggaatgccgcacaggcaatgctggagaaactgctg

SEQ ID NO: 79103 - DNA, 75 bp, synthetic construct
  source 1..75: mol_type = other DNA
ggggcttacgaagtggtgggcgtttttgaccagattgaggaaaagcgtgatgccatgcagtcgctggttctgcca

SEQ ID NO: 79104 - DNA, 75 bp, synthetic construct
  source 1..75: mol_type = other DNA
aaaacactatcacctgctgctgctggtcaaccgggatacctggtgtcgtgccggtgattaccgcgctccggggtc

SEQ ID NO: 79105 - DNA, 75 bp, synthetic construct
  source 1..75: mol_type = other DNA
acccgatgatgtctgaaaaacgcaggcaaccagtggaaaaggtggcactggatgctcaccgcactgttgttgaaa

SEQ ID NO: 79106 - DNA, 75 bp, synthetic construct
  source 1..75: mol_type = other DNA
ggcgacagattgcctgatgagcgtctcaccacttctgttgactgcgactacagcgcccggaaagatgatattgcg

SEQ ID NO: 79107 - DNA, 75 bp, synthetic construct
  source 1..75: mol_type = other DNA
atgacaactcaaatctctgttgaaactctctccccgatcacccataaccagattcctgttattaccaccgaactt

SEQ ID NO: 79108 - DNA, 75 bp, synthetic construct
  source 1..75: mol_type = other DNA
atgacagtaaataaaataaagaacattttcaataatgcgacatcgactacaaaatcagcatttaatacagcatca

SEQ ID NO: 79109 - DNA, 75 bp, synthetic construct
  source 1..75: mol_type = other DNA
tggtatcaggtacgcattgccgggcgtgatacaggtgaaacggaattatcagcccgtcttaatgaaccgctggca

SEQ ID NO: 79110 - DNA, 75 bp, synthetic construct
  source 1..75: mol_type = other DNA
ctgaacaggtcggcaaatgggctgctcgccatatcgtcaatcgtatcaatgcgttcaaaccgactgccgatcgtc

SEQ ID NO: 79111 - DNA, 75 bp, synthetic construct
  source 1..75: mol_type = other DNA
gccaatattgagttactctcagacagcggacgcaaatcactaatagacagaattaaaggcggtgacgcaatcact

SEQ ID NO: 79112 - DNA, 75 bp, synthetic construct
  source 1..75: mol_type = other DNA
gttggtggcgctggtgcactgtctgactggctgttgcgtcatgtcaaatcctgccagtggcctcatggtgactat

SEQ ID NO: 79113 - DNA, 75 bp, synthetic construct
  source 1..75: mol_type = other DNA
tttctgaatcagtgttcaacggctgatccagcggctatatcgaaaatcatgagtaagtttggtcgtgtcagaggt

SEQ ID NO: 79114 - DNA, 75 bp, synthetic construct
  source 1..75: mol_type = other DNA
ctcgctggcgctggttttgcttagcgatgtatcggcattagagttagaaaaatatgccgataccgccgtagcgca

SEQ ID NO: 79115 - DNA, 75 bp, synthetic construct
  source 1..75: mol_type = other DNA
aatggataagaaactggaagggtacgatatgccaacggcggacccagtgaactatctgaatgtgggtggaagttt

SEQ ID NO: 79116 - DNA, 75 bp, synthetic construct
  source 1..75: mol_type = other DNA
gaccgcgtaaaccgtcagttcgtggcagaacgtccagaccagttgtgggtggctgattttacctgggtaagcaca

SEQ ID NO: 79117 - DNA, 75 bp, synthetic construct
  source 1..75: mol_type = other DNA
gcttcgtttatgtggcgttcatcattgatgtgttcgccggatacatcgtgggatggcgggtctcatcgtccatgg

SEQ ID NO: 79118 - DNA, 75 bp, synthetic construct
  source 1..75: mol_type = other DNA
acgaccgttttatgatcaagctgattatgaagatgtcaggcggtgaaacggatacgcgcaaagaagttgtctata

SEQ ID NO: 79119 - DNA, 75 bp, synthetic construct
  source 1..75: mol_type = other DNA
taacgcgtgatttcttgatgaatgccgattgtaaaacggcatttggtgccattgaagaatcactcttatggtcag

SEQ ID NO: 79120 - DNA, 75 bp, synthetic construct
  source 1..75: mol_type = other DNA
gcgggcgacaatttatcgccaacgtcataatgtcccggccgcggtgagtgatttgcgcgccgcgctggaactgga

SEQ ID NO: 79121 - DNA, 75 bp, synthetic construct
  source 1..75: mol_type = other DNA
actggccgggatgattaaacaggcgtggtgcagtgccctgggagtggataccggagatcataccacgctggcgca

SEQ ID NO: 79122 - DNA, 75 bp, synthetic construct
  source 1..75: mol_type = other DNA
ggatattcaggcgtggacggcagattatcgcgtcagctggcatcagaaggtagctaacggacagactattgagcc

SEQ ID NO: 79123 - DNA, 75 bp, synthetic construct
  source 1..75: mol_type = other DNA
gacaactggcctatgtgaaccagcgtctggatgacatgcctgcgacgcagcactacgcccggctggtgattgatg

SEQ ID NO: 79124 - DNA, 75 bp, synthetic construct
  source 1..75: mol_type = other DNA
gcaattgttgaagtgctgtcgcccggtcaacgcccgactaaacgcggattaatttacgccgcgacgccagccagc

SEQ ID NO: 79125 - DNA, 75 bp, synthetic construct
  source 1..75: mol_type = other DNA
gaaaactgcgcggcgaggaaccttattgccctgaaaaaggcgggaaaggtggcagctctgataaaagcgcaaagt

SEQ ID NO: 79126 - DNA, 75 bp, synthetic construct
  source 1..75: mol_type = other DNA
caatcgttgttgttacctgtattccctgataatgattctactacctgtatacgctcactgtatttcattcaccaa

SEQ ID NO: 79127 - DNA, 75 bp, synthetic construct
  source 1..75: mol_type = other DNA
gtcggtttatccccgctggcgcggggaactcacgatgtatgaccggaaaacctcagactggcgcggtttatcccc

SEQ ID NO: 79128 - DNA, 75 bp, synthetic construct
  source 1..75: mol_type = other DNA
acagaaattctaccgtgactatgaggatattacagagtacgaagttttattggcacggttaaaggaaaataagca

SEQ ID NO: 79129 - DNA, 75 bp, synthetic construct
  source 1..75: mol_type = other DNA
ggaattgtccgcattgcggaaaaatctcctggcagtacagcccatatgattttgaaggctgtagtgattacaact

SEQ ID NO: 79130 - DNA, 75 bp, synthetic construct
  source 1..75: mol_type = other DNA
taacagacgaatacgtttcaaatgcaacgttgattcggctcattctgtgggctgaccagcacaatagccattatg

SEQ ID NO: 79131 - DNA, 75 bp, synthetic construct
  source 1..75: mol_type = other DNA
atgggcaaaaccgaccgcagcgccaacccttcgccgggcaacaaaaagggcggcctcgccaacgtggtaaagaaa

SEQ ID NO: 79132 - DNA, 75 bp, synthetic construct
  source 1..75: mol_type = other DNA
gcaggctttagttttgcaatggaaaatgccggcaatgcggtcgtcgcagcggcaaaataccgggcaggctccaat

SEQ ID NO: 79133 - DNA, 75 bp, synthetic construct
  source 1..75: mol_type = other DNA
atgtcgcgccagtgcacgcattatgggcgttggcctcaacacggttttacgtcacttaaaaaactcaggccgaag

SEQ ID NO: 79134 - DNA, 75 bp, synthetic construct
  source 1..75: mol_type = other DNA
gttgccgcctttgccgcctttgccgccatttctgcttttggcaactggcgcagcgaaggccgttattaccgcccg

SEQ ID NO: 79135 - DNA, 75 bp, synthetic construct
  source 1..75: mol_type = other DNA
gacaaggggggagaaagcgcggcgatcatctacagtctgctggtcacctgcaaactgaacgaagtggagccggag

SEQ ID NO: 79136 - DNA, 75 bp, synthetic construct
  source 1..75: mol_type = other DNA
tctgcgggttactgtggagttccagtggatgggcagctgaccctttgggaacgattaatatcaatttgcacggta

SEQ ID NO: 79137 - DNA, 75 bp, synthetic construct
  source 1..75: mol_type = other DNA
acgattaatatcaatttgcacggtaacgttgttgatttctcctgtaccgtaaacactgcggatattgataagacg

SEQ ID NO: 79138 - DNA, 75 bp, synthetic construct
  source 1..75: mol_type = other DNA
cagccagaagaacgggaactgtcgctctatgccgcccacggagtggccgtgctgcaacatggagcactctggcaa

SEQ ID NO: 79139 - DNA, 75 bp, synthetic construct
  source 1..75: mol_type = other DNA
ggccggactctatgcttccgccatgtttgattccggtgcctatatcgacctgattggtaagtatgttcatcatga

SEQ ID NO: 79140 - DNA, 75 bp, synthetic construct
  source 1..75: mol_type = other DNA
acgactacatcaacgatggtgtattcgttgccgggctggtggactcggaactgaacgaaaagcataaggaggtgc

SEQ ID NO: 79141 - DNA, 75 bp, synthetic construct
  source 1..75: mol_type = other DNA
tgcggcggaatattccgctctcgcataaaaaactgtgtcgtgctctgaaagccattacccgttcggaaagttatc

SEQ ID NO: 79142 - DNA, 75 bp, synthetic construct
  source 1..75: mol_type = other DNA
aaagtttgtggcccgatgcctggcatttcctttctattttcagcggcagcgcatggttaatgaccctgctgtggc

SEQ ID NO: 79143 - DNA, 75 bp, synthetic construct
  source 1..75: mol_type = other DNA
catcgaactgccggaaggcgtagagatggtaatgccgggcgacaacatcaaaatggttgttaccctgatccaccc

SEQ ID NO: 79144 - DNA, 75 bp, synthetic construct
  source 1..75: mol_type = other DNA
ctgctactggcgaccgcgccgcgctactgtcagtactacaatcaactccaccaactgccgttggttgctcttcct

SEQ ID NO: 79145 - DNA, 75 bp, synthetic construct
  source 1..75: mol_type = other DNA
ttaccattgaggccaccagcgaacaggaagcgcgtcagcaatctcctgatggctgcgtgatggtattcgccgccc

SEQ ID NO: 79146 - DNA, 75 bp, synthetic construct
  source 1..75: mol_type = other DNA
tcagaaagggagcgcaatatgaagagatcagaaaactgggtaaaggcgatcatctggtgaagctgaaaaccagcc

SEQ ID NO: 79147 - DNA, 75 bp, synthetic construct
  source 1..75: mol_type = other DNA
gacagtcagcgtcaggcagcagcaagtcagtttcagcaacgaacacacactgcgccagtcattacgcgagatact

SEQ ID NO: 79148 - DNA, 75 bp, synthetic construct
  source 1..75: mol_type = other DNA
tgagacagcggcaaaacgggcagaggatattgcatccgccgtggcgcttgaggatgcgagcacgacgaaaaaggg

SEQ ID NO: 79149 - DNA, 75 bp, synthetic construct
  source 1..75: mol_type = other DNA
acacccgaaaccatgctcgacggtgtgaaacgctatgccgcctgggtgcgtgtctctggaaataccggtacccag

SEQ ID NO: 79150 - DNA, 75 bp, synthetic construct
  source 1..75: mol_type = other DNA
attttggacatccggttgcttattaccctgggctcgttaaatacatgggaagtccgcacgctgttattttctttg

SEQ ID NO: 79151 - DNA, 75 bp, synthetic construct
  source 1..75: mol_type = other DNA
atccacgaataacaccggggcgcatacccatagtattagcgggaccgcaaatagtgccggtgcgcaccaacacaa

SEQ ID NO: 79152 - DNA, 75 bp, synthetic construct
  source 1..75: mol_type = other DNA
atgtcgccggaggactggctgcgtgcacaaatgcagggggaggttgtggcactggtccacagccaccccggtggt

SEQ ID NO: 79153 - DNA, 75 bp, synthetic construct
  source 1..75: mol_type = other DNA
tggggaaaacggcctcgattaatgatgcggatatgattgtgatcccgggagaaacactggcagagctgaatgcgc

SEQ ID NO: 79154 - DNA, 75 bp, synthetic construct
  source 1..75: mol_type = other DNA
atcctgggaagttcctgcggtatctgcagccagacgcgaggacccgtacttcaaagccagttacgacaacgtgga

SEQ ID NO: 79155 - DNA, 75 bp, synthetic construct
  source 1..75: mol_type = other DNA
tcaaagcctggaaagcccgtttgaatgagggggtaaaccccgaaaccatgctggaaggtgtgaaacgctacgcgg

SEQ ID NO: 79156 - DNA, 75 bp, synthetic construct
  source 1..75: mol_type = other DNA
ccgttccgtctggttatgccctgatgcaggggcagacttttgacaaatctgcatacccgaaacttgcagttgctt

SEQ ID NO: 79157 - DNA, 75 bp, synthetic construct
  source 1..75: mol_type = other DNA
aaactccgaagtcgatgcactgattaaagtgctgccgcgcatgacggcaccgatgctgaccgagcaggaagtcgc

SEQ ID NO: 79158 - DNA, 75 bp, synthetic construct
  source 1..75: mol_type = other DNA
cagatgtactgatttttgaaccaaaagtttttagcgacgagcgcggtttcttttttgagagctttaaccagaagg

SEQ ID NO: 79159 - DNA, 75 bp, synthetic construct
  source 1..75: mol_type = other DNA
ccggtatgacacggaagggtatgtgacggagcatatttctcaggaggaggaagcgtatgcggcagcgcgtctgga

SEQ ID NO: 79160 - DNA, 75 bp, synthetic construct
  source 1..75: mol_type = other DNA
ttacacatatgcaggatgaagcagccaacttcccggacccggtagaccgtgcagcccaggaagaagagttcagcc

SEQ ID NO: 79161 - DNA, 75 bp, synthetic construct
  source 1..75: mol_type = other DNA
aaggtgctgccgcgcatgacggcaccgatgctgaccgagcaggaggtcgccgcactggaactgcctgaccttgtg

SEQ ID NO: 79162 - DNA, 75 bp, synthetic construct
  source 1..75: mol_type = other DNA
accgccactgtaagggcatgtgaggctcatccgctgctcctcgcgctggaagacaccaccaccattaacttcagt

SEQ ID NO: 79163 - DNA, 75 bp, synthetic construct
  source 1..75: mol_type = other DNA
tggagacggatattgcccatttccgttatgcctacgcgtcagataatcagcgacgtggtttaaaaccgccgccac

SEQ ID NO: 79164 - DNA, 75 bp, synthetic construct
  source 1..75: mol_type = other DNA
acgtctcccgcgagctgtttgccgccctgaacccgccgtttgagcaacaatgggcaaaagataacggcggcgaca

SEQ ID NO: 79165 - DNA, 75 bp, synthetic construct
  source 1..75: mol_type = other DNA
gcgttctgcgcgtgtagaacgggtgctcagcgagccgcatcatccctcgggggaattaaccgattttcgtatccg

SEQ ID NO: 79166 - DNA, 75 bp, synthetic construct
  source 1..75: mol_type = other DNA
ttatgcgcaagggaaattggtacgttgcgttgttggtgaggtttttgatgtagctgttgatattcgtaaatcgtc

SEQ ID NO: 79167 - DNA, 75 bp, synthetic construct
  source 1..75: mol_type = other DNA
gtggattacctgatcaaacccttccaggcttcccgctttgaagaggcgctcaccggctggcggcaaaagaaaatg

SEQ ID NO: 79168 - DNA, 75 bp, synthetic construct
  source 1..75: mol_type = other DNA
ggcggggatcgccttagcgatttttggcgtactggtgttaatcgaagatagtctgaacggtcagcatgtggcgat

SEQ ID NO: 79169 - DNA, 75 bp, synthetic construct
  source 1..75: mol_type = other DNA
atgatgcttttattattgagcctgatgtctatggcgatgaaagaggtttttttcaagaagtataccatcatgaaa

SEQ ID NO: 79170 - DNA, 75 bp, synthetic construct
  source 1..75: mol_type = other DNA
tcgccattccggaaattccccagccgcagccgctgaatccgcaaggcgaagcggtggcgaatgattttatccccc

SEQ ID NO: 79171 - DNA, 75 bp, synthetic construct
  source 1..75: mol_type = other DNA
ttcacgatgattaccaaacggtaatggcatacaaagtttctgaagtcatcgatgcaatccgcgccgctggcattc

SEQ ID NO: 79172 - DNA, 75 bp, synthetic construct
  source 1..75: mol_type = other DNA
gccagcgttaaaggaatgaatgaacctgctgatggtgcaatgaatctcgttaaaaccagcaatggctggaaagcc

SEQ ID NO: 79173 - DNA, 75 bp, synthetic construct
  source 1..75: mol_type = other DNA
tacgtttcttcctgcgtggtcttacgctacaacagttaattcatatgcttattattttaattgccttgataataa

SEQ ID NO: 79174 - DNA, 75 bp, synthetic construct
  source 1..75: mol_type = other DNA
ttctgactacccttttagtacagattggcatcatgctggtggtcgttccgggaattatcatggccattttactgg

SEQ ID NO: 79175 - DNA, 75 bp, synthetic construct
  source 1..75: mol_type = other DNA
tcaaaaaacctataaccgtgagcggtttatggctcagtatcagcaaatgaaagcacaaggcattcgctttgtggt

SEQ ID NO: 79176 - DNA, 75 bp, synthetic construct
  source 1..75: mol_type = other DNA
gcgactggccggtgcagggaaaggcggactgcagattgtgctgggggcggcagccatcgtgggctctttcttcac

SEQ ID NO: 79177 - DNA, 75 bp, synthetic construct
  source 1..75: mol_type = other DNA
aattctggatatcaaaaatcaggagttatcgggaacgttaactctgtattcccggccctctatcgcccaatgctg

SEQ ID NO: 79178 - DNA, 75 bp, synthetic construct
  source 1..75: mol_type = other DNA
ggctgacgcgcagtatggagtacgatgctgccggacgtgtcatcagtctgactaacgagaacggcagccacagcg

SEQ ID NO: 79179 - DNA, 75 bp, synthetic construct
  source 1..75: mol_type = other DNA
ttgtgagccaggagaatcaactaacccttgatgttaaggcagcacaaagttctattaatcatgtaataatgggga

SEQ ID NO: 79180 - DNA, 75 bp, synthetic construct
  source 1..75: mol_type = other DNA
aggcgtgactggggattctacggattgattgccgaggaagtaggagaaattgctcctcagtttgtacactggcga

SEQ ID NO: 79181 - DNA, 75 bp, synthetic construct
  source 1..75: mol_type = other DNA
aagcagatataattcatttgtctactgttcacgttgaggttgaaggtgatatcaattttcctaaaattccagaga

SEQ ID NO: 79182 - DNA, 75 bp, synthetic construct
  source 1..75: mol_type = other DNA
ttgactgcgttattctccgcaacagttattcgctgacagggcagccagttccgtggcagtggtggaatgaccgcg

SEQ ID NO: 79183 - DNA, 75 bp, synthetic construct
  source 1..75: mol_type = other DNA
accgtactggctaaaacctacggcggtgctgctcgtgcattcgaccagatcgataacgctccggaagaaaaagct

SEQ ID NO: 79184 - DNA, 75 bp, synthetic construct
  source 1..75: mol_type = other DNA
atgtcgcgccagtgcacgcattatgggcgttggcctcaacacggttttacgtcacttaaaaaaatcaggccgcag

SEQ ID NO: 79185 - DNA, 75 bp, synthetic construct
  source 1..75: mol_type = other DNA
gaaagcgatgctcgacgacgcggatgtcttcctgttgccatcggtaacgggcgcggatggcgatatggaaggcat

SEQ ID NO: 79186 - DNA, 75 bp, synthetic construct
  source 1..75: mol_type = other DNA
ggcgtggattgcgcgcggcattaacccgcagcttaatcccatcgatagctatctgatgaataaacacttcatgcg

SEQ ID NO: 79187 - DNA, 75 bp, synthetic construct
  source 1..75: mol_type = other DNA
cggccagccaaatccaggcgctgaaaaaactgacctgtgccatcagccagacactggaagaacaaccggtgctca

SEQ ID NO: 79188 - DNA, 75 bp, synthetic construct
  source 1..75: mol_type = other DNA
aaagcggacgatatggtggtggttgatatgagcggcaaggtggtggaaggggagtatcgtccgtcttccgacacc

SEQ ID NO: 79189 - DNA, 75 bp, synthetic construct
  source 1..75: mol_type = other DNA
tggtgtggctggcaatccagtctgcgtcccagaaatggacgattccgttgaaggactggcgaatggcaacgagcc

SEQ ID NO: 79190 - DNA, 75 bp, synthetic construct
  source 1..75: mol_type = other DNA
ttatttagcacgctaacaataccagatggatgtattattaatggatctggatacacgcaaactactttaaaacaa

SEQ ID NO: 79191 - DNA, 75 bp, synthetic construct
  source 1..75: mol_type = other DNA
cgaaagggaaaacgctgcaccagacattcttaaaaaatctggaagcctttgaacctgtagcagaatcttatcatg

SEQ ID NO: 79192 - DNA, 75 bp, synthetic construct
  source 1..75: mol_type = other DNA
taccggtaaaatagttgcgccctggattccacgcgaccatagttcagctattacagaagaagaatatattggtag

SEQ ID NO: 79193 - DNA, 75 bp, synthetic construct
  source 1..75: mol_type = other DNA
atccgcatcctggaagagcagatgaagctcgcacgccagcagcgttttggtaaaaaatgcgaatcgctggccggg

SEQ ID NO: 79194 - DNA, 75 bp, synthetic construct
  source 1..75: mol_type = other DNA
agctcctgaagcgaaacctactgaagctcccgttgcaaaagcagaagctaaacctgaaacacctgcgcaaccggt

SEQ ID NO: 79195 - DNA, 75 bp, synthetic construct
  source 1..75: mol_type = other DNA
cacatcgacagctacctgatgaataaacacttcatgcgtaagcatggtcccaacgcttattacgggcagaagtaa

SEQ ID NO: 79196 - DNA, 75 bp, synthetic construct
  source 1..75: mol_type = other DNA
ctacgggctggtgacctttacctggggcaacgtcagcgctatcgaccgcgaacgcgggctggtggtgatcaagcc

SEQ ID NO: 79197 - DNA, 75 bp, synthetic construct
  source 1..75: mol_type = other DNA
tggtcgagggattccgccattcggttccctatatcaatacccaccggggaaaaacgtttgtcatcatgctcggcg

SEQ ID NO: 79198 - DNA, 75 bp, synthetic construct
  source 1..75: mol_type = other DNA
ctggacgtgatgctgcctttcctcgacgggtggcaaatcatcagcgcactgagggagtccgggcacgaagaaccg

SEQ ID NO: 79199 - DNA, 75 bp, synthetic construct
  source 1..75: mol_type = other DNA
taatcttggtaacctttatgcccgcgatggcgatatcaccctggatgccagcggcagactgactgtcaacaacag

SEQ ID NO: 79200 - DNA, 75 bp, synthetic construct
  source 1..75: mol_type = other DNA
gagattttttcgcagacagaggcgcagcaactggtcgcggaagagcttgtggagaagtgggaaaaaggaaagatg

SEQ ID NO: 79201 - DNA, 75 bp, synthetic construct
  source 1..75: mol_type = other DNA
aacccgtaaatgggaacccggcatggcggaagaagaaacgcgtttctttggcttaaaaagggaatgtggattaca

SEQ ID NO: 79202 - DNA, 75 bp, synthetic construct
  source 1..75: mol_type = other DNA
tcatcacccgacggaaaagcccgttaccagcctgcaaccgctgattgagagcttcacacacccgaacgcaattgt

SEQ ID NO: 79203 - DNA, 75 bp, synthetic construct
  source 1..75: mol_type = other DNA
aaatgctgttgggtgtttatgcctacttcatagagcataagcagcgcaacacacttatctggttgccgacggatg

SEQ ID NO: 79204 - DNA, 75 bp, synthetic construct
  source 1..75: mol_type = other DNA
attgatcattatgccagactaacaaataaatctcactcttccgtaatagcggaagttgtggatttggctatccct

SEQ ID NO: 79205 - DNA, 75 bp, synthetic construct
  source 1..75: mol_type = other DNA
accatcaaaaaataaaattgaattttgggaaaatggaagcattccatggatttccccgaaagatatgggccgaac

SEQ ID NO: 79206 - DNA, 75 bp, synthetic construct
  source 1..75: mol_type = other DNA
accagcctgcaaccgctgattgagagcttcacacacccgaacgcaattgtgctggacccgtttgcaggcagcggc

SEQ ID NO: 79207 - DNA, 75 bp, synthetic construct
  source 1..75: mol_type = other DNA
tgccgggcagacggtcagcgtgatggcaggcaacggcgcaacgactgccccgacggtgaccactcagccggatgg

SEQ ID NO: 79208 - DNA, 75 bp, synthetic construct
  source 1..75: mol_type = other DNA
tgccggcgataaaaccgatgattggctgcaaccggcctgtaatgagatgtaccgcgtactcaaaaaagacgcgtt

SEQ ID NO: 79209 - DNA, 75 bp, synthetic construct
  source 1..75: mol_type = other DNA
cagaaatcttcagtccctggcgatacattggagccagtctggagagcgatgatcgcatgttgccgccaaaactac

SEQ ID NO: 79210 - DNA, 75 bp, synthetic construct
  source 1..75: mol_type = other DNA
atgtcccgttttatccagggtgactgcgtgcgtgttatggccacgtttccgggcaatgctgtcgatttcatcctc

SEQ ID NO: 79211 - DNA, 75 bp, synthetic construct
  source 1..75: mol_type = other DNA
cggcagaagcacagcgtcagtcactgattgatactgcaatggcttccattagtctgattcaactgaaattacagg

SEQ ID NO: 79212 - DNA, 75 bp, synthetic construct
  source 1..75: mol_type = other DNA
ccctcgaagcccatgaagacggcgcacagacggtgtgggtcggcgaaacggagccgatgcatggtttacaggtga

SEQ ID NO: 79213 - DNA, 75 bp, synthetic construct
  source 1..75: mol_type = other DNA
ggacagcaacgccttgccgccgtgcaacgggccatgcagcagggggccgcaaatgataacaggtttgaaccggag

SEQ ID NO: 79214 - DNA, 75 bp, synthetic construct
  source 1..75: mol_type = other DNA
accgacccgccgtatctcgtcggtttccgtgaccgttccgggcgcaccattgctggcgataaaaccgacgaatgg

SEQ ID NO: 79215 - DNA, 75 bp, synthetic construct
  source 1..75: mol_type = other DNA
tataacggtgggttgactccggaagagtccgagaacaggtaccatttttactgtaaaaccgtggccagtattact

SEQ ID NO: 79216 - DNA, 75 bp, synthetic construct
  source 1..75: mol_type = other DNA
ttttaattacaaagggatgttgatgagcggaattattgatggtgagcgtgtgacgctttatacggggaaaaaata

SEQ ID NO: 79217 - DNA, 75 bp, synthetic construct
  source 1..75: mol_type = other DNA
tgattacagcacgcattcatggtatgccggtgcagaagcgggctaccgctatcatgtcactgaggatgcctggat

SEQ ID NO: 79218 - DNA, 75 bp, synthetic construct
  source 1..75: mol_type = other DNA
gtagattccatacatattattgatggtcagcaacgattgaccactcttcaatatgttctggcatccatccgatta

SEQ ID NO: 79219 - DNA, 75 bp, synthetic construct
  source 1..75: mol_type = other DNA
gtgaacacggcagcggaagccatccgcgccctgtcgatgcagatgccgggctttcgccgtcagatgaacgaaggc

SEQ ID NO: 79220 - DNA, 75 bp, synthetic construct
  source 1..75: mol_type = other DNA
atgtcgcaaaaatcgcttatcaccgtcacaatttgcatgacggttatcttcaccatctggatgttgcacggttca

SEQ ID NO: 79221 - DNA, 75 bp, synthetic construct
  source 1..75: mol_type = other DNA
ggcggtcgtccggaataccgtcagggcgtagtgaccgataacggcaacgtgatcctcgacgtccacggcatggaa

SEQ ID NO: 79222 - DNA, 75 bp, synthetic construct
  source 1..75: mol_type = other DNA
acaatggttttaccgtcacctatgaaaaagtcccacaggatgcctgtatccagattgccacacaaatcagtcgta

SEQ ID NO: 79223 - DNA, 75 bp, synthetic construct
  source 1..75: mol_type = other DNA
gcctgaaaaacaactgaatattgaactggtaagcgcgccaaaagacaccaatgaaaatgtctttaaagccagtaa

SEQ ID NO: 79224 - DNA, 75 bp, synthetic construct
  source 1..75: mol_type = other DNA
gcttattacatctgttcaggacaacgaatcagaaacggtttcgaagaaacgaaaaattccatcagatgcggtgcg

SEQ ID NO: 79225 - DNA, 75 bp, synthetic construct
  source 1..75: mol_type = other DNA
gctgagctatctgatccttaacccgattttgaatcgcaaaacgacggctgcaatgacgcatgtggaggctaacag

SEQ ID NO: 79226 - DNA, 75 bp, synthetic construct
  source 1..75: mol_type = other DNA
tgttcgccgctggcgctcatggtggcgttggtcagaaaagaaaatataccggcgaagactacatcaaccacccgg

SEQ ID NO: 79227 - DNA, 75 bp, synthetic construct
  source 1..75: mol_type = other DNA
ctctcatcgctgtttgccaatttatcagacggattctggtacttcattaacctgagtaaattaccacaggggatt

SEQ ID NO: 79228 - DNA, 75 bp, synthetic construct
  source 1..75: mol_type = other DNA
actggatgcgtcagtgctcagttacacggacaaaataccgacgaaaaaccttgggccttccctggcaacatggga

SEQ ID NO: 79229 - DNA, 75 bp, synthetic construct
  source 1..75: mol_type = other DNA
ctttatctggtcgatgtttaccttgctgcaaggcttcgtcgatatctttagtggattcggcattatcgttgccct

SEQ ID NO: 79230 - DNA, 75 bp, synthetic construct
  source 1..75: mol_type = other DNA
tgaactgcgtcagtatattgaagagctggaaagtgcgctgggtgtatccggacggcgtcgtggcccggcaggagt

SEQ ID NO: 79231 - DNA, 75 bp, synthetic construct
  source 1..75: mol_type = other DNA
ccaatcgcaattggttatatcgttggcacgactggctcctttaatggggcgctgatttatgttggtgttcatgcc

SEQ ID NO: 79232 - DNA, 75 bp, synthetic construct
  source 1..75: mol_type = other DNA
tacctgaaggatgactggcacggcctgcagctttttgccattgatggcgcacagttcaggacacctgatgaacct

SEQ ID NO: 79233 - DNA, 75 bp, synthetic construct
  source 1..75: mol_type = other DNA
gcgctaccgggtttatcggtaaatatattattgataacctgctcgcccgcggctttcacgttcgcgcattgacgc

SEQ ID NO: 79234 - DNA, 75 bp, synthetic construct
  source 1..75: mol_type = other DNA
cagcgaagaaagcggctgcagacgcgaagaaaaaagcagaagcagaagccgccaaagccgcagccgaagcgcaga

SEQ ID NO: 79235 - DNA, 75 bp, synthetic construct
  source 1..75: mol_type = other DNA
ttgggcggcgcagggcgtttcgcataaatcttctcatcgtcggtattgcggcaacaggggccgcttttgtccctg

SEQ ID NO: 79236 - DNA, 75 bp, synthetic construct
  source 1..75: mol_type = other DNA
ccgccaacactgatggcacaatggtattttggcgattcaggcagtaaattccgtccttacattggtgcgggtatt

SEQ ID NO: 79237 - DNA, 75 bp, synthetic construct
  source 1..75: mol_type = other DNA
cgctgaatatcagtcaactggcggctctgtcaggtgtacatcgccagactgctgcggcaaggctgcaaaatctac

SEQ ID NO: 79238 - DNA, 75 bp, synthetic construct
  source 1..75: mol_type = other DNA
ggaggcgaatatgccattcagcacgcggtggaaggcgctgaagatagccgggaaggtggtgttaacgatctgaaa

SEQ ID NO: 79239 - DNA, 75 bp, synthetic construct
  source 1..75: mol_type = other DNA
ggtgggtaatgcatatgcaacacaattgttggatgattatagtataatttcctatatgactgatgaagaatcgcc

SEQ ID NO: 79240 - DNA, 75 bp, synthetic construct
  source 1..75: mol_type = other DNA
attcatggcggaagcctgatactgaataatggaggagaatctgcaggtactattgcaggggatggttctctgaac

SEQ ID NO: 79241 - DNA, 75 bp, synthetic construct
  source 1..75: mol_type = other DNA
agggcgcgaccgacgaacagggctttatggcccgcatggatacggtccttcagatgcgtggagtgggtaacaatg

SEQ ID NO: 79242 - DNA, 75 bp, synthetic construct
  source 1..75: mol_type = other DNA
tgtattccttaatggagctgatggatttattcatcacggtggcgcaggtaataccctgacagcgctgtatagtgg

SEQ ID NO: 79243 - DNA, 75 bp, synthetic construct
  source 1..75: mol_type = other DNA
agccgggaagtggaagctcttccggccaggtgccggcggtgaacgacacagacggtaacggcaagccggacagcc

SEQ ID NO: 79244 - DNA, 75 bp, synthetic construct
  source 1..75: mol_type = other DNA
cagcaagtggtgatggtctgaaaggtatttttatcacaataacagatcaaatctctggttataaatgcgttatac

SEQ ID NO: 79245 - DNA, 75 bp, synthetic construct
  source 1..75: mol_type = other DNA
cagcaagtggtgatggcctgaaaggtatttttataacaataaccgatcaagtatctggatataagtgtgtaatac

SEQ ID NO: 79246 - DNA, 75 bp, synthetic construct
  source 1..75: mol_type = other DNA
cgcaaaaagcatcctacaaaattgtgttaaagcgttcaggaacagcgccggattacgtcattaatggccttataa

SEQ ID NO: 79247 - DNA, 75 bp, synthetic construct
  source 1..75: mol_type = other DNA
gctggtgagtctcctggaaccgatctggtgaaaccgctaatcgacaccgggcaatatcgcagagctattacccat

SEQ ID NO: 79248 - DNA, 75 bp, synthetic construct
  source 1..75: mol_type = other DNA
ttcagggtaaaggtggtgttggaaaatcattcgcgaccgcaatactggcacaatactttattgatgaaaatcaca

SEQ ID NO: 79249 - DNA, 75 bp, synthetic construct
  source 1..75: mol_type = other DNA
tggtttatctgaccttagtctgaaggattcatggggcgtggcggggcaagtaggtctggattatctcatcaaccg

SEQ ID NO: 79250 - DNA, 75 bp, synthetic construct
  source 1..75: mol_type = other DNA
agctacctccagaaagcccgaactactttttaattaacatcgccacagaacaggtagcaccgctaaaagcgttcc

SEQ ID NO: 79251 - DNA, 75 bp, synthetic construct
  source 1..75: mol_type = other DNA
atatgaagtggatgccacggatgaagaaatttctgttgaatgtgatctgaacgcgaatatggcggggattgtaac

SEQ ID NO: 79252 - DNA, 75 bp, synthetic construct
  source 1..75: mol_type = other DNA
ccgttttttccagttgtaccgggaaaaggggcgtattgaggccagaacatactggcaccgggaactgggcggaat

SEQ ID NO: 79253 - DNA, 75 bp, synthetic construct
  source 1..75: mol_type = other DNA
gagaattttaattgtggtgttctgtctctcgcgccgggtgggatcatgtcaaaagcgcaggattttctgctgaat

SEQ ID NO: 79254 - DNA, 75 bp, synthetic construct
  source 1..75: mol_type = other DNA
aaatacagtgcgtcgtagatattacggagaagataaatccagaccaacaattgcttttgccatgcataaaggcat

SEQ ID NO: 79255 - DNA, 75 bp, synthetic construct
  source 1..75: mol_type = other DNA
gtgagcttgcagcagcatgccgatacttcactcaaggcttaagtgatgaagatgcaggccgaagggatatgctga

SEQ ID NO: 79256 - DNA, 75 bp, synthetic construct
  source 1..75: mol_type = other DNA
ggtattcgtaaaacggtggaatggtatctggctaatacaaattgggttgagaatgtgaaaagcggtgcttatcag

SEQ ID NO: 79257 - DNA, 75 bp, synthetic construct
  source 1..75: mol_type = other DNA
ggtgagatgatttaccatggcgaaatgatgctgcttgacgcgaagttaataccagttgatatcaagtttgagaag

SEQ ID NO: 79258 - DNA, 75 bp, synthetic construct
  source 1..75: mol_type = other DNA
gactacaacatcaacgggacggtgaacaagccgcacaagggaaaacagtcacagtcactgagctataacgggacc

SEQ ID NO: 79259 - DNA, 75 bp, synthetic construct
  source 1..75: mol_type = other DNA
aacgctgggcgcgcctttattgccccgaagtgattcttggagtgtacaccagggacgaactggacgagccacagg

SEQ ID NO: 79260 - DNA, 75 bp, synthetic construct
  source 1..75: mol_type = other DNA
aagctggtggaggctggccgtaaatttattatggagccggtgccgcgtgagttaatcgagcacatggaagacggc

SEQ ID NO: 79261 - DNA, 75 bp, synthetic construct
  source 1..75: mol_type = other DNA
ttggcgtaaatggcaacctgaatccagcggccagcgtctggggaatgtgggcgtgcagctgggtgataatggcta

SEQ ID NO: 79262 - DNA, 75 bp, synthetic construct
  source 1..75: mol_type = other DNA
gtgctggtgggctttcatgcgcaacatgatgcacctgatgccggaagaagtctgccgcatatcaataaataagat

SEQ ID NO: 79263 - DNA, 75 bp, synthetic construct
  source 1..75: mol_type = other DNA
tgtcctcaccgcccaaccacccgccgccgaagagagcgaactgatgcagtcgctgcgccaggtgtgcaagctgtc

SEQ ID NO: 79264 - DNA, 75 bp, synthetic construct
  source 1..75: mol_type = other DNA
agtatgctgctctgggcggtgctggcgggcgcggtagtactggctttgctgtgcggtgtgctgggctggatgctg

SEQ ID NO: 79265 - DNA, 75 bp, synthetic construct
  source 1..75: mol_type = other DNA
ggcaaataaccgtcaattaaccgtgagttatgcgagtcgctacccggattacagccgtattcccgccatcaccct

SEQ ID NO: 79266 - DNA, 75 bp, synthetic construct
  source 1..75: mol_type = other DNA
ccggagcctccgtgcgctggatcttgctgccacagacctggagcccgcgatgcgcaaaattgccggaaccctgct

SEQ ID NO: 79267 - DNA, 75 bp, synthetic construct
  source 1..75: mol_type = other DNA
gccagaaaatgcacatcccggagaattttaccgtctcgtgggattactcgttatgcaaacgcgccattgatgaaa

SEQ ID NO: 79268 - DNA, 75 bp, synthetic construct
  source 1..75: mol_type = other DNA
atcatcgctgacacgctgagcgtcagggcgaccacgctggatggtgacggcctgttgcagggcgccggtgcactg

SEQ ID NO: 79269 - DNA, 75 bp, synthetic construct
  source 1..75: mol_type = other DNA
tgaagaacatgataaacgtattgctgaaaactatgtctttgatgaggtattaggccgtcatgtttcacgtaatga

SEQ ID NO: 79270 - DNA, 75 bp, synthetic construct
  source 1..75: mol_type = other DNA
tattcctgccgagttaaacaatgacgacaagaaaagacttgtccttgagtattgtcagaaaaatttcgttgataa

SEQ ID NO: 79271 - DNA, 75 bp, synthetic construct
  source 1..75: mol_type = other DNA
gggcgaccacgctggatggtgacggcctgttgcagggcgccggtgcactggcgcttgcaggtgacacactctcac

SEQ ID NO: 79272 - DNA, 75 bp, synthetic construct
  source 1..75: mol_type = other DNA
gtcaatgggcctcgctcttacgtcatcggctgaagtctttctggggcttcggattcttcaggcttgtggtgcctc

SEQ ID NO: 79273 - DNA, 75 bp, synthetic construct
  source 1..75: mol_type = other DNA
tcgtgcggcctgaccgtggagcagatgcaaaaccagatggacccggtgtacacgccggcgcgaaaaatccacctg

SEQ ID NO: 79274 - DNA, 75 bp, synthetic construct
  source 1..75: mol_type = other DNA
tggcctgttcggggtgccccggcggagtgacgtccggccatccggtcaatcccctgctcggtgcaaaggtccttc

SEQ ID NO: 79275 - DNA, 75 bp, synthetic construct
  source 1..75: mol_type = other DNA
ggtgaaatgcgtgtggggtcgcgggtggtatctcaggagatcagcacggcagatgaaggtgatggtggtcaggtt

SEQ ID NO: 79276 - DNA, 75 bp, synthetic construct
  source 1..75: mol_type = other DNA
gccgcgcgaagccaaaagagaaagcctatacactcaatgacggcaacgggctttcgttactcattgagccgaacg

SEQ ID NO: 79277 - DNA, 75 bp, synthetic construct
  source 1..75: mol_type = other DNA
tggataaaaatgctattcgggggatatataatcatgctcagtatcttgatgggcgtcgggaaatgatgcaatggt

SEQ ID NO: 79278 - DNA, 75 bp, synthetic construct
  source 1..75: mol_type = other DNA
cgcattgcactacgccgaggcggttgcggatatccccaacaaacgatgggtgacgtatgagatgccgatgcttgg

SEQ ID NO: 79279 - DNA, 75 bp, synthetic construct
  source 1..75: mol_type = other DNA
agcatcagtggggaacatggcatcgggcgagaaaaaatcaatcaaatgtgcgcccagttcaacagcgatgaaatc

SEQ ID NO: 79280 - DNA, 75 bp, synthetic construct
  source 1..75: mol_type = other DNA
ttcacccgcggtgatatgctgaaggtctgtccgaaatttgtcacatcacttgccggtttttccccgaaacagacg

SEQ ID NO: 79281 - DNA, 75 bp, synthetic construct
  source 1..75: mol_type = other DNA
tgaaacaggaattttccggcgttcctgatgatgcggctgatgcgctttcgtcaatatctgaaattatgcgggtgg

SEQ ID NO: 79282 - DNA, 75 bp, synthetic construct
  source 1..75: mol_type = other DNA
ggattcgacgaacagaaaaacgcagagaacaacgctcgttatatcgcagctttcaaccctgaagtagtgcaggca

SEQ ID NO: 79283 - DNA, 75 bp, synthetic construct
  source 1..75: mol_type = other DNA
attggtgaagcgccgggcggagaggtgatttatcaaacactggtcgatgctattccgatggttctgggccaggaa

SEQ ID NO: 79284 - DNA, 75 bp, synthetic construct
  source 1..75: mol_type = other DNA
accggttccggaaaataaccggtggtggggtgttgtccggcatgatggtgtggaatatctggccgtgtactgggg

SEQ ID NO: 79285 - DNA, 75 bp, synthetic construct
  source 1..75: mol_type = other DNA
ttgagatgccggattttcatcgcggggatgactggtggcgcaacggtcagaatctctatctggacaatatggagg

SEQ ID NO: 79286 - DNA, 75 bp, synthetic construct
  source 1..75: mol_type = other DNA
ccacgccgatgggcttcaacgtggtggatgtggtcggcggcatcagttacagcgatgatatcgggccgctgggtt

SEQ ID NO: 79287 - DNA, 75 bp, synthetic construct
  source 1..75: mol_type = other DNA
cggcaacctgcaggtaagtgtggaagatctcgtcagaaccggcgcgtttctggtggcgatgtccctgtggcataa

SEQ ID NO: 79288 - DNA, 75 bp, synthetic construct
  source 1..75: mol_type = other DNA
ggattgggcgaaagcgatttctaccgtacgcggctaactcactctatggaagtagcgcaaattggcggcggtatc

SEQ ID NO: 79289 - DNA, 75 bp, synthetic construct
  source 1..75: mol_type = other DNA
ctgagctacgataaaggtgaagcaaacggcgtctgggcatcgcttagtggcgaccagttaaccggtaaaaatgtc

SEQ ID NO: 79290 - DNA, 75 bp, synthetic construct
  source 1..75: mol_type = other DNA
attggacaaaggaaatgtatcaatcccataattcattaataataaagttacctgcgaaatatatatctaaactgc

SEQ ID NO: 79291 - DNA, 75 bp, synthetic construct
  source 1..75: mol_type = other DNA
cgccgttatccgcgatgcgtatttcatccactgtcataaaggcactataggtgcaatccggcgtgtggtggagcc

SEQ ID NO: 79292 - DNA, 75 bp, synthetic construct
  source 1..75: mol_type = other DNA
gagatgcgtcgtttaggtatccctccagaaactattgctgaaatgcaggttaatgacccgcagggcttccagcac

SEQ ID NO: 79293 - DNA, 75 bp, synthetic construct
  source 1..75: mol_type = other DNA
taatgagggatgggctaagattggtagttctatcgctgactggtttaatggtgcagctaataaaattgctaactt

SEQ ID NO: 79294 - DNA, 75 bp, synthetic construct
  source 1..75: mol_type = other DNA
ggaaccctgtgggctggctgggggccgcggctgtatcgggtatgtatgcggcaggggccagtatgatcctgggcg

SEQ ID NO: 79295 - DNA, 75 bp, synthetic construct
  source 1..75: mol_type = other DNA
gcaggggccagtatgatcctgggcggtgtggcgcagatgctggcaccgaaagccaggacgcccacggcagccagt

SEQ ID NO: 79296 - DNA, 75 bp, synthetic construct
  source 1..75: mol_type = other DNA
tatttacgctcaccgacagataccaaaatatcgcgatgttcataaagaaccttacgtaatttttgtcgtcaactt

SEQ ID NO: 79297 - DNA, 75 bp, synthetic construct
  source 1..75: mol_type = other DNA
atgatggtgtggaatatctggccgtgtactggggtaagggtgccacggtacctgatgaataccgtatccgtacgg

SEQ ID NO: 79298 - DNA, 75 bp, synthetic construct
  source 1..75: mol_type = other DNA
aaatgaaactggaatgactctgtttgccaataatactgtctcaggagaatataataacggcggggcaatatttgc

SEQ ID NO: 79299 - DNA, 75 bp, synthetic construct
  source 1..75: mol_type = other DNA
tacgagtacatccggatttgctgcgtcatgaccttcgtatccttgtgatcgaccttgacccgcaggcgtccagca

SEQ ID NO: 79300 - DNA, 75 bp, synthetic construct
  source 1..75: mol_type = other DNA
gcatgaccgtcgtactgtggacgaaaaatttgagcagaagaaaagcgggctgacggttgccctttccggcacggt

SEQ ID NO: 79301 - DNA, 75 bp, synthetic construct
  source 1..75: mol_type = other DNA
atgccttcgatgatagcgataattttactcatcatccttcacatctggctctgtagacagggtggtgatcacttc

SEQ ID NO: 79302 - DNA, 75 bp, synthetic construct
  source 1..75: mol_type = other DNA
gtgtaccactcagaaaaaatcgatattgttcagcaaagttttgaaccgggaatgacagtctcccttgttgcccgg

SEQ ID NO: 79303 - DNA, 75 bp, synthetic construct
  source 1..75: mol_type = other DNA
aaaggtaaggatcttggagtatggggcgatcaggacttagtcaaatatgttgatgtaggtgcaacctattacttc

SEQ ID NO: 79304 - DNA, 75 bp, synthetic construct
  source 1..75: mol_type = other DNA
tttggccgccgcctcagcctgtacgtgaacacggcagcggaagccatccgtgccctgtcgctgcagatgccggga

SEQ ID NO: 79305 - DNA, 75 bp, synthetic construct
  source 1..75: mol_type = other DNA
cgggaaagctgctgcggcaatcaaggagagctatatcgcagcattcaactggatggcagagcaactgagccgccg

SEQ ID NO: 79306 - DNA, 75 bp, synthetic construct
  source 1..75: mol_type = other DNA
ccgggcagaaggtgccaaaagtggcggagtgtttcaggccgtgcttggcgttgcgctggttgcggcagctatctg

SEQ ID NO: 79307 - DNA, 75 bp, synthetic construct
  source 1..75: mol_type = other DNA
cctttgacttccgagaaatggtgcaagctaaaaacggagaggtcgttaccacatccagaaaagttgctacgtact

SEQ ID NO: 79308 - DNA, 75 bp, synthetic construct
  source 1..75: mol_type = other DNA
aaagatcgctattgttcagcagagctttgaaccgggaatgacggtctcccttgttgcccggcaacacggtgtggc

SEQ ID NO: 79309 - DNA, 75 bp, synthetic construct
  source 1..75: mol_type = other DNA
ggaaaatgaactcctcaaagaagccgttgaatatgggcgtgcaaaaaagtggatagcgcacgcgcccttattgcc

SEQ ID NO: 79310 - DNA, 75 bp, synthetic construct
  source 1..75: mol_type = other DNA
ccagcaaaatggcgaagttattggtcgtctcggcggtgatgagtttttggttgtttcactaaacaacgagaatgc

SEQ ID NO: 79311 - DNA, 75 bp, synthetic construct
  source 1..75: mol_type = other DNA
aatataatggtgggttaccaccaaacgaatcagaaaaccgatactggaaaaactctaacgcggtggccagtttta

SEQ ID NO: 79312 - DNA, 75 bp, synthetic construct
  source 1..75: mol_type = other DNA
agtaggggttgagacgcaatcgaattcggtatacatcactttatttaaaacgatgcccattttgttgattattta

SEQ ID NO: 79313 - DNA, 75 bp, synthetic construct
  source 1..75: mol_type = other DNA
aagatattccgtggctgttgaacattgtcgaagtattaaaaggcaatgagcacaaagtggcggatgttggtaagt

SEQ ID NO: 79314 - DNA, 75 bp, synthetic construct
  source 1..75: mol_type = other DNA
gccggagcgaaaagaatttgcagggcgtaaatcctgatctggtgaaagtgacccgacgggcactggaaatttcgg

SEQ ID NO: 79315 - DNA, 75 bp, synthetic construct
  source 1..75: mol_type = other DNA
atacgtctgaagggtgttttaatattggtattctgctcagtaaccgggagtttactgaggacgccatcaggatga

SEQ ID NO: 79316 - DNA, 75 bp, synthetic construct
  source 1..75: mol_type = other DNA
tgctgcaacgtgcccggattacctccgggaagcctcagctactctatcgcgtatactggctgcatcagggactat

SEQ ID NO: 79317 - DNA, 75 bp, synthetic construct
  source 1..75: mol_type = other DNA
attacagcgcactaagaccgcacgaatataatggtgggttaccaccaaacgaatcagaaaaccgatactggaaaa

SEQ ID NO: 79318 - DNA, 75 bp, synthetic construct
  source 1..75: mol_type = other DNA
ccatttttgtttcggtcgtcgaaagcggcagctttagccgggcagcggaacaattagggcaagcaaactcagcgg

SEQ ID NO: 79319 - DNA, 75 bp, synthetic construct
  source 1..75: mol_type = other DNA
atcgccaacgatccgctcagcacgccgcatgtgtatttatgctgcgatccggtgcgcccgtatgtctctgccgcg

SEQ ID NO: 79320 - DNA, 75 bp, synthetic construct
  source 1..75: mol_type = other DNA
gcgtatcgcacgcgtccattactggttgttctgcctaagcagatggaacaggtgacggcgattctggctgtctgc

SEQ ID NO: 79321 - DNA, 75 bp, synthetic construct
  source 1..75: mol_type = other DNA
gttcaaacaaatgttggtgttgtgtttgaacatgacgcaaacacaaaagcaactaataaagatacagatctaaaa

SEQ ID NO: 79322 - DNA, 75 bp, synthetic construct
  source 1..75: mol_type = other DNA
gcgaataaaagccacacgtcatttggcgcggtattccgcttatttagccgccgcatggttgtggtcggcatgata

SEQ ID NO: 79323 - DNA, 75 bp, synthetic construct
  source 1..75: mol_type = other DNA
gccaatccagtggctgacagataacggttcagcgtacagagcgcatgaaacacggcagttcaccagagagttgaa

SEQ ID NO: 79324 - DNA, 75 bp, synthetic construct
  source 1..75: mol_type = other DNA
atctcaatggctaatgacagtgattacggcctgacctcatcaatctatacccaaaatctgaacgtcgcgatgaaa

SEQ ID NO: 79325 - DNA, 75 bp, synthetic construct
  source 1..75: mol_type = other DNA
agatttaggtgccgattatatcgctaccggtcattacgtacgtcgggccgatgtcgatggcaagagccgcctgct

SEQ ID NO: 79326 - DNA, 75 bp, synthetic construct
  source 1..75: mol_type = other DNA
agacgaaaatcaggcacaggaatgaaataaacaacacattttctgctttgcctttgtcagcaagaagaattctgt

SEQ ID NO: 79327 - DNA, 75 bp, synthetic construct
  source 1..75: mol_type = other DNA
gatgaagaaaccgtcgcctttctgacaaccacagacgaagggaagcgaattaattcgcaccttcaccacaacgaa

SEQ ID NO: 79328 - DNA, 75 bp, synthetic construct
  source 1..75: mol_type = other DNA
tacccgaacaaaattacagatgctgatatatccgcgctggcgagcctactggcgcgcctttcgggaagtgtcgct

SEQ ID NO: 79329 - DNA, 75 bp, synthetic construct
  source 1..75: mol_type = other DNA
aacgccagattgctgaaaacccgatcctgctgtacatgaaaggttcaccgaaactgccgagctgcggtttctctg

SEQ ID NO: 79330 - DNA, 75 bp, synthetic construct
  source 1..75: mol_type = other DNA
ctcgcagacaatatcggcaccagcgcagaagagctggggctgagcgattatcgccattttgttatttatccccgt

SEQ ID NO: 79331 - DNA, 75 bp, synthetic construct
  source 1..75: mol_type = other DNA
cggcgctcgatgcgcggcgtgctgccgatgccctgcgtcgccgttatccggtggcgcaaggagccggacgctggc

SEQ ID NO: 79332 - DNA, 75 bp, synthetic construct
  source 1..75: mol_type = other DNA
gcaggtgaaaccgaattatctgcccgtcttaatgagccgctggcaaatggtgccgtgatccacatcgtgccgcgt

SEQ ID NO: 79333 - DNA, 75 bp, synthetic construct
  source 1..75: mol_type = other DNA
gccaggggggcggcgaattgcccctggttccaggcaaggactggaacaatcagcagaatatctatcaccgttggt

SEQ ID NO: 79334 - DNA, 75 bp, synthetic construct
  source 1..75: mol_type = other DNA
gaacgccatcggctgggcaggccttcaccgcatccaccagttccagttcttcggtatccctccccgccaggtatg

SEQ ID NO: 79335 - DNA, 75 bp, synthetic construct
  source 1..75: mol_type = other DNA
atgcgtgtggcatgtatcggcttgttaccgtacccgactcgtttttgggcttctgcgctaattgcaaagccacat

SEQ ID NO: 79336 - DNA, 75 bp, synthetic construct
  source 1..75: mol_type = other DNA
acggttatcaccgcttccgccgatacgctccacgcatgttgcgcctgctcgatctgcgagctgcgcccgttgcac

SEQ ID NO: 79337 - DNA, 75 bp, synthetic construct
  source 1..75: mol_type = other DNA
ccggagggagtctgatcccatcaccgacacttcattcacgagggagtatcggtaatactggcgggagtgaaaccc

SEQ ID NO: 79338 - DNA, 75 bp, synthetic construct
  source 1..75: mol_type = other DNA
cacaaccaattggcgtagtgacgatttatccggggatttctgctgacgtcgtgcgcaattttctgcgccaaccgg

SEQ ID NO: 79339 - DNA, 75 bp, synthetic construct
  source 1..75: mol_type = other DNA
atgaaaatcaggcatgagcacattgaatcagtgctgttagccctggccgctgaaaaagggcaggcatgggtagcc

SEQ ID NO: 79340 - DNA, 75 bp, synthetic construct
  source 1..75: mol_type = other DNA
atgaaaatcaggcatgagcacatcgaatcagtgttgttagccctggcagccgaaaaagggcaggcgtgggtcgct

SEQ ID NO: 79341 - DNA, 75 bp, synthetic construct
  source 1..75: mol_type = other DNA
cacaatatgaagagccgctggtcgaaagtcgctatctttacgacccgctgggccgcagggtggcaaaacgggtat

SEQ ID NO: 79342 - DNA, 75 bp, synthetic construct
  source 1..75: mol_type = other DNA
gagagaccacggatatgtttcttatgatggcctgcctgtcgctgtttgaatcagatgaacggatgtcattatttt

SEQ ID NO: 79343 - DNA, 75 bp, synthetic construct
  source 1..75: mol_type = other DNA
ggcgtggttttgctgttgtcgccgatgaggttcgcagtcttgctgctcgcacacagcaatcgacaacggatattc

SEQ ID NO: 79344 - DNA, 75 bp, synthetic construct
  source 1..75: mol_type = other DNA
cggtcaatctcgttcgccgtgatcgtccattaacccgagatgaactagcgcactatgtcccgagtgtgttcagcg

SEQ ID NO: 79345 - DNA, 75 bp, synthetic construct
  source 1..75: mol_type = other DNA
gaacggcttttgttccagaccccgacagggtgaaaactattgagctaatttttaaactcaggatggaaaggcgct

SEQ ID NO: 79346 - DNA, 75 bp, synthetic construct
  source 1..75: mol_type = other DNA
agctggcatggaatacggcttcgatatcaccagtacgcaaactttttgcgaaggtggcgtgcgtatcagcagcac

SEQ ID NO: 79347 - DNA, 75 bp, synthetic construct
  source 1..75: mol_type = other DNA
tccggtacaaatctgctggcataaattcgcccgctactgggatgtggagttgcgtgagatccctatgcgccccgg

SEQ ID NO: 79348 - DNA, 75 bp, synthetic construct
  source 1..75: mol_type = other DNA
gtattcgcccgatgtacaagtggacgccaatcatgagcaccgtgatggaaatcggctacgacaacgtcgaatccc

SEQ ID NO: 79349 - DNA, 75 bp, synthetic construct
  source 1..75: mol_type = other DNA
gttaattaaacaggccagaaaatatcataaacgcctggttgtggttgcagactcatgtgagtctgagtttatcga

SEQ ID NO: 79350 - DNA, 75 bp, synthetic construct
  source 1..75: mol_type = other DNA
atcgagctggctatttatcaggcgctgagttacgactacgatcctgcccgcgcggcgatgctggcgctgatccag

SEQ ID NO: 79351 - DNA, 75 bp, synthetic construct
  source 1..75: mol_type = other DNA
atgggtcaatgtaatcaccatgggtcagggaggaaaggaaccgttgggtggaatgcggcaggtggtgcgctgggt

SEQ ID NO: 79352 - DNA, 75 bp, synthetic construct
  source 1..75: mol_type = other DNA
tatttccacatatcagcacaattacatcccccaaccattatttgtccgaatgggatgattgggagaaacaggggt

SEQ ID NO: 79353 - DNA, 75 bp, synthetic construct
  source 1..75: mol_type = other DNA
cggtatcgaaatggtccagaggatggctgaaaaccggcacaatactccagactccagaagacagaaatacggatg

SEQ ID NO: 79354 - DNA, 75 bp, synthetic construct
  source 1..75: mol_type = other DNA
ccatctgtggtagaagatgccattatgaccactactgtcacaacagattcaggtgaaccattccctaccttccac

SEQ ID NO: 79355 - DNA, 75 bp, synthetic construct
  source 1..75: mol_type = other DNA
aaagcgattcgccgtctcagcgatcggctgaatatcgatgtcgtacccgtggagtcgatggtcgatcaaatggga

SEQ ID NO: 79356 - DNA, 75 bp, synthetic construct
  source 1..75: mol_type = other DNA
taccaagtgtattatcggattgatggaatggctggtgcggatatagcggataatgcaccaggggaaacccgctgc

SEQ ID NO: 79357 - DNA, 75 bp, synthetic construct
  source 1..75: mol_type = other DNA
acctgaaacaggagaaaaaatccgggctgatgagctccggaggtgtgggattcagcgtgggcagccagagtctga

SEQ ID NO: 79358 - DNA, 75 bp, synthetic construct
  source 1..75: mol_type = other DNA
gccgccgtgctcggctactggctggaccgctcactcttcccgaaggcccgtccggggcagtacctgaagcatgac

SEQ ID NO: 79359 - DNA, 75 bp, synthetic construct
  source 1..75: mol_type = other DNA
gttacgccaacagtaaatggccacaaacaataccgaaaattccctcgggagaatatgacaccataattctgggct

SEQ ID NO: 79360 - DNA, 75 bp, synthetic construct
  source 1..75: mol_type = other DNA
tgattcgtgagcaggttgtcgctctgaccgggcaacggtacctggacggatacagtaatgatgaagagcagttta

SEQ ID NO: 79361 - DNA, 75 bp, synthetic construct
  source 1..75: mol_type = other DNA
cccaggcagcagatcaacggttcaaacaattcaacgactcactgcgctttgattaccgtctggcggagcaggata

SEQ ID NO: 79362 - DNA, 75 bp, synthetic construct
  source 1..75: mol_type = other DNA
acaccctgctcccgaaacttatctccggtgagctatccctggaagatcttccggatctcagcaccgatacagaag

SEQ ID NO: 79363 - DNA, 75 bp, synthetic construct
  source 1..75: mol_type = other DNA
tctgctggcataaattcgcccgctactgggatgtggagttgcgtgagatccctatgcgccccggtcagttgttta

SEQ ID NO: 79364 - DNA, 75 bp, synthetic construct
  source 1..75: mol_type = other DNA
ccgggagttgtcattggccgaagtggtagtattggtggtggtcaatatattacaaacaatttctggcctttgaac

SEQ ID NO: 79365 - DNA, 75 bp, synthetic construct
  source 1..75: mol_type = other DNA
tcatctgtacgggtcgcccggacgaaggcatcccggcggtttgcttcaaactgaaagatggtgaagatccgggat

SEQ ID NO: 79366 - DNA, 75 bp, synthetic construct
  source 1..75: mol_type = other DNA
taaggtcggaactactcgattcacgttttggtgcgaagtctatttccactatcgcagaatcaaaacgatttccgc

SEQ ID NO: 79367 - DNA, 75 bp, synthetic construct
  source 1..75: mol_type = other DNA
atgtggttttggtctgacttatttttgtactcgttacaagaacccttttcgtatatgctaaccgtgagcgggaat

SEQ ID NO: 79368 - DNA, 75 bp, synthetic construct
  source 1..75: mol_type = other DNA
cacagtcgccgctggcattgtttgatgagctgggattgcgtgcgcaacttagcgcctcacgcagccaggggttga

SEQ ID NO: 79369 - DNA, 75 bp, synthetic construct
  source 1..75: mol_type = other DNA
gatgtggcaaaggttcagggacaactggcaggtatcagccaggtgttttgcgatccacacgtaggcgtttccctg

SEQ ID NO: 79370 - DNA, 75 bp, synthetic construct
  source 1..75: mol_type = other DNA
ctgacgaaattaacgacagaaatcgccagctattgcgctgatgaatttaagaagctgaacgacaaaaggagctgg

SEQ ID NO: 79371 - DNA, 75 bp, synthetic construct
  source 1..75: mol_type = other DNA
cgcgcactgagaaagaagcgattgatgcgggcaccacctggtgggagggcgacttgttccagggcaagccggact

SEQ ID NO: 79372 - DNA, 75 bp, synthetic construct
  source 1..75: mol_type = other DNA
agacactacacccggataccatcatggacgctctgtttgagcaagggatccgggtggattccggtcttaccccgc

SEQ ID NO: 79373 - DNA, 75 bp, synthetic construct
  source 1..75: mol_type = other DNA
cgagaagcattaaacgagctaagtgttgataacgatgatgctcatgcggaaatcatcaaaaaaatggaactgcta

SEQ ID NO: 79374 - DNA, 75 bp, synthetic construct
  source 1..75: mol_type = other DNA
tttcttcgctggtgctattgctgtttttgacaagacctggaagggaccggcaatcagctacatcgggcgcgatga

SEQ ID NO: 79375 - DNA, 75 bp, synthetic construct
  source 1..75: mol_type = other DNA
ttttagcatttgtctttgcgcccacccatgggcttttggcaaatcgtcggcgtgcgcataaggcgctggaggatc

SEQ ID NO: 79376 - DNA, 75 bp, synthetic construct
  source 1..75: mol_type = other DNA
tattcgcgggcgtattggttttgaactgcctgcctggtttatcccgaaggatgagaagcaggtgccgacaggcgc

SEQ ID NO: 79377 - DNA, 75 bp, synthetic construct
  source 1..75: mol_type = other DNA
gtaatggatgctgcggcatcgctgattacctacggcattatgctcggtgaaaaacccgccgtgctgtcggctatc

SEQ ID NO: 79378 - DNA, 75 bp, synthetic construct
  source 1..75: mol_type = other DNA
tgccggtcctgccaatgcgatgaagatcattgctcgtgctaaattatcactagatggtgagtcatgtgagtatga

SEQ ID NO: 79379 - DNA, 75 bp, synthetic construct
  source 1..75: mol_type = other DNA
ccaaaacaaactggctccggagggaaagtacgtctgctggggataagcaaacgtggtgacacttatctcaggaca

SEQ ID NO: 79380 - DNA, 75 bp, synthetic construct
  source 1..75: mol_type = other DNA
tggtgaagaccaccagccggtgactgaatcgcagatcctctcccctcgccgctggcaggatgagagcaatgacct

SEQ ID NO: 79381 - DNA, 75 bp, synthetic construct
  source 1..75: mol_type = other DNA
gaatacaagcagacatggaaaacactggatgacgaactggcctacgctctctggcctagtgatgtggatgccgga

SEQ ID NO: 79382 - DNA, 75 bp, synthetic construct
  source 1..75: mol_type = other DNA
aaacgcgcggtgtggcgattgtcatggtggggcacgtaaccaaagatggctcgctggctggccctaaagtgctgg

SEQ ID NO: 79383 - DNA, 75 bp, synthetic construct
  source 1..75: mol_type = other DNA
ccgtgcctttaaacaggctgccgcagagctgggtgtcgccatcgaatggggcggagactggaaaacgctgaaaga

SEQ ID NO: 79384 - DNA, 75 bp, synthetic construct
  source 1..75: mol_type = other DNA
gtattgacagcattgatgaactttcaattgaacaaatcccgctggccgtagagtacatccacagggtagtgcttg

SEQ ID NO: 79385 - DNA, 75 bp, synthetic construct
  source 1..75: mol_type = other DNA
gaagactacaaagcctccctgaaatatctcagcgatcacccgaaactgcagggtattgcccagcagaacagcttt

SEQ ID NO: 79386 - DNA, 75 bp, synthetic construct
  source 1..75: mol_type = other DNA
ttttatgagtataagccgggcggctggtatcagcattcggctggagataaagcgccaaagtggatacaactctac

SEQ ID NO: 79387 - DNA, 75 bp, synthetic construct
  source 1..75: mol_type = other DNA
cagcgaagtgtttaacaacaccatcactgttaaagactctactgtgacctctggttcatggtctgatgaaggtac

SEQ ID NO: 79388 - DNA, 75 bp, synthetic construct
  source 1..75: mol_type = other DNA
gcgcagctcgagaaagccgatccggactttatggcggagcgcgaggatgttgtcagcgacgaaggccgatttaac

SEQ ID NO: 79389 - DNA, 75 bp, synthetic construct
  source 1..75: mol_type = other DNA
ggcagatcctgaacatccccgtctcagcaataaggcgttaggtatttcaggaggaagccgtaaaggtacaaagaa

SEQ ID NO: 79390 - DNA, 75 bp, synthetic construct
  source 1..75: mol_type = other DNA
atgaaattgcagcacaaatacaagaaggcggctcgctgcttggaatgatctattcctacatgtcagaaaacggag

SEQ ID NO: 79391 - DNA, 75 bp, synthetic construct
  source 1..75: mol_type = other DNA
atatcctccgcccggctgaagataacttcatggaaaaggtcgatgaccttaacagtgagcagcagtacgacaata

SEQ ID NO: 79392 - DNA, 75 bp, synthetic construct
  source 1..75: mol_type = other DNA
tgtttctaacagtgacacatccctgatccgttcgctgtatcgaaatttcactcaccactacatcaaggcaaaacg

SEQ ID NO: 79393 - DNA, 75 bp, synthetic construct
  source 1..75: mol_type = other DNA
aggactcgttcagctaaccagtgccactgacagccccagtgaaacgctggcagccaccgcaaaagcggtgaaaat

SEQ ID NO: 79394 - DNA, 75 bp, synthetic construct
  source 1..75: mol_type = other DNA
gaaattcatattgaacgtgaggcgcgacgcggaatagtaggcaatatctacaagggtcgtgtaagtcgtgtactt

SEQ ID NO: 79395 - DNA, 75 bp, synthetic construct
  source 1..75: mol_type = other DNA
tcctgtatctcaatcgtcatggttaccgtgggttatgtcgttataacaagagcgggcatttcaacattccatacg

SEQ ID NO: 79396 - DNA, 75 bp, synthetic construct
  source 1..75: mol_type = other DNA
tttgtatttgcgcccacccatgggcttttggcaaatcgtcggcgtgcgcataaagcgctggaggatcgctcatga

SEQ ID NO: 79397 - DNA, 75 bp, synthetic construct
  source 1..75: mol_type = other DNA
aaacagaagcaacggagataaaaatgaacatgcgtaatattaatattattactgcacgctctgtaccggataaaa

SEQ ID NO: 79398 - DNA, 75 bp, synthetic construct
  source 1..75: mol_type = other DNA
aagccagagaggctagaaggctccagaaaccgcgtacgaatggcggtaaggggtttgccttgctgcaccgtaaaa

SEQ ID NO: 79399 - DNA, 75 bp, synthetic construct
  source 1..75: mol_type = other DNA
tcctttcatgcggtgttttcttgcatttcgctgatatcccaggatatcgccaaaatgcgactgcgcctgatgcag

SEQ ID NO: 79400 - DNA, 75 bp, synthetic construct
  source 1..75: mol_type = other DNA
tcgaaagggatgcttaatatttgctcgatggggaagaaatttagcctgtttacaatcgttaaatatgacgatttt

SEQ ID NO: 79401 - DNA, 75 bp, synthetic construct
  source 1..75: mol_type = other DNA
acggcaataaccgcgccatccgtctgccccgggacctggattttgacggcgtcagcgagctggagatcgtccggg

SEQ ID NO: 79402 - DNA, 75 bp, synthetic construct
  source 1..75: mol_type = other DNA
acgtgccgtgaaaaatattgccagacagggcaacaccatcaccggtgcaatgggcggcatggtcaaaaatccgga

SEQ ID NO: 79403 - DNA, 75 bp, synthetic construct
  source 1..75: mol_type = other DNA
aagccgctggctctgccagaaagctcagcatcgcgcttggtgtgacgagtatgtctgtaagtcattggaagaatc

SEQ ID NO: 79404 - DNA, 75 bp, synthetic construct
  source 1..75: mol_type = other DNA
ccctgagcgatctgcagaaccgcccatccgggacaatacgtattactactgtagaacatgcagcaaaaacgatat

SEQ ID NO: 79405 - DNA, 75 bp, synthetic construct
  source 1..75: mol_type = other DNA
tggttttgttagtgatgttattggttccgtaggcggtgaatttgttggtaataaagttaaagataagataggagg

SEQ ID NO: 79406 - DNA, 75 bp, synthetic construct
  source 1..75: mol_type = other DNA
atgcagcaggtattattccaggaaactgagtttctaaattcagttattgattataatcataaagtagaaacggaa

SEQ ID NO: 79407 - DNA, 75 bp, synthetic construct
  source 1..75: mol_type = other DNA
cgaagcgggtgaaggcttcggcgactttacggtgcgtgcgggcatcattcgcccggtgctcgatccggcgcgcga

SEQ ID NO: 79408 - DNA, 75 bp, synthetic construct
  source 1..75: mol_type = other DNA
gcgctgtttacccaaaagtgattggccttgatgcttcaagaattgttccaactgcaaacgaaaaccgtcctcgta

SEQ ID NO: 79409 - DNA, 75 bp, synthetic construct
  source 1..75: mol_type = other DNA
cattggcggttcgactcaggaagcgcaggagaatatcggcctggaagttgcgggtaaattgatcaagtattctga

SEQ ID NO: 79410 - DNA, 75 bp, synthetic construct
  source 1..75: mol_type = other DNA
cactgcagcggagagtgctgattgtgctggctgcccttgatgaaaaacggccgggccccgtgctgacgcgggaca

SEQ ID NO: 79411 - DNA, 75 bp, synthetic construct
  source 1..75: mol_type = other DNA
tacgaatgcgaccagattaacttcgatttttatatccgctacaaaacgctggacctgtgggcgcgttatcaggat

SEQ ID NO: 79412 - DNA, 75 bp, synthetic construct
  source 1..75: mol_type = other DNA
aattacaacagcgcctgcgtgattgcgatattaagcatctgaccgatgtgctggaaatagataaagatatgcgtg

SEQ ID NO: 79413 - DNA, 75 bp, synthetic construct
  source 1..75: mol_type = other DNA
gcatacaaaatgtaatggttcagtgatatttgtttcaccgggaacgtcgtttcgtgtttctgctgaggtggctgc

SEQ ID NO: 79414 - DNA, 75 bp, synthetic construct
  source 1..75: mol_type = other DNA
gaaaaacattctcagtttgcttctgcatccacgtcttggtgcggtaatacagcaaatgctggaaatgccaggaca

SEQ ID NO: 79415 - DNA, 75 bp, synthetic construct
  source 1..75: mol_type = other DNA
cccgatggaagctgttaaaactaacgttaatgggactgaaaatgtattaaatgcagctattgattgtggcgtaaa

SEQ ID NO: 79416 - DNA, 75 bp, synthetic construct
  source 1..75: mol_type = other DNA
aacccaaaactgaaatttattattggtgatactcgtgattatgaatcagtataccgcgcaatgaatggggttgat

SEQ ID NO: 79417 - DNA, 75 bp, synthetic construct
  source 1..75: mol_type = other DNA
tattctttccagcggcgaaaaacaacgtatcgccctggcacgattaattttacgacgtccgaaatggatatttct

SEQ ID NO: 79418 - DNA, 75 bp, synthetic construct
  source 1..75: mol_type = other DNA
tttttgacagcgccagccagaaaaaactgtcagaagtgcagtcgaaggcgctggctgaccgttttaacgcggcac

SEQ ID NO: 79419 - DNA, 75 bp, synthetic construct
  source 1..75: mol_type = other DNA
ctaaagctggaacgccagcttatgaaagagcgctaaatcaggcggctactgccgtgcgcccgctcttagttaacg

SEQ ID NO: 79420 - DNA, 75 bp, synthetic construct
  source 1..75: mol_type = other DNA
ctaatgttcagggagatgctatggtcttccccaaccaggcaaaagcagctaccaatatggtagagaatgcaatgt

SEQ ID NO: 79421 - DNA, 75 bp, synthetic construct
  source 1..75: mol_type = other DNA
ggctgctcctgtgtttcgccgaacgatcagcgcctgcaaatgctcagccagatggtggaagaatatcaggtcgat

SEQ ID NO: 79422 - DNA, 75 bp, synthetic construct
  source 1..75: mol_type = other DNA
atctcttttccacgctacagcgtattgttaacccggaagtgactgataaaaaccatgatgaatcgagtaattccg

SEQ ID NO: 79423 - DNA, 75 bp, synthetic construct
  source 1..75: mol_type = other DNA
gccttgatgcactggtgatggatgcgaccaacaacctgattgaaccgtggtatcaggaagaccctgaccttgtgg

SEQ ID NO: 79424 - DNA, 75 bp, synthetic construct
  source 1..75: mol_type = other DNA
gtggcgctcgatgctgctctgctggaaaaactccaggctgtcgcagagtaccttcgggaagccgaaggctgggag

SEQ ID NO: 79425 - DNA, 75 bp, synthetic construct
  source 1..75: mol_type = other DNA
ttcctatattaggagtgagattcttttggcgaaattaaaatatgaattacagttggataatctgacaggtgtcat

SEQ ID NO: 79426 - DNA, 75 bp, synthetic construct
  source 1..75: mol_type = other DNA
gagcgggttaatgaatgccgtcacgccgcagcgtgaaaactcaatggcctgcgtgtcattcccgacttgcccgct

SEQ ID NO: 79427 - DNA, 75 bp, synthetic construct
  source 1..75: mol_type = other DNA
agcacaaccaaaaaagccagtgattgtgcgttctggcttgaagttgaaggtaattccatgaccgcgccaacagga

SEQ ID NO: 79428 - DNA, 75 bp, synthetic construct
  source 1..75: mol_type = other DNA
cacaaaagaaactccaggatgcttctaaaaaagggcaaattctaaaaagtagagacttaaccatctctgtaataa

SEQ ID NO: 79429 - DNA, 75 bp, synthetic construct
  source 1..75: mol_type = other DNA
gagcagacggtttccgatgcgcgcctgcgcaacgccatcaagaccggcatggcggaaaccaatgcggagctttac

SEQ ID NO: 79430 - DNA, 75 bp, synthetic construct
  source 1..75: mol_type = other DNA
atgcgcaccgtatcgaagatatctggcagtttttctataaaggtgcttactggcgtcgcggtccggttacgatgt

SEQ ID NO: 79431 - DNA, 75 bp, synthetic construct
  source 1..75: mol_type = other DNA
cacgttccgacagccgacaactggactctgtcgatccttttaatatcgaccatattgaagtgatctccggcgcga

SEQ ID NO: 79432 - DNA, 75 bp, synthetic construct
  source 1..75: mol_type = other DNA
gtgaccaaagactacacctttaaacgccccggctgggccggacgttttgaacaggaaggccagcaccaggactat

SEQ ID NO: 79433 - DNA, 75 bp, synthetic construct
  source 1..75: mol_type = other DNA
tgccgctggtcccggcagcaggtctgcccgcagacggcacttctgccactgatctggcggtgcagctgaacggca

SEQ ID NO: 79434 - DNA, 75 bp, synthetic construct
  source 1..75: mol_type = other DNA
agaccagatccagcagtccgctgctttcctgacgctgattaatgtcaccccggtgactgaacagtccggtcaact

SEQ ID NO: 79435 - DNA, 75 bp, synthetic construct
  source 1..75: mol_type = other DNA
gcccgcagacggcacttctgccactgatctggcggtgcagctgaacggcataacgtatcaggcctgccgtgggga

SEQ ID NO: 79436 - DNA, 75 bp, synthetic construct
  source 1..75: mol_type = other DNA
tggggtaagtgttcaggaaaataaacgaagaaacgatatattaaaaagcgcacataaagcaggcgttagaattcc

SEQ ID NO: 79437 - DNA, 75 bp, synthetic construct
  source 1..75: mol_type = other DNA
ggattcaattctggatgaattgcttggtgcacagccggaaccatccccggaactgcttccggaaccacaggcgga

SEQ ID NO: 79438 - DNA, 75 bp, synthetic construct
  source 1..75: mol_type = other DNA
gcggttggtggatacgtgaagtgggcttgtttgatgagtccggggcattgattgctgtgggcaactgcccggaaa

SEQ ID NO: 79439 - DNA, 75 bp, synthetic construct
  source 1..75: mol_type = other DNA
ggcgatccgctggaagtggcgcagtggctgcaggcctgtcatgatgccggaataaaagttagtgtacaggttaat

SEQ ID NO: 79440 - DNA, 75 bp, synthetic construct
  source 1..75: mol_type = other DNA
tcaccgaacgccagcaggcatggctcaacttctcccagggcgtggagctgccggacccgggtaaatactatggtc

SEQ ID NO: 79441 - DNA, 75 bp, synthetic construct
  source 1..75: mol_type = other DNA
gacgaagatacgcgcgatatgctcgaaggggtgatggacatcgcagaccaacgcgttcgcgacatcatgatcccc

SEQ ID NO: 79442 - DNA, 75 bp, synthetic construct
  source 1..75: mol_type = other DNA
tgggcggaaaaaacgtggcgtgggcgcagtctgaaatcaccgcatggatgactgaccgcattgccgaacgcaacc

SEQ ID NO: 79443 - DNA, 75 bp, synthetic construct
  source 1..75: mol_type = other DNA
cagacgtcaggaaattgaagcatggcgcacagaacaggaggcgaagccgttcacgtttgaatggaacggtcgtat

SEQ ID NO: 79444 - DNA, 75 bp, synthetic construct
  source 1..75: mol_type = other DNA
caggaaggcattaagtgggctttcgtcagcaaagaagctcgcgatgtagccaacgataacgagatatgggagggc

SEQ ID NO: 79445 - DNA, 75 bp, synthetic construct
  source 1..75: mol_type = other DNA
gtttccttctgccttcattactacccctactaattcaataatgcttaaagctttctttgccaatatctcaatcac

SEQ ID NO: 79446 - DNA, 75 bp, synthetic construct
  source 1..75: mol_type = other DNA
cagcggcattgctgaattatgacttcagtggtaatcgggtgcgcgacagctatggtggcaccagcgattatgcct

SEQ ID NO: 79447 - DNA, 75 bp, synthetic construct
  source 1..75: mol_type = other DNA
tacggctaaatcagctaaaagtgccttatcatcagattcaggtgatggtagtgaccccgaccccgagcccgaaac

SEQ ID NO: 79448 - DNA, 75 bp, synthetic construct
  source 1..75: mol_type = other DNA
cttcgcaagtctgtcgcatgcgccaaactgaaaattttacatcttaaacaaagaatgcaaaatgctactaacttt

SEQ ID NO: 79449 - DNA, 75 bp, synthetic construct
  source 1..75: mol_type = other DNA
cgcggtgagtttattcgtggctgggatgacggacgtggagtggataacggaaggggattattaacgcttcaggac

SEQ ID NO: 79450 - DNA, 75 bp, synthetic construct
  source 1..75: mol_type = other DNA
tcagaaacgcacattatcttgaaaatggtgcggttgactgcgaggtgttatttgaaggtgaaacggagtttgccc

SEQ ID NO: 79451 - DNA, 75 bp, synthetic construct
  source 1..75: mol_type = other DNA
gaacagacggatgtggtgacaggagaaaatgaaacagcggagattgcccgtgaacgcaagctggcagaaatcagc

SEQ ID NO: 79452 - DNA, 75 bp, synthetic construct
  source 1..75: mol_type = other DNA
ggaactatcctgccgcctcagacctgctcaggatgtatatccttaaagagcatggtggtatttatacagacacag

SEQ ID NO: 79453 - DNA, 75 bp, synthetic construct
  source 1..75: mol_type = other DNA
gcgaaattgagccggaagagcgcaaggtgctggaagagattgccggtgttctgggtcttcgtctggagaatcacc

SEQ ID NO: 79454 - DNA, 75 bp, synthetic construct
  source 1..75: mol_type = other DNA
atgccagttagccgttatctctgcattttcataaacgttggtttgggagaaggttcggcattacccgttggtgtg

SEQ ID NO: 79455 - DNA, 75 bp, synthetic construct
  source 1..75: mol_type = other DNA
tcagaagttatgggaagaggatatattgcaagcctgacgccgggtgctgatagcccacttgattttgatgattat

SEQ ID NO: 79456 - DNA, 75 bp, synthetic construct
  source 1..75: mol_type = other DNA
tcagcgggagatgaaggaagaactgaataatcttgatgatttacgctcaatccgagcgtttgacgttacgcaata

SEQ ID NO: 79457 - DNA, 75 bp, synthetic construct
  source 1..75: mol_type = other DNA
agagaatgcggatgccagctctctggccttcacagccctgcacgcgcgccgtctcgatctccccttccgcctggc

SEQ ID NO: 79458 - DNA, 75 bp, synthetic construct
  source 1..75: mol_type = other DNA
aacaccagctggagttacagtgccggaaaggggtacagccagaataactggcagcacattaacacctggctggag

SEQ ID NO: 79459 - DNA, 75 bp, synthetic construct
  source 1..75: mol_type = other DNA
tcagtatgcttatcccactggcaaatattcttggctgcgatgcgatgtggctgttaactggcgaaacggcagcaa

SEQ ID NO: 79460 - DNA, 75 bp, synthetic construct
  source 1..75: mol_type = other DNA
ctaacacggttaaacaagcgaataaagatatcgatgccgccaaattgaaattaaccaccgaaatagccgccatcg

SEQ ID NO: 79461 - DNA, 75 bp, synthetic construct
  source 1..75: mol_type = other DNA
ccgcgctgattgccggcacgctggctgcgggcgcaggcatcagctggctggtctgccagcttaaccgtcctgtgg

SEQ ID NO: 79462 - DNA, 75 bp, synthetic construct
  source 1..75: mol_type = other DNA
aatgcgggattctatcgaccgccgtatcgctaaacagaaagagcgcccaccagccagcaaaacgcggaaaagtgc

SEQ ID NO: 79463 - DNA, 75 bp, synthetic construct
  source 1..75: mol_type = other DNA
gagccagtggtgaaacgcgcccgtgaaaaagtcgaacacgattttaatcagcgggtgataaatcaacggctcgcc

SEQ ID NO: 79464 - DNA, 75 bp, synthetic construct
  source 1..75: mol_type = other DNA
tttatgagtcgctggtttctcgagaagaaatggtaaaagctgaagatatgggacgatattatcgcattccagcgg

SEQ ID NO: 79465 - DNA, 75 bp, synthetic construct
  source 1..75: mol_type = other DNA
ggtgagccaggtccgaaaggagacaaaggggaaactggtccggcaggaccgaaaggtgaacagggaccgcagggg

SEQ ID NO: 79466 - DNA, 75 bp, synthetic construct
  source 1..75: mol_type = other DNA
gaagccaacaatattgatgattatacatctcataacacaactcgacttagtgttaaagaagttactgagttgttg

SEQ ID NO: 79467 - DNA, 75 bp, synthetic construct
  source 1..75: mol_type = other DNA
atggttgcagtgtactggaacgacaacctttgtcgtggcgatgagaagaacgcagcaaggatttatcgggccagt

SEQ ID NO: 79468 - DNA, 75 bp, synthetic construct
  source 1..75: mol_type = other DNA
cagagtggcagatggggtgaaatcgccccgttcacagtcacgcctgaagttattgccgcagccagagatgccaaa

SEQ ID NO: 79469 - DNA, 75 bp, synthetic construct
  source 1..75: mol_type = other DNA
actcaaaaaaatacacaggcacccctggctctggtggcaacatccgcattaacagcgatgtcagtttccagccag

SEQ ID NO: 79470 - DNA, 75 bp, synthetic construct
  source 1..75: mol_type = other DNA
aacgctgaatgccattgtcgccaacgggggtaacgggcgtttgctcagtttcgacgtcgcaaaccgcgaacagtg

SEQ ID NO: 79471 - DNA, 75 bp, synthetic construct
  source 1..75: mol_type = other DNA
agcgtcgtgcccacgcatggtgccgttgtgcgggctgactataaaacccgtgtgggtgtgaaagtgctgatgacg

SEQ ID NO: 79472 - DNA, 75 bp, synthetic construct
  source 1..75: mol_type = other DNA
tgctaaaaatgcagagtatatggcaagactggcaggacttatttaccattcgagcggtgaagagggggagatttc

SEQ ID NO: 79473 - DNA, 75 bp, synthetic construct
  source 1..75: mol_type = other DNA
aaccacagtggcgattcccatgcctggtttgacaggcacaatcgtggcacggggggagcttgtcacaaccccgaa

SEQ ID NO: 79474 - DNA, 75 bp, synthetic construct
  source 1..75: mol_type = other DNA
cacgttatctggaatcaggtgcaattaactgtgaggtattgtttgagggaatggagaaagtcctgccgtatacag

SEQ ID NO: 79475 - DNA, 75 bp, synthetic construct
  source 1..75: mol_type = other DNA
ctggattattataaccaggacactacgggaacctcggggatagtcggcatgggattcaacaatgaagattccatt

SEQ ID NO: 79476 - DNA, 75 bp, synthetic construct
  source 1..75: mol_type = other DNA
attactatgttcttaccgttgctggtcagtctaatgccatggcgtatggcgaaggactaccattaccggacaagg

SEQ ID NO: 79477 - DNA, 75 bp, synthetic construct
  source 1..75: mol_type = other DNA
tatcggccacgttgaccagggtaaaactactctgaccgctgcaatcacaaccgtactggctaaaacctacggcgg

SEQ ID NO: 79478 - DNA, 75 bp, synthetic construct
  source 1..75: mol_type = other DNA
ccatgcgcaatatatagaacagcgaagaaatatgatgcaattttatagtgatttcattttaaaccttcccctctc

SEQ ID NO: 79479 - DNA, 75 bp, synthetic construct
  source 1..75: mol_type = other DNA
ggcaggaacaaccgtagcaaaccgatctcgaaagaaagtgtttcacaagtgattgagttacttggttacaaaggc

SEQ ID NO: 79480 - DNA, 75 bp, synthetic construct
  source 1..75: mol_type = other DNA
caaaaccgcacgttaacgtgggtactatcggccacgttgaccaaggtaaaaccacactgaccgctgcaatcacga

SEQ ID NO: 79481 - DNA, 75 bp, synthetic construct
  source 1..75: mol_type = other DNA
ttttcaagcaactcaagccgattactggtcactacccttatatttttattggcaggaacaaccgtagtaaaccga

SEQ ID NO: 79482 - DNA, 75 bp, synthetic construct
  source 1..75: mol_type = other DNA
tatcggccacgttgaccaaggtaaaaccactctgaccgctgcaatcactaccgtactggctaaaacctacggcgg

SEQ ID NO: 79483 - DNA, 75 bp, synthetic construct
  source 1..75: mol_type = other DNA
actctgacaccctgcgttcagcgctggtttctctgaatggcgacaacgcatgggcattaagcgaaagctggtatg

SEQ ID NO: 79484 - DNA, 75 bp, synthetic construct
  source 1..75: mol_type = other DNA
cgatctttgttgaagaagaaattgacgactacaaagccgttgaagccatgccaggcgtgatgcgcattccagaga

SEQ ID NO: 79485 - DNA, 75 bp, synthetic construct
  source 1..75: mol_type = other DNA
atgatcctttttgttccagcggcacctgaaccagaactatctaccgcaccacttttcaccgaacgttgcccagca

SEQ ID NO: 79486 - DNA, 75 bp, synthetic construct
  source 1..75: mol_type = other DNA
ggagaatatgctgaaaggcgggatttccggtcgcagtgcaaaaggaaaacgtatccatacccgggccattcacag

SEQ ID NO: 79487 - DNA, 75 bp, synthetic construct
  source 1..75: mol_type = other DNA
ttttctgataacgccagcctttttgcccgctctgcagcttccatgcgggagtatggttacagttctgaggaggta

SEQ ID NO: 79488 - DNA, 75 bp, synthetic construct
  source 1..75: mol_type = other DNA
ggcgttggtattacgatgaagagcacgatcgaatgatgctcgatttagccaatggtatgctatttcgctcacgtt

SEQ ID NO: 79489 - DNA, 75 bp, synthetic construct
  source 1..75: mol_type = other DNA
gtgttgccgtggcggatcggcttttaccgcgggcagcgaagggacatattcagaacggcacggagccagccatga

SEQ ID NO: 79490 - DNA, 75 bp, synthetic construct
  source 1..75: mol_type = other DNA
agcggcacagacaacgctgaataatgttacgtcagtggggagtcgtttattaagtggcgcgctggggctggttgg

SEQ ID NO: 79491 - DNA, 75 bp, synthetic construct
  source 1..75: mol_type = other DNA
tgtccgagctgcgtaaagaaataaaaaacgcgcaggggcaggctgtaaaggatgctgcaattaagacaaccgaag

SEQ ID NO: 79492 - DNA, 75 bp, synthetic construct
  source 1..75: mol_type = other DNA
ggcaggaacgatcctcgcaagcctataagcaaggaaagtattaatcaggttattgagttactgggatataaaggt

SEQ ID NO: 79493 - DNA, 75 bp, synthetic construct
  source 1..75: mol_type = other DNA
catttacctttcctgatggtacgagcaccgaagatattggcaccgccattgatgagtattttgctggtcagtcag

SEQ ID NO: 79494 - DNA, 75 bp, synthetic construct
  source 1..75: mol_type = other DNA
atggcatcaccgtcgattaatacgctacgcagaatgagtatttgtaaaagtccggcctggaaagatactcagcga

SEQ ID NO: 79495 - DNA, 75 bp, synthetic construct
  source 1..75: mol_type = other DNA
gtgttcatgcccgaggcagatagcctcaagcacccgcagcaattctacttaactcacgtcacctcgccaatataa

SEQ ID NO: 79496 - DNA, 75 bp, synthetic construct
  source 1..75: mol_type = other DNA
tctcagtacgacttcccgggtgacgacactccgatcgttcgtggttctgctttgaaagcgctggaaggcgacgca

SEQ ID NO: 79497 - DNA, 75 bp, synthetic construct
  source 1..75: mol_type = other DNA
gaaggcgtagagatggtaatgccgggcgacaacatcaaaatggttgttaccctgatccacccgatcgcgatggac

SEQ ID NO: 79498 - DNA, 75 bp, synthetic construct
  source 1..75: mol_type = other DNA
tcagacagtgccgttctggggaactcaacactgaccagtaccgccctgaatctgaacaagggagcaaatgctctg

SEQ ID NO: 79499 - DNA, 75 bp, synthetic construct
  source 1..75: mol_type = other DNA
aatttctgctggtcttggtggggtactgaagggtgtagaaaacaccgcaagcgcagtgtctcgttctgctatggg

SEQ ID NO: 79500 - DNA, 75 bp, synthetic construct
  source 1..75: mol_type = other DNA
caaaaccgcacgttaacgtaggtactatcggccacgttgaccagggtaaaaccacactgaccgctgcaatcacga

SEQ ID NO: 79501 - DNA, 75 bp, synthetic construct
  source 1..75: mol_type = other DNA
cgatatgccattgctactggaagagcagagtttaatcctgcggcagatctgtccagtgcccttgaagttcataaa

SEQ ID NO: 79502 - DNA, 75 bp, synthetic construct
  source 1..75: mol_type = other DNA
tcatgcgctgtatcttgaaaaacgcagaaaaatgatgaactggtatgctgattatatttatccgaaatctttacc

SEQ ID NO: 79503 - DNA, 75 bp, synthetic construct
  source 1..75: mol_type = other DNA
agcggagtcgtgcggcttcgtggtgagaacgccggaaggggaaagatattttccctgcgtgaatatctccggtga

SEQ ID NO: 79504 - DNA, 75 bp, synthetic construct
  source 1..75: mol_type = other DNA
ggtggtgcctcatatgcactgaatccgggtgttgatattgacagtaccttaatggttgttgattttcccacaaaa

SEQ ID NO: 79505 - DNA, 75 bp, synthetic construct
  source 1..75: mol_type = other DNA
agtttagaaatgacatcaccagcggtccaaataacctgcaattagctagagaaaaccgtacaaacttacgtaagc

SEQ ID NO: 79506 - DNA, 75 bp, synthetic construct
  source 1..75: mol_type = other DNA
gttaaatcgcaattactggagagactggggaatgtgttgtttttcacgtcgctttataaccagggatgtttagag

SEQ ID NO: 79507 - DNA, 75 bp, synthetic construct
  source 1..75: mol_type = other DNA
tcatgcccaatatttagaaaagagaagttctatgatgcagtggtacagtgattatatccttaatagagataaagc

SEQ ID NO: 79508 - DNA, 75 bp, synthetic construct
  source 1..75: mol_type = other DNA
cgaagccttccgcgatgccgacgttgacggtgcgctggcagcttccgtattccacaaacaaataatcaatattgg

SEQ ID NO: 79509 - DNA, 75 bp, synthetic construct
  source 1..75: mol_type = other DNA
ctgcttaaccagaacgacgtcaccacgcttgtgcgcaaggacggttttcgcttctggggttcccgctgtctgagc

SEQ ID NO: 79510 - DNA, 75 bp, synthetic construct
  source 1..75: mol_type = other DNA
tgctatgacgaactttcctcgttcgagccggatgtcgaaaaagaggggtcgccaaccctgctgggggataaacgt

SEQ ID NO: 79511 - DNA, 75 bp, synthetic construct
  source 1..75: mol_type = other DNA
ttcaaaatgcgccgctccatcaggtcaaaatgacacgatggaagaggtcaaaatgaaacgctccattggttcaaa

SEQ ID NO: 79512 - DNA, 75 bp, synthetic construct
  source 1..75: mol_type = other DNA
ggtattactgctgtttttatactgcctttttccttatggcgtgttctgcatgcgcaccattgatcgcgttacagt

SEQ ID NO: 79513 - DNA, 75 bp, synthetic construct
  source 1..75: mol_type = other DNA
cggtattccggcgtattcctgtttagatgctcctggtacatataaggctggttatactatctgccgttcagcaga

SEQ ID NO: 79514 - DNA, 75 bp, synthetic construct
  source 1..75: mol_type = other DNA
cacgctgaaaggtacaaaagcaggcgctcatactgttacagcatcgatgactggcggtaagagtgagcagttggt

SEQ ID NO: 79515 - DNA, 75 bp, synthetic construct
  source 1..75: mol_type = other DNA
ttgccgacctgatgatgacggtaggtaaaaaagtggaagagctgatagcacgtctggcgcaaaaagcccgtgccg

SEQ ID NO: 79516 - DNA, 75 bp, synthetic construct
  source 1..75: mol_type = other DNA
gtggagggtcaggtcatcaactttagcgtaacgccagaaggggcgacgttaagtggcggaaaagtgagaactaac

SEQ ID NO: 79517 - DNA, 75 bp, synthetic construct
  source 1..75: mol_type = other DNA
gtgcactgacagggcgtgtggttggcggtgttctggggggaatgattgcctccgctgtatcaggaaaaattgccg

SEQ ID NO: 79518 - DNA, 75 bp, synthetic construct
  source 1..75: mol_type = other DNA
gcagcgaaagtgtgccatgaagtggggctggacgcgggagaggtggtcattggtagtgatattgaaacgctatct

SEQ ID NO: 79519 - DNA, 75 bp, synthetic construct
  source 1..75: mol_type = other DNA
gaagatatcagcaaggaaattaacgggtattactgctgtttttatactgcttttttccttatggcgtgttctgca

SEQ ID NO: 79520 - DNA, 75 bp, synthetic construct
  source 1..75: mol_type = other DNA
gcacagagcgaccgtgctgaaagtatcgccaaagcggtagatggtgtgaaaagcgttaaaaatgatctgaaaact

SEQ ID NO: 79521 - DNA, 75 bp, synthetic construct
  source 1..75: mol_type = other DNA
tgacgcgtcgggcagcaattattatgcgcggctatatttccggcctgatggaaaactggctctttgccccgcaat

SEQ ID NO: 79522 - DNA, 75 bp, synthetic construct
  source 1..75: mol_type = other DNA
gctgggaagaccgtcgagaatcgccccagaagcccgtagagcgattatcgagaaaaagaataatggaaccagtgt

SEQ ID NO: 79523 - DNA, 75 bp, synthetic construct
  source 1..75: mol_type = other DNA
tttgtgggtctgttatcgcaacccctttaatatattgctcaccattctcggcggtatttcttatgccacggagga

SEQ ID NO: 79524 - DNA, 75 bp, synthetic construct
  source 1..75: mol_type = other DNA
aaacagaacgattatcgctatgcaaaccataagaaatgggcgacggaaaatgcatttgttctacaataccatatg

SEQ ID NO: 79525 - DNA, 75 bp, synthetic construct
  source 1..75: mol_type = other DNA
atttgatccagtttggaatgattgtttgcttggtgaatgatagcgaaatgaaaacactatcttcaatccaagagc

SEQ ID NO: 79526 - DNA, 75 bp, synthetic construct
  source 1..75: mol_type = other DNA
accatgccgaaaacccgcaatcagcggggcgtgtatctgtgtgaagtggggacggacaccgcaaaagaaattctc

SEQ ID NO: 79527 - DNA, 75 bp, synthetic construct
  source 1..75: mol_type = other DNA
tggaaaaccctgccatttcaggtcgctatcatgaatagcatgggtaacgaccagatccgtaccattaatctgatt

SEQ ID NO: 79528 - DNA, 75 bp, synthetic construct
  source 1..75: mol_type = other DNA
aaatcgcacgcgcgatccgaaatctcatccgtaccggcatcgttagcgacgtagacctcaaggaggggctatgtc

SEQ ID NO: 79529 - DNA, 75 bp, synthetic construct
  source 1..75: mol_type = other DNA
gctggcagctaagcctgcttgcgagcgtggtaatcagtgccttttttctcaacacagcttacgcctggcaacaag

SEQ ID NO: 79530 - DNA, 75 bp, synthetic construct
  source 1..75: mol_type = other DNA
ggcgttaattcgtcagcaggcggcagagcagaataaggtgtaccagtccatgctggttatgaacggtcagcatac

SEQ ID NO: 79531 - DNA, 75 bp, synthetic construct
  source 1..75: mol_type = other DNA
attacccaggacatccccggttatctgtttgccggtggtgtggcttatgacggcgatgttattacggtttaccca

SEQ ID NO: 79532 - DNA, 75 bp, synthetic construct
  source 1..75: mol_type = other DNA
gaaaaactccaccaggagggtattcaggccgttgccgcaccttttaatgttactcataaacatgaaattgatgcc

SEQ ID NO: 79533 - DNA, 75 bp, synthetic construct
  source 1..75: mol_type = other DNA
cgtcaatgtctttgcctgaagcctcagataatgaaggacgaacacgggcggcgctgacagagcagaaccggctga

SEQ ID NO: 79534 - DNA, 75 bp, synthetic construct
  source 1..75: mol_type = other DNA
gcggcgtattacctaccggttctcagcgcatcgaaaccccagcttgaactgttcgatgaaatctggaaagagggt

SEQ ID NO: 79535 - DNA, 75 bp, synthetic construct
  source 1..75: mol_type = other DNA
attacaggccgctgcatatttcttcgctaaggagcaggaggaagaatgtaactgccctgtatgtcagctttcccg

SEQ ID NO: 79536 - DNA, 75 bp, synthetic construct
  source 1..75: mol_type = other DNA
atgaaaggcaacatcgagcatacaggcgggtcgctgtcatctaatggcaaggtgctccacacccataaacacccc

SEQ ID NO: 79537 - DNA, 75 bp, synthetic construct
  source 1..75: mol_type = other DNA
aaaaacaatccattgcggtacttgaacagagcctttcccggcataacgcaattcttaatgacctgaataccatca

SEQ ID NO: 79538 - DNA, 75 bp, synthetic construct
  source 1..75: mol_type = other DNA
cagagcattaagcccttacgactacacactgtattgcaggaagtgggtaaaaccaaatctgacttgtacgccaca

SEQ ID NO: 79539 - DNA, 75 bp, synthetic construct
  source 1..75: mol_type = other DNA
tgaactttattcaggaagcacgttccactaaagcggcagatgccctgaaagcgatggtcagcaatactgcgacgg

SEQ ID NO: 79540 - DNA, 75 bp, synthetic construct
  source 1..75: mol_type = other DNA
cgccgattaccacgccccagcgggcgtggttccaaccgtctatcacggcggcgatctcttccatgtgcgaggttc

SEQ ID NO: 79541 - DNA, 75 bp, synthetic construct
  source 1..75: mol_type = other DNA
ggcggcttatgcgtttgatgttctgtgccgtcagctgagggacgcaacggatgcgtatctccgtacacagagccg

SEQ ID NO: 79542 - DNA, 75 bp, synthetic construct
  source 1..75: mol_type = other DNA
gttagcagcaatcgcacctacactcggtcaaaactggctgtcaggtcagatgaacaactacaacaatctggcaaa

SEQ ID NO: 79543 - DNA, 75 bp, synthetic construct
  source 1..75: mol_type = other DNA
cgggcgttatcattacacggcggtagggcagttggctcagcatgaagacacttctacggtgcagcttagcggcaa

SEQ ID NO: 79544 - DNA, 75 bp, synthetic construct
  source 1..75: mol_type = other DNA
caggcaatcaacaaaaccattgaagccgtctccaacgggcaaaaccgcgttctgctggtcatggcgaccggaaca

SEQ ID NO: 79545 - DNA, 75 bp, synthetic construct
  source 1..75: mol_type = other DNA
tcagactgggaacgtggtgtaaaacggccgggaggtgccgctcttcgccttctttcagtcgtagagaaaaacgga

SEQ ID NO: 79546 - DNA, 75 bp, synthetic construct
  source 1..75: mol_type = other DNA
gtttgacggtttatgatacgccggaagccacgttaattaaaccttccgttggtgttatcggtggtcgcaacgtaa

SEQ ID NO: 79547 - DNA, 75 bp, synthetic construct
  source 1..75: mol_type = other DNA
cggtaaactggttaccgaatcctttaaagattacacccgcaaaacactgctcaaagaatatgcctcgctggatga

SEQ ID NO: 79548 - DNA, 75 bp, synthetic construct
  source 1..75: mol_type = other DNA
ggagcgcggaatatgatgaatggggcaaccagcttaatgaggagaacccgcatcacctgcaccagccgtaccggc

SEQ ID NO: 79549 - DNA, 75 bp, synthetic construct
  source 1..75: mol_type = other DNA
ctggcaggttccggccttcactctcggcggtgaagccaccgacatcgtggtgatgcgcattatgtgtcgtcgcgg

SEQ ID NO: 79550 - DNA, 75 bp, synthetic construct
  source 1..75: mol_type = other DNA
cacttgcatccgtacatgaaatgatggagtcacttcaggatattggcgcagttacaaaacaaactatgagagagt

SEQ ID NO: 79551 - DNA, 75 bp, synthetic construct
  source 1..75: mol_type = other DNA
tcccggctgaactggtgcggctgctggacaggctggaggaagaaatccgggcagaccgcgtgagcagtgaaagcc

SEQ ID NO: 79552 - DNA, 75 bp, synthetic construct
  source 1..75: mol_type = other DNA
ctgcgttgcgtaaacatggttgccgatctgtggcatgcgcctgcaccgaaaaatggtcaggccgttggcaccaac

SEQ ID NO: 79553 - DNA, 75 bp, synthetic construct
  source 1..75: mol_type = other DNA
taacgcccagggtgatatttcgaaagaaagtacctttgttgataccctcgtggcgcgtaatgtcgatgccattat

SEQ ID NO: 79554 - DNA, 75 bp, synthetic construct
  source 1..75: mol_type = other DNA
gttcctggagtacggtcaccgagtatggtgatgcgaattatttgaatgttgttagcatccccgccgttgattgta

SEQ ID NO: 79555 - DNA, 75 bp, synthetic construct
  source 1..75: mol_type = other DNA
acagcgcatgcacaccacttcgggatcgtttggctgacgcatcatctgagtttaatgttggtcagcaacatctat

SEQ ID NO: 79556 - DNA, 75 bp, synthetic construct
  source 1..75: mol_type = other DNA
gtttttatcttgatgagttcagtaatataagcgaactgaaggatgctgttacggaatatattgaatactacaaca

SEQ ID NO: 79557 - DNA, 75 bp, synthetic construct
  source 1..75: mol_type = other DNA
tgagggtcgccggattaaagaaatccgcgagattcagggttatgaaaacggggaatatatatcccaacttatcgc

SEQ ID NO: 79558 - DNA, 75 bp, synthetic construct
  source 1..75: mol_type = other DNA
tccgccattcctatgcgatgcacatgctgtatgccggtataccgctgaaggtcctgcagagcctgatggggcata

SEQ ID NO: 79559 - DNA, 75 bp, synthetic construct
  source 1..75: mol_type = other DNA
aagcctgccggatggcgaatgatttccagattactcatgagctggcggatctgccgccggagttgtgggcgtacc

SEQ ID NO: 79560 - DNA, 75 bp, synthetic construct
  source 1..75: mol_type = other DNA
taatcgaagaagccaaattaaaaatagcgattgcgaaatgccaccccaattcagggatggcacgggtagagggcg

SEQ ID NO: 79561 - DNA, 75 bp, synthetic construct
  source 1..75: mol_type = other DNA
cctgcccgggtggtttatctgacggcgggcattgactcgcagcgaaaccgttttgagatgtatgtctggggatgg

SEQ ID NO: 79562 - DNA, 75 bp, synthetic construct
  source 1..75: mol_type = other DNA
gaaggagaaacctacgaaattttcgtaggtcaaaaaaacggcgcagaaatagatattataaccatgacctacaaa

SEQ ID NO: 79563 - DNA, 75 bp, synthetic construct
  source 1..75: mol_type = other DNA
actttatggcacgcaagctggcagagttagggcattttccaaagctgatatcaccgcaatttgtccgcccattcg

SEQ ID NO: 79564 - DNA, 75 bp, synthetic construct
  source 1..75: mol_type = other DNA
caagcgtatggaagctgcaggcaaaccaacggataaaccaaacctggtgtgcggtccggtacaaatctgctggca

SEQ ID NO: 79565 - DNA, 75 bp, synthetic construct
  source 1..75: mol_type = other DNA
gaaggcatcccggcggtttgcttcaaactgaaagatggtgaagatccgggatacaccctgtacgacctctctgaa

SEQ ID NO: 79566 - DNA, 75 bp, synthetic construct
  source 1..75: mol_type = other DNA
catcaggacgtgagttaaatatttctggcggtaataaccgtatcgctgggcgtgactataacgaaactaagggta

SEQ ID NO: 79567 - DNA, 75 bp, synthetic construct
  source 1..75: mol_type = other DNA
atgtcctgttctcgttcaattgtattactgaacaatgccttaaaaatctccgttatgaaaaatggcgatttgtct

SEQ ID NO: 79568 - DNA, 75 bp, synthetic construct
  source 1..75: mol_type = other DNA
attgactcctggttcggttacgccggttccgttgcaccgtctgatatctataatttagaccgtagtgactttgat

SEQ ID NO: 79569 - DNA, 75 bp, synthetic construct
  source 1..75: mol_type = other DNA
gaaaatgagcgcaataaaatacgcgaaaaacaacttcaggcattaaatgatgctcattcagtaaaggaacgttaa

SEQ ID NO: 79570 - DNA, 75 bp, synthetic construct
  source 1..75: mol_type = other DNA
ccaaactgcgcgagctgggggtgattgacgggaagatcgccacgatcttccacggcattgatatctccagccgtg

SEQ ID NO: 79571 - DNA, 75 bp, synthetic construct
  source 1..75: mol_type = other DNA
gcgatgccggtacgcataccgtggggatgtgtgtgtcccgtctggccagagaaatcagccccaaagacagcaaag

SEQ ID NO: 79572 - DNA, 75 bp, synthetic construct
  source 1..75: mol_type = other DNA
cgatgccgaggctatctgtgaagcagcgtcgcgtccatcgatgcgttttgtgcaaccccgaacggaatctcagca

SEQ ID NO: 79573 - DNA, 75 bp, synthetic construct
  source 1..75: mol_type = other DNA
ggcgcgtgttccttgcccactgcgccatgcatgaagataacccgttcagctattgcgataactacttttactact

SEQ ID NO: 79574 - DNA, 75 bp, synthetic construct
  source 1..75: mol_type = other DNA
ataaaccgaatgccaccgtaatggtcgatgttgatcgtcagggctttgttgatttactggctgatcgtctgaaat

SEQ ID NO: 79575 - DNA, 75 bp, synthetic construct
  source 1..75: mol_type = other DNA
gcagctgaaaaattcaaggtcattacaacttttaccatcatcgcagatatggccaaaaacgtggctggagatgct

SEQ ID NO: 79576 - DNA, 75 bp, synthetic construct
  source 1..75: mol_type = other DNA
ttcaacggaagtctacacgaaggtttttgcgctggatgtggctgcccggcaccgggtgcagtttgcgatgccgga

SEQ ID NO: 79577 - DNA, 75 bp, synthetic construct
  source 1..75: mol_type = other DNA
atggatgagcaaattgttgaatgtcccacctgtggaaatgaggacccggagtatctgaaagagtgcccacattgt

SEQ ID NO: 79578 - DNA, 75 bp, synthetic construct
  source 1..75: mol_type = other DNA
cggataacgcccaactggaactgaaatataaaaaaggcaaaacaccactcagccatcgcaattggccgggcgaac

SEQ ID NO: 79579 - DNA, 75 bp, synthetic construct
  source 1..75: mol_type = other DNA
ttaagggcgtggcgggacggtgcgtaacttaccgccgtgaaggttacgaatatgattgcgtgatgcctgtttatc

SEQ ID NO: 79580 - DNA, 75 bp, synthetic construct
  source 1..75: mol_type = other DNA
taatttaactaccatttgcaataaagttatcgagacaatcaatcatcatgttgaggttggtaatatcagccttac

SEQ ID NO: 79581 - DNA, 75 bp, synthetic construct
  source 1..75: mol_type = other DNA
gacagcgccaatacatcactgggtaaaaagggcgaaacgctggccgataccatttcggttatcagcacttacgtc

SEQ ID NO: 79582 - DNA, 75 bp, synthetic construct
  source 1..75: mol_type = other DNA
atcagcaaaaagtggtgatcggtcgttgggtctatgccgccagccagattttgttgctcgacgagccaacgcgcg

SEQ ID NO: 79583 - DNA, 75 bp, synthetic construct
  source 1..75: mol_type = other DNA
agaatcttcatatggtgagggagaatggaaaacgctgccattccagatcgccattatgaactgtatgggtaacga

SEQ ID NO: 79584 - DNA, 75 bp, synthetic construct
  source 1..75: mol_type = other DNA
accaagttgtttgcgtcgaatccctcaaggtgaaaaacatgatccgcaacccgaagctgtctaaagcaatagctg

SEQ ID NO: 79585 - DNA, 75 bp, synthetic construct
  source 1..75: mol_type = other DNA
tggaagtgggcaatattagccttacaaccagtgaaccagattttgaatttgacccctatattttggaggaatttt

SEQ ID NO: 79586 - DNA, 75 bp, synthetic construct
  source 1..75: mol_type = other DNA
aggctaaagtaccggagtacaaaagcacggataacggcagacagaacacgtacttttcctcgctggataacatga

SEQ ID NO: 79587 - DNA, 75 bp, synthetic construct
  source 1..75: mol_type = other DNA
ccgtgggtggaaaaagccgctgagcagtgcatacaacagcgacagacggtagttatgcttgtgccagaggatatg

SEQ ID NO: 79588 - DNA, 75 bp, synthetic construct
  source 1..75: mol_type = other DNA
acgactggtgcggatataattatcggaccggaagagatcattagttctaatgctaaggcaaagattgtagtcgat

SEQ ID NO: 79589 - DNA, 75 bp, synthetic construct
  source 1..75: mol_type = other DNA
tcgtgaggatgactggtggcgtaacggtcagaatctttacctggacaacatggcagatacaggcttttacccggt

SEQ ID NO: 79590 - DNA, 75 bp, synthetic construct
  source 1..75: mol_type = other DNA
tatcggccacgttgaccatggtaaaactacgctgaccgctgcaatcacaaccgtactggctaaaacctacggcgg

SEQ ID NO: 79591 - DNA, 75 bp, synthetic construct
  source 1..75: mol_type = other DNA
cgccaaatggtggcccggctgataccaacgtcactaaagtggtggaagatcgtgccaacgcactgctggccgatg

SEQ ID NO: 79592 - DNA, 75 bp, synthetic construct
  source 1..75: mol_type = other DNA
gtacgaaatccgttacgaacttaatgggctgcgtttgggaaacgtacaatattgtacggttgcgctattgcggta

SEQ ID NO: 79593 - DNA, 75 bp, synthetic construct
  source 1..75: mol_type = other DNA
tcatcggaaccatcgcaacagggggtatttcctgtaatatgtactcgacttcatcctggctccgtaatgaaacgc

SEQ ID NO: 79594 - DNA, 75 bp, synthetic construct
  source 1..75: mol_type = other DNA
gtacgaaatccgttacgaacttactggccagactatttatgtattgcgcctgtggcacacacgagaaaacaggta

SEQ ID NO: 79595 - DNA, 75 bp, synthetic construct
  source 1..75: mol_type = other DNA
atgaaacttaaatatcctggcttaactgccagtggcaaaactcgcactaaattcatgcgcggggatatttaccgc

SEQ ID NO: 79596 - DNA, 75 bp, synthetic construct
  source 1..75: mol_type = other DNA
tgcggcggacgtgggccagagtgatggccgcaactacggactgattttcagcggtgaaattcgctactcggtcac

SEQ ID NO: 79597 - DNA, 75 bp, synthetic construct
  source 1..75: mol_type = other DNA
cggtgcaatacgccggtaacggctggctgctggtgggcgatgcgttgcgcagttgcgtcaataccggaatttccg

SEQ ID NO: 79598 - DNA, 75 bp, synthetic construct
  source 1..75: mol_type = other DNA
cgacctgatacaggatattgccgcgagaggtatttcactcggacagggaacactacgcgcaacgctggcgcgtta

SEQ ID NO: 79599 - DNA, 75 bp, synthetic construct
  source 1..75: mol_type = other DNA
gcaggccgtaccgcgtaacgtgcccaccagcagggagaaagcacgcgccaatattcagaagatgaaaaccatgat

SEQ ID NO: 79600 - DNA, 75 bp, synthetic construct
  source 1..75: mol_type = other DNA
atggaacaaaaaacattatcagctgaaccccgcaggtcattttcaaatgagtttaaacttcaaatggttaaactg

SEQ ID NO: 79601 - DNA, 75 bp, synthetic construct
  source 1..75: mol_type = other DNA
aggggccaggcgtggtacatggatatgatgtgcgaagcgcgtggcgcggcggatcttgtttcctcatcagcgagg

SEQ ID NO: 79602 - DNA, 75 bp, synthetic construct
  source 1..75: mol_type = other DNA
ttattccgttacgctcacggttaacagtgggtgatagttataccgatggcgatatttttgacagtgtgaactttc

SEQ ID NO: 79603 - DNA, 75 bp, synthetic construct
  source 1..75: mol_type = other DNA
ttcggattttcaattttttgtattctgttagttgttcttattggtggtgttgctttatggttgcatcgtagtaaa

SEQ ID NO: 79604 - DNA, 75 bp, synthetic construct
  source 1..75: mol_type = other DNA
ctctttatgggcaggcgttaggggatgcgatggggatgccctccgagctttggccacgcagccgcgttaaagcac

SEQ ID NO: 79605 - DNA, 75 bp, synthetic construct
  source 1..75: mol_type = other DNA
ccatacgcggctcaacgcccaaaattaaaggtttttgccagattgaaaaagccgcgaacgaatctgcgcatttca

SEQ ID NO: 79606 - DNA, 75 bp, synthetic construct
  source 1..75: mol_type = other DNA
tggtagggatgcctgcgcagcttttcacgctggcacgctcatttaaagcaaatgccaacggtaaaatctatcttg

SEQ ID NO: 79607 - DNA, 75 bp, synthetic construct
  source 1..75: mol_type = other DNA
tttatcagtttcgttacagaggggagagttattcagtacctgaagatgatttgctctgttgttatccgtcgttgt

SEQ ID NO: 79608 - DNA, 75 bp, synthetic construct
  source 1..75: mol_type = other DNA
ggtggaggccgataaatccggctggctggtgcctgagaacgatgctcgcgcactggcgcaacgactggcggcgtt

SEQ ID NO: 79609 - DNA, 75 bp, synthetic construct
  source 1..75: mol_type = other DNA
gtcaccgagcagggcgagcgttatgatttgcagattaggggtttgagtatagatcaacttgttaaaattacagga

SEQ ID NO: 79610 - DNA, 75 bp, synthetic construct
  source 1..75: mol_type = other DNA
accattggcgttgccgtaagcccaccgattctggcggcgatgatgctggtgatgggctggcgcgggatgtttatt

SEQ ID NO: 79611 - DNA, 75 bp, synthetic construct
  source 1..75: mol_type = other DNA
caggcgcatcttgcggcggcttcgttgcgcgaactcgaccttgccgttgaaaccgcagaaattgaactgccggaa

SEQ ID NO: 79612 - DNA, 75 bp, synthetic construct
  source 1..75: mol_type = other DNA
cgggatgcataccatctggcggggataacgctgccggattttgagcgtgaggatgactggtggcgcaacggtcag

SEQ ID NO: 79613 - DNA, 75 bp, synthetic construct
  source 1..75: mol_type = other DNA
gatggtccgttgccggaaaagcggcccatcattttagaggcgcaggacgtgttgataacctacagaggaaagcta

SEQ ID NO: 79614 - DNA, 75 bp, synthetic construct
  source 1..75: mol_type = other DNA
agcttattaaagcaattagtgaacgattgaaagaacaacccaacaaaccaaaacgaatcaaatcatccacctcta

SEQ ID NO: 79615 - DNA, 75 bp, synthetic construct
  source 1..75: mol_type = other DNA
gcgactgtaatgatgttcaaagtttgttggcacagggaaatcaattgctggaaggtgcatacgatataacgctaa

SEQ ID NO: 79616 - DNA, 75 bp, synthetic construct
  source 1..75: mol_type = other DNA
ataatgatgacgatacctttacagttaaagtgggagataaagaattatttactaacagatggaatcttcagtctc

SEQ ID NO: 79617 - DNA, 75 bp, synthetic construct
  source 1..75: mol_type = other DNA
tggctggattatctggtgtcaccgcgccgccatgcttcagggaggccaacctgtaaaccaaacttacaacttgcc

SEQ ID NO: 79618 - DNA, 75 bp, synthetic construct
  source 1..75: mol_type = other DNA
atttgcaggtccttcgcgaggcgatggggttaattatgtgaccattcgtccccgtaacattgcgtttaattacat

SEQ ID NO: 79619 - DNA, 75 bp, synthetic construct
  source 1..75: mol_type = other DNA
gtgaatgcgaattccgggacgctcaacaacgtcacgattaacgagaactgtcgggttctgggaaaactgtccgcg

SEQ ID NO: 79620 - DNA, 75 bp, synthetic construct
  source 1..75: mol_type = other DNA
agctgattatctgtgatgagccggtgtcggcgctggacgtgtcaattcaggcgcaggtggtcaacctgctccagc

SEQ ID NO: 79621 - DNA, 75 bp, synthetic construct
  source 1..75: mol_type = other DNA
ggacgtccggctgaattaggcgagatgatcggcgattttctccatttactggcggatggcgcgttcttttccggg

SEQ ID NO: 79622 - DNA, 75 bp, synthetic construct
  source 1..75: mol_type = other DNA
atatcgatactttgatgaacactttaacgttattacatgcattagtgtcatatttgtcattgtatggaacatcta

SEQ ID NO: 79623 - DNA, 75 bp, synthetic construct
  source 1..75: mol_type = other DNA
atgctcagggtgtcgcggttcggtttattgacgacgggatcagtaccgacggtgatatggggcaaatggtggtca

SEQ ID NO: 79624 - DNA, 75 bp, synthetic construct
  source 1..75: mol_type = other DNA
ttatggaggaagcagaaccgcgagggacttgctggtattacccgaaaatgggggtatttcaggttattggttggc

SEQ ID NO: 79625 - DNA, 75 bp, synthetic construct
  source 1..75: mol_type = other DNA
agttccggcgtgatttttctctggtacagaacgcaacacgcggtaagcccaccagcagggaaaaagcacgggaaa

SEQ ID NO: 79626 - DNA, 75 bp, synthetic construct
  source 1..75: mol_type = other DNA
tgcacgggcagcaacgccgtgtttggtgtgatcactcacattatcaacgacgcaagaagtggcgagtttgatgat

SEQ ID NO: 79627 - DNA, 75 bp, synthetic construct
  source 1..75: mol_type = other DNA
taacgccggatggctggtacatcagcgcggaaattgacgacctgaactggcgcagcgaagccgcccgtcagcctt

SEQ ID NO: 79628 - DNA, 75 bp, synthetic construct
  source 1..75: mol_type = other DNA
cgcaacggccagttgcgtgcagtggcagcaggcagtcgtctgagtttttccagtgcggcgcgtaactataacggc

SEQ ID NO: 79629 - DNA, 75 bp, synthetic construct
  source 1..75: mol_type = other DNA
gataagctgtagtgagcgaatgccggaagaaacgggtgacattattgttgtttcggatggcattgtaatgtcagg

SEQ ID NO: 79630 - DNA, 75 bp, synthetic construct
  source 1..75: mol_type = other DNA
atgtcattctggtgaagaagctcgaccgtcttggccgcgacaccgccgacatgatccaactgataaaagagtttg

SEQ ID NO: 79631 - DNA, 75 bp, synthetic construct
  source 1..75: mol_type = other DNA
ttctattcctgctttttatatctgcgtcagctagggcggaaaaaccctggtattttgatgcaattggtctgacag

SEQ ID NO: 79632 - DNA, 75 bp, synthetic construct
  source 1..75: mol_type = other DNA
acagcggcaagatccggagatggcaaacgtgattttagtcaccgatgacgaaagttgcgggtattcggctatgga

SEQ ID NO: 79633 - DNA, 75 bp, synthetic construct
  source 1..75: mol_type = other DNA
gtatcagtctgcagatactggataaccaggggtattcggcccgtgttggtaaagctatgccgccgttattgctga

SEQ ID NO: 79634 - DNA, 75 bp, synthetic construct
  source 1..75: mol_type = other DNA
tcagacctgatggcaaaacggggactggtagcggaacgtcagaagcaacagctatagtttccggcgtactggcag

SEQ ID NO: 79635 - DNA, 75 bp, synthetic construct
  source 1..75: mol_type = other DNA
agaaattccgtctgcggttgcgtaactgtgagctggcgggaacaggtaaacggatttatacggcgagccgtgtca

SEQ ID NO: 79636 - DNA, 75 bp, synthetic construct
  source 1..75: mol_type = other DNA
gtgcgcttgaagtacatgacatggctgaactacgtatttcaggttcttctggattggattccgaaggtccggata

SEQ ID NO: 79637 - DNA, 75 bp, synthetic construct
  source 1..75: mol_type = other DNA
tatactgctggaggttgaacaggcctggaatgcattaacattgcaggagtggaaacaggcgaaagtattaactga

SEQ ID NO: 79638 - DNA, 75 bp, synthetic construct
  source 1..75: mol_type = other DNA
tggacaggctggaacactgaagtttatatcttcccgacctttaagcagatgaagacctacgatgatccattcagt

SEQ ID NO: 79639 - DNA, 75 bp, synthetic construct
  source 1..75: mol_type = other DNA
cggtgattgatgaactgctggaagtaaccgacctggtaatgctcgatctcaaacagatgaacgacgagatccacc

SEQ ID NO: 79640 - DNA, 75 bp, synthetic construct
  source 1..75: mol_type = other DNA
acagcatacaaatttaacctgctggataaagacgatgcagcgattaccgatgccgcaactgatgaccagtttgca

SEQ ID NO: 79641 - DNA, 75 bp, synthetic construct
  source 1..75: mol_type = other DNA
actttgcatggagccttggcgcaggtgtccgctatgacgtcaccccggatatcgcgctggacctcagctatcgct

SEQ ID NO: 79642 - DNA, 75 bp, synthetic construct
  source 1..75: mol_type = other DNA
atgaataaggtttttgttgtttcagtggtggccgcagcctgtgtatttgcagtaaatgctggtgctgaggaaggt

SEQ ID NO: 79643 - DNA, 75 bp, synthetic construct
  source 1..75: mol_type = other DNA
taatcaggaaaaaacccgtttaaccttcgcaggtttgaaatataacgagttaggatctttcgactatggtcgtaa

SEQ ID NO: 79644 - DNA, 75 bp, synthetic construct
  source 1..75: mol_type = other DNA
gcggttgcgtaactgcgaacttgcaggaacaggtaagcgggtttatacggcgagccgtatccgcatgacctttga

SEQ ID NO: 79645 - DNA, 75 bp, synthetic construct
  source 1..75: mol_type = other DNA
gcctgatttgcggcatcacgctgtttgttgaagtgggcgtcgtgctattgattcctctggctttttcaattgcca

SEQ ID NO: 79646 - DNA, 75 bp, synthetic construct
  source 1..75: mol_type = other DNA
atgtacccctggctggcaaaggcttatccgaccaataaattaccggatttacggggcgaatttatccgtggctgg

SEQ ID NO: 79647 - DNA, 75 bp, synthetic construct
  source 1..75: mol_type = other DNA
tgctgctggtttcatctgctgtcagcgcagcacttcccacgcgttatatgcaaaccactcaggatgcgactatct

SEQ ID NO: 79648 - DNA, 75 bp, synthetic construct
  source 1..75: mol_type = other DNA
aaagcgcagtccattcaggatgtgcttgccgggctggaagaccgtcgtgtggcgttaattcgtcagcaggcggca

SEQ ID NO: 79649 - DNA, 75 bp, synthetic construct
  source 1..75: mol_type = other DNA
tacgtggatgatgaagtcctggaattaaggctgtatgtggatgaccagatgagaaaccacattgccgcacaggat

SEQ ID NO: 79650 - DNA, 75 bp, synthetic construct
  source 1..75: mol_type = other DNA
atattggcatgacgttataggctacaattataggatgacaaatatctgcgctgctataggattagcccagttaga

SEQ ID NO: 79651 - DNA, 75 bp, synthetic construct
  source 1..75: mol_type = other DNA
caggtatcgttatgagataacggatgagattggtgttataacatcttttacatgggcgcgttctatgactaatgc

SEQ ID NO: 79652 - DNA, 75 bp, synthetic construct
  source 1..75: mol_type = other DNA
gacggtacagtttgagttctggttctcggaaaagcggattaccgatatcaggcaggttgaaaccacagcccgcta

SEQ ID NO: 79653 - DNA, 75 bp, synthetic construct
  source 1..75: mol_type = other DNA
gaattttatgcagcgctggatcaacagcgcagtgactggatggcgggaatgcgtgaaggtctggcgaactgggct

SEQ ID NO: 79654 - DNA, 75 bp, synthetic construct
  source 1..75: mol_type = other DNA
gaagcggtacagatttaccttgtggttcgaccgtatgagagcgcgaaagaaatcagcgtcagcatcgaactggac

SEQ ID NO: 79655 - DNA, 75 bp, synthetic construct
  source 1..75: mol_type = other DNA
catttcgggcagaaaattgcctatctgcgcaagattgacccgtttgtgttcgaagagctgctgcttgaaggcttt

SEQ ID NO: 79656 - DNA, 75 bp, synthetic construct
  source 1..75: mol_type = other DNA
ccgctgacggacacggacggtaatcccgtgatacacggtgtgacagcggtctggcgcgccggggagcaggagcag

SEQ ID NO: 79657 - DNA, 75 bp, synthetic construct
  source 1..75: mol_type = other DNA
aagctggcacaggtggcgtatggagtgctgaagtcaggcgtgccgttcgatgcgtcacggcataatccggtagct

SEQ ID NO: 79658 - DNA, 75 bp, synthetic construct
  source 1..75: mol_type = other DNA
tggcgattgatgataaccgccgggcgctggacgacgcagcggtgcttaacgccgcctgttatatgcaggtggttg

SEQ ID NO: 79659 - DNA, 75 bp, synthetic construct
  source 1..75: mol_type = other DNA
ggcgttgatccgtcaacaggccgcggaacaaaacaaagcgtatcagtccctgttgatcatgaatgggcagcatac

SEQ ID NO: 79660 - DNA, 75 bp, synthetic construct
  source 1..75: mol_type = other DNA
tcctaacccgctgctgccggaatgccgcgacgacacccgcaatgcggtcatcaaacacggcgcggatatgggcat

SEQ ID NO: 79661 - DNA, 75 bp, synthetic construct
  source 1..75: mol_type = other DNA
ttatccctcaggcttctgttcgttatgacgttaacgagcaacgtctggatatagacgttcctcaggcatgggtaa

SEQ ID NO: 79662 - DNA, 75 bp, synthetic construct
  source 1..75: mol_type = other DNA
gtcacaggggctgcgtcacacacccggtgacattattgaaatctgtgataacgactatgccgggaccatgaccgg

SEQ ID NO: 79663 - DNA, 75 bp, synthetic construct
  source 1..75: mol_type = other DNA
cattactgacggatgagcatatacttcagccatttgattgtgggaatgaagtgttaagtaactggttacatggtc

SEQ ID NO: 79664 - DNA, 75 bp, synthetic construct
  source 1..75: mol_type = other DNA
agatacagaaggttcaggttgatacaaataataacctgaacagcatgtgggctgtgaagctgcagcagatgcagg

SEQ ID NO: 79665 - DNA, 75 bp, synthetic construct
  source 1..75: mol_type = other DNA
gttaatcccgcaatatatcggcctggcgtttgccccaggcctttcttaaacatagtaataaaggccgttgttgaa

SEQ ID NO: 79666 - DNA, 75 bp, synthetic construct
  source 1..75: mol_type = other DNA
ggctgaaattcgtgcggaggctcgcaacgagggaattaactataccgcaagtcgtcttgctgctgctttcaacca

SEQ ID NO: 79667 - DNA, 75 bp, synthetic construct
  source 1..75: mol_type = other DNA
gtgggtgcgcgaagcagtgtttttaaatcgcttccggcaaatgtggtttgccgggggaaccccgcagtggtgata

SEQ ID NO: 79668 - DNA, 75 bp, synthetic construct
  source 1..75: mol_type = other DNA
atcattgttgtcgcacagctttgccctgaattcaccgcccgcctggtagaccgctggcgcgaactggaagaacaa

SEQ ID NO: 79669 - DNA, 75 bp, synthetic construct
  source 1..75: mol_type = other DNA
tacgtgaacgaagcggcgtttctcctcgtgcgcttgagtttgccatactgaccgcagcacgctcaggtgaaattc

SEQ ID NO: 79670 - DNA, 75 bp, synthetic construct
  source 1..75: mol_type = other DNA
ttgggaatgacgttcctcaacacagacaagtttataagattacttatcttctttctaaaatcagggacattgaat

SEQ ID NO: 79671 - DNA, 75 bp, synthetic construct
  source 1..75: mol_type = other DNA
atgaacaactcatggtggcaggaactaatgcattttttcctgcaaggaatgacacttaaacagttgattcatatg

SEQ ID NO: 79672 - DNA, 75 bp, synthetic construct
  source 1..75: mol_type = other DNA
acctaacaaggaaaaacctgcagccctgtttgcgaaaggctctgtcagtataacagacagtaacaaagcaggtgc

SEQ ID NO: 79673 - DNA, 75 bp, synthetic construct
  source 1..75: mol_type = other DNA
aagctgacagctgcccaggcgtcacttacccgtaatattgcggccagaacagcggcacagacaacgctgaatact

SEQ ID NO: 79674 - DNA, 75 bp, synthetic construct
  source 1..75: mol_type = other DNA
aagttagtgaaaacacaaaacagcgcaatttattttccaaaaaagtgactttgtgcataagtttgttttttgttc

SEQ ID NO: 79675 - DNA, 75 bp, synthetic construct
  source 1..75: mol_type = other DNA
atgaccactattaccagagaacaagctctgaaaattattgaggcagccgatgaggttattagtgcgcttgccgga

SEQ ID NO: 79676 - DNA, 75 bp, synthetic construct
  source 1..75: mol_type = other DNA
aacacttaagcctgatatcgtcatcattgatgtcgatatccccggagttaacggtatccaggtgttagaaacgct

SEQ ID NO: 79677 - DNA, 75 bp, synthetic construct
  source 1..75: mol_type = other DNA
ttggggggccgatagttgctcacatattttctagccattatgagagctacgatttacacattgccgagttaacca

SEQ ID NO: 79678 - DNA, 75 bp, synthetic construct
  source 1..75: mol_type = other DNA
cgcattgcctgatttcagcccgttgtcgcaggacaaacttgcgattcagttaatccgcgagcgcggtgccattga

SEQ ID NO: 79679 - DNA, 75 bp, synthetic construct
  source 1..75: mol_type = other DNA
agcatgccagatggagaaggatggtttgtcggttcgattcacgatacagaagacggtccgatctgcgtttggttc

SEQ ID NO: 79680 - DNA, 75 bp, synthetic construct
  source 1..75: mol_type = other DNA
gggacggccagcggtgactggacgctttcctgtgtgcgcggacaggtgaacagcatcacctttgtgtttgctgac

SEQ ID NO: 79681 - DNA, 75 bp, synthetic construct
  source 1..75: mol_type = other DNA
gaaggcgatggcggacgatggtcaactgacggcggataaagtcgttcctgcgttaatcagccagctgggggtatt

SEQ ID NO: 79682 - DNA, 75 bp, synthetic construct
  source 1..75: mol_type = other DNA
attacgggatgatggattgtggtttttgcaaaaagcccagcgcggcgcaaaaccgctggaaaaaccacttgcgca

SEQ ID NO: 79683 - DNA, 75 bp, synthetic construct
  source 1..75: mol_type = other DNA
gtgaacacggcacacaacactccgatgcgatcctgacccgcgatatgcgcaacgcccagcgttttgttaacgaag

SEQ ID NO: 79684 - DNA, 75 bp, synthetic construct
  source 1..75: mol_type = other DNA
gatgagtatttaccggaggcgttgctgacgcaggagtatgggttacgtgcttttaatgttcagcgcgtggaggag

SEQ ID NO: 79685 - DNA, 75 bp, synthetic construct
  source 1..75: mol_type = other DNA
ctgcgtgtgcctgcagcctttgaagggctttctgttgctgggccaactgccgcttatgagtttcatgcacgaagc

SEQ ID NO: 79686 - DNA, 75 bp, synthetic construct
  source 1..75: mol_type = other DNA
ttcatgaccacggcggcggcaaactttgccacgctgacagaacgggagattgccgaagcggaacaggtaacaacc

SEQ ID NO: 79687 - DNA, 75 bp, synthetic construct
  source 1..75: mol_type = other DNA
tggcttacttccgtacatttccttgcgtagatgtacagaattgtacgatttcggacaccaaaactgctgttgtcc

SEQ ID NO: 79688 - DNA, 75 bp, synthetic construct
  source 1..75: mol_type = other DNA
gttaagacgcagccgtgtgcatgttgtggtaagccagccgacgatcctcatcacctgattggtcatggtcagggt

SEQ ID NO: 79689 - DNA, 75 bp, synthetic construct
  source 1..75: mol_type = other DNA
accacggcggcggcaaactttgccacgctgacagaacgggagattgccgaagcggaacaggtaacaaccatcaac

SEQ ID NO: 79690 - DNA, 75 bp, synthetic construct
  source 1..75: mol_type = other DNA
atgcacacatcaggaaaactgaacaaacatataaagccacattaccgcgcccttgatatggctgaacactggcta

SEQ ID NO: 79691 - DNA, 75 bp, synthetic construct
  source 1..75: mol_type = other DNA
acgctgtgccgcccgttgcagcagtgatggaaagcgatgaagcgttacgcctgcgtgtgcctgcagcctttgagg

SEQ ID NO: 79692 - DNA, 75 bp, synthetic construct
  source 1..75: mol_type = other DNA
aaaaggtcttgtccagctcagtagtgccaccaacagcacgtctgaaacgctcgccgcaacaccaaaagcggtaaa

SEQ ID NO: 79693 - DNA, 75 bp, synthetic construct
  source 1..75: mol_type = other DNA
gtgcaaccagcccggcacctgcagaggtggtgctgacagtccttagccgcgaaggcgatggaactgcagaaaaag

SEQ ID NO: 79694 - DNA, 75 bp, synthetic construct
  source 1..75: mol_type = other DNA
aggaaaaaccattacggaacgacaggcagcggaagggctgatctccaacgtgctacgtgtggagcgggcgctgga

SEQ ID NO: 79695 - DNA, 75 bp, synthetic construct
  source 1..75: mol_type = other DNA
gctaggcgtcattgatgccatgttggttcatgaaatggcgaaggctttattgccgctggtggctgataaacatga

SEQ ID NO: 79696 - DNA, 75 bp, synthetic construct
  source 1..75: mol_type = other DNA
aatcacagttccgggtgattaccctgaaaatacaaccactatcgccccattaacgccatacgatgaatgggatgg

SEQ ID NO: 79697 - DNA, 75 bp, synthetic construct
  source 1..75: mol_type = other DNA
cggtgatgagaaagttactctgctgacggatgacagcagcgcctcccccacaggggcgaccctttccctgagaga

SEQ ID NO: 79698 - DNA, 75 bp, synthetic construct
  source 1..75: mol_type = other DNA
caagttagattttgagcaatggctggaacagcaacgcgggaaaatcgatgtggactgcggttgtgtgtctgcgga

SEQ ID NO: 79699 - DNA, 75 bp, synthetic construct
  source 1..75: mol_type = other DNA
tggtgctgttcgtcaccggactgttgccacaccaaaaggtctgcttccggtgtaaaagccgctcctgtccgcact

SEQ ID NO: 79700 - DNA, 75 bp, synthetic construct
  source 1..75: mol_type = other DNA
attgccccaccggggccggaccggcgtgcgtcactgaaacggttgtatctgcagcagaactggttgtcactgctt

SEQ ID NO: 79701 - DNA, 75 bp, synthetic construct
  source 1..75: mol_type = other DNA
tccgaaccactgaacatcatcgctcaggctatggcatggcgggagctgttactgcggcagcgtatcaatgatggc

SEQ ID NO: 79702 - DNA, 75 bp, synthetic construct
  source 1..75: mol_type = other DNA
agttatcgacagcacgctattgccgccaaatctgctgaataatggcacaacggagcaaagtgatgtaacagaggt

SEQ ID NO: 79703 - DNA, 75 bp, synthetic construct
  source 1..75: mol_type = other DNA
ggttgaaggtggtgcgcgcatgaatgtggcaaaccctgacgacagctgggaggaccagaaacgtgacctgctggc

SEQ ID NO: 79704 - DNA, 75 bp, synthetic construct
  source 1..75: mol_type = other DNA
aacaacccgacttaacgccgtgctggattacattgacgcggtgacggcaacagataccagcaccgcgccggatgt

SEQ ID NO: 79705 - DNA, 75 bp, synthetic construct
  source 1..75: mol_type = other DNA
aggcgtgaagcagggcagtgtcagcattgtgggcatgaccgctgacgggaattttgtggcagtggctacggtggc

SEQ ID NO: 79706 - DNA, 75 bp, synthetic construct
  source 1..75: mol_type = other DNA
gccaacagacattgcaggtggagttgatagggagaagtgaatggataaatcagtatcggcgacgtttacagcagt

SEQ ID NO: 79707 - DNA, 75 bp, synthetic construct
  source 1..75: mol_type = other DNA
gggtgtaaacatgaatgtgcagcgcctggttatcaccgaagcaacggagaccacaccggcggtaatggaaagtga

SEQ ID NO: 79708 - DNA, 75 bp, synthetic construct
  source 1..75: mol_type = other DNA
gcgcaggcggtgacgctggcctactccgccggtaacgacctcgacgtcgtagccgggaacaataataccgaacgc

SEQ ID NO: 79709 - DNA, 75 bp, synthetic construct
  source 1..75: mol_type = other DNA
gcggcggcaaattttgccacgttgacagagcgggagattgccgaagcggaacaggtgacaaccatcaacgttaac

SEQ ID NO: 79710 - DNA, 75 bp, synthetic construct
  source 1..75: mol_type = other DNA
taccgccgccgcagattgtggatgtgccggactttgaggcattgctggcagaacgcaaggccgcctttgtggccc

SEQ ID NO: 79711 - DNA, 75 bp, synthetic construct
  source 1..75: mol_type = other DNA
gtggctgaccgtgtgaccgtgcagtctgccgccattgttgaataccagataaacgccacgctgtatctttaccct

SEQ ID NO: 79712 - DNA, 75 bp, synthetic construct
  source 1..75: mol_type = other DNA
gcacagcatagcgccgcagtagaagcggcagaagcacagcgccagtatctgattgatgctgctatggcttccatc

SEQ ID NO: 79713 - DNA, 75 bp, synthetic construct
  source 1..75: mol_type = other DNA
tgggcgatgaatattggctgccacctgactattccgcagagctgcgagttccagctgctgcgtgataagcaggag

SEQ ID NO: 79714 - DNA, 75 bp, synthetic construct
  source 1..75: mol_type = other DNA
atgctggtggagtgggggccggttatcccggaagggaaggtcgaaatcactatcagtaagtacgagaaaacggcg

SEQ ID NO: 79715 - DNA, 75 bp, synthetic construct
  source 1..75: mol_type = other DNA
gccgcgaacagtcgacgatcccggtgatcacaggtggtataggcgtatgccatatttacgttgatgaaagtgcag

SEQ ID NO: 79716 - DNA, 75 bp, synthetic construct
  source 1..75: mol_type = other DNA
ccgatcttgataccggagagatgtatgtcttcctgtgtaaggttgaagcctgggcgatgaatattggctgccacc

SEQ ID NO: 79717 - DNA, 75 bp, synthetic construct
  source 1..75: mol_type = other DNA
acctcttgagtattatgaaaataacattgtagcaacaatatctttgattgatgaagcagcaaagtatggagtcat

SEQ ID NO: 79718 - DNA, 75 bp, synthetic construct
  source 1..75: mol_type = other DNA
gcactgcatcgggtgtcattggcctgaatgggtatgtaacgatcccgttaattatttcaggttcccggagaacac

SEQ ID NO: 79719 - DNA, 75 bp, synthetic construct
  source 1..75: mol_type = other DNA
caagatttctaaagttgcagtcacctttgatagctcagcgaaaaccaccggcgcagatccgattctcaacaacac

SEQ ID NO: 79720 - DNA, 75 bp, synthetic construct
  source 1..75: mol_type = other DNA
aaagcaatatcgttttaggcaccgctactccagatatcgacctggctccgacctccagcgaacaaacgctgaatt

SEQ ID NO: 79721 - DNA, 75 bp, synthetic construct
  source 1..75: mol_type = other DNA
attaccaggtgtggcgcagattgtcagacatgccgtaaacacctggcttaatcagaatggttttgcatcggtggg

SEQ ID NO: 79722 - DNA, 75 bp, synthetic construct
  source 1..75: mol_type = other DNA
ctgtttatcggcttacgcagccgcaaagaaacgcggcatcactcgctaaaggaaaatgtcgctccgggtgggtaa

SEQ ID NO: 79723 - DNA, 75 bp, synthetic construct
  source 1..75: mol_type = other DNA
atatggaaatgactacccaactttggatggtactggtattagagattatattcacgttactgatcttgctaaagg

SEQ ID NO: 79724 - DNA, 75 bp, synthetic construct
  source 1..75: mol_type = other DNA
tttgaacgagatttctgataccgaaaaagcattctgctggtttgaaacttcggatacaacttcgcttactggagt

SEQ ID NO: 79725 - DNA, 75 bp, synthetic construct
  source 1..75: mol_type = other DNA
ttaccgatctgacggaagattcaacgctggtagacggttttctggcacagattcactgcctgccgtgtgtaccga

SEQ ID NO: 79726 - DNA, 75 bp, synthetic construct
  source 1..75: mol_type = other DNA
actgaacccagctcaacctcatttattaaccgcaccagaaatttggttgcttaccgatctgactgaagattcaac

SEQ ID NO: 79727 - DNA, 75 bp, synthetic construct
  source 1..75: mol_type = other DNA
ttaatgagttggctaaagacaaattgcagtcttatgtcatgcgcgcaatgcgtgaactcggcgaactggcgagcg

SEQ ID NO: 79728 - DNA, 75 bp, synthetic construct
  source 1..75: mol_type = other DNA
agagggagtcaaagataagcgtagcgcggtgcaaaaccgctggaaaaaccactgttatctgcgcactaaaggaga

SEQ ID NO: 79729 - DNA, 75 bp, synthetic construct
  source 1..75: mol_type = other DNA
cgaagcgcgtgacaaagcgcgtgagctacgtaaacaaatccgtaatggtattaatccccttcaagaaaaacacga

SEQ ID NO: 79730 - DNA, 75 bp, synthetic construct
  source 1..75: mol_type = other DNA
agcagcattaactctgttactcgtctgatggcactggctgccgtttcgatgcaggcgcgtttacaggctaacccg

SEQ ID NO: 79731 - DNA, 75 bp, synthetic construct
  source 1..75: mol_type = other DNA
gctggtagatggctttctggcacagattcactgcctgccatgcgtaccaattaatgaggtggcaaaagagaaact

SEQ ID NO: 79732 - DNA, 75 bp, synthetic construct
  source 1..75: mol_type = other DNA
ttaatttaggcactggtcaaggttatagtgtgttagatatcatcgacgcttttaaactggaaacaggacgcgata

SEQ ID NO: 79733 - DNA, 75 bp, synthetic construct
  source 1..75: mol_type = other DNA
aaaattccattcattgaagctgatatcaacgataaacaaaaacttgaagaagtttttaaaaactacgatatcgat

SEQ ID NO: 79734 - DNA, 75 bp, synthetic construct
  source 1..75: mol_type = other DNA
aggtgggattttcaccggttgttattcgcgaagttaatgaaccgcaaacggtactcgctatggtcagtatgggca

SEQ ID NO: 79735 - DNA, 75 bp, synthetic construct
  source 1..75: mol_type = other DNA
tgaattcactatgacgcagtccgcgccgttgatggtactgccggatcctgatgagtttgtggtggtacaggtgaa

SEQ ID NO: 79736 - DNA, 75 bp, synthetic construct
  source 1..75: mol_type = other DNA
gaaaacacgaacgggagttattaaatcaaatttgcattctttctatgctggcccgtttacgtccgactcaaaaag

SEQ ID NO: 79737 - DNA, 75 bp, synthetic construct
  source 1..75: mol_type = other DNA
gatggaatctgacaccgattatcgtctgcgtattcagcaggcttttgagggcttaagcgtcgccgggtcagtggg

SEQ ID NO: 79738 - DNA, 75 bp, synthetic construct
  source 1..75: mol_type = other DNA
accggggaaaccattcgggtaagtcggttagctgaacctttctggcaggatcactttttaggcgcgcggcggatt

SEQ ID NO: 79739 - DNA, 75 bp, synthetic construct
  source 1..75: mol_type = other DNA
atgggctggacgccggaacggattcaggaggcaaccggactttccggtgaagaactgaaaaaactgtttcctgat

SEQ ID NO: 79740 - DNA, 75 bp, synthetic construct
  source 1..75: mol_type = other DNA
gtgtggccgtcgtgctggcgctggcggcactggtgcctgattttcgtttgcttcacacctcgccggaagggctcg

SEQ ID NO: 79741 - DNA, 75 bp, synthetic construct
  source 1..75: mol_type = other DNA
acaaggggctcttgaagtggcgcgggaaatagcctgccggcttcgggatataggctggccgccggaacggattca

SEQ ID NO: 79742 - DNA, 75 bp, synthetic construct
  source 1..75: mol_type = other DNA
atggaacagataacaaaaccgcattgtggtgcacggctggatcgcttaccggattgccgctggcattcgtcaatg

SEQ ID NO: 79743 - DNA, 75 bp, synthetic construct
  source 1..75: mol_type = other DNA
aacgctcaattcacttatattaatcatggtgatgcttatgcccccggctggcgacgagactacaacacgaaaaac

SEQ ID NO: 79744 - DNA, 75 bp, synthetic construct
  source 1..75: mol_type = other DNA
ggttggcgcgttgtccattgatggcagcacggcatctggcgttatcaaagaagcgatggtttatgccaacgtgat

SEQ ID NO: 79745 - DNA, 75 bp, synthetic construct
  source 1..75: mol_type = other DNA
gaccatcgtcggcccggaagcgccgctggtgaaaggcgtggtcgataccttccgcgccgccgggctgaaaatctt

SEQ ID NO: 79746 - DNA, 75 bp, synthetic construct
  source 1..75: mol_type = other DNA
gtcttacgacagcatgcgttatgaactgggtgtagatgcaggttataccttcacctacagcgaagaccaggctct

SEQ ID NO: 79747 - DNA, 75 bp, synthetic construct
  source 1..75: mol_type = other DNA
atttttctcggggcgagtggggaacgtgcctgagttttgttacgttgggtatgatggcgtgggctttgcggtaat

SEQ ID NO: 79748 - DNA, 75 bp, synthetic construct
  source 1..75: mol_type = other DNA
tgtttgcggtggccaaaaaaggtcatggtattaacaccggtaaagtgctgcgcggcgcgccctggcagatcgtga

SEQ ID NO: 79749 - DNA, 75 bp, synthetic construct
  source 1..75: mol_type = other DNA
acaacctcggaacaggaaaggggtattctgttttggatcttttgaccacttttgaacgagtaacctttcgatccg

SEQ ID NO: 79750 - DNA, 75 bp, synthetic construct
  source 1..75: mol_type = other DNA
agtgctaccagcaccattattaatgccggattccaagatgtttccagtggtggcagtgctaccagcaccactatt

SEQ ID NO: 79751 - DNA, 75 bp, synthetic construct
  source 1..75: mol_type = other DNA
ctccagaaatgattataagcaaagacaagtgtcattttaatataacaaaacaatgtttttacgcattacccatat

SEQ ID NO: 79752 - DNA, 75 bp, synthetic construct
  source 1..75: mol_type = other DNA
gcaaggttgtttgcgccggggctgcatgtgctgtcgtataacgaagtgccggatgagctggagttgaagattatg

SEQ ID NO: 79753 - DNA, 75 bp, synthetic construct
  source 1..75: mol_type = other DNA
ggattaaagcagattcggcgctggccaggcataacgaataccagcagaacggctcgctgacgctgatggggacgc

SEQ ID NO: 79754 - DNA, 75 bp, synthetic construct
  source 1..75: mol_type = other DNA
agaacaccacgctggcagctgttgcgggtcggattgccagaaagcaccggctgaaactggtgggcagcattgagt

SEQ ID NO: 79755 - DNA, 75 bp, synthetic construct
  source 1..75: mol_type = other DNA
ttgtcgggaaagggcgtatcagcaaaaacatccaggaagtgctcgaaggcgaagcgttgatgaatgatgcttccg

SEQ ID NO: 79756 - DNA, 75 bp, synthetic construct
  source 1..75: mol_type = other DNA
aaaacgctgtccaatgtcggggtaaacggtgttaccggcatcagtgcctctgtattctgggatttgcaggagtcc

SEQ ID NO: 79757 - DNA, 75 bp, synthetic construct
  source 1..75: mol_type = other DNA
cacctgttgttattattaagaaaaaaagacgaattctttctcatcaggatgatgccgtacaggcagttcctgatg

SEQ ID NO: 79758 - DNA, 75 bp, synthetic construct
  source 1..75: mol_type = other DNA
gcaaaaccgtgcgcgtttattaaaacagtaccaaacccatctgaaaaagcaggccagctatattgtggaaggcaa

SEQ ID NO: 79759 - DNA, 75 bp, synthetic construct
  source 1..75: mol_type = other DNA
caaacggctatatcgtggatgcgacctgctggttcagcgaagaatccaacgatgcggaaaccctcaaggccggaa

SEQ ID NO: 79760 - DNA, 75 bp, synthetic construct
  source 1..75: mol_type = other DNA
attctggcgatggttattctgccgctgccgcctgcgctgctggatattctgttcaccttcaacattgtgctggcg

SEQ ID NO: 79761 - DNA, 75 bp, synthetic construct
  source 1..75: mol_type = other DNA
gataatccgcttattaatattctggagaagttcacccgctggtatgacacgaataacgtgacgctgggcggtgtt

SEQ ID NO: 79762 - DNA, 75 bp, synthetic construct
  source 1..75: mol_type = other DNA
caacgaaaaagctaaaaagatggaacaacctgcagatgcaaagctggttgcggcatcgctgccgcgcctggctga

SEQ ID NO: 79763 - DNA, 75 bp, synthetic construct
  source 1..75: mol_type = other DNA
gggaagtgaaaacggttgttccggtcagttcagttgtgccggtaacacccccacgtccgctaagaacgggtgaac

SEQ ID NO: 79764 - DNA, 75 bp, synthetic construct
  source 1..75: mol_type = other DNA
agtggacgatgggaacggatcccgcgtgaacttcccaccgggcgtccggccatgctgcatattttcgagccggtg

SEQ ID NO: 79765 - DNA, 75 bp, synthetic construct
  source 1..75: mol_type = other DNA
ccataaaggcaatcagtgggcaggtaatatcaccgactgtacggtgattgtgaccaaaaaagccgcttccggcat

SEQ ID NO: 79766 - DNA, 75 bp, synthetic construct
  source 1..75: mol_type = other DNA
gaagaatatgaccatcacctggggatactatttccgcaccgggatcgtcatgactctgcctgtgctgtttgtaac

SEQ ID NO: 79767 - DNA, 75 bp, synthetic construct
  source 1..75: mol_type = other DNA
ggcacaggcgaaatgggacacgccgcgggtggtgaagggtgtgcgcttcagtctgcgcctgaccagtggaagcgg

SEQ ID NO: 79768 - DNA, 75 bp, synthetic construct
  source 1..75: mol_type = other DNA
ccatccgggacagggacaatcagaagcagaatctggcgaacctgagccgtgaccctgcgcacgctaatgacagta

SEQ ID NO: 79769 - DNA, 75 bp, synthetic construct
  source 1..75: mol_type = other DNA
gagaaggtgacaccgtagttgtggtagctgtagaccgtcttggacgtgacacaattgatgtgttatcaacggtta

SEQ ID NO: 79770 - DNA, 75 bp, synthetic construct
  source 1..75: mol_type = other DNA
tactcggttataccgaacaaaaagttaaattccgtgcgctgtttctggagctgtttttccgccgtacggtgaatt

SEQ ID NO: 79771 - DNA, 75 bp, synthetic construct
  source 1..75: mol_type = other DNA
cggacgtatcctgtccatcgatgccgccagccgcaccctgacactggaccgtgaggtgaccctgccggagacagg

SEQ ID NO: 79772 - DNA, 75 bp, synthetic construct
  source 1..75: mol_type = other DNA
ataatctgcggtataagcaaggatgtatctgttatgtggcctgttaacatgagtgttgcagaagtgcctgattcg

SEQ ID NO: 79773 - DNA, 75 bp, synthetic construct
  source 1..75: mol_type = other DNA
gaagttacagcggacatgcggaaggaacgactcaggccgcagtggcagaaggcactatcaccatccgggacaggg

SEQ ID NO: 79774 - DNA, 75 bp, synthetic construct
  source 1..75: mol_type = other DNA
attcgtctggcggataaggctaattttcatattcaccgtctcctgaatatcagcggagggcatcgtcatgcttaa

SEQ ID NO: 79775 - DNA, 75 bp, synthetic construct
  source 1..75: mol_type = other DNA
aatgggcctttgagcatggtgttgagttgcgcttaatccagccgggcaagccaacgcagaacggatttattgaga

SEQ ID NO: 79776 - DNA, 75 bp, synthetic construct
  source 1..75: mol_type = other DNA
agggtattatggtgatctggcaatcgtggtggcaaaaacgtcctatgtggcagaggacggtaccgaaaaacgtta

SEQ ID NO: 79777 - DNA, 75 bp, synthetic construct
  source 1..75: mol_type = other DNA
ttgcccgttattttgaccgtgtaagaagttctcgtcttgatgtcgaactgggcatcggcgacgattgcgcacttc

SEQ ID NO: 79778 - DNA, 75 bp, synthetic construct
  source 1..75: mol_type = other DNA
accgggatcgcacgctttgtgcaggacaaagatctgaaaaagatccttcgtgcgaccgatggtctggggacagaa

SEQ ID NO: 79779 - DNA, 75 bp, synthetic construct
  source 1..75: mol_type = other DNA
gtttcctcttaataaacctgtgctgatcactgatgtgctgaccgccagcggtaaagcgggtgagtctggcacgct

SEQ ID NO: 79780 - DNA, 75 bp, synthetic construct
  source 1..75: mol_type = other DNA
gactgagcggcttccgcttattcgcccggatgcgccgaacctgacatggtcgatggattttgtcatggatgcact

SEQ ID NO: 79781 - DNA, 75 bp, synthetic construct
  source 1..75: mol_type = other DNA
ccagacgcctacgacagccgctatgcgcgctggaatcttgcggatttgccgattgtcccggaaaagtggcaatta

SEQ ID NO: 79782 - DNA, 75 bp, synthetic construct
  source 1..75: mol_type = other DNA
tcatcatgaagtcgaactggcggtgttgattggcgcgacgctgcgtcaggctacggaagagcatgtccgcaaagc

SEQ ID NO: 79783 - DNA, 75 bp, synthetic construct
  source 1..75: mol_type = other DNA
cagcgttatcaggctatatctgggaacaacttttttatgcacctgggcggctgttttttttggaatatctctgct

SEQ ID NO: 79784 - DNA, 75 bp, synthetic construct
  source 1..75: mol_type = other DNA
cacaacagatatttttaaaataccgacgccgcagtacggcgaagaaataccctgttccttacgcaatatttggtt

SEQ ID NO: 79785 - DNA, 75 bp, synthetic construct
  source 1..75: mol_type = other DNA
cagtcaggaagagcgtgaggcactggaagtcagacagcagttgttactgagagaacggaaggataatgatgatga

SEQ ID NO: 79786 - DNA, 75 bp, synthetic construct
  source 1..75: mol_type = other DNA
tttctccggcgacgcatacattaaacttagcgacttgtcagtgtctaaaactggtggcgctgcggaacgtatcac

SEQ ID NO: 79787 - DNA, 75 bp, synthetic construct
  source 1..75: mol_type = other DNA
tggctgcgataaaggagacagctggtctcgctaaggttattaatgacgcaaaaacggatgcagaagttaaagccg

SEQ ID NO: 79788 - DNA, 75 bp, synthetic construct
  source 1..75: mol_type = other DNA
ggggctgagcctttgctatctatgcgtcctgccaccgatgacagaaatgacggtccagcaaagattgatctcctt

SEQ ID NO: 79789 - DNA, 75 bp, synthetic construct
  source 1..75: mol_type = other DNA
ggcctgactttactggctgggacacggtgctgaatgccgaagcaacggcttatgccaccgcccgtgcacttggtc

SEQ ID NO: 79790 - DNA, 75 bp, synthetic construct
  source 1..75: mol_type = other DNA
caaagaggtggctgttgcactggcatccgtctgtcagaagctgcgcgctttcggatatatcagcgcatggggctg

SEQ ID NO: 79791 - DNA, 75 bp, synthetic construct
  source 1..75: mol_type = other DNA
cgcaggttggaaacgactatgttattgcgcgtaaacctgaccatgatgacggtttcgcctgtactaccgcttcaa

SEQ ID NO: 79792 - DNA, 75 bp, synthetic construct
  source 1..75: mol_type = other DNA
aaatacatcaccacctcagatcgcaaggagaccattgcactggccacttacggggagattttctccatcacccgc

SEQ ID NO: 79793 - DNA, 75 bp, synthetic construct
  source 1..75: mol_type = other DNA
acaaacaacgatacatagtattgatgaaatagcaaaagaactatctaaaatagcatacaaacgtagaagcatcgc

SEQ ID NO: 79794 - DNA, 75 bp, synthetic construct
  source 1..75: mol_type = other DNA
cttgtcttcggtatctttgccgcactggcggagtttgagcgcgaactgattgctgaaagaacgactgcaggtctg

SEQ ID NO: 79795 - DNA, 75 bp, synthetic construct
  source 1..75: mol_type = other DNA
atgaatccggcagagtttattccgctggcagaaaaggaggggatgatagaacagataactgattatgttattgat

SEQ ID NO: 79796 - DNA, 75 bp, synthetic construct
  source 1..75: mol_type = other DNA
cggtgatgtttatcgtctggatcggcagtctgctgaccacctgtattagcatcgcgatggcaagcggtgcgatgc

SEQ ID NO: 79797 - DNA, 75 bp, synthetic construct
  source 1..75: mol_type = other DNA
tggaaagatgttttcgggttgcccggcctggttcatcagggcaatacgtggcgttaaaaacggctgttcagtcct

SEQ ID NO: 79798 - DNA, 75 bp, synthetic construct
  source 1..75: mol_type = other DNA
ctggcaaccggacacgatcatgtcgcgctagtctatggcgatatttccgggcataccccggtacttgcgcgcgtc

SEQ ID NO: 79799 - DNA, 75 bp, synthetic construct
  source 1..75: mol_type = other DNA
ctgagtcgccttggtgtggatattgtggaatacaccgtggaatgcggccccggtattgcccgcccggaaaaatac

SEQ ID NO: 79800 - DNA, 75 bp, synthetic construct
  source 1..75: mol_type = other DNA
atgcaattacgtaaacctgccacagcaatcctggccctggcgctttccgcaggactggcacaggcagatgacgcc

SEQ ID NO: 79801 - DNA, 75 bp, synthetic construct
  source 1..75: mol_type = other DNA
gaagggaaacgcacgtttacggaatttatccgtgaaggtgtgggcgttcatgcctttaacggcgaaatctttgtg

SEQ ID NO: 79802 - DNA, 75 bp, synthetic construct
  source 1..75: mol_type = other DNA
ataacagttatgccagcgggacggtaaccgtcacagtttacgatgaccagggattcgaccggcagattatcattc

SEQ ID NO: 79803 - DNA, 75 bp, synthetic construct
  source 1..75: mol_type = other DNA
gattatgttatgtggcttgaattaataaagcgtgcaaaatgttgttattgcgttcaagaatacctggctaaatat

SEQ ID NO: 79804 - DNA, 75 bp, synthetic construct
  source 1..75: mol_type = other DNA
ttgctccgcgaagcagcaaaacttgatcccgccaactatatggtgcatagggccagaagtatgctagcgcaacta

SEQ ID NO: 79805 - DNA, 75 bp, synthetic construct
  source 1..75: mol_type = other DNA
ggtgacgaaaaacagagatgtactgctcagggaggcgacacgacttgaccagacaagcgcccttttcgaacgggc

SEQ ID NO: 79806 - DNA, 75 bp, synthetic construct
  source 1..75: mol_type = other DNA
agttccagagcacgatgccgcaggtaaaagagcagatgaaagcggcggggaaagacccggtgctgctggtgccgc

SEQ ID NO: 79807 - DNA, 75 bp, synthetic construct
  source 1..75: mol_type = other DNA
tggcttccatgaagtcatcgcacaaaccgggcgtttcaaggtgtatcgcgccattatgacccgccaggcgaagaa

SEQ ID NO: 79808 - DNA, 75 bp, synthetic construct
  source 1..75: mol_type = other DNA
acgttcactgcaggaacgcagcagattggtttcagtaatgtcacgccggtaatcagcacagaaaaaacggatgat

SEQ ID NO: 79809 - DNA, 75 bp, synthetic construct
  source 1..75: mol_type = other DNA
ttctttccgttgcttttgcgcgccattcaccgaagatccgcctcactctgtgtgatgtttctgcaccagcggtag

SEQ ID NO: 79810 - DNA, 75 bp, synthetic construct
  source 1..75: mol_type = other DNA
ggacgccgacaacgtacatcagtgatttactggttgtggtcatgaaaaaatccacagcagggatcagtatcagct

SEQ ID NO: 79811 - DNA, 75 bp, synthetic construct
  source 1..75: mol_type = other DNA
gcaaaatggtggagctggagaagagaccgtccggtgactggtttgccgatctgagtcgccttggtgtggatattg

SEQ ID NO: 79812 - DNA, 75 bp, synthetic construct
  source 1..75: mol_type = other DNA
gttctggaaggcccggtgccttccgtgggttaaaagaacgcgtcacctggatgattcagtctcgtggtcgtcctg

SEQ ID NO: 79813 - DNA, 75 bp, synthetic construct
  source 1..75: mol_type = other DNA
atgctgacggaaaggtacaggctttcagctctgttgatattgccagcggtcgtccgacagttgtgctttccgacg

SEQ ID NO: 79814 - DNA, 75 bp, synthetic construct
  source 1..75: mol_type = other DNA
ctcgaaaaccgcaacggactttatggcgtcaggttataaatccttcctgacagaggtcaataatctgaacaagcg

SEQ ID NO: 79815 - DNA, 75 bp, synthetic construct
  source 1..75: mol_type = other DNA
acattgaagttactcgcggtatttccaccatcctttaccagttggcggtgggtgcaaaagtgattctgtctttgt

SEQ ID NO: 79816 - DNA, 75 bp, synthetic construct
  source 1..75: mol_type = other DNA
ttgcgctggctggcggtcactccatcgatgcgccggagccgatttttggtctggcggtaacggggatcgtaccga

SEQ ID NO: 79817 - DNA, 75 bp, synthetic construct
  source 1..75: mol_type = other DNA
ggagtcagataacgggagtgcctgctgcctcgctgacggcaaaaggcaccgtacaactgagcagtgccatcaaca

SEQ ID NO: 79818 - DNA, 75 bp, synthetic construct
  source 1..75: mol_type = other DNA
tttttctcggtaccaattccaacaccgcgcagagccataacggcgacctgtatgtcgatgaaatattctggatcc

SEQ ID NO: 79819 - DNA, 75 bp, synthetic construct
  source 1..75: mol_type = other DNA
tccgtaccacaaatcgccgacacactgcaggtaaagcgcccgaccgtgcagagctggaaacagcgcgacgggtgg

SEQ ID NO: 79820 - DNA, 75 bp, synthetic construct
  source 1..75: mol_type = other DNA
cggcggcaaaagaaactgaagcactggtcaccggtacagacaacgccacagatgcagctgccgcacgcaaggcga

SEQ ID NO: 79821 - DNA, 75 bp, synthetic construct
  source 1..75: mol_type = other DNA
ttcgccgaccatccgttcggctctcgtcctgtctggattggctacgacccgtcacacaccggcgacagtgccggg

SEQ ID NO: 79822 - DNA, 75 bp, synthetic construct
  source 1..75: mol_type = other DNA
gcccaaattatggtggggcgtacagggccgacttcggtcgggccgggttcggtagtctccggtaacgccaaccct

SEQ ID NO: 79823 - DNA, 75 bp, synthetic construct
  source 1..75: mol_type = other DNA
cgcttacggcccggattatgccctgattggctcaccaaaagtttacgctgctattcatcagtggggcggtaagcc

SEQ ID NO: 79824 - DNA, 75 bp, synthetic construct
  source 1..75: mol_type = other DNA
agcattgttctggaaggcacgcaagttcgtggaaacgctacctgtagagtttcgcggttcgtggagcgagaagaa

SEQ ID NO: 79825 - DNA, 75 bp, synthetic construct
  source 1..75: mol_type = other DNA
atgaccccggcactgactgaaaaacttgttgaaacagcccgcgcggcacgtaatgcggggcatggtaaacgcggt

SEQ ID NO: 79826 - DNA, 75 bp, synthetic construct
  source 1..75: mol_type = other DNA
ctccgttgacgccggttacgccaaccccgtccagttcaccaccagtgaaattggcgtttccggtggtggaagttt

SEQ ID NO: 79827 - DNA, 75 bp, synthetic construct
  source 1..75: mol_type = other DNA
catcagccgtttttttgaactcggcacactcaacgtcatggaggttgcggccatttccggccatcgctctctcaa

SEQ ID NO: 79828 - DNA, 75 bp, synthetic construct
  source 1..75: mol_type = other DNA
tatgtcgtgaactggctgtggcggcaccagaactccgcaaagtcacgccaaaacttcgtgtctcgttccggggca

SEQ ID NO: 79829 - DNA, 75 bp, synthetic construct
  source 1..75: mol_type = other DNA
cgaagcatatcagaaaatcattctcttccagcagcaacctgattggtataagttactccctgttgcaattatcgc

SEQ ID NO: 79830 - DNA, 75 bp, synthetic construct
  source 1..75: mol_type = other DNA
gcactggatgaagtcatggccacgctgaccacaccggcccgcagcagtgttatcagcattgttaacggcaactga

SEQ ID NO: 79831 - DNA, 75 bp, synthetic construct
  source 1..75: mol_type = other DNA
agtgcgcagttcacctccggtgcacagcgtggcggcgaagttcagggggtttttgacgatccggagtcgctgggg

SEQ ID NO: 79832 - DNA, 75 bp, synthetic construct
  source 1..75: mol_type = other DNA
cacctgcgcaccacctacttttcaaccccctcgacgctggcacatggcgcctatccgttctggtcaggcgagctg

SEQ ID NO: 79833 - DNA, 75 bp, synthetic construct
  source 1..75: mol_type = other DNA
atgagtatcctgacccggtggttgcttatcccgccggtcaacgcgcggcttatcgggcgttatcgcgattatcgt

SEQ ID NO: 79834 - DNA, 75 bp, synthetic construct
  source 1..75: mol_type = other DNA
gttttacatcaccggtgatgtccaccacaatccggtgtggcgttaccggcgatgatgacgaaacattacggcgca

SEQ ID NO: 79835 - DNA, 75 bp, synthetic construct
  source 1..75: mol_type = other DNA
gacccggacacgggccagagctgggagtcatggagtgacccgtggctggcatggcgtcaggagcatggttttgtt

SEQ ID NO: 79836 - DNA, 75 bp, synthetic construct
  source 1..75: mol_type = other DNA
acattaatgttcaaagtgaagattcgaaggaaaaagggaaatcacgaaaagagagaatgctggagtatatcaact

SEQ ID NO: 79837 - DNA, 75 bp, synthetic construct
  source 1..75: mol_type = other DNA
aaagaaggcaaaatggtcatgttgagtaaagaagaactggcgcttctcgaagagttgcgcaaggcaaagactcgc

SEQ ID NO: 79838 - DNA, 75 bp, synthetic construct
  source 1..75: mol_type = other DNA
acaaacagcccctgccgggcagtttcctgtaagagaatgtttgccttctctgcatgatcttccaggagcagaaga

SEQ ID NO: 79839 - DNA, 75 bp, synthetic construct
  source 1..75: mol_type = other DNA
gacgaccactgtaacaacgacgggtggtaacgcagcggcaaccgttgcggcgacgggtggcgcaccggtagtggg

SEQ ID NO: 79840 - DNA, 75 bp, synthetic construct
  source 1..75: mol_type = other DNA
ccagaaggatgcggaccttcagtctcagtatcagaccggggatatcagtgaggatttttacagacaggcgctggc

SEQ ID NO: 79841 - DNA, 75 bp, synthetic construct
  source 1..75: mol_type = other DNA
agaaatccgagttctaatcgctggagaaaattgcctgatggaaccatcattcaaatgggaatatcagcatcaggg

SEQ ID NO: 79842 - DNA, 75 bp, synthetic construct
  source 1..75: mol_type = other DNA
tcattgctgccattcatcgcgaatacaagcagacatggaaaacactggatgacgaactggcctacgctctctggc

SEQ ID NO: 79843 - DNA, 75 bp, synthetic construct
  source 1..75: mol_type = other DNA
tcattgatgcctttaaataacgataaccatgtaaatatacctacaccaactatcactattaacggcaatacagtc

SEQ ID NO: 79844 - DNA, 75 bp, synthetic construct
  source 1..75: mol_type = other DNA
aaggcagcacgttcgcccgtcatgctggataatttcgggagcttgagagaggcagcacaccgcacacaggcggat

SEQ ID NO: 79845 - DNA, 75 bp, synthetic construct
  source 1..75: mol_type = other DNA
aaaagaagcaaacagccttgtatggttatgggattatgccaaccgctcacaggcattattccgcgaactgtatcc

SEQ ID NO: 79846 - DNA, 75 bp, synthetic construct
  source 1..75: mol_type = other DNA
gacgcccggtgatggtgcgccggttccggacagcatacaacgaagttgcccgtaaaaacgcaaaatcaaccctgt

SEQ ID NO: 79847 - DNA, 75 bp, synthetic construct
  source 1..75: mol_type = other DNA
tttctccgaaagacaaagtaagaattgagggtgaaattgataaagacctgagcagtgttgaagtggatgtaaagg

SEQ ID NO: 79848 - DNA, 75 bp, synthetic construct
  source 1..75: mol_type = other DNA
ttacgttacgcccttagctacctggctaaacaggatcagaaagaacacggtattattctgggccgtagcaggctt

SEQ ID NO: 79849 - DNA, 75 bp, synthetic construct
  source 1..75: mol_type = other DNA
ggtggtgcagagtcaggactggcagcacaacattatcagagttttgttgagcagctcgggattaaacagggtgca

SEQ ID NO: 79850 - DNA, 75 bp, synthetic construct
  source 1..75: mol_type = other DNA
ggtcaggtggttactggcgtgatgacctgaagaatgaggtgtcagtcaacacactaatgctgaatgcgtactatg

SEQ ID NO: 79851 - DNA, 75 bp, synthetic construct
  source 1..75: mol_type = other DNA
aaagagtatgcagaggttctcgttgctattacagaacttgctaatactctgcgaagagatttaatgggacgctga

SEQ ID NO: 79852 - DNA, 75 bp, synthetic construct
  source 1..75: mol_type = other DNA
gcatccgcaacctgctaaagtcacgccagatcggcgcgaccttctattttgcccgtgaggccctgattgacgccc

SEQ ID NO: 79853 - DNA, 75 bp, synthetic construct
  source 1..75: mol_type = other DNA
tgcagggctgataggtgagcgcatcagccaggattttcagcggctggaagagtcagtcgcaaacatgaaggcaaa

SEQ ID NO: 79854 - DNA, 75 bp, synthetic construct
  source 1..75: mol_type = other DNA
cgcgggactcccgggcaccggagcggtggccatcagggaccattaccgtcaggatttatgacgatcagccttttg

SEQ ID NO: 79855 - DNA, 75 bp, synthetic construct
  source 1..75: mol_type = other DNA
gttctggtccggtgcgctgttcaaccgcggacgcaacaaagccgacaaggtggacatcgacctgtcccacaacaa

SEQ ID NO: 79856 - DNA, 75 bp, synthetic construct
  source 1..75: mol_type = other DNA
tcgggcaaagctgctgatttctggcgatgttattttcaaaggcggagtagggcgcagtgacttcccgcgtggcga

SEQ ID NO: 79857 - DNA, 75 bp, synthetic construct
  source 1..75: mol_type = other DNA
ttatcctgtgactatggctgtcagtaaacagctgttaccgatttatgataaaccgatgatctattacccgctctc

SEQ ID NO: 79858 - DNA, 75 bp, synthetic construct
  source 1..75: mol_type = other DNA
tggaaatggcgaaaaaccttaagccttctgcccgtggtgaactggaaattaccgatattaaccgtatttatatgg

SEQ ID NO: 79859 - DNA, 75 bp, synthetic construct
  source 1..75: mol_type = other DNA
gcgacaggcagcgggtcttccccgccccatctggataaaggacacgtttgtgcagcagatccgacagacaacggg

SEQ ID NO: 79860 - DNA, 75 bp, synthetic construct
  source 1..75: mol_type = other DNA
ctgccccccggtggtaaagtcagggtatggttaaaagacaatcgtaatcctgttgtactccagaatcctgcccga

SEQ ID NO: 79861 - DNA, 75 bp, synthetic construct
  source 1..75: mol_type = other DNA
ctaccggagacagcaatgagcagacacaatttattgattattttaatctgttctacagtaagcgtggtcaggaac

SEQ ID NO: 79862 - DNA, 75 bp, synthetic construct
  source 1..75: mol_type = other DNA
gtcgctatgaagtggacattagacctcgcggtcgcgacggaaaacgcatccgcaggaaatttgaaagaaaagctg

SEQ ID NO: 79863 - DNA, 75 bp, synthetic construct
  source 1..75: mol_type = other DNA
gttcaggatgatgactggcccggctacggtgtcagtaaatggacacgaattacggcaacactgccttccggacga

SEQ ID NO: 79864 - DNA, 75 bp, synthetic construct
  source 1..75: mol_type = other DNA
ggataccgataacggctactcgacttttgaacagtccctgctgcgttatattgccgctgggcttggtgtgtcgta

SEQ ID NO: 79865 - DNA, 75 bp, synthetic construct
  source 1..75: mol_type = other DNA
cggattacctgcaggatgcggtggcccttaatccgctgaaaggtggcgtaagtgtccacgcagtgtccacggggg

SEQ ID NO: 79866 - DNA, 75 bp, synthetic construct
  source 1..75: mol_type = other DNA
tggtgggcttaccagaaacaacggtaaaagaagctcgcgatcgcgtgcgcagcgccattatcaatagcggatatg

SEQ ID NO: 79867 - DNA, 75 bp, synthetic construct
  source 1..75: mol_type = other DNA
gcggaaaaacggtgctgaaatttataaccgtaccgcgctggataatacgctgatttacagtggcgttattgatat

SEQ ID NO: 79868 - DNA, 75 bp, synthetic construct
  source 1..75: mol_type = other DNA
atgaggagtccggcctgtattacaaccgccaccgctattatgacccgctgcaggggcggtatatcactcaggatc

SEQ ID NO: 79869 - DNA, 75 bp, synthetic construct
  source 1..75: mol_type = other DNA
gcaggtgaagatattggccgagccgctaaagaaaaatgcttatggtcagtatctgctaaaaatgattaagggtta

SEQ ID NO: 79870 - DNA, 75 bp, synthetic construct
  source 1..75: mol_type = other DNA
accgacatagcgcagtcatttatggcaatccgtcgcgccaccaccgccagcggcaaccgcccgacctatgaagcc

SEQ ID NO: 79871 - DNA, 75 bp, synthetic construct
  source 1..75: mol_type = other DNA
gaggaaaccgccccgcttaatcgcgtggaaacgacgctcgaggcgcgcctgatccagctttatgcaaagcctgac

SEQ ID NO: 79872 - DNA, 75 bp, synthetic construct
  source 1..75: mol_type = other DNA
ctctatttttatgataacgaggtcattgagatggctaaacaactgaaaccgtcagctcgcggtgaattagaaatc

SEQ ID NO: 79873 - DNA, 75 bp, synthetic construct
  source 1..75: mol_type = other DNA
ctatatttttacgatagaggcgtagtagagatggctaagagtttaaaaccatcagttcgtggtgaatatgaaata

SEQ ID NO: 79874 - DNA, 75 bp, synthetic construct
  source 1..75: mol_type = other DNA
tccaggagctgcgcaaagtagcttccggtatggctattcacaagaaatggcgacagacctatttttccacaccat

SEQ ID NO: 79875 - DNA, 75 bp, synthetic construct
  source 1..75: mol_type = other DNA
taataatggatatttaacagtaagcttaaatcgagtaaataaaattcatcaatgtttgttgcaattaaaaaaata

SEQ ID NO: 79876 - DNA, 75 bp, synthetic construct
  source 1..75: mol_type = other DNA
gatattttgatcattagcactccacaagatactcctcgctttcagcgattgctgggtgatggcagccactgggga

SEQ ID NO: 79877 - DNA, 75 bp, synthetic construct
  source 1..75: mol_type = other DNA
gggttctttggtgaccggtatttccacccctgtacgtctcaccaccaataaggtcgtggaaagccttggtggtga

SEQ ID NO: 79878 - DNA, 75 bp, synthetic construct
  source 1..75: mol_type = other DNA
aaatgacaatcagccgggcgctggacaaatacctgaagacagtatccatccacaaaaaaggccatctacaggagt

SEQ ID NO: 79879 - DNA, 75 bp, synthetic construct
  source 1..75: mol_type = other DNA
gatgtcgctgtcacggaaaccgcaagtgacctggtacggctgggacggcgaccggctgaccacgatacagaacga

SEQ ID NO: 79880 - DNA, 75 bp, synthetic construct
  source 1..75: mol_type = other DNA
aagaattttttcagtgacgaggccatcgaaaagctggagcagattttctttgagcagtctttcgaatatcagttg

SEQ ID NO: 79881 - DNA, 75 bp, synthetic construct
  source 1..75: mol_type = other DNA
gcttacgtgttccgcgaatacatcatccagtttgcgcgactggtcgacgttgacctgactggcgacccgattgtc

SEQ ID NO: 79882 - DNA, 75 bp, synthetic construct
  source 1..75: mol_type = other DNA
catccgcatcagcagcccgcgccagacccggagttacagctacagcaccaccggcaggctgaccggcgttcacac

SEQ ID NO: 79883 - DNA, 75 bp, synthetic construct
  source 1..75: mol_type = other DNA
acagcctgaaacacacggcagcctgataaaggccggtgacctctggcacggtatggtcgccattaccctgccacc

SEQ ID NO: 79884 - DNA, 75 bp, synthetic construct
  source 1..75: mol_type = other DNA
gtgatgtacggggccagaaaacccgtcacaccggaaaagaacttcatggtctccgtcctctgtgcattgtgtgtg

SEQ ID NO: 79885 - DNA, 75 bp, synthetic construct
  source 1..75: mol_type = other DNA
gctacctcaatcaatgtgaaccaggcgaacctgtgtcacatgcattgtccgagctactattcaatgatcatgatc

SEQ ID NO: 79886 - DNA, 75 bp, synthetic construct
  source 1..75: mol_type = other DNA
ccctatgtggccgggattggtgcagggattgaggatactgatggccagccactgagcaacatactgctgctggct

SEQ ID NO: 79887 - DNA, 75 bp, synthetic construct
  source 1..75: mol_type = other DNA
atgaaacccactttatatactgctactggtgagtgcgttacgccaggccgtgaactgggcaaaggtggcgaaggc

SEQ ID NO: 79888 - DNA, 75 bp, synthetic construct
  source 1..75: mol_type = other DNA
gcagaacgtgaaggtggtgcactgacagaagttgcgtgctgggcccatgcccggcgaaaaatccacgatgtatag

SEQ ID NO: 79889 - DNA, 75 bp, synthetic construct
  source 1..75: mol_type = other DNA
cgacatgtctattaacaccccgtctgacggcgtaaatatcgctctgcacaatattgaaggttctactattaaaca

SEQ ID NO: 79890 - DNA, 75 bp, synthetic construct
  source 1..75: mol_type = other DNA
aattttacaatattttttggctttttgtttctatctttattccctacgctggattcccgttcacatagcaggagc

SEQ ID NO: 79891 - DNA, 75 bp, synthetic construct
  source 1..75: mol_type = other DNA
tcgttgatagcgacaccgctatgatgattcaggctttcactgatgtaggtgttagcattgactttgacaggctgt

SEQ ID NO: 79892 - DNA, 75 bp, synthetic construct
  source 1..75: mol_type = other DNA
cagactgcgctgctctacctgatgacccgcgagcagcgggcggtcaggcatcagggcgagagcgatatggctgga

SEQ ID NO: 79893 - DNA, 75 bp, synthetic construct
  source 1..75: mol_type = other DNA
ttgagccaggaatacactgaagacaaagaagtcacattgacaaagttaagtagcggccgccgccttctggaggcg

SEQ ID NO: 79894 - DNA, 75 bp, synthetic construct
  source 1..75: mol_type = other DNA
agtagagggtagcttcaatgatgaaaatggaactatggtttgctttgcagctgaagctgtatatgcttcaaagcc

SEQ ID NO: 79895 - DNA, 75 bp, synthetic construct
  source 1..75: mol_type = other DNA
atgcatcaatggttaatactgtatggcgtatgacgggagattccgggcttaataccctcaaaaccagcaaatccc

SEQ ID NO: 79896 - DNA, 75 bp, synthetic construct
  source 1..75: mol_type = other DNA
tagttcttgcggcattacgtaagctcggtgtggcatcaaatgccacgttaaccgatgtcgaaccgcagtctatgg

SEQ ID NO: 79897 - DNA, 75 bp, synthetic construct
  source 1..75: mol_type = other DNA
atgaaatctgcttttcagctctctaacgataaagtcgcgcatattggtgatgttctctcgatgacgatgaacaaa

SEQ ID NO: 79898 - DNA, 75 bp, synthetic construct
  source 1..75: mol_type = other DNA
accaatgtgcagagcgcaattgcaaaggccggtaaaaaaggcacgctggcggcatcgttgcaggccatcgctgac

SEQ ID NO: 79899 - DNA, 75 bp, synthetic construct
  source 1..75: mol_type = other DNA
aggattaccggatgaggtcagggaaaccatcaccgtgcatttcaccgcaaaaagaggtgactggtgtggcttctg

SEQ ID NO: 79900 - DNA, 75 bp, synthetic construct
  source 1..75: mol_type = other DNA
agaaagctgttgcccggagtgtggcggtgagctggattatctgggggaagtcagcgcagaacaactggaactggt

SEQ ID NO: 79901 - DNA, 75 bp, synthetic construct
  source 1..75: mol_type = other DNA
ccgcactggactgggccatgaaacagaattttcactgcggttgctggctgatggagaaacctgaaaccgcaatga

SEQ ID NO: 79902 - DNA, 75 bp, synthetic construct
  source 1..75: mol_type = other DNA
gttgcgccagaaacaatacgaatactaccgtgatttactgttcagtttcccgaaacctgaaactgtcagtaatta

SEQ ID NO: 79903 - DNA, 75 bp, synthetic construct
  source 1..75: mol_type = other DNA
attgaaactggtgacccacgttttatgtttcccgttaccgactcaaacatgaagcgccttattattgaggaaact

SEQ ID NO: 79904 - DNA, 75 bp, synthetic construct
  source 1..75: mol_type = other DNA
tgtaatcaaactggatgatgagtataagtatgctcttgtcagtggtccgaacagagaatacctatggattctggc

SEQ ID NO: 79905 - DNA, 75 bp, synthetic construct
  source 1..75: mol_type = other DNA
cagtggtgtggttgtggttggtgaatccggtagtatccttatctcaagagataataagctggtggagaacttcat

SEQ ID NO: 79906 - DNA, 75 bp, synthetic construct
  source 1..75: mol_type = other DNA
gcatcagcttctggccgcagcattttggcctcattccacagtgggtcaccctggaaccccgtgtcttcggctgga

SEQ ID NO: 79907 - DNA, 75 bp, synthetic construct
  source 1..75: mol_type = other DNA
gtaaagatggtattaagattgacgactcaattattacaaactttaaagcctctaaagatgttggtattgccaatg

SEQ ID NO: 79908 - DNA, 75 bp, synthetic construct
  source 1..75: mol_type = other DNA
gtgtggggcagcggtacaccgatgcgcgaatttctgcatgtcgatgatatggcggcggcgagcattcatgtcatg

SEQ ID NO: 79909 - DNA, 75 bp, synthetic construct
  source 1..75: mol_type = other DNA
gctggatggaccgtctttgcgaagactactgcggtggtatctggaatctgtacaccctgaacaacggcggggcat

SEQ ID NO: 79910 - DNA, 75 bp, synthetic construct
  source 1..75: mol_type = other DNA
cgggattatttcaccctcagagagcggctgatgacgatgcacaagcaactggaaggggcacaggactatatccgc

SEQ ID NO: 79911 - DNA, 75 bp, synthetic construct
  source 1..75: mol_type = other DNA
aggtcagcgctacttatggaaaacggaacgacggagggattcgtgtacttaaccgtggatacgatccaacgaaaa

SEQ ID NO: 79912 - DNA, 75 bp, synthetic construct
  source 1..75: mol_type = other DNA
cgaacaaaaaaaagcggcctatggcgcactggcggatgtgctggataatgacacctcgcgtaaagagttgatcga

SEQ ID NO: 79913 - DNA, 75 bp, synthetic construct
  source 1..75: mol_type = other DNA
tctgcctgctgggcgcacctgcccacgcggtatccatacccggcgttacaaccacaacgacaacggactcaacga

SEQ ID NO: 79914 - DNA, 75 bp, synthetic construct
  source 1..75: mol_type = other DNA
ggatatcgccatcctgaaaacactggtcacttcgctggatacgatgagtgatgaagtggttgtttctggttatgt

SEQ ID NO: 79915 - DNA, 75 bp, synthetic construct
  source 1..75: mol_type = other DNA
tatgccatgacggtccattattaccggctgcgggattacgccctgcagcatccggaatgcagcgccattatgcgc

SEQ ID NO: 79916 - DNA, 75 bp, synthetic construct
  source 1..75: mol_type = other DNA
gcctgtcgtacagagaattatgccatgacggtccattattatcggttgcgggattacgccctgcagcatccggaa

SEQ ID NO: 79917 - DNA, 75 bp, synthetic construct
  source 1..75: mol_type = other DNA
ggtatgaggtgaatatcagcagtcagggagacaacttcattcaggttgatttcgacacgccgtggtgtcagccgg

SEQ ID NO: 79918 - DNA, 75 bp, synthetic construct
  source 1..75: mol_type = other DNA
tcaggcggtggatattgaagtcagccgtcacgaagatttttcgccggttattcagtcacgacgcgcctggtttag

SEQ ID NO: 79919 - DNA, 75 bp, synthetic construct
  source 1..75: mol_type = other DNA
cagaaggcaatggatgcattttcgaagccttcggaattgacggcatggaaccaggggatccagctcgcgcaatca

SEQ ID NO: 79920 - DNA, 75 bp, synthetic construct
  source 1..75: mol_type = other DNA
gccgaggggcatatgtgggcgaacgataagcccatcaccgcgacgttgattcgcgacattatcgacggcatcaac

SEQ ID NO: 79921 - DNA, 75 bp, synthetic construct
  source 1..75: mol_type = other DNA
atgtaccagatggaaaaaatcacaacaggtgtgtcatacaccacgtcagcggtggggacgggctactggttcctg

SEQ ID NO: 79922 - DNA, 75 bp, synthetic construct
  source 1..75: mol_type = other DNA
acagatggggatttcaccttatcaccgggcaacaggcagatggactcgccgacctggaaagaatgctgcatctgt

SEQ ID NO: 79923 - DNA, 75 bp, synthetic construct
  source 1..75: mol_type = other DNA
aactaccctgtacttactgaatatccagcgaagacacaggaacaggaaatagctgaagcggagggaatgaaaaat

SEQ ID NO: 79924 - DNA, 75 bp, synthetic construct
  source 1..75: mol_type = other DNA
gcgaagtggagcgtcgtgtgaaggagcgcatgattctgtcacgtaaccgcaattacagccgcctggccacagctt

SEQ ID NO: 79925 - DNA, 75 bp, synthetic construct
  source 1..75: mol_type = other DNA
tagtacagtcaatacctaatatagttgaacttatggttcaacagaaagagcgtgaaactttctcgcagaggcttg

SEQ ID NO: 79926 - DNA, 75 bp, synthetic construct
  source 1..75: mol_type = other DNA
cccgcgcttttctcggtatcggtctgatattgctcgttatttctgcaatcatcttttattaccattttactttta

SEQ ID NO: 79927 - DNA, 75 bp, synthetic construct
  source 1..75: mol_type = other DNA
cgggcattgcctatggcacctccgcaggcagtgctggctactggtttttacagtggcttgatcaggtcagtccgt

SEQ ID NO: 79928 - DNA, 75 bp, synthetic construct
  source 1..75: mol_type = other DNA
ccggtcactggaatacgataattttccggaaatcagcgaagcgaacatcctgagcacatttgaacaactgcacca

SEQ ID NO: 79929 - DNA, 75 bp, synthetic construct
  source 1..75: mol_type = other DNA
cgatgtgaaatttgtcttcgccgaagggatcgcatacggtccggaaatggcagcgaaagcgcagtctgacgcgaa

SEQ ID NO: 79930 - DNA, 75 bp, synthetic construct
  source 1..75: mol_type = other DNA
atgatcagaccagggttcttgataaagatggtttctatcaggatgcggagcgtcttacaacagaaatttttaatc

SEQ ID NO: 79931 - DNA, 75 bp, synthetic construct
  source 1..75: mol_type = other DNA
tcgttatcgaatccagacgacacttgaaaatgaacttgattttttcgatcaggaacttctggtgatgaatcgttg

SEQ ID NO: 79932 - DNA, 75 bp, synthetic construct
  source 1..75: mol_type = other DNA
atgtgaatgccccctatgtatccctgcagaaatatgcagagataacaggtatccctcttaatacatgcaaaaaga

SEQ ID NO: 79933 - DNA, 75 bp, synthetic construct
  source 1..75: mol_type = other DNA
cagtcaaaaccggtcaccgttgtcgtgcgtgtggaagacggcaccggcgacgacgaagaaacgaaactcgcgcag

SEQ ID NO: 79934 - DNA, 75 bp, synthetic construct
  source 1..75: mol_type = other DNA
aactgtatatcgactacgactataccccggtgcctcctctcgaaaacctgaccctgcgccagcgtattaccgata

SEQ ID NO: 79935 - DNA, 75 bp, synthetic construct
  source 1..75: mol_type = other DNA
tgcgtcgacgcatgccaccggtgctgcgtcgacgggctattgatgcgctcctgcaggggctgtgtttccactatg

SEQ ID NO: 79936 - DNA, 75 bp, synthetic construct
  source 1..75: mol_type = other DNA
gactggatgcgctgggtatggatgaactgatagctaaggcctggcgttttgtgcgcgagcgtttccgcagttatc

SEQ ID NO: 79937 - DNA, 75 bp, synthetic construct
  source 1..75: mol_type = other DNA
accatcaccgcgcttttcaccgcaaaaagaggtgactggtgtggcttctggagtaacgaggatgtatcggtgtgg

SEQ ID NO: 79938 - DNA, 75 bp, synthetic construct
  source 1..75: mol_type = other DNA
gtgatgcatggtaacctgaatggtaatctgaatgcaggtaaaaatctttattttacaggcgaaaatggcattatt

SEQ ID NO: 79939 - DNA, 75 bp, synthetic construct
  source 1..75: mol_type = other DNA
cactctccggtgtatggcaagtacgaggatgacgtggaccgggaatccgcctatgagatgttgcaaaaaggcgta

SEQ ID NO: 79940 - DNA, 75 bp, synthetic construct
  source 1..75: mol_type = other DNA
atgaataatgatgagctggccaccagacgtgcgcaggcgattgccgaagacaggtgtttctcgaaaggacgtctg

SEQ ID NO: 79941 - DNA, 75 bp, synthetic construct
  source 1..75: mol_type = other DNA
aaaatattattacagccgatttcgatcccattatttcatttaataaaaacagtaaagaacatatgtcatggacat

SEQ ID NO: 79942 - DNA, 75 bp, synthetic construct
  source 1..75: mol_type = other DNA
atgagtgactatcatcacggcgtgcaggtgctggagattaacgacggcacccgcgtcatttccactgtatccacg

SEQ ID NO: 79943 - DNA, 75 bp, synthetic construct
  source 1..75: mol_type = other DNA
cgcaatcagcctgccggtgctggcggtagccggtgcagtggtggccggtgcattgctgatccgcaaatactggga

SEQ ID NO: 79944 - DNA, 75 bp, synthetic construct
  source 1..75: mol_type = other DNA
cctctttccgttcctctcctgtttatggcttttccgggcgtccccctggcggggcgggctgtcgtgaacggagcc

SEQ ID NO: 79945 - DNA, 75 bp, synthetic construct
  source 1..75: mol_type = other DNA
ttcaaaaggctggagctgattgacagaattaacgatataatagccagacactttccttctgtgctctcagcctga

SEQ ID NO: 79946 - DNA, 75 bp, synthetic construct
  source 1..75: mol_type = other DNA
ggctgttgattatggggctgcaattattaacagcagcacagacaagtcattattgactttaaatctgtcaccatt

SEQ ID NO: 79947 - DNA, 75 bp, synthetic construct
  source 1..75: mol_type = other DNA
aaaagcgccgctcgccaggtgacgaatcagattgtacgcggagtgctggggagtttgcttggggggagaagaagg

SEQ ID NO: 79948 - DNA, 75 bp, synthetic construct
  source 1..75: mol_type = other DNA
atcgtgaacaagtgaaaaatgcttttgacttcggtttttctcgttatgagaaagccatggaagacctctctaaag

SEQ ID NO: 79949 - DNA, 75 bp, synthetic construct
  source 1..75: mol_type = other DNA
cttctctctggtcactaccagcctatgccagacagacggatttatatccctaaaagcaacggcaaactgcgacca

SEQ ID NO: 79950 - DNA, 75 bp, synthetic construct
  source 1..75: mol_type = other DNA
tgtacgccgccagcctgctgtggatgctttcagagttgtatgaacaattgccggaagcgggcgatctggagaaac

SEQ ID NO: 79951 - DNA, 75 bp, synthetic construct
  source 1..75: mol_type = other DNA
atcctgtcgccaattctggttggctccatcactgaccgctttttctcggcgcagaaagtgctggcggtattgatg

SEQ ID NO: 79952 - DNA, 75 bp, synthetic construct
  source 1..75: mol_type = other DNA
gggatactggttactgcagctgctggacaaagtctctccgtcccagtgggtggcaatcggtgtgctggggagtct

SEQ ID NO: 79953 - DNA, 75 bp, synthetic construct
  source 1..75: mol_type = other DNA
cagttgctcgataaagtcacgccctcacagtgggcggcaataggtgtgctgggtagtctggtatttggcttgctg

SEQ ID NO: 79954 - DNA, 75 bp, synthetic construct
  source 1..75: mol_type = other DNA
gtaaagcgggtgagtccggtacgctggcccgttcgctggacgccatcgctgaccaggcaaaacccgtgaccgttg

SEQ ID NO: 79955 - DNA, 75 bp, synthetic construct
  source 1..75: mol_type = other DNA
tgcagtctgtctcggaaagaaaaattctacgtgttcttcggtagcgatcacggcggcgagcgtggtgcactgctg

SEQ ID NO: 79956 - DNA, 75 bp, synthetic construct
  source 1..75: mol_type = other DNA
ccccgccagttgcgacagtcgcgccatcgtcgtccgttaccggcacaccttccccgtgaaatacaccgcctggag

SEQ ID NO: 79957 - DNA, 75 bp, synthetic construct
  source 1..75: mol_type = other DNA
ccatgcgtattcaccgccagcatcctgcatcccgtcttttcccgttctgtgccggtaagtaccgctggcacggca

SEQ ID NO: 79958 - DNA, 75 bp, synthetic construct
  source 1..75: mol_type = other DNA
ggcacgtaaagatgggtggcgaataagcgccgacaaaacgcgtgcttttgcgcccgggcataaagttttgaggat

SEQ ID NO: 79959 - DNA, 75 bp, synthetic construct
  source 1..75: mol_type = other DNA
tatcccccggcaggttttgttgttgccggggcgctgtgtctgtgctggtcgtggctggttgcgcgttatctcgat

SEQ ID NO: 79960 - DNA, 75 bp, synthetic construct
  source 1..75: mol_type = other DNA
acttttttgctgatttctggctgggcgaaactatcgccaacggtccgttcgtccattatcccaacgaaaaatggt

SEQ ID NO: 79961 - DNA, 75 bp, synthetic construct
  source 1..75: mol_type = other DNA
atccggaagcgtatctgcgccatattctgagcgtactgccggaatggccctccaaccgggttgatgaactcctgc

SEQ ID NO: 79962 - DNA, 75 bp, synthetic construct
  source 1..75: mol_type = other DNA
acactgatgacacaccggtaaaggtactggcaccgggtcagaaaaaggcgaaaacagggcgtatctggacgtatg

SEQ ID NO: 79963 - DNA, 75 bp, synthetic construct
  source 1..75: mol_type = other DNA
tgcatctctattgtgattgcctccagtgtacagatggcaaatataagtcgccagacttcggtgagtatataggta

SEQ ID NO: 79964 - DNA, 75 bp, synthetic construct
  source 1..75: mol_type = other DNA
tatcccccggcggggtttgttgttgccggggcgctgtgcctgttctggtcgtggctggtggcgcgatatctcgac

SEQ ID NO: 79965 - DNA, 75 bp, synthetic construct
  source 1..75: mol_type = other DNA
atcgcagccgcaaccgcgaccacgtgctagcacaactattaatgacccgtcgctggatgctctgcttgaggatta

SEQ ID NO: 79966 - DNA, 75 bp, synthetic construct
  source 1..75: mol_type = other DNA
atgtttctgataattctcacaccactggtgggcgtgctgggggcgcttttgctgtcgtacggcgcatggctgatt

SEQ ID NO: 79967 - DNA, 75 bp, synthetic construct
  source 1..75: mol_type = other DNA
agattttttcgctgggtcaggtaccacggctcacgcaactttgaataaaaatattgctgacagtggttcacgccg

SEQ ID NO: 79968 - DNA, 75 bp, synthetic construct
  source 1..75: mol_type = other DNA
ccggacatcatggagaagcttgccacgcttcagcaggccacgaagcgcgccatgtacgaggccattctgtatccg

SEQ ID NO: 79969 - DNA, 75 bp, synthetic construct
  source 1..75: mol_type = other DNA
tcagcagaacagcgtctggcggcaagaaaagccagagccgcgccactgatgcagtcactgtatgactggatacag

SEQ ID NO: 79970 - DNA, 75 bp, synthetic construct
  source 1..75: mol_type = other DNA
tcaatgttgcggcgatcggcatcaccttaaacccggccagcaaactggcttatctggttccgcgcgacggcatgg

SEQ ID NO: 79971 - DNA, 75 bp, synthetic construct
  source 1..75: mol_type = other DNA
atgtcagatatcacagcctcccgtccggaagtggtcaccgggcatacggacgttatttgctcaaccagtatccgc

SEQ ID NO: 79972 - DNA, 75 bp, synthetic construct
  source 1..75: mol_type = other DNA
gaatccggcagaataacggaagccgcgtgtatggctcatgcccggagaaaaatccacgatgtgcatgcaagagcg

SEQ ID NO: 79973 - DNA, 75 bp, synthetic construct
  source 1..75: mol_type = other DNA
ttattaccgtctccgaggtggaatcgacaagataaccgcgcaggttaactacctgcaggagtacatcaggacgca

SEQ ID NO: 79974 - DNA, 75 bp, synthetic construct
  source 1..75: mol_type = other DNA
catcatcgctgatatgcagaagcgtcaacgtgatgtagcagaactcgacgcaagatatacaaaggaacttgctga

SEQ ID NO: 79975 - DNA, 75 bp, synthetic construct
  source 1..75: mol_type = other DNA
aaaactgagcgccactgagcagcgcctcgctgagatggaaaccgccttttccgcacttaagcaggaggtgactga

SEQ ID NO: 79976 - DNA, 75 bp, synthetic construct
  source 1..75: mol_type = other DNA
tgttgtaccggctgataaatttatatggcacgccgtaacgcgtgccgtcgggaatgtgaaaaatcagggcgccga

SEQ ID NO: 79977 - DNA, 75 bp, synthetic construct
  source 1..75: mol_type = other DNA
tacagcagatgctgaactcaattattaccgtctccgaagtggaatcgacaagataaccgcgcaggttaactacct

SEQ ID NO: 79978 - DNA, 75 bp, synthetic construct
  source 1..75: mol_type = other DNA
ttcaccctcagagagcggctgatgacgatgcacaagcaactggaaggggcacaggaatatatccgtactcagtgc

SEQ ID NO: 79979 - DNA, 75 bp, synthetic construct
  source 1..75: mol_type = other DNA
ttattaccgtctcagaagtggaatcgacaggataaccgcgcaggttaactacctgcaggaatacatcaggacgca

SEQ ID NO: 79980 - DNA, 75 bp, synthetic construct
  source 1..75: mol_type = other DNA
atgaaacgtaaaacactgcctctgctggtgctggttgccaccacgctgtttctcagcgcatgcgataacagaagt

SEQ ID NO: 79981 - DNA, 75 bp, synthetic construct
  source 1..75: mol_type = other DNA
ggcgcaacaggacaccatccgccagatggccgaatacaattgcctgctctcacagcgggcggcggcttatgcttc

SEQ ID NO: 79982 - DNA, 75 bp, synthetic construct
  source 1..75: mol_type = other DNA
gcagaatgtttaaaccactctggcagcatggccgcgcaatttgctttgctgatggatggtatgagtggaaaaagg

SEQ ID NO: 79983 - DNA, 75 bp, synthetic construct
  source 1..75: mol_type = other DNA
cgtgctgatgtttctgctggtcgtaagcgcctgcaagtcgccgccacctgtgcaaagtcaacgaccggagccagc

SEQ ID NO: 79984 - DNA, 75 bp, synthetic construct
  source 1..75: mol_type = other DNA
tcatggaaaaggcggtgggcttcacctcccgttttgattttgccgcgcatgtggcgtatgcacgttcgcgtggcc

SEQ ID NO: 79985 - DNA, 75 bp, synthetic construct
  source 1..75: mol_type = other DNA
acatggtaccgctcactggagtacgataactttccggaaatcagtgaagcgaacatttggagcacatttgagcaa

SEQ ID NO: 79986 - DNA, 75 bp, synthetic construct
  source 1..75: mol_type = other DNA
agcatgggcgatggagaaagcccaggacttacagcagatgctgaactcaattattaccgtctccgaagtggaatc

SEQ ID NO: 79987 - DNA, 75 bp, synthetic construct
  source 1..75: mol_type = other DNA
ccagcgaccaggtgcaggtcgtttttgggcctggtaaagcgcatcgtgccgcaaaagcgatgagcgagctgctgg

SEQ ID NO: 79988 - DNA, 75 bp, synthetic construct
  source 1..75: mol_type = other DNA
atatttatatcccggattggtggagaaaaagctttttccatgcactttttttgcaaaaatttctatatgggaggc

SEQ ID NO: 79989 - DNA, 75 bp, synthetic construct
  source 1..75: mol_type = other DNA
ctgtctgtcatgggctgttaatcattaccgtgataacgccattacctataaagaacagcgcgataaagccacgta

SEQ ID NO: 79990 - DNA, 75 bp, synthetic construct
  source 1..75: mol_type = other DNA
ctgaagattggcaaaaaggtgaccgattaaagtcggttgcgctgctgattgcttatctggataaagccaatttct

SEQ ID NO: 79991 - DNA, 75 bp, synthetic construct
  source 1..75: mol_type = other DNA
gggagtacggttcgccgcgtctggaacgttacaacggcctgccatccatggaaatcttaggccaggcggcaccgg

SEQ ID NO: 79992 - DNA, 75 bp, synthetic construct
  source 1..75: mol_type = other DNA
cccctgtaaatttggcagtaaaattatcgtcaacaatctggtgaggtgggaccgatggggattgcatcttatcac

SEQ ID NO: 79993 - DNA, 75 bp, synthetic construct
  source 1..75: mol_type = other DNA
tcggcgcatttaaccgcttttaccgccgtactgaagataaatatcagcgaggcgtaatttatgtcctgcgccgtg

SEQ ID NO: 79994 - DNA, 75 bp, synthetic construct
  source 1..75: mol_type = other DNA
ggcgaaaaagaatgccgaaagttcaatacagagattatctatcagctgaggaaagtgtatggactcactggtgag

SEQ ID NO: 79995 - DNA, 75 bp, synthetic construct
  source 1..75: mol_type = other DNA
aatacagaggaaagtgcgcagaaaaatgcgcaaaaaagtgcgcaaattgacactcaaaaaagcgcacaaaaaaat

SEQ ID NO: 79996 - DNA, 75 bp, synthetic construct
  source 1..75: mol_type = other DNA
ctgaaagtgaatcaggatggttcccgcgtgctgctgcgtgacgtcgcgaagattgagctgggtggtgagaactac

SEQ ID NO: 79997 - DNA, 75 bp, synthetic construct
  source 1..75: mol_type = other DNA
cagactgtaccaagtctgtatcaacgcgtagtacaaccggaccgtaatgatccgacgaaaatcactccgattctg

SEQ ID NO: 79998 - DNA, 75 bp, synthetic construct
  source 1..75: mol_type = other DNA
atgacgatttccctgcataccacccggacaagcgcccctaacaccgcagcggcgaccagcgtatccccgctggac

SEQ ID NO: 79999 - DNA, 75 bp, synthetic construct
  source 1..75: mol_type = other DNA
atagaacatctgcgggcccagatagaaaaactgcgccggatgctgttcggtactcgttctgaaaaactgcgtcgt

SEQ ID NO: 80000 - DNA, 75 bp, synthetic construct
  source 1..75: mol_type = other DNA
tctttgcccgccagggtgtcgaactgagccgtgccttactctccaactgggttgatgcgtgctgccagttaatga

SEQ ID NO: 80001 - DNA, 75 bp, synthetic construct
  source 1..75: mol_type = other DNA
cggaagtggtcaccgggaatacggacgttatctgctccaccagtatccgacacgttgtgacggtacggaatgcag

SEQ ID NO: 80002 - DNA, 75 bp, synthetic construct
  source 1..75: mol_type = other DNA
aaggcatactggcaggtacgtttgcgctaatgctgagcggttgtgtcactgtgccggacgccattaaaggcagca

SEQ ID NO: 80003 - DNA, 75 bp, synthetic construct
  source 1..75: mol_type = other DNA
aacgacaagcgttatattttcaaagcggtcagcgccgcctctaaagcgcattcttatctgatggataaactctga

SEQ ID NO: 80004 - DNA, 75 bp, synthetic construct
  source 1..75: mol_type = other DNA
aaagcgacgttgttgcagcattaagccgccgtttcggctgcacgctggagcactggtacgccgaacagggctgca

SEQ ID NO: 80005 - DNA, 75 bp, synthetic construct
  source 1..75: mol_type = other DNA
ggcagcacaccgcacacaggcggatatggggatagaaatcgcaaaatctgtctggcggaactaccagacagacaa

SEQ ID NO: 80006 - DNA, 75 bp, synthetic construct
  source 1..75: mol_type = other DNA
ccgccctgaaatccgcgagaaggtaatccagtatcaggaagagtgtgacgatgtgctctacgagtactggactaa

SEQ ID NO: 80007 - DNA, 75 bp, synthetic construct
  source 1..75: mol_type = other DNA
cagcgcttctgacaaatctccacctgatagagcgctctcaggtcgcattcattgatgacgcccaacacaccgtat

SEQ ID NO: 80008 - DNA, 75 bp, synthetic construct
  source 1..75: mol_type = other DNA
tgttgcatttaatcaagatgtaaaatgtctcatagtcaataatgatatgattgatccttggtatcttttgctatg

SEQ ID NO: 80009 - DNA, 75 bp, synthetic construct
  source 1..75: mol_type = other DNA
aaaattgatcccctgaaacccgtaacggtaaaaaaaccggataagatcactgttgtttgtaattacagagaataa

SEQ ID NO: 80010 - DNA, 75 bp, synthetic construct
  source 1..75: mol_type = other DNA
tggagcaggcattccgacgcgaacatgccgaaacgggaataacattactggactggtgccggaagaaaaagatta

SEQ ID NO: 80011 - DNA, 75 bp, synthetic construct
  source 1..75: mol_type = other DNA
gccgctgaatgatgctctgtaccgttatgtgatgaacagccgcaaagttcacactgatgacacaccagtaaaagt

SEQ ID NO: 80012 - DNA, 75 bp, synthetic construct
  source 1..75: mol_type = other DNA
cagaactacaatcaatgaatatcactgaagataatatcagcaaacttaactctttgtttcctgaagcatttaatg

SEQ ID NO: 80013 - DNA, 75 bp, synthetic construct
  source 1..75: mol_type = other DNA
tgttcaatgccatgaacggtaaccgcgcagaaatgagcccggaagccgccggtattgccgcctgtctgatgacgt

SEQ ID NO: 80014 - DNA, 75 bp, synthetic construct
  source 1..75: mol_type = other DNA
agttcaaatggtgttctgtacgcgctgaaacataaaagacactatcgccgggataagatgattggaagggttgaa

SEQ ID NO: 80015 - DNA, 75 bp, synthetic construct
  source 1..75: mol_type = other DNA
cgggattatttcatcctcagagaacggttgatgacaatgcagaagcagctggaaggggcacaggaatatatccgc

SEQ ID NO: 80016 - DNA, 75 bp, synthetic construct
  source 1..75: mol_type = other DNA
acgtggcgctggcgtgggcggtctttaaaatcttccgcattccggtaaatcagtggacgctggcgacggcggcgc

SEQ ID NO: 80017 - DNA, 75 bp, synthetic construct
  source 1..75: mol_type = other DNA
ccggaaatcagtgaagagaatatactgagtacgtttgagcagctacaccagaataaggatgaagtgtttgagcgt

SEQ ID NO: 80018 - DNA, 75 bp, synthetic construct
  source 1..75: mol_type = other DNA
ctctgagggttgtggttcgtatgcatctattggtaataaatatcaaataaatcatgtggatgaaatttttgtttt

SEQ ID NO: 80019 - DNA, 75 bp, synthetic construct
  source 1..75: mol_type = other DNA
accaaagacgaaattcaaggattgctaacattaacagaaaacacacgaaagttaacgttgacggagaaaccctgg

SEQ ID NO: 80020 - DNA, 75 bp, synthetic construct
  source 1..75: mol_type = other DNA
tatctggaatctgtacacactgaacaacggtggcgcatttatggcgcccgaaccggatgacgatgatgacgaaaa

SEQ ID NO: 80021 - DNA, 75 bp, synthetic construct
  source 1..75: mol_type = other DNA
ggattttcgctgtggctgctggctcatggagaaaccggaaaccgcaatgaaagccatcacccgcaatcttgaccg

SEQ ID NO: 80022 - DNA, 75 bp, synthetic construct
  source 1..75: mol_type = other DNA
gccaggtaaagcaaaaactgcttaatactccagaagctgttaaagggtatgaagatgctgacaaagaactggaga

SEQ ID NO: 80023 - DNA, 75 bp, synthetic construct
  source 1..75: mol_type = other DNA
gcaggatgttcaattggttcgctggtgggcgctgcctatgcatgcgatcgattatctgcgctggaagattgggtg

SEQ ID NO: 80024 - DNA, 75 bp, synthetic construct
  source 1..75: mol_type = other DNA
cggtctggttcgcgtactcgccgaaccggcaggggaaacacccggagcaacacctccgccccttccggggtatcc

SEQ ID NO: 80025 - DNA, 75 bp, synthetic construct
  source 1..75: mol_type = other DNA
tttgcaggcattcaacagcgcgacggggcagatacaggaagagccccagctcgggctggaaacggttttgtgtct

SEQ ID NO: 80026 - DNA, 75 bp, synthetic construct
  source 1..75: mol_type = other DNA
ccatgtgcctggcgtcatagcagactggccggtcaaccgggtcagcgaactgcttccgtggcgcatagcactgcc

SEQ ID NO: 80027 - DNA, 75 bp, synthetic construct
  source 1..75: mol_type = other DNA
ctttccgctttttgccctggtgtgggggctgaatctgtcccgtcatgcgcatatccggcaaccggccattaaccg

SEQ ID NO: 80028 - DNA, 75 bp, synthetic construct
  source 1..75: mol_type = other DNA
tccagaacttccgatctattcgtttgctgacctggttgccttcgccagggctcaactgcctcatgggccctgggg

SEQ ID NO: 80029 - DNA, 75 bp, synthetic construct
  source 1..75: mol_type = other DNA
gtgctgacgtggtgtgaaacgcgcagtgggtggcgtacagcagcggccattcttctgatggccctgtgggggcct

SEQ ID NO: 80030 - DNA, 75 bp, synthetic construct
  source 1..75: mol_type = other DNA
attgccggtcatgcccgcagccggggactcattgtggtcacaaacaatacccgggagtttgaacgtatcgccggc

SEQ ID NO: 80031 - DNA, 75 bp, synthetic construct
  source 1..75: mol_type = other DNA
atgcctcaatctctcccggacactacgccgccgaaaaggcgctttcgctggccaacgggaatgccgcagctggcg

SEQ ID NO: 80032 - DNA, 75 bp, synthetic construct
  source 1..75: mol_type = other DNA
atgaggcgattgcgcttctcgccacgaagttcatttgcccgtacgttattgctcatcgtcaccttgctgttcgtc

SEQ ID NO: 80033 - DNA, 75 bp, synthetic construct
  source 1..75: mol_type = other DNA
acgccctgacccacgcgggtgtgtgggaagacgacagccaggtgaaaagaatgctggtggagtggggaccggtta

SEQ ID NO: 80034 - DNA, 75 bp, synthetic construct
  source 1..75: mol_type = other DNA
caggagtatttcgatggccctgaactggaccggctgattctggatgcctggagcaacgtactgggcttcgcgtca

SEQ ID NO: 80035 - DNA, 75 bp, synthetic construct
  source 1..75: mol_type = other DNA
taaaacggtaaccagcatcctgatggcgtgggtgtttactttaccggcggcaatttttctttctggtgggctgta

SEQ ID NO: 80036 - DNA, 75 bp, synthetic construct
  source 1..75: mol_type = other DNA
atggtgctgattaccagcagtacggacaatatcacactgaaaattgaccctgccgtagtgctggcaacccgcaag

SEQ ID NO: 80037 - DNA, 75 bp, synthetic construct
  source 1..75: mol_type = other DNA
gcagaatagcagccagattattgctgaacaggtgatccctgaaaacgagggcggttggtggatacgtgaagtggg

SEQ ID NO: 80038 - DNA, 75 bp, synthetic construct
  source 1..75: mol_type = other DNA
gcgaatccctgcgctggagtctgctggttgccctgaacaaaacccgcccttacaccgccagcgagacgttgctgc

SEQ ID NO: 80039 - DNA, 75 bp, synthetic construct
  source 1..75: mol_type = other DNA
cgtatgcttacgatgccctggaaccgcacttcgataagcagaccatggaaatccaccacaccaaacaccatcaga

SEQ ID NO: 80040 - DNA, 75 bp, synthetic construct
  source 1..75: mol_type = other DNA
acccatttcccgttagccaaagcggcgcttgaggcgggtaaacatgtggtcgttgataaaccctttaccgtgaca

SEQ ID NO: 80041 - DNA, 75 bp, synthetic construct
  source 1..75: mol_type = other DNA
gtttttcttgtttccggagagccagttgatattgcagtcagtgttcacagaacaatgcaggaatgtatggcagca

SEQ ID NO: 80042 - DNA, 75 bp, synthetic construct
  source 1..75: mol_type = other DNA
gtattaagtggattactccagcagacctctacggactcaaagggaagtacattacatctggagcccgtgatattt

SEQ ID NO: 80043 - DNA, 75 bp, synthetic construct
  source 1..75: mol_type = other DNA
tactgcttttagccttacggtataagaagttgctttcccttttcaaccggttacgcaagcaggttcacaacaaat

SEQ ID NO: 80044 - DNA, 75 bp, synthetic construct
  source 1..75: mol_type = other DNA
aagccatcacgctgaaaatcgacccgtctgtggttctggcaacccgcaaatatgtggatgacaaaatctcagagc

SEQ ID NO: 80045 - DNA, 75 bp, synthetic construct
  source 1..75: mol_type = other DNA
gttgaccagcagttttctggtgggttgataaaaaatctgacaacagcaagactggaaatattaggaactaataaa

SEQ ID NO: 80046 - DNA, 75 bp, synthetic construct
  source 1..75: mol_type = other DNA
gtgttgatggtggcgcttatatgttctatgcgcagaaaaataccgataacacctatatgttaagcgttaatggtg

SEQ ID NO: 80047 - DNA, 75 bp, synthetic construct
  source 1..75: mol_type = other DNA
actgctcgaagatttaatggaagccggaccactgaaagctgccccgtcgctgtccttcctcgggctcgcggtgat

SEQ ID NO: 80048 - DNA, 75 bp, synthetic construct
  source 1..75: mol_type = other DNA
gcaaacgctggatgtgcgttgtcatcgcggcattgttaattacgacccgaccgagctggtgataaccgcgcgtgc

SEQ ID NO: 80049 - DNA, 75 bp, synthetic construct
  source 1..75: mol_type = other DNA
actgtggcatttgaagataaatatggctctcaactggagctgatatttcgttttatcgatcgtgcgctggcaact

SEQ ID NO: 80050 - DNA, 75 bp, synthetic construct
  source 1..75: mol_type = other DNA
catcacaacatccccgtctgcaggagacgagtctggcaaccccggcagcacgtccggggatccagctgataccgg

SEQ ID NO: 80051 - DNA, 75 bp, synthetic construct
  source 1..75: mol_type = other DNA
ggtatgaggggaatatcctgtttgcctttgcagtcgcagcacaggtgctgacgtggtgtgagacgcgcagcctgt

SEQ ID NO: 80052 - DNA, 75 bp, synthetic construct
  source 1..75: mol_type = other DNA
catgggttggttgatatcgtaaatggtgagggcaactctaaaccacgctacagagtttctcaatatggattgaat

SEQ ID NO: 80053 - DNA, 75 bp, synthetic construct
  source 1..75: mol_type = other DNA
cgtttctggcccggagattttttcccgacgttctatggctgtcatctggctgtgctgggcattctggcgttgtga

SEQ ID NO: 80054 - DNA, 75 bp, synthetic construct
  source 1..75: mol_type = other DNA
catggctgaaagtttgcctacatcttgccggattgttgccgtttctctggctggtctgggcgatcaatcacggtg

SEQ ID NO: 80055 - DNA, 75 bp, synthetic construct
  source 1..75: mol_type = other DNA
gtctgtgctggcactgcgataaccagctgcgcgatcagttcacggaacggctggaatcaatggcaacggataact

SEQ ID NO: 80056 - DNA, 75 bp, synthetic construct
  source 1..75: mol_type = other DNA
gtcgtcgaaacaccggtaggcctgaacgagaagcagaaacagctgctgcaagagctgcaagaaagcttcggtggc

SEQ ID NO: 80057 - DNA, 75 bp, synthetic construct
  source 1..75: mol_type = other DNA
cgcgaccagacatcagaatcactcgatcaacttgctcagcagaatctggttgcctggatgattgatgtcatccgt

SEQ ID NO: 80058 - DNA, 75 bp, synthetic construct
  source 1..75: mol_type = other DNA
cggtttaccgtggtaccagggcaatatcctgtttgcctttgcggttgcggcacaggtgctcaggtggtgtgaaaa

SEQ ID NO: 80059 - DNA, 75 bp, synthetic construct
  source 1..75: mol_type = other DNA
tttccgaaatggtagtggtgtactgaatagtggggaatttcaggcgacagccaatatgagtattatttataattg

SEQ ID NO: 80060 - DNA, 75 bp, synthetic construct
  source 1..75: mol_type = other DNA
aaacgaaaggtgcgggaacgacgttctggatgtacaccggcaagggcgatgcgtttgcgaaccctttatcggaca

SEQ ID NO: 80061 - DNA, 75 bp, synthetic construct
  source 1..75: mol_type = other DNA
gaggcactgcgccgctttgagcagatggtggaagaggtgtcacgtaacgcctccgcggttgcacagaatacggca

SEQ ID NO: 80062 - DNA, 75 bp, synthetic construct
  source 1..75: mol_type = other DNA
gtacgctgaatgattttctcggtgccatgacggaggatgatgtccgaccggaggcactgcgccgctttgagcaga

SEQ ID NO: 80063 - DNA, 75 bp, synthetic construct
  source 1..75: mol_type = other DNA
cattgccgttgatcctgagtctccggaatctttcatgaaacgacctaaacgtcgccgctgggttaacgagaaata

SEQ ID NO: 80064 - DNA, 75 bp, synthetic construct
  source 1..75: mol_type = other DNA
ggcaaacaacctgccggaactgcagcgtcagttaaaactgacagcgggcaatgatgcgcttggctccatgcagaa

SEQ ID NO: 80065 - DNA, 75 bp, synthetic construct
  source 1..75: mol_type = other DNA
gagagcgacatcataccgggagaacagacagccaccagcatactgaagcagcgcacaaaaaattttgcgctgttg

SEQ ID NO: 80066 - DNA, 75 bp, synthetic construct
  source 1..75: mol_type = other DNA
gtgtattgcgatccgccgtatgacggtaagttttccggctatcacactgatggtttcactgaagatgaccagtat

SEQ ID NO: 80067 - DNA, 75 bp, synthetic construct
  source 1..75: mol_type = other DNA
tggcctggtctggacacagtgcccgtgtcggagccgcgcgagatatggcccgcgccggagtttcaataccggaga

SEQ ID NO: 80068 - DNA, 75 bp, synthetic construct
  source 1..75: mol_type = other DNA
ctggcagcacaacaaaagatctgatgacgcttaagtctgatgcactacgggttaccgggcaggtgataccatcaa

SEQ ID NO: 80069 - DNA, 75 bp, synthetic construct
  source 1..75: mol_type = other DNA
gcgtaatctgccatccggagtcgttcctgccgttcgccagccgctggcggaagacaaaacattgctgccgttttt

SEQ ID NO: 80070 - DNA, 75 bp, synthetic construct
  source 1..75: mol_type = other DNA
tttctgcatatctgacactttggttcccactacttatttggtggacaccactttgtctaattcgtcagattctga

SEQ ID NO: 80071 - DNA, 75 bp, synthetic construct
  source 1..75: mol_type = other DNA
cagcgcgaaaaggtcttgtccagctcagtagcgccaccaacagcgattctgaaacgcttgcggcaacgccaaagg

SEQ ID NO: 80072 - DNA, 75 bp, synthetic construct
  source 1..75: mol_type = other DNA
gtgctggcactgcgacaaccagctgcgtgaccagacttccgaatcactcgagcaacttgctcatcaaaacctgtc

SEQ ID NO: 80073 - DNA, 75 bp, synthetic construct
  source 1..75: mol_type = other DNA
agaggtggcggtaaatcaggcggttataggacaataattttttaccgcgtcgcagaaaaggcttttttcatctat

SEQ ID NO: 80074 - DNA, 75 bp, synthetic construct
  source 1..75: mol_type = other DNA
cattaccgttgatccggagtctccggaatctttcatgaggcgacctaaacgtcgccgttgggtaaatgagaaata

SEQ ID NO: 80075 - DNA, 75 bp, synthetic construct
  source 1..75: mol_type = other DNA
ttgaaggcccggctgattttaatgaccgggtagacgaactgtttttagcccaccagcttccggtagctatttaca

SEQ ID NO: 80076 - DNA, 75 bp, synthetic construct
  source 1..75: mol_type = other DNA
cggggcgatctcttccaacgaacgcaagctggtgaccggctatgccagatttctggcctcctacggcgggaacga

SEQ ID NO: 80077 - DNA, 75 bp, synthetic construct
  source 1..75: mol_type = other DNA
cacgttttgagcaaatcccacaaatcctgaaacgttttcgtcaagcggtattggggggcgcagttaatggaaaat

SEQ ID NO: 80078 - DNA, 75 bp, synthetic construct
  source 1..75: mol_type = other DNA
aaaattacttctcaggcaattgttgatttaattgcccaaggacatgaagttatcgtcactcatggtaacgggccg

SEQ ID NO: 80079 - DNA, 75 bp, synthetic construct
  source 1..75: mol_type = other DNA
taactacacatatctaaaacttactgttagtaaagttgtagtaaaaagtggtgatgtggtgaaatatctaatccg

SEQ ID NO: 80080 - DNA, 75 bp, synthetic construct
  source 1..75: mol_type = other DNA
agcaacttgctcaacaaaatctgacagcctggatgcttgaggttatacgtcacgcaatgaatggcacgcaggagc

SEQ ID NO: 80081 - DNA, 75 bp, synthetic construct
  source 1..75: mol_type = other DNA
acttaaccttgccaccagtgatgcggcggctgtagccggccttgtgatgacggtgctgactgttggtctggtgtc

SEQ ID NO: 80082 - DNA, 75 bp, synthetic construct
  source 1..75: mol_type = other DNA
attgtgaaacatgagcaatcacgtaatcatcctgatgcaactttaacctcaaaaggctttgttcaacttagcagc

SEQ ID NO: 80083 - DNA, 75 bp, synthetic construct
  source 1..75: mol_type = other DNA
gcatggatgatgtgaaagctagatatattgtgacagggtgtgtagttgctatggggaaaaacactgtagaggaaa

SEQ ID NO: 80084 - DNA, 75 bp, synthetic construct
  source 1..75: mol_type = other DNA
agttgggtgatgttttgaccctcatcaatggcagagcatataagaaagaagaaatgctcacagaaggtgttccta

SEQ ID NO: 80085 - DNA, 75 bp, synthetic construct
  source 1..75: mol_type = other DNA
atgacaacggataacacgaacacgacacgtaacgattcactggctgcccggaccgatacctggttgcagtcgttt

SEQ ID NO: 80086 - DNA, 75 bp, synthetic construct
  source 1..75: mol_type = other DNA
atgattaccagttatgaagccactgttgttactactgatgacattgttcacgaagttaccctggaaggaaagcgt

SEQ ID NO: 80087 - DNA, 75 bp, synthetic construct
  source 1..75: mol_type = other DNA
gaaataaaaccgccgtaatgtccgaactgaaaaaacatcttcctgctggtccgcgactagttgaacctttcgcgg

SEQ ID NO: 80088 - DNA, 75 bp, synthetic construct
  source 1..75: mol_type = other DNA
caggtggcgtcctcctgctttccggttgcgccggaacgaactctgattttgagtgtgatgccaccacgtcagata

SEQ ID NO: 80089 - DNA, 75 bp, synthetic construct
  source 1..75: mol_type = other DNA
ctctgctgggaaccttattactttccggctgtgcaggaacgaactctgattttgagtgtgatgccaccacgtcag

SEQ ID NO: 80090 - DNA, 75 bp, synthetic construct
  source 1..75: mol_type = other DNA
ggtatgctgcgtgcgctggatttaagcgctgaagagaaagcggctgttcgttacctgagcttcctgacgctaaaa

SEQ ID NO: 80091 - DNA, 75 bp, synthetic construct
  source 1..75: mol_type = other DNA
actccagctctgccggtgcggcgctgggcgtagggattgccacagggttgattggtatggctgccgatgcaatgg

SEQ ID NO: 80092 - DNA, 75 bp, synthetic construct
  source 1..75: mol_type = other DNA
ggggagatggattcactcgtgcgtgatgccggatttgataaatgcacacaacggattgatgagtggggtattttt

SEQ ID NO: 80093 - DNA, 75 bp, synthetic construct
  source 1..75: mol_type = other DNA
actcggctctgccatcgtggcgaaagcgcgtggctacgatatgaaagtcattgccgtggatgaccagtttgttaa

SEQ ID NO: 80094 - DNA, 75 bp, synthetic construct
  source 1..75: mol_type = other DNA
ggaagaaaccgcaacgggcatgacagactccttactgtacgcgccgtgcgattatgtgattacacaatcctatac

SEQ ID NO: 80095 - DNA, 75 bp, synthetic construct
  source 1..75: mol_type = other DNA
gcagagatcgggcgtgttgcagcaggtgcggtatctggtgatgtaaaaactagtgccggtcgtcgtgatgctatc

SEQ ID NO: 80096 - DNA, 75 bp, synthetic construct
  source 1..75: mol_type = other DNA
caataccaagtgatggtatccgcccaacgtctggtaaaggagaaggcttacttatcctgctttggatcccccgtc

SEQ ID NO: 80097 - DNA, 75 bp, synthetic construct
  source 1..75: mol_type = other DNA
atctgaaaaccgttatggaacagctggcccagggcaaacgccgttgccagcaacaattcacctctcaagaagtgc

SEQ ID NO: 80098 - DNA, 75 bp, synthetic construct
  source 1..75: mol_type = other DNA
gataataaaccactcggtttccagggcggtatcgcggtcctttccgtggtggcattcatgatgctggcattctgt

SEQ ID NO: 80099 - DNA, 75 bp, synthetic construct
  source 1..75: mol_type = other DNA
tcatgcagacccgctgaagtttgagaaaaagtacggctctcagattgagttaatttttcgttttcttgatcacgc

SEQ ID NO: 80100 - DNA, 75 bp, synthetic construct
  source 1..75: mol_type = other DNA
tgatgatgcggctgatgcgctttcgtcaatatctgaaattatgcgggtggcttttttctttctttgcactgatga

SEQ ID NO: 80101 - DNA, 75 bp, synthetic construct
  source 1..75: mol_type = other DNA
tgcgccactgacccttaccggtagcactcaacaggccgagacaggacaaaccgtcacagtaaccctggctggaca

SEQ ID NO: 80102 - DNA, 75 bp, synthetic construct
  source 1..75: mol_type = other DNA
gtgaatatagtgcagaacaaatcagaaacggtgccacaccggttccttttgatatttcacttcaaaactgcgttc

SEQ ID NO: 80103 - DNA, 75 bp, synthetic construct
  source 1..75: mol_type = other DNA
atatggtaatgactatgataccaaggatgggacgggagtaagagattttattcatgttacggatttagctaatgg

SEQ ID NO: 80104 - DNA, 75 bp, synthetic construct
  source 1..75: mol_type = other DNA
cttactgagcgatgatgacatacaggaatgcatgcctgtcccggtggctctgactgatacgccagagccgaccag

SEQ ID NO: 80105 - DNA, 75 bp, synthetic construct
  source 1..75: mol_type = other DNA
tgattgccgcgcgtgaagtcggtctacaactgctctccacgttagatccggtggaaattaaatccaccacgacgc

SEQ ID NO: 80106 - DNA, 75 bp, synthetic construct
  source 1..75: mol_type = other DNA
agaacgccctgcgtgatgcctatgacaatgacacggtgtatgcgtttaaggtgcagtttccgtccggtaagggct

SEQ ID NO: 80107 - DNA, 75 bp, synthetic construct
  source 1..75: mol_type = other DNA
ttgctgtggatattcgtaagtcatcccctacgtttggtaaatgggttggtgtgaatttatcttctgagaatatgc

SEQ ID NO: 80108 - DNA, 75 bp, synthetic construct
  source 1..75: mol_type = other DNA
ataatcttggtactgggcgaggttatagtgtgttagaagtcgttagatgttttgaggctattacaggaaaaagta

SEQ ID NO: 80109 - DNA, 75 bp, synthetic construct
  source 1..75: mol_type = other DNA
ggagccctgcacgacggcagtcagtagccctcagagcaatggaatggcagaaaggttcgtgaaaacgatgaaaga

SEQ ID NO: 80110 - DNA, 75 bp, synthetic construct
  source 1..75: mol_type = other DNA
cgctgtctgaaattgaacgcaccatgggtgacgtttatggctcgtcagccggacatcttgaattccagtacaccg

SEQ ID NO: 80111 - DNA, 75 bp, synthetic construct
  source 1..75: mol_type = other DNA
tgcaacgacagaccgaactatgaaattcaggcgttattcactgccccgcctgtgccactgacaccagaaggattg

SEQ ID NO: 80112 - DNA, 75 bp, synthetic construct
  source 1..75: mol_type = other DNA
gccagaagaaatctgcgatgatgaagctgggtgtcgagaacgatatcgccctgctgaattatctctcttctgtga

SEQ ID NO: 80113 - DNA, 75 bp, synthetic construct
  source 1..75: mol_type = other DNA
aacaagcggattttgagcgtttggcggcgttctacccataccgtgatgagcatgggttacctgtgcttgaagaaa

SEQ ID NO: 80114 - DNA, 75 bp, synthetic construct
  source 1..75: mol_type = other DNA
aacaaactctttcaccaatatttaatcgaaggtgtgcctgttgaatactcggtaatggagcaagaacaatgggtg

SEQ ID NO: 80115 - DNA, 75 bp, synthetic construct
  source 1..75: mol_type = other DNA
tccgagaatcttgatgcgcgactggaaccgacacgcgttcccattgagctggagcaactggttatctcgttcaat

SEQ ID NO: 80116 - DNA, 75 bp, synthetic construct
  source 1..75: mol_type = other DNA
cgggaccgatggataccgggtccgaaatgaagatggaaacatacaggattatcgcctcctctggtcaggcgatat

SEQ ID NO: 80117 - DNA, 75 bp, synthetic construct
  source 1..75: mol_type = other DNA
ccggaaggtctggtaacgggtaaaaagccatcgttattaccagccgcggtgggatccacaaagatggaccaacgg

SEQ ID NO: 80118 - DNA, 75 bp, synthetic construct
  source 1..75: mol_type = other DNA
gcgcgtcgtgatgcgaacagggaacgtcaggatatcgtcaccctggtgaaacggcagctgacgcgtgaaatctcg

SEQ ID NO: 80119 - DNA, 75 bp, synthetic construct
  source 1..75: mol_type = other DNA
ttctcgccgccgtgctggccgggacgaccgccggtgccttccttggcgagcattggggtgttgccgcgctcgcgc

SEQ ID NO: 80120 - DNA, 75 bp, synthetic construct
  source 1..75: mol_type = other DNA
gattgtggatcgcgttactgatggtgggcgtaactgcctggtgtttggttgggaaagctaccgtgcgcatatcag

SEQ ID NO: 80121 - DNA, 75 bp, synthetic construct
  source 1..75: mol_type = other DNA
ccaaagtcagttgagtcatttgctcagcaagaagctgacaaattcaaagaggcgctgcttgagacgctaaagacc

SEQ ID NO: 80122 - DNA, 75 bp, synthetic construct
  source 1..75: mol_type = other DNA
atgcaacacgaactacagcctgattcactggttgatttgaaattcatcatggccgatactggcttcggtaaaacc

SEQ ID NO: 80123 - DNA, 75 bp, synthetic construct
  source 1..75: mol_type = other DNA
ggtcagcatcggtatcagcgggcatttatccagcgattaaaaaatggtcgctggcatgtcatgcagcgtgtggcc

SEQ ID NO: 80124 - DNA, 75 bp, synthetic construct
  source 1..75: mol_type = other DNA
ccagactgaaacgggccacggtcagaaatccgaatgccagaattatcgttaaacgcggtgatctccctgtgatta

SEQ ID NO: 80125 - DNA, 75 bp, synthetic construct
  source 1..75: mol_type = other DNA
ggttttgctgtggctgcgggataaccagcctgatgccatcaataacccgacgttacgggaaaagctattcacctt

SEQ ID NO: 80126 - DNA, 75 bp, synthetic construct
  source 1..75: mol_type = other DNA
ctggtctctgccggtaatgccgtccgctatccgcaacgcgaactgctgggattcagtgaagccgacagacagaaa

SEQ ID NO: 80127 - DNA, 75 bp, synthetic construct
  source 1..75: mol_type = other DNA
aatgttgatgagaacaactactggctgcgccgtgaagcagcgggtgatatccggcgcgtgaataaaaaggtgaat

SEQ ID NO: 80128 - DNA, 75 bp, synthetic construct
  source 1..75: mol_type = other DNA
gttccgttcattaaaacaaccttctctcacatcgctctgttacataatgtcatacagaatctcagtctgcaaaag

SEQ ID NO: 80129 - DNA, 75 bp, synthetic construct
  source 1..75: mol_type = other DNA
gggatagagaaagcaaggaaagacggcaaatataaagggcgtaaacctaatcaagccagacatgatgcaattatc

SEQ ID NO: 80130 - DNA, 75 bp, synthetic construct
  source 1..75: mol_type = other DNA
tctgctgcgcccggaagacttacgtgttgaagagattaacgacgacaaccacgctgaagggctgattggttacgt

SEQ ID NO: 80131 - DNA, 75 bp, synthetic construct
  source 1..75: mol_type = other DNA
cttccctggcttttgatctcagtggtaaaggagtcactaacgatgaaattatcaaagcggtagacaaatcacata

SEQ ID NO: 80132 - DNA, 75 bp, synthetic construct
  source 1..75: mol_type = other DNA
gtggaggaattggtgcgagtattcgacaaagtgaaaacagtaataatcagccggaaattaacggttctggtagta

SEQ ID NO: 80133 - DNA, 75 bp, synthetic construct
  source 1..75: mol_type = other DNA
tgaatataacaaaagtagttaaaggctgtctggtattaattttgatggtgatttcgggttgctcagcagctaatt

SEQ ID NO: 80134 - DNA, 75 bp, synthetic construct
  source 1..75: mol_type = other DNA
aacgtttcctgggatgcgctgaacacagcatacagtgaacacccggagtggttttcagggcttgtctccggggat

SEQ ID NO: 80135 - DNA, 75 bp, synthetic construct
  source 1..75: mol_type = other DNA
ccaattataaaaatacagttctggctgatgtgctcccggttacgatgttagatggtgacgatcgtgtcgaaaaac

SEQ ID NO: 80136 - DNA, 75 bp, synthetic construct
  source 1..75: mol_type = other DNA
tctggtggcgtttggctaatgaaatgtatatatccgggaataaaaaacaacgaaaatgtgcgattaagataaaaa

SEQ ID NO: 80137 - DNA, 75 bp, synthetic construct
  source 1..75: mol_type = other DNA
tttgggaggcccgcagtagtcatgggcgaaatcctaaattcgaatcgcctgaggcgctgtgggctgcttgttgtg

SEQ ID NO: 80138 - DNA, 75 bp, synthetic construct
  source 1..75: mol_type = other DNA
gaataataatctggccttaatgttcgatggttcacaggaaggtttaacagactttacaaggtcactgactaattt

SEQ ID NO: 80139 - DNA, 75 bp, synthetic construct
  source 1..75: mol_type = other DNA
gaaaatacactggcgataaagaaggaaaaagacacgctattgtcaacggtgttcttatggttcatcgcggatggg

SEQ ID NO: 80140 - DNA, 75 bp, synthetic construct
  source 1..75: mol_type = other DNA
tctgtacctgggaactgacaggaacgccgtttgattgtgaatctgacgagacactacagttcggtacaaaccagt

SEQ ID NO: 80141 - DNA, 75 bp, synthetic construct
  source 1..75: mol_type = other DNA
atgaaatcactaaccagaaatgaacctctgagatttaacctgatagctgtctggctaagggtaaggggtaatccg

SEQ ID NO: 80142 - DNA, 75 bp, synthetic construct
  source 1..75: mol_type = other DNA
tgcggttccgtgtcagggagcgcagtcgccacaaatccgcactggtcatgcagaagtacagccgtcagcaggcac

SEQ ID NO: 80143 - DNA, 75 bp, synthetic construct
  source 1..75: mol_type = other DNA
gcaatggtttctcgacaccaccgaagggactccgtggatccagtctgtgctcggtaagcagaagccggaaaccta

SEQ ID NO: 80144 - DNA, 75 bp, synthetic construct
  source 1..75: mol_type = other DNA
ttaaaggtgttgaggatgccagccgcgtcttggcactccaaaatcaaaatatgtcagcgccgataacgccggagg

SEQ ID NO: 80145 - DNA, 75 bp, synthetic construct
  source 1..75: mol_type = other DNA
tcctctctttcaatactacggtggataccacgacccgacgtgtcaggttttccactgaaatcgacactctctatg

SEQ ID NO: 80146 - DNA, 75 bp, synthetic construct
  source 1..75: mol_type = other DNA
tcgattgtcggtccacgtccgcacgcggtggcgcataacgaacagtatcgccagctcattgaaggctacatgctg

SEQ ID NO: 80147 - DNA, 75 bp, synthetic construct
  source 1..75: mol_type = other DNA
tggtacatagaagaaggtgaagaagagcaacttcacattctagccaaagtcctcattaggcagtcaatcgattac

SEQ ID NO: 80148 - DNA, 75 bp, synthetic construct
  source 1..75: mol_type = other DNA
gaccgtgatttaagtgcgctggaagacgctgcggaagatcaaccgcgtgttgtaagagctgcgcaaccttccaga

SEQ ID NO: 80149 - DNA, 75 bp, synthetic construct
  source 1..75: mol_type = other DNA
tggcaaagcgaacacctgttactgccggattcgtgctacagacatgcaagcaggcgcttaagttctgccggaggc

SEQ ID NO: 80150 - DNA, 75 bp, synthetic construct
  source 1..75: mol_type = other DNA
gcctggctgattgagaaagctggaatcgtgatccacaaatgcccacgcaatccgtttaccggaaaccgcattttt

SEQ ID NO: 80151 - DNA, 75 bp, synthetic construct
  source 1..75: mol_type = other DNA
gtgatcccggaaacgtcccacggtgcgagctgcatcttaaatcaggtgtggtaaaactgtttgaccctctcactc

SEQ ID NO: 80152 - DNA, 75 bp, synthetic construct
  source 1..75: mol_type = other DNA
ccgacgtattcatctttgagccaaaagtgttcggggacgatcgtggattcttcttcgaaagctttaaccaccagc

SEQ ID NO: 80153 - DNA, 75 bp, synthetic construct
  source 1..75: mol_type = other DNA
atgaagcaacaacgaaatgcacgcatcaataacaacaccgaacgccacgttgcacgccagcacttccgtaaaaat

SEQ ID NO: 80154 - DNA, 75 bp, synthetic construct
  source 1..75: mol_type = other DNA
tatccgtcgtgaacgcctgcccaaagaactggcatatgcgctgaaacaacaactgaggattgcgataaaacgatg

SEQ ID NO: 80155 - DNA, 75 bp, synthetic construct
  source 1..75: mol_type = other DNA
catgcctggctgattgagaaagctggaatcgtggtccacaaatgcccacgcaatccgtttaccggaaaccgcatt

SEQ ID NO: 80156 - DNA, 75 bp, synthetic construct
  source 1..75: mol_type = other DNA
atgtcaggctcccttattccgaacgcccaccgcgtccgtcccgcacattccagcaacgcatctggaggtaacgtg

SEQ ID NO: 80157 - DNA, 75 bp, synthetic construct
  source 1..75: mol_type = other DNA
gtgcgggtattacttcgacctgttccggtaccggaactcgggctggtggtccttaagcctggtcgtgaatccatg

SEQ ID NO: 80158 - DNA, 75 bp, synthetic construct
  source 1..75: mol_type = other DNA
aagacaaaacattgctgccgtttttcagtaacgcacgggtaattcgtgctgctggtggtgctggtgcattgtctg

SEQ ID NO: 80159 - DNA, 75 bp, synthetic construct
  source 1..75: mol_type = other DNA
ggggattgcccctgctggcttcgtcgtcaatatgaatgcgtccggctatgaaattacccgtacccgcgatgccgt

SEQ ID NO: 80160 - DNA, 75 bp, synthetic construct
  source 1..75: mol_type = other DNA
aaaacgccactgaaacgcaatggcttaaagattctccctcacagccattgcaacagtcactgaaagaccttgagc

SEQ ID NO: 80161 - DNA, 75 bp, synthetic construct
  source 1..75: mol_type = other DNA
aaaggtctgatccacaaaaacaaagctgcacgtcataaggctaacctgactgcacagatcaacaagctggcttaa

SEQ ID NO: 80162 - DNA, 75 bp, synthetic construct
  source 1..75: mol_type = other DNA
gcgcacaaaaaatattgcgctgccacttcacgtccaccagcaacagcccccactccaggaaaagacgttagtaag

SEQ ID NO: 80163 - DNA, 75 bp, synthetic construct
  source 1..75: mol_type = other DNA
caggcgtgcaaacaggcgcttaaattctgtcgtaaacgccgctatgccgtcagtaacgctctggatgatctcaac

SEQ ID NO: 80164 - DNA, 75 bp, synthetic construct
  source 1..75: mol_type = other DNA
tggagtgaaacattcccatagaggctcaaaaatgcgtacaacgcatctagtgcctctttcaacgcaagctcttgc

SEQ ID NO: 80165 - DNA, 75 bp, synthetic construct
  source 1..75: mol_type = other DNA
agcagtacggggtcggaccggtatgcagtgaactacatattgccccgtcaacgtattaccactgtcagcaacagc

SEQ ID NO: 80166 - DNA, 75 bp, synthetic construct
  source 1..75: mol_type = other DNA
aataccgagccggtggtgcgtctgaacgtggagtccagagcggattttagtctgatggagactaaaacaaaagaa

SEQ ID NO: 80167 - DNA, 75 bp, synthetic construct
  source 1..75: mol_type = other DNA
agcaactgctggctgaagcgcgttccttaaaccaggccaacgatatcgccgctgattttggtagcaaaagcttaa

SEQ ID NO: 80168 - DNA, 75 bp, synthetic construct
  source 1..75: mol_type = other DNA
tgccatgcagtcgctgattctgccgccaccggcacgccaggcgctggccctggcggcactgacttaccgttatgg

SEQ ID NO: 80169 - DNA, 75 bp, synthetic construct
  source 1..75: mol_type = other DNA
gattttctggatgcgaaccgggagaagggtatcagtccgtttgaatatgcaaagattaacaatccattaaaatag

SEQ ID NO: 80170 - DNA, 75 bp, synthetic construct
  source 1..75: mol_type = other DNA
tgaaacgaagctgcatgacggttccgggcaacgtaattatggttgcagtcgtgggccagggcgtctactggatgg

SEQ ID NO: 80171 - DNA, 75 bp, synthetic construct
  source 1..75: mol_type = other DNA
gaagtggaactggccacactcacgtgggtggactggtataacaatcgacgattgctggaaaggctgggccatact

SEQ ID NO: 80172 - DNA, 75 bp, synthetic construct
  source 1..75: mol_type = other DNA
ccgtgcgcagcgcgatgactggctgaagaaagagatacagcgcgtatacgatgaaaatcaccaggtatacggtgt

SEQ ID NO: 80173 - DNA, 75 bp, synthetic construct
  source 1..75: mol_type = other DNA
gtatatcactgccgggcaaccgaggatggcgcaagtagtccgctccgttctaattgatgtattcaaggaggcaca

SEQ ID NO: 80174 - DNA, 75 bp, synthetic construct
  source 1..75: mol_type = other DNA
tccggtttcttcgccgtcaggcgcattgtgtttctggcgactgattcaggctattaccgggcgcaagcgggtgac

SEQ ID NO: 80175 - DNA, 75 bp, synthetic construct
  source 1..75: mol_type = other DNA
actgcgcgacgtccagcgtctggcagaagccaacgactttcctcccgtcgatgaaaccaaacgcggtcgctatca

SEQ ID NO: 80176 - DNA, 75 bp, synthetic construct
  source 1..75: mol_type = other DNA
tcacgtggaggcgacgattcgggatgtgccatgtctgaaagacctttttccatggctggggcgtaaacatcgtga

SEQ ID NO: 80177 - DNA, 75 bp, synthetic construct
  source 1..75: mol_type = other DNA
atgttaaggacgacacgatgggtcgctgctattatttttttgtattcttttccgggttatgctgaagaaactttt

SEQ ID NO: 80178 - DNA, 75 bp, synthetic construct
  source 1..75: mol_type = other DNA
ttaatctgcacagcttcctggtggcggtggtgggagctattctcgttctgggcgtattccgcctcctgcgaagag

SEQ ID NO: 80179 - DNA, 75 bp, synthetic construct
  source 1..75: mol_type = other DNA
cgcatggcttatattcacaaggcagaacacttggaagcccgcaaggcgatgatgcagtggtggtcggactatctg

SEQ ID NO: 80180 - DNA, 75 bp, synthetic construct
  source 1..75: mol_type = other DNA
ctggcgttaggggtttatccaatggtttcattggcagaggctcgtaagaggcgcgatgccgcaaagaaactggta

SEQ ID NO: 80181 - DNA, 75 bp, synthetic construct
  source 1..75: mol_type = other DNA
accgccgacattctgacgccacgacgccgggaggattacggtaaggacctgtggagtacttatcagaccatccag

SEQ ID NO: 80182 - DNA, 75 bp, synthetic construct
  source 1..75: mol_type = other DNA
tgaatgttgaagagtgcgacagtctctcctttctgccgtatctgtttggcaacgattttctgtatgccgaggcgt

SEQ ID NO: 80183 - DNA, 75 bp, synthetic construct
  source 1..75: mol_type = other DNA
aagtacacctctgggatttgatgaagtactctctatgattcaggattccagtggtattcccattgtaaaacatac

SEQ ID NO: 80184 - DNA, 75 bp, synthetic construct
  source 1..75: mol_type = other DNA
gctgttttcagctatctggcggatgatctgcgcgagcttcagcagctcatccagcagcaaaacaaactccattaa

SEQ ID NO: 80185 - DNA, 75 bp, synthetic construct
  source 1..75: mol_type = other DNA
aagcaatgggaaaagccacatccatagaacttgctgcgcgacttgatatcagtcgtgaagaagtgttgaacgaac

SEQ ID NO: 80186 - DNA, 75 bp, synthetic construct
  source 1..75: mol_type = other DNA
aagcactgaaaagagcctcttcacaggtagtggcatcgcgccttggaatcagccgcgaagatgctgtcaacgaac

SEQ ID NO: 80187 - DNA, 75 bp, synthetic construct
  source 1..75: mol_type = other DNA
gcaaatcttcaggaaaaacaggccgctattaccgcgatgtttaaaccgcatcacccggtatgtgtcgtctccgcc

SEQ ID NO: 80188 - DNA, 75 bp, synthetic construct
  source 1..75: mol_type = other DNA
atggccggaggtaaacgaccggcccgtgtttaccgggtggtgaacggtattgctgtactgccggtgaccggcacg

SEQ ID NO: 80189 - DNA, 75 bp, synthetic construct
  source 1..75: mol_type = other DNA
cccttgaacaaccgctgtcggcgcttcccgatacgcttcgccagctaatttttgaacgtattcagaacctcaccc

SEQ ID NO: 80190 - DNA, 75 bp, synthetic construct
  source 1..75: mol_type = other DNA
tccgcctctgttttcagctatctggcggatgatctgcgcgagctgcaacaactcttccagcagcaaaacaaactc

SEQ ID NO: 80191 - DNA, 75 bp, synthetic construct
  source 1..75: mol_type = other DNA
aagggctgtgattcgaaccgtgcgggaagcggtggtgactgttgctcgtgctgtatgggactggattttcttctg

SEQ ID NO: 80192 - DNA, 75 bp, synthetic construct
  source 1..75: mol_type = other DNA
ctatcgcggagcgtcgtcacatccagactgaaatcgaccgcagactcacccgcgctgcacacatcgcctttatca

SEQ ID NO: 80193 - DNA, 75 bp, synthetic construct
  source 1..75: mol_type = other DNA
agctgtgggtggctgacttcacgtatggtgtgcccggagttcagggcgggcatggatgcttaaatgaaccgcgag

SEQ ID NO: 80194 - DNA, 75 bp, synthetic construct
  source 1..75: mol_type = other DNA
caccggttttaccgtgaccattgaagcggctgaaggtgtgactaccggtgtttctgccgctgaccgtattacgac

SEQ ID NO: 80195 - DNA, 75 bp, synthetic construct
  source 1..75: mol_type = other DNA
gtgggagcgagtctgcgccgcgctgcgtgagctgaacaagcaccaggatattgtccgtcagattgtcgattcctc

SEQ ID NO: 80196 - DNA, 75 bp, synthetic construct
  source 1..75: mol_type = other DNA
gcattaaggaagcagatggtagtgttcgttcctttttggttccctactcttccgtgcccaatatgctgcaacctg

SEQ ID NO: 80197 - DNA, 75 bp, synthetic construct
  source 1..75: mol_type = other DNA
aggggtgggtgaaagcgatcaaagagacaaagaatacgccgccctctatcgtcacatccttcccgaagtggattt

SEQ ID NO: 80198 - DNA, 75 bp, synthetic construct
  source 1..75: mol_type = other DNA
gccgccgcgctccatcactttccatatctggacggcgtacagtccgttcaccacctgggtacagattgtctatga

SEQ ID NO: 80199 - DNA, 75 bp, synthetic construct
  source 1..75: mol_type = other DNA
ccgtgctcagcgcgatgactggctgaagagagagatacagcgcgtatacgatgaaaatcatcaggtgtacggtgt

SEQ ID NO: 80200 - DNA, 75 bp, synthetic construct
  source 1..75: mol_type = other DNA
aatcctacctgaccacctacggctgggttgccctgggcgcctggtaccagacctttgccaccgccaaccagcgac

SEQ ID NO: 80201 - DNA, 75 bp, synthetic construct
  source 1..75: mol_type = other DNA
gttactgggcgtggtcgggtattttatcgagcataaaagccgtaacactttattgttccaaccgacagattcatc

SEQ ID NO: 80202 - DNA, 75 bp, synthetic construct
  source 1..75: mol_type = other DNA
gggcagcaacacatctcggcgtagaacatgacaggggaagtcgtgctgcctatggatatatttacctgatcgatg

SEQ ID NO: 80203 - DNA, 75 bp, synthetic construct
  source 1..75: mol_type = other DNA
ccgtgcgcagcgcgatgactggctgaagaaagagataccgcgcgtatacgatgaaaatcacaaggtatacggtgt

SEQ ID NO: 80204 - DNA, 75 bp, synthetic construct
  source 1..75: mol_type = other DNA
atcacctggatgggtgtgaaagattccgaccatacccggaaagacggaacgcgcattgaaacggaaggcgacgga

SEQ ID NO: 80205 - DNA, 75 bp, synthetic construct
  source 1..75: mol_type = other DNA
gcggagattgattgtaagccagtccgggattttgttgccaaggctaatccggctaccgtgcttgcactgctggat

SEQ ID NO: 80206 - DNA, 75 bp, synthetic construct
  source 1..75: mol_type = other DNA
cggctggggtggtaaacgctattgctgcatatcatccctcattaatgctaatgtatgcgtacattagcattaatg

SEQ ID NO: 80207 - DNA, 75 bp, synthetic construct
  source 1..75: mol_type = other DNA
ttgtttctggcggcagtaacttaagaagatctcctgccacaaacattattcagaagaaggatacaaataaaaatg

SEQ ID NO: 80208 - DNA, 75 bp, synthetic construct
  source 1..75: mol_type = other DNA
gtatatcaggaagcactgggttgcgttgtgcaacttctgtgatgacggtctggcggaggcggacaataacacagc

SEQ ID NO: 80209 - DNA, 75 bp, synthetic construct
  source 1..75: mol_type = other DNA
gctatcctaaatactaccaaacggccgattatgcgttgaggctttcagtgatggctgatatagcaacaatgagaa

SEQ ID NO: 80210 - DNA, 75 bp, synthetic construct
  source 1..75: mol_type = other DNA
tttggcgatgatgcgacaacctttggcctgaaatgggagaagggcaagccggagacggtgtattacctgtgtgaa

SEQ ID NO: 80211 - DNA, 75 bp, synthetic construct
  source 1..75: mol_type = other DNA
gccggaaaaccgttgccacaggtgaccgcgtaaaccgtcagttcgtggcagaacgtcctgaccagctgtgggtgg

SEQ ID NO: 80212 - DNA, 75 bp, synthetic construct
  source 1..75: mol_type = other DNA
ctggaccagagcaacgggcggtggatctgtgaaaacacgggcatgtggacccgtgacggtctgacgtttttcagc

SEQ ID NO: 80213 - DNA, 75 bp, synthetic construct
  source 1..75: mol_type = other DNA
gcgctggagcaggcgttgtgggcccgtcgtccgtccggcaccatccatcacagcgataaaggctctcagtatgtg

SEQ ID NO: 80214 - DNA, 75 bp, synthetic construct
  source 1..75: mol_type = other DNA
cgtatactttctgttactactgctgttttgtgcaggattctctttatctatttatttaccatttattccgtttat

SEQ ID NO: 80215 - DNA, 75 bp, synthetic construct
  source 1..75: mol_type = other DNA
gctggggcttacgtctacacgctggctaaagggaaggggaatgacgagaaaaactggtatctgaccagtaaatgg

SEQ ID NO: 80216 - DNA, 75 bp, synthetic construct
  source 1..75: mol_type = other DNA
atgggccagcaacagcagggatagatgatttgggtgaaattttagctaaaatgaaacagagaacatcgagaggaa

SEQ ID NO: 80217 - DNA, 75 bp, synthetic construct
  source 1..75: mol_type = other DNA
tcagcagcagatatcggaaaaagcattagcagataatgtatttattgcctcaggttctggaaaaccggatacgat

SEQ ID NO: 80218 - DNA, 75 bp, synthetic construct
  source 1..75: mol_type = other DNA
ctgttgggaagctgagagttgagcttgaggagacaaaatcaaaactcaacgagcagcgtgagtattacgaaggtg

SEQ ID NO: 80219 - DNA, 75 bp, synthetic construct
  source 1..75: mol_type = other DNA
tgtgggtggctgattttacttacggtgtgcccggagttcagggcgggcatggatgcttaaatgaaccgcgagtct

SEQ ID NO: 80220 - DNA, 75 bp, synthetic construct
  source 1..75: mol_type = other DNA
ttgttcccgctaacgaaccgcagttcaccctcagtgccacgctggtacccgacgaacagcgtatcaacttctggc

SEQ ID NO: 80221 - DNA, 75 bp, synthetic construct
  source 1..75: mol_type = other DNA
atctggacggcgtacagtccgttcaccacctgggtacagatagtctatgactggctggatgcactgaaagatccc

SEQ ID NO: 80222 - DNA, 75 bp, synthetic construct
  source 1..75: mol_type = other DNA
cgcgctgtacgagaggcgttttataaccgaccagttgaacagcgtgatgcatggcttttgtggatggggttgtga

SEQ ID NO: 80223 - DNA, 75 bp, synthetic construct
  source 1..75: mol_type = other DNA
actatgatgcgcaggttcccctgcgggtggtttacctgaccgcagggatcgactctcagaaaaaccgttatgaga

SEQ ID NO: 80224 - DNA, 75 bp, synthetic construct
  source 1..75: mol_type = other DNA
aacaccacctcttcggcctgtgcaccggagactggcctgcaacaactggttgccaccatagtccctgatgaacag

SEQ ID NO: 80225 - DNA, 75 bp, synthetic construct
  source 1..75: mol_type = other DNA
ggtaaaaaggtccgtactaccgtcagccggaaagccgttgccgcatgcgaccgcgtaaaccgtcagttcgtggca

SEQ ID NO: 80226 - DNA, 75 bp, synthetic construct
  source 1..75: mol_type = other DNA
aaaccggagcatggaaagacgctgttgactgggtgctcaaagaggcttgtcaggttgtaaacactggcatcaaag

SEQ ID NO: 80227 - DNA, 75 bp, synthetic construct
  source 1..75: mol_type = other DNA
gaaggcggagttcgaccgcctctggaaaaaatgatgccactgctggataagctgcgtgagcagtacggggtcgga

SEQ ID NO: 80228 - DNA, 75 bp, synthetic construct
  source 1..75: mol_type = other DNA
gaatatataattgcaatgagaaaaaactgttggaaagaatttgaaccatttgaaaaagaattcacaacaagaatg

SEQ ID NO: 80229 - DNA, 75 bp, synthetic construct
  source 1..75: mol_type = other DNA
tatcagagcatcgtcgcgtgactctgctggctgaaggttgtcgttgctcagggcttgctccataccgcctcgtac

SEQ ID NO: 80230 - DNA, 75 bp, synthetic construct
  source 1..75: mol_type = other DNA
cgattgcgtttaaatttagccggtaaagttctggatgttctggagtgggtaagtaataaaaatgaaaaaacggaa

SEQ ID NO: 80231 - DNA, 75 bp, synthetic construct
  source 1..75: mol_type = other DNA
ccctccttcgccattgagtctggcatggcgcaaatttggcagcggcaaagcggtagaagatattgtgaccttgtt

SEQ ID NO: 80232 - DNA, 75 bp, synthetic construct
  source 1..75: mol_type = other DNA
ggcgcgaagtggatgcacggcatgttgtcagacgcgttttaccagtatctgcaacaaatgcccgtcggcagcagc

SEQ ID NO: 80233 - DNA, 75 bp, synthetic construct
  source 1..75: mol_type = other DNA
tatctgccggacagcacgtttaaccgctacggcaaggtgacggcgctgtttgctgaagaaatcgcggaaggtccg

SEQ ID NO: 80234 - DNA, 75 bp, synthetic construct
  source 1..75: mol_type = other DNA
ggcgataatttaccagcagaaccgaaagctgcattggtaacgaaaaatgatggtaaagcctttcctcagccagcc

SEQ ID NO: 80235 - DNA, 75 bp, synthetic construct
  source 1..75: mol_type = other DNA
ccgacagcattaacgtgcaggcgatgaacatggggcgcattgtcgttgacattgatggtgttaatctcgctgaac

SEQ ID NO: 80236 - DNA, 75 bp, synthetic construct
  source 1..75: mol_type = other DNA
gtatctggctggttgccggtatcaccgacatgcgaaatggctttaacggcctggcatcaaaagttcagaacgtcc

SEQ ID NO: 80237 - DNA, 75 bp, synthetic construct
  source 1..75: mol_type = other DNA
aaacgggcgaccttgaaactaactggatcagttggctgacgctgcgtgccgggaatgcccgcacatggtggcgac

SEQ ID NO: 80238 - DNA, 75 bp, synthetic construct
  source 1..75: mol_type = other DNA
ttgttgggttggcaggatgctccagaaagctgagggcgtagtggagggcatgctgatggtgttggatctccgatt

SEQ ID NO: 80239 - DNA, 75 bp, synthetic construct
  source 1..75: mol_type = other DNA
aagctgcatccgtagcggaaaccgatggtaaagcctttcctcagccagcaggtgttgcgttaccagtacaggaaa

SEQ ID NO: 80240 - DNA, 75 bp, synthetic construct
  source 1..75: mol_type = other DNA
ccgcaaaacagcgcattgcagagctggagggtaatttcacggcgctggcagcggagaatgcgggaataaagtctg

SEQ ID NO: 80241 - DNA, 75 bp, synthetic construct
  source 1..75: mol_type = other DNA
gacatggttgccaagaatccggcgcttcttaaatgggttcaggcagcaccagaagacgaagagaaaaagtctgca

SEQ ID NO: 80242 - DNA, 75 bp, synthetic construct
  source 1..75: mol_type = other DNA
acgtagtatgcggcatctggtcattctggttgaggagttgcgcgaacgtggcgttaattttcgcagcctgacgga

SEQ ID NO: 80243 - DNA, 75 bp, synthetic construct
  source 1..75: mol_type = other DNA
attgccaatgttgataatcaattgcatgaagtcatgaatatcgacaagaaatatcgctctatcggtattcttggc

SEQ ID NO: 80244 - DNA, 75 bp, synthetic construct
  source 1..75: mol_type = other DNA
ggccgtttcttttttcacgtcatgggggctctggctgaaatggaacgtgaactgatagttgaacgtaccagagca

SEQ ID NO: 80245 - DNA, 75 bp, synthetic construct
  source 1..75: mol_type = other DNA
actggttacccttattaatggttgatggtcacggttttagccctacttccggctcgctgatttatgccggtttta

SEQ ID NO: 80246 - DNA, 75 bp, synthetic construct
  source 1..75: mol_type = other DNA
aggcggtcaggagactggaaaaacagatgtatcatctacaggctcgactaagccggaaagtggaaactcctctgg

SEQ ID NO: 80247 - DNA, 75 bp, synthetic construct
  source 1..75: mol_type = other DNA
ccacgtaacgatgatggtaccgtcagcctggtcagtgaaggccagtactcaacctttactgtcgcgctcaaccgg

SEQ ID NO: 80248 - DNA, 75 bp, synthetic construct
  source 1..75: mol_type = other DNA
tggcgtggttgttcatgcaataatggttggtgatgttgtcgttggtggcagctattcaactggcaagaatgttac

SEQ ID NO: 80249 - DNA, 75 bp, synthetic construct
  source 1..75: mol_type = other DNA
accaggactgaaaaagctgctcaggacattatcggcaggtgacacgctggtggtctggaaactggaccgactggg

SEQ ID NO: 80250 - DNA, 75 bp, synthetic construct
  source 1..75: mol_type = other DNA
caacaaatgaccagaacaccgatctacaacgtaatgcgttgaactgtgcaggatgtgagctgatttttgaagaca

SEQ ID NO: 80251 - DNA, 75 bp, synthetic construct
  source 1..75: mol_type = other DNA
tatccggcaggttcttgagcgctggggggcatgggcggcaaataaccatgaggatgttacatggtcgcccattgc

SEQ ID NO: 80252 - DNA, 75 bp, synthetic construct
  source 1..75: mol_type = other DNA
taacgccgcgccggttgctgaaatccgggctgaatctcagctttttgtgactcctgccccggtctgtgatcgcct

SEQ ID NO: 80253 - DNA, 75 bp, synthetic construct
  source 1..75: mol_type = other DNA
gcagagtaggtggacgccgtcctaagttgaccagcgaacagtgggcacagattgggcgtttactcgaggccggag

SEQ ID NO: 80254 - DNA, 75 bp, synthetic construct
  source 1..75: mol_type = other DNA
tccgcaatgctgtgacgatgacgcgatgatcatttgtgaatgtatggctcgcctgaaaaaaaacaacagcgattt

SEQ ID NO: 80255 - DNA, 75 bp, synthetic construct
  source 1..75: mol_type = other DNA
cggaaatttccggtgccggtacgatgctggcggaatatgcaccaaaaggtaagcgcggaattatctcctcatttg

SEQ ID NO: 80256 - DNA, 75 bp, synthetic construct
  source 1..75: mol_type = other DNA
acggcttaggcaccagcctgatgatggaaatgagcattaaaagcattttgaaggatttgtccgtcagcgctgatg

SEQ ID NO: 80257 - DNA, 75 bp, synthetic construct
  source 1..75: mol_type = other DNA
gaactggaaaagccacatcaccaactggtcagcacatacagtgagctgaaccggcagtatgccagcctgctggaa

SEQ ID NO: 80258 - DNA, 75 bp, synthetic construct
  source 1..75: mol_type = other DNA
ctgtttgatgacgtggttaagttgtttgagtttgatacattcgaaagccctgcaagggagacaaccagtgaacaa

SEQ ID NO: 80259 - DNA, 75 bp, synthetic construct
  source 1..75: mol_type = other DNA
taccctgcgacgggattttcgcgaacggctgatgtacctcgaccttgagtatcgacgggggcaatgccgcctgcg

SEQ ID NO: 80260 - DNA, 75 bp, synthetic construct
  source 1..75: mol_type = other DNA
ttacggcattggtatatcgacgatttatcgttaccaccccgcaggagaatcaatcggaacaatagagaagagtca

SEQ ID NO: 80261 - DNA, 75 bp, synthetic construct
  source 1..75: mol_type = other DNA
cacgccgtacgggcatcaggtgattatttctgaattgatgtgggtgtggttgccggggatgctactgatgggaat

SEQ ID NO: 80262 - DNA, 75 bp, synthetic construct
  source 1..75: mol_type = other DNA
agactgctctgcaggagcagcaaaccgcctttaacgaactggtgaataagctgagccatgaagacagccgccagg

SEQ ID NO: 80263 - DNA, 75 bp, synthetic construct
  source 1..75: mol_type = other DNA
ccattgaaaaaccgctggcattattgcctctcgctattggcgaacaaatccttaagcacatccacaagctggcaa

SEQ ID NO: 80264 - DNA, 75 bp, synthetic construct
  source 1..75: mol_type = other DNA
ttgtatatgcccgcaatggtagccaccagtaagactgagtggggacgggcgttccgcgaccgtctggcggctaat

SEQ ID NO: 80265 - DNA, 75 bp, synthetic construct
  source 1..75: mol_type = other DNA
tccattgccgccggttttaagggattaattccttcaaaagtaaaatctcgcccgcaatgttgtgacgatgacgcg

SEQ ID NO: 80266 - DNA, 75 bp, synthetic construct
  source 1..75: mol_type = other DNA
ttttgaaattcttcctttgcccggtcgtccgcgcctgggatggacaaagccccttcatcgattttatggaagaac

SEQ ID NO: 80267 - DNA, 75 bp, synthetic construct
  source 1..75: mol_type = other DNA
taaactcgccacgctgtcagatggcacagtctttgagcctgtaaacagttttcagaaaaaccagaagaagctggc

SEQ ID NO: 80268 - DNA, 75 bp, synthetic construct
  source 1..75: mol_type = other DNA
caccgaagggccctatgagggcaaacctaacccccatgcctggatgtcgccagataatgctctgatttacgtcga

SEQ ID NO: 80269 - DNA, 75 bp, synthetic construct
  source 1..75: mol_type = other DNA
attacctgggaacgcataagagcttctgtgtgcaggacgttgctgcggtaacaggcgcaacagtaaccagcatca

SEQ ID NO: 80270 - DNA, 75 bp, synthetic construct
  source 1..75: mol_type = other DNA
ccaggaaactacgaacttgatttttatgtaaatcaccagtggcgtgggaaaaaagatatcacgatcccagagtca

SEQ ID NO: 80271 - DNA, 75 bp, synthetic construct
  source 1..75: mol_type = other DNA
acatcctttctgctgttcgctatggctacatgatgaggcgttttgcaatacagatgcgagacatcaaagatccta

SEQ ID NO: 80272 - DNA, 75 bp, synthetic construct
  source 1..75: mol_type = other DNA
ttttgatgtgggcatatcgacgctgtataaaaaatttccggcgacaaatcccgttgtgtcagccaccggcgaacc

SEQ ID NO: 80273 - DNA, 75 bp, synthetic construct
  source 1..75: mol_type = other DNA
ggcaggaatcttggtcattgatggtaaggtctggcgaacggtgtattacagattcgctaccagggaagaacggga

SEQ ID NO: 80274 - DNA, 75 bp, synthetic construct
  source 1..75: mol_type = other DNA
ctacatcgcgctttcgatcgattttcatcttcattacataaatgatttgatgaataaacttattatgaccgcatc

SEQ ID NO: 80275 - DNA, 75 bp, synthetic construct
  source 1..75: mol_type = other DNA
ccgaatccctgaaagccaaaatccaggcttaccagagacatcagcgacgtgccggtaagcgtgtgcatgcaacca

SEQ ID NO: 80276 - DNA, 75 bp, synthetic construct
  source 1..75: mol_type = other DNA
gacctgcgggagcagtggggcccgcaggcccacggggaccggctggtgcagctggtcccaaaggtgatgcaggcc

SEQ ID NO: 80277 - DNA, 75 bp, synthetic construct
  source 1..75: mol_type = other DNA
gaacagaggccgccgtttttgaaggtcagtccggcattgatgccgggctggcggatgaattaatcaatgcgtcgg

SEQ ID NO: 80278 - DNA, 75 bp, synthetic construct
  source 1..75: mol_type = other DNA
atcctcatatgttaaggcatgcttgtggttatgaactggcggagcgtggtgccgatacccgtttaattcaggatt

SEQ ID NO: 80279 - DNA, 75 bp, synthetic construct
  source 1..75: mol_type = other DNA
ccagacagatgatgataaagctgctgcggtggtggcccagcgggtggctgacattatcacccgcaccggtgagcc

SEQ ID NO: 80280 - DNA, 75 bp, synthetic construct
  source 1..75: mol_type = other DNA
tgacaggggcgagcaaggaccggcaggtcccacaggtccgaaaggtgagcgcggtgaacccggacctcaggggcc

SEQ ID NO: 80281 - DNA, 75 bp, synthetic construct
  source 1..75: mol_type = other DNA
ctggaaaggtgctgaccggaccgacgctatatttatttctcgccgcgggagtcggctttctcgccagcaggccta

SEQ ID NO: 80282 - DNA, 75 bp, synthetic construct
  source 1..75: mol_type = other DNA
gtctggcgggcgcactgttactgggatgttcactggtaccggtggcggaagccagcctgagtacggctactctgg

SEQ ID NO: 80283 - DNA, 75 bp, synthetic construct
  source 1..75: mol_type = other DNA
aaaaaaagataaacgggtacaaatcaacgtaaagatatcgccatccgcaaaaagcgctctggacagactgaccag

SEQ ID NO: 80284 - DNA, 75 bp, synthetic construct
  source 1..75: mol_type = other DNA
tccgtttgttccaggaaggtcatctgctacgtaatagcatcgctatttttgcgctaaccacgctgttctatttta

SEQ ID NO: 80285 - DNA, 75 bp, synthetic construct
  source 1..75: mol_type = other DNA
cgacggtggcgaaggaacggtggaagcgatgattgcagccacccagggggctgaacgtcacgcctgggttacagg

SEQ ID NO: 80286 - DNA, 75 bp, synthetic construct
  source 1..75: mol_type = other DNA
ctgctggcagaacgtttccctgacagttcccgtctgcttctggaagactgggagcgttatctcggccttcccgag

SEQ ID NO: 80287 - DNA, 75 bp, synthetic construct
  source 1..75: mol_type = other DNA
tttatctggcctgcggtacgtgacggcaaggtatccattacccgttcgcaactggtaatgctcctcgataagctg

SEQ ID NO: 80288 - DNA, 75 bp, synthetic construct
  source 1..75: mol_type = other DNA
tcagtggagaaaaaacagtactggcagccggagcccgtcatacagtaaaggcacaggccggggaacagtatggac

SEQ ID NO: 80289 - DNA, 75 bp, synthetic construct
  source 1..75: mol_type = other DNA
agtgggagcgagtctgcgccgcgctgcgggagctgaacaagcaccgggatattgttcgacagattactgattctt

SEQ ID NO: 80290 - DNA, 75 bp, synthetic construct
  source 1..75: mol_type = other DNA
caaagtggcgaaactgcgccaccgcgccagccagacgttacgcggcattcatcgtaaaaatacctggcaggcgct

SEQ ID NO: 80291 - DNA, 75 bp, synthetic construct
  source 1..75: mol_type = other DNA
caacaaatgaccagaacacagatttgcaacgtaatgcactgaactgcgcgggatgtgagcggatttttgaggaca

SEQ ID NO: 80292 - DNA, 75 bp, synthetic construct
  source 1..75: mol_type = other DNA
ataatttcgtattggcagtgaaggcgggtctctcagtcctgaaaagaccattgccaatgacccccgttgaatggg

SEQ ID NO: 80293 - DNA, 75 bp, synthetic construct
  source 1..75: mol_type = other DNA
ttagcgtggccgcctggcgttatgcttcgcaggattacaggacattcagcgaccatctttacgaaaatgataaaa

SEQ ID NO: 80294 - DNA, 75 bp, synthetic construct
  source 1..75: mol_type = other DNA
gcgtagtatgcggcatctggtcattctggttgaggaactgcgcgaacgcggcgttaattttcgcagcctgacgga

SEQ ID NO: 80295 - DNA, 75 bp, synthetic construct
  source 1..75: mol_type = other DNA
agcgtcaaagtgataagtgccgtaaatgggaccatacctttgtttgctcgcgtttcggtgacgtcccggagtcct

SEQ ID NO: 80296 - DNA, 75 bp, synthetic construct
  source 1..75: mol_type = other DNA
accggtgattggcattgcgggtagcctgaccgatgatgttggcgttgtacatcagcatggcattgatgcggtctt

SEQ ID NO: 80297 - DNA, 75 bp, synthetic construct
  source 1..75: mol_type = other DNA
gtgctttgacgaattctacgacgcggtcattgccttccagcgcaaacgtcatcaggttgaggtggaaaagtcgtg

SEQ ID NO: 80298 - DNA, 75 bp, synthetic construct
  source 1..75: mol_type = other DNA
gatgtctggtatctgttaccgatcaccgcaaagcttatggtagaaacggaggcctccggctggctacctgcggcg

SEQ ID NO: 80299 - DNA, 75 bp, synthetic construct
  source 1..75: mol_type = other DNA
acgcctgcaggccggacgctggtttgcgcctgcgtatgcctttcatctgctgtgtgttggttttctggtcggtat

SEQ ID NO: 80300 - DNA, 75 bp, synthetic construct
  source 1..75: mol_type = other DNA
tacaaccagtcaggccagcccttaatttctccgcgctgcagcgcgatgttatccgtatggtggcgtttgtggcga

SEQ ID NO: 80301 - DNA, 75 bp, synthetic construct
  source 1..75: mol_type = other DNA
tgccgccaggataccgccgacgcggtgcgcgagcatcaggccgacatggggattgcctttgacggcgacttcgat

SEQ ID NO: 80302 - DNA, 75 bp, synthetic construct
  source 1..75: mol_type = other DNA
gggatatggtacgacgtgacgatgatctggatgacctctgccaggtacagacccatatccggaccatcacccacc

SEQ ID NO: 80303 - DNA, 75 bp, synthetic construct
  source 1..75: mol_type = other DNA
attctcgaccagtttctggatgaaaaggaaggcaaccacaccacagcataccgtgatggtgcaggtatctggacc

SEQ ID NO: 80304 - DNA, 75 bp, synthetic construct
  source 1..75: mol_type = other DNA
agtctcagcgccgatatgctgattgacctgaaatttacgctgcgcaataagtaccgcaaaaaagctgtatgggtg

SEQ ID NO: 80305 - DNA, 75 bp, synthetic construct
  source 1..75: mol_type = other DNA
cgagagctgcattgaagcattccatgaggctgagaccaacctgaatcacactgttttccgtcgtaatcaatggga

SEQ ID NO: 80306 - DNA, 75 bp, synthetic construct
  source 1..75: mol_type = other DNA
gaagttgtcgaaggaaaaatgcgctcaggttaatgccattgaacgtgataaggcgctggcatgggtggagaaaaa

SEQ ID NO: 80307 - DNA, 75 bp, synthetic construct
  source 1..75: mol_type = other DNA
tttactggttccctgtgcccgtggcggctctgcttttacaaccggcgcagttggctcattcgatccggcaagtgg

SEQ ID NO: 80308 - DNA, 75 bp, synthetic construct
  source 1..75: mol_type = other DNA
atcctcgaccagtttctggatgaaaaagaaggtaaccacaccacggcataccgtgatggtgcgggtatctggacc

SEQ ID NO: 80309 - DNA, 75 bp, synthetic construct
  source 1..75: mol_type = other DNA
tatggagaaaccggcgtcgggaatgtcagcatcaccacgggggggatgtgggaggtcaataagaatgtctatacc

SEQ ID NO: 80310 - DNA, 75 bp, synthetic construct
  source 1..75: mol_type = other DNA
cagaaagcgattgagtcaattaagcaggctgattcggctgttaagttggcacacgagaagttttcagcgctggcg

SEQ ID NO: 80311 - DNA, 75 bp, synthetic construct
  source 1..75: mol_type = other DNA
cctgcaccgcctggtccattacatccgtatccaatatgaggagccgctggtcgagagccgatacctttacgaccc

SEQ ID NO: 80312 - DNA, 75 bp, synthetic construct
  source 1..75: mol_type = other DNA
agatactggtgtgggcggctgtagctgcggcaaatcataagcttcccaaatatgcagaatctatcctgaatgtat

SEQ ID NO: 80313 - DNA, 75 bp, synthetic construct
  source 1..75: mol_type = other DNA
aaatctgatgcaccataaaacaggggggaatacgaaactgggatcatttggagcctacaataaccagtggcatac

SEQ ID NO: 80314 - DNA, 75 bp, synthetic construct
  source 1..75: mol_type = other DNA
ccggttattgatggtcaggatggtgccgcgtttaccctgacgcagtcaccagtaggaactttcccggtggacaaa

SEQ ID NO: 80315 - DNA, 75 bp, synthetic construct
  source 1..75: mol_type = other DNA
ctccgcgtaacggatatcacaaaaaatgcaacttacccggtgctgattgacagcattgtggtggaagtgaaaaaa

SEQ ID NO: 80316 - DNA, 75 bp, synthetic construct
  source 1..75: mol_type = other DNA
attatccctggatagcgccctgccggatcgcaccactatcatgaatttccgccacctgctcgagcagcatcaact

SEQ ID NO: 80317 - DNA, 75 bp, synthetic construct
  source 1..75: mol_type = other DNA
gtacctcgacagggaaacggggctgcactacaatctgcacaggtactatgatccggatgtcgggcggttcatggt

SEQ ID NO: 80318 - DNA, 75 bp, synthetic construct
  source 1..75: mol_type = other DNA
gacggccacacgctggcgcggctgtgggcgtcgctgccgccggatatccggttaagcccgcatctttacctggcg

SEQ ID NO: 80319 - DNA, 75 bp, synthetic construct
  source 1..75: mol_type = other DNA
tgatccgccaggatgatgcacgcgtgcgcgggcgtataaaatcgatcagcagaaaacgttgcggtaagtgcggcg

SEQ ID NO: 80320 - DNA, 75 bp, synthetic construct
  source 1..75: mol_type = other DNA
ttctgtcgcggattaacaatgataaaagtattgtgttatctgtgattgtgtttacgcttgttaatatcattgtat

SEQ ID NO: 80321 - DNA, 75 bp, synthetic construct
  source 1..75: mol_type = other DNA
tggcagcgttacacaaccacagggaaatcagaaaccacacaggggcgcacttttgagcgcgtctatgccgggagc

SEQ ID NO: 80322 - DNA, 75 bp, synthetic construct
  source 1..75: mol_type = other DNA
gacggaaatttgtatatccgcaaactcattggaacatggaatggtaatgatggaccatggggagcatggcgccat

SEQ ID NO: 80323 - DNA, 75 bp, synthetic construct
  source 1..75: mol_type = other DNA
ctattaactactatcggcttgtcgtcgaaaaacgccattctgattgtggaatttgctgaagcggcggttgcagag

SEQ ID NO: 80324 - DNA, 75 bp, synthetic construct
  source 1..75: mol_type = other DNA
cattactggccattttcttcgttcctctgttttttgtactggtgaaacgtttgtttgccggtaaaccgcgccgtc

SEQ ID NO: 80325 - DNA, 75 bp, synthetic construct
  source 1..75: mol_type = other DNA
cagagtggaacagtattcaattgatgagatgttcctcgatttgaccggcgtggagcactgtatggagcttgagga

SEQ ID NO: 80326 - DNA, 75 bp, synthetic construct
  source 1..75: mol_type = other DNA
atgaaatgaatctggaccgggcattgctaccgatcctttttcgttcgaaccggtcgacagtgtggaagtatttaa

SEQ ID NO: 80327 - DNA, 75 bp, synthetic construct
  source 1..75: mol_type = other DNA
ctgaatatgcttcgcctggctcgcgctgtgatcccggctgctgttctgatgatgttcttcccgcaactggcaatg

SEQ ID NO: 80328 - DNA, 75 bp, synthetic construct
  source 1..75: mol_type = other DNA
ccattcgccttggattaaacaaggtgtgcgaggaagggattcgtatcgatagcattgggattgatacctggggcg

SEQ ID NO: 80329 - DNA, 75 bp, synthetic construct
  source 1..75: mol_type = other DNA
gtcggtgcggtcatgtacatgatgaccaaaaacgtcaagttcctggccggttttgccatcatctctgtatttatt

SEQ ID NO: 80330 - DNA, 75 bp, synthetic construct
  source 1..75: mol_type = other DNA
aaagttagctgatgcctgcggtgttaagcagccgtctgtatgggcttggttgcatgggaagaaaagggtatccgc

SEQ ID NO: 80331 - DNA, 75 bp, synthetic construct
  source 1..75: mol_type = other DNA
agagagttcctgttaattcatgcccgtgtaatggtgactcacaatgctgggtgaccaaaggctggcacgaaacaa

SEQ ID NO: 80332 - DNA, 75 bp, synthetic construct
  source 1..75: mol_type = other DNA
atctgtcggggtgccacagtggtggatggaaaaaacgtttttcccaatatgaaactgtcgaaggaaaaatgcgac

SEQ ID NO: 80333 - DNA, 75 bp, synthetic construct
  source 1..75: mol_type = other DNA
atcaagactgtcgctgtgcactccagcgcggatcgcgatctaaaacacgtattactggcagatgaaacggtctgt

SEQ ID NO: 80334 - DNA, 75 bp, synthetic construct
  source 1..75: mol_type = other DNA
agcccagatgaaataaaaaacctgtaccgtcgctgtcgtaacggctatgaaaaactgcaggtattccgtttactg

SEQ ID NO: 80335 - DNA, 75 bp, synthetic construct
  source 1..75: mol_type = other DNA
cgctgtttttaagtgtggaaccgacgccggatttaacgccgcaatttttgcagctgctactgccggaactggcgc

SEQ ID NO: 80336 - DNA, 75 bp, synthetic construct
  source 1..75: mol_type = other DNA
gttaacgcgaaccgaggtcgatgagctgacgcgagctgtcagacgtgacctggaagagttcgccatgagctatga

SEQ ID NO: 80337 - DNA, 75 bp, synthetic construct
  source 1..75: mol_type = other DNA
cagttcaacaattcccaatcacaaaacaattcactgataacgaactttgcacactcgcctggttatggcgagcag

SEQ ID NO: 80338 - DNA, 75 bp, synthetic construct
  source 1..75: mol_type = other DNA
gcgcctgaaggcgaagagccggagcctggacacagcgcagaaggtcattgtgggtgcagcattgctggcaaaggt

SEQ ID NO: 80339 - DNA, 75 bp, synthetic construct
  source 1..75: mol_type = other DNA
ctcttcaccggcaccatcaaccgcacggaagtccatccccgggaagtgattaaacgcgctctgtaccacaatgcc

SEQ ID NO: 80340 - DNA, 75 bp, synthetic construct
  source 1..75: mol_type = other DNA
acactttggataacttattctttattaggtattgcttgtattgtctgttatagacttgcaggaatgcctttgttt

SEQ ID NO: 80341 - DNA, 75 bp, synthetic construct
  source 1..75: mol_type = other DNA
gggcttgaaaaagcaaagccaaagcaaaatagccgccttgctcaagaaatactggagaaaggtggagcgtgggtt

SEQ ID NO: 80342 - DNA, 75 bp, synthetic construct
  source 1..75: mol_type = other DNA
tgttttaccggccagcgggtattgctccggtaaataaagcgacatttaaaaaattgctggtaaatcgcagtggca

SEQ ID NO: 80343 - DNA, 75 bp, synthetic construct
  source 1..75: mol_type = other DNA
tttggtccggcaggggtaaccgcagcaaaactccgcgaactgggtgtcattcgcggcaaaattgccactatcttc

SEQ ID NO: 80344 - DNA, 75 bp, synthetic construct
  source 1..75: mol_type = other DNA
ccccaatatctggcagagtgtcggaaaagacagaaataaagccatcgatactgtaaaacatcaaaaaattgaggc

SEQ ID NO: 80345 - DNA, 75 bp, synthetic construct
  source 1..75: mol_type = other DNA
gactcggtgatgatcagctacgcgccaatgaattcagccctgaacatctgggagctgctagggagacaggcctga

SEQ ID NO: 80346 - DNA, 75 bp, synthetic construct
  source 1..75: mol_type = other DNA
tgatttttgtttatagcctggtctttactgtgttgctggcaatcccgttgggaatttatttccttggcggcgaag

SEQ ID NO: 80347 - DNA, 75 bp, synthetic construct
  source 1..75: mol_type = other DNA
taaaccgtcagttcgtggcagaacgtcctgaccagctgtgggtggctgattttacttacgtcagcacatggcagg

SEQ ID NO: 80348 - DNA, 75 bp, synthetic construct
  source 1..75: mol_type = other DNA
atgtcgccatcattacgcaaggctgttgcagttgctattggtggcggggctgttgctatagcatctgtgttaatc

SEQ ID NO: 80349 - DNA, 75 bp, synthetic construct
  source 1..75: mol_type = other DNA
taagcgaatgggtgaccttcgggatactcaaggggataccggagtatgggggcgaatcatgaacggcaggggctc

SEQ ID NO: 80350 - DNA, 75 bp, synthetic construct
  source 1..75: mol_type = other DNA
gaaaccgtattgcgggacgcatctggtgaaaaacgcatcaaaggtgaaaaggacagccgtatgctgatgtccgtt

SEQ ID NO: 80351 - DNA, 75 bp, synthetic construct
  source 1..75: mol_type = other DNA
gtgattgataacgctctggatgcaggaaatccaatcccggaagccctgcaaactcgcgccaaattgcgtcaaaaa

SEQ ID NO: 80352 - DNA, 75 bp, synthetic construct
  source 1..75: mol_type = other DNA
gattaaggatggtgggcgcgattgccgcatacgttcaaataactgctatgggcaagttattcgtcgtgaccagga

SEQ ID NO: 80353 - DNA, 75 bp, synthetic construct
  source 1..75: mol_type = other DNA
agcaggaatacgtcttcccgacccaggtggcgcgcgtgatgggtaatgaagttgggctgaaattaatgccgctca

SEQ ID NO: 80354 - DNA, 75 bp, synthetic construct
  source 1..75: mol_type = other DNA
ctggtatcctggtacgacaacgaaaccggttactccaacaaagttctggacctgatcgctcacatctccaaataa

SEQ ID NO: 80355 - DNA, 75 bp, synthetic construct
  source 1..75: mol_type = other DNA
caggtcaacgccattgagcgtgataaggcgctggcatgggtggagcgcaatattaaagtgccgctgaccgaaccc

SEQ ID NO: 80356 - DNA, 75 bp, synthetic construct
  source 1..75: mol_type = other DNA
aacaaaaacacttggcagcgaaattctgaattttgcatgtgaatatgcaaaagctgctgccgaaaaagaattagc

SEQ ID NO: 80357 - DNA, 75 bp, synthetic construct
  source 1..75: mol_type = other DNA
atcagtaagattggtgccgatgctgtggcattgcctgagaatttccgcattcatgatctggaaaaatttaattta

SEQ ID NO: 80358 - DNA, 75 bp, synthetic construct
  source 1..75: mol_type = other DNA
tcgtctgccagtgccgcgtcaacaagtgccgggcaggcctcagccagtgccaccgccgccggaaaatcggcagaa

SEQ ID NO: 80359 - DNA, 75 bp, synthetic construct
  source 1..75: mol_type = other DNA
ttcggactgtgcatggcctctttccactggtggcgcaggaaagttaaccggctgccaccatgggatgatgtgtaa

SEQ ID NO: 80360 - DNA, 75 bp, synthetic construct
  source 1..75: mol_type = other DNA
tcaccggttttttaggcgcaggcaaaaccaccctgctgcgccatattcttaacgaacaacacggctacaagattg

SEQ ID NO: 80361 - DNA, 75 bp, synthetic construct
  source 1..75: mol_type = other DNA
agaccaccaccgggacatccggaactccagagagcagaacaaccacgccagccccggtggccacgaaaccggtag

SEQ ID NO: 80362 - DNA, 75 bp, synthetic construct
  source 1..75: mol_type = other DNA
atgaactcgcataatattactaacgaatcattagcactggcattaatgctggtggtggtggcaatcttaattagc

SEQ ID NO: 80363 - DNA, 75 bp, synthetic construct
  source 1..75: mol_type = other DNA
ccggctgattgccgcgcaaaacacgctggcctattacgagaaccagctaggcagcctggatcgttacctggccaa

SEQ ID NO: 80364 - DNA, 75 bp, synthetic construct
  source 1..75: mol_type = other DNA
tattcggcagcctgtttttttcctgcagcgtgatggccgcaaacggtacgctggcccccactgtggtgccaatgg

SEQ ID NO: 80365 - DNA, 75 bp, synthetic construct
  source 1..75: mol_type = other DNA
aactacgtcgctggacatatgctggcggtaagcaatggaaagggctgatgactcgccgtgagattgagcgtgaag

SEQ ID NO: 80366 - DNA, 75 bp, synthetic construct
  source 1..75: mol_type = other DNA
ctgtcggtattggtgctcatacgcactccgttgcgattggttcacatggacacaccatcaccgttaacgctgctg

SEQ ID NO: 80367 - DNA, 75 bp, synthetic construct
  source 1..75: mol_type = other DNA
gaacagaaaaaacattaaagcaaaaggttgcttttgctcaactagaacttaatcgtcttaagtctctggagaaat

SEQ ID NO: 80368 - DNA, 75 bp, synthetic construct
  source 1..75: mol_type = other DNA
accaaggggcagaagaacggatgcttcggtcaggtggaacgccgcgaccaagaaagcgcgttggcatgctggggg

SEQ ID NO: 80369 - DNA, 75 bp, synthetic construct
  source 1..75: mol_type = other DNA
ctgaaatgcgcgctagagttgagaatttcaatagacttttcgaagaaatgctcaaagctcgtaaaaacaaatcta

SEQ ID NO: 80370 - DNA, 75 bp, synthetic construct
  source 1..75: mol_type = other DNA
atcttcatcggcccgaaagccgaaaccattcgcctgatgggcgataaagtatcagcaatcgcggcgatgaaaaaa

SEQ ID NO: 80371 - DNA, 75 bp, synthetic construct
  source 1..75: mol_type = other DNA
gtgaactgcatagactcatttctgaatatttgcagtgtaagcgacgtaaagataaatctgttgagcccacccctt

SEQ ID NO: 80372 - DNA, 75 bp, synthetic construct
  source 1..75: mol_type = other DNA
atatctggcgcagcctcgaaaaaaacatcttttcaactctgggtgatgttcctatcaaagagatccgccccaaaa

SEQ ID NO: 80373 - DNA, 75 bp, synthetic construct
  source 1..75: mol_type = other DNA
caaaagcaaaagcgttacccctgattacgcaaaagacatttggcgctcactggagaaagatgtattccctgccat

SEQ ID NO: 80374 - DNA, 75 bp, synthetic construct
  source 1..75: mol_type = other DNA
gccgtatccgttcaaataattgctacggtcaggtctcacggcgtgaccaggagagcgcgctggcgtgctgggaca

SEQ ID NO: 80375 - DNA, 75 bp, synthetic construct
  source 1..75: mol_type = other DNA
tacatatttattgtggaagcagggcgcgaacatgaaagagatgttaccgaaacctacattctaccgacaccgtaa

SEQ ID NO: 80376 - DNA, 75 bp, synthetic construct
  source 1..75: mol_type = other DNA
gctgtcgcacagtctgctggtggggtgtttgtatcgcttcctgacattgaggaagtagagaacgccgatataaac

SEQ ID NO: 80377 - DNA, 75 bp, synthetic construct
  source 1..75: mol_type = other DNA
aggttgcttcacgattacaacagcgaaccacggcaattatgcgctatgccgtgcagagtggtttactggactata

SEQ ID NO: 80378 - DNA, 75 bp, synthetic construct
  source 1..75: mol_type = other DNA
tgctgatgctgcgatcggccaaagtatggaaatttttgacgaaattcaacagcaagaacagattaataactttac

SEQ ID NO: 80379 - DNA, 75 bp, synthetic construct
  source 1..75: mol_type = other DNA
gacatactatgcgaatacagggaatgctggcggtatcaagattgaaattcaggacagggatggaagtaatgcatc

SEQ ID NO: 80380 - DNA, 75 bp, synthetic construct
  source 1..75: mol_type = other DNA
aacttgaaaagctaaaaaaggcagcgcttgatcagcgctccagaatggcgaatgaagggcagacagagaagcaac

SEQ ID NO: 80381 - DNA, 75 bp, synthetic construct
  source 1..75: mol_type = other DNA
gcttaataaaaacccgaaatcccttgataacgatattcgcgctcgtcttgaaaacaaaccgatgcttgctccgcc

SEQ ID NO: 80382 - DNA, 75 bp, synthetic construct
  source 1..75: mol_type = other DNA
cgctttattcaaccgccttcgtgcagatggcgatcagattttcccgctgggatgggcaatgattttacagcgtgc

SEQ ID NO: 80383 - DNA, 75 bp, synthetic construct
  source 1..75: mol_type = other DNA
gcggcggtattgattacactgaaattggcgcgattcgctgggcttttgctatcgccccggatcacccgttagcct

SEQ ID NO: 80384 - DNA, 75 bp, synthetic construct
  source 1..75: mol_type = other DNA
gatgatgcagtggtgggctgattatcttgattgctgcagtcaatatcacatcacaccatatgagtttgcacagat

SEQ ID NO: 80385 - DNA, 75 bp, synthetic construct
  source 1..75: mol_type = other DNA
atggcgcttaatagcctgcaatatgcaggagttcgagaaacagacttacttctacttgataaagtaaacattgac

SEQ ID NO: 80386 - DNA, 75 bp, synthetic construct
  source 1..75: mol_type = other DNA
agataatcagcgcaagcagtcgtccgggtgacctggttgcagatttttttatggggtcaggttcaacagttaaag

SEQ ID NO: 80387 - DNA, 75 bp, synthetic construct
  source 1..75: mol_type = other DNA
gcctgaaatgggagaagggtaaaccggaaacggtgtattacctgtgtgaacataatggctgtgtgatccgccagt

SEQ ID NO: 80388 - DNA, 75 bp, synthetic construct
  source 1..75: mol_type = other DNA
gggtattttattgagcataaatcccgaaacagtctgctttttcagcccacggattctgccgctgaagattttatg

SEQ ID NO: 80389 - DNA, 75 bp, synthetic construct
  source 1..75: mol_type = other DNA
gtgagtaaacgaattgcgctttttccggcgttattgctggcgctgctggtgattgtcgctacggcgctgacctgg

SEQ ID NO: 80390 - DNA, 75 bp, synthetic construct
  source 1..75: mol_type = other DNA
cacaacgaaggtactattgtttctgtaagtgacggtgttatccgcattcacggcctggccgattgtatgcagggt

SEQ ID NO: 80391 - DNA, 75 bp, synthetic construct
  source 1..75: mol_type = other DNA
tttcatgcgtttcagatacgcaaaatgatgataactcttatgatgtgcttactattcctgtcgcctctggtaata

SEQ ID NO: 80392 - DNA, 75 bp, synthetic construct
  source 1..75: mol_type = other DNA
aagcaggatgacgcaggaaacattcatttcgattccgccggttgtctggagtgcggcacctgtcgggtgctgtgc

SEQ ID NO: 80393 - DNA, 75 bp, synthetic construct
  source 1..75: mol_type = other DNA
gcgctgccgattatcgaaactcaggcgggtgacgtttctgcgttcgttccaaccaacgtaatctccattaccgat

SEQ ID NO: 80394 - DNA, 75 bp, synthetic construct
  source 1..75: mol_type = other DNA
actgtttggcgcagcactagttaacgtacaggtaaaatcattaacagggatattcagccttgccgggttcctgct

SEQ ID NO: 80395 - DNA, 75 bp, synthetic construct
  source 1..75: mol_type = other DNA
cgggaagcgattcctgaactgccaacgtttgaagagttccgtaagcaggggatctttaaaaagcgcgacccacaa

SEQ ID NO: 80396 - DNA, 75 bp, synthetic construct
  source 1..75: mol_type = other DNA
ctcgaccggatcaatgagcaaatgaaacaacacatgacagcattcttccaggagcaggccagactgataggcagc

SEQ ID NO: 80397 - DNA, 75 bp, synthetic construct
  source 1..75: mol_type = other DNA
ccggataaacgcagtgcccgtgcgcagcgcgatgactggctgaagaaagagatacagcgcgtatacgatgaaaat

SEQ ID NO: 80398 - DNA, 75 bp, synthetic construct
  source 1..75: mol_type = other DNA
agacggtgaaagtgactacctttaaccgcccgaaagagatggcggaccaggtgtttacgcttaatgtgctggaca

SEQ ID NO: 80399 - DNA, 75 bp, synthetic construct
  source 1..75: mol_type = other DNA
acatgcagttattgaaccgacagcaagagttaaatattgctaaatccagtgccattggtaatgttcgaatcattg

SEQ ID NO: 80400 - DNA, 75 bp, synthetic construct
  source 1..75: mol_type = other DNA
aatggaaatgataagtacaccttagttattccctcgatgggaatggataaaatagccaataaaacagcacaatct

SEQ ID NO: 80401 - DNA, 75 bp, synthetic construct
  source 1..75: mol_type = other DNA
actggcccaagtggtaacgatggtctggaaggtgtgagacataatccttacaaagacatagttggtgtatggact

SEQ ID NO: 80402 - DNA, 75 bp, synthetic construct
  source 1..75: mol_type = other DNA
gtagcgcaactcgcagaaaaattgcatcagaaagcgcaggccggtgaacgaatgccttcctgcattaacatcatt

SEQ ID NO: 80403 - DNA, 75 bp, synthetic construct
  source 1..75: mol_type = other DNA
gcccttgcacagagctataaaactgtgcccgcaaccagaagtgatatttcttcaggatcacaaaaaggaaaagag

SEQ ID NO: 80404 - DNA, 75 bp, synthetic construct
  source 1..75: mol_type = other DNA
caattccaggtgaacgtgaaccgctggaaggcgttaagcattctcatcgtggttcgaagatgcggacgactcata

SEQ ID NO: 80405 - DNA, 75 bp, synthetic construct
  source 1..75: mol_type = other DNA
atgttcctgaaaacagaacaatttgaatataacggtgtgtccgtcacgctgtcggagctgtccgcgctgcagcgg

SEQ ID NO: 80406 - DNA, 75 bp, synthetic construct
  source 1..75: mol_type = other DNA
gctctctaatatatacctgaataaacttgaccagtacgtggaacacgtgttattgcctaaatataacaagggtaa

SEQ ID NO: 80407 - DNA, 75 bp, synthetic construct
  source 1..75: mol_type = other DNA
aaccctgcgctgggacacggtgcatgaactgccgccggacgtggacggcaaaacccggctggccccgccgcgcac

SEQ ID NO: 80408 - DNA, 75 bp, synthetic construct
  source 1..75: mol_type = other DNA
ttgttgtcatcgtcatcattctgaataaaaccggggtgtccgacagtctcgcggccctgacccttgccactgttg

SEQ ID NO: 80409 - DNA, 75 bp, synthetic construct
  source 1..75: mol_type = other DNA
gtaagcggaacattgctgaattgaagacacgggatctgcttgtccccatcaaagccgtcgagtcatccgggcggc

SEQ ID NO: 80410 - DNA, 75 bp, synthetic construct
  source 1..75: mol_type = other DNA
aaagccgtccgcaatttctggaacaaaaagatagatgaagcagccgccaggaaatcagctggcggagcggtcaac

SEQ ID NO: 80411 - DNA, 75 bp, synthetic construct
  source 1..75: mol_type = other DNA
gtaatctgaacagccttgatacccgtatggtgccacaggccagcgcatgggcgataaaccgtgtggcacagaaag

SEQ ID NO: 80412 - DNA, 75 bp, synthetic construct
  source 1..75: mol_type = other DNA
tgccttgcggcaagctgggatgcatcaaatccgcagtgggaaccgtggttaagagtcggtcatcagtcagagagc

SEQ ID NO: 80413 - DNA, 75 bp, synthetic construct
  source 1..75: mol_type = other DNA
gcgcgatgaaagtgtttttaatcttctacatcgtttgtgtgctgctgacctggctggtttatggtcggcggaagt

SEQ ID NO: 80414 - DNA, 75 bp, synthetic construct
  source 1..75: mol_type = other DNA
tgagcctgctgtatctggcaaccttcggctccttcatcggcttctccgcgggctttgcgatgctgtcaaaaacgc

SEQ ID NO: 80415 - DNA, 75 bp, synthetic construct
  source 1..75: mol_type = other DNA
agcaaattacagcagcagaaaacgtcttccgaacgggaaaatgagctggccgctgaaaatgcccgcctgaagcgc

SEQ ID NO: 80416 - DNA, 75 bp, synthetic construct
  source 1..75: mol_type = other DNA
ctcagctttatgctgaaattgctgacaaacgctacatcgcaggagtgacttgtcaacggatttatgaatctttaa

SEQ ID NO: 80417 - DNA, 75 bp, synthetic construct
  source 1..75: mol_type = other DNA
tggcccgtgggggctggggtttattagcgacgtcgatgagatcctccacttttcggaactcggcgtggtattcct

SEQ ID NO: 80418 - DNA, 75 bp, synthetic construct
  source 1..75: mol_type = other DNA
tccgccagcacgccgccgcgccattccgggtgtgcagctttgcattacctgtcaggaaatcgcagagctgaaagg

SEQ ID NO: 80419 - DNA, 75 bp, synthetic construct
  source 1..75: mol_type = other DNA
ggggcaatctgcccgccattaagctggggacagcccgggtcagactggcccggcgtggtggaaaactgcagtacc

SEQ ID NO: 80420 - DNA, 75 bp, synthetic construct
  source 1..75: mol_type = other DNA
cgagaattcgggggcatatacttttgaaactatcgcccgagaatggcatgccagtaacaagcgctggagtgaaga

SEQ ID NO: 80421 - DNA, 75 bp, synthetic construct
  source 1..75: mol_type = other DNA
ctggaccgccatcttcatgaacccggcgtggccttcacctccacccgtgcagcacgggaatggctgattctgaac

SEQ ID NO: 80422 - DNA, 75 bp, synthetic construct
  source 1..75: mol_type = other DNA
ccagtaacaagcgttggagtgaagaccatcgatcgcgtgttcttcgctatcttgagctttatatctttcctcata

SEQ ID NO: 80423 - DNA, 75 bp, synthetic construct
  source 1..75: mol_type = other DNA
ctgtgcgtctgaagaaataccggtcttaccggggaaatatgggactcgctgcagaaaatatccttcagcgacagt

SEQ ID NO: 80424 - DNA, 75 bp, synthetic construct
  source 1..75: mol_type = other DNA
cattacccaattgagccaccatcacctattgaggccattaaattccgtatggaacagcaagggctgaccgtgaag

SEQ ID NO: 80425 - DNA, 75 bp, synthetic construct
  source 1..75: mol_type = other DNA
gaaactatcgctcgtgaatggcatgctagtaataagcgctggagtgaagatcaccgatcacgcgttctacgttat

SEQ ID NO: 80426 - DNA, 75 bp, synthetic construct
  source 1..75: mol_type = other DNA
cttgagctttatatcttccctcacattggttcgtccgacattcgtcagctcaagactagccacctgttagccccg

SEQ ID NO: 80427 - DNA, 75 bp, synthetic construct
  source 1..75: mol_type = other DNA
gaaactatcgcccgagaatggcatgccagtaacaagcgttggagtgaagaccatcgatcgcgtgttcttcgctat

SEQ ID NO: 80428 - DNA, 75 bp, synthetic construct
  source 1..75: mol_type = other DNA
ctggccatcgcgggatggtcggttccgccatcaggcgacagctcgaacagcgcggtgatgtggaactggtattac

SEQ ID NO: 80429 - DNA, 75 bp, synthetic construct
  source 1..75: mol_type = other DNA
actgggatggacttcaaaattatctttacacgatgggttggttgatacctatcaatggtatttagataatcaaga

SEQ ID NO: 80430 - DNA, 75 bp, synthetic construct
  source 1..75: mol_type = other DNA
tacggcggtagctatcgcctgttcgacagcctggcgaaacgcggttgctatcgcgtgttgtttgttgatcaaggc

SEQ ID NO: 80431 - DNA, 75 bp, synthetic construct
  source 1..75: mol_type = other DNA
actttaccggatttaatgaaccgcgcgcgcatgattactcgcggcgcggcaacccaacgcgcgatgtggttcagc

SEQ ID NO: 80432 - DNA, 75 bp, synthetic construct
  source 1..75: mol_type = other DNA
gtcgaaaatcgacaatatgctctccaccagtacctcttcgctggcaacacagatgcaggatttcttcaccagcct

SEQ ID NO: 80433 - DNA, 75 bp, synthetic construct
  source 1..75: mol_type = other DNA
ggtagaaagcccaagtaatccattgttacgcgtcgtggatattgcgaaaatctgccatctggcaagggaagtcgg

SEQ ID NO: 80434 - DNA, 75 bp, synthetic construct
  source 1..75: mol_type = other DNA
aacccatgcgactgatgctgcagattcagcacgtgcagccagcacgtcagccggacaggccgcttcgtcggctca

SEQ ID NO: 80435 - DNA, 75 bp, synthetic construct
  source 1..75: mol_type = other DNA
tcgaccttttctgtgatcaggccagtggtcttgtgaatattgccattatggacggtaccgtctggcgtctgctga

SEQ ID NO: 80436 - DNA, 75 bp, synthetic construct
  source 1..75: mol_type = other DNA
gaagaaatgtactatcgccgggactacagaaatgtagaagagctggaaaatgccgttaacgaatacataacttac

SEQ ID NO: 80437 - DNA, 75 bp, synthetic construct
  source 1..75: mol_type = other DNA
ggacggtcagggtggtgtgccgggagtggagtattacggataacgccaggtacagcgatttcagttgtatgatgg

SEQ ID NO: 80438 - DNA, 75 bp, synthetic construct
  source 1..75: mol_type = other DNA
ttccgggtgacggatgaggcgacccggcgctggctggatgaatttttatcgtggcatggtggttaccgtgccttt

SEQ ID NO: 80439 - DNA, 75 bp, synthetic construct
  source 1..75: mol_type = other DNA
aggctgaacgatatggagcatcgctgtcgctttgattccgatgtgcttgttgaacgcctggcacgccagacgctg

SEQ ID NO: 80440 - DNA, 75 bp, synthetic construct
  source 1..75: mol_type = other DNA
atgaactatgccggacacgaaaaactgcgcgccgacgtggcggaggtggccaacaccatgtgtgaccttcgggcc

SEQ ID NO: 80441 - DNA, 75 bp, synthetic construct
  source 1..75: mol_type = other DNA
gaataccggagtgagttcgggggcttttccccggtacaggttcgttttacgccatcacacggcaacttccatatc

SEQ ID NO: 80442 - DNA, 75 bp, synthetic construct
  source 1..75: mol_type = other DNA
ttccagatgagcgatggaacaaccattggttaccacatcggagtagcctacaaggttgatccatccaaagttacc

SEQ ID NO: 80443 - DNA, 75 bp, synthetic construct
  source 1..75: mol_type = other DNA
gcgggaagatttacgtgatatctggcaaaacgaccagtggcggattgtcggtttactaaccattttcaatatcct

SEQ ID NO: 80444 - DNA, 75 bp, synthetic construct
  source 1..75: mol_type = other DNA
tggggtaaatttcgtccgtgggtactgtttggcgcactgccatttgggatcgtctgtgtactggcctatagcacg

SEQ ID NO: 80445 - DNA, 75 bp, synthetic construct
  source 1..75: mol_type = other DNA
caacctggtgggcaagtctgcatttgtggaagccagcgggcaggccagcaatgatgcaaaagggtatctggaatt

SEQ ID NO: 80446 - DNA, 75 bp, synthetic construct
  source 1..75: mol_type = other DNA
ctcgatgcaacagccgaacagccagaatcgcccgctgagtccccggcccccctcagtatcagctgcgaggtaacg

SEQ ID NO: 80447 - DNA, 75 bp, synthetic construct
  source 1..75: mol_type = other DNA
gggaatacaccctgacggtcagggcgattaacagctatggccagcagggcgaacccgccaccaccacgttccgga

SEQ ID NO: 80448 - DNA, 75 bp, synthetic construct
  source 1..75: mol_type = other DNA
ggtggacccatacacagcaaacgcacaggccgccccggttgggtagatatgtgggatggctggttcagacttcag

SEQ ID NO: 80449 - DNA, 75 bp, synthetic construct
  source 1..75: mol_type = other DNA
tggccttcaccagcatgttcagcctcagcaccctgttaagcccggcgcacgccgaagagcaggaaaaggcgttga

SEQ ID NO: 80450 - DNA, 75 bp, synthetic construct
  source 1..75: mol_type = other DNA
ctcaaccgactggccagcaaaatgaccaccgacaaatttatcgacggcggcaagtctgagctgctggatgcagct

SEQ ID NO: 80451 - DNA, 75 bp, synthetic construct
  source 1..75: mol_type = other DNA
gtcacgctgaaaatgccggcctttgaatgggttcatgtgcagctccatcagcaaaaggggatgataagtttatca

SEQ ID NO: 80452 - DNA, 75 bp, synthetic construct
  source 1..75: mol_type = other DNA
ggcggagatgaagaccaccatcaccgaaacccgcaatgaaatcacacagacggtcagtaaaacgctggaggacca

SEQ ID NO: 80453 - DNA, 75 bp, synthetic construct
  source 1..75: mol_type = other DNA
ttctgcacaccatgatcccccaggaattcgaagactggcgcgaggcgggggaagatttacgccgcgaactgaccc

SEQ ID NO: 80454 - DNA, 75 bp, synthetic construct
  source 1..75: mol_type = other DNA
gctggttgatgaagtactgcctgaacaacccatgcgtcagtgggtgttgagcttcccgtttcagctgcgtttcct

SEQ ID NO: 80455 - DNA, 75 bp, synthetic construct
  source 1..75: mol_type = other DNA
tgaaggcgatctcgttaaaacagtgggcaaagctttcccccgggactcccgtgcaccggaacggtggccatcagg

SEQ ID NO: 80456 - DNA, 75 bp, synthetic construct
  source 1..75: mol_type = other DNA
gttttcatgcgcatgtcgttttctggatcgatcgtcagagggttaaaaaaatatatccctttgcggagcggatag

SEQ ID NO: 80457 - DNA, 75 bp, synthetic construct
  source 1..75: mol_type = other DNA
atggcagagcagggaaaggaattgccgggctatgtgcaacgggaatttgaagaatttctccaatgcgggcggctg

SEQ ID NO: 80458 - DNA, 75 bp, synthetic construct
  source 1..75: mol_type = other DNA
cggtcttgtgaatattgccattatggacggtactgtctggcgtctgctgaatggttttaagctgttccgcgaaaa

SEQ ID NO: 80459 - DNA, 75 bp, synthetic construct
  source 1..75: mol_type = other DNA
atgaaaacggggatgagcagcgttatctgccggaaggcacactgattcttggaaacactcaggtggagggtgtcc

SEQ ID NO: 80460 - DNA, 75 bp, synthetic construct
  source 1..75: mol_type = other DNA
ctggtgcctggagaaatgctctttctatttgggaacctgtctgcaatgaaattttcgatcgtctgattaaaccac

SEQ ID NO: 80461 - DNA, 75 bp, synthetic construct
  source 1..75: mol_type = other DNA
gcgtgcatatcgaattcgtcaaggaacacctcagttttactggcgaagactctccgatggcgaacctgatgctct

SEQ ID NO: 80462 - DNA, 75 bp, synthetic construct
  source 1..75: mol_type = other DNA
aaagtcactactgaagaagccagtgcgcaatgcacagctgataatggcagcaccggtacaaacaaactaatcttc

SEQ ID NO: 80463 - DNA, 75 bp, synthetic construct
  source 1..75: mol_type = other DNA
atgaaaaaagtggttctaatggcgctggctctcggcctttcactacccgcgatggcgagtgaaaaagtcattgat

SEQ ID NO: 80464 - DNA, 75 bp, synthetic construct
  source 1..75: mol_type = other DNA
atctgaaaaccgttatggaacagctggctcagggcaaacgccgttgccagcaacaattcacctctcaagaagtgc

SEQ ID NO: 80465 - DNA, 75 bp, synthetic construct
  source 1..75: mol_type = other DNA
tgcaaacgcgtatcaaactgttctggcgaccgaaggcgctggcagaaatcaacatgagagatccgtggcagcaca

SEQ ID NO: 80466 - DNA, 75 bp, synthetic construct
  source 1..75: mol_type = other DNA
ccgggctatgtgcaacgggaatttgaagaatttctccaatgcgggcggctggagcatggctttctacgggttcgc

SEQ ID NO: 80467 - DNA, 75 bp, synthetic construct
  source 1..75: mol_type = other DNA
ctatggcgatttaccgtcagcatccacaatcccggttgtttcgcttctgtaccggcaaatacacatggtcaggca

SEQ ID NO: 80468 - DNA, 75 bp, synthetic construct
  source 1..75: mol_type = other DNA
ccacagcctgcaagtgaatatacactgtttgcaaaggaatatagagacgcattttctttggattcgaaaaattgc

SEQ ID NO: 80469 - DNA, 75 bp, synthetic construct
  source 1..75: mol_type = other DNA
gaaggggcaggatttccgtcacgtcggtggcgatgagctggataaactgctggcggggaaagatagcgacaaata

SEQ ID NO: 80470 - DNA, 75 bp, synthetic construct
  source 1..75: mol_type = other DNA
ggtatgaggtgaatatcagcagtcagggagaaaacttcattcaggtggatttcgacacgccgtggtgtcagccgg

SEQ ID NO: 80471 - DNA, 75 bp, synthetic construct
  source 1..75: mol_type = other DNA
atgacagcgaagcacataaaaaaatcacaatcgcacgcccttgatttgacggaacactggttaagggtgtcgata

SEQ ID NO: 80472 - DNA, 75 bp, synthetic construct
  source 1..75: mol_type = other DNA
ataactggacaccgacaaccagtatcagcgatttgcttgttgtggtgatgaagaaatccaccgcaggtatcacga

SEQ ID NO: 80473 - DNA, 75 bp, synthetic construct
  source 1..75: mol_type = other DNA
gttcatgcgggccatgaatcagatagccgccgcccggaactgatcgcaaaaggtgagtccgccgcgcgccttgga

SEQ ID NO: 80474 - DNA, 75 bp, synthetic construct
  source 1..75: mol_type = other DNA
tggtattttttatcgttcagcgcgtgatggttacggattcgaagctgactggtcagaattttacaccacaacacg

SEQ ID NO: 80475 - DNA, 75 bp, synthetic construct
  source 1..75: mol_type = other DNA
cgaaaaagcggccagagaatttggcgtgacgcagagaacatggcacgcctgggaaaatgcggaacaggtggacgt

SEQ ID NO: 80476 - DNA, 75 bp, synthetic construct
  source 1..75: mol_type = other DNA
agattgctgagattaaacgacaggccagtggtgcagtcacaccgttttatcgccgcgccacagatgaaggtattc

SEQ ID NO: 80477 - DNA, 75 bp, synthetic construct
  source 1..75: mol_type = other DNA
ccgaggtcaaccgtctgaatgtggaaatcgtgaccctgcggggtgaactgaaaaccacgaacgccacgctccgct

SEQ ID NO: 80478 - DNA, 75 bp, synthetic construct
  source 1..75: mol_type = other DNA
ggaactccttttcctttgttgttcgaaattgaagtgagttcatgtacagggaataatactaattgtaatagcgtc

SEQ ID NO: 80479 - DNA, 75 bp, synthetic construct
  source 1..75: mol_type = other DNA
atggagaaaccggaaaccgcaatgaaagccatcacccgcaatcttgactgcgaaatctggcgtgacctgatgcaa

SEQ ID NO: 80480 - DNA, 75 bp, synthetic construct
  source 1..75: mol_type = other DNA
tcccattgtccagggttcggcaggtgtaagaattggcgcgccaactggcgtggcgtgctcggtgtgcccgggcgg

SEQ ID NO: 80481 - DNA, 75 bp, synthetic construct
  source 1..75: mol_type = other DNA
atgaatggattcagaaacagttcacggaacggtcaggtctggcgctggcagcgtgccggaagccgtgccgtcagc

SEQ ID NO: 80482 - DNA, 75 bp, synthetic construct
  source 1..75: mol_type = other DNA
gctttcgcggcataaccttgccgtcagaaagacgacggctgcggtattccacggtcggcctgacccgttaccgga

SEQ ID NO: 80483 - DNA, 75 bp, synthetic construct
  source 1..75: mol_type = other DNA
gaaacgcagacagtccaggagctgcgcgcgctgtttcaggcggttcgcctgatgggctgtattaacgtcattgtg

SEQ ID NO: 80484 - DNA, 75 bp, synthetic construct
  source 1..75: mol_type = other DNA
cagcagactggatgagttttcgaaagagtggaaggacgctaacgataaatggaatgccatgtggggcgtcaaaat

SEQ ID NO: 80485 - DNA, 75 bp, synthetic construct
  source 1..75: mol_type = other DNA
cctctactggatcagcgaaggtccgcgccctggcgtcgggtatttttacgcgttgacgccagtttatctggcgaa

SEQ ID NO: 80486 - DNA, 75 bp, synthetic construct
  source 1..75: mol_type = other DNA
gtgccggtattgagaacacccctgacggcatgcagagtcaggtgctgctggcggcggacaggattgcgatgatta

SEQ ID NO: 80487 - DNA, 75 bp, synthetic construct
  source 1..75: mol_type = other DNA
tcatcagtctattactcaaaaaggccttttgctcatggttatgcccggttggtacgctttctgaattaatcggcg

SEQ ID NO: 80488 - DNA, 75 bp, synthetic construct
  source 1..75: mol_type = other DNA
atgcggtctcccgatggaccgggcctctgttctgctttgccgctctgatgatactgattctggtgggaactgtgt

SEQ ID NO: 80489 - DNA, 75 bp, synthetic construct
  source 1..75: mol_type = other DNA
ttaatcagttcgtaaagcctctactgccactgcatatagtgtttgatgggcttacgctctatttgtcggttgttg

SEQ ID NO: 80490 - DNA, 75 bp, synthetic construct
  source 1..75: mol_type = other DNA
ttggcatcaacgtctatgtcatcatctttcactcgcttcagaagatgagtggcaacgctgtgtagataaagtact

SEQ ID NO: 80491 - DNA, 75 bp, synthetic construct
  source 1..75: mol_type = other DNA
gggcgatactggtgacgaataatacaagagaatttgagcgggtgcctgacctggtgctggaagactgggtgaagt

SEQ ID NO: 80492 - DNA, 75 bp, synthetic construct
  source 1..75: mol_type = other DNA
atggccgtttctgacctgcatggcatgatttacgcttttggacgggagattcagcgtgctgattggctatgtaag

SEQ ID NO: 80493 - DNA, 75 bp, synthetic construct
  source 1..75: mol_type = other DNA
ttcaagaatagccgcaaaatgttgtcattacaacaaggcggctatatgacgctcgcgaagtttgccatgattttc

SEQ ID NO: 80494 - DNA, 75 bp, synthetic construct
  source 1..75: mol_type = other DNA
cccctgtaaatttggcagtaaaattatcgtcaacaacctggtgaggtgggacagatggggattgcatcttatcac

SEQ ID NO: 80495 - DNA, 75 bp, synthetic construct
  source 1..75: mol_type = other DNA
gggcgatactggtaacgaataatacaagagaatttgagcgagtgcctgacctggtgctggaagactgggtgaagt

SEQ ID NO: 80496 - DNA, 75 bp, synthetic construct
  source 1..75: mol_type = other DNA
cactggtacgccgaacagggctgcaatttctgtggctggcagcgatatgagcgtggagagcttgttgatgtgctg

SEQ ID NO: 80497 - DNA, 75 bp, synthetic construct
  source 1..75: mol_type = other DNA
atgccaaactggtgcagtaaccgtatgtatttttctgccgaaccggcacagattgctgagattaaacgactggcc

SEQ ID NO: 80498 - DNA, 75 bp, synthetic construct
  source 1..75: mol_type = other DNA
tcgcggggatgactggtggcgtaacggccagaatctctatcttgacaatatggaggcgactggtttttaccgtgt

SEQ ID NO: 80499 - DNA, 75 bp, synthetic construct
  source 1..75: mol_type = other DNA
atggcagcggccagctgaaaacccaaagcaatcgctatgttctgcaactgggaggcgatgtcgcgcagtggagcc

SEQ ID NO: 80500 - DNA, 75 bp, synthetic construct
  source 1..75: mol_type = other DNA
agctggaagcgcaagggttatggcgaagagccgccgcccgttggcttgacgtgatgaaagaggcccacaccgatc

SEQ ID NO: 80501 - DNA, 75 bp, synthetic construct
  source 1..75: mol_type = other DNA
gtttatcattggtgaagactttattggtggcgatgattgtgcacttgtgcttggtgataatatcttctatggaca

SEQ ID NO: 80502 - DNA, 75 bp, synthetic construct
  source 1..75: mol_type = other DNA
ggaaatgctggttggctcccgccgtatatcccaggacatcagcacccgtgatgaaggcgggggcggaaaggtcgt

SEQ ID NO: 80503 - DNA, 75 bp, synthetic construct
  source 1..75: mol_type = other DNA
aaatcaacattattacatgttcaaaaaaaagacattgataatcaatttgtgcttaccccgcctgttgctgaacaa

SEQ ID NO: 80504 - DNA, 75 bp, synthetic construct
  source 1..75: mol_type = other DNA
cggtttttgcttatcatgtgactgacccagagcgctatggtgtcgttgagtttgataaatctgggacagctatta

SEQ ID NO: 80505 - DNA, 75 bp, synthetic construct
  source 1..75: mol_type = other DNA
gcaggtgaaagtattagctgaacctctgaaaaaaaatgcttatggtcagtacctgataaaaatgattaaaggtta

SEQ ID NO: 80506 - DNA, 75 bp, synthetic construct
  source 1..75: mol_type = other DNA
ctcccggcgaatctcccaggacatcagcacccgtgatgaaggcgggggcgggaaggtggtggttatcgggcggca

SEQ ID NO: 80507 - DNA, 75 bp, synthetic construct
  source 1..75: mol_type = other DNA
tctgccgtttgcccttatggtcaagtcttacggaactgtcagcgtaaacggaaaagtaaacgatgcagacctgga

SEQ ID NO: 80508 - DNA, 75 bp, synthetic construct
  source 1..75: mol_type = other DNA
cggggttaaccgcctgctaaaacgtgcggaagacattgtgctggcgacgcttattctgctgctgatctccccggt

SEQ ID NO: 80509 - DNA, 75 bp, synthetic construct
  source 1..75: mol_type = other DNA
cagttggtgtggcggtctctgtccggaacaatttgaaaaccagaacctcgcttgggcctgtgtctatattacgtg

SEQ ID NO: 80510 - DNA, 75 bp, synthetic construct
  source 1..75: mol_type = other DNA
tggactgcagattgtgctgggggcggcagccatcgtggggtcgttcttcactgccggaggctcgatggcgttatg

SEQ ID NO: 80511 - DNA, 75 bp, synthetic construct
  source 1..75: mol_type = other DNA
ccgccggcgcaacgatggcgttgtggggcgcagccctgagtgccggagggctgactgccaccacgatgctgttct

SEQ ID NO: 80512 - DNA, 75 bp, synthetic construct
  source 1..75: mol_type = other DNA
catcaggaaacagactgaatattgctgttactgagccgctgataatcacgctggcaaaccagatctatttcgaaa

SEQ ID NO: 80513 - DNA, 75 bp, synthetic construct
  source 1..75: mol_type = other DNA
gtgtcccatacatgccccatagagccagactctgaaataatatctttaaatatcagttattttaatggtagttgc

SEQ ID NO: 80514 - DNA, 75 bp, synthetic construct
  source 1..75: mol_type = other DNA
cagcggtggcaatcccccaacgttttcactgacacctgatggtcgactttctgcgaaaaatgcggatatcagcgg

SEQ ID NO: 80515 - DNA, 75 bp, synthetic construct
  source 1..75: mol_type = other DNA
ctaacatctccggtgtcacggtggtgttccgggcaggtgagcaggaacagacaccgccggagggatttgaatcat

SEQ ID NO: 80516 - DNA, 75 bp, synthetic construct
  source 1..75: mol_type = other DNA
aaccttcaggatccgtccgcaggtaacgaccggcgtatcatggcacaacgacatgttcaccacggcactggatgt

SEQ ID NO: 80517 - DNA, 75 bp, synthetic construct
  source 1..75: mol_type = other DNA
ttctgcccgtggcgaactggaaattaccgatattaaccgtatttatatggagcagggacgtttgtctgtcgctat

SEQ ID NO: 80518 - DNA, 75 bp, synthetic construct
  source 1..75: mol_type = other DNA
ttgaagcaagtaacttcattgccaccattgaagagcgtcagggattaaaggtatcttgcccggaagagattgctt

SEQ ID NO: 80519 - DNA, 75 bp, synthetic construct
  source 1..75: mol_type = other DNA
ctggcgcaggcagatgtcgcggtggcgatgaactccggtactcaggcggcgaaagaagcgggcaatatggtggat

SEQ ID NO: 80520 - DNA, 75 bp, synthetic construct
  source 1..75: mol_type = other DNA
tgctttgggcgcaggttgacagggtggctccgcacctgttgccaaacggcaagaaagaggggcatgagtgggttg

SEQ ID NO: 80521 - DNA, 75 bp, synthetic construct
  source 1..75: mol_type = other DNA
cgacaatgacacaggctggcataaaaccctgtcaaacgtcggcatcaatggcgtcaccggtatcagtgcgtcggt

SEQ ID NO: 80522 - DNA, 75 bp, synthetic construct
  source 1..75: mol_type = other DNA
aatccggtcagcgtggaggtccagtccgtcaccgacggcgtgaaggtgaaagtgagccgtgttcctgacggcgtt

SEQ ID NO: 80523 - DNA, 75 bp, synthetic construct
  source 1..75: mol_type = other DNA
gtattgaaatgcccctgttgggctttggtgtatttcagatgaccgatgccgccgaatgcgaaagagcggtcattg

SEQ ID NO: 80524 - DNA, 75 bp, synthetic construct
  source 1..75: mol_type = other DNA
gaataattcctggttcaggatgcaggcaggtcaccagagtgacgcggatatttatatttatgacgagattggttt

SEQ ID NO: 80525 - DNA, 75 bp, synthetic construct
  source 1..75: mol_type = other DNA
ctgactggctggtgattgagtgcagcgttaaccccggcgagacatttctggatcggatgatcgcgatggtggaag

SEQ ID NO: 80526 - DNA, 75 bp, synthetic construct
  source 1..75: mol_type = other DNA
tttttggtagcaagacaaagcttgccagtgccgcaggagtaaggctggcaagtattgctgcatggggggagctgg

SEQ ID NO: 80527 - DNA, 75 bp, synthetic construct
  source 1..75: mol_type = other DNA
gtcagatgaaccaggcactggcaatgtattcccgcattgatgccaccaactttgaagatattcagcaatcggtaa

SEQ ID NO: 80528 - DNA, 75 bp, synthetic construct
  source 1..75: mol_type = other DNA
aagataatcagactcgtattcctgacggcattctctatatcaacggtctgccactggtcgtctttgaatttaaaa

SEQ ID NO: 80529 - DNA, 75 bp, synthetic construct
  source 1..75: mol_type = other DNA
taacgctgccggattttgagcgtgaggatgactggtggcgcaacggtcagaacctttacctggacaatatggcgg

SEQ ID NO: 80530 - DNA, 75 bp, synthetic construct
  source 1..75: mol_type = other DNA
ttccgcgagctgaaatcaaacggctacatcgtggacggtgaatgctggttcgacgaggaatcgaacgataaggaa

SEQ ID NO: 80531 - DNA, 75 bp, synthetic construct
  source 1..75: mol_type = other DNA
aaaaacagcctgagtggtacgtgaaagctgtcagaaaaactatcgcaaagttgccgggtggttacgctgaagcag

SEQ ID NO: 80532 - DNA, 75 bp, synthetic construct
  source 1..75: mol_type = other DNA
tcgggtatatcagcgcatggggctgtaaaaccatttccgaggtgaaagcctaccgccagaatttcagccagcgtg

SEQ ID NO: 80533 - DNA, 75 bp, synthetic construct
  source 1..75: mol_type = other DNA
tcgttgcccggcaacatggtgtagcagccagttacttctctggcgcaagcaataccaggagggaagtcttactgc

SEQ ID NO: 80534 - DNA, 75 bp, synthetic construct
  source 1..75: mol_type = other DNA
ttcccgaagcaagcggagaaagaaaggtgagcgcgcatttctgaaaggcggtggcagtgtgctgattgtgggtaa

SEQ ID NO: 80535 - DNA, 75 bp, synthetic construct
  source 1..75: mol_type = other DNA
taactggtatcccacagcaagtatcagcgatctgctggttgtggtgatgaaaaaatccacagcaggtatcagtat

SEQ ID NO: 80536 - DNA, 75 bp, synthetic construct
  source 1..75: mol_type = other DNA
gaagcgcatcaatggaataagtgaagtgtttagcctgttcggcagtcgttacgacgggatcaaaatggcgtgtct

SEQ ID NO: 80537 - DNA, 75 bp, synthetic construct
  source 1..75: mol_type = other DNA
gttacatcagaagaactggttaaagctgtgcacttttatgaacaactaaaacgcgaaaatccaccagcatccggc

SEQ ID NO: 80538 - DNA, 75 bp, synthetic construct
  source 1..75: mol_type = other DNA
ggcattcgcatcacttcggaaattgatgcaaaagatcgtggcattctcgaatcacaactggatgagttgcaaatc

SEQ ID NO: 80539 - DNA, 75 bp, synthetic construct
  source 1..75: mol_type = other DNA
tcctatctgcgcgatccgcttattcgccacctctccttcctgcgcaaaaaacaggaagccgatcgccggaaaggc

SEQ ID NO: 80540 - DNA, 75 bp, synthetic construct
  source 1..75: mol_type = other DNA
gacaggctctggccaaaaggcgagtcggcgttcagcggctaccagttgctgctggagtatttcaccttccgcgag

SEQ ID NO: 80541 - DNA, 75 bp, synthetic construct
  source 1..75: mol_type = other DNA
ggtatgaactcggccttctgcattttcttaatggggaactggtaaaagctgcaactgcatttcgtcgcggctttg

SEQ ID NO: 80542 - DNA, 75 bp, synthetic construct
  source 1..75: mol_type = other DNA
cccgctattccttggcgcactgtgccacaccttctcgccgggggcggggaaatattttggatcattcaccaacgg

SEQ ID NO: 80543 - DNA, 75 bp, synthetic construct
  source 1..75: mol_type = other DNA
atgaacatcgcaatttttaacggcaaagtatccatgaccagcgttgaaattgcagagctggtgggtaaacgtcat

SEQ ID NO: 80544 - DNA, 75 bp, synthetic construct
  source 1..75: mol_type = other DNA
cgcagggtatccttctgcaaggtcaggctgaattgctcaaggcagagaaccaacaggcgcagattcaggttgaag

SEQ ID NO: 80545 - DNA, 75 bp, synthetic construct
  source 1..75: mol_type = other DNA
ttaccgggcggcgctttgagcacggggtgacggactgttacacgctgttccgggatgcttaccatctggcgggga

SEQ ID NO: 80546 - DNA, 75 bp, synthetic construct
  source 1..75: mol_type = other DNA
ttgctatttccgccctggcgtttattgtcgcctccggatttagtttctggcggttgtcccctgctgaaaatacag

SEQ ID NO: 80547 - DNA, 75 bp, synthetic construct
  source 1..75: mol_type = other DNA
gtaacgacaataatgtccatgataagacgttcagggatggctcgttccttaaaattggttggccctcggtcaata

SEQ ID NO: 80548 - DNA, 75 bp, synthetic construct
  source 1..75: mol_type = other DNA
aacatacggacctggtagcaacgttgtactgccagcagaagaagcggaagaactggcacgaattgctctggcatc

SEQ ID NO: 80549 - DNA, 75 bp, synthetic construct
  source 1..75: mol_type = other DNA
actgaaaaccgccggatattcacgcagttttattcagtattcatcgggtaataaatacgctgcgttatctgcatt

SEQ ID NO: 80550 - DNA, 75 bp, synthetic construct
  source 1..75: mol_type = other DNA
ttgacgctgaaatgcgttatctgcgtgaagccggaaaggcgtttgcacaggctcatcccgatcgggcggcgatgc

SEQ ID NO: 80551 - DNA, 75 bp, synthetic construct
  source 1..75: mol_type = other DNA
gtggttttaatcagatggagtacaacaagattatgctggataacatagccagagtcagggcaatgtgttcagaaa

SEQ ID NO: 80552 - DNA, 75 bp, synthetic construct
  source 1..75: mol_type = other DNA
tttttcgaatttaaaaatactgtcgatatgatggggagcgaagacttttgtcagttcctgcgggatgatgaagag

SEQ ID NO: 80553 - DNA, 75 bp, synthetic construct
  source 1..75: mol_type = other DNA
tgacgaacatcagcccgtcaccaccgccggcattctgacaccacgacgccgggaggattacggtaaggacctgtg

SEQ ID NO: 80554 - DNA, 75 bp, synthetic construct
  source 1..75: mol_type = other DNA
cgacggcaccaacgatgctccggcgctggcgcaggcagatgtcgcggtggcgatgaactccggtactcaggcggc

SEQ ID NO: 80555 - DNA, 75 bp, synthetic construct
  source 1..75: mol_type = other DNA
caggacggcgatctggatgtcagcggcggcggtcacggtattgatatcaccggcgacagcgcgacggtggataac

SEQ ID NO: 80556 - DNA, 75 bp, synthetic construct
  source 1..75: mol_type = other DNA
aaagttattcgcgttctcgatggcgacaccatagaagttaaaacactacccgcaaaaattgttgtgtatgaagtt

SEQ ID NO: 80557 - DNA, 75 bp, synthetic construct
  source 1..75: mol_type = other DNA
gtgacagcattactgacactggaagaaatcaaggctcatctgcgtgttgaccatgacgcggatgatgacatgctg

SEQ ID NO: 80558 - DNA, 75 bp, synthetic construct
  source 1..75: mol_type = other DNA
tgctcagaatgtgggataaacgccagcggggttataaggcgatggggtacaggattgtggctgatggtgaagggc

SEQ ID NO: 80559 - DNA, 75 bp, synthetic construct
  source 1..75: mol_type = other DNA
taactttgttcgccgtggactgcgcacacgcctgaaacgcatcgaacaggtgaatgaatgcttcgccacgacggc

SEQ ID NO: 80560 - DNA, 75 bp, synthetic construct
  source 1..75: mol_type = other DNA
tgaacgataaccaggggcgtttcgtatttccggatatctggtttggcccattactgggggagtttgaagaactgc

SEQ ID NO: 80561 - DNA, 75 bp, synthetic construct
  source 1..75: mol_type = other DNA
cagatcgaagcggacaaatccggtaccgtgaaagcaattctggtcgaaagtggacaaccggtagaatttgacgag

SEQ ID NO: 80562 - DNA, 75 bp, synthetic construct
  source 1..75: mol_type = other DNA
agcgaggcagaccggcgtctgcagataaaaagcgcactgtcctggtggctggtctgccggggagacattcataaa

SEQ ID NO: 80563 - DNA, 75 bp, synthetic construct
  source 1..75: mol_type = other DNA
gcggagaagacagccgtctggtgaccaccgctatcactgcggatacagagcatcgtttcagtggtctgccgctcg

SEQ ID NO: 80564 - DNA, 75 bp, synthetic construct
  source 1..75: mol_type = other DNA
catgcagatgaattttcaccttactggtatgaactcggccttctgcattttctgaaccggccccttgaaacgcca

SEQ ID NO: 80565 - DNA, 75 bp, synthetic construct
  source 1..75: mol_type = other DNA
acacaccgcgcgaggcgaaggacaatctcaaatccacgcagatgatgagcgtgattgacgccattggtgaagggc

SEQ ID NO: 80566 - DNA, 75 bp, synthetic construct
  source 1..75: mol_type = other DNA
tctgcataacttcccggaagggattgccacctttgtcacggcgagcagcaacctggagctgggatttggcatcgc

SEQ ID NO: 80567 - DNA, 75 bp, synthetic construct
  source 1..75: mol_type = other DNA
gggagattgtggcactggtccacagtcatcccggtggtctgccctggctgagcgaggccgaccggcggctgcaga

SEQ ID NO: 80568 - DNA, 75 bp, synthetic construct
  source 1..75: mol_type = other DNA
tggagaagagcgtatttatgccacacaagcgccgataagtgtgattgcagacgtgatcacagcatgggagttgga

SEQ ID NO: 80569 - DNA, 75 bp, synthetic construct
  source 1..75: mol_type = other DNA
cagttttcgctctgagtctttgtctgctgtcaccggctcaggccgaagaacagcgttacatcagtatccgcaaca

SEQ ID NO: 80570 - DNA, 75 bp, synthetic construct
  source 1..75: mol_type = other DNA
tgtttgaccggatagaggagaagcgtgatgccatgcagtcgctggtcctgccgccaccggcacgccaggcgctgg

SEQ ID NO: 80571 - DNA, 75 bp, synthetic construct
  source 1..75: mol_type = other DNA
cggtacgtctgttaatggtcatcctgacgaacttggaactaccggtgataccggtaccgccgttgtggtctctgc

SEQ ID NO: 80572 - DNA, 75 bp, synthetic construct
  source 1..75: mol_type = other DNA
tgcacatgcagccaatcaagggcaaggtgttgttaattttaaaggaactgtaattgatgcaccatgcggtattga

SEQ ID NO: 80573 - DNA, 75 bp, synthetic construct
  source 1..75: mol_type = other DNA
tgagtacatttgaacaactgcaccagaataaggatgaggtgtttgagcggggggtgatcaacgtcttcagagggt

SEQ ID NO: 80574 - DNA, 75 bp, synthetic construct
  source 1..75: mol_type = other DNA
attctccggtacgcctgttaatggtcatactgatgagcttggtactgctggtgataccggtactgctgttgttgt

SEQ ID NO: 80575 - DNA, 75 bp, synthetic construct
  source 1..75: mol_type = other DNA
aacgagttaggtactgctggtgataccggtacagcaattgttatttccagtgaggatggctctctggtgactttt

SEQ ID NO: 80576 - DNA, 75 bp, synthetic construct
  source 1..75: mol_type = other DNA
ggggggatggaacctgtatggatatcaattgaatccgatatcagacatcgaccccctgggtttatctatgtggga

SEQ ID NO: 80577 - DNA, 75 bp, synthetic construct
  source 1..75: mol_type = other DNA
ttaacgcgccagcaaaacccgccaccattgaactgacgccggggtattttcagataacggcggtcccgcgtcttg

SEQ ID NO: 80578 - DNA, 75 bp, synthetic construct
  source 1..75: mol_type = other DNA
gtcaagggctcgcggcagttccgcgactttgacgactacctgctgccggcagagaggttcgccgcgctcaagcat

SEQ ID NO: 80579 - DNA, 75 bp, synthetic construct
  source 1..75: mol_type = other DNA
atcatcctttgtaccggcgacatgggctttggcgcttgcaaaacttacgacctggaagtatggatcccggcacag

SEQ ID NO: 80580 - DNA, 75 bp, synthetic construct
  source 1..75: mol_type = other DNA
atgaatcaaatttacgacagttttccgtttccttcccctgagggttttaccgcaggtatgacaatggcgggatat

SEQ ID NO: 80581 - DNA, 75 bp, synthetic construct
  source 1..75: mol_type = other DNA
tgtccccccaaaaaaaatgctgaatgaaatgattgagcaggcgcaccgggattttgtggcaaatgagcagcataa

SEQ ID NO: 80582 - DNA, 75 bp, synthetic construct
  source 1..75: mol_type = other DNA
acggaaggggcaacagcgtggtgcgcagaatatgatgaatggggcaacctgctgaatgaagagaacccgcatcag

SEQ ID NO: 80583 - DNA, 75 bp, synthetic construct
  source 1..75: mol_type = other DNA
atgctgacccacccgcgctacgggatgggaaaacgcctgggggcctcggacgtggacaagtgggcgctgtatgcc

SEQ ID NO: 80584 - DNA, 75 bp, synthetic construct
  source 1..75: mol_type = other DNA
ataaccatttttgcactgcacactgttcactctgtgatgtttcacccggaaaccttcacaccagacggacatttc

SEQ ID NO: 80585 - DNA, 75 bp, synthetic construct
  source 1..75: mol_type = other DNA
atgacagaaagtattggaggtaaaactgctccggactgggccatgaaacaggattttcgctgcggttgctggctg

SEQ ID NO: 80586 - DNA, 75 bp, synthetic construct
  source 1..75: mol_type = other DNA
cgatattgaggctatcgccacgccagtaaccaaaatggctcgcacaattctcgaagcgggtcagttgccggggat

SEQ ID NO: 80587 - DNA, 75 bp, synthetic construct
  source 1..75: mol_type = other DNA
atgccatgtatatgctgaaggtgcagaaaacaaaaaacggtattccctatgtggccgggattggcgcggggattg

SEQ ID NO: 80588 - DNA, 75 bp, synthetic construct
  source 1..75: mol_type = other DNA
cagaatacttccaggagagaaaactgcgcgtttatatgaggccggtaaggggcgcagccgggcagactggctgac

SEQ ID NO: 80589 - DNA, 75 bp, synthetic construct
  source 1..75: mol_type = other DNA
taactacgccaaaaagcatgcagccaaggggaatggttttggctttgggttggtcaatcctgagaataaggaaag

SEQ ID NO: 80590 - DNA, 75 bp, synthetic construct
  source 1..75: mol_type = other DNA
ccgtccgcctgctgattcagttacagcgtaacggtaactgggtgacagaaaaggatgtcaccattaacggcaaga

SEQ ID NO: 80591 - DNA, 75 bp, synthetic construct
  source 1..75: mol_type = other DNA
acccgtaaaaaagagcggtgtcgacttacccgagtcagactttgaagcatgggctacgttacaggtggattacca

SEQ ID NO: 80592 - DNA, 75 bp, synthetic construct
  source 1..75: mol_type = other DNA
atcatcgacaacatcaacggcgacaacttccgccaggacgtgccttacaccatcacctgcgatcctgatgtgcgc

SEQ ID NO: 80593 - DNA, 75 bp, synthetic construct
  source 1..75: mol_type = other DNA
accgatgctgatcgggaaggcgaaattattgccagagaactgcttgattattgtggctatacaggagtagttcga

SEQ ID NO: 80594 - DNA, 75 bp, synthetic construct
  source 1..75: mol_type = other DNA
ctgacagaaagcatcggaggtaaaaccgcactggactgggccatgaaacaggattttcgttgcggttgctggctg

SEQ ID NO: 80595 - DNA, 75 bp, synthetic construct
  source 1..75: mol_type = other DNA
atggatgttggcgagcttcgtgaagctgttcgagttaaacttaaagcccgtaaagagtggcgagttgctcaataa

SEQ ID NO: 80596 - DNA, 75 bp, synthetic construct
  source 1..75: mol_type = other DNA
aaagcaaaacgtttaaaaccgaaaatggtgcccgtcgctggctggaaagaaactcaggtgagtgatatggatttc

SEQ ID NO: 80597 - DNA, 75 bp, synthetic construct
  source 1..75: mol_type = other DNA
ggacgcctttatattgcgggtatcggagccggtattgagaatacgccagcaggtatgcagagtcaggtgcttctg

SEQ ID NO: 80598 - DNA, 75 bp, synthetic construct
  source 1..75: mol_type = other DNA
tatttatccgctttattgattttcgcggtgagctgttgttgcgcgcatcagctattgatggagtggttccggtag

SEQ ID NO: 80599 - DNA, 75 bp, synthetic construct
  source 1..75: mol_type = other DNA
ggtgaataactggtatcccacagcaagtatcagcgatttgctggttgtggtgatgaagaaagccaccgcaggcat

SEQ ID NO: 80600 - DNA, 75 bp, synthetic construct
  source 1..75: mol_type = other DNA
atgacggcagaaccctacgatgataactacctggatgatgaagacgcggactggaccgcgaccgggcaggggcag

SEQ ID NO: 80601 - DNA, 75 bp, synthetic construct
  source 1..75: mol_type = other DNA
gcggtcaggacagccgtctggtgaccaccgccatcaccgcggatacagagcaccgtttcagcggtctgccgccgg

SEQ ID NO: 80602 - DNA, 75 bp, synthetic construct
  source 1..75: mol_type = other DNA
gccgcccagcttcgaaaaggagagctgcatatgatgtttgacgctggcattcacatcaaaggagaagagcatgga

SEQ ID NO: 80603 - DNA, 75 bp, synthetic construct
  source 1..75: mol_type = other DNA
gtgagttccatgcttgagattttttttccgctttgcaccactgatcccatccgctggcagcaccgtacacccgac

SEQ ID NO: 80604 - DNA, 75 bp, synthetic construct
  source 1..75: mol_type = other DNA
ggagaggctaattatttaaaaggtaacaatgtagagtcaccggtaacagggactgttggcttcaagataaacttt

SEQ ID NO: 80605 - DNA, 75 bp, synthetic construct
  source 1..75: mol_type = other DNA
gtgcagtattatccgggtaaacatccgtgtgagaagccagcagatatgttgcggcagataattacagccagcagt

SEQ ID NO: 80606 - DNA, 75 bp, synthetic construct
  source 1..75: mol_type = other DNA
aaacgagcggtggatgcactctctgtggctgtggagcacctgtgtaaactgattaagaaggaggcagtcagtgag

SEQ ID NO: 80607 - DNA, 75 bp, synthetic construct
  source 1..75: mol_type = other DNA
ggaaagcctgcgggcgtatttcccggcaacagagcgcattctgtttgcagaacattatcaggggccataccagcc

SEQ ID NO: 80608 - DNA, 75 bp, synthetic construct
  source 1..75: mol_type = other DNA
gcgcagggggtagagatgatgcgcgaacacccatcaatcaaactttgctctttgacgcacatatgtgatgagtta

SEQ ID NO: 80609 - DNA, 75 bp, synthetic construct
  source 1..75: mol_type = other DNA
accggaattgttcctcagtttggcgaacttaagcagagtgatgttgatttagtccttttctacagggacgaatat

SEQ ID NO: 80610 - DNA, 75 bp, synthetic construct
  source 1..75: mol_type = other DNA
tgtagtatccgcattaattgttttcgcatttattgtaatgatgattactgctctctacgatgtcagtaacgtcct

SEQ ID NO: 80611 - DNA, 75 bp, synthetic construct
  source 1..75: mol_type = other DNA
tatgggattatgccaaccgctcacaggcattattccgcgaactgtatccggcgctaaaacaaattcaatcgaact

SEQ ID NO: 80612 - DNA, 75 bp, synthetic construct
  source 1..75: mol_type = other DNA
ctctggaatatcccactggctggcaaaatacacattcaggtattccagaataagtttatatgaagatttatctgg

SEQ ID NO: 80613 - DNA, 75 bp, synthetic construct
  source 1..75: mol_type = other DNA
atgtgagacgatggcgcaaaaacggcaatatgccagcctgacgtcactcttcgcccagcttttcattgagctggc

SEQ ID NO: 80614 - DNA, 75 bp, synthetic construct
  source 1..75: mol_type = other DNA
tatcggcatcgccaaaaccggttattgatagcaccgataacagcagtctgcctgaaatcctcgtttcaccaccgt

SEQ ID NO: 80615 - DNA, 75 bp, synthetic construct
  source 1..75: mol_type = other DNA
aacgttggggggcatgggtggcaaataatcacgaggatgtcacttggtcgtctattgctgcaggatttaaaggac

SEQ ID NO: 80616 - DNA, 75 bp, synthetic construct
  source 1..75: mol_type = other DNA
ctggcgggtactgaagcctgccggaagtctctacctgttctgtggtcatcgcctggcatctgatatcgaaatcat

SEQ ID NO: 80617 - DNA, 75 bp, synthetic construct
  source 1..75: mol_type = other DNA
ttctacctgcgccagcacggcgaggaaaaaggccgccagattgcctgtgccctgctggaagatttaatggaagcc

SEQ ID NO: 80618 - DNA, 75 bp, synthetic construct
  source 1..75: mol_type = other DNA
catcgcagccacaactggcagcagaagtgatgccgtggttaagtactcaaccccagtcagtgctgaagagttatt

SEQ ID NO: 80619 - DNA, 75 bp, synthetic construct
  source 1..75: mol_type = other DNA
tgatccccgaaaaagtaaaatcacgtccacagtgttgtgacgatgacgcgatgattatatgcgggtgtatggctc

SEQ ID NO: 80620 - DNA, 75 bp, synthetic construct
  source 1..75: mol_type = other DNA
cgtctggtgcacatctggagcgtcccggtggagtatctgacgcgtaagtatcagctggtgcgcgctcgtcactaa

SEQ ID NO: 80621 - DNA, 75 bp, synthetic construct
  source 1..75: mol_type = other DNA
acacagcagcaggctgatgcccttggcagaacatccggacatgcagctcgtcaggatgctattgccaatctggtg

SEQ ID NO: 80622 - DNA, 75 bp, synthetic construct
  source 1..75: mol_type = other DNA
tcgtcaggagtactacggttgggaggacaacttcacggaaaccccagccaccgacgctttcctggctgaaattga

SEQ ID NO: 80623 - DNA, 75 bp, synthetic construct
  source 1..75: mol_type = other DNA
atgtatgaagcctggctgccgattgaagtgaaacagaaaatggcgatgtttgctggtggtgccagcggcgtactg

SEQ ID NO: 80624 - DNA, 75 bp, synthetic construct
  source 1..75: mol_type = other DNA
cgcgtggtggatgcgtcaattatgccgcagattatcaccgggaatttgaacgccacgacaattatgattggcgag

SEQ ID NO: 80625 - DNA, 75 bp, synthetic construct
  source 1..75: mol_type = other DNA
caccgggcacgtcaacccgaagtacggtagcgagccgggacggctgttctatacccatatctccgaccagtacgc

SEQ ID NO: 80626 - DNA, 75 bp, synthetic construct
  source 1..75: mol_type = other DNA
tggcctggaaaccgggagaagaaggtcagaaatggcttataggctggtttgaaagcggggatgtgcgggcctata

SEQ ID NO: 80627 - DNA, 75 bp, synthetic construct
  source 1..75: mol_type = other DNA
atggttcatcaacattacggaacgcagaccgttaatcgaggtgcggtcatgccaggaatgctggtcaaacacaaa

SEQ ID NO: 80628 - DNA, 75 bp, synthetic construct
  source 1..75: mol_type = other DNA
aaagttcaggttgatacaaataataacctgaacagcatgtgggccgtgaaactgcagcagatgaaggacggacgc

SEQ ID NO: 80629 - DNA, 75 bp, synthetic construct
  source 1..75: mol_type = other DNA
caccgtttcagcggcctgccgctcggggaatacaccctgacggtgcgggccattaacagctacggccagcagggc

SEQ ID NO: 80630 - DNA, 75 bp, synthetic construct
  source 1..75: mol_type = other DNA
gcggcgctgaagaagttctgcaaagacgctgcattcgatgccgattacgaagcagagctaggtatggagcgtggt

SEQ ID NO: 80631 - DNA, 75 bp, synthetic construct
  source 1..75: mol_type = other DNA
actgtcgatgacggaactggaggagctggctgcagctatggcgcaggttgatcgcaataatgagatttatcgtca

SEQ ID NO: 80632 - DNA, 75 bp, synthetic construct
  source 1..75: mol_type = other DNA
atgctttgcacatgtaggttagcctcttacgcgccggaaggcaaggagaagcaggctatgaagcagcaaaaggcg

SEQ ID NO: 80633 - DNA, 75 bp, synthetic construct
  source 1..75: mol_type = other DNA
aaaggctgcgctctatctggaacgtagagctattggtgtagagctggaaacggataggtttaatcaaacggttga

SEQ ID NO: 80634 - DNA, 75 bp, synthetic construct
  source 1..75: mol_type = other DNA
tctgggaccggataacgacatgctgacgctttctggcgttcttatgccggagataacaggcggcaggctgtcgtt

SEQ ID NO: 80635 - DNA, 75 bp, synthetic construct
  source 1..75: mol_type = other DNA
attcattcgcccggctttcgatacgacagaggaactggcagcacggattgccatacagcgaatgaatcaggctat

SEQ ID NO: 80636 - DNA, 75 bp, synthetic construct
  source 1..75: mol_type = other DNA
gtgcgcaggggaaaactgcgccgcaatgtggtggtcctttcccggcgctcccgcgatggcgggatggaatccggt

SEQ ID NO: 80637 - DNA, 75 bp, synthetic construct
  source 1..75: mol_type = other DNA
tgagttctggttttcggaggcaaaaattgcagacgccgcacaggtggaaacctctgcccgttatctggggaccgg

SEQ ID NO: 80638 - DNA, 75 bp, synthetic construct
  source 1..75: mol_type = other DNA
ataactggacgccaacgaccagtatcagcgaccttcttgttgtcgtgatgaagaaatcaacagccggtatcagta

SEQ ID NO: 80639 - DNA, 75 bp, synthetic construct
  source 1..75: mol_type = other DNA
ctcaacaatgtcacgattaatcagaactgccggattctgggaaaactgtcagctaaccagattgaaggtgatatt

SEQ ID NO: 80640 - DNA, 75 bp, synthetic construct
  source 1..75: mol_type = other DNA
gaacaaggatgaggtgtttgagcgaggggtgatcaacgtcttcaggggactgagctggaattacaaaaccaattg

SEQ ID NO: 80641 - DNA, 75 bp, synthetic construct
  source 1..75: mol_type = other DNA
tgaacgcctgacacgtcagacgctgtatcgcgccaatcgcctgttcatggaggcgtataccgaaattctggaact

SEQ ID NO: 80642 - DNA, 75 bp, synthetic construct
  source 1..75: mol_type = other DNA
atgattaccaattatgaagccactgttgtaactaccgatgacattgttcacgaggttaatctggaaggaaagcgt

SEQ ID NO: 80643 - DNA, 75 bp, synthetic construct
  source 1..75: mol_type = other DNA
aaggcaatccaggaactggggaccggcgaggcgttaatctcgtttctcgatgcgaaaggaagtccttcagtggtg

SEQ ID NO: 80644 - DNA, 75 bp, synthetic construct
  source 1..75: mol_type = other DNA
cggatatcagtggagccatcacggcgaataccggcacgctcaataatgtcaccattaacgagaactgtgtcatca

SEQ ID NO: 80645 - DNA, 75 bp, synthetic construct
  source 1..75: mol_type = other DNA
ttaaatcgatttattaataacgaactagttaatgatttagggttggaatatggttccgttatcataaatatcggt

SEQ ID NO: 80646 - DNA, 75 bp, synthetic construct
  source 1..75: mol_type = other DNA
aatatgaagttggtgaaaataacttaaaggtattcaacgtacactttaataataatcacgagttagttctggtga

SEQ ID NO: 80647 - DNA, 75 bp, synthetic construct
  source 1..75: mol_type = other DNA
acgggtcacccggaagcgcgcaagctgctcgattacaccattgaaattatcgagaaatacttctggagcgaagaa

SEQ ID NO: 80648 - DNA, 75 bp, synthetic construct
  source 1..75: mol_type = other DNA
cgatggcactacgtttgttactcgtttctacagtgctgaactaaattatgtgacacgctggatcctttataacgg

SEQ ID NO: 80649 - DNA, 75 bp, synthetic construct
  source 1..75: mol_type = other DNA
gcgacggagaggcatttctgtttggcgctaacatcacgccaatggctgtggcctccacgcatgtggtgtgcgatc

SEQ ID NO: 80650 - DNA, 75 bp, synthetic construct
  source 1..75: mol_type = other DNA
ggggctgatagatgagacgcttctgggccaggcactgaaagagcgcattgatgcttcagcgctgcgtacggaggt

SEQ ID NO: 80651 - DNA, 75 bp, synthetic construct
  source 1..75: mol_type = other DNA
tgagctgaagcaggcgaccgccaccattactgacatgcagcagcgccagcgtgctgctgatgcactcgatgctaa

SEQ ID NO: 80652 - DNA, 75 bp, synthetic construct
  source 1..75: mol_type = other DNA
cggaagtggtcaacgggcatacggacgttatctgctcaaccagtatccgccacattctggctgtacaaaagagta

SEQ ID NO: 80653 - DNA, 75 bp, synthetic construct
  source 1..75: mol_type = other DNA
cactattcgtctggatggtcacatccagtccgttcagggtaaagagcgctatgaagacgagatgttcatcattaa

SEQ ID NO: 80654 - DNA, 75 bp, synthetic construct
  source 1..75: mol_type = other DNA
gctggctcttgttgaggaatacaacgagatagccagccgtgtcggtatggatgaattcaacgtcatacttcgtgg

SEQ ID NO: 80655 - DNA, 75 bp, synthetic construct
  source 1..75: mol_type = other DNA
ctgcactggactgggccatgaaacaggattttcgctgcggctgctggctgatggagaaaacggaaaccgcaatga

SEQ ID NO: 80656 - DNA, 75 bp, synthetic construct
  source 1..75: mol_type = other DNA
cgcttcagtcaggtctggcaggaaaacggactggatcacaactggctgccgctgccggtacatccgtggcagtgg

SEQ ID NO: 80657 - DNA, 75 bp, synthetic construct
  source 1..75: mol_type = other DNA
atgcgctacagcagaccggcctgaaagcgcagcctgttgatgtcatcgtcacattgccgatctctgaataccttg

SEQ ID NO: 80658 - DNA, 75 bp, synthetic construct
  source 1..75: mol_type = other DNA
ttgatggggagtacgtctgcgacattgatatcagtgttgaggaatggaaaatattattaatgaatgaaaaagttt

SEQ ID NO: 80659 - DNA, 75 bp, synthetic construct
  source 1..75: mol_type = other DNA
ggctatgtctcccatgaaggctatgccgcgcttgcccgggctccctatcgctaccaggaaatgcttggtgttatc

SEQ ID NO: 80660 - DNA, 75 bp, synthetic construct
  source 1..75: mol_type = other DNA
cttcctttattgatgtcattccctatagctcatggcaaattgatgccgccattattggcaatgcccataacgttg

SEQ ID NO: 80661 - DNA, 75 bp, synthetic construct
  source 1..75: mol_type = other DNA
caacggataacggcagacagaacacgtatttttcctcactggacaacatgattgcccagggcaacccgatgccgg

SEQ ID NO: 80662 - DNA, 75 bp, synthetic construct
  source 1..75: mol_type = other DNA
atgcggatatcagtggcagtgtgaatgcgaactcagggacgctcaacaacgtcacgattaatgagaactgtcaga

SEQ ID NO: 80663 - DNA, 75 bp, synthetic construct
  source 1..75: mol_type = other DNA
caagactcaagactcaagactcaagactcaagactcaagactcaagactcaagactcaagactcaagactcaaga

SEQ ID NO: 80664 - DNA, 75 bp, synthetic construct
  source 1..75: mol_type = other DNA
ctgcacaggtcactattaaacaaaatgggtatgacatttataatagtacggtgccaccggggccttttaccatca

SEQ ID NO: 80665 - DNA, 75 bp, synthetic construct
  source 1..75: mol_type = other DNA
tgaaatatagccttgcaacaggtcagttaccgtccgtccacgccgccgcgatgctgttattggtcgcttttatcg

SEQ ID NO: 80666 - DNA, 75 bp, synthetic construct
  source 1..75: mol_type = other DNA
tctttcatacaaataaaaaaataccatttatgacttgtattgttaaagatgttgaagagaatgaacaagtaataa

SEQ ID NO: 80667 - DNA, 75 bp, synthetic construct
  source 1..75: mol_type = other DNA
tctggtctaaagctacatccactaacgcgacggctgctaaaaatttccctgaagacggtgcagtcggtgtactgg

SEQ ID NO: 80668 - DNA, 75 bp, synthetic construct
  source 1..75: mol_type = other DNA
ttaatattcggaaatatcatgatattcctgctgaaacgccgtatgcgccgggagaacgaattaagggagggcggc

SEQ ID NO: 80669 - DNA, 75 bp, synthetic construct
  source 1..75: mol_type = other DNA
atgaattttaagaaaaaaatcgaagagcattttaagcagttcgaagcatcccctgtgttatttgttggctccggt

SEQ ID NO: 80670 - DNA, 75 bp, synthetic construct
  source 1..75: mol_type = other DNA
gtctgcacctgctgatcaccggccaggacttcgtggtgccgtacggctgggaagcgttatccgaactgctgggcc

SEQ ID NO: 80671 - DNA, 75 bp, synthetic construct
  source 1..75: mol_type = other DNA
gaaaaggtgttgaggtcatctttgattctgcgaaggcgatcgaatggtatgctcagcgcgaagctgatattgaaa

SEQ ID NO: 80672 - DNA, 75 bp, synthetic construct
  source 1..75: mol_type = other DNA
ccgtggaggatgcggtgcgcggaggctgtaacctgttcgacctggaccaactgcgcatggagtacagcccggacg

SEQ ID NO: 80673 - DNA, 75 bp, synthetic construct
  source 1..75: mol_type = other DNA
tggtttgaagccggaaaaacaaaccgcatccgtaatctgctcaagtcgcgccagattggcgccacgttttatttt

SEQ ID NO: 80674 - DNA, 75 bp, synthetic construct
  source 1..75: mol_type = other DNA
ggcctaccgtcgccgcgtgcagatgtaccgggagagcgagaaaaagacttaccagtggaagaagccggagcggtt

SEQ ID NO: 80675 - DNA, 75 bp, synthetic construct
  source 1..75: mol_type = other DNA
acgaaaagctccgcaaagaactggaagatttgcgtgcggctgcagaatcagatttacaacccggcaccattgact

SEQ ID NO: 80676 - DNA, 75 bp, synthetic construct
  source 1..75: mol_type = other DNA
tcagcggcaaaccgatccccgacaacagggaaaacataactattcatctggacgaacatatccggtctcttcagg

SEQ ID NO: 80677 - DNA, 75 bp, synthetic construct
  source 1..75: mol_type = other DNA
cagcggcaaccggtatgaccgtgacgccagccagcgcttccgtagtgaaagggaagagcaccacgctgaccgtgg

SEQ ID NO: 80678 - DNA, 75 bp, synthetic construct
  source 1..75: mol_type = other DNA
cggtaaaaggtgccggtaccactctgtgggtttacaacggcaaggctgatgcttatgcaaacccgttgtcagacg

SEQ ID NO: 80679 - DNA, 75 bp, synthetic construct
  source 1..75: mol_type = other DNA
atgagcgtgacaacggctgaactggcgtactgcatgacgcttcccccgaagcgggcagtcagttacctgaagtcc

SEQ ID NO: 80680 - DNA, 75 bp, synthetic construct
  source 1..75: mol_type = other DNA
aacgcattcgcaaaaaatttaaaacgaaatcggatgcagttttatatgagcggtgggtgctggcgcaacagcata

SEQ ID NO: 80681 - DNA, 75 bp, synthetic construct
  source 1..75: mol_type = other DNA
tgaaaaagaaattcgcgcatttgcagagaaagcccagcgggcaacgtttatctgcgcaagctttgatgaaacgct

SEQ ID NO: 80682 - DNA, 75 bp, synthetic construct
  source 1..75: mol_type = other DNA
tcccgctatagctctttcagcatttactgctttgaaacgtaatgaacaacaggatcctattctgttgattctcgc

SEQ ID NO: 80683 - DNA, 75 bp, synthetic construct
  source 1..75: mol_type = other DNA
ccgcgactggttgaacctttcgcaggttcctgtgctgtgatgatggcgacggattatccaagctatctggttgcg

SEQ ID NO: 80684 - DNA, 75 bp, synthetic construct
  source 1..75: mol_type = other DNA
atgttatatgcatttaagctgggcagaaaactgcgcggcgaggaaccttggtgccctgaaaaaggcgggaaaggt

SEQ ID NO: 80685 - DNA, 75 bp, synthetic construct
  source 1..75: mol_type = other DNA
cagatgcatggagcaaccttactggatgctcaacaacgggtattgcgccctgccattttgtggaacgacgggcgc

SEQ ID NO: 80686 - DNA, 75 bp, synthetic construct
  source 1..75: mol_type = other DNA
gacaacgagtacagtcgaagagccatcggcaagtatattgatgtctggcattatcctgacggacataaggagctg

SEQ ID NO: 80687 - DNA, 75 bp, synthetic construct
  source 1..75: mol_type = other DNA
gttactcaacctgcgtccgtcaccggagtttgaacgctggctggaaagcatgggcattatggcaaacggtcgcct

SEQ ID NO: 80688 - DNA, 75 bp, synthetic construct
  source 1..75: mol_type = other DNA
cagaaattgagcgcggcgctgatgccgttggcggaattccctccaccgcgttaaaaggggcaggtctgctgccac

SEQ ID NO: 80689 - DNA, 75 bp, synthetic construct
  source 1..75: mol_type = other DNA
caacttgacagtaatctgacaagttctttagggcaacttgaaaggaagtttaataagacctttgacaagattgaa

SEQ ID NO: 80690 - DNA, 75 bp, synthetic construct
  source 1..75: mol_type = other DNA
caacctgccggttaagagtgacccgcaatggtcaggagatttttaatcagtccacgacggatgctcagggcgtat

SEQ ID NO: 80691 - DNA, 75 bp, synthetic construct
  source 1..75: mol_type = other DNA
ggttgagcccgtcgccattgtagataacaagagacttggccatgtgttggatgttgcccgtcaggtccagagaaa

SEQ ID NO: 80692 - DNA, 75 bp, synthetic construct
  source 1..75: mol_type = other DNA
cgccgcgtggagatgtatcgggagaaggagaaaataacgtaccactggaagaagccggagcggttgcggcggtaa

SEQ ID NO: 80693 - DNA, 75 bp, synthetic construct
  source 1..75: mol_type = other DNA
aaaccgcaaatatacaaacaattatcacaagtgcccagagcctgctaaaaggtagcgatggatatacatttacca

SEQ ID NO: 80694 - DNA, 75 bp, synthetic construct
  source 1..75: mol_type = other DNA
cactattgatcgctggcaaactcaggggctccctcagatatctggtggaggaaaaggtgttgaggtcatctttga

SEQ ID NO: 80695 - DNA, 75 bp, synthetic construct
  source 1..75: mol_type = other DNA
ctcacccgactgctggaccagcattacggcctcacgctgaatgacacaccattcgccgatgaacgtgtgattgag

SEQ ID NO: 80696 - DNA, 75 bp, synthetic construct
  source 1..75: mol_type = other DNA
tttaaccgcagagaagttcgccacagcaatccgaaaccactggcacgtggagaataagctgcactggcgtctgga

SEQ ID NO: 80697 - DNA, 75 bp, synthetic construct
  source 1..75: mol_type = other DNA
ctcaacaacgtcacgattaatgagaactgtcagattaaggggaaactgtcagccaatcagattgaaggcgatatt

SEQ ID NO: 80698 - DNA, 75 bp, synthetic construct
  source 1..75: mol_type = other DNA
atgagcgcacgttcacaggcactggttcccctcagcgcagagcaacaggccacatggcgggcggtggcggagacg

SEQ ID NO: 80699 - DNA, 75 bp, synthetic construct
  source 1..75: mol_type = other DNA
atgttcatcattaaatactttaagaagggatctgcacacatcactttcaaaaggctggagctgattgacagaatt

SEQ ID NO: 80700 - DNA, 75 bp, synthetic construct
  source 1..75: mol_type = other DNA
gagcagacatttgccaccattgcgccttacacccttgaagaaacctacgaggtgctggacgccatcgcccgtgaa

SEQ ID NO: 80701 - DNA, 75 bp, synthetic construct
  source 1..75: mol_type = other DNA
ggggttcataccaccaccagtgtggtgcattcgatctttgtggtgattttgcttgatgccgtggcagcgctattt

SEQ ID NO: 80702 - DNA, 75 bp, synthetic construct
  source 1..75: mol_type = other DNA
aaagatgatggttctcccgttgttcttgatctgacacagaagcgtcagagattctccggagatattccgcaatga

SEQ ID NO: 80703 - DNA, 75 bp, synthetic construct
  source 1..75: mol_type = other DNA
aaagccggaaaactcaccatcgactatgactacacgccagtgccgccacttgaaaatctgatgctgcgtcagcgc

SEQ ID NO: 80704 - DNA, 75 bp, synthetic construct
  source 1..75: mol_type = other DNA
gatcttgatgaaaagctggcggaagccggaattggcggtagcaataaaagtagcgcccaggatgtattagcaaga

SEQ ID NO: 80705 - DNA, 75 bp, synthetic construct
  source 1..75: mol_type = other DNA
aaattatatttaaccttaatgccttaaagtatacaaaagcaagttactttgaaatacttggagagaaatatataa

SEQ ID NO: 80706 - DNA, 75 bp, synthetic construct
  source 1..75: mol_type = other DNA
cccctgtaaatttggcagtaaaattatcgtcaacaatctggtgaggtgggaccggtggggattgcatcttatcac

SEQ ID NO: 80707 - DNA, 75 bp, synthetic construct
  source 1..75: mol_type = other DNA
catgagtgcctttcagattttctgcacttatgtattacgcaataaaaatgcctggtatgtctcactggttgacgt

SEQ ID NO: 80708 - DNA, 75 bp, synthetic construct
  source 1..75: mol_type = other DNA
agttccgcttcgccaatgtgggtagccaatgcggcaacgatcgcgccatctgccgatacgctggatggcaaagtg

SEQ ID NO: 80709 - DNA, 75 bp, synthetic construct
  source 1..75: mol_type = other DNA
gggcgcaagaaaacgcctcggcatcaaaggcggctttttctggacagaggcaaaaaaactttctgttgcggtttc

SEQ ID NO: 80710 - DNA, 75 bp, synthetic construct
  source 1..75: mol_type = other DNA
atgatgcgctcaaagaatggctgaaactggataaatccattcagcagcagttcgcgaaaaaactaaagaaatgca

SEQ ID NO: 80711 - DNA, 75 bp, synthetic construct
  source 1..75: mol_type = other DNA
agggaaagggccttcccgagagtggtaaaggagaggccctggaaataccccacagccccgaaaaagagccagtaa

SEQ ID NO: 80712 - DNA, 75 bp, synthetic construct
  source 1..75: mol_type = other DNA
gagaagtccgggtgccccaccggggaaacgtggtggacagggtgattgaaggtgcttacgaagtggtgggcgtgt

SEQ ID NO: 80713 - DNA, 75 bp, synthetic construct
  source 1..75: mol_type = other DNA
gatgggttgccagaaagatattgcagagaagatacaaaaacagggaggtgattatttattcgcggtaaaaggaaa

SEQ ID NO: 80714 - DNA, 75 bp, synthetic construct
  source 1..75: mol_type = other DNA
atgctgaatgacttttcgcaaatagataacgatttaggcctgaatatcatctatttcctgcaacatggtcactgg

SEQ ID NO: 80715 - DNA, 75 bp, synthetic construct
  source 1..75: mol_type = other DNA
gacgtcaggttgagagccgtggagttcagtcagcaggcttgcagacgttttctcagccaggtattggtgatgctt

SEQ ID NO: 80716 - DNA, 75 bp, synthetic construct
  source 1..75: mol_type = other DNA
gaaggctccagtccaccacaatcaatggcaacgggaataaataaggttcgttatgatgcaggaatggaagagaaa

SEQ ID NO: 80717 - DNA, 75 bp, synthetic construct
  source 1..75: mol_type = other DNA
gtatctcatatcttatttgaacaggctaagatacactcaactgatatagcctctctctactactatagggcacta

SEQ ID NO: 80718 - DNA, 75 bp, synthetic construct
  source 1..75: mol_type = other DNA
aagaactgcagaaactgggcgtagacgtatacgcagtatctaccgatactcacttcacccacaaagcatggcaca

SEQ ID NO: 80719 - DNA, 75 bp, synthetic construct
  source 1..75: mol_type = other DNA
aacaaccccaccagctacgaagtcccaacctttagcaaatccgaacgtaagaacattgaagcggtcattcgtagc

SEQ ID NO: 80720 - DNA, 75 bp, synthetic construct
  source 1..75: mol_type = other DNA
gaggagtccggcctgtattacaaccgccaccgctattatgacccgctgcaggggaggtatatcactcaggattcg

SEQ ID NO: 80721 - DNA, 75 bp, synthetic construct
  source 1..75: mol_type = other DNA
ccacacccgtgcggttaacggcattgacggcgacgtgaagctcaaccgcgccctgtgggtaatggcggaaagcct

SEQ ID NO: 80722 - DNA, 75 bp, synthetic construct
  source 1..75: mol_type = other DNA
ttttccgccttcacatgccgggaccattaccgtctatgaaggctccagaccaggtacgctgaatgattttctcgg

SEQ ID NO: 80723 - DNA, 75 bp, synthetic construct
  source 1..75: mol_type = other DNA
catcaagctatcagatgctgccggggctgtttcgcggcgtctgtaccaacggactggtttgtggtcagtcatttg

SEQ ID NO: 80724 - DNA, 75 bp, synthetic construct
  source 1..75: mol_type = other DNA
tcccgctttgcgcctccgacaccatccgctggcagcgccgtacacccgacgtggagcacggtatctggcctgacg

SEQ ID NO: 80725 - DNA, 75 bp, synthetic construct
  source 1..75: mol_type = other DNA
tcgcacccgtgccgttaccggtattaatggcgacgtgaagctcaatcgtgccctgtgggtaatggcagagaatat

SEQ ID NO: 80726 - DNA, 75 bp, synthetic construct
  source 1..75: mol_type = other DNA
atgcaccctgatggtgtcgggggatttctgggcgctgaccaccactactgcgacgatcgggcagaaagtatttgc

SEQ ID NO: 80727 - DNA, 75 bp, synthetic construct
  source 1..75: mol_type = other DNA
gcgaagtcagggtgcctcataaaggcgacgtggtgggaaaagtcattgaaggggcttatgaggtgctcggggtgt

SEQ ID NO: 80728 - DNA, 75 bp, synthetic construct
  source 1..75: mol_type = other DNA
ttcccttcacatcacttcgcgaatggccgcaggatgtcgcaaaagctgaacgccgggcaaatgaaccgaccgttc

SEQ ID NO: 80729 - DNA, 75 bp, synthetic construct
  source 1..75: mol_type = other DNA
aaaagcgccgcccgccaggtgacgaatcagattgtgcgtggaatgttggggagtttgctgggggggagaaaaagg

SEQ ID NO: 80730 - DNA, 75 bp, synthetic construct
  source 1..75: mol_type = other DNA
cgtattcctgagggggaaaaacacacagcatcagcaatgaaagcctgtattaaagaatacaacgcaagcctccct

SEQ ID NO: 80731 - DNA, 75 bp, synthetic construct
  source 1..75: mol_type = other DNA
atgagcgaacccctgttaattgcccgcacgccggacacagaactgtttttactgccgggaatggcgaaccgtcac

SEQ ID NO: 80732 - DNA, 75 bp, synthetic construct
  source 1..75: mol_type = other DNA
gcgtaatcaggggaagttctttgcagaagtgcatgaggatgcttttgataagctaacgatgctgatccagcaggt

SEQ ID NO: 80733 - DNA, 75 bp, synthetic construct
  source 1..75: mol_type = other DNA
atgagagatgcagaatttagagcgatgcttcaggcatcaaaagaacgcaacaagcacaactcctacgcttacaca

SEQ ID NO: 80734 - DNA, 75 bp, synthetic construct
  source 1..75: mol_type = other DNA
cacgcgacctatcaggccggcgagggagctctggttgctggcgaggacggcctgactgtcggccgcttcgcctgg

SEQ ID NO: 80735 - DNA, 75 bp, synthetic construct
  source 1..75: mol_type = other DNA
atgtggaaccaaagccggggctctgcgggggcgcgcacgctggctgacatgctgacccaaaacggcgtcccgatg

SEQ ID NO: 80736 - DNA, 75 bp, synthetic construct
  source 1..75: mol_type = other DNA
ggctccgcgcatatcacgttcagaaaaccagaactggttgatcggctaaatgacatcgttgcgaagcattatccg

SEQ ID NO: 80737 - DNA, 75 bp, synthetic construct
  source 1..75: mol_type = other DNA
aaggcgctgaacatccacacaaggagaatgctggcagcgctcaggatcacgccagcgatagtgaaactggcgaga

SEQ ID NO: 80738 - DNA, 75 bp, synthetic construct
  source 1..75: mol_type = other DNA
cgggccgcacgacaacttccacccgagtaactcgcatgtgatccctgcattgctgcgccgcttccacgaggcgac

SEQ ID NO: 80739 - DNA, 75 bp, synthetic construct
  source 1..75: mol_type = other DNA
aaagacaagcgagactgcggcagctaactcggcgaaagcatccgctgcaagccagacagcggctaaagcaagtga

SEQ ID NO: 80740 - DNA, 75 bp, synthetic construct
  source 1..75: mol_type = other DNA
gaaacacgcgccgcaggatgcagaagctattctgacaaacaccagttcaccggagattgcagaacgccgtcgggc

SEQ ID NO: 80741 - DNA, 75 bp, synthetic construct
  source 1..75: mol_type = other DNA
cgccgataagtttgaaaagcgattatcagatctggatgacgttgctgaagaaagctggctggaggaaaacctgcc

SEQ ID NO: 80742 - DNA, 75 bp, synthetic construct
  source 1..75: mol_type = other DNA
gctgtggggtgtcttactggcttataatctggtgagatatcagatgattaaaatggcagaacatctgaaaggtta

SEQ ID NO: 80743 - DNA, 75 bp, synthetic construct
  source 1..75: mol_type = other DNA
atgcgattagccagccgttttggttatgcgaaccagatacgccgtaaccgccccttaactcgcgaagaattgatg

SEQ ID NO: 80744 - DNA, 75 bp, synthetic construct
  source 1..75: mol_type = other DNA
ctggccatcgcggaatggtcggttccgccatcacgcggcagctcgaacagcgcggtgatgtggaactggtattac

SEQ ID NO: 80745 - DNA, 75 bp, synthetic construct
  source 1..75: mol_type = other DNA
tgtcggtggttaacgacattaagacggccatcagcgagaaagtgaaactgagaccgggaaccagtgtggcattct

SEQ ID NO: 80746 - DNA, 75 bp, synthetic construct
  source 1..75: mol_type = other DNA
ggatgggtattgcttggagaaatatttcccttaatttcatctgagctcgctgggatggctttaatgccagaaacg

SEQ ID NO: 80747 - DNA, 75 bp, synthetic construct
  source 1..75: mol_type = other DNA
ccgccctggactgggcgatgaaacaggattttcgctgcggctgctggctcatggagaaaccggaaaccgcaatga

SEQ ID NO: 80748 - DNA, 75 bp, synthetic construct
  source 1..75: mol_type = other DNA
gttcatcattaaatactttaagaagggatctgcacacatcactttcaaaaggctggagctgattgacagaattaa

SEQ ID NO: 80749 - DNA, 75 bp, synthetic construct
  source 1..75: mol_type = other DNA
ggctccgcacacatcacgttcaggaaaccagaactggttgacaggctgaatgacatcattgcgaaacattatgcg

SEQ ID NO: 80750 - DNA, 75 bp, synthetic construct
  source 1..75: mol_type = other DNA
cgttatctgctccacctcagtcagccacattctggctgtgcgaaagactacactgctgcaaatcgacacacttat

SEQ ID NO: 80751 - DNA, 75 bp, synthetic construct
  source 1..75: mol_type = other DNA
cctataaaacggtgtataaagcaatccggagaatgcgaaagttagagcaaggtaagaggcagctctcatttaata

SEQ ID NO: 80752 - DNA, 75 bp, synthetic construct
  source 1..75: mol_type = other DNA
ataatagcagaacaaaagaaagagccagaaatgacggtcagatattatatcagttctgctgatttaaccgcagag

SEQ ID NO: 80753 - DNA, 75 bp, synthetic construct
  source 1..75: mol_type = other DNA
catggcgatcttcgcgaaattggcgaagtgtgcagcagaaaccgggttgccaaaatcatgaggaaaaacaggatt

SEQ ID NO: 80754 - DNA, 75 bp, synthetic construct
  source 1..75: mol_type = other DNA
ggcactcttatgacaagagtcgccgcaggggagcgattcatgtcattagtgcgttctcaacaatgcacagtctgg

SEQ ID NO: 80755 - DNA, 75 bp, synthetic construct
  source 1..75: mol_type = other DNA
ttccgcagcccgcaaggctgcatcccgccgagaacaaagccaatgttgccgtgcggcttgatggcgtactgaaac

SEQ ID NO: 80756 - DNA, 75 bp, synthetic construct
  source 1..75: mol_type = other DNA
atttaatcattctccgtttgggcagagttatatcacgggtatccgccgtaaccagactacaggacgtcttgaagc

SEQ ID NO: 80757 - DNA, 75 bp, synthetic construct
  source 1..75: mol_type = other DNA
ccatacccgtgccattcacagcatcgacaccgacattaagctcaatcgcgcattgtgggtaatggctgaaacgct

SEQ ID NO: 80758 - DNA, 75 bp, synthetic construct
  source 1..75: mol_type = other DNA
ttgaccggattgaggaaaagcgtgatgccatgcagtcgctgattctgccgccaccggcacgccagtcgctggcac

SEQ ID NO: 80759 - DNA, 75 bp, synthetic construct
  source 1..75: mol_type = other DNA
cgccggggatacacaaaacacatgctgcgtctgcggcgggccggagagataaacggagaacatttccctgaaatt

SEQ ID NO: 80760 - DNA, 75 bp, synthetic construct
  source 1..75: mol_type = other DNA
tggtgggcgtgctgggggcgcttttgctgtcgtatggcacatggctgatttatcccccggcaggttttgttgttg

SEQ ID NO: 80761 - DNA, 75 bp, synthetic construct
  source 1..75: mol_type = other DNA
ctgatgcgcgatcttgcaagtatgggacaacttgtgaaattaccgacaagaagggaaagggccttcccgagagtg

SEQ ID NO: 80762 - DNA, 75 bp, synthetic construct
  source 1..75: mol_type = other DNA
gattatctcgatgtaaccactccacagattgaggctggtacaggcgcatcatcttttattgttacggggacggca

SEQ ID NO: 80763 - DNA, 75 bp, synthetic construct
  source 1..75: mol_type = other DNA
ttgtgcctgttctggtcgtggctggtggcgcgatatcttgaccgtacacagtcgtctgtcggcggaggtaaatag

SEQ ID NO: 80764 - DNA, 75 bp, synthetic construct
  source 1..75: mol_type = other DNA
tacaaaaacagggcggtgattatttattcgctgtaaaaggaaaccaggggcggctaaataaagcctttgaggaaa

SEQ ID NO: 80765 - DNA, 75 bp, synthetic construct
  source 1..75: mol_type = other DNA
tcggggaaacctgcggtaaaaaccgggtgggtcggatcatgcaactgaaccggattaaagctgtgcgcggctata

SEQ ID NO: 80766 - DNA, 75 bp, synthetic construct
  source 1..75: mol_type = other DNA
tatcgctgaccaggacggtatcggtcaggaagaagaagcgcaactgaagaaaattgcgcaggcgctgcagttgcc

SEQ ID NO: 80767 - DNA, 75 bp, synthetic construct
  source 1..75: mol_type = other DNA
tctggtgccgaaatatgccgatgaagagagttctgcgtctggtgtgcgcattgacccgactcagacgcagaatct

SEQ ID NO: 80768 - DNA, 75 bp, synthetic construct
  source 1..75: mol_type = other DNA
tgcaggaaacgtcaatggacaaagtgcaacactgaaaggtgatgttacaagcgaaaacggctggttaatcaccaa

SEQ ID NO: 80769 - DNA, 75 bp, synthetic construct
  source 1..75: mol_type = other DNA
aaaggcggaaaagtcagtggtggtacagtccggtctgacggtcgtctttcaaccggggagtatttacagcttgat

SEQ ID NO: 80770 - DNA, 75 bp, synthetic construct
  source 1..75: mol_type = other DNA
aaaacatggatgatttgaagcgatattttgcagaagcatatcgcctgacatctggaatgaaattgcagcagaacg

SEQ ID NO: 80771 - DNA, 75 bp, synthetic construct
  source 1..75: mol_type = other DNA
aaacgtggtggacagggtgattgaaggtgcttacgaggtggtgggggtttttgaccggattgaagagaaacgtga

SEQ ID NO: 80772 - DNA, 75 bp, synthetic construct
  source 1..75: mol_type = other DNA
acggtcaaaaaagcagaaatcaaggtggagctgctgccgaaatatgccgcctgggcggagggcgttctggctgcc

SEQ ID NO: 80773 - DNA, 75 bp, synthetic construct
  source 1..75: mol_type = other DNA
acggtcaaaaaagcggaaatcaaggtggagctgctgccgaaatataccgcctgggcggagggcgttctggctgcc

SEQ ID NO: 80774 - DNA, 75 bp, synthetic construct
  source 1..75: mol_type = other DNA
tgtttggcgcagaactggtatcaaaaagcaccgactttttgtcccgcaatccggaaatcgccaatcttttccagg

SEQ ID NO: 80775 - DNA, 75 bp, synthetic construct
  source 1..75: mol_type = other DNA
gttgcaggaagaactctgcagcgtggtggaggcatccggtgccagtctggagaaggggaggcacgaccagctgct

SEQ ID NO: 80776 - DNA, 75 bp, synthetic construct
  source 1..75: mol_type = other DNA
gaacttggtcgacaggaatatcgccggacgctacgccagataaacgaagccctggagacaaacaactggccagca

SEQ ID NO: 80777 - DNA, 75 bp, synthetic construct
  source 1..75: mol_type = other DNA
gtctgacgaaaagtgataattcccggtgtcgtgcaaggttcggaaaaatgtctgataatggtgcgtttgtttttc

SEQ ID NO: 80778 - DNA, 75 bp, synthetic construct
  source 1..75: mol_type = other DNA
ttgaccggattgaggaaaagcgtgatgccatgcagtctctggtcctgccgccaccggcacgtcaggcgctggcac

SEQ ID NO: 80779 - DNA, 75 bp, synthetic construct
  source 1..75: mol_type = other DNA
tggaactgctgccgaaatacgccgcctgggcagagggggtcctggctggcggaggcgcgcaacaggatgacgtgc

SEQ ID NO: 80780 - DNA, 75 bp, synthetic construct
  source 1..75: mol_type = other DNA
gttggttataagcaaactgaagttggagtgattccggaggattggcaagtaattgtttttggagaggtgctatca

SEQ ID NO: 80781 - DNA, 75 bp, synthetic construct
  source 1..75: mol_type = other DNA
tgtgagcaggatacagccgttgattgacgaactgaacgcgttaccaaaaccagtccccaaagaagtgtcagaaaa

SEQ ID NO: 80782 - DNA, 75 bp, synthetic construct
  source 1..75: mol_type = other DNA
acggtttattgacggcggtgttgagttctccgcaagagattgaaccggaacagtggctggttgccgtgtggggtg

SEQ ID NO: 80783 - DNA, 75 bp, synthetic construct
  source 1..75: mol_type = other DNA
aacacaaaacgacccgcgggtaaccaaaattggtcactttctgcgtcgcacttcgctggatgaactcccacagtt

SEQ ID NO: 80784 - DNA, 75 bp, synthetic construct
  source 1..75: mol_type = other DNA
gaggagatgtatctggaaatggaacggcttattgccgatgccaaacccgcaagtcgccaccttatcggtctgaac

SEQ ID NO: 80785 - DNA, 75 bp, synthetic construct
  source 1..75: mol_type = other DNA
atatggcatcaattgctgcaacaaagtcagttgatgtctcaggcgataacaagtacgtgacaacctcatgccgtt

SEQ ID NO: 80786 - DNA, 75 bp, synthetic construct
  source 1..75: mol_type = other DNA
gcacacccgcgccattaaaggcatcgacggcgatatcaaactcaaccgcgccctgtgggtgatggctgaaaacat

SEQ ID NO: 80787 - DNA, 75 bp, synthetic construct
  source 1..75: mol_type = other DNA
tggcgcggtgatgggcgacgcaacataccaggaaacattcaacgaagaaagccaggatgaagcccgggagaaaga

SEQ ID NO: 80788 - DNA, 75 bp, synthetic construct
  source 1..75: mol_type = other DNA
gcagcatttccacttcttaagtttaatttgaaagagaaacagaaaaaccgtctatctctggttttgaaaaatgat

SEQ ID NO: 80789 - DNA, 75 bp, synthetic construct
  source 1..75: mol_type = other DNA
cgagtttctcaggctctcgttaacgcaggtctaatgaaccaggcgaatgctttcattgggaaattagttcaaatt

SEQ ID NO: 80790 - DNA, 75 bp, synthetic construct
  source 1..75: mol_type = other DNA
tccaggagaatatgctgaaaggcgggatttccggtcgcagtgcaaaaggaaaacgtatccacacccgtgccattc

SEQ ID NO: 80791 - DNA, 75 bp, synthetic construct
  source 1..75: mol_type = other DNA
ggtgggggtttttgaccggattgaggaaaagcgtgatgccatgcagtcgctgattctgccgccaccggcacgcca

SEQ ID NO: 80792 - DNA, 75 bp, synthetic construct
  source 1..75: mol_type = other DNA
ccggagacgggggaactgctgtggcagcatgagacgaaacacgcctacaacgaacaggggctggcaaaccgcgtc

SEQ ID NO: 80793 - DNA, 75 bp, synthetic construct
  source 1..75: mol_type = other DNA
gactatatttatctggccacccctcaggttgaggatggttcgtgtgcatcatcttttattatctcaggaacgacg

SEQ ID NO: 80794 - DNA, 75 bp, synthetic construct
  source 1..75: mol_type = other DNA
agtctgattcaactgaaattgcaggccggacgtaaaccgacgcaggcagaaacaaccagacttaacgctgtgctg

SEQ ID NO: 80795 - DNA, 75 bp, synthetic construct
  source 1..75: mol_type = other DNA
tctccagtgcggcgtaaaacccgcaaaacagagaatgaccgaaattctgcctgatgagttttatgctgccgaaaa

SEQ ID NO: 80796 - DNA, 75 bp, synthetic construct
  source 1..75: mol_type = other DNA
acgaagaaaaagctgcccaggaacgaatgcccggggcagatactcctgatgagttgctgaagaaggccaaagagt

SEQ ID NO: 80797 - DNA, 75 bp, synthetic construct
  source 1..75: mol_type = other DNA
gcatttaatgccatatgcaaagtgacgagtgctatcacgcttgatacgtggaaaaaatcagtgaaacgcttttac

SEQ ID NO: 80798 - DNA, 75 bp, synthetic construct
  source 1..75: mol_type = other DNA
ccggttgggcgcagattaacggctggcgcggcgaaaccgacacgctggagaaaatggaaaaacgcgtcgagttcg

SEQ ID NO: 80799 - DNA, 75 bp, synthetic construct
  source 1..75: mol_type = other DNA
agataaacggagaacatgtccctgaaatcattctgctcaactcccatgacggtacctccagctaccagatgctgc

SEQ ID NO: 80800 - DNA, 75 bp, synthetic construct
  source 1..75: mol_type = other DNA
accttgagtacatccgcgaatggagcgtctggttcgatatcaaaatcgttttcctgacggtattcaaaggcttcg

SEQ ID NO: 80801 - DNA, 75 bp, synthetic construct
  source 1..75: mol_type = other DNA
gtggcgatacctggagtcagaaagatgtcttcatgacataccgtactaccggtgtggcaacctatcgcaactacg

SEQ ID NO: 80802 - DNA, 75 bp, synthetic construct
  source 1..75: mol_type = other DNA
cactatgtacccagtatttttggggaagaccggcatacctcccgcagtgaacggtatgcgtacattcccaccatc

SEQ ID NO: 80803 - DNA, 75 bp, synthetic construct
  source 1..75: mol_type = other DNA
ggctgattgccgatgccaaacccgcaagtcgccaccttatcggtctgaacattatccaggacattcccggctatc

SEQ ID NO: 80804 - DNA, 75 bp, synthetic construct
  source 1..75: mol_type = other DNA
gcaagcgtgcagcgggatttctgatttgcaggtgccgctgcgtgacctgtgggatccgacgacctgtccggtcag

SEQ ID NO: 80805 - DNA, 75 bp, synthetic construct
  source 1..75: mol_type = other DNA
ttcagaaaatatccggaaatacagattgtctcgcgtgatcgcagtggagtctatgcgacagcagcacgtgaaggt

SEQ ID NO: 80806 - DNA, 75 bp, synthetic construct
  source 1..75: mol_type = other DNA
atagcacaaatatcaaacatggtggggatatccagtacttcatattttattagattgtttaataaacattttggt

SEQ ID NO: 80807 - DNA, 75 bp, synthetic construct
  source 1..75: mol_type = other DNA
atcagtccggatattgccgcttacgtaccgctggcagtgagatgcagatggtgcctgatgtgcttatctttgctc

SEQ ID NO: 80808 - DNA, 75 bp, synthetic construct
  source 1..75: mol_type = other DNA
cggaagtggtcaacgggcatacggacgttatttgctcaacctcagtcagccacattctggctgtacgaaagagta

SEQ ID NO: 80809 - DNA, 75 bp, synthetic construct
  source 1..75: mol_type = other DNA
tcgcgaagaaacgcagatgctcggatggcacaattaggaaggagctgcaaactgcaatgggatttgttgagggat

SEQ ID NO: 80810 - DNA, 75 bp, synthetic construct
  source 1..75: mol_type = other DNA
ggagtgatcaacgtcttcagagggctgagctggaattacaaaaccaattccccctgtaaatttggcagtaaaatt

SEQ ID NO: 80811 - DNA, 75 bp, synthetic construct
  source 1..75: mol_type = other DNA
tgatgatgtggctgaccgggtgcggcgggccgtctgtgaaatacgtgccggtgaagccggtgccgatccccgctg

SEQ ID NO: 80812 - DNA, 75 bp, synthetic construct
  source 1..75: mol_type = other DNA
gacctggaaagaatgctgcacctgttcagcggcaaaccgatccccgacaatcgggaaaacatcaccattcatctg

SEQ ID NO: 80813 - DNA, 75 bp, synthetic construct
  source 1..75: mol_type = other DNA
ccactggcacagcatgcactggcgaatgctgccctgacgtaccgttttggtgaagagcatcagccggtgacggca

SEQ ID NO: 80814 - DNA, 75 bp, synthetic construct
  source 1..75: mol_type = other DNA
ccgaagctgagccgccgcattgtggagcaggccatcaaagagatggaagatgatgggtaccagttcaacaagaaa

SEQ ID NO: 80815 - DNA, 75 bp, synthetic construct
  source 1..75: mol_type = other DNA
tttatcgtcagttactgccggaactggatctgattatctggatcctgcggagtgatgaacgtgcgtatgctgccg

SEQ ID NO: 80816 - DNA, 75 bp, synthetic construct
  source 1..75: mol_type = other DNA
aaatgtggtggacagagtcattgaaggggcttacgaagtggtgggcgtgtttgaccggatagaggagaagcgtga

SEQ ID NO: 80817 - DNA, 75 bp, synthetic construct
  source 1..75: mol_type = other DNA
ttgccgtaatgccggaagagataattatcaccgaaaagttttctatttactacgaaatattgacaagattagctc

SEQ ID NO: 80818 - DNA, 75 bp, synthetic construct
  source 1..75: mol_type = other DNA
gcgtcaccctgctggttgaagattttccgccttcacatgccgggaccattaccgtctatgaaggttccagaccag

SEQ ID NO: 80819 - DNA, 75 bp, synthetic construct
  source 1..75: mol_type = other DNA
gaaaacagtgggcgcgctggcgggtgatgattctgccgatattgctgattctggttgcgctggtagtggaacggg

SEQ ID NO: 80820 - DNA, 75 bp, synthetic construct
  source 1..75: mol_type = other DNA
atcgttggggggcctgggctgcagcagataacagtggtgtggactggcagccgatagcagcaggcttcaaggggc

SEQ ID NO: 80821 - DNA, 75 bp, synthetic construct
  source 1..75: mol_type = other DNA
atgcgattagcaagtcgttttggttatgcgaaccagatacgccgtgaccgccccttaactcgcgaagaactgatg

SEQ ID NO: 80822 - DNA, 75 bp, synthetic construct
  source 1..75: mol_type = other DNA
gtgagttccatccttgagatttttttcccgctttgtgcctccggcctcatccgttggcagcgccgtacacccgac

SEQ ID NO: 80823 - DNA, 75 bp, synthetic construct
  source 1..75: mol_type = other DNA
tcgcaaagaagcggaaatgctcggatggaactattagaaaggagttgcaaactgcacttggatttattgatggta

SEQ ID NO: 80824 - DNA, 75 bp, synthetic construct
  source 1..75: mol_type = other DNA
gggattgtgtgaagaacatcttccagggaaaaatattcatgctgtgcttaaagataacattatcgataagctcca

SEQ ID NO: 80825 - DNA, 75 bp, synthetic construct
  source 1..75: mol_type = other DNA
agacccgcgattctgtgtaccagcatcagccaaaaacggaacagaacgaccgaaaatcggaacaaaacggccaaa

SEQ ID NO: 80826 - DNA, 75 bp, synthetic construct
  source 1..75: mol_type = other DNA
ccaataccgcgtcgttttcacctgcacagggcgtcggcgtacagttgacgcgcaacggtacgattattccagcga

SEQ ID NO: 80827 - DNA, 75 bp, synthetic construct
  source 1..75: mol_type = other DNA
tggcacgattagaaaggaattgcaaactgcaattggttttgtagaggggattacgagcgttatggcatgtaaata

SEQ ID NO: 80828 - DNA, 75 bp, synthetic construct
  source 1..75: mol_type = other DNA
ccaaaggacgcctcaccgcccttgatacggacgccgcgcaaaaagcgccgggcgtactggctgtcattaccgcca

SEQ ID NO: 80829 - DNA, 75 bp, synthetic construct
  source 1..75: mol_type = other DNA
gatccacgccctgccaccacaggcaaccagcgcggtttattcgcatatccggaatgaaaagcgcactgcgcagga

SEQ ID NO: 80830 - DNA, 75 bp, synthetic construct
  source 1..75: mol_type = other DNA
taggtgcaacctatgctaaatctgaccgcactaatgatcaggttatctacggtaacaacagcctgaatgcatctg

SEQ ID NO: 80831 - DNA, 75 bp, synthetic construct
  source 1..75: mol_type = other DNA
ccgtcacggcaggctgacagagaaaaccgacctcatcccggaaggggttatccgcacggatgatgagcggactca

SEQ ID NO: 80832 - DNA, 75 bp, synthetic construct
  source 1..75: mol_type = other DNA
ttgccaaaaggagaaggtgctctgatggcactattaggaaggagttgcaaaccgcaatcggttttatagaggggg

SEQ ID NO: 80833 - DNA, 75 bp, synthetic construct
  source 1..75: mol_type = other DNA
tgcaccgtgaaattattgagcgtgattatcacctcagcgccgcaatgtattgcgatgtggcaaacctggaaaaat

SEQ ID NO: 80834 - DNA, 75 bp, synthetic construct
  source 1..75: mol_type = other DNA
ggcaatgcgcgcgatgtcttttatcaacccgttcatccttattctatcggtttgctcaacgcggtgccgcgtctt

SEQ ID NO: 80835 - DNA, 75 bp, synthetic construct
  source 1..75: mol_type = other DNA
acgctgccgttgcccgattcagctttccggcctggatgttacagcttctgcgtaaggcccgggaccgcattatcc

SEQ ID NO: 80836 - DNA, 75 bp, synthetic construct
  source 1..75: mol_type = other DNA
aaatgcctgaatcgagcagcctctcgagacgtgaaatcagcgcacttgtcggtgttgctcaggtaaaccgggact

SEQ ID NO: 80837 - DNA, 75 bp, synthetic construct
  source 1..75: mol_type = other DNA
tgacgaacatcagcccgtcaccactgctgacattctgacaccacgacgcagggaggattacggcaaggacctgtg

SEQ ID NO: 80838 - DNA, 75 bp, synthetic construct
  source 1..75: mol_type = other DNA
cgggcgatgatgccgatgcaaaaatgttccctcttaataaacccgtgctaatcactgatgtgcttactgccagcg

SEQ ID NO: 80839 - DNA, 75 bp, synthetic construct
  source 1..75: mol_type = other DNA
cccatgacgcagaccatcctgacggggatcgccatcggtattttcccgctcctggtactggcggctgtcttcaac

SEQ ID NO: 80840 - DNA, 75 bp, synthetic construct
  source 1..75: mol_type = other DNA
ggaagcacgccagcaatctcctgatgactgcgtgatggtattcgccgcccgtattcgtcagggggtgcgccatgc

SEQ ID NO: 80841 - DNA, 75 bp, synthetic construct
  source 1..75: mol_type = other DNA
ataaaacgccgctgtcattaaatacgccgcccggagaggtgaaactgaccctggcaggatgtgaagagcgaaatg

SEQ ID NO: 80842 - DNA, 75 bp, synthetic construct
  source 1..75: mol_type = other DNA
gggctgacgctttccctgaaatcttatgccgatcaggaaaacgccgccaccgggctgaaagtcgccatgatggat

SEQ ID NO: 80843 - DNA, 75 bp, synthetic construct
  source 1..75: mol_type = other DNA
ataacgagaaaaaatattcacctggcagtaatttcgcaaaatggatgttgcaggaaataaagcgcttaatagcaa

SEQ ID NO: 80844 - DNA, 75 bp, synthetic construct
  source 1..75: mol_type = other DNA
tcagatgccgctaatgagcaagcttcaaaggtgcttaagccgggtaatgctctgcgaaagtactctgtgaaccct

SEQ ID NO: 80845 - DNA, 75 bp, synthetic construct
  source 1..75: mol_type = other DNA
atgcagaagcacaaaagcctgcgcaaggcgctgattaacgccgtgccgcagctccgaaataaccccgatatgctg

SEQ ID NO: 80846 - DNA, 75 bp, synthetic construct
  source 1..75: mol_type = other DNA
agacggtatctggttttttgatgagagttgtccggggggggctgtttgggtgcttgaagatggctctctcgaatg

SEQ ID NO: 80847 - DNA, 75 bp, synthetic construct
  source 1..75: mol_type = other DNA
ggtatgcgggttatggaaacgcgatccagcggttttgatgtcagccatgatgttggctatacgcggttcaggtag

SEQ ID NO: 80848 - DNA, 75 bp, synthetic construct
  source 1..75: mol_type = other DNA
ttgttcgtcatggacttcacagaaagtatcgacaacatcatgctgccggtcatggcgtggctgtacaggaatcag

SEQ ID NO: 80849 - DNA, 75 bp, synthetic construct
  source 1..75: mol_type = other DNA
gttcgaatggaacggtcgtacctggaatgctggggccgactcactggctcgtctttatccggcagtaatggcatc

SEQ ID NO: 80850 - DNA, 75 bp, synthetic construct
  source 1..75: mol_type = other DNA
tatccgccgaagatatggacactgcgttaactgggcaggcttataccgtagctaacggcgcacagtcttttgacg

SEQ ID NO: 80851 - DNA, 75 bp, synthetic construct
  source 1..75: mol_type = other DNA
atgctgatgctgcaactgctaacgcaggggtatcgttcactgatacagctagcaaagaaaccgttttaaataaag

SEQ ID NO: 80852 - DNA, 75 bp, synthetic construct
  source 1..75: mol_type = other DNA
tcgaaagcgcagatcatccagcaggccggtaactctgtgttggcaaaagctaaccaggtaccgcagcaggttctg

SEQ ID NO: 80853 - DNA, 75 bp, synthetic construct
  source 1..75: mol_type = other DNA
tcggtatcgatatcggcaccaccaccacccaggtgattttctcccacctggaactggttaaccgtgcggcggtgt

SEQ ID NO: 80854 - DNA, 75 bp, synthetic construct
  source 1..75: mol_type = other DNA
agctttgtcgatgaaaaattgcgggcgctacactccgatattttatggtcggtaaagacccgcgaaggcgatggc

SEQ ID NO: 80855 - DNA, 75 bp, synthetic construct
  source 1..75: mol_type = other DNA
ggttgttgaccagaaatacacggtggcagatgccgccaaagctatggatgttggcctttccacaatgacgcgatg

SEQ ID NO: 80856 - DNA, 75 bp, synthetic construct
  source 1..75: mol_type = other DNA
actgtacactgcgctccgtgatgccgggtttacggttcctttccgtatgacaacggagatgaataccgcacttca

SEQ ID NO: 80857 - DNA, 75 bp, synthetic construct
  source 1..75: mol_type = other DNA
gactggagccgcgagcagcgtctggcgctggtgaacgcgattgttgaaaccggcgtgcgcgtgccgtccatgtgc

SEQ ID NO: 80858 - DNA, 75 bp, synthetic construct
  source 1..75: mol_type = other DNA
gctgcgaggatgtcgcccgcttattctgtgtaaacaagcgcacgattcttcggtggatcgataacattcccggat

SEQ ID NO: 80859 - DNA, 75 bp, synthetic construct
  source 1..75: mol_type = other DNA
ctgatgtcgacgagcgtacccgtaaaacaggcgaagccttcgccgccgggctggcacctgactgtgcaataaccg

SEQ ID NO: 80860 - DNA, 75 bp, synthetic construct
  source 1..75: mol_type = other DNA
cctgagcatgagagagaggcgcgtgctcgcggtattcctacgatgggtagcggtcgaatcttccagataccggaa

SEQ ID NO: 80861 - DNA, 75 bp, synthetic construct
  source 1..75: mol_type = other DNA
cgaagatggcccgactcaccagccggttgagcaggtcgcttcactgcgcgtgaccccgaacatgtccacatggcg

SEQ ID NO: 80862 - DNA, 75 bp, synthetic construct
  source 1..75: mol_type = other DNA
acagtcgtttgaagattattttacttcttctgttggccgggccctgactgctaactcgccttggaagataatcat

SEQ ID NO: 80863 - DNA, 75 bp, synthetic construct
  source 1..75: mol_type = other DNA
atgacagaacaacaaaaattgacctttacggccttgcagcagcggctggattcgctgatgctgcgtgacagactg

SEQ ID NO: 80864 - DNA, 75 bp, synthetic construct
  source 1..75: mol_type = other DNA
ccaaagccgacttgattgctcttacggcgaagcaattgagattctgtacgaacaggaagttgcgagcaaatcagc

SEQ ID NO: 80865 - DNA, 75 bp, synthetic construct
  source 1..75: mol_type = other DNA
acgtcaatttcggttgtatgtatgagttagtagttaactggatgcatggacgtaagacaattttcagcccattta

SEQ ID NO: 80866 - DNA, 75 bp, synthetic construct
  source 1..75: mol_type = other DNA
cagaagcccccacacctcaccgactagaaaaagcgcgggaagaggggcaaatcccgcgttcccgtgaactgactt

SEQ ID NO: 80867 - DNA, 75 bp, synthetic construct
  source 1..75: mol_type = other DNA
agtatggatattttaggtgctaatgttggattataccctgaagtttctgctgttactggaaacttatttcaatat

SEQ ID NO: 80868 - DNA, 75 bp, synthetic construct
  source 1..75: mol_type = other DNA
tctttattgctctgtcatttaccacgtgttcagctatcgcgaacagccttgcattatcattagcaaatgatgatg

SEQ ID NO: 80869 - DNA, 75 bp, synthetic construct
  source 1..75: mol_type = other DNA
cgttactggggagcctgcgcaaaggctcatttaatggcatggttgcacgtaccctgccgaaaattgctccggcga

SEQ ID NO: 80870 - DNA, 75 bp, synthetic construct
  source 1..75: mol_type = other DNA
ggtgcagtggtgtccggtaccgcgagtggtgactggacgctctcctgtgtccgtgggcaggtgaacagcatcacg

SEQ ID NO: 80871 - DNA, 75 bp, synthetic construct
  source 1..75: mol_type = other DNA
tcaggcatacgatgagtacaatcctacatgagaaaggatttaacagcgcttggattgaaacccagcttgctcatt

SEQ ID NO: 80872 - DNA, 75 bp, synthetic construct
  source 1..75: mol_type = other DNA
ggacgcgtggcggtaaccagctccgttatccgggaaagtaccgggttgtggaaaacctgcccgacgtttccccgt

SEQ ID NO: 80873 - DNA, 75 bp, synthetic construct
  source 1..75: mol_type = other DNA
aagcccgggatacctttctttccatcaacaccgaaccggagcagggctggacacgctatgaaccggtggcatttt

SEQ ID NO: 80874 - DNA, 75 bp, synthetic construct
  source 1..75: mol_type = other DNA
atggccacactatctgatacaataaaaccgaataaaacatatcttgaggcggtactccgtacagcgttgttagga

SEQ ID NO: 80875 - DNA, 75 bp, synthetic construct
  source 1..75: mol_type = other DNA
ccgaagaacacggcggtgcggagtccggagagtaacggcatagcagagagcttcgtgaaaacgataaagcgtgac

SEQ ID NO: 80876 - DNA, 75 bp, synthetic construct
  source 1..75: mol_type = other DNA
tactgtgcctgttactgggtttttcttcggtatcctattcccgggaatttacgatagacttttcgactcaacaaa

SEQ ID NO: 80877 - DNA, 75 bp, synthetic construct
  source 1..75: mol_type = other DNA
caggttaatggcgatgaaccctatatcgaaattatctgcatggattcagaagctgaaattcagaaagcagattaa

SEQ ID NO: 80878 - DNA, 75 bp, synthetic construct
  source 1..75: mol_type = other DNA
gaaccgatgactggatggatggccgccgcagtcgtcacactgatgatacggatgtgcttctccgtatacaccatg

SEQ ID NO: 80879 - DNA, 75 bp, synthetic construct
  source 1..75: mol_type = other DNA
tgagaattgtgcaaaagaaaatgctgatctacttatatgccataatgataatcgtaaattatttaatcttatgaa

SEQ ID NO: 80880 - DNA, 75 bp, synthetic construct
  source 1..75: mol_type = other DNA
aaaaaggactaagcatttatgataaaagcgcaatgcaacttcaacttttagcatcaaacctatcgaataaatatt

SEQ ID NO: 80881 - DNA, 75 bp, synthetic construct
  source 1..75: mol_type = other DNA
atgattttaatgatgcatataactggattttactgtcatcatcggatgataatctggaaatgatgttatctttaa

SEQ ID NO: 80882 - DNA, 75 bp, synthetic construct
  source 1..75: mol_type = other DNA
cggtgagctgttgttgcgcgcatcagctattgatggagtggttccggtagataaaagcacggccacttacattta

SEQ ID NO: 80883 - DNA, 75 bp, synthetic construct
  source 1..75: mol_type = other DNA
tgaaaaagcgcgccaggctaatagcgatgaaccctatatcgaaattatttgtatggattcagaagctgaaattaa

SEQ ID NO: 80884 - DNA, 75 bp, synthetic construct
  source 1..75: mol_type = other DNA
tatttggaacggagcatgagtctcctgagatcctgcgtcgttatgcaaatggtcttttggaagaggcatataaac

SEQ ID NO: 80885 - DNA, 75 bp, synthetic construct
  source 1..75: mol_type = other DNA
agtaaccacttttcgacgctttttcgccgagagtttaactggtcaccgcgtgatattcgtcagggacgggatggt

SEQ ID NO: 80886 - DNA, 75 bp, synthetic construct
  source 1..75: mol_type = other DNA
cattacattacactataaaaaagaaatcatttccttattactggaaaccacgcctattaaagctaaccatttgcg

SEQ ID NO: 80887 - DNA, 75 bp, synthetic construct
  source 1..75: mol_type = other DNA
ggcgcagtggctgcatgcctttcacgatgccggaatagaagttcgtgtacaggttaatgaaagtgtcactccgta

SEQ ID NO: 80888 - DNA, 75 bp, synthetic construct
  source 1..75: mol_type = other DNA
gactgctgtgaccgtgaggcactgcactgggcggtcactaccggcggcttcaacagtgaaacagtacaggacgtc

SEQ ID NO: 80889 - DNA, 75 bp, synthetic construct
  source 1..75: mol_type = other DNA
ttaaatcactgaagaacagtaaaaaaaatacactgtcacgtactgatgccacggaagagctgacacgtctttccc

SEQ ID NO: 80890 - DNA, 75 bp, synthetic construct
  source 1..75: mol_type = other DNA
cgtgcacgcctcaatctgaagtctccggtattttcccagaaccagacggtcagacgggcaatggagcaattgcgt

SEQ ID NO: 80891 - DNA, 75 bp, synthetic construct
  source 1..75: mol_type = other DNA
tggtacgcgatgagacggtacataaaaatacccgcgcttatttcgacccgaaaatgcaacaacaggtgccaggaa

SEQ ID NO: 80892 - DNA, 75 bp, synthetic construct
  source 1..75: mol_type = other DNA
tacaggtattgatgcgactgggcttgcaaaagccgcagtttctttagctaaagatgcctcaattaaataccaagg

SEQ ID NO: 80893 - DNA, 75 bp, synthetic construct
  source 1..75: mol_type = other DNA
gcgtgaacgtactggcgaaagacggttcgatgaaaattcaggttggtgcgaacgacggccagactatcactattg

SEQ ID NO: 80894 - DNA, 75 bp, synthetic construct
  source 1..75: mol_type = other DNA
ctggacgccactggtaacctatctacaaacaacgccggcattgcatcttcagcgaaattgtccgatctgtttgct

SEQ ID NO: 80895 - DNA, 75 bp, synthetic construct
  source 1..75: mol_type = other DNA
caggtctgtcctctacgggattatctacagatgagagagaaatgcgacgaattatcgatctcgctcaacgttgcg

SEQ ID NO: 80896 - DNA, 75 bp, synthetic construct
  source 1..75: mol_type = other DNA
tgctggctgccgtggtatggggaatgcaccagaagacgcagcgccttgaggacaataatcatgtgcttgtgcgtg

SEQ ID NO: 80897 - DNA, 75 bp, synthetic construct
  source 1..75: mol_type = other DNA
aaatatgtctaaagcgcagatcatccagcaggccggtaactccgtgttggctaaagctaaccaggttcctcagca

SEQ ID NO: 80898 - DNA, 75 bp, synthetic construct
  source 1..75: mol_type = other DNA
gtgaggaaaccctgtttgtcttccacgcttcagacggcgatatcagcgcctggctgccgctcgctagcgcgttga

SEQ ID NO: 80899 - DNA, 75 bp, synthetic construct
  source 1..75: mol_type = other DNA
accgttaccgcgacctactacggttttgctgatggtaaagtttctgacggtgaaggttctactgtctataaagct

SEQ ID NO: 80900 - DNA, 75 bp, synthetic construct
  source 1..75: mol_type = other DNA
ataagtcttacacttttgatgctactggtgttgccaaggcggatgctggaacggcactgaaagggtacttaggcg

SEQ ID NO: 80901 - DNA, 75 bp, synthetic construct
  source 1..75: mol_type = other DNA
attgccaaagatggctccatcaccgataccaatggcgatgcgctgtatctcgatagtaccggcaacttaaccaaa

SEQ ID NO: 80902 - DNA, 75 bp, synthetic construct
  source 1..75: mol_type = other DNA
aacatgtcgaaagcgcagatcattcagcaggccggtaactccgtgctggcaaaagccaaccaggtaccgcagcag

SEQ ID NO: 80903 - DNA, 75 bp, synthetic construct
  source 1..75: mol_type = other DNA
atgtttgacacaaagcaaattagatactcaggtaaagatggtatctattttcaccttagagataatgtagaatct

SEQ ID NO: 80904 - DNA, 75 bp, synthetic construct
  source 1..75: mol_type = other DNA
acctgtctgcagttatggaataaagaaggcagggtggtacgccgggagggcgatccgctggaagtggcgcagtgg

SEQ ID NO: 80905 - DNA, 75 bp, synthetic construct
  source 1..75: mol_type = other DNA
gtgcggctgcaaaagaaggaatgagtttggctaattggcttaaagaactagcaagagcagaactacgcaaacaag

SEQ ID NO: 80906 - DNA, 75 bp, synthetic construct
  source 1..75: mol_type = other DNA
cgcaactgtaaatgccactatcaagtttgatagcggtatgacggttgattacactgcaggtactggcgcgaatat

SEQ ID NO: 80907 - DNA, 75 bp, synthetic construct
  source 1..75: mol_type = other DNA
cactccttcctggcttcgccgttgccgccagctggacttctccggggttccctgcctttagcgaacagggaacgg

SEQ ID NO: 80908 - DNA, 75 bp, synthetic construct
  source 1..75: mol_type = other DNA
ggtgtatgcctatgcagcgctgcgcatttccgttcagcggtggcaactggatctggatgcactggcccgcgccag

SEQ ID NO: 80909 - DNA, 75 bp, synthetic construct
  source 1..75: mol_type = other DNA
atacggcaaatgcactggctgaaaatgcccggaatgccggtgagctgggacgatttatgtcggtggcccgtgtgg

SEQ ID NO: 80910 - DNA, 75 bp, synthetic construct
  source 1..75: mol_type = other DNA
cttccgtcaggataaagattctgttgatctgccgctggaagcgaaagcggtgctcgattcgatggtgaacatcga

SEQ ID NO: 80911 - DNA, 75 bp, synthetic construct
  source 1..75: mol_type = other DNA
taaaggtttttgccagattgaaaaagccgcgaacgaatctgcacattttatgcggttttatgtgccatgccctca

SEQ ID NO: 80912 - DNA, 75 bp, synthetic construct
  source 1..75: mol_type = other DNA
ttaccggtaggaattgttacctcgctggtaggcgttccgttctttctgagcattgtaatgcgtcatcgagggagt

SEQ ID NO: 80913 - DNA, 75 bp, synthetic construct
  source 1..75: mol_type = other DNA
catgatggatattaaaggaaaaatcatcacaactgatgcgatgggttgccagaaagatattgcagaaaagataca

SEQ ID NO: 80914 - DNA, 75 bp, synthetic construct
  source 1..75: mol_type = other DNA
ccgcccgaaagagatggcggatcaggtgtttacgcttaatgtgctggacaacaaaaactacaccctgagcagcga

SEQ ID NO: 80915 - DNA, 75 bp, synthetic construct
  source 1..75: mol_type = other DNA
gcgtcacgctgatggttgaagccattcacgccagcccgggcagtgagtttaccgtcaccaaatactccacgctgg

SEQ ID NO: 80916 - DNA, 75 bp, synthetic construct
  source 1..75: mol_type = other DNA
gaacataaatacccgcaaacgcaaaccaccagggcgcgtcaaccgggaagaagccgcaatggcgacgcctcgcgc

SEQ ID NO: 80917 - DNA, 75 bp, synthetic construct
  source 1..75: mol_type = other DNA
aaccgggaacgtgcggcactggctgcatacacctgggaagtgctggcccgccagctgaaaaaggcgcgtcagcaa

SEQ ID NO: 80918 - DNA, 75 bp, synthetic construct
  source 1..75: mol_type = other DNA
tgcacgaatcctgaaaagcgtggtggatcaactggatatcgccaaaatccacctgctgggcaactcgatgggcgg

SEQ ID NO: 80919 - DNA, 75 bp, synthetic construct
  source 1..75: mol_type = other DNA
atttgccgaacaggaagaaattgcctttaccagtggcgacggcagcaaaaaaccaaaaggttttctggcttacga

SEQ ID NO: 80920 - DNA, 75 bp, synthetic construct
  source 1..75: mol_type = other DNA
gggtatggcatcgttgagaatgagcagatgccggatattgctgccgatgcaaaagccattgcgtttggtaacttc

SEQ ID NO: 80921 - DNA, 75 bp, synthetic construct
  source 1..75: mol_type = other DNA
gaaattactgaatcagaaagacagctactaattaaccaggccaacgaatacatgaacagtaagcaatggcccggt

SEQ ID NO: 80922 - DNA, 75 bp, synthetic construct
  source 1..75: mol_type = other DNA
ccggaaatcagcgaagcgaacattctgagcacatttaaacaactgcaccagaacaaggatgaggtgtttgagcgg

SEQ ID NO: 80923 - DNA, 75 bp, synthetic construct
  source 1..75: mol_type = other DNA
ccagaaagctaccttcgccatgtgcctggcgtcatagcagactggccggtcaaccgggtcagcgaactgcttccg

SEQ ID NO: 80924 - DNA, 75 bp, synthetic construct
  source 1..75: mol_type = other DNA
tatcaaaccgaactggcaggtgtggtacgagtgcgtgctgccggaagatcgccagcatgccgaaaaagtgattcg

SEQ ID NO: 80925 - DNA, 75 bp, synthetic construct
  source 1..75: mol_type = other DNA
cagctgaaactttcattggtaacaatattgaagagattgctatttatgacggcgataaaatccgtgagagtctcg

SEQ ID NO: 80926 - DNA, 75 bp, synthetic construct
  source 1..75: mol_type = other DNA
accgaaaagcaacaagtattaaataaaattaatgcctgtatccataataccggagccgaagtcattcgccatatc

SEQ ID NO: 80927 - DNA, 75 bp, synthetic construct
  source 1..75: mol_type = other DNA
atgaacgcctgggaagtcaatttcgacgggctggtagggctgacgcatcattacgcgggcctgtcgtttggtaat

SEQ ID NO: 80928 - DNA, 75 bp, synthetic construct
  source 1..75: mol_type = other DNA
gttaacatcgcatatcgatgagaataacaagagcgcatttaatcaaggctcttcaggaagtacttattactcccc

SEQ ID NO: 80929 - DNA, 75 bp, synthetic construct
  source 1..75: mol_type = other DNA
ccggcatacgcaactgcgcgcgcactcggcctgcgtgcctatatcgaccagaccgtcggctggcacaaaaccctg

SEQ ID NO: 80930 - DNA, 75 bp, synthetic construct
  source 1..75: mol_type = other DNA
atgggattctggatccgggggaaaattcctgcagagaccagtaaccccctgaaccgggtactgatcaaagcgtat

SEQ ID NO: 80931 - DNA, 75 bp, synthetic construct
  source 1..75: mol_type = other DNA
tgcggccttgtccattttcaccgttatctggccgctgagccaggtgggcggtgagtttctgccgaagattaacga

SEQ ID NO: 80932 - DNA, 75 bp, synthetic construct
  source 1..75: mol_type = other DNA
ggcgttcatgaagtgcgtaacttctggcatagcattgttgaatgccatgcggtgtacgaccccggattccgtggt

SEQ ID NO: 80933 - DNA, 75 bp, synthetic construct
  source 1..75: mol_type = other DNA
atgtcagacatcaccatctcccgtccggaagtgctcaatggacatacggacgttatctgctcaaccagtatccgc

SEQ ID NO: 80934 - DNA, 75 bp, synthetic construct
  source 1..75: mol_type = other DNA
tctgatcgatatgggtgaagaaattggtctggctacggtatatcgcgtactgaaccagtttgacgacgctggtat

SEQ ID NO: 80935 - DNA, 75 bp, synthetic construct
  source 1..75: mol_type = other DNA
gtttcctcttaataaacctgtgctgatcactgatgtgctgactgcaagcggtaaagcgggtgagtccggcacatt

SEQ ID NO: 80936 - DNA, 75 bp, synthetic construct
  source 1..75: mol_type = other DNA
ccggcaatttcagtaccgggcaacaacctgaaacggcgttttccggaacgagctatatccagcgaatcggttatc

SEQ ID NO: 80937 - DNA, 75 bp, synthetic construct
  source 1..75: mol_type = other DNA
aaaccgcccgggactgggccatgaaacaggattttcgctgcggctgctggctcatggagaaaccggaaaccgcaa

SEQ ID NO: 80938 - DNA, 75 bp, synthetic construct
  source 1..75: mol_type = other DNA
actacacccgaaccgcgcaggtactgatggacacgatggcagaagcgcacatgtgggcagtggacaaaccgctga

SEQ ID NO: 80939 - DNA, 75 bp, synthetic construct
  source 1..75: mol_type = other DNA
ggactgttaaatggctggagcctggcgggagaacaccgccactggatgatacctctcagaaagggagcgcaatat

SEQ ID NO: 80940 - DNA, 75 bp, synthetic construct
  source 1..75: mol_type = other DNA
tcagtgagatctgggaactgtcagaatccaatattggtgaactagagcttgagtatcaggcaaaattccctggcg

SEQ ID NO: 80941 - DNA, 75 bp, synthetic construct
  source 1..75: mol_type = other DNA
ctgattaaatctgcccgtgttggctatacaaagatgttgctgggggtggtcgggtattttattgagcataaatcc

SEQ ID NO: 80942 - DNA, 75 bp, synthetic construct
  source 1..75: mol_type = other DNA
aagccatcacccgcaatctcgatcgcgaaatctggcgtgacctgatgcaacattccgggatgctgtcattaatgg

SEQ ID NO: 80943 - DNA, 75 bp, synthetic construct
  source 1..75: mol_type = other DNA
tggctgtacctgcattaatggctgtttctggcgcgactttcgctgcagaaggagcggcatcaagtggtgttgatt

SEQ ID NO: 80944 - DNA, 75 bp, synthetic construct
  source 1..75: mol_type = other DNA
ggggcgtttatctgtgtgaagtggggacggacaccgcaaaagaaattctctatgcccgtatgaaagccgagccca

SEQ ID NO: 80945 - DNA, 75 bp, synthetic construct
  source 1..75: mol_type = other DNA
caaacgtctgaaagggcgggtggatatgaccatggcgctggggctttctgacattaaagcgcagatgggcgggtt

SEQ ID NO: 80946 - DNA, 75 bp, synthetic construct
  source 1..75: mol_type = other DNA
tccacgcctgacgatgctgaacagccagaattttgtagatttaaacgccctgcattctattcagtccgggaagcg

SEQ ID NO: 80947 - DNA, 75 bp, synthetic construct
  source 1..75: mol_type = other DNA
cacgccataacggactatatcgttggatattacagcgcactaagaccgcacgaatataacggtgggttaccccca

SEQ ID NO: 80948 - DNA, 75 bp, synthetic construct
  source 1..75: mol_type = other DNA
ttcccgtttgtcgaagcaccggataaacgcaatatccaggatggcgtgcgtctgctcgaagaactgggcgcgatc

SEQ ID NO: 80949 - DNA, 75 bp, synthetic construct
  source 1..75: mol_type = other DNA
tgggaaacactgccgtttcaggttggcatcatgaactgtatgggcaacgatttgattcgcactgttaacctgatt

SEQ ID NO: 80950 - DNA, 75 bp, synthetic construct
  source 1..75: mol_type = other DNA
catggtgggcgaaccacagaacctgatcatcgctaaagcggctggctggcattttggcgatttcttcctgcgcat

SEQ ID NO: 80951 - DNA, 75 bp, synthetic construct
  source 1..75: mol_type = other DNA
gttgaagcacaggaaaatggtcttcgtttgcggctcagtcagtggaaaaaagggggggattttggatggatattt

SEQ ID NO: 80952 - DNA, 75 bp, synthetic construct
  source 1..75: mol_type = other DNA
ccaactggtcagcttacaacaaggcactcagacagcgtggttcgctgacgatctggcttgatgaatctgctattg

SEQ ID NO: 80953 - DNA, 75 bp, synthetic construct
  source 1..75: mol_type = other DNA
ttagcgcttggcgtgtatcctgaagtcacattggccgatgctcgggcaaaacgtgaagaagccaaaagggggatc

SEQ ID NO: 80954 - DNA, 75 bp, synthetic construct
  source 1..75: mol_type = other DNA
gcaaatagacacccgctccggtacgccaacattgatgatttccatccagaacgccgccgaaccggtagcaaacct

SEQ ID NO: 80955 - DNA, 75 bp, synthetic construct
  source 1..75: mol_type = other DNA
tcacctgaaaatcaccttccgcgtggtggatgacaaaaacaagaagctaaaagaagggcgctcattacaggatct

SEQ ID NO: 80956 - DNA, 75 bp, synthetic construct
  source 1..75: mol_type = other DNA
gacaacacgccacctggtggtgaactggtgtttgaacgctggcgtcgactcagtgataacagccagtggattcag

SEQ ID NO: 80957 - DNA, 75 bp, synthetic construct
  source 1..75: mol_type = other DNA
taaataatccagagcatgacagttacgcaatgagtgaaaagagtcacggcagagaagaaatccgtcttcatattg

SEQ ID NO: 80958 - DNA, 75 bp, synthetic construct
  source 1..75: mol_type = other DNA
ccggcagagctgctgtttgaagagttcggcttcaccgttgacaacgttgttgcgaaagcaaaagaactgctgtaa

SEQ ID NO: 80959 - DNA, 75 bp, synthetic construct
  source 1..75: mol_type = other DNA
caacaaatgaccagaatacggcgctacagagaaatgcgctggaatgtgcaggatgtgagctgtttttcgaagaca

SEQ ID NO: 80960 - DNA, 75 bp, synthetic construct
  source 1..75: mol_type = other DNA
gttaagcccgcatctttacctggcgaccaacagcgcacaggggccgtggtggatactcggctggtcagagcgggt

SEQ ID NO: 80961 - DNA, 75 bp, synthetic construct
  source 1..75: mol_type = other DNA
agaagccgaaagggttcctggcgtatgaatccacggatgaaaccgacaaggtccgggcgttcggcaaacttcagc

SEQ ID NO: 80962 - DNA, 75 bp, synthetic construct
  source 1..75: mol_type = other DNA
gtggctggattatctggacgcactggagctgatcgatacttccggtgcaccagatattgaatggcctacgcctcc

SEQ ID NO: 80963 - DNA, 75 bp, synthetic construct
  source 1..75: mol_type = other DNA
atgaatgagctgataaatagcagcatcatcaaaatgaccagcattgaaatcgctgagttggtggggagtcgtcca

SEQ ID NO: 80964 - DNA, 75 bp, synthetic construct
  source 1..75: mol_type = other DNA
atacgaaattcagcgccggcgtgaaatggggttgagcgagccgtcctggtctgtctctcatccatcaaataccaa

SEQ ID NO: 80965 - DNA, 75 bp, synthetic construct
  source 1..75: mol_type = other DNA
gaaacgcagacagtccaggagctgcgcgcactgtttcaggcggttcgtctgatgggctgtattaacgttattgtg

SEQ ID NO: 80966 - DNA, 75 bp, synthetic construct
  source 1..75: mol_type = other DNA
cagatcaacacgccgcgaaacgccgctggcttaatgcccacgaagaggggtatcacaaagcgatgggcaatcgcc

SEQ ID NO: 80967 - DNA, 75 bp, synthetic construct
  source 1..75: mol_type = other DNA
gatctggatgcacttaacgaactttccgagctgatctgtgccgcagaatgcggagaacatattgaaccgtataag

SEQ ID NO: 80968 - DNA, 75 bp, synthetic construct
  source 1..75: mol_type = other DNA
ggttgccgcaaccggtccgggcgtcgacaccccagcatgcctggaaaaagtgcgcgccctgatggcacaggaact

SEQ ID NO: 80969 - DNA, 75 bp, synthetic construct
  source 1..75: mol_type = other DNA
aacattcggagcatttccagaggaagatcaagaaaaaatgcttaaagacatgaaagacaaaaaagaatcaatgga

SEQ ID NO: 80970 - DNA, 75 bp, synthetic construct
  source 1..75: mol_type = other DNA
gagttgttactggaaaaggtctgccactatggtgcgcaggttcccctgcgggtggtttacctgaccgcagggatc

SEQ ID NO: 80971 - DNA, 75 bp, synthetic construct
  source 1..75: mol_type = other DNA
gattaaaacagttagaagaacgtatcggcgacgaccgttttttgaaaaaccaaggttccggcaatgagattggct

SEQ ID NO: 80972 - DNA, 75 bp, synthetic construct
  source 1..75: mol_type = other DNA
cgtcaccatggcggtgcggcgctgccttccagttcggttaacacgccgtggcacgatcgcaaagccacccagacc

SEQ ID NO: 80973 - DNA, 75 bp, synthetic construct
  source 1..75: mol_type = other DNA
caacatcgatttaagcagtgtgcaaaatgtggaagtgctgcgtggccccttctctgccctgtatggcaacgcgtc

SEQ ID NO: 80974 - DNA, 75 bp, synthetic construct
  source 1..75: mol_type = other DNA
aaggttactggccgaatcaactgagtttctcagaatcatgcggaatggtgatgagaatgctgatgacattgcagg

SEQ ID NO: 80975 - DNA, 75 bp, synthetic construct
  source 1..75: mol_type = other DNA
ttaatgccgcaaatcagtatgcacgtgacgtggttcgcggaaaaattcaggtttgccgttatgtcgttctggcct

SEQ ID NO: 80976 - DNA, 75 bp, synthetic construct
  source 1..75: mol_type = other DNA
tcctccggtgtggggttctggtgtctgggtggtgcggcagcaaaaaactaccgtgaaaaatccgtggatgtggtc

SEQ ID NO: 80977 - DNA, 75 bp, synthetic construct
  source 1..75: mol_type = other DNA
aaaactacgtggattaaaagattgctacaaaataaaacttcgcgcatcaggttttcgtctggtctatcaggtgat

SEQ ID NO: 80978 - DNA, 75 bp, synthetic construct
  source 1..75: mol_type = other DNA
aagtcaactttgatatgtccctgcgcgatccgttgatgctggctttcttcgccaccattggcctgaacgccaacc

SEQ ID NO: 80979 - DNA, 75 bp, synthetic construct
  source 1..75: mol_type = other DNA
atgtcaaagcaacagatcggcgtagtcggtatggcagtgatggggcgcaacctagcgctcaacatcgaaagccgt

SEQ ID NO: 80980 - DNA, 75 bp, synthetic construct
  source 1..75: mol_type = other DNA
aactccatcgtgtggattttgacccggcgcaggatttactgatatcggtcggcgaccttatcgatcgcggtactg

SEQ ID NO: 80981 - DNA, 75 bp, synthetic construct
  source 1..75: mol_type = other DNA
ctcaccgccgtcggcaagatagacaaaaaacgcctgacggctctcgccgtcgaccgttatcgccattctgcccaa

SEQ ID NO: 80982 - DNA, 75 bp, synthetic construct
  source 1..75: mol_type = other DNA
tgaacaaccagagtcgtggccgcactggtaaccgtctgttgccagcgtcactgacagatcaggcactcagtataa

SEQ ID NO: 80983 - DNA, 75 bp, synthetic construct
  source 1..75: mol_type = other DNA
tcgcggccgtagttgagtcccttgcaagccacgtcgaacagtattcaatcgacgagctttttgttgactgcaaag

SEQ ID NO: 80984 - DNA, 75 bp, synthetic construct
  source 1..75: mol_type = other DNA
tacctttactgagtggaacaacggtgagttgagcagctacctgattgacatcacaaaagacatcttcaccaaaaa

SEQ ID NO: 80985 - DNA, 75 bp, synthetic construct
  source 1..75: mol_type = other DNA
agcagctgctggcgaactacgaatcggttccgaacaatatcatcgcggctatcgtggatgctaaccgtacccgta

SEQ ID NO: 80986 - DNA, 75 bp, synthetic construct
  source 1..75: mol_type = other DNA
ctgtgatcccggctgctgttctgatgatgttcttcccgcaactggcaatggcagcacagggccaggacctgatgg

SEQ ID NO: 80987 - DNA, 75 bp, synthetic construct
  source 1..75: mol_type = other DNA
gaccccggcctgctgtatgctggacagtggcaggatgcagaatccgggctgtgctataaccggttccggtattac

SEQ ID NO: 80988 - DNA, 75 bp, synthetic construct
  source 1..75: mol_type = other DNA
cagagcaacatgtacgaagtctgtttacagctaccagccagatttgtaccaggactgcggaggtgcgagtactta

SEQ ID NO: 80989 - DNA, 75 bp, synthetic construct
  source 1..75: mol_type = other DNA
aagggtttcttcgcgggaaatgtgtaccacgagatctgaaagtgaatgaaacaaatgctgagtatctggtgcgta

SEQ ID NO: 80990 - DNA, 75 bp, synthetic construct
  source 1..75: mol_type = other DNA
gtctttacgaaggttctggagggacgcctgccggacggcagcgacctcagccggactcaggacggggcgaacaaa

SEQ ID NO: 80991 - DNA, 75 bp, synthetic construct
  source 1..75: mol_type = other DNA
gaatgcagctggtaatcacagccatagagatggccgtcgatttaaccccagtgtttttaaagatacttatcaata

SEQ ID NO: 80992 - DNA, 75 bp, synthetic construct
  source 1..75: mol_type = other DNA
cagagcggtatgtacaaaatatgtttacagctaccagccagacttgtttgaggactgcggaggtgcgagtactta

SEQ ID NO: 80993 - DNA, 75 bp, synthetic construct
  source 1..75: mol_type = other DNA
tgcgagtcaggctgacgctaatctttttaattctggcctcggtgacctggctgctttccagctttgtcgcctgga

SEQ ID NO: 80994 - DNA, 75 bp, synthetic construct
  source 1..75: mol_type = other DNA
atgattaaacaggcgtggtgcagtgccctgggagtggatgtcgggtgccatgccacgctggtgcattttccggcc

SEQ ID NO: 80995 - DNA, 75 bp, synthetic construct
  source 1..75: mol_type = other DNA
cctgttcggcatgttaacgccgcactggatgtacgcgtggtttctgccggtggcggtaaaacagcagatggcgat

SEQ ID NO: 80996 - DNA, 75 bp, synthetic construct
  source 1..75: mol_type = other DNA
ctcgccagcaggcattgatgttacgccatcaggcggcaaactcgtcgcgcgatgtgcgtcgtcagctggacagtg

SEQ ID NO: 80997 - DNA, 75 bp, synthetic construct
  source 1..75: mol_type = other DNA
acgaggtggttcaggcctttggcctggccagtgaccagttagccactcaagtgctcaactggacgatgcagcaat

SEQ ID NO: 80998 - DNA, 75 bp, synthetic construct
  source 1..75: mol_type = other DNA
atggaaggtcaacagcacggcgagcagctaaagcgcggccttaaaaaccgccatattcagcttatcgcgctgggt

SEQ ID NO: 80999 - DNA, 75 bp, synthetic construct
  source 1..75: mol_type = other DNA
gcgtcagtggatacatattttaatgttatggaagttaatttaattatttacaatgatgatgtaataatgatgaat

SEQ ID NO: 81000 - DNA, 75 bp, synthetic construct
  source 1..75: mol_type = other DNA
acgtgcggcgataagctggagtccgtgaccgggaaattgcagttcgatatcagcagccagtatgggctacagcaa

SEQ ID NO: 81001 - DNA, 75 bp, synthetic construct
  source 1..75: mol_type = other DNA
ctttgaatcagttacgtcctgttttaatcggctttcgcaaagccaatggactgacgcaaaaagatgtttctgaac

SEQ ID NO: 81002 - DNA, 75 bp, synthetic construct
  source 1..75: mol_type = other DNA
atggttataaaagcacgtctaattctggctttggtttttctcgtgctatctgtgctggtggatttcaccagcaca

SEQ ID NO: 81003 - DNA, 75 bp, synthetic construct
  source 1..75: mol_type = other DNA
atggccgcactgacgctgctgatgaagcatatccgccatcgtgacatgatggagctgctggacaaactcccgcag

SEQ ID NO: 81004 - DNA, 75 bp, synthetic construct
  source 1..75: mol_type = other DNA
gtgcctgctgccgctactgaccggttgcggaagtacgcggacagtttacgtgagcaccccagtagcaccactgtc

SEQ ID NO: 81005 - DNA, 75 bp, synthetic construct
  source 1..75: mol_type = other DNA
agatcatgcaatttggcgcaacatcaggagtaaattgccttgcaggaatgctgcatggatttcgaaccctgaaca

SEQ ID NO: 81006 - DNA, 75 bp, synthetic construct
  source 1..75: mol_type = other DNA
aaaaaagtattagcgaaatttagaaagctaactaatgacacggttatatgggagagaggtgaaaaagcatggcga

SEQ ID NO: 81007 - DNA, 75 bp, synthetic construct
  source 1..75: mol_type = other DNA
tctgggcatcggtggcgcagtggcaaaactatccagtctggactggcagacctacgattttgtgccgggcagtct

SEQ ID NO: 81008 - DNA, 75 bp, synthetic construct
  source 1..75: mol_type = other DNA
atgagcacgaaatttaaaaccgttatcactactgccggagccgcgaagctggcagccgccactgtccccggcggg

SEQ ID NO: 81009 - DNA, 75 bp, synthetic construct
  source 1..75: mol_type = other DNA
tgtgtggcgttttctggccctgaatatcggagaaaaaaaccagttgatcgccagtgtcgaaaatagctatgattc

SEQ ID NO: 81010 - DNA, 75 bp, synthetic construct
  source 1..75: mol_type = other DNA
gtgcctgctgccgctgctgaccggttgcggaagtacgcggacagtttacgtgaacactccggcggtaccactgcc

SEQ ID NO: 81011 - DNA, 75 bp, synthetic construct
  source 1..75: mol_type = other DNA
atgttactggcaggcgctatctttgtcctgaccatcgtattggttatctggcagccgaaaggtttaggcatcggc

SEQ ID NO: 81012 - DNA, 75 bp, synthetic construct
  source 1..75: mol_type = other DNA
cgaatcaacaggtgtggcgctgatttttgttaatggcgaaggtgagaatgtcatcggtattcatgccggcgctaa

SEQ ID NO: 81013 - DNA, 75 bp, synthetic construct
  source 1..75: mol_type = other DNA
aaagggccaatggatgccgccagccagcaggcgtggggagcgtttttctggcagcaccgcaacggcctgattgac

SEQ ID NO: 81014 - DNA, 75 bp, synthetic construct
  source 1..75: mol_type = other DNA
cacaggctcaggcagataaagaatcacaacagatagccgctgatgaaaaagcgttagctggagagaatacaccaa

SEQ ID NO: 81015 - DNA, 75 bp, synthetic construct
  source 1..75: mol_type = other DNA
ttatccgctggtggaaggcggttataaggcactgcgccagaccgcgattcaggcgaccattgaactgtcacaaaa

SEQ ID NO: 81016 - DNA, 75 bp, synthetic construct
  source 1..75: mol_type = other DNA
cactggcagaatggattgaagactgggccgactaccttgtgggctttgatgctaatggtgacaccattcaggcaa

SEQ ID NO: 81017 - DNA, 75 bp, synthetic construct
  source 1..75: mol_type = other DNA
aacggtcggcatactgccgccggaaaatggtgtgattgaacgggcacgcgccggtatcgatgaggccatcagccg

SEQ ID NO: 81018 - DNA, 75 bp, synthetic construct
  source 1..75: mol_type = other DNA
atgacatacgagtacaaccccttctggcaacaacgtatccgtgagacggtactgcgcgcactggatgttcatccc

SEQ ID NO: 81019 - DNA, 75 bp, synthetic construct
  source 1..75: mol_type = other DNA
taccgtaatctgcaattacatctgaatccgctggatcaaagccctaacgtcaaacgcaaagcaaaatcggtcacg

SEQ ID NO: 81020 - DNA, 75 bp, synthetic construct
  source 1..75: mol_type = other DNA
caccttcaacaatatcgaagagctggggctgggatttatcaactattcactggtgccgtatctgacccgcatcga

SEQ ID NO: 81021 - DNA, 75 bp, synthetic construct
  source 1..75: mol_type = other DNA
cctgatcgcactggcgctgacggtggtgatttatctgtgtgcttatttcatgctgtttattggctacattgtgtt

SEQ ID NO: 81022 - DNA, 75 bp, synthetic construct
  source 1..75: mol_type = other DNA
ttactggtcagacccagggaaacatcaccgcaggtgcatttactgctgattccgtcggcaatatctacgtgcagg

SEQ ID NO: 81023 - DNA, 75 bp, synthetic construct
  source 1..75: mol_type = other DNA
tgaggaaaacgaagccggactgtaaattgccgggtaaggcgatggactacctgaagcgaaacggactgataagcg

SEQ ID NO: 81024 - DNA, 75 bp, synthetic construct
  source 1..75: mol_type = other DNA
gaagggaaaatcactgccgacatgatgttaacccatcgctatccgttcgccacgctggcagaaacctacgagcgc

SEQ ID NO: 81025 - DNA, 75 bp, synthetic construct
  source 1..75: mol_type = other DNA
aatctaaatcgtaatgcacttgctccagaggaagcagaggagataaatgacgaatatgatattaatattatttca

SEQ ID NO: 81026 - DNA, 75 bp, synthetic construct
  source 1..75: mol_type = other DNA
gttacgaataaaaaaggtaatacttcactttatgatcacaatgataacacttcagactacagcaaaaatggtgca

SEQ ID NO: 81027 - DNA, 75 bp, synthetic construct
  source 1..75: mol_type = other DNA
gtggtgactggtacaaattaccaacacaggtggttcgaaagccgctaagcaatatagctagtaaaaaacgctctg

SEQ ID NO: 81028 - DNA, 75 bp, synthetic construct
  source 1..75: mol_type = other DNA
tggtttcccgtgcgtcgtatgaggcagaaaagagcattcttcgccatattctcgaaggtaaggaggcggtcacgc

SEQ ID NO: 81029 - DNA, 75 bp, synthetic construct
  source 1..75: mol_type = other DNA
caccttcaacaatattgaagagctggggcttggtttcattaactattcccttgtgccgtatctgacccgtattga

SEQ ID NO: 81030 - DNA, 75 bp, synthetic construct
  source 1..75: mol_type = other DNA
tgagccaggaggatatctggcatgtgcgcacgctgacgctggacggactggtggggctgaatcccatcgcctatg

SEQ ID NO: 81031 - DNA, 75 bp, synthetic construct
  source 1..75: mol_type = other DNA
cgctgtttacctggcagcggctctggcagctcacagccagaaaggcatcccggcattctccatttacggtcatga

SEQ ID NO: 81032 - DNA, 75 bp, synthetic construct
  source 1..75: mol_type = other DNA
tgtcgtctgttccgggtgccgttgcacatggtgcagaacaccgatcgcgccaccttcaacaatatcgaagagctg

SEQ ID NO: 81033 - DNA, 75 bp, synthetic construct
  source 1..75: mol_type = other DNA
gtggggctgaatcccatcgcctatgcccgcgaggcaatatcgctggcggcagcgaccgaagagcacggggccaga

SEQ ID NO: 81034 - DNA, 75 bp, synthetic construct
  source 1..75: mol_type = other DNA
aacagtgagcagcagtacgacaatattgctggcaccacaaatctggggtatcaaaaacagtttggcgaagcgcgg

SEQ ID NO: 81035 - DNA, 75 bp, synthetic construct
  source 1..75: mol_type = other DNA
gccgcccagggggcaggtcaggacctgatggctaaaggtcaggaaacggttaaagcaactttcggtaagaactcc

SEQ ID NO: 81036 - DNA, 75 bp, synthetic construct
  source 1..75: mol_type = other DNA
tgatggcaagcggtaacaccacggttaaggcgaccttcggtaaggactccagtgttgttaaatgggttgttctgg

SEQ ID NO: 81037 - DNA, 75 bp, synthetic construct
  source 1..75: mol_type = other DNA
ctggccggatgaaaccttctttgacagcccgcgtttttctgtttcacgcctgacgcatgtgctgaaagccaaagc

SEQ ID NO: 81038 - DNA, 75 bp, synthetic construct
  source 1..75: mol_type = other DNA
ctgcgcgcacgtctgagggtaggcattgcggatactttattgactggcctggcatctgtcaggggcgggagagca

SEQ ID NO: 81039 - DNA, 75 bp, synthetic construct
  source 1..75: mol_type = other DNA
taacgagtacgaggaagaagtcgagagagtggtcggcatttacgcgccgcatctcggcgcgcgtcatattcatat

SEQ ID NO: 81040 - DNA, 75 bp, synthetic construct
  source 1..75: mol_type = other DNA
agatgaagacggtaactacctggttgatgtgattctggatgaagcagcaaacaaaggtaccggtaaatggaccag

SEQ ID NO: 81041 - DNA, 75 bp, synthetic construct
  source 1..75: mol_type = other DNA
gctgattttgaagataatgacttcagcggcaaacgctccctgatggagtctgtcgaagcgaagaccaaagatatt

SEQ ID NO: 81042 - DNA, 75 bp, synthetic construct
  source 1..75: mol_type = other DNA
attatcactggcgatcgtcctgtactggttctgcgcattattcagctggaagcagtgcaggaagaaatggctaac

SEQ ID NO: 81043 - DNA, 75 bp, synthetic construct
  source 1..75: mol_type = other DNA
agagccactggcgaacgtctgcataagctgatctccacgcatcccaatggctatatgacgccgcaggagttctgg

SEQ ID NO: 81044 - DNA, 75 bp, synthetic construct
  source 1..75: mol_type = other DNA
cagaaaagagtaacgcccgcgagtgtgcagctccgggcgtcgtggcgtcgattgcttctggttgtggagaaacta

SEQ ID NO: 81045 - DNA, 75 bp, synthetic construct
  source 1..75: mol_type = other DNA
ctttttcatgggaagaagttctgtgaggcctgtggtacggggatttattgcagagcggtatgtacaaagtctgtt

SEQ ID NO: 81046 - DNA, 75 bp, synthetic construct
  source 1..75: mol_type = other DNA
gtgtgctgggttcgctctattaccgccaaccgcaagatcctttactggtgccgctgtttaccctgattcgtgagg

SEQ ID NO: 81047 - DNA, 75 bp, synthetic construct
  source 1..75: mol_type = other DNA
acctcatcagcacccggatcattagtgaactcgaaatcactcacggtctgacagtgacaaagacagcaccatcca

SEQ ID NO: 81048 - DNA, 75 bp, synthetic construct
  source 1..75: mol_type = other DNA
ggtgtcaccaatcgccagcgcgagcattgagaaaatcctccgctcctacactgctgatgaactggctgatggcgt

SEQ ID NO: 81049 - DNA, 75 bp, synthetic construct
  source 1..75: mol_type = other DNA
gcgtttctaacgactgggcgggcaatctgcaacagctggtcgaggatgcgaaagcgggcaagattcataacgtct

SEQ ID NO: 81050 - DNA, 75 bp, synthetic construct
  source 1..75: mol_type = other DNA
cacgccgggggcttttgctgactatctggcggcgggtaatgatgtgcgctgcctgtatgagcatgactatacccg

SEQ ID NO: 81051 - DNA, 75 bp, synthetic construct
  source 1..75: mol_type = other DNA
catgcaggtgcatgagctcagcccggtcaccatggccacattactggccccctggaatatccgccctgccgtctt

SEQ ID NO: 81052 - DNA, 75 bp, synthetic construct
  source 1..75: mol_type = other DNA
gacacaacaggcgcaaaaagcacttcagccatttaacgcttctgttttatcagttcacaatacttatattagtga

SEQ ID NO: 81053 - DNA, 75 bp, synthetic construct
  source 1..75: mol_type = other DNA
aacagtctccatatatttccgtagtagatattctgcgagcaaggcgctctaccggcttgctaaaaactaatgtga

SEQ ID NO: 81054 - DNA, 75 bp, synthetic construct
  source 1..75: mol_type = other DNA
ctttaaagccctcggcgcacccgtggaattgatcaaagtgcacaacacgccggacggcaatttccccaacggtat

SEQ ID NO: 81055 - DNA, 75 bp, synthetic construct
  source 1..75: mol_type = other DNA
aatcagggagccgcggctggggatttgcctcgcccgacagcgactacgatgtacggtttttgtatgttcacccgc

SEQ ID NO: 81056 - DNA, 75 bp, synthetic construct
  source 1..75: mol_type = other DNA
ataccgttgccagcacgcatgcatatagcacattgagtgattacattgcccaggccaaacaaaagggcattaaac

SEQ ID NO: 81057 - DNA, 75 bp, synthetic construct
  source 1..75: mol_type = other DNA
tcgtgaactatcgcaaagaatccaatttattgtttgacgttggcgtggctgatgcactttccaaacgcctggtca

SEQ ID NO: 81058 - DNA, 75 bp, synthetic construct
  source 1..75: mol_type = other DNA
tcgctaccgaacgtgaattacaagcgcctgcgtcggttggcgaatttgttaattgacccagcgacactggaagat

SEQ ID NO: 81059 - DNA, 75 bp, synthetic construct
  source 1..75: mol_type = other DNA
ttacaggatgcgggcgtcgacgtgctggatattggtatgtccggcaccgaagaaatctatttcgccacgttccat

SEQ ID NO: 81060 - DNA, 75 bp, synthetic construct
  source 1..75: mol_type = other DNA
atggtcggtgcgttctttattgatatcgttaacgcgctggtgattaagctgtatttaatgttgccgatttttgcg

SEQ ID NO: 81061 - DNA, 75 bp, synthetic construct
  source 1..75: mol_type = other DNA
aggcggtgtggctggaaaacgactacatcaaagtgatgatcctgccggaactgggcggtcgggtgcatcgcgcgt

SEQ ID NO: 81062 - DNA, 75 bp, synthetic construct
  source 1..75: mol_type = other DNA
aatccaccaccggaaaaaccgttcccggcttgtctggaagaacggcggcttttgattcctgggcgacgttcaatg

SEQ ID NO: 81063 - DNA, 75 bp, synthetic construct
  source 1..75: mol_type = other DNA
tgctggagcaattaagtcagcataaactggatatgatcatttccgactgtccgatagattctacgcagcaggaag

SEQ ID NO: 81064 - DNA, 75 bp, synthetic construct
  source 1..75: mol_type = other DNA
attgagcagaatgaaccgttcgtttacgacaaacgtgttttgtggaagcgagtagggcgcatcaggaaaaatgtc

SEQ ID NO: 81065 - DNA, 75 bp, synthetic construct
  source 1..75: mol_type = other DNA
ttatgatgtgtgctttaaccacttcttccgtgcgcgcaacgagcaggatggcggcgacctggtttacttccaggg

SEQ ID NO: 81066 - DNA, 75 bp, synthetic construct
  source 1..75: mol_type = other DNA
gtggaaataaatccagaagatgagttaagcaatatcgttttatttccggtaaaagaggatgacccacgtaatcag

SEQ ID NO: 81067 - DNA, 75 bp, synthetic construct
  source 1..75: mol_type = other DNA
ttttgtgggctgttcatttaccctggacagtcagtgcggcaggttgtggctgtatcagcccccggcgacagggac

SEQ ID NO: 81068 - DNA, 75 bp, synthetic construct
  source 1..75: mol_type = other DNA
tgccgccgcccatgacgccggccgagacagtcaggccagcgttcgcgtcctttccccggtcgatctgaacaaaca

SEQ ID NO: 81069 - DNA, 75 bp, synthetic construct
  source 1..75: mol_type = other DNA
gggtatgcggccattttccggaatgacaggctatgacggcattgtcgcctgtcttcagcaggcaatggcggatag

SEQ ID NO: 81070 - DNA, 75 bp, synthetic construct
  source 1..75: mol_type = other DNA
atccagcgggtggaaagtgatgctgagaaaatcgcgttaaattgcctgttgttattggttattaccggctttcgc

SEQ ID NO: 81071 - DNA, 75 bp, synthetic construct
  source 1..75: mol_type = other DNA
gaagcgaaaggacgtgaacagcttgccacgatgctggcagggcaacagggcatgagcgttgaacaggcccgggcg

SEQ ID NO: 81072 - DNA, 75 bp, synthetic construct
  source 1..75: mol_type = other DNA
tcagtccggcattgaggccgggctggcggatgaattaatcaatgcgtcggatgccatcagtgtgatggccacggc

SEQ ID NO: 81073 - DNA, 75 bp, synthetic construct
  source 1..75: mol_type = other DNA
gcttctggagcccgcctatgcgcgggttttcttttgcgcgctcgggcgcgagatgggggcagcaagtctttcggt

SEQ ID NO: 81074 - DNA, 75 bp, synthetic construct
  source 1..75: mol_type = other DNA
tgttctacacgcggatacagcatggcgagccactggtcgagagccgctacctctacgacccgctgggacggcgaa

SEQ ID NO: 81075 - DNA, 75 bp, synthetic construct
  source 1..75: mol_type = other DNA
agcgggcggcgaaaccctgcctgtcacccgtggctgtctggaaaatgctactgacacacctgctggaacaacact

SEQ ID NO: 81076 - DNA, 75 bp, synthetic construct
  source 1..75: mol_type = other DNA
gggccgtaaagaaaggtaaagtgtctgcggctgtgttagctgaagtcaggtctaaattaaaagtattgattggat

SEQ ID NO: 81077 - DNA, 75 bp, synthetic construct
  source 1..75: mol_type = other DNA
atgaggcacgggctgctggcgctgatttgctggctgtgttgtgttgttgcccatagcgaaatgctgaatgtcgaa

SEQ ID NO: 81078 - DNA, 75 bp, synthetic construct
  source 1..75: mol_type = other DNA
gcactacgcaaaggccaggcctcagcattttattatggtgatcccctgggcgaaatgcgcctggtaagcagagtt

SEQ ID NO: 81079 - DNA, 75 bp, synthetic construct
  source 1..75: mol_type = other DNA
gcgtcctatccgacgccgaacaggaggccttgtatggcctgccggagttcgatgatgcgcagcagctggaatatc

SEQ ID NO: 81080 - DNA, 75 bp, synthetic construct
  source 1..75: mol_type = other DNA
agcctggtgctgatgccatcggcagattatgcccgccagatttgtggggcggggagccagctggcgcgtatggtg

SEQ ID NO: 81081 - DNA, 75 bp, synthetic construct
  source 1..75: mol_type = other DNA
tcaggatatgcacagcttgccactcagcagaaggaaggactagatcgctctgctgagcaaggggctgttttaggt

SEQ ID NO: 81082 - DNA, 75 bp, synthetic construct
  source 1..75: mol_type = other DNA
cggggcttgccgaatacggcccttttttacctcacgggttgcaggtggagctgccggacataccgacaaccacca

SEQ ID NO: 81083 - DNA, 75 bp, synthetic construct
  source 1..75: mol_type = other DNA
aagcaatgacttaccacatcataatccattaaatcatgttgatatcgttgatataatccaagaaacaagagtcta

SEQ ID NO: 81084 - DNA, 75 bp, synthetic construct
  source 1..75: mol_type = other DNA
gccgtgacgtggtgggcgccgacagtgggcgaacaggtttatattttgtgcccctgcggtgagctggagacggca

SEQ ID NO: 81085 - DNA, 75 bp, synthetic construct
  source 1..75: mol_type = other DNA
ttcagcatcaggggcgctattaccatgaatacagtatgcacattactgttgaacgtgactccgccacaggtcagc

SEQ ID NO: 81086 - DNA, 75 bp, synthetic construct
  source 1..75: mol_type = other DNA
aagagagcaaaatcctgttcacagattaaatgaagcattgccaagaaagataaaaggacccaaaagtaagaaaaa

SEQ ID NO: 81087 - DNA, 75 bp, synthetic construct
  source 1..75: mol_type = other DNA
actggtcaccgcattatgggcaacactggcactgatgtatgtctcgctggcagcgatcaccgggaaatatccggt

SEQ ID NO: 81088 - DNA, 75 bp, synthetic construct
  source 1..75: mol_type = other DNA
tttgacaaatcgacagggcaggccagactggcgcatccggttgtcgctaatgtggtggtgaaaaacagtgaaggc

SEQ ID NO: 81089 - DNA, 75 bp, synthetic construct
  source 1..75: mol_type = other DNA
ggtgatgtgatcaacgagtccattcgttatttcagccagcagtacatcgacatgccgattactcaggcgctgatt

SEQ ID NO: 81090 - DNA, 75 bp, synthetic construct
  source 1..75: mol_type = other DNA
cgtcaaataatcgaaggcgtttgtctcgacccacgtattggcaaccattacaacaatccgtcgtttggttatggt

SEQ ID NO: 81091 - DNA, 75 bp, synthetic construct
  source 1..75: mol_type = other DNA
ctggtattcctgattttcgccattatctctggcggctgggtggcagaaagtccgacctgggcaccgtactttgac

SEQ ID NO: 81092 - DNA, 75 bp, synthetic construct
  source 1..75: mol_type = other DNA
tcagcacagtaattaacaaatcagctaaagccggtttatccggcgtaattatccacgccgttcatgaaataaatg

SEQ ID NO: 81093 - DNA, 75 bp, synthetic construct
  source 1..75: mol_type = other DNA
cacagcccaacacctggcaacgtcgctggtcaacgttttttgctgaacaacggattggctggcagttggaactgg

SEQ ID NO: 81094 - DNA, 75 bp, synthetic construct
  source 1..75: mol_type = other DNA
aatcgaactgcgtaatgaactgcctggcggagaagtccatgccgcatggcatttgcgctatgcaggacatgactt

SEQ ID NO: 81095 - DNA, 75 bp, synthetic construct
  source 1..75: mol_type = other DNA
tcaagtcgcccgacactgtcactgagtgcactgctgaaacagtatggtatccgcctgacggctaatcaggcatat

SEQ ID NO: 81096 - DNA, 75 bp, synthetic construct
  source 1..75: mol_type = other DNA
ccttcctgaaaatcgggactatcgtcggtctggcggtaggcattttgattatgcgcccgacgctgaccatgcctg

SEQ ID NO: 81097 - DNA, 75 bp, synthetic construct
  source 1..75: mol_type = other DNA
gcgatgcataaaaaatatcgtactgaaaatattatattctccccggaatttctccgtgagggtaaagccctttac

SEQ ID NO: 81098 - DNA, 75 bp, synthetic construct
  source 1..75: mol_type = other DNA
caacaatccgtcgtttggctatggtggttattgtctaccgaaagataccaagcagttactggcgaactaccagtc

SEQ ID NO: 81099 - DNA, 75 bp, synthetic construct
  source 1..75: mol_type = other DNA
ctgttttcttgttgagctttttcatgatattgattcattttttataaatcaacgattaagtaagctggaaagttt

SEQ ID NO: 81100 - DNA, 75 bp, synthetic construct
  source 1..75: mol_type = other DNA
atatcgactcttttacttacaacctggcagatcagttgcgcagcaatggtcataacgtggtgatttaccgcaacc

SEQ ID NO: 81101 - DNA, 75 bp, synthetic construct
  source 1..75: mol_type = other DNA
gaacgaagcgcataacgcttgtgggcgatgcggcgcatccggtggcgcaatatatggcgcagggtgcctgtatgg

SEQ ID NO: 81102 - DNA, 75 bp, synthetic construct
  source 1..75: mol_type = other DNA
cccggcgaatggaaacctggtgatgaaccgtactatccagtaaatgatgacaaaaacatgacgatttataagaaa

SEQ ID NO: 81103 - DNA, 75 bp, synthetic construct
  source 1..75: mol_type = other DNA
taatctcccatttaatatgaatacattttatcaattatggggagtgcggacgcctgatgaagcaattaagaaaat

SEQ ID NO: 81104 - DNA, 75 bp, synthetic construct
  source 1..75: mol_type = other DNA
ggtcaatttgcttgatattttccatatcaaagcattttcagagttggatctctccttgctggcaaacgccccact

SEQ ID NO: 81105 - DNA, 75 bp, synthetic construct
  source 1..75: mol_type = other DNA
cgcgccatgttctcgtgtacgacgcatcttcaagcgccaatggtccgcaatggtgtgtgctgaaaacaggcctgt

SEQ ID NO: 81106 - DNA, 75 bp, synthetic construct
  source 1..75: mol_type = other DNA
tgcggttcagcaatattctgcttatgttaacgtagaaagtggaatgctgaaaacgataaaagatctggtctcaac

SEQ ID NO: 81107 - DNA, 75 bp, synthetic construct
  source 1..75: mol_type = other DNA
cttcggcgcgatactgagtattacagaatggtgggagaacaacgatccgccggggtcattcaggctggatattga

SEQ ID NO: 81108 - DNA, 75 bp, synthetic construct
  source 1..75: mol_type = other DNA
cctgccggaaaaaatcaggaaatgccatgtttatttccctgatgaccgaacaaacagaagcaacggagataaaaa

SEQ ID NO: 81109 - DNA, 75 bp, synthetic construct
  source 1..75: mol_type = other DNA
caacgttgaccagaaaatatgaaggttcaacttgtcttccaaacgtagccatttacgctgcaggctaccgtaaat

SEQ ID NO: 81110 - DNA, 75 bp, synthetic construct
  source 1..75: mol_type = other DNA
ggtcaccgcattctgggcaacgctggcacttatgtatatgtcgtttgcggcaggcaccgggaaatatccgatgtg

SEQ ID NO: 81111 - DNA, 75 bp, synthetic construct
  source 1..75: mol_type = other DNA
cagcaatatcagcagccgcaacagccggttgcgccgcagccgcagtatcagcagccacaacagcaggttgcgccg

SEQ ID NO: 81112 - DNA, 75 bp, synthetic construct
  source 1..75: mol_type = other DNA
ttactacgtatcaaccgtagttccatcagaaatcaccccaggggaagcagacgctatcgttaacgtaacgctgga

SEQ ID NO: 81113 - DNA, 75 bp, synthetic construct
  source 1..75: mol_type = other DNA
ctgcgtgacgcttacgttgatcacctgttcggttatatcaacgtcaaaaacctcacgccgctcaagctggtgatc

SEQ ID NO: 81114 - DNA, 75 bp, synthetic construct
  source 1..75: mol_type = other DNA
acgcggtcgctatcagcaaatcaatctgcgtgacgcttacgttgatcacctgttcggttatatcaacgtcaaaaa

SEQ ID NO: 81115 - DNA, 75 bp, synthetic construct
  source 1..75: mol_type = other DNA
tctcccgcttcaaccaggcctacatgatgcatgccaccacctccccgctgtatgccatctgcgcatccaacgacg

SEQ ID NO: 81116 - DNA, 75 bp, synthetic construct
  source 1..75: mol_type = other DNA
ctggcagccgtggcgctggtactgagcactgtggtgctgattaagatgaagcgcactaaatacatctgggttacc

SEQ ID NO: 81117 - DNA, 75 bp, synthetic construct
  source 1..75: mol_type = other DNA
ctctgcttgggccgtcgggttccggcaaatccacccttttacgtcacttaagcggtttgattaccggcgataaat

SEQ ID NO: 81118 - DNA, 75 bp, synthetic construct
  source 1..75: mol_type = other DNA
agctgagctagttgataaaacttgctataaagacaggcaagggtcttatgacattgctctaactctcgctcagca

SEQ ID NO: 81119 - DNA, 75 bp, synthetic construct
  source 1..75: mol_type = other DNA
atgaaacctgtttttgatgaaaatgggctggctacagtgccgggtgatatgcgttgtttttattatgatgcagta

SEQ ID NO: 81120 - DNA, 75 bp, synthetic construct
  source 1..75: mol_type = other DNA
cagcgttttggatcggcgctcaatctgaatgttcacttccacatgctgtttctcgacggtgtgtatgtcgagcaa

SEQ ID NO: 81121 - DNA, 75 bp, synthetic construct
  source 1..75: mol_type = other DNA
agcggaggggaaagtgtttacgcagattcagtgggagcagaaattcgcccgtcacgtaaatcacgtcagggcgca

SEQ ID NO: 81122 - DNA, 75 bp, synthetic construct
  source 1..75: mol_type = other DNA
catcgacagaatctgttggtatcggtgcaggtgttgacgcttcagttatgactctggcttgtagaacgtggcaag

SEQ ID NO: 81123 - DNA, 75 bp, synthetic construct
  source 1..75: mol_type = other DNA
agctgaattggttgataaaactggttacaaagacaggcaagggtcttatgacctgattctcgctctgtatcatca

SEQ ID NO: 81124 - DNA, 75 bp, synthetic construct
  source 1..75: mol_type = other DNA
gacgtcctggcgcgtctgccggaatggccagaggagcgactggcagagttgctgccccttgagggatttaccttc

SEQ ID NO: 81125 - DNA, 75 bp, synthetic construct
  source 1..75: mol_type = other DNA
cagccggcccgagatcatggggtgggtgctgggcatcgtttaccgcgtcattgccacgcacctggtcaagaaagc

SEQ ID NO: 81126 - DNA, 75 bp, synthetic construct
  source 1..75: mol_type = other DNA
tcagctatcgctatctggatgctggtaaatcctccctgtcttacaaggatgcagaaggggataaatataaatcag

SEQ ID NO: 81127 - DNA, 75 bp, synthetic construct
  source 1..75: mol_type = other DNA
gtggggtatggctctgcctgagccggaatttacacctgctgagcttgccgcattccgggattactggatggcgga

SEQ ID NO: 81128 - DNA, 75 bp, synthetic construct
  source 1..75: mol_type = other DNA
ttttcgtttttaatgcctgtcatgctgacaaggctgctgctgccagcgccaatgcactgcacagcctggaagttg

SEQ ID NO: 81129 - DNA, 75 bp, synthetic construct
  source 1..75: mol_type = other DNA
atgagtgagaagaaaacccgaacgggcagtgagaacaggaagagaattgtaaaattcacggcgagattcacggag

SEQ ID NO: 81130 - DNA, 75 bp, synthetic construct
  source 1..75: mol_type = other DNA
catcgttcagcgatatgttgtccggcttcaaagataaggtgacatcatcccttaatagcgcgaccagctcagtta

SEQ ID NO: 81131 - DNA, 75 bp, synthetic construct
  source 1..75: mol_type = other DNA
gtaaacatctgaacataacttactctgggagaatacctttaccgcttgaagatgagtcggggcaaatggggtttg

SEQ ID NO: 81132 - DNA, 75 bp, synthetic construct
  source 1..75: mol_type = other DNA
gaacaaaccacgaaacccattcaggggaaacagcgtatctccgtctacgcccgcagcaatcccgactccgaccgg

SEQ ID NO: 81133 - DNA, 75 bp, synthetic construct
  source 1..75: mol_type = other DNA
ccggccgcacgttataccgccgtggtcagacggcatcttgcccggctccaccgggataatttcctgaatccgtct

SEQ ID NO: 81134 - DNA, 75 bp, synthetic construct
  source 1..75: mol_type = other DNA
ccgccgtattcaccgcgcgtatcagcgtacccgtgacgctaacttctctctggaaggtctgaccggctttactat

SEQ ID NO: 81135 - DNA, 75 bp, synthetic construct
  source 1..75: mol_type = other DNA
tcgaaatgcagttttgtcagatattacgcctgtgtgctgtgttaatgacaaaagcagataaaaaagttgttattt

SEQ ID NO: 81136 - DNA, 75 bp, synthetic construct
  source 1..75: mol_type = other DNA
gtgcgtcagcagctggggttggatcagccgctgtatcaccagttctggcactatatcagcaatgctgtgcagggg

SEQ ID NO: 81137 - DNA, 75 bp, synthetic construct
  source 1..75: mol_type = other DNA
tcggtgtggagtatgtcgatctgccaaccctgttctctgaatcagacgttatctctctgcactgcccgctgacac

SEQ ID NO: 81138 - DNA, 75 bp, synthetic construct
  source 1..75: mol_type = other DNA
gaactcttacagagttgttaggcagatggtggatatatcacggaaaatcacatgagcgtggagatattgaacggg

SEQ ID NO: 81139 - DNA, 75 bp, synthetic construct
  source 1..75: mol_type = other DNA
gctttttaatcacgacaccagtcgcgatcaggaaccacagttacacacgcatgcggtggtggccaatgttacaca

SEQ ID NO: 81140 - DNA, 75 bp, synthetic construct
  source 1..75: mol_type = other DNA
aacagtacgacaagaagtacctgcaacaggtgaacgagtcctttggctttgagctggaattttttgactttctgc

SEQ ID NO: 81141 - DNA, 75 bp, synthetic construct
  source 1..75: mol_type = other DNA
tctccactggcggcggtgcattcctcgaattcgtggaaggtaaagtactgcctgcagtagcgatgctcgaagagc

SEQ ID NO: 81142 - DNA, 75 bp, synthetic construct
  source 1..75: mol_type = other DNA
aggagaaagaaactttacctttatggtacgcccaagtgccgatctttttttacaacctgatggccttcctgcatt

SEQ ID NO: 81143 - DNA, 75 bp, synthetic construct
  source 1..75: mol_type = other DNA
tggttaaggagattaacttcgtaagacaaacagcacctgccggacagttcccggtcagtgaatgctggttttctt

SEQ ID NO: 81144 - DNA, 75 bp, synthetic construct
  source 1..75: mol_type = other DNA
gcactgatgtatgtctcgctggcggtgatctccggaaaatatccgatgcgacccggaaaaatgaaatgtgtccgg

SEQ ID NO: 81145 - DNA, 75 bp, synthetic construct
  source 1..75: mol_type = other DNA
ctggccattatcctcgtgccatttaactttgcgcctatgcgtaagtcgatgatttccgcgccggtatttcgcggt

SEQ ID NO: 81146 - DNA, 75 bp, synthetic construct
  source 1..75: mol_type = other DNA
atggcgcgtggctgcattctgagtcttctgctgatgacgggcatgtgtcaggccgttgcgcagaccattccggac

SEQ ID NO: 81147 - DNA, 75 bp, synthetic construct
  source 1..75: mol_type = other DNA
gctggtaacccaaggaaaggatggcgtgatggctcgctggcagggaaaaaacctgtacttcccggcaacaccggt

SEQ ID NO: 81148 - DNA, 75 bp, synthetic construct
  source 1..75: mol_type = other DNA
acgttggaacctggcacaaatataactgcggaagcatcgccggccgctggtttgacctgaccacgtttgatgatg

SEQ ID NO: 81149 - DNA, 75 bp, synthetic construct
  source 1..75: mol_type = other DNA
tgatctccggaaaatatccgatgcgacccggaaaaatgaaatgtgtccgggtcgcaactgcagatgaacatctga

SEQ ID NO: 81150 - DNA, 75 bp, synthetic construct
  source 1..75: mol_type = other DNA
ccgaaaacacggtagttgctgacactgtgaaagaaaccagtgagcgtggcgtaaaacttacccaaccaattgagc

SEQ ID NO: 81151 - DNA, 75 bp, synthetic construct
  source 1..75: mol_type = other DNA
ggtctgcacctcactggaagaggagctgaatgactatttcagaaccggtaaacgcaaagaacagcaaatgctgga

SEQ ID NO: 81152 - DNA, 75 bp, synthetic construct
  source 1..75: mol_type = other DNA
atggcaggctgatcgacaagcctgatctcaaaatggcgctggagagctggcacaaacaggtcattaaggtggggc

SEQ ID NO: 81153 - DNA, 75 bp, synthetic construct
  source 1..75: mol_type = other DNA
taacattttagcggcggggcacgccgttcttgcctgtggagagatggtgcagtcaggccgcccgttgaagcagga

SEQ ID NO: 81154 - DNA, 75 bp, synthetic construct
  source 1..75: mol_type = other DNA
gattgctggaaaggctgggccatactcctccggcagaagcagaaaaagcttattatgcttccatcggaaacgatg

SEQ ID NO: 81155 - DNA, 75 bp, synthetic construct
  source 1..75: mol_type = other DNA
ctgccagacccgtgtgcgcgacccgggccgccggggatacacaaaacacatgctgcgtctgcggcgggccggaga

SEQ ID NO: 81156 - DNA, 75 bp, synthetic construct
  source 1..75: mol_type = other DNA
gattcagagcgtacagaggtaaaccggggtattcgggaagcatggtctgggtcaaaatacgttgctgtaagttaa

SEQ ID NO: 81157 - DNA, 75 bp, synthetic construct
  source 1..75: mol_type = other DNA
cgatctccacaaactggttcgtgacacggacaaagttttccctaatcctggtaattcagacctgggactgatgac

SEQ ID NO: 81158 - DNA, 75 bp, synthetic construct
  source 1..75: mol_type = other DNA
tctgctaagacccagctggagctgaataattcagcactgactgccagtggtaaggtatttatcgggcagggaaat

SEQ ID NO: 81159 - DNA, 75 bp, synthetic construct
  source 1..75: mol_type = other DNA
tatccatacccgtgccattcacagcatcgacaccgacattaagctcaaccgcgcattgtgggtgatggctgaaac

SEQ ID NO: 81160 - DNA, 75 bp, synthetic construct
  source 1..75: mol_type = other DNA
aaaggcaatggtgcacatgcaacactggattacacgagctcggagttgacgacgggcagtgcagttatagccagt

SEQ ID NO: 81161 - DNA, 75 bp, synthetic construct
  source 1..75: mol_type = other DNA
tgagctggagccgtggcagcagttcgcctttgcgtgcatcctgggctttaaggttaaggccaccggacggcgcaa

SEQ ID NO: 81162 - DNA, 75 bp, synthetic construct
  source 1..75: mol_type = other DNA
acacagtgaatttggccaggcgtgggataagagtctgaccgacaataacggcccgtatatcgaactgatgaccgg

SEQ ID NO: 81163 - DNA, 75 bp, synthetic construct
  source 1..75: mol_type = other DNA
tctcgcgtgatcgcagtggagtctatgcgacagcagcacgtgaaggtgcacctcaggccagacaggtggccgatc

SEQ ID NO: 81164 - DNA, 75 bp, synthetic construct
  source 1..75: mol_type = other DNA
gcgcattacaggaaaaacaagataaagtgcgaataatcaaagggatgttatcacagttgctttctatatctccct

SEQ ID NO: 81165 - DNA, 75 bp, synthetic construct
  source 1..75: mol_type = other DNA
ttccgatggattttaatatttatgaaattccgggcagcgtttatcgtcgcgcaaaagaagtcgtccggaagaaag

SEQ ID NO: 81166 - DNA, 75 bp, synthetic construct
  source 1..75: mol_type = other DNA
ccgccgtctcaagggtgttcagtccacggtcaaaaaagcggaaatcaaggtggagctgctgccgaagtacgccgc

SEQ ID NO: 81167 - DNA, 75 bp, synthetic construct
  source 1..75: mol_type = other DNA
gccagcgatagtgaaactggcgagacggcagatcccttaattacggtgaacggtcatcacgttatcacatccacc

SEQ ID NO: 81168 - DNA, 75 bp, synthetic construct
  source 1..75: mol_type = other DNA
atgattacgcttttccgtttactggcgattctttgccttttttataacgtttcagtttatgctgtaaattgctat

SEQ ID NO: 81169 - DNA, 75 bp, synthetic construct
  source 1..75: mol_type = other DNA
ggactgaatgcgctgacgctgacggatgttacaaaaaatgcagcgtatggcgttgagatagaaagtctgatgctg

SEQ ID NO: 81170 - DNA, 75 bp, synthetic construct
  source 1..75: mol_type = other DNA
cggatgacattctggattatgtggctatcgacacagataaaaccggtcatctgcgggtcagggtcgtggagggaa

SEQ ID NO: 81171 - DNA, 75 bp, synthetic construct
  source 1..75: mol_type = other DNA
ctgaagatattcgtgatttcgtcgcaattcagcatgacgctgacggaaaaatcagggtgaaagtcgtcgaagcga

SEQ ID NO: 81172 - DNA, 75 bp, synthetic construct
  source 1..75: mol_type = other DNA
atgttggatcctgcagacctgccaccggatgacattctggattatgtggctatcgacacagataaaaccggtcat

SEQ ID NO: 81173 - DNA, 75 bp, synthetic construct
  source 1..75: mol_type = other DNA
gaaaatccccgtgtccttggttcgattccgagtccgggcaccaaattcatatcaacggacctccacggaggtccg

SEQ ID NO: 81174 - DNA, 75 bp, synthetic construct
  source 1..75: mol_type = other DNA
caacgacgttttccagcttacagcccggcggtgaatcctggagtgtattacgtgcacggttcgatccgtggctgg

SEQ ID NO: 81175 - DNA, 75 bp, synthetic construct
  source 1..75: mol_type = other DNA
gaccaggcaaaacccgtgaccgttgttgtgcgtgtgccgcagggtgaaacggaagaagaaaccacgaccaatatc

SEQ ID NO: 81176 - DNA, 75 bp, synthetic construct
  source 1..75: mol_type = other DNA
atggcctggtagatccgctgtccgcacacttcatatcccccattgacgaagataaatactcaatgctcccggagg

SEQ ID NO: 81177 - DNA, 75 bp, synthetic construct
  source 1..75: mol_type = other DNA
ttacaggcagtgaaaccatcgtcagggatgcggttgccaaatggcgtaaaggctggaacccaccggttactactg

SEQ ID NO: 81178 - DNA, 75 bp, synthetic construct
  source 1..75: mol_type = other DNA
aatacctttccactggcgagacgcgaaaaaccctgctgtgtcaggcgctgatgtcggagcctgacttgttgatcc

SEQ ID NO: 81179 - DNA, 75 bp, synthetic construct
  source 1..75: mol_type = other DNA
actggatcagggctggtatgaaatgcaccgccagcttgagtacaagcagctctggcgtggcggtcaggtgcttgc

SEQ ID NO: 81180 - DNA, 75 bp, synthetic construct
  source 1..75: mol_type = other DNA
gatgtcgtacttcactcagaccactgacggcagagtgaatctgatgcatcacaggaaagccggaaacacgaagct

SEQ ID NO: 81181 - DNA, 75 bp, synthetic construct
  source 1..75: mol_type = other DNA
tcagtttgctgatagatatggaagaatttcatcacgaaaacccgtttcgcgccgtgaagaagttacgtctggaaa

SEQ ID NO: 81182 - DNA, 75 bp, synthetic construct
  source 1..75: mol_type = other DNA
cgctgttccgctatacgctggcgattatgctattggcgataggcggggcgtggctgtttattcgtatccagaacc

SEQ ID NO: 81183 - DNA, 75 bp, synthetic construct
  source 1..75: mol_type = other DNA
cggcccgacggaagtgcgcgttgaggtcaacaaaagttcgcctgtcgtctggctgaaaacctggctgtcgcccaa

SEQ ID NO: 81184 - DNA, 75 bp, synthetic construct
  source 1..75: mol_type = other DNA
gtaataaccgcaagattcacgctcgtaagttcctgtctacgccagaaggaaaagcctggctagagcgtaaacaga

SEQ ID NO: 81185 - DNA, 75 bp, synthetic construct
  source 1..75: mol_type = other DNA
ggggctcggtgataaccttttagtacctatataccctgctgaaaacggcaaagtgggtacatccgagttcatgat

SEQ ID NO: 81186 - DNA, 75 bp, synthetic construct
  source 1..75: mol_type = other DNA
tcacctatcttgagaagcatttcggaaccactccgatcgtgcctccgcacgaggccgtcgagcgctcttgcgagc

SEQ ID NO: 81187 - DNA, 75 bp, synthetic construct
  source 1..75: mol_type = other DNA
gctcaaaaccgtactggtcaacggatgttgaaatggcggcgcgtgcctttgagcgttatgttcaggataaagcgc

SEQ ID NO: 81188 - DNA, 75 bp, synthetic construct
  source 1..75: mol_type = other DNA
agctgacgcttaacgtcatgacctgggttgcggtggttctggtaccgatcattctgctctacaccgcctggtgtt

SEQ ID NO: 81189 - DNA, 75 bp, synthetic construct
  source 1..75: mol_type = other DNA
accagggataagcgggaaaaattcacggcgctgattccggcaattatggaggctatccggatcagcgatttcagg

SEQ ID NO: 81190 - DNA, 75 bp, synthetic construct
  source 1..75: mol_type = other DNA
tgctcggcttttacgaagccatgcaaaatcacaccatcaagctgacgccgcctgcaggcaagccgatgccgattg

SEQ ID NO: 81191 - DNA, 75 bp, synthetic construct
  source 1..75: mol_type = other DNA
cagcttaacgcgctctatgatgctaacagcggtaacgccgttcaaacggtacacggttggccaacgcagcgtcag

SEQ ID NO: 81192 - DNA, 75 bp, synthetic construct
  source 1..75: mol_type = other DNA
tgcaggtgtacaccgataaccgtcagggctggacggatgccattaacaatgccgtacagaaaggaactgcccacg

SEQ ID NO: 81193 - DNA, 75 bp, synthetic construct
  source 1..75: mol_type = other DNA
gactggctggcagaacagcagcttgtcaccgtggaaaacctgcgcggcttttatgtcgtgacactgacctcccgt

SEQ ID NO: 81194 - DNA, 75 bp, synthetic construct
  source 1..75: mol_type = other DNA
gtgacggtaaaagatgctcagggcaatccattgggtgatatgccttttacgctgaagcgtggcgatggttatacc

SEQ ID NO: 81195 - DNA, 75 bp, synthetic construct
  source 1..75: mol_type = other DNA
caggagcgtctgcagcagatggagcgggatatggtccgtgacctgcagaaagagaaaaccctgggcggagactga

SEQ ID NO: 81196 - DNA, 75 bp, synthetic construct
  source 1..75: mol_type = other DNA
gcggaagagaatggtcggtctgttaactctgagatttatcagagagtaatggaaagctttaagaaggaagggcgc

SEQ ID NO: 81197 - DNA, 75 bp, synthetic construct
  source 1..75: mol_type = other DNA
aacgcggattattctgagctggcgaagtcaccgaaatttcagcagacctttttgtcaattgatgcagatccgcag

SEQ ID NO: 81198 - DNA, 75 bp, synthetic construct
  source 1..75: mol_type = other DNA
ctgattgagctgcataccgacaacctcgataaattcttcaccccgcgcccgaaagtcgactggcccgcccattcg

SEQ ID NO: 81199 - DNA, 75 bp, synthetic construct
  source 1..75: mol_type = other DNA
aacggtcggtatactgccgccggaaaatggtgtgattgaacgggcacgcgccggtatcgatgaggccatcagtcg

SEQ ID NO: 81200 - DNA, 75 bp, synthetic construct
  source 1..75: mol_type = other DNA
gaagatcttgtgcgagcctgtcttgaagagaaccagccaattgatctagcctcactttaccttgaaaatctctta

SEQ ID NO: 81201 - DNA, 75 bp, synthetic construct
  source 1..75: mol_type = other DNA
ccgatggtctatgccgctgcgttctccggcttctatgtggcgatgatcctcgtgctggcgtctttgttcttccgt

SEQ ID NO: 81202 - DNA, 75 bp, synthetic construct
  source 1..75: mol_type = other DNA
aaagatgccggggtgaacacatatcgctggcaggggggagaacagcggccggccaccatcatcagtgaaccggac

SEQ ID NO: 81203 - DNA, 75 bp, synthetic construct
  source 1..75: mol_type = other DNA
cacggttttgggtgttcatacagccgaagccacactgcctaacggcaacaacgatacgaagatagtcaatattgc

SEQ ID NO: 81204 - DNA, 75 bp, synthetic construct
  source 1..75: mol_type = other DNA
gtgacggtaaaagatgcgcagggcaatccattgggtgatataccctttaccctgaaacgtggcgatggttatacc

SEQ ID NO: 81205 - DNA, 75 bp, synthetic construct
  source 1..75: mol_type = other DNA
ttgtcgtcaaacgacgcaaagccaaaagccacggggcagcacatggatcgtggaagattgcttatgccgacttta

SEQ ID NO: 81206 - DNA, 75 bp, synthetic construct
  source 1..75: mol_type = other DNA
ggcaggctgtacgatattagtaatccgaaaattgaggcgtttacaccggcgagaggtccgattattccgccgccc

SEQ ID NO: 81207 - DNA, 75 bp, synthetic construct
  source 1..75: mol_type = other DNA
tgcaaaaatgctcgaaaccgatcaggcgtgggaagtgttcgaaaaactggaagactgctatttcagccagggaaa

SEQ ID NO: 81208 - DNA, 75 bp, synthetic construct
  source 1..75: mol_type = other DNA
gcgacgatattaattactgaagccttctgggctctacaggaacgcccgaacatcgatgttcagcgtgtcacgctt

SEQ ID NO: 81209 - DNA, 75 bp, synthetic construct
  source 1..75: mol_type = other DNA
tggccctgtcgcgtatgaagcagcatgtacaggtgtacaccgatgaccgtcagggctggacggatgccatcaaca

SEQ ID NO: 81210 - DNA, 75 bp, synthetic construct
  source 1..75: mol_type = other DNA
gattcctgttattaccaccgaacttttggcgcagctttacggcactgagccggtgcgcattcgccagaatcatca

SEQ ID NO: 81211 - DNA, 75 bp, synthetic construct
  source 1..75: mol_type = other DNA
gcttgatggcggcgtcgtgatgttcggccagcgcaccagcaaaatgaccattccccagatggtagaggtcatcga

SEQ ID NO: 81212 - DNA, 75 bp, synthetic construct
  source 1..75: mol_type = other DNA
atggggctatacgataaatatgcgcgccttgctggcgagcgactgcaatttagtgacaacgggttaacaccgttt

SEQ ID NO: 81213 - DNA, 75 bp, synthetic construct
  source 1..75: mol_type = other DNA
gcacagtaccggaacgtctttatcgaggatgaccacggcgaacagtttcgcctggttgtccgtaataacggtgca

SEQ ID NO: 81214 - DNA, 75 bp, synthetic construct
  source 1..75: mol_type = other DNA
accctgacgctgacggtcaccaaaccggacggcacgacggacacggtggagcacacgctgaccgcagatgaagtg

SEQ ID NO: 81215 - DNA, 75 bp, synthetic construct
  source 1..75: mol_type = other DNA
aatgggatatagttcatcaggttatgacacatatgttagtgagcgaaaatcaggaagcgacagcaataagtccgg

SEQ ID NO: 81216 - DNA, 75 bp, synthetic construct
  source 1..75: mol_type = other DNA
acacagtaccggaatgtctttatcgaggatgatcagggaacgcattttcgcctggttgtccgtcaggatggcacg

SEQ ID NO: 81217 - DNA, 75 bp, synthetic construct
  source 1..75: mol_type = other DNA
cggggtttgctgttgaatacctgagccgcaagaatccgtttggcgatatcaaatcggatggcacggtgaaaacgg

SEQ ID NO: 81218 - DNA, 75 bp, synthetic construct
  source 1..75: mol_type = other DNA
atgaaaatcacacctgaacaggtttgcgaggctctggatgcctgggtatgcagaccaggaatgacgcaggagcag

SEQ ID NO: 81219 - DNA, 75 bp, synthetic construct
  source 1..75: mol_type = other DNA
ggatttggcaatgcagcgagcgtcaacaagaggaaccgctgggaatgatgagcgtacagttcagttatcagatgg

SEQ ID NO: 81220 - DNA, 75 bp, synthetic construct
  source 1..75: mol_type = other DNA
gcgcgtcctctgctcggctttaccggtgaggatgtgcagatgattgaagagattatcctgactcaccttgagcgt

SEQ ID NO: 81221 - DNA, 75 bp, synthetic construct
  source 1..75: mol_type = other DNA
gtgacattgcgttataacgcgcagtactacgcaacgggtgtggctactgcaggcgatgttacttctacagttaat

SEQ ID NO: 81222 - DNA, 75 bp, synthetic construct
  source 1..75: mol_type = other DNA
aagcatgcgcatttaacgacatcattccggcagaccactgcctgcatgatgttcaggatatgagcgcactgaatc

SEQ ID NO: 81223 - DNA, 75 bp, synthetic construct
  source 1..75: mol_type = other DNA
tcgcacgttagattttcccgacttcacccgagggcagtggcgcacccgcaagccgatctttgcgctgaacgacgc

SEQ ID NO: 81224 - DNA, 75 bp, synthetic construct
  source 1..75: mol_type = other DNA
accgctgttaaaagcgagctggtcaacgttgcgaaaaaagtacgtattgacggcttccgcaaaggcaaagtgcca

SEQ ID NO: 81225 - DNA, 75 bp, synthetic construct
  source 1..75: mol_type = other DNA
agcggtttaccgctatctggcaaccgagcgaagcgtgtgaaccgtaccaggatgaagaagggcgcttgttacatc

SEQ ID NO: 81226 - DNA, 75 bp, synthetic construct
  source 1..75: mol_type = other DNA
tgttcacagcgatagcacctgccatttggggcagcacctacattgtcaccacccaatacctgccgaacttctcac

SEQ ID NO: 81227 - DNA, 75 bp, synthetic construct
  source 1..75: mol_type = other DNA
cagcttcctcctgagcgtaaagattggcgcaaccactggcttaagaaagccaagaagctggcggaagatttggga

SEQ ID NO: 81228 - DNA, 75 bp, synthetic construct
  source 1..75: mol_type = other DNA
tacgcctcagtttaatccgctccaacgtcgctgggcggaatcctgccttgaatttcaggtagcgcaggaaattgg

SEQ ID NO: 81229 - DNA, 75 bp, synthetic construct
  source 1..75: mol_type = other DNA
ctgtcctttcggctccccagcgccgctgccagatcttgctgacgctctttcagccggggttgaccgccaccacgg

SEQ ID NO: 81230 - DNA, 75 bp, synthetic construct
  source 1..75: mol_type = other DNA
acttaacgctgtgctggattatattgacgcggtgacggcaacagataccagcaccgcaccggatgtcatctggcc

SEQ ID NO: 81231 - DNA, 75 bp, synthetic construct
  source 1..75: mol_type = other DNA
atgacaaagtgactctgttcggtacggatggttccgaaactgattatgactacgacgaattgcttgttgttgaga

SEQ ID NO: 81232 - DNA, 75 bp, synthetic construct
  source 1..75: mol_type = other DNA
tataccacccgctctattaaataggctcaccaattcggatgttcgtaagcgtcaacggagcaccgtattgacgct

SEQ ID NO: 81233 - DNA, 75 bp, synthetic construct
  source 1..75: mol_type = other DNA
acagcggaaagagcgcttcgtgcagtctgtctcggaaagaaaaattacgtgttcttcggtagcgatcacggcggc

SEQ ID NO: 81234 - DNA, 75 bp, synthetic construct
  source 1..75: mol_type = other DNA
aaccactgctggatgtgttgatgatcctcgatgccttagaaaaagaaggcagttttgcggcggcgtcagccaaac

SEQ ID NO: 81235 - DNA, 75 bp, synthetic construct
  source 1..75: mol_type = other DNA
taaaaccatttccgaggtgaaagcctaccgtcagaatttcagccagcgtgagctgatggtcatctggccggattt

SEQ ID NO: 81236 - DNA, 75 bp, synthetic construct
  source 1..75: mol_type = other DNA
ccatgaactgaaggaagtgggcgatcagtggcgcacgccggataacattttctggggaattaacaccctgtttgg

SEQ ID NO: 81237 - DNA, 75 bp, synthetic construct
  source 1..75: mol_type = other DNA
ataacgaaagctggttatgttctccgttaagcgttatcggtactggcagagacgataaagaccagtatctcattc

SEQ ID NO: 81238 - DNA, 75 bp, synthetic construct
  source 1..75: mol_type = other DNA
cgcgtctggtcgaaaaccagcgataaaccggtgtggatggatcaggccgaaaaggcaaccggtgatttttactga

SEQ ID NO: 81239 - DNA, 75 bp, synthetic construct
  source 1..75: mol_type = other DNA
gcgatgacgtataccagaagcaaaacgtttaaaactgaagctggcgcgcatcgctggttagccagaaacactgac

SEQ ID NO: 81240 - DNA, 75 bp, synthetic construct
  source 1..75: mol_type = other DNA
tgacagttcccgccctctctcagcctcagcgttccccgacacactgcccggtaccgaatacggccccgacagggg

SEQ ID NO: 81241 - DNA, 75 bp, synthetic construct
  source 1..75: mol_type = other DNA
tggccctgtcgcgtatgaagcagcatgtgcaggtgtacaccgataaccgtcagggctggacggatgccatcaaca

SEQ ID NO: 81242 - DNA, 75 bp, synthetic construct
  source 1..75: mol_type = other DNA
aaaatatttcccggtgtgacgttgtgcgttgaatgtcaggcgtatcaggaaagacagagaaaacattatgcataa

SEQ ID NO: 81243 - DNA, 75 bp, synthetic construct
  source 1..75: mol_type = other DNA
ccctggggtgctgattttgactatgccaccagatttcaacagctggatatggaggctctgaaaaaagatatcaaa

SEQ ID NO: 81244 - DNA, 75 bp, synthetic construct
  source 1..75: mol_type = other DNA
cctgaagaaacatttatctggcaggatcctcttccttccgctgattatactatgattgaccataatgatattcaa

SEQ ID NO: 81245 - DNA, 75 bp, synthetic construct
  source 1..75: mol_type = other DNA
tgtcaccggtctggctggacagccggagccgttatctgcgggatatgtaccgcccgggaatggtgatggagcagt

SEQ ID NO: 81246 - DNA, 75 bp, synthetic construct
  source 1..75: mol_type = other DNA
gccacccgtatgatactggaaacgtccgaccgtttcacggtggtacagggttatgccggtgtgggtaagaccaca

SEQ ID NO: 81247 - DNA, 75 bp, synthetic construct
  source 1..75: mol_type = other DNA
atgctgccgctcgcgctggccggttgcagcaacagctcgttgccatccgtgagcagctcaggcagtataacgcca

SEQ ID NO: 81248 - DNA, 75 bp, synthetic construct
  source 1..75: mol_type = other DNA
ttcaccgcgatgacgtataccagaagcaaaacgtttaaaaccgaagctggcgcgcgtcgctggctggaaagaaat

SEQ ID NO: 81249 - DNA, 75 bp, synthetic construct
  source 1..75: mol_type = other DNA
tatgtgaggcaatcagcagtcgctggagtaatggtgttgtcgaaggtcatgtaaatcgcctgaagatgctgaaac

SEQ ID NO: 81250 - DNA, 75 bp, synthetic construct
  source 1..75: mol_type = other DNA
cgatggaaacacgcggtatcgaaacagaacgcggcgaacagaatcgtctgattaacaggcttaacctggaaatac

SEQ ID NO: 81251 - DNA, 75 bp, synthetic construct
  source 1..75: mol_type = other DNA
aaagaaatttcaggaaatacagagaaggactctcattacgatagacttcttgatgctttttttaaaaaacataat

SEQ ID NO: 81252 - DNA, 75 bp, synthetic construct
  source 1..75: mol_type = other DNA
tgaccggatgcgcttcacgaagagtgaccgggagcgcggctatgtggccaacagcgtctggacggtgacagcggt

SEQ ID NO: 81253 - DNA, 75 bp, synthetic construct
  source 1..75: mol_type = other DNA
atcagggttgcggttccctgcaactgaacggcgcagatcttctgacggataacagcctgctgactgcggtcatta

SEQ ID NO: 81254 - DNA, 75 bp, synthetic construct
  source 1..75: mol_type = other DNA
tgtcagatgttaatcacaccaagaaagatgttgttcagagcgcacttaatattatcattgacattacatcaggtg

SEQ ID NO: 81255 - DNA, 75 bp, synthetic construct
  source 1..75: mol_type = other DNA
tatcgatcttagcaacaacgaatccctggtgtgtggcgtgttccccaaccaggatggaacgttcaccgccatgac

SEQ ID NO: 81256 - DNA, 75 bp, synthetic construct
  source 1..75: mol_type = other DNA
tgaaaacgggggtgacagggctggcgctggctgtgatggtggcctgtgtgatgtttcgtgcggagagtggtattg

SEQ ID NO: 81257 - DNA, 75 bp, synthetic construct
  source 1..75: mol_type = other DNA
acagatgtttgccgacctgagtcttgagaacagggcgctgaaagacgttatcgaaaaaagctttaaaactagcct

SEQ ID NO: 81258 - DNA, 75 bp, synthetic construct
  source 1..75: mol_type = other DNA
cggggagaaacggataaaaggagagaaggacagccggatgctgtttaatgttggtatgaatgcgcagataaagga

SEQ ID NO: 81259 - DNA, 75 bp, synthetic construct
  source 1..75: mol_type = other DNA
tggacgcagattgataacggtcagcttgcgcctgacctggctgaaatcaggacgtccattacggatgtcagcaat

SEQ ID NO: 81260 - DNA, 75 bp, synthetic construct
  source 1..75: mol_type = other DNA
gattacattgacgcggtgacggcaatagataccagcaccgcgcctgatattatttggcctgtattccctgagact

SEQ ID NO: 81261 - DNA, 75 bp, synthetic construct
  source 1..75: mol_type = other DNA
tgtcctgcggtgggatctggacattctcgccgccagtacggacgacggttggtatttacttgaaggtgctgaccc

SEQ ID NO: 81262 - DNA, 75 bp, synthetic construct
  source 1..75: mol_type = other DNA
caactgcacgacatggtagtgcgtgtcgataccagcagccgccagccgattgattccacctgccgcttccagtac

SEQ ID NO: 81263 - DNA, 75 bp, synthetic construct
  source 1..75: mol_type = other DNA
ttcaaaatctacctgtgttggtcttgacgcgtatgatgctcggtcgagtaaatctgattggatctgttacaacgc

SEQ ID NO: 81264 - DNA, 75 bp, synthetic construct
  source 1..75: mol_type = other DNA
ggtcgcctgcatgcgcaaactcatcaccattctgaataccatgctcagaaaaggggaagagtggaacgcctcatt

SEQ ID NO: 81265 - DNA, 75 bp, synthetic construct
  source 1..75: mol_type = other DNA
cattacaactaaagcactacagggatggaatgttgctcgtgccgtagccgtaattaagccatgcgatgaaataag

SEQ ID NO: 81266 - DNA, 75 bp, synthetic construct
  source 1..75: mol_type = other DNA
gccgcgggtggtgaagggggtgcgcttcagtctgcgactgaccagcggaagcggagaagacagccgtctggtgac

SEQ ID NO: 81267 - DNA, 75 bp, synthetic construct
  source 1..75: mol_type = other DNA
cgattgaaggtccggtggatggattaaaaagcgtgctgctgaacagtacaccggtgctggacagtgaggggaata

SEQ ID NO: 81268 - DNA, 75 bp, synthetic construct
  source 1..75: mol_type = other DNA
aatagcggggcctattattggtggttttgcaggagagatttcaccgcatagtcccttttttatcgctgcgttgct

SEQ ID NO: 81269 - DNA, 75 bp, synthetic construct
  source 1..75: mol_type = other DNA
ccactggtcgagagccgctacctctacgacccgctgggacggcgaatggcgaaacgggtatggcggcgggagcgt

SEQ ID NO: 81270 - DNA, 75 bp, synthetic construct
  source 1..75: mol_type = other DNA
gctcaacgtcttctcgggcataaatcagattcaatggcggcgcggtatagggacagccgagggagagaatgggac

SEQ ID NO: 81271 - DNA, 75 bp, synthetic construct
  source 1..75: mol_type = other DNA
gtggaggcatccggtgccagcctggagaaggggcggcacgaccagctgcttaccgcgcttcgtgcgctgctgtta

SEQ ID NO: 81272 - DNA, 75 bp, synthetic construct
  source 1..75: mol_type = other DNA
ggtaaggctttcccccgtgactcccgtgcaccggagcgttggccatcaggaaccattaccgtcagggtttatgac

SEQ ID NO: 81273 - DNA, 75 bp, synthetic construct
  source 1..75: mol_type = other DNA
tggggcaggagaatgctgcgctggcagagcaggtgaaagccctgggcgcgaatcccgttacagtgaccggagagc

SEQ ID NO: 81274 - DNA, 75 bp, synthetic construct
  source 1..75: mol_type = other DNA
cccattggtgcggcggcgtttgacagtttgatccgcaccctgcgggatgccctcaatctaacggtattcttggtg

SEQ ID NO: 81275 - DNA, 75 bp, synthetic construct
  source 1..75: mol_type = other DNA
atctggcgctggcgaaatgggacacgccgagggtggtgaagggcgtgcgcttcagtctgcgcctgaccagtggaa

SEQ ID NO: 81276 - DNA, 75 bp, synthetic construct
  source 1..75: mol_type = other DNA
cattcgggcgtccagcctgccagagtattacaaagagcgtctgctcgccgccagccatcatttgatcagcagtga

SEQ ID NO: 81277 - DNA, 75 bp, synthetic construct
  source 1..75: mol_type = other DNA
atgagcaggaaattccgctatggtttatcagcggtcgttctggcgctgattgctgcgggcgcttctgcgcctgaa

SEQ ID NO: 81278 - DNA, 75 bp, synthetic construct
  source 1..75: mol_type = other DNA
caggggtgattgttgaggcgctggctcgccgtaaagcggcaggacttcccgcatttaccgtcatgtcatgtgaca

SEQ ID NO: 81279 - DNA, 75 bp, synthetic construct
  source 1..75: mol_type = other DNA
cgctggttgtctttttcgcgttttacaagatttatgacatctatgcggctactgcggcgctgatcgtcgccacgg

SEQ ID NO: 81280 - DNA, 75 bp, synthetic construct
  source 1..75: mol_type = other DNA
gcacaacacggtgccgcagtagaagcggcagaagcacagcgccagtcactgattgatgcagcaatggcttccatt

SEQ ID NO: 81281 - DNA, 75 bp, synthetic construct
  source 1..75: mol_type = other DNA
tccactaataaagaacagtcagatgctccggccgagatccgccgtctccagaaagagctgaaacgggttaccgac

SEQ ID NO: 81282 - DNA, 75 bp, synthetic construct
  source 1..75: mol_type = other DNA
ttgccgcattattatgcgctattgtcggggcgattggttcggtcagtattgatagtctggatttctggcctttgc

SEQ ID NO: 81283 - DNA, 75 bp, synthetic construct
  source 1..75: mol_type = other DNA
atgaacgcaaaaatcaaatacggcctgtcggctgccgttctggcgctgattgccgcaggtgcgcctgcgcctgaa

SEQ ID NO: 81284 - DNA, 75 bp, synthetic construct
  source 1..75: mol_type = other DNA
agctacgtcgctggacatatgctggcggtaagcaatggaaaggactgatgactcgtcgggagattgagcgtgaag

SEQ ID NO: 81285 - DNA, 75 bp, synthetic construct
  source 1..75: mol_type = other DNA
ctggcagcagcgcaccgctggcccccttcgttcccggcacgctggctgatggcgtggtgtatgtctccggtacgc

SEQ ID NO: 81286 - DNA, 75 bp, synthetic construct
  source 1..75: mol_type = other DNA
gaaggggttgagtatggcgtttataagcaacacagtattgtgcttcaagctgagaatttagatttagtttcctgg

SEQ ID NO: 81287 - DNA, 75 bp, synthetic construct
  source 1..75: mol_type = other DNA
aggcgctggcatgggtggagcgcaatattaaagtaccactgaccgaaccacaaaaagcgggtatcgcgtcatttt

SEQ ID NO: 81288 - DNA, 75 bp, synthetic construct
  source 1..75: mol_type = other DNA
gcctggtcatgctgacttgcgcagcagaaagtctggcagcgaagaaaattgcgacattggtgaccccggtggcat

SEQ ID NO: 81289 - DNA, 75 bp, synthetic construct
  source 1..75: mol_type = other DNA
cccggtaatgcgcccgttgcttttccgccgcagggggcaggtgcagtgccaccgcccaccgcgttctatccgggc

SEQ ID NO: 81290 - DNA, 75 bp, synthetic construct
  source 1..75: mol_type = other DNA
cagaaagcggggatcgcgtcattctgtccgtacaacattggccccggtaagtgcttcccgtcgacgttttataaa

SEQ ID NO: 81291 - DNA, 75 bp, synthetic construct
  source 1..75: mol_type = other DNA
gaaagctacatttcagcgttcaactggatgtctgagcaacttagccgtcgcctggccatgggtgaagaaatgcag

SEQ ID NO: 81292 - DNA, 75 bp, synthetic construct
  source 1..75: mol_type = other DNA
gattttgccgtggcgctctgtatggcaaaccgggcgtcatacatggagggcttcatcctggatgaatcagcctgt

SEQ ID NO: 81293 - DNA, 75 bp, synthetic construct
  source 1..75: mol_type = other DNA
ctttaatcagagatattgaacttcgtttctttctgttaatagccttaggggtgatcattgttacctctttccagg

SEQ ID NO: 81294 - DNA, 75 bp, synthetic construct
  source 1..75: mol_type = other DNA
atgcagacattcgaaaaactgaaagcgattaggaaagcagaaggcttaacacaggcgaaattcagcgaaattagc

SEQ ID NO: 81295 - DNA, 75 bp, synthetic construct
  source 1..75: mol_type = other DNA
agacaagcacagaaaccggcaaccagcataaataccagacccgggttgtatccagtgccaaccaggttaatctga

SEQ ID NO: 81296 - DNA, 75 bp, synthetic construct
  source 1..75: mol_type = other DNA
atggtggaagatataaattacacaatgattacagatgttcagattgccgagcgaaccagaaccagcgtcagaacg

SEQ ID NO: 81297 - DNA, 75 bp, synthetic construct
  source 1..75: mol_type = other DNA
tggattaaggacggtggcagagactgccgtatccgttcaaataattgctacggtcaggtctcacggcgtgaccag

SEQ ID NO: 81298 - DNA, 75 bp, synthetic construct
  source 1..75: mol_type = other DNA
ttgcaggtacgcaggcagcacaacagaccatggcggtgaacgccagtgaaaagctcacccacagcgggaaaagca

SEQ ID NO: 81299 - DNA, 75 bp, synthetic construct
  source 1..75: mol_type = other DNA
tacacatataggtgaaaacggaacagaaatcccccaattttctgttggggacatctttgatgtacatggagaaga

SEQ ID NO: 81300 - DNA, 75 bp, synthetic construct
  source 1..75: mol_type = other DNA
gccggcagtgcagcacctcacggtggaggtgagtgcctcagacggccagtatctggcgctggcgaaatgggacac

SEQ ID NO: 81301 - DNA, 75 bp, synthetic construct
  source 1..75: mol_type = other DNA
acagatttccaacctggtggctattttattatgtattaaggaaagcttatttctttcttggcatacctttttttc

SEQ ID NO: 81302 - DNA, 75 bp, synthetic construct
  source 1..75: mol_type = other DNA
caggaaaatcgagcaggttaaggctgattgctcgcgtgagtttagccaacgcaattttgcgtcggctgattatat

SEQ ID NO: 81303 - DNA, 75 bp, synthetic construct
  source 1..75: mol_type = other DNA
acgccggagggcaggctgacggcccgcaatgcggacatcagcggacatatcagtgcgaactcgggcacgctcaat

SEQ ID NO: 81304 - DNA, 75 bp, synthetic construct
  source 1..75: mol_type = other DNA
agttcaggatatcagcggcgttctcgctgtttttgttgaacgtcgtcaggaccgggcaggcccgtacgccattct

SEQ ID NO: 81305 - DNA, 75 bp, synthetic construct
  source 1..75: mol_type = other DNA
gcacgcaatggcagaaagaggatacgattattctgtcgattttcctcgcctgattcaggcaaaacgtaaagagtg

SEQ ID NO: 81306 - DNA, 75 bp, synthetic construct
  source 1..75: mol_type = other DNA
gtgaagtgacgttccggcacggatcactccgtctgaatggtgccatcagcgaaaatatcctgaacctgctgatac

SEQ ID NO: 81307 - DNA, 75 bp, synthetic construct
  source 1..75: mol_type = other DNA
ttggggactagcagtaatcccaactggattcctgctatactccggatataaaaatggaagaaagaaaagagcaat

SEQ ID NO: 81308 - DNA, 75 bp, synthetic construct
  source 1..75: mol_type = other DNA
attcccgcaacggtgtgggtgctatttaccgaaaatcgttttggatggaatagcatgatggttggcttttcatta

SEQ ID NO: 81309 - DNA, 75 bp, synthetic construct
  source 1..75: mol_type = other DNA
ctgttgaacgtagggttgcacagttagttagtgacaattcccgattaagcaaacttgttgaacatactggtcagg

SEQ ID NO: 81310 - DNA, 75 bp, synthetic construct
  source 1..75: mol_type = other DNA
ctggaggaaaccatcctctacagccgggatgccgcaggccgcctggcagaaatcatcacgccggaaggcaaaacg

SEQ ID NO: 81311 - DNA, 75 bp, synthetic construct
  source 1..75: mol_type = other DNA
agaggctcagttttggtttaaatatggagtaagccctaaagtaagagaatatatagaaagcaaaggtgggaaagt

SEQ ID NO: 81312 - DNA, 75 bp, synthetic construct
  source 1..75: mol_type = other DNA
acagaaatcatgagctggacaatatggatttgtttacgggtgtattgctaacctatacagacagcgatgcaagca

SEQ ID NO: 81313 - DNA, 75 bp, synthetic construct
  source 1..75: mol_type = other DNA
aaagagaagcgtgtcctggctgtcgagcatgaatacatcttgcaggtgacacagcctgaactgctgattaattga

SEQ ID NO: 81314 - DNA, 75 bp, synthetic construct
  source 1..75: mol_type = other DNA
ggtgaataatctactggatatggcgcgaattcagtccggcggctttaatttgaagaaagagtggttaacgctgga

SEQ ID NO: 81315 - DNA, 75 bp, synthetic construct
  source 1..75: mol_type = other DNA
acaacgtgggtgctggcaatttcagaacatcgacgcttcttcgcaaaataaaccagggcgatatcaaaggcgcat

SEQ ID NO: 81316 - DNA, 75 bp, synthetic construct
  source 1..75: mol_type = other DNA
cagaaagcggggatcgcgtcattctgtccgtacaacattggccccggtaagtgttttccgtcgacgttttataaa

SEQ ID NO: 81317 - DNA, 75 bp, synthetic construct
  source 1..75: mol_type = other DNA
ccggacgggcggctgacggcgaaaaatgccgatatcagcggtaacgtgaatgcgaactccgggacgctcaataat

SEQ ID NO: 81318 - DNA, 75 bp, synthetic construct
  source 1..75: mol_type = other DNA
atggtaagcctgttattcctggcatgaagctgtcgaaggaaaaatgcgaccgggttaacgctatcgaacgggata

SEQ ID NO: 81319 - DNA, 75 bp, synthetic construct
  source 1..75: mol_type = other DNA
atacacgtgataatacagataccgaagtaggggttgagacgcaatcgaattcggtatacatcactttatttaaaa

SEQ ID NO: 81320 - DNA, 75 bp, synthetic construct
  source 1..75: mol_type = other DNA
atgtgtcgtcgcggcttcgaaatggactttgctgaactgttgctggaagactacaaagcctccctgaaatatctc

SEQ ID NO: 81321 - DNA, 75 bp, synthetic construct
  source 1..75: mol_type = other DNA
atctgtcggggagcaacgatggtggacggtaaacctgttattccgggaatgaaactgtcgaaggaaaaatgcgcc

SEQ ID NO: 81322 - DNA, 75 bp, synthetic construct
  source 1..75: mol_type = other DNA
ggtgcaggatattagcggcgtgctcgcggtcttcgccgagcgccgtcaggatcgcaatggtccctatgtcattct

SEQ ID NO: 81323 - DNA, 75 bp, synthetic construct
  source 1..75: mol_type = other DNA
atttggtcggcgcccagtgctgttgttgtcattaataggcgcatcgctggattacttattgctggctttttcaag

SEQ ID NO: 81324 - DNA, 75 bp, synthetic construct
  source 1..75: mol_type = other DNA
actaaggcaacggtgacaacggataatgttgccgccctgcgtcagggcacatccggtgcgaaaattcagaccagt

SEQ ID NO: 81325 - DNA, 75 bp, synthetic construct
  source 1..75: mol_type = other DNA
atggcacaggttaatatgagtttaagaattgacgctgaactgaaggatgcttttatggccgctgcaaaaagcatg

SEQ ID NO: 81326 - DNA, 75 bp, synthetic construct
  source 1..75: mol_type = other DNA
gttatgcaatctgccgttctgcagattttaactcatgggaatatgtgccagaccatcgcggtgaaacggtctata

SEQ ID NO: 81327 - DNA, 75 bp, synthetic construct
  source 1..75: mol_type = other DNA
gcgcgggaatggcgggaaattccccgcacggagcctgacccggaaaccaccccggataacagttaccgcaattat

SEQ ID NO: 81328 - DNA, 75 bp, synthetic construct
  source 1..75: mol_type = other DNA
agaccagagtgcggcaatccagcagatacagaaagttcaggttgatacaaataataacctgaacagcatgtgggc

SEQ ID NO: 81329 - DNA, 75 bp, synthetic construct
  source 1..75: mol_type = other DNA
tccctgggctgactgagtcaatttattgccagcaggatggtgtctggcgctgcattgcacattaccgggtttctc

SEQ ID NO: 81330 - DNA, 75 bp, synthetic construct
  source 1..75: mol_type = other DNA
atgtgctgcgtataccggatgaaccgtcccgtcgctggtttgaccgggatattctgcgggaggttgttctggagg

SEQ ID NO: 81331 - DNA, 75 bp, synthetic construct
  source 1..75: mol_type = other DNA
atgaaggtaattctggccacaaggaaccgctacctggaatatggactgcaacagttgctgaaggaacacagtgtg

SEQ ID NO: 81332 - DNA, 75 bp, synthetic construct
  source 1..75: mol_type = other DNA
ggttcggtatggactttatcgaaaccgtcagtgcgctgatgaatgcaacacctggacgagatctctgctggctcc

SEQ ID NO: 81333 - DNA, 75 bp, synthetic construct
  source 1..75: mol_type = other DNA
agcttattgccacgaaggcggggaatattaccgtctatagctatgatggtgaaactcgggaatatatttccactt

SEQ ID NO: 81334 - DNA, 75 bp, synthetic construct
  source 1..75: mol_type = other DNA
gaagacggtattccgtgggaaatgccgtaccgctgcccggacattgtctggaacccgtaccgccgtaaattcagt

SEQ ID NO: 81335 - DNA, 75 bp, synthetic construct
  source 1..75: mol_type = other DNA
cggtccgtggatctactggcgtcagattcagtctgcaacacgccccctgagcacaactattgacctgaacacgct

SEQ ID NO: 81336 - DNA, 75 bp, synthetic construct
  source 1..75: mol_type = other DNA
atatcactcaggacccgatagggctggagggggggatggagtctgtatgcgtacccgctgaatccggtgaatggt

SEQ ID NO: 81337 - DNA, 75 bp, synthetic construct
  source 1..75: mol_type = other DNA
tggcagaagcacaacgccagtcactgattgatgcagcaatggcttccattagtctgattcagctgaaattgcagg

SEQ ID NO: 81338 - DNA, 75 bp, synthetic construct
  source 1..75: mol_type = other DNA
ggggcggtgatggagggctcaccaccgctgaacgtcagcgtctgaaagagctggagcgtgaaaatcgtgaactgc

SEQ ID NO: 81339 - DNA, 75 bp, synthetic construct
  source 1..75: mol_type = other DNA
gactatatcgacgtggtagcagcaatagatatcagcacagcccctgatattaactggcccaaactaccagaaatt

SEQ ID NO: 81340 - DNA, 75 bp, synthetic construct
  source 1..75: mol_type = other DNA
attcggtatcaaattctgagccggtcaattgaattaaataaactacctgaactgaagcttcctgatgagccttat

SEQ ID NO: 81341 - DNA, 75 bp, synthetic construct
  source 1..75: mol_type = other DNA
tgttttgagaaatattttgacagaaaaatacagtaatttttctattgtacaatttccagagctcaatcatcagga

SEQ ID NO: 81342 - DNA, 75 bp, synthetic construct
  source 1..75: mol_type = other DNA
agtctcgattggctttgcgccaggaaccgctgcgtcatccatcaccatgcccttattacaggcggttcgcgctga

SEQ ID NO: 81343 - DNA, 75 bp, synthetic construct
  source 1..75: mol_type = other DNA
attcacattatcactgattattctgggcacagcgttcaggttcagccaggactcgctacctcatgccctgctcaa

SEQ ID NO: 81344 - DNA, 75 bp, synthetic construct
  source 1..75: mol_type = other DNA
tccggtccgctgtacatgaaacgcctgaaaggcggcgtgctggcaaacggcctgaactcgtttgtttcggcggta

SEQ ID NO: 81345 - DNA, 75 bp, synthetic construct
  source 1..75: mol_type = other DNA
cggtgccagcaacgaaaccgggatgctgacccagaaatttgcccgctccctcgggatgctggcggtagacaacca

SEQ ID NO: 81346 - DNA, 75 bp, synthetic construct
  source 1..75: mol_type = other DNA
tacgtggagttgagcgacggcactttatcgtggttagggaacgccttgttctggatgctgctaccagaacctccc

SEQ ID NO: 81347 - DNA, 75 bp, synthetic construct
  source 1..75: mol_type = other DNA
cttatcgtcgttgtcgtaggtcgttccgttagcctgcatcgccagcaaattaaagagtggctggcgcgtcgggcc

SEQ ID NO: 81348 - DNA, 75 bp, synthetic construct
  source 1..75: mol_type = other DNA
aaagaagcactggcagaagtattaaaacgtccgggtgcagcgcttcaactggttggcaaagtaaatgatatttat

SEQ ID NO: 81349 - DNA, 75 bp, synthetic construct
  source 1..75: mol_type = other DNA
atggagccatgaagaagaccatcgcaatgagactgtttactcaacagaaaatggcgcagctgttacagtggatta

SEQ ID NO: 81350 - DNA, 75 bp, synthetic construct
  source 1..75: mol_type = other DNA
ataccacgtggtgctgtgcgtcagacaggagtatttcgatggccctgaactggaccggctgattctggatgcctg

SEQ ID NO: 81351 - DNA, 75 bp, synthetic construct
  source 1..75: mol_type = other DNA
cggacgtgtcctgtccatcgatgccgccagccgcaccctgacactggaccgtgaggtgaccctgccggagacagg

SEQ ID NO: 81352 - DNA, 75 bp, synthetic construct
  source 1..75: mol_type = other DNA
atggataacgctgtattaaatagcgagtttattgctacaaaggcgggaaatattaccgtctataactatgatggc

SEQ ID NO: 81353 - DNA, 75 bp, synthetic construct
  source 1..75: mol_type = other DNA
cattccgcctgaagagtgggatgaaggtattcctgctttactcctgaattataatttcaccggtaacagaggtaa

SEQ ID NO: 81354 - DNA, 75 bp, synthetic construct
  source 1..75: mol_type = other DNA
aggcacaccggcacagcgcaaggtgtggcaggacaaaatagaccagcagggagcagagcttaaggccagagggct

SEQ ID NO: 81355 - DNA, 75 bp, synthetic construct
  source 1..75: mol_type = other DNA
gcgaaaaaggttaacaccaaactaaaagatcttgtgatggataagcaggattccaggattgtttatcgcgatcag

SEQ ID NO: 81356 - DNA, 75 bp, synthetic construct
  source 1..75: mol_type = other DNA
atacctgggtaaacaaaaccagtcacgagattaaacatgtttttctcaacgccagcgttcgtaaggactatacaa

SEQ ID NO: 81357 - DNA, 75 bp, synthetic construct
  source 1..75: mol_type = other DNA
ttattcaggcaggtcagtgacagagccgggaattttcagcgggatcatcgatatgccagccggtcatggtcatat

SEQ ID NO: 81358 - DNA, 75 bp, synthetic construct
  source 1..75: mol_type = other DNA
ctgtatgccatcgggcagtactgcgaccagacggtcccggatggtttcggaggcacagagccgcggatgaccttt

SEQ ID NO: 81359 - DNA, 75 bp, synthetic construct
  source 1..75: mol_type = other DNA
cgggttaacgccattgagcgtgataaggcgctggcatgggtggcgaaaaacatcaaagtgccactgactgaaccc

SEQ ID NO: 81360 - DNA, 75 bp, synthetic construct
  source 1..75: mol_type = other DNA
ccgcgttacgcgacgatttgctttactgccagttcaatggtcgtaacatggaagaactgcgtcgccagtaccgcc

SEQ ID NO: 81361 - DNA, 75 bp, synthetic construct
  source 1..75: mol_type = other DNA
ttttcattgctgataaatggctaaaatcaacgcgtgaacattttcctacgatgaaatactgggacgaagaccctg

SEQ ID NO: 81362 - DNA, 75 bp, synthetic construct
  source 1..75: mol_type = other DNA
gacccgggcgaaaacattctgggaagagtgacggtatttacaggtaagggatggagccatgaggaagaccatcgc

SEQ ID NO: 81363 - DNA, 75 bp, synthetic construct
  source 1..75: mol_type = other DNA
accttattgcaacaaaggcaggggatgttaccgtttataactacgatggtgaaacacgggaatatatttccacgt

SEQ ID NO: 81364 - DNA, 75 bp, synthetic construct
  source 1..75: mol_type = other DNA
tatacaatatcctccaattttgaacgaggctgatttaacaggagctattataattcctggaatggttttaagtgg

SEQ ID NO: 81365 - DNA, 75 bp, synthetic construct
  source 1..75: mol_type = other DNA
gctgacggccagtaacattactcttaccggggaaagtacgagtgggaatgccatcaaccttacagacactacagg

SEQ ID NO: 81366 - DNA, 75 bp, synthetic construct
  source 1..75: mol_type = other DNA
cgcggcgccacgctggtagatggtaaaccagttcgccagggcatgaagctgacgcaggccaaatgtgaccaggtg

SEQ ID NO: 81367 - DNA, 75 bp, synthetic construct
  source 1..75: mol_type = other DNA
tcctctgttgaaagagaggcctgttctgacaccaacaactctgctggagatgctacaggataaatatcccggcca

SEQ ID NO: 81368 - DNA, 75 bp, synthetic construct
  source 1..75: mol_type = other DNA
gcaaaacatccagtatttgactgcccttaatattaatatacataaaatgttgctatcaaatataacaatagaaaa

SEQ ID NO: 81369 - DNA, 75 bp, synthetic construct
  source 1..75: mol_type = other DNA
caattggtcaacgcaacagttatgtgaaaacatggggttgcggaggttttttgaatgagacgaacatttacagca

SEQ ID NO: 81370 - DNA, 75 bp, synthetic construct
  source 1..75: mol_type = other DNA
atgagtatggttgccagaactaaccccggccccgcagaggacgacatcaccgacaccgatgatggcgatacccgt

SEQ ID NO: 81371 - DNA, 75 bp, synthetic construct
  source 1..75: mol_type = other DNA
gctgggatttacgcttctggtcggagattcgctgtgtgagttcaccgtaaaggaacgtaatattgagtttaaggc

SEQ ID NO: 81372 - DNA, 75 bp, synthetic construct
  source 1..75: mol_type = other DNA
ttgccatcacggcggtgcagcacgtaccggaaaaagaagccattgtggataacggagcccgctttgagccgcagt

SEQ ID NO: 81373 - DNA, 75 bp, synthetic construct
  source 1..75: mol_type = other DNA
atgtaccccaaactggcaaaagcctaccccgcgaataaattaccggatttacggggtgagtttattcgcggctgg

SEQ ID NO: 81374 - DNA, 75 bp, synthetic construct
  source 1..75: mol_type = other DNA
cgaagcagaatgcaaagccctcctgaataaagaccttgccactgtcgccagacaaattaacccgtacatcaaagt

SEQ ID NO: 81375 - DNA, 75 bp, synthetic construct
  source 1..75: mol_type = other DNA
aaccatgataaagtaagggccgctgaagaacttatcaaaaaaatatctcttgacgaattagcggcgttccggccc

SEQ ID NO: 81376 - DNA, 75 bp, synthetic construct
  source 1..75: mol_type = other DNA
ggaattgtccgcattgcggaaaaataacctggcagtacagcccatatgattttgaaggctgtagtgattacaact

SEQ ID NO: 81377 - DNA, 75 bp, synthetic construct
  source 1..75: mol_type = other DNA
cggcattccggcatattcctgtttagatgccccaggcgcatacaaagctggttatgcaatctgccgttctgcaga

SEQ ID NO: 81378 - DNA, 75 bp, synthetic construct
  source 1..75: mol_type = other DNA
gaccgcggacgtggacaaatgggcgctgtatgccatcgggcagtactgtgaccagcgtgtcccggacggcttcgg

SEQ ID NO: 81379 - DNA, 75 bp, synthetic construct
  source 1..75: mol_type = other DNA
tgaaacaggaattttccggcgttcctgatgatgcggctgatgcgctttcgtcaatgccagaacttattagagcgg

SEQ ID NO: 81380 - DNA, 75 bp, synthetic construct
  source 1..75: mol_type = other DNA
ttgcaaactataccttaaattttggagaggacaaagttctcttagatgcttttgattgcattgtttttccttcat

SEQ ID NO: 81381 - DNA, 75 bp, synthetic construct
  source 1..75: mol_type = other DNA
ctgaagcccgtcaacgggcagtacgtatggttctggaaagtcagggcgaatatgactcacaatgggcgacaattt

SEQ ID NO: 81382 - DNA, 75 bp, synthetic construct
  source 1..75: mol_type = other DNA
atggataacgctgtattaaatggcgagcttattgccacgaaggcggggaatattactgtctataactatgatggt

SEQ ID NO: 81383 - DNA, 75 bp, synthetic construct
  source 1..75: mol_type = other DNA
accacctcacgtctgctgcattcggccaccgaagctgtggcacatgtaacggcagagcttgacgcctggaaacag

SEQ ID NO: 81384 - DNA, 75 bp, synthetic construct
  source 1..75: mol_type = other DNA
aaccgaacgcctggcaacatcgtgcggtagcctatcaggcgtatcaggttgaggactacgccaccgcactggcgg

SEQ ID NO: 81385 - DNA, 75 bp, synthetic construct
  source 1..75: mol_type = other DNA
aactcattgccataaaagcgggagacataaccgtttataattatgatggtgaaacgcgggaatatatttccacat

SEQ ID NO: 81386 - DNA, 75 bp, synthetic construct
  source 1..75: mol_type = other DNA
caacgcaaatatacagcaatggctcgagcctatatgtgatgacttttttgatactataatgtcttggtttaataa

SEQ ID NO: 81387 - DNA, 75 bp, synthetic construct
  source 1..75: mol_type = other DNA
atgcataccacccgactgaagagggttggcggctcagttatgctgaccgtcccaccggcactgctgaatgcgctg

SEQ ID NO: 81388 - DNA, 75 bp, synthetic construct
  source 1..75: mol_type = other DNA
gaaatgatctccctgccaggtaaccgttacgctatcgcactgaacctcgagcgcgactctgtaggtgcggttgtt

SEQ ID NO: 81389 - DNA, 75 bp, synthetic construct
  source 1..75: mol_type = other DNA
caatcagggggcaggcaatatcaccgactgtacggtgattgtgaccaaaaaagccgcttccggcatcagtattcg

SEQ ID NO: 81390 - DNA, 75 bp, synthetic construct
  source 1..75: mol_type = other DNA
accgtctggcaaagtgttatcgggacacgctacccggtgtggcgttgtatgcatggcttcaggccgaacaacgac

SEQ ID NO: 81391 - DNA, 75 bp, synthetic construct
  source 1..75: mol_type = other DNA
atgattgggacgtttggcaatgtgtgctgggcgctggcggggcatctgtttcagcgattgtttcgccagtatggt

SEQ ID NO: 81392 - DNA, 75 bp, synthetic construct
  source 1..75: mol_type = other DNA
caatgcctgcagttccacgctggtgaatttactcaatcagcggcgctgggcagatgcgtgccgacagttgccgcg

SEQ ID NO: 81393 - DNA, 75 bp, synthetic construct
  source 1..75: mol_type = other DNA
taaggttatgagtgaaaacacggtaaacagcgcattgcgtgctatgggttatgacacaaaaacggaggtttgcgg

SEQ ID NO: 81394 - DNA, 75 bp, synthetic construct
  source 1..75: mol_type = other DNA
ccatcgatcgcgcgttcttcgataccttgagctttatatcttccctcatattggttcgtccgatattcgtctact

SEQ ID NO: 81395 - DNA, 75 bp, synthetic construct
  source 1..75: mol_type = other DNA
cagacgtccctctgacaaaaaagaggatcgcctcgcttttggtgtttggcctactgtgacgcttgctcaggcaag

SEQ ID NO: 81396 - DNA, 75 bp, synthetic construct
  source 1..75: mol_type = other DNA
gttcccgttatgcagattaacagtggtaaacgctacgagggcaaaccgctgggttctcagggggcaagtacctca

SEQ ID NO: 81397 - DNA, 75 bp, synthetic construct
  source 1..75: mol_type = other DNA
ggctacagcgccacgggcaggctggagagcgtgcgtaccctcgcaccggacctggacatccgcatcccgtatgcc

SEQ ID NO: 81398 - DNA, 75 bp, synthetic construct
  source 1..75: mol_type = other DNA
ccggatactgagagaggaattttccgctgttattgcgccgcttcatcaggaaatgcgtatccttgacgatatgac

SEQ ID NO: 81399 - DNA, 75 bp, synthetic construct
  source 1..75: mol_type = other DNA
ggcttaaaagagttatttttagacagcctaaaaagaaatattattgataatcatgagcttggtgttttatccctt

SEQ ID NO: 81400 - DNA, 75 bp, synthetic construct
  source 1..75: mol_type = other DNA
acccgccggtttacagcaaagtgaacccggcagatccaccgatcatgacgctcgccgtcacctcaaccgccatgc

SEQ ID NO: 81401 - DNA, 75 bp, synthetic construct
  source 1..75: mol_type = other DNA
tgccccggcagggacaaaactgacatttatcacaccgcaggcggggatcaaccagacggccacggtgaccggaac

SEQ ID NO: 81402 - DNA, 75 bp, synthetic construct
  source 1..75: mol_type = other DNA
tgccccctcccgtattatccgtgcggtggcaggtgttaccggtctggatgattttgaagtgcgtttcccgacaga

SEQ ID NO: 81403 - DNA, 75 bp, synthetic construct
  source 1..75: mol_type = other DNA
attaaaaaggttgatgccagtggcaagcatgacgttgcacagcgtcttcagcagcgtgtcacggctattatgcgt

SEQ ID NO: 81404 - DNA, 75 bp, synthetic construct
  source 1..75: mol_type = other DNA
tttttaagttccttcccaaatacaaagctcacaaaatcgttagtgcatcgaaaatcaaagatatcgagattatct

SEQ ID NO: 81405 - DNA, 75 bp, synthetic construct
  source 1..75: mol_type = other DNA
tccctgagttgcttacaaaaatagatagctatactggtaggccgctaacccgatgggcgacagaacttactttgc

SEQ ID NO: 81406 - DNA, 75 bp, synthetic construct
  source 1..75: mol_type = other DNA
aattacgcacgtaccggagggcaggtgactgcagggaatgtgcaatcgattattggcgtgacttttgtttatcaa

SEQ ID NO: 81407 - DNA, 75 bp, synthetic construct
  source 1..75: mol_type = other DNA
atgacgcgtattgcagtcgagttatctctacttaccttcgttcgctctagtgagatgcgatttgcccgatgggat

SEQ ID NO: 81408 - DNA, 75 bp, synthetic construct
  source 1..75: mol_type = other DNA
atgagtgactatcatcacggcgtgcaggtgctggagattaacgagggcacccgcgtcatttccactgtatccacg

SEQ ID NO: 81409 - DNA, 75 bp, synthetic construct
  source 1..75: mol_type = other DNA
ggtgctggccgacacgatggccgaggcgcacatgtgggcggtcgataagcccatcaccgcatcacttatccgtga

SEQ ID NO: 81410 - DNA, 75 bp, synthetic construct
  source 1..75: mol_type = other DNA
gtggagaacgggcgcatagtgcgtaattaccacctgccggatggtgcaattgccggaagcgttgaagcattgctg

SEQ ID NO: 81411 - DNA, 75 bp, synthetic construct
  source 1..75: mol_type = other DNA
agatccagcgggggcggacaaaattcttctgtattcactaccggcgtccccggttaaaagcgccgaatgatgaga

SEQ ID NO: 81412 - DNA, 75 bp, synthetic construct
  source 1..75: mol_type = other DNA
ggcaccgatatcgctggcgcggctgcgtgcacgcctcaatctgaagtctcctgtattttcccagaaccagacggt

SEQ ID NO: 81413 - DNA, 75 bp, synthetic construct
  source 1..75: mol_type = other DNA
gggttatcagcagcgatttgtcaggcaacttgcagaattaagcaggagttcggagaccccggccctgccaggttc

SEQ ID NO: 81414 - DNA, 75 bp, synthetic construct
  source 1..75: mol_type = other DNA
agaccagagtgcagcgatccagcagatacagaaagttcaggttgatacaaataataacctgaacagcatgtgggc

SEQ ID NO: 81415 - DNA, 75 bp, synthetic construct
  source 1..75: mol_type = other DNA
acaactgagtaaacgggagaggtattccgaaaaatggcaacgacgaacgcattctgtctggcgtcaccgccactg

SEQ ID NO: 81416 - DNA, 75 bp, synthetic construct
  source 1..75: mol_type = other DNA
ccagcgatgcggatgcggaaaccttccccctcaataaacctgtgctgattaccaatgtgcagagcgcaattgcaa

SEQ ID NO: 81417 - DNA, 75 bp, synthetic construct
  source 1..75: mol_type = other DNA
attttgcaaataaaacccaaaactttgaagctgttgtacagtatcagttcgacttcggtttacgtccgtctttag

SEQ ID NO: 81418 - DNA, 75 bp, synthetic construct
  source 1..75: mol_type = other DNA
tatggcgaacagtatcaacatgatgtgcccgtaaacgcagaagatgcagatgctgcggcagaggctgaactggct

SEQ ID NO: 81419 - DNA, 75 bp, synthetic construct
  source 1..75: mol_type = other DNA
cactgcgtgcccgctgtccgtattttgaaaaccgggtggcaggcgcggcacagttcaaaaatctgccggaggtcg

SEQ ID NO: 81420 - DNA, 75 bp, synthetic construct
  source 1..75: mol_type = other DNA
ttggtggtgattgctggctggatgagtcggtgaacgacaaagacacgctgaaagccggaaaactcaccatcgact

SEQ ID NO: 81421 - DNA, 75 bp, synthetic construct
  source 1..75: mol_type = other DNA
gaccaggcaaaacccgtgaccattgttgtgcgtgtgccgcagggtgaaacggaagacgaaaccacgaccaatatc

SEQ ID NO: 81422 - DNA, 75 bp, synthetic construct
  source 1..75: mol_type = other DNA
tcttcatatggtgctaataactggacgccaacgaccagtatcagcgaccttcttgttgtcgtgatgaagaaatca

SEQ ID NO: 81423 - DNA, 75 bp, synthetic construct
  source 1..75: mol_type = other DNA
ggaagaagaaaccacaaccaatatcattggcgcagtgaccgccgagggtaaaaaaacaggtatgaaagccctgtt

SEQ ID NO: 81424 - DNA, 75 bp, synthetic construct
  source 1..75: mol_type = other DNA
atgagcaccgtgactattaccgatttagcgcgtgaaaacgtccgcaacctgacgccgtatcagtcagcgcgtcgt

SEQ ID NO: 81425 - DNA, 75 bp, synthetic construct
  source 1..75: mol_type = other DNA
atgggctgtggtgaggggcgtacgcgtcgggaagttgaaagtcgctgggcattttttgtcgtggcggagttgctg

SEQ ID NO: 81426 - DNA, 75 bp, synthetic construct
  source 1..75: mol_type = other DNA
tgtcgccagagcgcaactgaacgatgcgacgtttgctgcatcgccggaaggaaaaacgctgcgaaccgatctgct

SEQ ID NO: 81427 - DNA, 75 bp, synthetic construct
  source 1..75: mol_type = other DNA
ctgaaatgccggattttcatcgcgaggatgactggtggcgcaacggtcagaacctttacctggacaatatggcgg

SEQ ID NO: 81428 - DNA, 75 bp, synthetic construct
  source 1..75: mol_type = other DNA
gtggctggtctgccggggtgacattcacaaattccgctgtgtgccacatctgacgggacggcgctttgagcacgg

SEQ ID NO: 81429 - DNA, 75 bp, synthetic construct
  source 1..75: mol_type = other DNA
tctggatgacatgcctgcgacgcagcactacgcccggctggtgattgatgacattgataatcaggcgctgataac

SEQ ID NO: 81430 - DNA, 75 bp, synthetic construct
  source 1..75: mol_type = other DNA
aatgtcaccattaacgagaactgtgtcatcagagggaaactgtctgcaaaccagattgaaggcgacctggtgaag

SEQ ID NO: 81431 - DNA, 75 bp, synthetic construct
  source 1..75: mol_type = other DNA
ggtagctggacaaccaccgtacccgccgccgatctcagcgcgttacgcgacggcgacgccacggtacaggccagc

SEQ ID NO: 81432 - DNA, 75 bp, synthetic construct
  source 1..75: mol_type = other DNA
agaataaattgcttcccatgaatgggtatatgaaaggcggcagcgactccggatctaaagcccaggcacgcgcaa

SEQ ID NO: 81433 - DNA, 75 bp, synthetic construct
  source 1..75: mol_type = other DNA
gtattatcgtgcctggcatgtccgatatttatccggctgaagatctgtggctggcgaataacagtatgggcagcc

SEQ ID NO: 81434 - DNA, 75 bp, synthetic construct
  source 1..75: mol_type = other DNA
cgcctatgaagctccgtcggttaaacgctcatggtatcagtgccagaatctggaatgttcctgcacatttaccgc

SEQ ID NO: 81435 - DNA, 75 bp, synthetic construct
  source 1..75: mol_type = other DNA
tggcaagaaaacgagccacacataaagaactcagagtgttcattcctgctgcgttaaaagcgcaattgcaggaga

SEQ ID NO: 81436 - DNA, 75 bp, synthetic construct
  source 1..75: mol_type = other DNA
tcaacaacatcaaagtaaattacacccgtaattccgagcgttttgttgagggtaaacactttttcaaggttgttg

SEQ ID NO: 81437 - DNA, 75 bp, synthetic construct
  source 1..75: mol_type = other DNA
aataccgtcgccagcgacaatatcgtcaacgccagcgaagccgatgcgggcgtgacggtgagcggcagcaccacc

SEQ ID NO: 81438 - DNA, 75 bp, synthetic construct
  source 1..75: mol_type = other DNA
tgaaagaagctactgggagtgataaaactgtgagagtggtacaactgataatctatggattttggggtgtttttc

SEQ ID NO: 81439 - DNA, 75 bp, synthetic construct
  source 1..75: mol_type = other DNA
gctgtgcagagcggcctaatcgattataaccccgcgcaagaaattgccggtgcggttgctacggcgaaaagacag

SEQ ID NO: 81440 - DNA, 75 bp, synthetic construct
  source 1..75: mol_type = other DNA
cactgggggccagcatgatactgggcggtgtggcccagatgctggccccgaaggcaaagacgccggagtacaaaa

SEQ ID NO: 81441 - DNA, 75 bp, synthetic construct
  source 1..75: mol_type = other DNA
gagccggaatggggcatctcgcaaacgccgcaggtctggatagatcatctggcgttcgagcatcacggcgaggtc

SEQ ID NO: 81442 - DNA, 75 bp, synthetic construct
  source 1..75: mol_type = other DNA
atgaacactctcgcaaatattcaggaactcgcgcgcgcactgcgcaacatgattcgcaccggcattatcgtcgaa

SEQ ID NO: 81443 - DNA, 75 bp, synthetic construct
  source 1..75: mol_type = other DNA
ttatgccagaatattggcattactgcatattcctcatgatctttcatcctatcgacaggtaatggcagggcaatt

SEQ ID NO: 81444 - DNA, 75 bp, synthetic construct
  source 1..75: mol_type = other DNA
taattcttgaagagcgaatggtgatggcggaaaggttattaagctacaatttatattctgttggaaaagttgctg

SEQ ID NO: 81445 - DNA, 75 bp, synthetic construct
  source 1..75: mol_type = other DNA
aacaaaataacagaggcaatcacttccctgggggcgcgtgtcaccagtgagctgacggccttcaggaacgttaac

SEQ ID NO: 81446 - DNA, 75 bp, synthetic construct
  source 1..75: mol_type = other DNA
atcatggctacgatcccaaccctcactcaacctgaaattgccatcgttgatggtcaggctgttacttcatccctg

SEQ ID NO: 81447 - DNA, 75 bp, synthetic construct
  source 1..75: mol_type = other DNA
gtggttacttcttctctgtctgttgcctgttatttccgcaaacaacacaaaaatgtcattcaaaaaattgcgtct

SEQ ID NO: 81448 - DNA, 75 bp, synthetic construct
  source 1..75: mol_type = other DNA
cgtttcttgctatgggtttcacgggtaaacgtgctgcccggttcaaagaggcatacatcaatgcctttaaccaga

SEQ ID NO: 81449 - DNA, 75 bp, synthetic construct
  source 1..75: mol_type = other DNA
ggcggagatgaagaccaccatcaccgaaacccgcaatgaaatcacacagacggtcagtaaaacgctggaagacca

SEQ ID NO: 81450 - DNA, 75 bp, synthetic construct
  source 1..75: mol_type = other DNA
agcggagtcgtgcggcttcgtggtgagaacgccggagggggaaagatattttccctgcgtgaatatctccggtga

SEQ ID NO: 81451 - DNA, 75 bp, synthetic construct
  source 1..75: mol_type = other DNA
cgttataacctcggaatatctgattcctctggttttgtcgggcgttcacttggcgctccaaaagctttctatgca

SEQ ID NO: 81452 - DNA, 75 bp, synthetic construct
  source 1..75: mol_type = other DNA
ggtggtgccgcagattgatgattactacgaacctttcaccttcgactacgaacatttgcatagcgcaccggaagg

SEQ ID NO: 81453 - DNA, 75 bp, synthetic construct
  source 1..75: mol_type = other DNA
tcatcgcaaccgtaccgctggtactggtgaaagcctcaaccagtatcaccctcgacaccccggaggtgatttgca

SEQ ID NO: 81454 - DNA, 75 bp, synthetic construct
  source 1..75: mol_type = other DNA
ggggccagatgtgccaggtcagaatccctggctactgcaatcacaatcccgaaacgtctgtgctggcgcattacc

SEQ ID NO: 81455 - DNA, 75 bp, synthetic construct
  source 1..75: mol_type = other DNA
tccacatttaaaatttcgctgccgacgccaatcatgtccggcgtgcgtaccccgactcgtcagttcagctcctgc

SEQ ID NO: 81456 - DNA, 75 bp, synthetic construct
  source 1..75: mol_type = other DNA
gacgatgctcacacatacggaaaatggtttcggttctattgctaatattttgctgattatcggggccggaggcgc

SEQ ID NO: 81457 - DNA, 75 bp, synthetic construct
  source 1..75: mol_type = other DNA
atttcatctcacttcctgatgattttcccgttcgcaatattgcacctcaggtaaaagaagttttgaaggatttta

SEQ ID NO: 81458 - DNA, 75 bp, synthetic construct
  source 1..75: mol_type = other DNA
tatcacgagtggttttttgttcggactgctcatggcctctttccactggtggcgcaggaaagttaaccggctgcc

SEQ ID NO: 81459 - DNA, 75 bp, synthetic construct
  source 1..75: mol_type = other DNA
ggaattatttgatttgcgcctgcacgagcgagatgacgttttacaggccgtattcgacaaaggcacatcaaaatt

SEQ ID NO: 81460 - DNA, 75 bp, synthetic construct
  source 1..75: mol_type = other DNA
gaatatccgcaatccgcagccatcgacctgcgttgcgtaaatatggttgccgatctgtggcatgcgcctgcgccg

SEQ ID NO: 81461 - DNA, 75 bp, synthetic construct
  source 1..75: mol_type = other DNA
atggaaaacaatcgcaatttccctgccagacaatttcattcgctcacgttctttgccggtctttgtattggtatt

SEQ ID NO: 81462 - DNA, 75 bp, synthetic construct
  source 1..75: mol_type = other DNA
ttatagtgttttcattattgggctttttttcataaacctgatgatttttatttttctattgctttactatgtttc

SEQ ID NO: 81463 - DNA, 75 bp, synthetic construct
  source 1..75: mol_type = other DNA
gcaggcgcgtttacaggctaacccggcgatggcaagcgcggtggataccgtgacgggcctcggcgcttcgtttgg

SEQ ID NO: 81464 - DNA, 75 bp, synthetic construct
  source 1..75: mol_type = other DNA
caataagacaatcggaagggctaactcaagcaaaattcagtgaaatcagcggcatagcgttaggaacgctaaaga

SEQ ID NO: 81465 - DNA, 75 bp, synthetic construct
  source 1..75: mol_type = other DNA
gaaccctttcgccgtggcgcagaaaacgcatgtggtaaacggaacgttaggctacgaagcacagttggtaaacgc

SEQ ID NO: 81466 - DNA, 75 bp, synthetic construct
  source 1..75: mol_type = other DNA
atgggtagccgtctcgctgtaggcgtcatcgttggcttactcacctggatcagctatcaaatcatggtcaatctg

SEQ ID NO: 81467 - DNA, 75 bp, synthetic construct
  source 1..75: mol_type = other DNA
gtgattgcgatggcggccggatatgcgctggcgtggtttatgggcatgttgccagaaagcaacgaaccgatgacg

SEQ ID NO: 81468 - DNA, 75 bp, synthetic construct
  source 1..75: mol_type = other DNA
ggatcgcgaatctgtgctgtttggcgattcaacattggcacttcgtcagtggatgcgcgagaaaggcattcagtt

SEQ ID NO: 81469 - DNA, 75 bp, synthetic construct
  source 1..75: mol_type = other DNA
gcactctgtaaaagagctgctctccatcggtatccagcctgacatcctgatttgtcgttcagatcgcgccgttcc

SEQ ID NO: 81470 - DNA, 75 bp, synthetic construct
  source 1..75: mol_type = other DNA
aacagcacgacaacaggcagcgggcggaccgtggtggagtcacagcactaccgggatttactgcgtgctgacaat

SEQ ID NO: 81471 - DNA, 75 bp, synthetic construct
  source 1..75: mol_type = other DNA
ggcgtaaaggccgccctaattatcctcccggatttaagcagcagctcgttgtggcttcctgtgagcccggcgtgt

SEQ ID NO: 81472 - DNA, 75 bp, synthetic construct
  source 1..75: mol_type = other DNA
aatggctgaaaaacctgctctcctccgggatcgccgcgggcggtattactgccatcgtgctgaatctgattttcc

SEQ ID NO: 81473 - DNA, 75 bp, synthetic construct
  source 1..75: mol_type = other DNA
cgcaatgcggacatgtggggaaatatctacccccgttccggttttgtcagccagaccgatgatgacaaagcggca

SEQ ID NO: 81474 - DNA, 75 bp, synthetic construct
  source 1..75: mol_type = other DNA
accccggggctgagggatttctgaatcgtctgggggtacagacacgggatgccagcggtaacatgcgtgacatgg

SEQ ID NO: 81475 - DNA, 75 bp, synthetic construct
  source 1..75: mol_type = other DNA
tttaagtaaaacgctttatggcgcgctggagcataactttactgatgcctggagcggctttgtgcgcggctatgg

SEQ ID NO: 81476 - DNA, 75 bp, synthetic construct
  source 1..75: mol_type = other DNA
caattgaattaaataaactacctgaactgaagcttcctgatgagccttattttcagaatgtatctgaagaggaag

SEQ ID NO: 81477 - DNA, 75 bp, synthetic construct
  source 1..75: mol_type = other DNA
agaacagttttccacatggcaaaatcagaagtatcaaaaagaactgaatctggataagaaaagagcagagcgatt

SEQ ID NO: 81478 - DNA, 75 bp, synthetic construct
  source 1..75: mol_type = other DNA
cagtgggcgtagcaaagaaattaaacctattgaaaactcaatagttaaagaaattatcgtaaaagaaggagagtc

SEQ ID NO: 81479 - DNA, 75 bp, synthetic construct
  source 1..75: mol_type = other DNA
aatattatgcgcagcacctgagtatctgcaaaaatatccgcagccacaatccttacaggaattaagtcgtcatga

SEQ ID NO: 81480 - DNA, 75 bp, synthetic construct
  source 1..75: mol_type = other DNA
aaaaattgaggatgagctagagcttgatggaaccggaaaaaaattccggttaaacaataaccagacaagaacggc

SEQ ID NO: 81481 - DNA, 75 bp, synthetic construct
  source 1..75: mol_type = other DNA
atgaagaaaggcgatgcggctgaacatgcagagttccacatgaaagacaaccgctgggtgcctggctggatgtgt

SEQ ID NO: 81482 - DNA, 75 bp, synthetic construct
  source 1..75: mol_type = other DNA
aagacttacaggtactggtggaaatcgtccatagcgggagttttagtgctgcagcggcgacgcttgggcaaacgc

SEQ ID NO: 81483 - DNA, 75 bp, synthetic construct
  source 1..75: mol_type = other DNA
atggatttatccattaacaaaaactggatcgacaaagaagaatatccgcaatctgcagccatcgacctgcgttgc

SEQ ID NO: 81484 - DNA, 75 bp, synthetic construct
  source 1..75: mol_type = other DNA
atggaaaacaatcgcaatttccctgccagacaatttcattcgctcacgttctttgccggtctttgtattggcatc

SEQ ID NO: 81485 - DNA, 75 bp, synthetic construct
  source 1..75: mol_type = other DNA
ggcgagatgggccgcaaagatctgatcaaaatcgaaaatacctttttgagtgaagatcaggtagatcaactggca

SEQ ID NO: 81486 - DNA, 75 bp, synthetic construct
  source 1..75: mol_type = other DNA
gcaatttgccgattataaatccgcgaccaacaacgccatctgcaacaccaatccttataacgaatgccgcgatgt

SEQ ID NO: 81487 - DNA, 75 bp, synthetic construct
  source 1..75: mol_type = other DNA
agcgcgatactttcccacagcttgccaagatcgatggcgtgaccaattttagcaatgtcacatcgtgcggcacat

SEQ ID NO: 81488 - DNA, 75 bp, synthetic construct
  source 1..75: mol_type = other DNA
ccgttagccacgctaattacgccatcttacgccagggatttcataaccagattatcggtgccaacatcaccaatt

SEQ ID NO: 81489 - DNA, 75 bp, synthetic construct
  source 1..75: mol_type = other DNA
atgctgtatagactgggatggcctaagggagagatcaccagaaaaattgaggctatgctgaattcatcgacagtg

SEQ ID NO: 81490 - DNA, 75 bp, synthetic construct
  source 1..75: mol_type = other DNA
ttcggactgctcatggcctctttccactggtggcgcaggaaagttaaccggctgccaccatgggatgatgtgtaa

SEQ ID NO: 81491 - DNA, 75 bp, synthetic construct
  source 1..75: mol_type = other DNA
atgagaaagggcagagctcggtggatattgaccgggtagatcagcatgtggtgaatacggaacggctcaattttg

SEQ ID NO: 81492 - DNA, 75 bp, synthetic construct
  source 1..75: mol_type = other DNA
acgccgtctgagtgatgcggtcaatgctgtgatgaatgacgagccgcaatatcgcgtctacggcattacccgaat

SEQ ID NO: 81493 - DNA, 75 bp, synthetic construct
  source 1..75: mol_type = other DNA
cgtatggctgcaagacggtgcaggaggcgatcacttaccgtaaaaacttcagtcagcgtgaagggatgctgattt

SEQ ID NO: 81494 - DNA, 75 bp, synthetic construct
  source 1..75: mol_type = other DNA
aaaaaactggcatgaaagccctgttatctgcacaggcacagctcggcgttaaaccgcgcattcttggcgtgccag

SEQ ID NO: 81495 - DNA, 75 bp, synthetic construct
  source 1..75: mol_type = other DNA
aatcgaccaggagcagggctggcataaaacgctgtccaatgtcggggtgaacggtgttaccggcatcagcgcctc

SEQ ID NO: 81496 - DNA, 75 bp, synthetic construct
  source 1..75: mol_type = other DNA
cgcgaaaacttcagcgcccgtgagctcatgattatctggcctgacttcctcgggtgggataccacggccaacgcg

SEQ ID NO: 81497 - DNA, 75 bp, synthetic construct
  source 1..75: mol_type = other DNA
caccacgctgataagcctggttgacgggcagggtaatccggtcagcgtggaggtccagtccgtcaccgacggcgt

SEQ ID NO: 81498 - DNA, 75 bp, synthetic construct
  source 1..75: mol_type = other DNA
atgagcgactatcatcatggcgtgcaggtgctggagattaacgacggcacccgcgtcatttccactgtatccacc

SEQ ID NO: 81499 - DNA, 75 bp, synthetic construct
  source 1..75: mol_type = other DNA
atgtctgaaaccgcaaaaaaagtaatcgtcggcatgtccggcggtgtcgattcctccgtttctgcctggctgttg

SEQ ID NO: 81500 - DNA, 75 bp, synthetic construct
  source 1..75: mol_type = other DNA
gttattacaactgggtacagcatgaaccctcagacagaaaacaaagtgatgagcggctaaaactggagattaagg

SEQ ID NO: 81501 - DNA, 75 bp, synthetic construct
  source 1..75: mol_type = other DNA
gcaggacccggcaaccgatgcaggtctgctgaaccagaacgacgtcaccacgcttgtgcgcaaggacggtttccg

SEQ ID NO: 81502 - DNA, 75 bp, synthetic construct
  source 1..75: mol_type = other DNA
cccggtacgtcgaatatcaatgcgagaacgacttttaatgtgagtagcccggcgacttcatttactccctctcgt

SEQ ID NO: 81503 - DNA, 75 bp, synthetic construct
  source 1..75: mol_type = other DNA
attacgacaaagacctgagtggctactcactcggtcagggcggttactacagcccgcaggaatacctgtcgtttg

SEQ ID NO: 81504 - DNA, 75 bp, synthetic construct
  source 1..75: mol_type = other DNA
ctactgtgacgctagctcaggcaagagtaaagcgcgatgaggctaaaaagctgctagtgcagggcattgacccaa

SEQ ID NO: 81505 - DNA, 75 bp, synthetic construct
  source 1..75: mol_type = other DNA
cacaaaaactttcagatgatgacgaactgctggcaaaagccaccgacgtttacagcgttcgtcgggaagaattaa

SEQ ID NO: 81506 - DNA, 75 bp, synthetic construct
  source 1..75: mol_type = other DNA
cgggatgcttatcatctggcggggactgaaatgccggattttcatcgcgaggatgactggtggcgcaacggtcag

SEQ ID NO: 81507 - DNA, 75 bp, synthetic construct
  source 1..75: mol_type = other DNA
cagcgtgagctcatgatacgcatagatagcacttttgatttcttctacagcatgcacggaattaaacagaaatga

SEQ ID NO: 81508 - DNA, 75 bp, synthetic construct
  source 1..75: mol_type = other DNA
cagttacccgctggcgcgacgcaagagcggacgcaaaaagtgttggatcaagtgacggattactatctgaagaac

SEQ ID NO: 81509 - DNA, 75 bp, synthetic construct
  source 1..75: mol_type = other DNA
aaccgcgtaaaattctcgacagcgaagccatcgagttgttgctcaaagaggggcatgtggtgatttgcagtggcg

SEQ ID NO: 81510 - DNA, 75 bp, synthetic construct
  source 1..75: mol_type = other DNA
tcagtggagaaaaaacagtactggcagccggagaccgtcatactgtaaaggcacaggccggggaacagtatggac

SEQ ID NO: 81511 - DNA, 75 bp, synthetic construct
  source 1..75: mol_type = other DNA
gtgcagggctggcggctattgcactggctgccggaggcggtggtggaagcagtcgtcataagcgtgcacctgaag

SEQ ID NO: 81512 - DNA, 75 bp, synthetic construct
  source 1..75: mol_type = other DNA
attggcatcgtgcggatgtgattgcgggacttaagaaaagaaagctctctttatcagctctttcccggcagtttg

SEQ ID NO: 81513 - DNA, 75 bp, synthetic construct
  source 1..75: mol_type = other DNA
cgcccgtcattgtggtgaaaaaacgtcgcgttatttcacctcctgtcgtcgataaaacagagactgtcattccgc

SEQ ID NO: 81514 - DNA, 75 bp, synthetic construct
  source 1..75: mol_type = other DNA
cgatggcgatataccgccggcatcctgaatcccgtctgtttcgcttatgtaccgggaaatatccgtggtccggca

SEQ ID NO: 81515 - DNA, 75 bp, synthetic construct
  source 1..75: mol_type = other DNA
cactcaccgcgctggtattaagctcaatgctgggcgcgggtgttttcagtctgccgcaaaatatggcggcagttg

SEQ ID NO: 81516 - DNA, 75 bp, synthetic construct
  source 1..75: mol_type = other DNA
acccgcatggtagcggatgcatcagtgacacagaacacctccgccactctgtaaacaatattctgaccaccccgc

SEQ ID NO: 81517 - DNA, 75 bp, synthetic construct
  source 1..75: mol_type = other DNA
gatgatccgctctttgccttcgaaaactacacccgaaccgcgcaggtactgatggacacgatggcagaagcgcac

SEQ ID NO: 81518 - DNA, 75 bp, synthetic construct
  source 1..75: mol_type = other DNA
tgctggcttatggcggatatgatgcggcagaaaaagcgcagaacagcgccacgattagcatcattattgcgctat

SEQ ID NO: 81519 - DNA, 75 bp, synthetic construct
  source 1..75: mol_type = other DNA
gtgtcgtcggccggtgcgaacaactggacgccgacaacgtacatcagtgatttactggttgtggtcatgaaaaaa

SEQ ID NO: 81520 - DNA, 75 bp, synthetic construct
  source 1..75: mol_type = other DNA
ttgattctgtatctgtgttcctgaacggttcatataaccgctacgcaaatactgataaagcggattattcagcgt

SEQ ID NO: 81521 - DNA, 75 bp, synthetic construct
  source 1..75: mol_type = other DNA
tcaacggcaattttgatggctctatggtggttgaacttaccggacacggcaataacggcgcaccggtttcccttt

SEQ ID NO: 81522 - DNA, 75 bp, synthetic construct
  source 1..75: mol_type = other DNA
taacaatcgacgattgctggaaaggctgggccatactcctccggcagaagcagaaaaagcttattatgcttccat

SEQ ID NO: 81523 - DNA, 75 bp, synthetic construct
  source 1..75: mol_type = other DNA
tcgtatgcgctgcgtggaagcgtggtcgatggtggtgccgtggattggttttccgctgcacaaattgctggcgct

SEQ ID NO: 81524 - DNA, 75 bp, synthetic construct
  source 1..75: mol_type = other DNA
ctcagactcaggtactacaggcagaaaaaggctgggttttcaaagcagatggtcactctttccgccgggtcgtac

SEQ ID NO: 81525 - DNA, 75 bp, synthetic construct
  source 1..75: mol_type = other DNA
aggctgacggagaagacggaccgcatcccggcgggtgtgatacggacggacgacgagcggacccaccactaccac

SEQ ID NO: 81526 - DNA, 75 bp, synthetic construct
  source 1..75: mol_type = other DNA
gaatatgatgaatggggcaacctgctgagtgatgagaacccgcatcatctgcagcagctcattcgcctgccgggt

SEQ ID NO: 81527 - DNA, 75 bp, synthetic construct
  source 1..75: mol_type = other DNA
actgctaatggtgaggcggtaaaacgcgaagtggagcgtcgtgtgaaggagcgcatgattctgtcacgtaaccgc

SEQ ID NO: 81528 - DNA, 75 bp, synthetic construct
  source 1..75: mol_type = other DNA
ttttgtgtactcgaaggaggtaaccgtgaacggcggcagcataatcatgcatctttgtccaaaatgttttggaca

SEQ ID NO: 81529 - DNA, 75 bp, synthetic construct
  source 1..75: mol_type = other DNA
gttgaagcgttaggcgatcacccggttattagaaagatgagcagtaccttcatttttcagcctattgaaccacta

SEQ ID NO: 81530 - DNA, 75 bp, synthetic construct
  source 1..75: mol_type = other DNA
taaaaacgccattccggcggcttcagcaatgaccattaaccgcgtggccacaacggcgattaatcagtcttcatc

SEQ ID NO: 81531 - DNA, 75 bp, synthetic construct
  source 1..75: mol_type = other DNA
tcgatgcttactggtaaggctgggccacatccctccgtcagaggcagaaaaagcgtattatgcttccatcggaaa

SEQ ID NO: 81532 - DNA, 75 bp, synthetic construct
  source 1..75: mol_type = other DNA
tggttgcttattttattatggggtttctggttattgctttcattttatctgttttaggccaggtggaaattgttg

SEQ ID NO: 81533 - DNA, 75 bp, synthetic construct
  source 1..75: mol_type = other DNA
tgctgcgtcctgccgctgtgatgttgtcgctgtcagtgatgtccctgacggcgcaggcagatgaactgatgaagt

SEQ ID NO: 81534 - DNA, 75 bp, synthetic construct
  source 1..75: mol_type = other DNA
catcattaaattatatcaatgaacttagtaatccatatgtacaaggaagatttgtttgccaagacgtttttgtat

SEQ ID NO: 81535 - DNA, 75 bp, synthetic construct
  source 1..75: mol_type = other DNA
gaagaaaggttacttatgcaataaagagtatgtgtctttgccggagtcatcgcctgcagaagcgctgattattac

SEQ ID NO: 81536 - DNA, 75 bp, synthetic construct
  source 1..75: mol_type = other DNA
acctgacgccggttcctatgcaggtcgccagccagcaggggtacatagaaagtgtcaccacggatacgacggcca

SEQ ID NO: 81537 - DNA, 75 bp, synthetic construct
  source 1..75: mol_type = other DNA
tcttctctgattgatactttaagtattaacagcggttcccaagttaatgttgcagactctcgtctgatctctgac

SEQ ID NO: 81538 - DNA, 75 bp, synthetic construct
  source 1..75: mol_type = other DNA
gggctgggactgattacctaccagacggaatatgacccgcttattggctgctatattccgaccgacatcacgttc

SEQ ID NO: 81539 - DNA, 75 bp, synthetic construct
  source 1..75: mol_type = other DNA
atggcagggaagtttcgctgcattttgctgttgatagttgggctttttttctcttcgttaagttatgcgaaaaac

SEQ ID NO: 81540 - DNA, 75 bp, synthetic construct
  source 1..75: mol_type = other DNA
tggtcgtcagttagaaaccgcagccagccattatgaaactcaactgcgcccgcccttcttccgcgcactggtcga

SEQ ID NO: 81541 - DNA, 75 bp, synthetic construct
  source 1..75: mol_type = other DNA
taacgcgattgcagtaggccgcaacagtgctgcagctggcgtagacagcctcgcattcggtagactatccgccgc

SEQ ID NO: 81542 - DNA, 75 bp, synthetic construct
  source 1..75: mol_type = other DNA
acggcggcgagcgtggtgcactgctgtacgggctgatcggcacctgccgtctgaacggtatcgatccggaagcgt

SEQ ID NO: 81543 - DNA, 75 bp, synthetic construct
  source 1..75: mol_type = other DNA
tggtgaaaatcccgatggcggccccactgaaacaggcgtttgatgagaatgttgaccgtatccggtgtgaacgcc

SEQ ID NO: 81544 - DNA, 75 bp, synthetic construct
  source 1..75: mol_type = other DNA
gagattggatatcttgattacacggagatccagcgggggcggacaaaattcttctgtattcactaccggcgtccc

SEQ ID NO: 81545 - DNA, 75 bp, synthetic construct
  source 1..75: mol_type = other DNA
ggcgcctatatcactggcgcgtctgcgggcccgcctgaatctgaaatccccggtgttctcacagaaccagacggt

SEQ ID NO: 81546 - DNA, 75 bp, synthetic construct
  source 1..75: mol_type = other DNA
gatatggataatgacttcaagacctgggtaggggtgattcattcctttgcccgccataaggttatcggcgataaa

SEQ ID NO: 81547 - DNA, 75 bp, synthetic construct
  source 1..75: mol_type = other DNA
ggcccgcatgcagcaccgtggcgcgattctcgccgatggtaaaaccggtgacggttgcggcttgctgttacaaaa

SEQ ID NO: 81548 - DNA, 75 bp, synthetic construct
  source 1..75: mol_type = other DNA
ataaagtcgcttacctttatcctcgttgtgcctacgcttacagttcaaagacctgctataccaacctcccctcgg

SEQ ID NO: 81549 - DNA, 75 bp, synthetic construct
  source 1..75: mol_type = other DNA
tcgtccgaacagcatacttaaagccggtcagcatcggtatcagcgggcattcattcagcgattaaaaaacggtcg

SEQ ID NO: 81550 - DNA, 75 bp, synthetic construct
  source 1..75: mol_type = other DNA
tcgtttacgcaacgccgcccgcgaaggagatgctaatccgctcacgggcaaacgtatttacagcgcagggttgcc

SEQ ID NO: 81551 - DNA, 75 bp, synthetic construct
  source 1..75: mol_type = other DNA
atgtcggacttgattgcctacaagtcgaatgctttggttgaggccagctacaagttgaccctacaggaacaacgt

SEQ ID NO: 81552 - DNA, 75 bp, synthetic construct
  source 1..75: mol_type = other DNA
aggtaaaccccgacgcccacgaagagtatcagcgtcggcataatcccatctggccagaactggaagcagtgctga

SEQ ID NO: 81553 - DNA, 75 bp, synthetic construct
  source 1..75: mol_type = other DNA
aacttattgccgtacaggcaggaaacatcatcgtttacaactatgacagtgagacaaaggaatatatttccgcat

SEQ ID NO: 81554 - DNA, 75 bp, synthetic construct
  source 1..75: mol_type = other DNA
gcggaatattttgattcattccctgacatggggcggaaaaatgccgaggttcagttacaggaagcgatcgatcgt

SEQ ID NO: 81555 - DNA, 75 bp, synthetic construct
  source 1..75: mol_type = other DNA
attgctgggaaggctgaggcatactcctccggcagaagcagaaaaagcgtattatgcttctatcggaaatgatga

SEQ ID NO: 81556 - DNA, 75 bp, synthetic construct
  source 1..75: mol_type = other DNA
atgactatgaaagttggttttattggcctggggattatgggtaaaccaatgagtaaaaaccttctgaaagcaggt

SEQ ID NO: 81557 - DNA, 75 bp, synthetic construct
  source 1..75: mol_type = other DNA
ttgttaagcgtcaggcgctcgatttcatcatggccggttttaacggtaccacccgcgccgccacctctgaccgca

SEQ ID NO: 81558 - DNA, 75 bp, synthetic construct
  source 1..75: mol_type = other DNA
ctggtggaccattataaagccgtaaatcaaaaacgtgcagcaagctatatccgcaaaatccgtgaaatgctggtt

SEQ ID NO: 81559 - DNA, 75 bp, synthetic construct
  source 1..75: mol_type = other DNA
atccgcctgccgggtcagcagtatgatgaggagtccggcctgtattacaaccgccaccgctattatgacccgctg

SEQ ID NO: 81560 - DNA, 75 bp, synthetic construct
  source 1..75: mol_type = other DNA
ctgttttagttggactatttactgcttttcagtctgcaaatgcaggtggaatacctgatgctttaacagggatgc

SEQ ID NO: 81561 - DNA, 75 bp, synthetic construct
  source 1..75: mol_type = other DNA
tttctgaccaaaattaatatcgtgccggtcgacgagctgaaaggcgaaaaagtcggggttggcgtcaacggtacg

SEQ ID NO: 81562 - DNA, 75 bp, synthetic construct
  source 1..75: mol_type = other DNA
gcaatatccctttgcgaccgaagtgatggatgttgccgatgctgcgcaggtggcgcaggtatgtcagcgactgtt

SEQ ID NO: 81563 - DNA, 75 bp, synthetic construct
  source 1..75: mol_type = other DNA
cgggacgcaggttcgcgggtttacttatgatgcggagcacgccgggcggatggtggcgcaccattatgcggggag

SEQ ID NO: 81564 - DNA, 75 bp, synthetic construct
  source 1..75: mol_type = other DNA
gttgatgcagcccttggtttcacagatgcgtttacccatctgagaaccggggctccatgtcgcgaccggatcggt

SEQ ID NO: 81565 - DNA, 75 bp, synthetic construct
  source 1..75: mol_type = other DNA
tctaatgattctttagaaacatgtaagatgaagtgctccggaaataacattggacgttttattagatttgtattc

SEQ ID NO: 81566 - DNA, 75 bp, synthetic construct
  source 1..75: mol_type = other DNA
acaaagcgcttaaaggatatctggggaaacccagagaaaagcagatcaccattgctgatggaaaggggctttcta

SEQ ID NO: 81567 - DNA, 75 bp, synthetic construct
  source 1..75: mol_type = other DNA
cgtaagcaagattggggggaaaatcggtaaacgtttgggccatgaaaaacaatggtcactacacgaccttagaag

SEQ ID NO: 81568 - DNA, 75 bp, synthetic construct
  source 1..75: mol_type = other DNA
tatctttgttaactctgagcatatattcccattatggtttaggtgcagaattaaacctggattttattcaaggga

SEQ ID NO: 81569 - DNA, 75 bp, synthetic construct
  source 1..75: mol_type = other DNA
ctcccgttttgattttgccgcgcatgtggcgtatgcacgttcgcgtggcctgcgccggcgtatgccgccggtgct

SEQ ID NO: 81570 - DNA, 75 bp, synthetic construct
  source 1..75: mol_type = other DNA
tcagtatgtgtcactggcctatatggagcgattaaaagaagcaaaactgctggcatcaacagggagtacaggcga

SEQ ID NO: 81571 - DNA, 75 bp, synthetic construct
  source 1..75: mol_type = other DNA
tgcgtggacaattagagtcagtttagatttcgttattttacttgtagcatctcggggcatatataaatcatggta

SEQ ID NO: 81572 - DNA, 75 bp, synthetic construct
  source 1..75: mol_type = other DNA
tggaaattctgagtatccggaaaacccgcaatgagcaggccggtatcgactggaacgcagtcttcagcgacagaa

SEQ ID NO: 81573 - DNA, 75 bp, synthetic construct
  source 1..75: mol_type = other DNA
tcctcccgtctcggtatatcctggcgctatgacggctcgcatatcatcttctattatctcgagacacagaccttc

SEQ ID NO: 81574 - DNA, 75 bp, synthetic construct
  source 1..75: mol_type = other DNA
tgcgtgaggaaagggaacggctgggtcttagccaagtcgctatgagtgatattggtggggttaaaaagttaaccc

SEQ ID NO: 81575 - DNA, 75 bp, synthetic construct
  source 1..75: mol_type = other DNA
ggatgatcttaaccgggcgatcaatgatgcggagtcagtgctggggacaacaagccgccgccgtcgtccgctggg

SEQ ID NO: 81576 - DNA, 75 bp, synthetic construct
  source 1..75: mol_type = other DNA
acaggttgcccgggaaaccagggtgagacggaaactggtaaaggaacggtccagactgaaacgggcgacggtcag

SEQ ID NO: 81577 - DNA, 75 bp, synthetic construct
  source 1..75: mol_type = other DNA
ccgctatccagggtaatggcttcaaaactctggctgaaggtcagaacgttgagttcgaaattcaggacggtcaga

SEQ ID NO: 81578 - DNA, 75 bp, synthetic construct
  source 1..75: mol_type = other DNA
atgaaaatcacaaggtatacggtgtgcgtaaagtttggcgtcagttgttacgggaaggtatcagagtggccagat

SEQ ID NO: 81579 - DNA, 75 bp, synthetic construct
  source 1..75: mol_type = other DNA
gcaacctgctgaatgaagagaacccgcatcagctgcagcagcttatccgcctgccggggcagcagtatgatgagg

SEQ ID NO: 81580 - DNA, 75 bp, synthetic construct
  source 1..75: mol_type = other DNA
gctgatccggttcccccccctggatatggagacaccgtaaataaagcgatggcaatcttatcattcatctgttct

SEQ ID NO: 81581 - DNA, 75 bp, synthetic construct
  source 1..75: mol_type = other DNA
acctggctgattgaaaaagctggaatcgtggttcacagatgccaacgcaacccatttaccggaaaccgcattttt

SEQ ID NO: 81582 - DNA, 75 bp, synthetic construct
  source 1..75: mol_type = other DNA
ggtgataagatctggcaaagcagtgagtattttatgaatgtcttctgtaataatgcattacctgccccatcacct

SEQ ID NO: 81583 - DNA, 75 bp, synthetic construct
  source 1..75: mol_type = other DNA
ctgggggcactgggcctggtcactaacgcagtggtactgtggaacacactttatatgcaggaagccctgagctgg

SEQ ID NO: 81584 - DNA, 75 bp, synthetic construct
  source 1..75: mol_type = other DNA
tccgatctcaaatatagatccattaggattagaaacactaaaatgcattaagccactgcattcaatgggcggaac

SEQ ID NO: 81585 - DNA, 75 bp, synthetic construct
  source 1..75: mol_type = other DNA
tggatatcgaagagttgccgcacgtcgtcaactatgagttaccaaacgtaccggaagattatgttcaccgtatcg

SEQ ID NO: 81586 - DNA, 75 bp, synthetic construct
  source 1..75: mol_type = other DNA
ggcgttcagtttggcagtgcggctgaaatggccattttgcaggaaattatcaatgcccggtatgagggtattttg

SEQ ID NO: 81587 - DNA, 75 bp, synthetic construct
  source 1..75: mol_type = other DNA
cttacgactacacactgtattgcaggaagtgggtaaaaccaaatctgacttgtacgccacaggatgattcccagt

SEQ ID NO: 81588 - DNA, 75 bp, synthetic construct
  source 1..75: mol_type = other DNA
gaatacatcacccatctggtacagtcagcctactacgatactgagcgggatattgtgcagttacaggccgatccc

SEQ ID NO: 81589 - DNA, 75 bp, synthetic construct
  source 1..75: mol_type = other DNA
ccataaaggcattgctagttatgtgtttttttatgtgtatagctttaattattctcgggatcttttcttaccttc

SEQ ID NO: 81590 - DNA, 75 bp, synthetic construct
  source 1..75: mol_type = other DNA
atggcgcacaataccaaacatcacaattctgatatcgcccctgccagcaggcaagggcggtgttctcacacattc

SEQ ID NO: 81591 - DNA, 75 bp, synthetic construct
  source 1..75: mol_type = other DNA
gttgataatccagaatcatcgacagaatctgttggtatcggtgcaggtgttgacgcttcagttatgactctggct

SEQ ID NO: 81592 - DNA, 75 bp, synthetic construct
  source 1..75: mol_type = other DNA
aaatgccatctaggtactgccaggcagacgaagagtggattcagcagcagttacaggggctgcctccgtcactga

SEQ ID NO: 81593 - DNA, 75 bp, synthetic construct
  source 1..75: mol_type = other DNA
tcagtggacacaaaacagaaaatcaggtgttgatttacgatcgtaaaaccaaaatcaccccaacactggatttgc

SEQ ID NO: 81594 - DNA, 75 bp, synthetic construct
  source 1..75: mol_type = other DNA
ccttgtcagccattttcgctggctggcgtatcgaaaaagaactcgctcgggcgggcgcacggttttgcctgcgat

SEQ ID NO: 81595 - DNA, 75 bp, synthetic construct
  source 1..75: mol_type = other DNA
ctccattcggttcatggattttgttcgcgataatccacatcaacaggtcttcgaggatgatttctttagcattcg

SEQ ID NO: 81596 - DNA, 75 bp, synthetic construct
  source 1..75: mol_type = other DNA
gcgcctgcaccgcacccgtgcgcccacatcggcgcaactgacggaactggccggcaccatcgcgcatcgcgtgtg

SEQ ID NO: 81597 - DNA, 75 bp, synthetic construct
  source 1..75: mol_type = other DNA
ggataaatgcggctatcacatattctgagaccaagtctttacctacatcgggagtcagcaattcagtaggtgtaa

SEQ ID NO: 81598 - DNA, 75 bp, synthetic construct
  source 1..75: mol_type = other DNA
taatggtcgtccggactgggataaagtgggcgcacagttcgttgcagacgttgtgccgttcgaaatgatgaagct

SEQ ID NO: 81599 - DNA, 75 bp, synthetic construct
  source 1..75: mol_type = other DNA
gtttatccggtggcgagcgccgaaggttgcgagctaattttgtctgacggcagacgcctggttgacggtatgtcg

SEQ ID NO: 81600 - DNA, 75 bp, synthetic construct
  source 1..75: mol_type = other DNA
ctactgtgttcctgctgcactgtatgaaaggatacttgatgctctggatgaccaggagctggtgaaactggttac

SEQ ID NO: 81601 - DNA, 75 bp, synthetic construct
  source 1..75: mol_type = other DNA
atgcctaacatcattctgtctgacaccagtgcaagtgtcagtgaactgaaaaaaaatccgatggctacagtcagt

SEQ ID NO: 81602 - DNA, 75 bp, synthetic construct
  source 1..75: mol_type = other DNA
atgaaaaacaaacacactttaacccgtattacaaagacagcctttgacgaacttaaccgaatcaaaaacattaca

SEQ ID NO: 81603 - DNA, 75 bp, synthetic construct
  source 1..75: mol_type = other DNA
tttatgcaaacaaagatgggatattcatctttcaaatctttatcccggtctacatgcgccacctctggaacgggc

SEQ ID NO: 81604 - DNA, 75 bp, synthetic construct
  source 1..75: mol_type = other DNA
atgccagcgcctctgtatggtgcggacgacgcgcgccgctgttccggcaattccgtattggaggtgctggataaa

SEQ ID NO: 81605 - DNA, 75 bp, synthetic construct
  source 1..75: mol_type = other DNA
ccgccctatattattctcccgcaacagttgcagcgtctgaccgcagcggttaaccgtgcggtgcaggatgaaaca

SEQ ID NO: 81606 - DNA, 75 bp, synthetic construct
  source 1..75: mol_type = other DNA
gggctttttagtccgcactgtaaagagaactggctgcgtaccctgtgtgaagtcgatttcacgccaccggtaaag

SEQ ID NO: 81607 - DNA, 75 bp, synthetic construct
  source 1..75: mol_type = other DNA
ggtaaagcaaaaggcgcaaccggtcgtccggtagcgttgctggcacagttcctgttaaaccgcgctgggtttaac

SEQ ID NO: 81608 - DNA, 75 bp, synthetic construct
  source 1..75: mol_type = other DNA
gtcctgatatgacagtggcatcggaaccgaaggtgttgacggtaaagctgggggatggctatgaacagcggcgac

SEQ ID NO: 81609 - DNA, 75 bp, synthetic construct
  source 1..75: mol_type = other DNA
agagtacagcccggatgtggtgacgggcctcatcacgcgcatcaccacgccggatggcagggcatcggcgtttta

SEQ ID NO: 81610 - DNA, 75 bp, synthetic construct
  source 1..75: mol_type = other DNA
ttctggctgaaattgcgaccatgcttgctggagaggataacgccacctctgcgaccattgaaacgctggagtccc

SEQ ID NO: 81611 - DNA, 75 bp, synthetic construct
  source 1..75: mol_type = other DNA
tgacgagtgcctcctggtcttctccgatcgctgcatcgacttctggtggcagagcggcggggtgcaggaaccggt

SEQ ID NO: 81612 - DNA, 75 bp, synthetic construct
  source 1..75: mol_type = other DNA
gctgacggaaaaagccatgacgcaaaaagccgtacgcgaaaactatgcccaccacgtccatggctgcttgttccg

SEQ ID NO: 81613 - DNA, 75 bp, synthetic construct
  source 1..75: mol_type = other DNA
tgtatgcatacaaaaaaggtgcagattatctccgcacccatgatgttaagtctttatcagatgccttgaaaatat

SEQ ID NO: 81614 - DNA, 75 bp, synthetic construct
  source 1..75: mol_type = other DNA
cggagactatgaaccaactatcagtatgcttatcccgctggcaaatgtccttggttgcgacccgatgtggctgtt

SEQ ID NO: 81615 - DNA, 75 bp, synthetic construct
  source 1..75: mol_type = other DNA
aggggactatacttgtggtggccaagaccaacggggagaatcaaaaggagatggtctatgggggccaggtaaagc

SEQ ID NO: 81616 - DNA, 75 bp, synthetic construct
  source 1..75: mol_type = other DNA
gatgccatgctcagaaaaaccggcctgggcttcatctgcggagaaaccggctccgggaaatccacactggcggcg

SEQ ID NO: 81617 - DNA, 75 bp, synthetic construct
  source 1..75: mol_type = other DNA
cgtgaacgcatcgtgctggtgggttttcgtcgcgatctgaatctgaaagccgattttactctgcgtgatatcagc

SEQ ID NO: 81618 - DNA, 75 bp, synthetic construct
  source 1..75: mol_type = other DNA
atttatatcaattattatatgatgtttggcatgatgattcatatggaacatcatcaattgatattactggcagtg

SEQ ID NO: 81619 - DNA, 75 bp, synthetic construct
  source 1..75: mol_type = other DNA
aacgtcagcaggcatggttcaatttttcccagggggtggcattgccggatccggggaaatattatggtcgcggca

SEQ ID NO: 81620 - DNA, 75 bp, synthetic construct
  source 1..75: mol_type = other DNA
gttatcgaaaatgccgaactggagcagcagattcagggcggtaaagagctgaaagacgcactggctcagttaatc

SEQ ID NO: 81621 - DNA, 75 bp, synthetic construct
  source 1..75: mol_type = other DNA
agacactgttggtatgtggatgagtatcccattgaagcattggctgggaaaaaatgataatgatgtaaatgccac

SEQ ID NO: 81622 - DNA, 75 bp, synthetic construct
  source 1..75: mol_type = other DNA
ccgagtcgaaagtgaacggtcaatggcaaaaatatgacgtgaaggaatcaagtccatcgaaagcgacagcttaca

SEQ ID NO: 81623 - DNA, 75 bp, synthetic construct
  source 1..75: mol_type = other DNA
gcgtgaaatctcggaagggcgcttcactgccaatcgtgaggcggtaaaacgcgaagtggagcgtcgtgtgaaaga

SEQ ID NO: 81624 - DNA, 75 bp, synthetic construct
  source 1..75: mol_type = other DNA
agggcgatgccacaatgaaaggtggcccgatagtccaggggtcggcaggcgtgagaattggtgcgccaaccggcg

SEQ ID NO: 81625 - DNA, 75 bp, synthetic construct
  source 1..75: mol_type = other DNA
gataatctccgtcaggcttccttactccgaacgcccaccgcgtccgtcccgcacattccagcaacgcatctggag

SEQ ID NO: 81626 - DNA, 75 bp, synthetic construct
  source 1..75: mol_type = other DNA
agacacggatacgagattaagaaagccctcagcctcgattatcgtcactggataatctccgtcaggctcccttac

SEQ ID NO: 81627 - DNA, 75 bp, synthetic construct
  source 1..75: mol_type = other DNA
ggcgtaacgatgatctggaaggtgctgttattggcgcattctttttgcgtggggcagatccggaagtgatggata

SEQ ID NO: 81628 - DNA, 75 bp, synthetic construct
  source 1..75: mol_type = other DNA
caggactcaaagccatcaccggcggcgatgcggtctcagttgacccgaaataccagaacccgtactcaacacata

SEQ ID NO: 81629 - DNA, 75 bp, synthetic construct
  source 1..75: mol_type = other DNA
ttctggccacactaccggcggacgttttttctgtacgaccgtaccgggatatctacacaggcatctgcagacagg

SEQ ID NO: 81630 - DNA, 75 bp, synthetic construct
  source 1..75: mol_type = other DNA
aagccaccgtgcgatgaagtacattgtgaaaaacgagatcccgctgcgggtggatagcgactttcctatccagca

SEQ ID NO: 81631 - DNA, 75 bp, synthetic construct
  source 1..75: mol_type = other DNA
tatggggaacgccagtatcatcccgcgcaattaccgtaaatacctctatcacgcctatctggcctacatggaggc

SEQ ID NO: 81632 - DNA, 75 bp, synthetic construct
  source 1..75: mol_type = other DNA
aatcaccgctccgggtgattaccctgaaaatacaaccactatcgccccattaacgccatacgataaatgggatgg

SEQ ID NO: 81633 - DNA, 75 bp, synthetic construct
  source 1..75: mol_type = other DNA
atagcgccttcattgatttcgtgaagtttggcggtgaaataaaacccgtcaataaagatattgttgatggattaa

SEQ ID NO: 81634 - DNA, 75 bp, synthetic construct
  source 1..75: mol_type = other DNA
ctgggcgatgacgctgattattatctccggtgaaattgatgtcagcgttgggccgatggtggcttttgtctcggt

SEQ ID NO: 81635 - DNA, 75 bp, synthetic construct
  source 1..75: mol_type = other DNA
gcttaacgctgtgctggattacattgacgcggtgacggcaacagataccagcaccgcgccggatatcaattggcc

SEQ ID NO: 81636 - DNA, 75 bp, synthetic construct
  source 1..75: mol_type = other DNA
acctgtgaagcagctgaagatgccctgaaggatgctcaaaacatgatggtctcattgtcgaccgaaaagggcatt

SEQ ID NO: 81637 - DNA, 75 bp, synthetic construct
  source 1..75: mol_type = other DNA
gctcgtagtcgtggagagaaaggcatccttcgctatttcgcaaatatcagcgacgaggatataaacgagtacgaa

SEQ ID NO: 81638 - DNA, 75 bp, synthetic construct
  source 1..75: mol_type = other DNA
atgatcactattaccaaagagcgactactgacaatcaagcagtggcgcgaaacatacggacctggtagcaacgtt

SEQ ID NO: 81639 - DNA, 75 bp, synthetic construct
  source 1..75: mol_type = other DNA
tggctgattttacttacggtgtgcccggagttcagggcgggcatggatgcttaaatgaaccgcgagtctgtctgg

SEQ ID NO: 81640 - DNA, 75 bp, synthetic construct
  source 1..75: mol_type = other DNA
tattggtcctattaataatggctataccaatattgctccttctgatccgttccagaaatgggatgggaaaaagtg

SEQ ID NO: 81641 - DNA, 75 bp, synthetic construct
  source 1..75: mol_type = other DNA
ttatattatgtctggtgttatgcatacccctatgcgtagcgtactttcactctggtgaactgatgatgaggttcg

SEQ ID NO: 81642 - DNA, 75 bp, synthetic construct
  source 1..75: mol_type = other DNA
tcaaatcaacagctgcaggccgttatcaacttctttcacgctggtgggatgcttaccgcaagcagcttggcctga

SEQ ID NO: 81643 - DNA, 75 bp, synthetic construct
  source 1..75: mol_type = other DNA
atcttctttgttacgtcgcgtacagtctactgaaaaccttgattatagtaatgctatgatatcaaactctttctc

SEQ ID NO: 81644 - DNA, 75 bp, synthetic construct
  source 1..75: mol_type = other DNA
cgagtatattcagaaatggcggattactccgttgtctcctttcggggcaaagaatattctgttcgttttattaaa

SEQ ID NO: 81645 - DNA, 75 bp, synthetic construct
  source 1..75: mol_type = other DNA
accaggagctggtgaaactggttaccgaacgttataaccagccactgcatgatgtggacctggacagttatctat

SEQ ID NO: 81646 - DNA, 75 bp, synthetic construct
  source 1..75: mol_type = other DNA
gtttactatattgatgctgctatgcaggcctccgcttgtcagggtgctaaatccagtgctcagagtgtatttact

SEQ ID NO: 81647 - DNA, 75 bp, synthetic construct
  source 1..75: mol_type = other DNA
ctatgtgtttaatggcgagcaggatgaaatatctgatgcgtatatctgcgcaacagacggaggtatgccgcaaac

SEQ ID NO: 81648 - DNA, 75 bp, synthetic construct
  source 1..75: mol_type = other DNA
agctttatgaaactcttgtatcccgcgaagaaatggtcaaagcgcaagatatggggaaatactatcgaatccctg

SEQ ID NO: 81649 - DNA, 75 bp, synthetic construct
  source 1..75: mol_type = other DNA
acatcattctgatgctttacagggatgaggtgtacaacccggagacacaggcgagaggcatagctgaaatcaaca

SEQ ID NO: 81650 - DNA, 75 bp, synthetic construct
  source 1..75: mol_type = other DNA
ttgagccatccagcattctggtttctacgctggtgctcacgttgcgcccgaccgggctactgccgctggttactg

SEQ ID NO: 81651 - DNA, 75 bp, synthetic construct
  source 1..75: mol_type = other DNA
actggttgaaaaggtgtttggtgtctccccgtccgacgcggccgcaaaggtggctgccgtgaccggcagcctgcc

SEQ ID NO: 81652 - DNA, 75 bp, synthetic construct
  source 1..75: mol_type = other DNA
ccatcttccatgaacaccggggatgttatgggtaccggcggatccattgtgagcttcagaaaagaggtcttaagt

SEQ ID NO: 81653 - DNA, 75 bp, synthetic construct
  source 1..75: mol_type = other DNA
ggggcgatatatcactcaggatccgattggactgaaggggggatggaacctgtatggatatcaattgaatccgat

SEQ ID NO: 81654 - DNA, 75 bp, synthetic construct
  source 1..75: mol_type = other DNA
aaacagtggcagcagcgcccgctggaaaaggtttatcccttcgtctggctggacgccattcactataaaatccgc

SEQ ID NO: 81655 - DNA, 75 bp, synthetic construct
  source 1..75: mol_type = other DNA
gccagaggcatagcagaaatcaacatcacgaaacagcgtaatggcacactcgggaccatttaccggcgttttcat

SEQ ID NO: 81656 - DNA, 75 bp, synthetic construct
  source 1..75: mol_type = other DNA
tcgcgatgaccttaatctggtgctggcgacagcggcgaaactgaaagcaaacccgcaaccagagctgttgaagca

SEQ ID NO: 81657 - DNA, 75 bp, synthetic construct
  source 1..75: mol_type = other DNA
agaaagggataatccagctaagcagcgcgaccaacagcacgtctgaaacgcttgccgcgacaccaaaggcagtaa

SEQ ID NO: 81658 - DNA, 75 bp, synthetic construct
  source 1..75: mol_type = other DNA
acagaccgcgccgcataacgtgtccaccagcaacgccagggcacgggcaaacatccagaagctgaaaaccatgat

SEQ ID NO: 81659 - DNA, 75 bp, synthetic construct
  source 1..75: mol_type = other DNA
atgaatttgtttgattcactgaataacgcccgtcgcctgaccgagcttgccggtgcggtactggaacgcagtaag

SEQ ID NO: 81660 - DNA, 75 bp, synthetic construct
  source 1..75: mol_type = other DNA
ggactggaagcggccagagctaaaggtcgtattggtggcagacgtccgaagctcaccgcgagtgagtgggaacag

SEQ ID NO: 81661 - DNA, 75 bp, synthetic construct
  source 1..75: mol_type = other DNA
tgccataggtgagggactggatacaaattgcgtagtccttccaccttcatacttaggaaaaatgaccgaagcaca

SEQ ID NO: 81662 - DNA, 75 bp, synthetic construct
  source 1..75: mol_type = other DNA
gccttaatctccgcaaagataacctcgtcattccggacattctctgccaggcatatgtcgatgtaatccataaac

SEQ ID NO: 81663 - DNA, 75 bp, synthetic construct
  source 1..75: mol_type = other DNA
atggcggaagtgtacctgactcagccgacgcagattgtggcgggcagccaggcagggagcaaatggatgagtgac

SEQ ID NO: 81664 - DNA, 75 bp, synthetic construct
  source 1..75: mol_type = other DNA
ataccacgtggtgctgtgcgtcagacaggagtatttcgacggccccgaactggatcggttgatactggatgcctg

SEQ ID NO: 81665 - DNA, 75 bp, synthetic construct
  source 1..75: mol_type = other DNA
tactgactggcgacaactgccagctttaaccgatgcgtttcaggccagcggttttacatggcgtggaatcattgc

SEQ ID NO: 81666 - DNA, 75 bp, synthetic construct
  source 1..75: mol_type = other DNA
atttaagaggattaatgctcattccttccattcagacatcagggcaaaattgtgacagaggtggatatgattttt

SEQ ID NO: 81667 - DNA, 75 bp, synthetic construct
  source 1..75: mol_type = other DNA
attaacaagagaaaacaagaacgggagctattaaataaaatatgcattgtttcaatgctggctcgtttacgtctg

SEQ ID NO: 81668 - DNA, 75 bp, synthetic construct
  source 1..75: mol_type = other DNA
atatagattcactgcattctcaggggtcggcaagcagtatgtggatgcgtcatgtcggagggcacgaacgttcaa

SEQ ID NO: 81669 - DNA, 75 bp, synthetic construct
  source 1..75: mol_type = other DNA
gcggcgtcggtgcacaaacggtcaacggtattgaactcattgaggttggcggtaattctgcaggtaacttcgcgc

SEQ ID NO: 81670 - DNA, 75 bp, synthetic construct
  source 1..75: mol_type = other DNA
gtgccggaggattgcttcaccgcagagcgtgaactggtgcgggcaagctggcagaagtggctggtggaagaatga

SEQ ID NO: 81671 - DNA, 75 bp, synthetic construct
  source 1..75: mol_type = other DNA
atatcaaatattagagctcatttcgcatctgacattaaatcgctttttgttttatcagcaatcggtggagccatt

SEQ ID NO: 81672 - DNA, 75 bp, synthetic construct
  source 1..75: mol_type = other DNA
tcacgactactgaaattgctgggagtcataaaaattagaaatacaaaaggacaaaaaatttattcggtgaatcct

SEQ ID NO: 81673 - DNA, 75 bp, synthetic construct
  source 1..75: mol_type = other DNA
accgggcagcatcatacggggcaattatggccgcattaccatacatgcaactgtacatagctgattacttggctg

SEQ ID NO: 81674 - DNA, 75 bp, synthetic construct
  source 1..75: mol_type = other DNA
agaagataaatggtcattccagatgaaattgcttgccggcatgtcggaatttttcatcgggtacggattctggct

SEQ ID NO: 81675 - DNA, 75 bp, synthetic construct
  source 1..75: mol_type = other DNA
cgttcagtgatttcgcccgcgatcgccgtggagtgtgcgatccggaagcccgttgcctcgccggtaatccctggt

SEQ ID NO: 81676 - DNA, 75 bp, synthetic construct
  source 1..75: mol_type = other DNA
gactgtgcagccgaaccgacacagtttaacggacgctcgctggtgcagattgcgcaggcgcttgctgcgcctttc

SEQ ID NO: 81677 - DNA, 75 bp, synthetic construct
  source 1..75: mol_type = other DNA
aggccatagacgccgcacaaccaaaggacaagcaatacaaactcaccgattcactgacgcccggcctgtttttgc

SEQ ID NO: 81678 - DNA, 75 bp, synthetic construct
  source 1..75: mol_type = other DNA
cgttgataaaactggtcacacctggtttctggctggcgaaggtgaatcccgggtaaccgaagagcggccagtaaa

SEQ ID NO: 81679 - DNA, 75 bp, synthetic construct
  source 1..75: mol_type = other DNA
aaggacagcggaggataattttaccggggcatggatatcaatgcgcccccgcaatgttgcgtttaattacatcgt

SEQ ID NO: 81680 - DNA, 75 bp, synthetic construct
  source 1..75: mol_type = other DNA
gcgtgaatttccgaagtctgactgacagtattgataccagtaccccaatgggcagtttcttttttcatgtcatgg

SEQ ID NO: 81681 - DNA, 75 bp, synthetic construct
  source 1..75: mol_type = other DNA
tggaaacggaacttgatctgattcagaagatgggactgcaaaattatctgcaagcacagattcgcgaagaaggtt

SEQ ID NO: 81682 - DNA, 75 bp, synthetic construct
  source 1..75: mol_type = other DNA
aaactctatacccgtctgtttgggttaagcagagtaaattctgttattgcgtcctctgtaagcggagcatttcta

SEQ ID NO: 81683 - DNA, 75 bp, synthetic construct
  source 1..75: mol_type = other DNA
tgttagccggaaagaaagaactttacgacttcacccctgaaagcatttacagggccatgactatatttgatagat

SEQ ID NO: 81684 - DNA, 75 bp, synthetic construct
  source 1..75: mol_type = other DNA
atgaagcaaatatacatgcttcgcaacgaagcaatcagaaataacgccatagacgcaatactctcacttcccatc

SEQ ID NO: 81685 - DNA, 75 bp, synthetic construct
  source 1..75: mol_type = other DNA
aataaattgcctgatttacgcggtgaatttattcgtggctgggatgacggtcgcgggattgatactggtcgcgct

SEQ ID NO: 81686 - DNA, 75 bp, synthetic construct
  source 1..75: mol_type = other DNA
tactggacgcacgaatggagcaagaaggctatgcccgcagttccatcaacccgttcctgtttccgggtgaaggag

SEQ ID NO: 81687 - DNA, 75 bp, synthetic construct
  source 1..75: mol_type = other DNA
acagtccgcttatatggcaatcctggggagcgtagcttcaatattcgtcggctaccaattatcgacgaagcccag

SEQ ID NO: 81688 - DNA, 75 bp, synthetic construct
  source 1..75: mol_type = other DNA
actgtacaaggacctgcttacccgtactcaggccgcactgaaggctaaccctaaaaatattctgcttgcagtggt

SEQ ID NO: 81689 - DNA, 75 bp, synthetic construct
  source 1..75: mol_type = other DNA
atcgaccagttagtgcctggcgatattattaaactggcggcgggggatatgatcccggccgatttacgtattttg

SEQ ID NO: 81690 - DNA, 75 bp, synthetic construct
  source 1..75: mol_type = other DNA
ggaagaagacccggacattccgggtatcggatattacggttcgaaatggcgtgacagctcagccacctggacgtc

SEQ ID NO: 81691 - DNA, 75 bp, synthetic construct
  source 1..75: mol_type = other DNA
gcggcgaaacaaaccttcagcgccggtctttcaggcgaactgtccggcaatgctgctacagcaacaaagctgaaa

SEQ ID NO: 81692 - DNA, 75 bp, synthetic construct
  source 1..75: mol_type = other DNA
tcttgatgcggtacgcgatgcagtatgcagtgtcagttaccgggtggcagaagatgcgcggcgtatccgtgcggc

SEQ ID NO: 81693 - DNA, 75 bp, synthetic construct
  source 1..75: mol_type = other DNA
atgctaatcgccctgatcgtcatctgtttaaccgtcattgtgacggcactggtaacgaggaaagacctctgcgag

SEQ ID NO: 81694 - DNA, 75 bp, synthetic construct
  source 1..75: mol_type = other DNA
ttaaacgtaatgctatcggatacgaaagcgcttcacagttgctgatcactgccggagacaatcctcaacggttaa

SEQ ID NO: 81695 - DNA, 75 bp, synthetic construct
  source 1..75: mol_type = other DNA
atagatggatttaatgttgacttagatgaggtgaaatacttttcactaaatgattacaaggaagatttatcctcc

SEQ ID NO: 81696 - DNA, 75 bp, synthetic construct
  source 1..75: mol_type = other DNA
gacctctgcgaggtacgaatccgaaccggccagacggaggtcactgtcttcacagcttacgaacctgaggagtaa

SEQ ID NO: 81697 - DNA, 75 bp, synthetic construct
  source 1..75: mol_type = other DNA
gccggtacttccggcagacggaacgcaggtgtctttcccgtatgccggagaatggctgaccgaagacgaaatcag

SEQ ID NO: 81698 - DNA, 75 bp, synthetic construct
  source 1..75: mol_type = other DNA
aagcgcttcgcagttgctgatcacggcaggagacaatccccaacgattaagatcagaatcaggttttgcggcact

SEQ ID NO: 81699 - DNA, 75 bp, synthetic construct
  source 1..75: mol_type = other DNA
aagactatcgatctggaaactgctggcggagtcattgatcgggacaccattaaatggtggcttaagcaatcacgc

SEQ ID NO: 81700 - DNA, 75 bp, synthetic construct
  source 1..75: mol_type = other DNA
cgtgggtgtttgacctggtggcggccctgtttggctcctacgatgcgcagaccggtgttcgccatatcaaggaag

SEQ ID NO: 81701 - DNA, 75 bp, synthetic construct
  source 1..75: mol_type = other DNA
aagtgatcatcgccatggaacattgcgccaaagatggttcagcaaaaattttgcgccgctgcaccatgccactca

SEQ ID NO: 81702 - DNA, 75 bp, synthetic construct
  source 1..75: mol_type = other DNA
ccaggagatgcgcgccagaatgccggtgagggtaaaacagaaaacggataaacgcagaaccacacactggatggc

SEQ ID NO: 81703 - DNA, 75 bp, synthetic construct
  source 1..75: mol_type = other DNA
tctgctggtatgggaactgccggatccggatgaagagtatgtttgtggggcagatactgccgaagggctggagca

SEQ ID NO: 81704 - DNA, 75 bp, synthetic construct
  source 1..75: mol_type = other DNA
atgactaaactgagcaatccctggtggcggctcaatcatctctacaaaatacagaacgaaaaaggtgaactggtc

SEQ ID NO: 81705 - DNA, 75 bp, synthetic construct
  source 1..75: mol_type = other DNA
aaagagtgatgataaaaatggcctccttgctcggttttgacccgataagccgccgtaaaaatccaccggaaacag

SEQ ID NO: 81706 - DNA, 75 bp, synthetic construct
  source 1..75: mol_type = other DNA
acgagtagcggaagggcatacaaaaatggaagcaatacgctgcctgaagcgctatatctcacgcgaagtttatac

SEQ ID NO: 81707 - DNA, 75 bp, synthetic construct
  source 1..75: mol_type = other DNA
caggccgctgtataaggatctcatcggtcgtacaaaagccgcgctggcaaagaacccgaaaaatgtgctgcttgc

SEQ ID NO: 81708 - DNA, 75 bp, synthetic construct
  source 1..75: mol_type = other DNA
atgcggcttgcccgggagttccggcgggcagactggcggcggatgctgtcggaaatgtcggccactgagcttggt

SEQ ID NO: 81709 - DNA, 75 bp, synthetic construct
  source 1..75: mol_type = other DNA
aagaatgcattgacgtaattcgtgaagaagtaaagcgatggaatgattcccgcgccgctggcattcgcatcaaag

SEQ ID NO: 81710 - DNA, 75 bp, synthetic construct
  source 1..75: mol_type = other DNA
atggataagaagcaagtaacggatttaaggtcggaactactcgattcacgttttggcgctaagtccatttcaact

SEQ ID NO: 81711 - DNA, 75 bp, synthetic construct
  source 1..75: mol_type = other DNA
ttcgtcggtggaaatgtacctggtcagcgattgtattgagcatatcctgtccagtgggctggcctgcgatgtgct

SEQ ID NO: 81712 - DNA, 75 bp, synthetic construct
  source 1..75: mol_type = other DNA
atgctgaagtttattcagaacaaccgtgaaatcacggcactgctggcggtggtgctgctgtttgtattacccggt

SEQ ID NO: 81713 - DNA, 75 bp, synthetic construct
  source 1..75: mol_type = other DNA
ggcctgaaggtgactgccgggagcgtgattcagcgcgatgacctggttcagtacacggcaactgccgatgcaacc

SEQ ID NO: 81714 - DNA, 75 bp, synthetic construct
  source 1..75: mol_type = other DNA
aaaaattatccgaagggtactggctgttgtaatgacgccgaagttttcgacaaagccggtattgccgtactttcg

SEQ ID NO: 81715 - DNA, 75 bp, synthetic construct
  source 1..75: mol_type = other DNA
tctttcccgtatgccggagaatggctgaccgaagacgaaatcagggcagttcttgatgcggtgcacgatgcggta

SEQ ID NO: 81716 - DNA, 75 bp, synthetic construct
  source 1..75: mol_type = other DNA
tgaaaaccgggtggcaggcgcggcacagttcaaaaatctgccggaggtcggaaagctgagactcccggcggcgta

SEQ ID NO: 81717 - DNA, 75 bp, synthetic construct
  source 1..75: mol_type = other DNA
atgaacgaaaacacaacgctgaatgcactgatttgtcgtcacgcccgcgacctgctgctggcgcagggctggccg

SEQ ID NO: 81718 - DNA, 75 bp, synthetic construct
  source 1..75: mol_type = other DNA
tcttggtgcggtacgcgatgcagtatgcagtgtcagttaccaggtggcagaagatgcgcggcgtatccgtgcggc

SEQ ID NO: 81719 - DNA, 75 bp, synthetic construct
  source 1..75: mol_type = other DNA
atacgtctgaaggttgttttgaaattggtgtcactatcagtaatcctgtatttactgaagaggccattaacaaaa

SEQ ID NO: 81720 - DNA, 75 bp, synthetic construct
  source 1..75: mol_type = other DNA
tccagccaagaactgagcccctgcaggccatgagggcgttacaccgggtccgagaatcactcatcagagataagg

SEQ ID NO: 81721 - DNA, 75 bp, synthetic construct
  source 1..75: mol_type = other DNA
caaacgttaatacgtctgaaggttgttttgaaattggtgtcactatcagtaaccctgtatttactgaagatgcca

SEQ ID NO: 81722 - DNA, 75 bp, synthetic construct
  source 1..75: mol_type = other DNA
cggttggagagacaatcaccatcacggtaacgctccgggatgcgttcgataatctggtaaccggtgcagcttcac

SEQ ID NO: 81723 - DNA, 75 bp, synthetic construct
  source 1..75: mol_type = other DNA
tacaggccgcttcaggtgacatttgatggttctcagtggcgtacagtcagcgtgggtgagtatgtgtcgtcagga

SEQ ID NO: 81724 - DNA, 75 bp, synthetic construct
  source 1..75: mol_type = other DNA
actcaagcgcgagcaggccctgcccctggcgatcaacccgaacagcgaccagtacctggaagagcgtttgcagct

SEQ ID NO: 81725 - DNA, 75 bp, synthetic construct
  source 1..75: mol_type = other DNA
ccgcgtttaccctgacgcagtcaccagtaggaactttcccggtggacaaactccgcgtaacggatatcaccaaaa

SEQ ID NO: 81726 - DNA, 75 bp, synthetic construct
  source 1..75: mol_type = other DNA
cggttcggtgtttaatgttcccggtcacagtgagtttcatctgcaagttgccgaacccacctcttatctgtgccg

SEQ ID NO: 81727 - DNA, 75 bp, synthetic construct
  source 1..75: mol_type = other DNA
ggacagtcgttcaccggactgcgaagacatcctcaaagatttgatctgggcgttcagtgatttcgcccgcgatcg

SEQ ID NO: 81728 - DNA, 75 bp, synthetic construct
  source 1..75: mol_type = other DNA
acgttatcagagggagacacgctggttgtatggaagctcgacaggctgggaagaagcatgcgacaccttgttacc

SEQ ID NO: 81729 - DNA, 75 bp, synthetic construct
  source 1..75: mol_type = other DNA
tggcacttttaatgaccgcacaacagtgttttgctggtggcgtagccttaagcacgacgcgtgttatttatgatg

SEQ ID NO: 81730 - DNA, 75 bp, synthetic construct
  source 1..75: mol_type = other DNA
tataaccaaattcaacacctggttagaaaaggattattaagtaaagtcagaaaatcaggcgtgtatcaatattta

SEQ ID NO: 81731 - DNA, 75 bp, synthetic construct
  source 1..75: mol_type = other DNA
tataaccaaattcaatatctagttaaaaaaggattattaaataaagtaagaaaatcaggcgtgtatcaatattta

SEQ ID NO: 81732 - DNA, 75 bp, synthetic construct
  source 1..75: mol_type = other DNA
tggccgctgttacttgatgcgcttattcctgtcgccaatacctgcgaaatgatcctgatgcccgcctgcttcggc

SEQ ID NO: 81733 - DNA, 75 bp, synthetic construct
  source 1..75: mol_type = other DNA
atgaagaaaaaaattgttagattttcggcattagcattgacaattggatttttatcgggttgtaccattatccct

SEQ ID NO: 81734 - DNA, 75 bp, synthetic construct
  source 1..75: mol_type = other DNA
gcattattccgcgaactgtatccggcgctgaaacaaattcaatcgaactattccggcagatgtcatgactgcggt

SEQ ID NO: 81735 - DNA, 75 bp, synthetic construct
  source 1..75: mol_type = other DNA
atgtttctgaaaacagaacaatttgaatataacggtgtgtctgtcacgctttctgagctgtctgcgctgcagcgt

SEQ ID NO: 81736 - DNA, 75 bp, synthetic construct
  source 1..75: mol_type = other DNA
gacgaaagaagctattacctttgagtcagttgctagagagtggcacgcagcaaataaaaaatggacagaagaaca

SEQ ID NO: 81737 - DNA, 75 bp, synthetic construct
  source 1..75: mol_type = other DNA
cgaaccgcagacgttatggtcttgctgcattcattgggctgattgctggcgttgtttccgcattcgtgaagtggg

SEQ ID NO: 81738 - DNA, 75 bp, synthetic construct
  source 1..75: mol_type = other DNA
tccaatggtgggcagcagcacattgccaaacaagatctggcaacgggaggcgtacaagttctgtcgtccacgttc

SEQ ID NO: 81739 - DNA, 75 bp, synthetic construct
  source 1..75: mol_type = other DNA
tgtgaccatctgctatcgtccgtttgccagtctggataaggcaaaccgtaaacgtatgaaagacggtcagaagct

SEQ ID NO: 81740 - DNA, 75 bp, synthetic construct
  source 1..75: mol_type = other DNA
gtgagaaccgtaataacataccttcggttcagttcagctatacaaggcgctgaaggtgcagattcaaccagacga

SEQ ID NO: 81741 - DNA, 75 bp, synthetic construct
  source 1..75: mol_type = other DNA
tggtttcaggactatggcatgtagctcgttgattgaatcggggttgtggtcgagggatgcggtagagcgacagat

SEQ ID NO: 81742 - DNA, 75 bp, synthetic construct
  source 1..75: mol_type = other DNA
gacatgtcattttaatatagcaaaacaatgtttttgcgcattccccatatacccccttcaacaaaatagtattta

SEQ ID NO: 81743 - DNA, 75 bp, synthetic construct
  source 1..75: mol_type = other DNA
catcgcggcctgccgctggcccttatcagcacggaagggacaacagcgtggtacgcagaatacgatgaatggggt

SEQ ID NO: 81744 - DNA, 75 bp, synthetic construct
  source 1..75: mol_type = other DNA
gcggcggcctcgccggattactctgtggcctgcaactgcaaaaacacggcctgcgctgtgccattgtcactcgtg

SEQ ID NO: 81745 - DNA, 75 bp, synthetic construct
  source 1..75: mol_type = other DNA
atcaatgactggcttggcgaagaggtgatccgttttaattcttatgctcttcttgatgaaaaaacagccccgtga

SEQ ID NO: 81746 - DNA, 75 bp, synthetic construct
  source 1..75: mol_type = other DNA
gtcccgacgcaggcgtcgtaaaaaggggcagcgttcagccctgaaaggtggcggcagcgtgcttgtggtgggaaa

SEQ ID NO: 81747 - DNA, 75 bp, synthetic construct
  source 1..75: mol_type = other DNA
tcgccgtggtgtttgttattgcatggcactacccgatgttaaagaacgtgaagtcagagacggcgttctgtgctt

SEQ ID NO: 81748 - DNA, 75 bp, synthetic construct
  source 1..75: mol_type = other DNA
tgctgacgttcagtttcagcggcgagttaccactggaacaggtcagcgagcgggatcagcttatcctttccgtga

SEQ ID NO: 81749 - DNA, 75 bp, synthetic construct
  source 1..75: mol_type = other DNA
gcattatttacgagcaagatttgattgtagctcgtctgcaacaggatccgccgcgtaacgttgagggtagcgttt

SEQ ID NO: 81750 - DNA, 75 bp, synthetic construct
  source 1..75: mol_type = other DNA
tttaacccaacaggtgcgcacaaatcagctaagatcggtgaagatccaaatggcattcctaataatctaatacca

SEQ ID NO: 81751 - DNA, 75 bp, synthetic construct
  source 1..75: mol_type = other DNA
gatcgaggttcacagtactgcgcatacgattaccgtgtcatacaggagcagtttggtctgaaaacatcaatgtcg

SEQ ID NO: 81752 - DNA, 75 bp, synthetic construct
  source 1..75: mol_type = other DNA
attatacagaaagagttcgccggttttgacgacaccaaagagcgccttgacctgctggctatcgataaaaaaggc

SEQ ID NO: 81753 - DNA, 75 bp, synthetic construct
  source 1..75: mol_type = other DNA
tttgcttttaactggctacatgaacgcaaagaggcaattgaaaacgcgtttggccatgcgcttaagtgggaacct

SEQ ID NO: 81754 - DNA, 75 bp, synthetic construct
  source 1..75: mol_type = other DNA
tgaatcatggtggtatgtgcaggatggcaaggacgcgtttcagtttcgccctggcaaagtgtgccacctgatgaa

SEQ ID NO: 81755 - DNA, 75 bp, synthetic construct
  source 1..75: mol_type = other DNA
gcatcatctacatcggtgcagcgcaggtaaaccgcgaaagcatggactccctgaaagaaacgctacagggtgcac

SEQ ID NO: 81756 - DNA, 75 bp, synthetic construct
  source 1..75: mol_type = other DNA
acgtatctgcgaggctatggggtatgccgatcatcagcgtgtcagtgctgttcattacgacactgataatgtgca

SEQ ID NO: 81757 - DNA, 75 bp, synthetic construct
  source 1..75: mol_type = other DNA
ctgggtcatatccctccggcagaagcagaaaaagcttattatgcttccatcggaaacgatgatctggcagcctga

SEQ ID NO: 81758 - DNA, 75 bp, synthetic construct
  source 1..75: mol_type = other DNA
cttaaattacggcacgccctggcgaaatacatgcgacgcggaagcgatcttgaatcatggtggtatgtgcaggat

SEQ ID NO: 81759 - DNA, 75 bp, synthetic construct
  source 1..75: mol_type = other DNA
cgctatgatatagagccaacacagcggcgtaacacgcgctctgagggcgataagacttatcaccttgtcatttcc

SEQ ID NO: 81760 - DNA, 75 bp, synthetic construct
  source 1..75: mol_type = other DNA
ggcgttaaaggggatacagcgtgggctggagcgcgaaactttgcgtgttaatgctgatggcacactggcaacaac

SEQ ID NO: 81761 - DNA, 75 bp, synthetic construct
  source 1..75: mol_type = other DNA
cctgggccggtaacggtctcggctgcgtggtgctgcgtcgcctgagagacgcgctgctgtcaggcgatccgatta

SEQ ID NO: 81762 - DNA, 75 bp, synthetic construct
  source 1..75: mol_type = other DNA
aagctatttcccgtggctggttgcgattctggcagggtatatgacgttaacccagttggtgaaaggattttatag

SEQ ID NO: 81763 - DNA, 75 bp, synthetic construct
  source 1..75: mol_type = other DNA
acctccctcagattatcacggccgtggccgccctcattacagccattaccgggctgattaaagtcatgaaggata

SEQ ID NO: 81764 - DNA, 75 bp, synthetic construct
  source 1..75: mol_type = other DNA
tatcatcgcgtcgcaagacctcgcaagatgttatgccggggcggcgggcgcattcaaaaaccatcgctcgcaacc

SEQ ID NO: 81765 - DNA, 75 bp, synthetic construct
  source 1..75: mol_type = other DNA
gttcgagcctgatgtacgtattttgcttaccaaatacagtaatagtaatggttctcagtccccgtggatggagga

SEQ ID NO: 81766 - DNA, 75 bp, synthetic construct
  source 1..75: mol_type = other DNA
gtggcacatatccgcactcgcgaaacatatggaacccggcggctccagacggagctggcagagaatggcatcatc

SEQ ID NO: 81767 - DNA, 75 bp, synthetic construct
  source 1..75: mol_type = other DNA
gcactgatttttgatgtaggtgtttctaccatttatagaaaatttccggcaaataagatcaatgaatccccctga

SEQ ID NO: 81768 - DNA, 75 bp, synthetic construct
  source 1..75: mol_type = other DNA
ggatattctgtgcactgataaaaccggcaccctgacacaggataaaattgtgctggagaatcataccgatatctc

SEQ ID NO: 81769 - DNA, 75 bp, synthetic construct
  source 1..75: mol_type = other DNA
aaaacctgtatctgccatgggggccgctacgggtctgcacgtctatcagaatttcggtgctgaagcctatcgtaa

SEQ ID NO: 81770 - DNA, 75 bp, synthetic construct
  source 1..75: mol_type = other DNA
atcgcaagcacggctttcgttatggccgcgattgccgcacttgtagattcgtcacctgatgcactgaacacgctg

SEQ ID NO: 81771 - DNA, 75 bp, synthetic construct
  source 1..75: mol_type = other DNA
tggttgcgctcctgctgtttctggtggtgatggtggacttcagcagccggataatgtcagtgctggctgacggtg

SEQ ID NO: 81772 - DNA, 75 bp, synthetic construct
  source 1..75: mol_type = other DNA
caccgccagcgaaatgctcagcgttaacggcgttgggatgcgcaagctggaacgctttggcaaaccgtttatggc

SEQ ID NO: 81773 - DNA, 75 bp, synthetic construct
  source 1..75: mol_type = other DNA
cacccttctgatgagctttccttggatgattaccagactgaatacacagccaaagatttttacctcattctgctc

SEQ ID NO: 81774 - DNA, 75 bp, synthetic construct
  source 1..75: mol_type = other DNA
ggctggggagaaactgaccgctggcaccttggtgttatggccggttacggtaacgagcataacaacacggactct

SEQ ID NO: 81775 - DNA, 75 bp, synthetic construct
  source 1..75: mol_type = other DNA
acaacccacgtatattctgcgttttaattatccgaaaccaccgtcagctaccgtaatgactgaaaagccatttcc

SEQ ID NO: 81776 - DNA, 75 bp, synthetic construct
  source 1..75: mol_type = other DNA
aatcaattttcccttatcaggtatgggataatggcgaatttacatgcatgagatggactaataaacaggaaattc

SEQ ID NO: 81777 - DNA, 75 bp, synthetic construct
  source 1..75: mol_type = other DNA
tgctgcgcagacctgaatatacccttctttgtggatgccggaaacaaaaagctggtcttctggtttgtacgtgtt

SEQ ID NO: 81778 - DNA, 75 bp, synthetic construct
  source 1..75: mol_type = other DNA
ctttactacgcttctgtcggtctgttccggcgcaaccgcctgttcctgacggtctgctatcgcccgtttgtcagc

SEQ ID NO: 81779 - DNA, 75 bp, synthetic construct
  source 1..75: mol_type = other DNA
actgatagttgaacgtaccagagcagggctggctgcagctcgtgccaaaggcagagtaggtggacgccgtcctaa

SEQ ID NO: 81780 - DNA, 75 bp, synthetic construct
  source 1..75: mol_type = other DNA
ggctgggagcacatcaacctaaccggcgattacgtctggcggcagagccgcagactggaagacgggaagtttcgg

SEQ ID NO: 81781 - DNA, 75 bp, synthetic construct
  source 1..75: mol_type = other DNA
actgattgttgaacgaacaaaagctggcctggaagctgctcgcgcacagggacgaattggtggacgacgtcccaa

SEQ ID NO: 81782 - DNA, 75 bp, synthetic construct
  source 1..75: mol_type = other DNA
cggaaaccgcaagtgacctggtacggctgggacggcgaccggctgaccacgatacagaacgacaggagccgcatc

SEQ ID NO: 81783 - DNA, 75 bp, synthetic construct
  source 1..75: mol_type = other DNA
gacgtagctctgtcattctctgacaatgctggctcaaattattccatgaaaaacaatgtaaactttgaccattca

SEQ ID NO: 81784 - DNA, 75 bp, synthetic construct
  source 1..75: mol_type = other DNA
ggcgaataggtgggcgtcgatcaaagctaactgatgaacagtgggcgcaggcaggcaggttgattgcagcaggtg

SEQ ID NO: 81785 - DNA, 75 bp, synthetic construct
  source 1..75: mol_type = other DNA
caacaaatgaccagaacactgcattgcaacgaaacgcgctggagtgcgcaggatgtgaactgatattcgaggata

SEQ ID NO: 81786 - DNA, 75 bp, synthetic construct
  source 1..75: mol_type = other DNA
ctgccgcagcggaacagaaaattcccggtaactgttacccggtcgataaagttattcaccaggataataacgaaa

SEQ ID NO: 81787 - DNA, 75 bp, synthetic construct
  source 1..75: mol_type = other DNA
atattaatgatgcttcggcactggcctgcctcataaatttgtcgctgaacccttcagaggtaagggggcgcaaat

SEQ ID NO: 81788 - DNA, 75 bp, synthetic construct
  source 1..75: mol_type = other DNA
actaaccaaagcggaatgggagcaggccgggcgtttattagcacaaggaatcccccgcactctgaatcacgggcc

SEQ ID NO: 81789 - DNA, 75 bp, synthetic construct
  source 1..75: mol_type = other DNA
agaagttgtaggttccgcaatgaaatatcaggacggtgcgagcggatcggaaggtgaagaaggtgaacgttatta

SEQ ID NO: 81790 - DNA, 75 bp, synthetic construct
  source 1..75: mol_type = other DNA
tcatggctacaacccttaccccttcacaccctgaatttgtctttgtgtttgcggctgtccgtcgcgcagaccgtc

SEQ ID NO: 81791 - DNA, 75 bp, synthetic construct
  source 1..75: mol_type = other DNA
tcacaaatttcagagctaatcatgaaaccatccacgatttgaaagatgctgcttctcagttaatggcaaagtatg

SEQ ID NO: 81792 - DNA, 75 bp, synthetic construct
  source 1..75: mol_type = other DNA
ggatgtgaactgatttttgaagataaaatcagcggaacaaaatcagccagaccgggattgaaaaaactgctcaga

SEQ ID NO: 81793 - DNA, 75 bp, synthetic construct
  source 1..75: mol_type = other DNA
cattgttcaaaagtggggaagattctattctcttagcatcgctcgttggcttgccacagtattagcagaactgtc

SEQ ID NO: 81794 - DNA, 75 bp, synthetic construct
  source 1..75: mol_type = other DNA
ggcgttatcgcccgtcccctcggcaaactgaccgtggtcaattgtgccagtccacactatctgacgcgctttggt

SEQ ID NO: 81795 - DNA, 75 bp, synthetic construct
  source 1..75: mol_type = other DNA
cagctatgccggtcatctggcgcaggccggtgtggatatcacgctgatttatgccggggcgcacaaggtggatgg

SEQ ID NO: 81796 - DNA, 75 bp, synthetic construct
  source 1..75: mol_type = other DNA
ggcgctcagggactggcgcagttcatgcccgccaccgccgactggataagtcagttgatgccggggcttaacagc

SEQ ID NO: 81797 - DNA, 75 bp, synthetic construct
  source 1..75: mol_type = other DNA
ctcaccaacagccagcagcagaaaaaagccctgatgcagcaattacttaccgggaagaaacgcttgctggatgag

SEQ ID NO: 81798 - DNA, 75 bp, synthetic construct
  source 1..75: mol_type = other DNA
ctggaaagtatgccaagcgagctgcaacaggtgaatgatggcgtggaacgccaggtgaatattgtcatcaacaac

SEQ ID NO: 81799 - DNA, 75 bp, synthetic construct
  source 1..75: mol_type = other DNA
cggcgcatcgaaagccgcacagacgctcagtgactactacatcaaacgtgccgaacagtatcacccggtgatacc

SEQ ID NO: 81800 - DNA, 75 bp, synthetic construct
  source 1..75: mol_type = other DNA
agtatgaggaaatccgtcgtgagctggatgttctgaacaaacagcgtggtgatgaccagcgtcgtattgaaaagc

SEQ ID NO: 81801 - DNA, 75 bp, synthetic construct
  source 1..75: mol_type = other DNA
agtatgaggaaatccgtcgtgagctggatgtcctgaacaaacagcgcggtgatgaccagcgtcgtattgaaaagc

SEQ ID NO: 81802 - DNA, 75 bp, synthetic construct
  source 1..75: mol_type = other DNA
cgatgagtcctggctggcgcgacatgctgcgatgaaacggtgtccgcgcaagggggccacggctgccagcgggta

SEQ ID NO: 81803 - DNA, 75 bp, synthetic construct
  source 1..75: mol_type = other DNA
attgatgttagtcctgataataatcattccgttggattgcgccttcgtgatgatttgaattttgcccgtgaacat

SEQ ID NO: 81804 - DNA, 75 bp, synthetic construct
  source 1..75: mol_type = other DNA
gctgaatccgtgattttgccgctggaacgcgctgtcaggctgaatatggcgacggatgaggaacgcagccgactg

SEQ ID NO: 81805 - DNA, 75 bp, synthetic construct
  source 1..75: mol_type = other DNA
cttgcgtcaatgtcggctgcgtgccgtccaagatcatgatccgcgctgcccatatcgcccatttgcgccgtgaaa

SEQ ID NO: 81806 - DNA, 75 bp, synthetic construct
  source 1..75: mol_type = other DNA
ccggcaatccaaaaaccgttgagcaatatcagctaacaaaaaattttaatgttgcctggctgtggtcagaagacg

SEQ ID NO: 81807 - DNA, 75 bp, synthetic construct
  source 1..75: mol_type = other DNA
ccaatcgtcgggccgatgattccggtaagtggatgtttaaggacggagctgtggttaaacggatttatacggcag

SEQ ID NO: 81808 - DNA, 75 bp, synthetic construct
  source 1..75: mol_type = other DNA
aaaatgttctggataataaagttgcattaaatatacatctttcagtaactagttgtatcaaattatttttccgtc

SEQ ID NO: 81809 - DNA, 75 bp, synthetic construct
  source 1..75: mol_type = other DNA
atgatgcacttaaagaacataaaagcgggtaatgctaaaacactggaacagtatgagttaacaaagaaacacgga

SEQ ID NO: 81810 - DNA, 75 bp, synthetic construct
  source 1..75: mol_type = other DNA
agataccctgacaggtggatttgatactgaagagctggaaacgtggcgcgcccgcgtcattgagcggtattactg

SEQ ID NO: 81811 - DNA, 75 bp, synthetic construct
  source 1..75: mol_type = other DNA
aaaatggtggtgctggagctgggcggactggaagaccgtccgtcactgctggttgcggtgatgttctccctgatt

SEQ ID NO: 81812 - DNA, 75 bp, synthetic construct
  source 1..75: mol_type = other DNA
aggctgccatagtccgggtcaccattggcgaatacggtgcaacggggtttattaatggcacggtctgtacctgta

SEQ ID NO: 81813 - DNA, 75 bp, synthetic construct
  source 1..75: mol_type = other DNA
atgcattcggaaaatattgcagcttacatcgggctggatgtacataaagaaacgttggcggttgctattgctgca

SEQ ID NO: 81814 - DNA, 75 bp, synthetic construct
  source 1..75: mol_type = other DNA
gttgcaacctaccgtaacaatggcttctttggtcaggtcgatggcctgaactttgctctgcaatatcagggtaat

SEQ ID NO: 81815 - DNA, 75 bp, synthetic construct
  source 1..75: mol_type = other DNA
gacgcggcgcagttcggctcgcaggtttccgggttcagtatcccgcaggcactggatgcgatttatgaccacggc

SEQ ID NO: 81816 - DNA, 75 bp, synthetic construct
  source 1..75: mol_type = other DNA
acggtgatggctatgcgttgtctgtagactacaacatcgaaggttttggttttgtaggtgcatatagcaaatctg

SEQ ID NO: 81817 - DNA, 75 bp, synthetic construct
  source 1..75: mol_type = other DNA
tatgtcagcgtttgttgattataaaatcaaccaactggatagcgataacaaattgaatattaataatgatgatat

SEQ ID NO: 81818 - DNA, 75 bp, synthetic construct
  source 1..75: mol_type = other DNA
cgggagtctttaaaggtgggtaaaattggtgctgttaataaaaacagtaccgaaaatggttatgtttcagcacaa

SEQ ID NO: 81819 - DNA, 75 bp, synthetic construct
  source 1..75: mol_type = other DNA
gttggctcgtaaaacaatctgcttctcacgctcagttgagatccacgaaaaagtgatcggagcgtttatcgaaaa

SEQ ID NO: 81820 - DNA, 75 bp, synthetic construct
  source 1..75: mol_type = other DNA
gcggtggctcgtgagttgactggatttatgtgggatattgcacttgctgcccaatcaccattcagtcagcagaag

SEQ ID NO: 81821 - DNA, 75 bp, synthetic construct
  source 1..75: mol_type = other DNA
tcgagactatcgagatcgaacgcggcccgcgcccggtgcgtaccgttaagtcggcggtgattggtcttgtaggaa

SEQ ID NO: 81822 - DNA, 75 bp, synthetic construct
  source 1..75: mol_type = other DNA
atgaagctgataacaggtttactttttttactggttccggggctggttatggcgaagggcgtcagtctggagctc

SEQ ID NO: 81823 - DNA, 75 bp, synthetic construct
  source 1..75: mol_type = other DNA
gaccgcgcgcaagaaatattttacaacatcggcggagaagcaaagtgctaaagccgccagggagaaaaagcagga

SEQ ID NO: 81824 - DNA, 75 bp, synthetic construct
  source 1..75: mol_type = other DNA
cttttctgggactggtgccaggtgaatattccagtggaaacagtattcgtcccagaggaataacaaaagttggaa

SEQ ID NO: 81825 - DNA, 75 bp, synthetic construct
  source 1..75: mol_type = other DNA
cagatgtggagagcacagaatctactgaggggtcattcccaactgttggggttgatactggcgatacgattacag

SEQ ID NO: 81826 - DNA, 75 bp, synthetic construct
  source 1..75: mol_type = other DNA
cgctggcggcttccgcccggtagccaggaacgccgttcccgcatgttaatcctgcgtggtcaggtcgcgctagcg

SEQ ID NO: 81827 - DNA, 75 bp, synthetic construct
  source 1..75: mol_type = other DNA
gcctgggcttactgctggtattaatgctgaattcaggtatgcggtttgtgctgcctcttctggcgccgctgttgt

SEQ ID NO: 81828 - DNA, 75 bp, synthetic construct
  source 1..75: mol_type = other DNA
ttccagattaattgcaaatatgataaccatatcaggaagttctggtgcgccgggcatttacatagcagatcaagg

SEQ ID NO: 81829 - DNA, 75 bp, synthetic construct
  source 1..75: mol_type = other DNA
gttcagtgggagcagaaattcgcccgtcacgtaaatcacgtcagggcgcaggttaaaccagtcagcaagggggta

SEQ ID NO: 81830 - DNA, 75 bp, synthetic construct
  source 1..75: mol_type = other DNA
gataaacaaccatgctgagaccattggcaacaatcagatgattgcggttaccaacaatcagatacagacggtggg

SEQ ID NO: 81831 - DNA, 75 bp, synthetic construct
  source 1..75: mol_type = other DNA
gcttcgacaggttcagaagaatatttatctgtattatgttgtcatcagcatggtccggagtgatgtggtttttta

SEQ ID NO: 81832 - DNA, 75 bp, synthetic construct
  source 1..75: mol_type = other DNA
gattgagatatgttttttccgggcatgtaaaaagagttaagttcattgatgatgtgctttttaaagttttgttta

SEQ ID NO: 81833 - DNA, 75 bp, synthetic construct
  source 1..75: mol_type = other DNA
taaccggagaacaacaaggatgtatttcctctcgttgtggaacgagcgcatcaataggtaatcgctggcagattg

SEQ ID NO: 81834 - DNA, 75 bp, synthetic construct
  source 1..75: mol_type = other DNA
gccatgacttataccaaaagcaaaacatttaaaaccgaaactggtgcgcgccgatggttggagaagcacacagta

SEQ ID NO: 81835 - DNA, 75 bp, synthetic construct
  source 1..75: mol_type = other DNA
tttaccgcgatgacgtataccagaagcaaaacgtttaaaactgaagctggcgcgcgtcgctggttagccagaaac

SEQ ID NO: 81836 - DNA, 75 bp, synthetic construct
  source 1..75: mol_type = other DNA
ggagacttgattttgtaggtcaaaaaagcatcgcaaagatgtatgctacacctgacggaggggttgcagccacat

SEQ ID NO: 81837 - DNA, 75 bp, synthetic construct
  source 1..75: mol_type = other DNA
acattgacaatggcagtataccgatatttgtattacgcccttctaatcccgatggggagatggctgtttacacat

SEQ ID NO: 81838 - DNA, 75 bp, synthetic construct
  source 1..75: mol_type = other DNA
attaatgaagtcaatattgccaatcgtattgttatgcatgattggttttttttaatattggcaagaacatttggc

SEQ ID NO: 81839 - DNA, 75 bp, synthetic construct
  source 1..75: mol_type = other DNA
cagcatcagtattgagggcagggatatcactactgtcctggataatcgcctgatgagtctgacgctgacggacaa

SEQ ID NO: 81840 - DNA, 75 bp, synthetic construct
  source 1..75: mol_type = other DNA
tgcacaatgcaatcttcgttgccccaacgctttatgcatatgacttttatgccgataaaactgtcgtagaaattg

SEQ ID NO: 81841 - DNA, 75 bp, synthetic construct
  source 1..75: mol_type = other DNA
cccccaaaggcgcgctgcccggcggcatggggttggcgttcgactggtcgctgctggccggatatcgcggtgcct

SEQ ID NO: 81842 - DNA, 75 bp, synthetic construct
  source 1..75: mol_type = other DNA
tggcgaaacggtgttaagcacgggaattaccgggtttggcattcgtattgaaaatgcagcagataactctctgtt

SEQ ID NO: 81843 - DNA, 75 bp, synthetic construct
  source 1..75: mol_type = other DNA
tggcgcgggcatgtgcattgttgctggatgataatacagatgtcccagatctcaggcaggttatcttcaagtgcg

SEQ ID NO: 81844 - DNA, 75 bp, synthetic construct
  source 1..75: mol_type = other DNA
tcggaaagccagacttcttgcagatgctgaatccgtgattttgccgctggagcgcgctgtcaggctgaatatggc

SEQ ID NO: 81845 - DNA, 75 bp, synthetic construct
  source 1..75: mol_type = other DNA
cagcagaagcacagcgccagtcactgattgatgcagcaatggcttccattagtctgattcagctgaaattacagg

SEQ ID NO: 81846 - DNA, 75 bp, synthetic construct
  source 1..75: mol_type = other DNA
ggtcagccggaactcgcactgaacgatctcacgcgctcaatcaatattgcgccttctgccaacgcttacgttgcg

SEQ ID NO: 81847 - DNA, 75 bp, synthetic construct
  source 1..75: mol_type = other DNA
cgggtaatccaaaaacggttgaacaatatcaattgacaaagggttttgatgttgtctggtttttttcagaagatg

SEQ ID NO: 81848 - DNA, 75 bp, synthetic construct
  source 1..75: mol_type = other DNA
atgaacatgcgtaatattaatgttattacagccctttctgtgccgggtaaaaccttatcagatgattttatacat

SEQ ID NO: 81849 - DNA, 75 bp, synthetic construct
  source 1..75: mol_type = other DNA
gaaattatccactaaaaactcttttgagagcgttagcagagaatggcatgcagcaaaagcagatcgttggacctt

SEQ ID NO: 81850 - DNA, 75 bp, synthetic construct
  source 1..75: mol_type = other DNA
cagctataggcgaagccgtcacggccgcattccgcatggagggcatcgaggtgagggaacacacccaggccagcc

SEQ ID NO: 81851 - DNA, 75 bp, synthetic construct
  source 1..75: mol_type = other DNA
agttttgaactgccgtttcgtctgctgttaacccggacaccgcagatgattgacagcgtgcggcgggaatggcag

SEQ ID NO: 81852 - DNA, 75 bp, synthetic construct
  source 1..75: mol_type = other DNA
gctgttctcagtaactgcaccacaagaatcgtacttcctgcaccgaaggaattcagttctgaatcattgccgcac

SEQ ID NO: 81853 - DNA, 75 bp, synthetic construct
  source 1..75: mol_type = other DNA
agaagaggagaggtcagtgcgcatctcatttattttattcatccacaacttgcctttgctcgtccatcagaagag

SEQ ID NO: 81854 - DNA, 75 bp, synthetic construct
  source 1..75: mol_type = other DNA
atgtcatttggcagctacgatttagtaagcctcgcagaagcacgtgaaaagcgtgatatcgcccgtaagcaggtt

SEQ ID NO: 81855 - DNA, 75 bp, synthetic construct
  source 1..75: mol_type = other DNA
gagtcatgggaacgctacagcgttctggtcagccgtgtggatcctgcaaatcctgaatggccggaaataccgcaa

SEQ ID NO: 81856 - DNA, 75 bp, synthetic construct
  source 1..75: mol_type = other DNA
aatgttgattatgtgaccagttttgaactgccgtttcgtctgctgttaacccggacaccgcagatgattgacact

SEQ ID NO: 81857 - DNA, 75 bp, synthetic construct
  source 1..75: mol_type = other DNA
ccacctaccgtaaccagctggcgtttatcgatatcttctttaaggggatgaataacaccaactacaacatggcgg

SEQ ID NO: 81858 - DNA, 75 bp, synthetic construct
  source 1..75: mol_type = other DNA
ggatgtacccgtgcacagaatgaagatgtagatgagttgtgtaagaaagtgacaagttggatgtattcgcatcct

SEQ ID NO: 81859 - DNA, 75 bp, synthetic construct
  source 1..75: mol_type = other DNA
tctacgtcttcgcgctgattgtgattatgtccgtgacgccgtggagttcggtagtcccggagaaaagcccgttcg

SEQ ID NO: 81860 - DNA, 75 bp, synthetic construct
  source 1..75: mol_type = other DNA
cgggtaatccaaaaacggttgaacaatatcaattgacaaaggactttgatgttgtctggttttttacagaagatg

SEQ ID NO: 81861 - DNA, 75 bp, synthetic construct
  source 1..75: mol_type = other DNA
cttccggtggcgattgatggtattgccggtgttgagaacgatgaaaactggctgaccacaccgggtgccaacgaa

SEQ ID NO: 81862 - DNA, 75 bp, synthetic construct
  source 1..75: mol_type = other DNA
attatcttcaaatataggatggaaaaaaggggccgaaaacgcccttaaaaataaaatccattctcattcatttgt

SEQ ID NO: 81863 - DNA, 75 bp, synthetic construct
  source 1..75: mol_type = other DNA
agtcagtgaaacggcgagtggtatgccggacccgacgctgccggaggtgtccggaggtcatggcagggcagacga

SEQ ID NO: 81864 - DNA, 75 bp, synthetic construct
  source 1..75: mol_type = other DNA
cacttgggatgacggtgatggcgaagacctgtatctcaaagaggtaacccactggatgcctctaccagaaccgcc

SEQ ID NO: 81865 - DNA, 75 bp, synthetic construct
  source 1..75: mol_type = other DNA
gaagcaggggagagaattattgcctgtcttgagccacgtatagatgagcttgagcgcgagctggaatcacttatc

SEQ ID NO: 81866 - DNA, 75 bp, synthetic construct
  source 1..75: mol_type = other DNA
atattgccatgcatcagtttttactgaatgaaggtgcagatccctcgcgttttctgtttgttctcagccatgccg

SEQ ID NO: 81867 - DNA, 75 bp, synthetic construct
  source 1..75: mol_type = other DNA
ctatcagaacggactggggttccctgcccgaagaaatctcttcaacggaccattgatagaagtttggctgataag

SEQ ID NO: 81868 - DNA, 75 bp, synthetic construct
  source 1..75: mol_type = other DNA
atggaagcctgctcatccagtcattattttgcgcgattattcacccgctatggtcatgaggtaaaactcatacct

SEQ ID NO: 81869 - DNA, 75 bp, synthetic construct
  source 1..75: mol_type = other DNA
agagcaacagcatgccgggatgagttttgtcagcacggatggcgttgactggtatgtcagtgcagacggcaatca

SEQ ID NO: 81870 - DNA, 75 bp, synthetic construct
  source 1..75: mol_type = other DNA
cgcggtgtggaagaaagaagatggcgcggtggttatcagcgcattgccgcatcaggtttcaggtgcgcgcgtact

SEQ ID NO: 81871 - DNA, 75 bp, synthetic construct
  source 1..75: mol_type = other DNA
tactgacagcaccgaagtggcgaaaaataacgcgctgactgatgatgatttttctgcgggaaagtcttcgacggc

SEQ ID NO: 81872 - DNA, 75 bp, synthetic construct
  source 1..75: mol_type = other DNA
aatgggattcagtgatactcatgttcgttgctatgtgcttcatgacgatccggctggtcagcacatacacattat

SEQ ID NO: 81873 - DNA, 75 bp, synthetic construct
  source 1..75: mol_type = other DNA
ccggatgaagagtatgtatgcggagcggataccgctgaggggctggagcacggagaccgctcatcgctggatatc

SEQ ID NO: 81874 - DNA, 75 bp, synthetic construct
  source 1..75: mol_type = other DNA
tgacccgctgcgctataacctcgccgctatgatcgcccgctttaacgagaccggccgcagccaggtgctggcgaa

SEQ ID NO: 81875 - DNA, 75 bp, synthetic construct
  source 1..75: mol_type = other DNA
ccattgctgacgtatcagccggccgcctgtttgtgctggtcaataaatttgatgagaaagaccgcaatggcgatg

SEQ ID NO: 81876 - DNA, 75 bp, synthetic construct
  source 1..75: mol_type = other DNA
agctgttgagcagcctggaacagattgtttttaaagatgaaacgcagaaaattaccctgacgcacagaacaacgt

SEQ ID NO: 81877 - DNA, 75 bp, synthetic construct
  source 1..75: mol_type = other DNA
cctgtttgtgctggtcaataaatttgatgagaaagaccgcaatggcgatggggcagatgccgtacgccagaaagt

SEQ ID NO: 81878 - DNA, 75 bp, synthetic construct
  source 1..75: mol_type = other DNA
acgttacaatacggaatataagtccaacaatcaggtagcctctttttcccagcccgactgggaaagtcgtaaatt

SEQ ID NO: 81879 - DNA, 75 bp, synthetic construct
  source 1..75: mol_type = other DNA
atgcagaatgcagaaaatatcagtgaatacctgttgttacgccatcaggggctacagcaaagcattcagtcactg

SEQ ID NO: 81880 - DNA, 75 bp, synthetic construct
  source 1..75: mol_type = other DNA
ttgagcaggaagtgcttaccacctggcccacagaggcaattgctcaggctgaaaatgtggtaatgcgtctgtccg

SEQ ID NO: 81881 - DNA, 75 bp, synthetic construct
  source 1..75: mol_type = other DNA
cctgtttgtgctggtcaataaatttgatgaaaaagaccgcaatggcgatggagcagatgccgtacgccagaaagt

SEQ ID NO: 81882 - DNA, 75 bp, synthetic construct
  source 1..75: mol_type = other DNA
aattcttcgcgcttatgtgctttgcactaaagaagaaataccaaaggtattaggttattacactttgtcaggcag

SEQ ID NO: 81883 - DNA, 75 bp, synthetic construct
  source 1..75: mol_type = other DNA
aaaatcttatcggcacacggattatcagtgagctggagagagtacacggcctcaccgaaactacgggtgtaaccg

SEQ ID NO: 81884 - DNA, 75 bp, synthetic construct
  source 1..75: mol_type = other DNA
aacagccttacgacaagatgaccgaagtcattatttttgcgggtagtgatgcctgggcacatgcgaaacagtggc

SEQ ID NO: 81885 - DNA, 75 bp, synthetic construct
  source 1..75: mol_type = other DNA
ctgtcattattgatcttaatggcaatctttcccggcgttcccgccagtattcgaaccagataaacgccctgtccc

SEQ ID NO: 81886 - DNA, 75 bp, synthetic construct
  source 1..75: mol_type = other DNA
cagcatgatcaggaataccggacactttatcgtcagctgctaccggaactggatctgattatctggatcctgcgg

SEQ ID NO: 81887 - DNA, 75 bp, synthetic construct
  source 1..75: mol_type = other DNA
tcgcgcaatctacgccggaacgcgaactgacagaaacccgggagaaattagcgagcattgcgccctatttaatgg

SEQ ID NO: 81888 - DNA, 75 bp, synthetic construct
  source 1..75: mol_type = other DNA
acaccacgatgggctttatgctggaagccattcccatcaatggtgcgaatgagtccattgtggaggcgctcgatc

SEQ ID NO: 81889 - DNA, 75 bp, synthetic construct
  source 1..75: mol_type = other DNA
atgggctccctatttaacatatacaaagatattttcccaacactcggcatgtattcgggactaaaagcttgccat

SEQ ID NO: 81890 - DNA, 75 bp, synthetic construct
  source 1..75: mol_type = other DNA
catctggaactacgcgggaaataccctggttaatcagcattctgacatcaacaaaacgcatgaaattctgcagga

SEQ ID NO: 81891 - DNA, 75 bp, synthetic construct
  source 1..75: mol_type = other DNA
aaccattagtaagaaataataagtttattgagaaggttgtagatgagcttgaaggtgagacctacacaaaaagtg

SEQ ID NO: 81892 - DNA, 75 bp, synthetic construct
  source 1..75: mol_type = other DNA
ggggtatatgcaggcgtttgttaagtacggcctgcgtaacctgaaagaagggccgaagttccgtaagagcattga

SEQ ID NO: 81893 - DNA, 75 bp, synthetic construct
  source 1..75: mol_type = other DNA
acgagatttatatggatgggcaaactaaagcgctggagaataaaacgcaggagtataaaaaacagctcgaagaac

SEQ ID NO: 81894 - DNA, 75 bp, synthetic construct
  source 1..75: mol_type = other DNA
ggcaaatggtttaaccacttcttcgcgctctattggtacaactgtgctgaataatgacgcagcgaatcataatct

SEQ ID NO: 81895 - DNA, 75 bp, synthetic construct
  source 1..75: mol_type = other DNA
cgctgctgggcgatggtcaacagcgtagcgaagtcgaaatgctcggttatctgttcttcgtcggtaatcgcaaag

SEQ ID NO: 81896 - DNA, 75 bp, synthetic construct
  source 1..75: mol_type = other DNA
tggtcccggcgttattagttgctggcgcagcaaatgcggctgaaatctataataaagatggtaataaactggatt

SEQ ID NO: 81897 - DNA, 75 bp, synthetic construct
  source 1..75: mol_type = other DNA
agcatatcctttctgtcaaagaagcgattgctgaactggaggccgtttgcctgccgggcagcgtggtggttgaag

SEQ ID NO: 81898 - DNA, 75 bp, synthetic construct
  source 1..75: mol_type = other DNA
cgtggctggatttgcccctatatttccagacatctgttatcacttaacccattacaagcccgctgccgcagatat

SEQ ID NO: 81899 - DNA, 75 bp, synthetic construct
  source 1..75: mol_type = other DNA
tatgctggtttgagttacaaagattttggttcattcgactatggtcgtaatgtcggtgtcgcgtatgatgcagaa

SEQ ID NO: 81900 - DNA, 75 bp, synthetic construct
  source 1..75: mol_type = other DNA
gtaacgctatcaggctattagccagcggcgctatcaaagtcaaaccgatgatcacgcatcgtatcggcctgtcgc

SEQ ID NO: 81901 - DNA, 75 bp, synthetic construct
  source 1..75: mol_type = other DNA
aaggcggtgtatctgaccatatcggacattaacacggccacaaaaaaccgcgcacaggtttataagtgcggggtt

SEQ ID NO: 81902 - DNA, 75 bp, synthetic construct
  source 1..75: mol_type = other DNA
tcgccattctgtgtctttctacgggagctcggtggggtgaggcggcggaattacgcggggagcatatcgtcggta

SEQ ID NO: 81903 - DNA, 75 bp, synthetic construct
  source 1..75: mol_type = other DNA
tttcagtaccaccattaacaatgcgctggcactgaaagcgccgttgtcgagtccggcactcaccggaacgccaac

SEQ ID NO: 81904 - DNA, 75 bp, synthetic construct
  source 1..75: mol_type = other DNA
gctgtgcgatgttccgcaacagcaaccgtcgggtgacctttcgcccgcagcacggacaacaagttttagtgcgcg

SEQ ID NO: 81905 - DNA, 75 bp, synthetic construct
  source 1..75: mol_type = other DNA
gttaaagaactgtcagtaaaggttgcagcgtttgttggctcaggtatttctgttcagccgctggctcgtgtgtaa

SEQ ID NO: 81906 - DNA, 75 bp, synthetic construct
  source 1..75: mol_type = other DNA
atgcgtaactttgatttatccccgctttaccgttctgctattggatttgaccgtttgtttaaccacttagaaaac

SEQ ID NO: 81907 - DNA, 75 bp, synthetic construct
  source 1..75: mol_type = other DNA
tttccggcacgcaggaactggtcagcacgctggcctgttttgccagtgccggagaaattaaagcgagaactccgc

SEQ ID NO: 81908 - DNA, 75 bp, synthetic construct
  source 1..75: mol_type = other DNA
aggctcaggagtttgagaagtatgtgttacagaactttcatgacaagccatggcaggctaagccagctgatcagc

SEQ ID NO: 81909 - DNA, 75 bp, synthetic construct
  source 1..75: mol_type = other DNA
ggtgagacactgaccactcgcctgggcgatggcgtagtgatcagtgaagtgagtgctgtgacgaaaagccgcaag

SEQ ID NO: 81910 - DNA, 75 bp, synthetic construct
  source 1..75: mol_type = other DNA
ccaaaagcgcatccgttgtcgctgggtatgctggggatgcacggcgtgcgcagcaccaactatattttgcaggag

SEQ ID NO: 81911 - DNA, 75 bp, synthetic construct
  source 1..75: mol_type = other DNA
tcagcatcagatgtggacggcgcaggcttatccgctcaatcgcccacgccagtggctgacctccggtgggctggg

SEQ ID NO: 81912 - DNA, 75 bp, synthetic construct
  source 1..75: mol_type = other DNA
tatgaagatgtcaggcggtgaaacggatacgcgcaaagaagttgtctataccgattgggagcaggtggcgaattt

SEQ ID NO: 81913 - DNA, 75 bp, synthetic construct
  source 1..75: mol_type = other DNA
ccagctataactatgctgatccaactaaagtcaccccggctgatatcatcggtgccgttaacgctgcgggcaacc

SEQ ID NO: 81914 - DNA, 75 bp, synthetic construct
  source 1..75: mol_type = other DNA
ggtcagccttatgtggaaggtcaggactactcgcttgatgcgcagaccggggtgattactaaccttggtaaaagc

SEQ ID NO: 81915 - DNA, 75 bp, synthetic construct
  source 1..75: mol_type = other DNA
gggttatatcaatgactttggtggattaagtttttatgaaataaactgcccaacggtaaataattcttgtaatgt

SEQ ID NO: 81916 - DNA, 75 bp, synthetic construct
  source 1..75: mol_type = other DNA
gcttatctgcctgaacccgaagcccccggcgcgcggaaaaagaaaaaagccagagtacaggaggacccgttctga

SEQ ID NO: 81917 - DNA, 75 bp, synthetic construct
  source 1..75: mol_type = other DNA
atgaacagggcgcggggtttatcgctcagggaatggcgcgcaccgacggtaaaccggcggtctgtatggcctgta

SEQ ID NO: 81918 - DNA, 75 bp, synthetic construct
  source 1..75: mol_type = other DNA
ttgttattacgtctatggttcttaactttaacgcagcagcgaaagaaaaaatatcactgcttgcaccctatgatg

SEQ ID NO: 81919 - DNA, 75 bp, synthetic construct
  source 1..75: mol_type = other DNA
gcatttctgaatcagtgttcaacggctgatccttctgcgatttcaaaaatcatgagtaagttcggcaaggttaaa

SEQ ID NO: 81920 - DNA, 75 bp, synthetic construct
  source 1..75: mol_type = other DNA
ctgcgcattcagggagaaagttgaacaactgcgtaacacgctgattcagagctctgaagatcataaacgcgatca

SEQ ID NO: 81921 - DNA, 75 bp, synthetic construct
  source 1..75: mol_type = other DNA
gaatcaacgataacctgctcttcaactggcgccatcaataccggaaaggtggcctgctgccttccggaaaaaata

SEQ ID NO: 81922 - DNA, 75 bp, synthetic construct
  source 1..75: mol_type = other DNA
tactggatattctggcggatgatgtctggcttaaaaatgaataccacggggaagacgaaatctttaccggactgg

SEQ ID NO: 81923 - DNA, 75 bp, synthetic construct
  source 1..75: mol_type = other DNA
gctgacgccggaaaagtcctgacgcgggaaatgcagtttgtcatgcggcttgcccgggagttccggcgggcagac

SEQ ID NO: 81924 - DNA, 75 bp, synthetic construct
  source 1..75: mol_type = other DNA
cttggtttgggagaaggctctgcattaccggttggtgtgcctgttccgtggccttcagccactccgccaacaggc

SEQ ID NO: 81925 - DNA, 75 bp, synthetic construct
  source 1..75: mol_type = other DNA
gacattcagtctcaacaacctcggacgctttgccgataagctgccgtcagaaccacgggaaaatatcgtttatca

SEQ ID NO: 81926 - DNA, 75 bp, synthetic construct
  source 1..75: mol_type = other DNA
gcagcagaattattttcagggatacggcacatcgctattaatattttgacgaatgataaggtattcaaggcaggg

SEQ ID NO: 81927 - DNA, 75 bp, synthetic construct
  source 1..75: mol_type = other DNA
cgattacgaagcagagctaggtatggagagaggtggattcagtgatgcacttaacgaaatcaaaaccccggccac

SEQ ID NO: 81928 - DNA, 75 bp, synthetic construct
  source 1..75: mol_type = other DNA
ggcacattgctattaatattttgacgaatgataaggtattcaaggcagggttaagacgtaagatgcgaaaagcag

SEQ ID NO: 81929 - DNA, 75 bp, synthetic construct
  source 1..75: mol_type = other DNA
gatggagcgacgcaaacggggtaaaagtgacacaattgatgctgaatgtgccgctcatgcagcattctcaggcat

SEQ ID NO: 81930 - DNA, 75 bp, synthetic construct
  source 1..75: mol_type = other DNA
cctgctgaataacggtgaaaccgttctgcgggacgcctctggtgagaaacgaatcaaaggcgagaaagacggacg

SEQ ID NO: 81931 - DNA, 75 bp, synthetic construct
  source 1..75: mol_type = other DNA
gttcactccggggattcagcaggcgaaagtagtttcaacggcagtctgagtgctcaaaacagcaaaataactgtt

SEQ ID NO: 81932 - DNA, 75 bp, synthetic construct
  source 1..75: mol_type = other DNA
cgatccccgtcgttcaggtaacgcacgatctccaggatgttcctgctgatagttctgttctggatatggcgcagt

SEQ ID NO: 81933 - DNA, 75 bp, synthetic construct
  source 1..75: mol_type = other DNA
cggaagagtttaacgcctggatggaggaaaataatcttcaatacgtcctctgcttcagagatgaaggatgtgctg

SEQ ID NO: 81934 - DNA, 75 bp, synthetic construct
  source 1..75: mol_type = other DNA
ggcccaagagaagaagggcatgttgacggccctgaagagttccatctcgtcattgttgacaatggacgttcagaa

SEQ ID NO: 81935 - DNA, 75 bp, synthetic construct
  source 1..75: mol_type = other DNA
atactgaagctgatttctcaggcatctcaggcattgatagatccatctcccaaggaaaagtcagtggtttcccca

SEQ ID NO: 81936 - DNA, 75 bp, synthetic construct
  source 1..75: mol_type = other DNA
ggcggcgaactcggcgaaagcatcggcagcaagccagacggcagcaaaagcaagtgaagatgctgccagagaata

SEQ ID NO: 81937 - DNA, 75 bp, synthetic construct
  source 1..75: mol_type = other DNA
gataaaagaatggactgaagccagagacctgccatcacctgatggagaaagcttccgtagttggttcaagcgaca

SEQ ID NO: 81938 - DNA, 75 bp, synthetic construct
  source 1..75: mol_type = other DNA
accagatgcttcgtgctgcacagaacaaagcagtaatagccagatttattggtgattcaaaaatgtggcttgaag

SEQ ID NO: 81939 - DNA, 75 bp, synthetic construct
  source 1..75: mol_type = other DNA
atcaatgacaatatcaaggatttgaaatcttggcttaggaatgtaggacaaatcgccacatcaacacgagataag

SEQ ID NO: 81940 - DNA, 75 bp, synthetic construct
  source 1..75: mol_type = other DNA
cagcaatttttgtccgttcaggccttgatgtaatggttaccgaagagcatttatcagctgatgaagctcgccaac

SEQ ID NO: 81941 - DNA, 75 bp, synthetic construct
  source 1..75: mol_type = other DNA
attgcgttaggaaatacggctcaagcttacgaaattatgagcatcgccctcggtgatcatgctaatgcctcaaaa

SEQ ID NO: 81942 - DNA, 75 bp, synthetic construct
  source 1..75: mol_type = other DNA
tgggcacagatcacaccggctgaactgaggaaaatgtcgggcatccccaacaccgcatttaaccgtagcatcagg

SEQ ID NO: 81943 - DNA, 75 bp, synthetic construct
  source 1..75: mol_type = other DNA
gacagcagaagagcttattgcgctgagtgaagcggcagagcaggcgatgttcaccaaagggatggaaatccacat

SEQ ID NO: 81944 - DNA, 75 bp, synthetic construct
  source 1..75: mol_type = other DNA
ggcgtttaacggcggatcaactcaatagtgcaaccgcctgtatttttgcggctgaagtcgccatcaaggagagtg

SEQ ID NO: 81945 - DNA, 75 bp, synthetic construct
  source 1..75: mol_type = other DNA
ctgaaatctgtcgtcaagtttgcgctggcaactggtctgagaaagtcgaacatcataaatctggaatggcaacaa

SEQ ID NO: 81946 - DNA, 75 bp, synthetic construct
  source 1..75: mol_type = other DNA
ggtgatcccggaactgagcggcaaactgaaaggtcatgcgcaacgcgtgccggtgaaaacaggttcggtcactga

SEQ ID NO: 81947 - DNA, 75 bp, synthetic construct
  source 1..75: mol_type = other DNA
agagcgcagcggcagcaaagaaatcagaaacagcagcggcatcgtccaggaacgcggcgaaaacatcagagacga

SEQ ID NO: 81948 - DNA, 75 bp, synthetic construct
  source 1..75: mol_type = other DNA
gtctgtctgtagtggtaaatggaaatatcggtggtgcatcggtttcgccttataatgatacaagatatcttaatg

SEQ ID NO: 81949 - DNA, 75 bp, synthetic construct
  source 1..75: mol_type = other DNA
ttggcgtttccggtggtggaagtttttcactgtcaacggaggctgccatcatggctacgatcccagccctcactc

SEQ ID NO: 81950 - DNA, 75 bp, synthetic construct
  source 1..75: mol_type = other DNA
ctggaaagcgatgaccggatgctgccacccagactgcgaggctatgcaccgcagattaccgggattgcggagact

SEQ ID NO: 81951 - DNA, 75 bp, synthetic construct
  source 1..75: mol_type = other DNA
ctgtatcaagtctatagtcagcctggccatgcatattgggtggttgagtacgagggtgaagtggtcggcggcggc

SEQ ID NO: 81952 - DNA, 75 bp, synthetic construct
  source 1..75: mol_type = other DNA
gtttgatatcgatgacacggtacttttttccagtccgggcttctggcgcggcaaaaaaaccttctcgccagaaag

SEQ ID NO: 81953 - DNA, 75 bp, synthetic construct
  source 1..75: mol_type = other DNA
gtttccgctgacgtaacccagtccgtggcccgtataccgggttatgacacaaaacagggaaaatcctggcgtctg

SEQ ID NO: 81954 - DNA, 75 bp, synthetic construct
  source 1..75: mol_type = other DNA
gtgatgttgctgcactggatgaaaaatacacgaaggagttagctaatgcgaaagctgaaaatgatgctctgcgtg

SEQ ID NO: 81955 - DNA, 75 bp, synthetic construct
  source 1..75: mol_type = other DNA
agccatcagacttactgggaccgccggacatctgactattacacgctgtcggtgaaccgctacttcgatgcgttc

SEQ ID NO: 81956 - DNA, 75 bp, synthetic construct
  source 1..75: mol_type = other DNA
cgaaacgttctcggtatcagagatggaatcatcagtgatcaagccgcattaaggacgttgcaggaatacatcagg

SEQ ID NO: 81957 - DNA, 75 bp, synthetic construct
  source 1..75: mol_type = other DNA
ccggtacggccagctacagcggcagcatgagcaacgaccgttacaccaatacggtgggttacagcgacacgctga

SEQ ID NO: 81958 - DNA, 75 bp, synthetic construct
  source 1..75: mol_type = other DNA
aaagctctagagaatgttccaaatgagttgaacaagcggttcgagtatgtagatacaaatgaacagccatttact

SEQ ID NO: 81959 - DNA, 75 bp, synthetic construct
  source 1..75: mol_type = other DNA
tctgacggcagcgcagttacgacagttagcacaggttctgcgtgaacatggcgacaatgatgcagctacaagagc

SEQ ID NO: 81960 - DNA, 75 bp, synthetic construct
  source 1..75: mol_type = other DNA
atgaacaaaatttttaaagttatctggaatccagcgacgggcagttacagcgttgccagcgaaacggcgaagagc

SEQ ID NO: 81961 - DNA, 75 bp, synthetic construct
  source 1..75: mol_type = other DNA
tgcctcgctgacggcaaaaggcaccgtacaactgagcagtgccatcaacagcacgtctgaaatactggccgccac

SEQ ID NO: 81962 - DNA, 75 bp, synthetic construct
  source 1..75: mol_type = other DNA
ttacgggaagaaatcagggtagccagatgtacagtggcgcgcctcatagcggttatgggacttgccggtgttctc

SEQ ID NO: 81963 - DNA, 75 bp, synthetic construct
  source 1..75: mol_type = other DNA
caggcggcccgtcgcgcctgtttattatgcgtcctgtcgccaccacgctgctgatggtggcgatcttactcgccg

SEQ ID NO: 81964 - DNA, 75 bp, synthetic construct
  source 1..75: mol_type = other DNA
tcgtcgcacggctgcaaacacactggattttatcgattgtgttattgaagaaatgcctttcccgatacagcgctt

SEQ ID NO: 81965 - DNA, 75 bp, synthetic construct
  source 1..75: mol_type = other DNA
atgcactggagcaggcgttatgggcccgtcgaccgtccggcacggtccatcacagtgataaaggttctcagtatg

SEQ ID NO: 81966 - DNA, 75 bp, synthetic construct
  source 1..75: mol_type = other DNA
gccagcgcgatgttgctgcgctcgatgcaaaatactcgagggaattagccgatgcgagagctgaaaatgaaactc

SEQ ID NO: 81967 - DNA, 75 bp, synthetic construct
  source 1..75: mol_type = other DNA
ggtacccaaagatgaaattgccctgatccgtaacggtgaagaacgaggtgatatcgctgaagccatgtttcaggt

SEQ ID NO: 81968 - DNA, 75 bp, synthetic construct
  source 1..75: mol_type = other DNA
acagcaattgagatgtacaaaccaactgtgcgcattgtggaagttaatgtgccacgcgtcgctggcattcgcatc

SEQ ID NO: 81969 - DNA, 75 bp, synthetic construct
  source 1..75: mol_type = other DNA
aaagctgcaggtatcccggcagataaaaaagatgatattcaggcatcatttgagcgcctgaacattcataagcgg

SEQ ID NO: 81970 - DNA, 75 bp, synthetic construct
  source 1..75: mol_type = other DNA
caacctgccctttaatatgaatacattctatcaattgtggggcgtaacaagtccagatgaggcaaaagcaataat

SEQ ID NO: 81971 - DNA, 75 bp, synthetic construct
  source 1..75: mol_type = other DNA
gcgctttacctggtggggtgaagatggcaatggtgacgccttccttacggcatgggcatggtacgccgactggca

SEQ ID NO: 81972 - DNA, 75 bp, synthetic construct
  source 1..75: mol_type = other DNA
gagacacgggagtatatttctgcatcaactgaatatcttgctgtgggtgtcggtatccctgcatattcctgttta

SEQ ID NO: 81973 - DNA, 75 bp, synthetic construct
  source 1..75: mol_type = other DNA
aggcgatttcattagttggggaggacttataccaagcattgataaagggttatacggagaagcagtggggaagaa

SEQ ID NO: 81974 - DNA, 75 bp, synthetic construct
  source 1..75: mol_type = other DNA
gtatgttttgccatccgcacaggaacctttgattatgcaacccagtttcctgactcccctaacctcaaggctttt

SEQ ID NO: 81975 - DNA, 75 bp, synthetic construct
  source 1..75: mol_type = other DNA
cgttaaatccggcaagtgtgaggagcacaggcgggcggcatggcgtgcagaggatgccagacgaggacaccgccg

SEQ ID NO: 81976 - DNA, 75 bp, synthetic construct
  source 1..75: mol_type = other DNA
tatttcaccgactatgtgcgccgctacaccgacatgccgatgctggtgatgctggaagagcgcgacggttactac

SEQ ID NO: 81977 - DNA, 75 bp, synthetic construct
  source 1..75: mol_type = other DNA
atgaatatcctcctttttggcaaaacagggcaggtaggttgggaactacagcgtgctctggcacctctgggtaat

SEQ ID NO: 81978 - DNA, 75 bp, synthetic construct
  source 1..75: mol_type = other DNA
atgacagtgatgacgctcaatctcgttgaaaaacagccagcagctatgcgccggataattggcaagcatcttgcc

SEQ ID NO: 81979 - DNA, 75 bp, synthetic construct
  source 1..75: mol_type = other DNA
ccgcacaaaccgtaacgttgggagatgagacgtatcaggtgatgagcgcgtgcaaaccgcatgactgtggctcgc

SEQ ID NO: 81980 - DNA, 75 bp, synthetic construct
  source 1..75: mol_type = other DNA
ttgcattcccgccacagcttgcgttcgattcgtacaattctgaagcacgcaaggaagagccgtcagcctgatttt

SEQ ID NO: 81981 - DNA, 75 bp, synthetic construct
  source 1..75: mol_type = other DNA
cgctgaaatgggataaggacaatggtgtattcacggcagctcatggcaccgagaccaccagcaaaatcaccaacg

SEQ ID NO: 81982 - DNA, 75 bp, synthetic construct
  source 1..75: mol_type = other DNA
atacttttatgaacaccagtggttccagtactgctgtgggttatgacgctatagctgaaggccaatatagctctg

SEQ ID NO: 81983 - DNA, 75 bp, synthetic construct
  source 1..75: mol_type = other DNA
atgtgggcggtggacaaaccgctgaacccgtcgctggcgcgcgacattatcgagggcatccgcgccaaaatgcgc

SEQ ID NO: 81984 - DNA, 75 bp, synthetic construct
  source 1..75: mol_type = other DNA
cagttcccaaatgataatgaaaagcttagcgtatatttaaaaaataaaatcccctttgaaaatatcacaattgat

SEQ ID NO: 81985 - DNA, 75 bp, synthetic construct
  source 1..75: mol_type = other DNA
gcgagctataaagacaaagaactcgtccgtgctatcattaatgacaacatagttgagaagactcatgatgatata

SEQ ID NO: 81986 - DNA, 75 bp, synthetic construct
  source 1..75: mol_type = other DNA
ggctgagtataagtattatgatatgcatcaggttattagatcagctttaaatcaagtaaaattggaaataaattg

SEQ ID NO: 81987 - DNA, 75 bp, synthetic construct
  source 1..75: mol_type = other DNA
ccgggcgtagcgtgggtgcgggtgaatgaagaacttccgtggcctgaagacctggcggtgaggttgccgcaatga

SEQ ID NO: 81988 - DNA, 75 bp, synthetic construct
  source 1..75: mol_type = other DNA
atacacgaaggagttagctgatgcgaaagctgaaaatgatgctcttcggcgcaagcttgataatggtggtcgggt

SEQ ID NO: 81989 - DNA, 75 bp, synthetic construct
  source 1..75: mol_type = other DNA
cagtcagcatgaggggcaatacatcaccggcatgcgttacatcatgaaacatgccagtgccatgcgtgataaagg

SEQ ID NO: 81990 - DNA, 75 bp, synthetic construct
  source 1..75: mol_type = other DNA
tgagccgtcggtggcggcagcgaaagcggggaaactgccggaggcgtttttctggacggatgcggaaaacaatga

SEQ ID NO: 81991 - DNA, 75 bp, synthetic construct
  source 1..75: mol_type = other DNA
aaaccgcgcattctcggcgtgccaggtcacgacacgaaggcggtagctactgagttgctgagtgtggcgcaaagc

SEQ ID NO: 81992 - DNA, 75 bp, synthetic construct
  source 1..75: mol_type = other DNA
ccacctatgtgcagatgatgccgcacactactgccgttaacaccgggctgttttttggactgcgcgggcgggtga

SEQ ID NO: 81993 - DNA, 75 bp, synthetic construct
  source 1..75: mol_type = other DNA
tgctgaatcagaagctggcagattatgtcccaatgatgtcccatggtcaccaaagtgacacaagagacttattaa

SEQ ID NO: 81994 - DNA, 75 bp, synthetic construct
  source 1..75: mol_type = other DNA
ccttcggtgaatctgctccggcagagctgctgtttgaagagttcggcttcaccgttgacaacgttgttgcgaaag

SEQ ID NO: 81995 - DNA, 75 bp, synthetic construct
  source 1..75: mol_type = other DNA
gctgttcattaacgcaggcattaccatcggaactcaaggtgagcgccgacaatgtctcattaaccggtgcggtaa

SEQ ID NO: 81996 - DNA, 75 bp, synthetic construct
  source 1..75: mol_type = other DNA
ttaactactatggcaccgtaggttctaaccgcgatgagtttgttgtagtgcgtaagatgaagaacattgactggt

SEQ ID NO: 81997 - DNA, 75 bp, synthetic construct
  source 1..75: mol_type = other DNA
gcaggacccggcaaccgatgcaggtctgctgaaccagaacgacgtcaccacacttgtgcgtaaagacggcttccg

SEQ ID NO: 81998 - DNA, 75 bp, synthetic construct
  source 1..75: mol_type = other DNA
gaatgggcggcgtgactgcctttggtgaaaactggcaggacgtttctgcacgcttactggcgtatgaaaatgcgg

SEQ ID NO: 81999 - DNA, 75 bp, synthetic construct
  source 1..75: mol_type = other DNA
ccagccgatgctcaataccgcaattgatgcggcagagatgatcctgacgctggcaccggaaaccaatggtcaggt

SEQ ID NO: 82000 - DNA, 75 bp, synthetic construct
  source 1..75: mol_type = other DNA
ctcggcccaagcagcctgaaaaccggtcgctatcactttgagcagtcttccacgactactcagtcggcacgctaa

SEQ ID NO: 82001 - DNA, 75 bp, synthetic construct
  source 1..75: mol_type = other DNA
aagttccggcggtgcgtcagttatcactttacagttccagctaacattgccgctggatgtcgccgagcaggaagt

SEQ ID NO: 82002 - DNA, 75 bp, synthetic construct
  source 1..75: mol_type = other DNA
ttgtaggtctgttcttcttcggttgggatcgtctgggtaaagttcagcatatgtgtgtcacctggctggtggcgc

SEQ ID NO: 82003 - DNA, 75 bp, synthetic construct
  source 1..75: mol_type = other DNA
actctcccttgcggaaccgtgatcgccattgagaccgagcgccgtctgaaaaccagagctcgctaccagtcaatc

SEQ ID NO: 82004 - DNA, 75 bp, synthetic construct
  source 1..75: mol_type = other DNA
tttttaccgggttttgggtaaaaaattttgtgggctgttcatttaccctggacagtcagtgcggcaggttgtggc

SEQ ID NO: 82005 - DNA, 75 bp, synthetic construct
  source 1..75: mol_type = other DNA
gacatgattggtaagtttggtgcggccaaagaccagtggttcagttccttcctgctgcaggtggaaaaccattcc

SEQ ID NO: 82006 - DNA, 75 bp, synthetic construct
  source 1..75: mol_type = other DNA
cgccggtattctggagtttccgcatcatggtgggctgtggttccctgctgctactggtgatgctgattgcgcttg

SEQ ID NO: 82007 - DNA, 75 bp, synthetic construct
  source 1..75: mol_type = other DNA
gtgtgattacaatcgctggcgtcgtcacagtgcctgtggcggtctcagcccggaacaatttgaaaaccataatct

SEQ ID NO: 82008 - DNA, 75 bp, synthetic construct
  source 1..75: mol_type = other DNA
gttagagaaagagattgccgagtttttcaatcgccctaccgctatcgtttttcaaccggttataccgctaattta

SEQ ID NO: 82009 - DNA, 75 bp, synthetic construct
  source 1..75: mol_type = other DNA
tcgcctgggcgtacagacccgtgacgccagcggcaacatgcgcgacatggccgctatttttacgggtgtcggaca

SEQ ID NO: 82010 - DNA, 75 bp, synthetic construct
  source 1..75: mol_type = other DNA
cgctgtaactacatccattgcgatcgcagagttttttggcaagcaacatcatcatgttgtccaaaaaatagaatc

SEQ ID NO: 82011 - DNA, 75 bp, synthetic construct
  source 1..75: mol_type = other DNA
gatatttacagcgcgtggaagcgtcagggaagcaatgctgaaaagttaaaagcggtgattgattgtaaggtcagc

SEQ ID NO: 82012 - DNA, 75 bp, synthetic construct
  source 1..75: mol_type = other DNA
gttcggcaaagcctgaagctaaagcctataaacttactgacggtgaaggcatggttttgctggttcaccctaatg

SEQ ID NO: 82013 - DNA, 75 bp, synthetic construct
  source 1..75: mol_type = other DNA
gcggtgatggcggaaaattgtacgacgacttcagagacaaacaggttgttgcaattggttggtcgcagctcgctc

SEQ ID NO: 82014 - DNA, 75 bp, synthetic construct
  source 1..75: mol_type = other DNA
atggaaaacgctaaaatgaattcgctcatcgcccagtatccgttggtagaggatctggttgctcttaaagaagcc

SEQ ID NO: 82015 - DNA, 75 bp, synthetic construct
  source 1..75: mol_type = other DNA
gagttcttccggaaaatgcacaaaaacgttattcagaagatcgaaactctcgaatgctcgccggagtttaaccgg

SEQ ID NO: 82016 - DNA, 75 bp, synthetic construct
  source 1..75: mol_type = other DNA
gttaagccgtccgacatcccgaccttgaaaggctacaccgcccgcctggtggatcagaaatggctgcgtctcgcg

SEQ ID NO: 82017 - DNA, 75 bp, synthetic construct
  source 1..75: mol_type = other DNA
agattcaacggaattgattcaaattccaaacgatatctctaattcaatttatgatctatttggtattgaactagt

SEQ ID NO: 82018 - DNA, 75 bp, synthetic construct
  source 1..75: mol_type = other DNA
tcataaagaaaccaataaattttcagtttcttaaggatttcctgatattaaactatggtgatgttctgttgctta

SEQ ID NO: 82019 - DNA, 75 bp, synthetic construct
  source 1..75: mol_type = other DNA
gtttgccgtactgttggcaacgcttattcatcattttggcgagcaaattattgatttcgtcgcgggtgatgccac

SEQ ID NO: 82020 - DNA, 75 bp, synthetic construct
  source 1..75: mol_type = other DNA
cagccgcttatacatcagatttattagatgataatctaagacattcaataagtctttttattctggcatatggat

SEQ ID NO: 82021 - DNA, 75 bp, synthetic construct
  source 1..75: mol_type = other DNA
ttatcctcaagcagtccgccaaagagttcgccaagtacaaccagctgtacccggaccagtattcgcagctgcagc

SEQ ID NO: 82022 - DNA, 75 bp, synthetic construct
  source 1..75: mol_type = other DNA
acagtatggcttccagttgctgcatctcacctgctgtcgcgacacggtggaagatcgcggaaccattcagtattt

SEQ ID NO: 82023 - DNA, 75 bp, synthetic construct
  source 1..75: mol_type = other DNA
attctttatgacgagaataatattattgtcgccatcaccaaagatgcctccacgcttaaccctgaaggctatagc

SEQ ID NO: 82024 - DNA, 75 bp, synthetic construct
  source 1..75: mol_type = other DNA
gtttatcattaaatactttaagaagggatctgcacacatcactttcaaaaggctggaactgattgacagaattaa

SEQ ID NO: 82025 - DNA, 75 bp, synthetic construct
  source 1..75: mol_type = other DNA
gcgatgacgtataccaaaagtaaaacgtttaaaaccgcagctggcgcgcatcgctggttagcaagaaacactgac

SEQ ID NO: 82026 - DNA, 75 bp, synthetic construct
  source 1..75: mol_type = other DNA
gggctaccgtaccgcccgccgccatacaggttcgtacatcaccattacgcagaacatcgtcgattttgactcgga

SEQ ID NO: 82027 - DNA, 75 bp, synthetic construct
  source 1..75: mol_type = other DNA
gccggatggtgcatctgagatgacgcgtaatctggccagtctggattttccgcagctgaccagcgtcctgccgta

SEQ ID NO: 82028 - DNA, 75 bp, synthetic construct
  source 1..75: mol_type = other DNA
actatgcagcaggtttttgttccgctaccccggcgttaaggggaaatgaggtcaacatggatatgctcaatcttg

SEQ ID NO: 82029 - DNA, 75 bp, synthetic construct
  source 1..75: mol_type = other DNA
tgaagcgagccgtccgttggtgttctcgtcaaactactatcagactcgtcaaaacctgctagatatcgacaatct

SEQ ID NO: 82030 - DNA, 75 bp, synthetic construct
  source 1..75: mol_type = other DNA
tgagccgacaggcgctggctgcacaaaaagccgggatatcagtcggacagtataaggctgccatgcgcacactgc

SEQ ID NO: 82031 - DNA, 75 bp, synthetic construct
  source 1..75: mol_type = other DNA
atgacggcgggaacactttgtataacagcgcagcaggtttttagttccgctaccccggcgttaaggggaaatgag

SEQ ID NO: 82032 - DNA, 75 bp, synthetic construct
  source 1..75: mol_type = other DNA
acgaatctctggtatgcggtgtgttccctaaccaggacggcacgtttaccgcgatgacgtataccaaaagtaaaa

SEQ ID NO: 82033 - DNA, 75 bp, synthetic construct
  source 1..75: mol_type = other DNA
gtatctcgaccgggacaaaaaagcgaaatccccctatgccaccctgtttcccggtgtggccaaacaggcccagga

SEQ ID NO: 82034 - DNA, 75 bp, synthetic construct
  source 1..75: mol_type = other DNA
gcaatgacgtataccaaaagcaaaacgtttaaaaccgaatctggagcgcgtcgctggctggaaagaaactcaggt

SEQ ID NO: 82035 - DNA, 75 bp, synthetic construct
  source 1..75: mol_type = other DNA
catcatcgctgatatgcagaagcgtcaacgtgatgtagcagaactcgatgccagatatacaaaggagcttgctga

SEQ ID NO: 82036 - DNA, 75 bp, synthetic construct
  source 1..75: mol_type = other DNA
agcctggcacatccgcgacgaaacctacggggcggcgctggccgatctggtcaacgcacagttccgccatccctt

SEQ ID NO: 82037 - DNA, 75 bp, synthetic construct
  source 1..75: mol_type = other DNA
aatgtacgctgtgcgttgaccgcgtggtggttgggcaagaaccagcctgcgtgaagacctgcccaacgggcgcga

SEQ ID NO: 82038 - DNA, 75 bp, synthetic construct
  source 1..75: mol_type = other DNA
atgctttccgcgtttaccgttattctgctggtggtctgtggtgtgcttagtctggggctgaatcattaccgcgat

SEQ ID NO: 82039 - DNA, 75 bp, synthetic construct
  source 1..75: mol_type = other DNA
ttatcgccgtagttggcgaatccggcgcagggaaaaccacgctacgccgtgacctggctgatcgcatcaaccgtg

SEQ ID NO: 82040 - DNA, 75 bp, synthetic construct
  source 1..75: mol_type = other DNA
aacgccatcacctacaaagcgcagcgcgataaaaaagccagagagctggagctggcaaacgcaaccattactgac

SEQ ID NO: 82041 - DNA, 75 bp, synthetic construct
  source 1..75: mol_type = other DNA
aagagcagcgcgataaagccacatccatcatcgctgatatgcagaagcggcaacgtgatgtagcagaacttgacg

SEQ ID NO: 82042 - DNA, 75 bp, synthetic construct
  source 1..75: mol_type = other DNA
gagatgtcgctgcgcttgatgccagatacacgaaggaattagccgatgcgagagctgaaaatgaaactctgcgcg

SEQ ID NO: 82043 - DNA, 75 bp, synthetic construct
  source 1..75: mol_type = other DNA
gcgtccggtaagaggcgatcagggccagcgtgaaccagcgttactggctggcgctggcgtgctggcgtctgagag

SEQ ID NO: 82044 - DNA, 75 bp, synthetic construct
  source 1..75: mol_type = other DNA
aacacctgaatatactgtaagaagaagcgactacagagccacttttggtagaactcaacccatagatattgacta

SEQ ID NO: 82045 - DNA, 75 bp, synthetic construct
  source 1..75: mol_type = other DNA
tgacgatggaccagtacctcaatgcccgttaccggaatgacttcacgggacgtgagaaggagctgtacaccgtca

SEQ ID NO: 82046 - DNA, 75 bp, synthetic construct
  source 1..75: mol_type = other DNA
ggcgggatctggaccagatcgccgctgacaacggtttcgactttcatatcatcgacaatgaaatctattgggacg

SEQ ID NO: 82047 - DNA, 75 bp, synthetic construct
  source 1..75: mol_type = other DNA
tccctcctgccctgctgggtctggcaggagtgttgtcatggttgctgctgctactccatacaggatatttttcag

SEQ ID NO: 82048 - DNA, 75 bp, synthetic construct
  source 1..75: mol_type = other DNA
attactcaattctggatagtaactgtagatatagtaattgtgacattaccgatgatcgttacggtgcccgattac

SEQ ID NO: 82049 - DNA, 75 bp, synthetic construct
  source 1..75: mol_type = other DNA
tgtttgccgataaaggtttggtagtcgcgcaatatattcgtaaccgtcgtctcgatttttgtgcagatgcgattc

SEQ ID NO: 82050 - DNA, 75 bp, synthetic construct
  source 1..75: mol_type = other DNA
gcaatggtgggcagattttctcgatgcgaatagtgaaaatccggtctcacctttcgattacgccagacaacaatt

SEQ ID NO: 82051 - DNA, 75 bp, synthetic construct
  source 1..75: mol_type = other DNA
gaataaatcctggttcaggatgctggcgggtagtcagggtgaggcagatatttatatttatgacgagattggttt

SEQ ID NO: 82052 - DNA, 75 bp, synthetic construct
  source 1..75: mol_type = other DNA
gaataattcctggttcaggatgcaggctggtcaccagagtgacgcggatatttatatttatgacgagattggttt

SEQ ID NO: 82053 - DNA, 75 bp, synthetic construct
  source 1..75: mol_type = other DNA
cgcacgctgtcggtaatgaggttgcacgtcggcaacagtctgcaaatgctcaggtcatgcgaagtaatcaggtga

SEQ ID NO: 82054 - DNA, 75 bp, synthetic construct
  source 1..75: mol_type = other DNA
caaagaagcctacatcgctgagttcgatcgcatggaggaagaactgcgccagaataacgccccgtctcccgacaa

SEQ ID NO: 82055 - DNA, 75 bp, synthetic construct
  source 1..75: mol_type = other DNA
ctgtcgtggttcaggctacgcgccttgatgcttcaattttgccacgcaatatattcagccagtcttacctgctgt

SEQ ID NO: 82056 - DNA, 75 bp, synthetic construct
  source 1..75: mol_type = other DNA
ttgctgctacgataatgcctgcgtggaaagcttctttcattcgctgaaagtggaatgtatccatggagaacactt

SEQ ID NO: 82057 - DNA, 75 bp, synthetic construct
  source 1..75: mol_type = other DNA
atccattcaccaggtggtgatgtgtttgaaggcatcgccatctataacctgctacggaatcatccggcagacatt

SEQ ID NO: 82058 - DNA, 75 bp, synthetic construct
  source 1..75: mol_type = other DNA
ctacaggtttgcagcaggcgcggcagcgtattctggcgcttgaaacggcacttagattacatgggctgattgact

SEQ ID NO: 82059 - DNA, 75 bp, synthetic construct
  source 1..75: mol_type = other DNA
tcaggtacgctcgatttaccacggcgcaggtacagcggacacacctgcggcactgacatgggatcagaagcaaat

SEQ ID NO: 82060 - DNA, 75 bp, synthetic construct
  source 1..75: mol_type = other DNA
atggtcatgttgacgttagagagcatgtccagctgaatgatcttaattctgatacacgcatggcattgtggaatt

SEQ ID NO: 82061 - DNA, 75 bp, synthetic construct
  source 1..75: mol_type = other DNA
ggatgggacggtggtcgcaaggttgataccgggcgtgcgctactttcatttcaggaagggactatcgtatccggt

SEQ ID NO: 82062 - DNA, 75 bp, synthetic construct
  source 1..75: mol_type = other DNA
agcacttctcttcaaaccatcaagataagcattcagataaagttaacagtcatcaacaccatggcaaggttgata

SEQ ID NO: 82063 - DNA, 75 bp, synthetic construct
  source 1..75: mol_type = other DNA
gattatttcaccctcagagaacggctgatgacaatgcaaaagcaactggaaggagcacaggaatatatccgtacc

SEQ ID NO: 82064 - DNA, 75 bp, synthetic construct
  source 1..75: mol_type = other DNA
actgcgagcaaaaagggataacacaggctcagttcattgagaaaattatcaaagatgaactgcagaggctggaga

SEQ ID NO: 82065 - DNA, 75 bp, synthetic construct
  source 1..75: mol_type = other DNA
tgcaaataccaatgcaatcgcgtcgctggatgtcagactaaccacggctgaaggtgaaatagtcaccttgcaggc

SEQ ID NO: 82066 - DNA, 75 bp, synthetic construct
  source 1..75: mol_type = other DNA
atgagcgataagcagactgaaaagactattcaactggatacccccatcaagcgaggtaaaacagaaatcaccgaa

SEQ ID NO: 82067 - DNA, 75 bp, synthetic construct
  source 1..75: mol_type = other DNA
cgatcactactctggcagaccgttaacccgactggctgtcgaactcacgttactagttttcatccgttcaagcga

SEQ ID NO: 82068 - DNA, 75 bp, synthetic construct
  source 1..75: mol_type = other DNA
gtctgaaagcggtgctgctcacaggcggtatcctgctggcatttatggtggtggcgctgttcattgcggatatgg

SEQ ID NO: 82069 - DNA, 75 bp, synthetic construct
  source 1..75: mol_type = other DNA
aatgcctcatcttcagcaatgcagccgaacaggacgatattgtaaattcacctaattacgaggacattgcagtag

SEQ ID NO: 82070 - DNA, 75 bp, synthetic construct
  source 1..75: mol_type = other DNA
aaggttgagcggatggtgaaatacctcaaggagaacttcttcgtccggtaccgcaggttcgacagcttcactcat

SEQ ID NO: 82071 - DNA, 75 bp, synthetic construct
  source 1..75: mol_type = other DNA
gaacggatcgatcaccaggaataccgacaaattctggctgaaacagagcaggagaaccatctgaaaaaattacgc

SEQ ID NO: 82072 - DNA, 75 bp, synthetic construct
  source 1..75: mol_type = other DNA
agctgcgtcgctggacatacgctggcggtaagcaatggaaaggcctgatgactcgtcgtgagattgagcgtgaag

SEQ ID NO: 82073 - DNA, 75 bp, synthetic construct
  source 1..75: mol_type = other DNA
cgatctgtatgtcagtttcgacgtcaaagacctacaaaaagcgatgttccgccagcagagtttcccgtcagtggt

SEQ ID NO: 82074 - DNA, 75 bp, synthetic construct
  source 1..75: mol_type = other DNA
cgctggatatttctcgcggggctgtttctcaggcagttaacagagtgtgggatgcctataaacaagaagtacctg

SEQ ID NO: 82075 - DNA, 75 bp, synthetic construct
  source 1..75: mol_type = other DNA
ctggcccgtaatacccagaaaattttccgttggctggataaagacacccctgatgctgttgaaaaaatgcaggct

SEQ ID NO: 82076 - DNA, 75 bp, synthetic construct
  source 1..75: mol_type = other DNA
cgctggcccgcggggaaatccccgaacagaaaaaaatcgaaagagtcctgcgtgatgtcggactctcccgtaccc

SEQ ID NO: 82077 - DNA, 75 bp, synthetic construct
  source 1..75: mol_type = other DNA
tcctgtatggccggtaacggaaatcatccagacattcagcggcctgcgccgcgtggttaaaacgtcctgtatcga

SEQ ID NO: 82078 - DNA, 75 bp, synthetic construct
  source 1..75: mol_type = other DNA
atgaaactgaatcctgagaaatacaatagaaatatcaccctgctatgtcctgtgtgcggaaatacagagatggaa

SEQ ID NO: 82079 - DNA, 75 bp, synthetic construct
  source 1..75: mol_type = other DNA
gattaaggacggtggcagagactgccgtatccgttcaaacaactgttacggtcaggtatcaagacgtgaccagga

SEQ ID NO: 82080 - DNA, 75 bp, synthetic construct
  source 1..75: mol_type = other DNA
ccaatccgtgccgtttgcccgccgccattgaaaaggcgctcgattttctgcgcgctaccgatttcaacgccctgg

SEQ ID NO: 82081 - DNA, 75 bp, synthetic construct
  source 1..75: mol_type = other DNA
atgaaagatttaacactcaaatttgccgacagggccgacttttcggcctttatggagagtgccggctattatgat

SEQ ID NO: 82082 - DNA, 75 bp, synthetic construct
  source 1..75: mol_type = other DNA
atgcctttagcagccaaacttaccgacaaaggcacccggcacgacggttattacgagaccgtcatcaccgccggg

SEQ ID NO: 82083 - DNA, 75 bp, synthetic construct
  source 1..75: mol_type = other DNA
atgattgaatggattattcgtcgctcggtggcgaaccgttttctggtgctgatgggcgcgttatttctgagtatc

SEQ ID NO: 82084 - DNA, 75 bp, synthetic construct
  source 1..75: mol_type = other DNA
tgtaaatcctcagaagaggcactcgccatgctgagtacgctttgttacaacctgatgatgacatgcggtatccat

SEQ ID NO: 82085 - DNA, 75 bp, synthetic construct
  source 1..75: mol_type = other DNA
gctattttcttggcgtgttaatgacagcaacttttggcaactatgcatatcttcgcgcagaaaaactcgggcaac

SEQ ID NO: 82086 - DNA, 75 bp, synthetic construct
  source 1..75: mol_type = other DNA
aaaacactgctggcggcagagattaaactggcgcagaaagattttgctggcgcgcaaaacttgctggcgaaaatc

SEQ ID NO: 82087 - DNA, 75 bp, synthetic construct
  source 1..75: mol_type = other DNA
aatcgatgccagccaggggcgtccttccattgatttactgcgcgcgttaattgctcaggaaccgctgctcggcgc

SEQ ID NO: 82088 - DNA, 75 bp, synthetic construct
  source 1..75: mol_type = other DNA
cgagaagcgcagattgagcagcagctacgcgaactaacgttactgccgctcaacattaaacatatgtcggtaaag

SEQ ID NO: 82089 - DNA, 75 bp, synthetic construct
  source 1..75: mol_type = other DNA
ctgttaatgcccatattacttcacatgtcgatgaatgcagtcatagcaggaatacaatatctggcttctatcagt

SEQ ID NO: 82090 - DNA, 75 bp, synthetic construct
  source 1..75: mol_type = other DNA
cgaagaacttgaaaagctgggatgttcattttactcatgcgatgcccgttcaacttcaatttatctgactgtatc

SEQ ID NO: 82091 - DNA, 75 bp, synthetic construct
  source 1..75: mol_type = other DNA
tatgtttgcagccccaacaacccgaccgggcaactgatcaacccgcaggattttcgcaccctgctggagttaacc

SEQ ID NO: 82092 - DNA, 75 bp, synthetic construct
  source 1..75: mol_type = other DNA
gaacacatcctgcgtgacaagttgtcaccgtatgacaccgaagagatgcttgaggctatgcgtatttttctggaa

SEQ ID NO: 82093 - DNA, 75 bp, synthetic construct
  source 1..75: mol_type = other DNA
tggcatcaaagttaatggctgcaagtgaggaacttcaaaagctgggatgttcattttactcatgcgatgtcagtt

SEQ ID NO: 82094 - DNA, 75 bp, synthetic construct
  source 1..75: mol_type = other DNA
gtgtttcccgtcgacgttttataagcggctgaatgccggtgatcgtaagggtgcatgcgaggcgattcgctggtg

SEQ ID NO: 82095 - DNA, 75 bp, synthetic construct
  source 1..75: mol_type = other DNA
ttgtgatggcaggtggctctggtagccggttgtggccgctgtcccgcgtgctctatccaaaacagttcctctgcc

SEQ ID NO: 82096 - DNA, 75 bp, synthetic construct
  source 1..75: mol_type = other DNA
acgacggtaaatggtgggaccgttcactttaaaggggaagttgttaacgccgcttgcgcagttgatgcaggctct

SEQ ID NO: 82097 - DNA, 75 bp, synthetic construct
  source 1..75: mol_type = other DNA
accgtactagaaagcctgcagcgggaaggttttcagccctttttcgcctgccagacccgtgtgcgcgacccgggc

SEQ ID NO: 82098 - DNA, 75 bp, synthetic construct
  source 1..75: mol_type = other DNA
cagcaagaaacggaacagaacggtcagaaagcggaacaaaacagcccaaatgcgttacaaaacgagccagaaacg

SEQ ID NO: 82099 - DNA, 75 bp, synthetic construct
  source 1..75: mol_type = other DNA
aaacaatcatcttgatgagatgatgcctgttatttataccccaaccgtcggcgcagcctgtgagcgtttttctga

SEQ ID NO: 82100 - DNA, 75 bp, synthetic construct
  source 1..75: mol_type = other DNA
gtcattttgtccctataacattggccccggtaagtgtttcccgtcgacgttttataagcggctgaatgctggtga

SEQ ID NO: 82101 - DNA, 75 bp, synthetic construct
  source 1..75: mol_type = other DNA
atgaaaatcaaacatgagcacatccgcatggcgatgaatgcctgggcatatcctgatggtgagaaagttcctgca

SEQ ID NO: 82102 - DNA, 75 bp, synthetic construct
  source 1..75: mol_type = other DNA
tatgcaacaccgcaaaatggcgctgttggagttaattcagaaacatattcgtcagcgcgatctgttgggattagt

SEQ ID NO: 82103 - DNA, 75 bp, synthetic construct
  source 1..75: mol_type = other DNA
aagccatgcaggagcatcttctggaaaaaaagcgccaggagctggagaaaaacgaaagtcatccagagcctgagg

SEQ ID NO: 82104 - DNA, 75 bp, synthetic construct
  source 1..75: mol_type = other DNA
gtgaaaaatattcccggtattaccataaaaagtgatattgaggatttttcaataattccttttgagcaggatgtg

SEQ ID NO: 82105 - DNA, 75 bp, synthetic construct
  source 1..75: mol_type = other DNA
gtgcaggtgttgaaggtactcttcagggaatggctcttttagggattggggctgctggaatggccgtagagaaaa

SEQ ID NO: 82106 - DNA, 75 bp, synthetic construct
  source 1..75: mol_type = other DNA
caccgcttttctcgaacaagcgctggcgattgaatggcaacacggcgatctcacgctgcgcggctgggtggccga

SEQ ID NO: 82107 - DNA, 75 bp, synthetic construct
  source 1..75: mol_type = other DNA
gcgccagaacggcctggcggtggccttgcgcgaactggggcgtatcgagcgcacgctgtttgcgctcgactggat

SEQ ID NO: 82108 - DNA, 75 bp, synthetic construct
  source 1..75: mol_type = other DNA
ctgaatgcttctggtcaaaatgctgaagtatgggcagctggtctgaaatatgatgcgaacaacatctatctggcc

SEQ ID NO: 82109 - DNA, 75 bp, synthetic construct
  source 1..75: mol_type = other DNA
aacgtatcaaggccgcagcagcactctgggtgccggggacacgtgaagaggtcattgagggaatcagactactcg

SEQ ID NO: 82110 - DNA, 75 bp, synthetic construct
  source 1..75: mol_type = other DNA
atttataacaaagacagcaataaattagatctgtacggaaaagttaatgccgggcactacttctcctctaacgat

SEQ ID NO: 82111 - DNA, 75 bp, synthetic construct
  source 1..75: mol_type = other DNA
ttgctggagctggtggacgaatccggcgcagtggcagcagcgcaaaccattacaccgcagggagagaagcgactc

SEQ ID NO: 82112 - DNA, 75 bp, synthetic construct
  source 1..75: mol_type = other DNA
aaagccccgcaccagtacggcgcataccctataaccctgacctgtacatcccggaaaatacctcgatcccctgct

SEQ ID NO: 82113 - DNA, 75 bp, synthetic construct
  source 1..75: mol_type = other DNA
cgaggaacaaccagagaactcatctcatagttgatgatgtgactaccctaccggtcatgttcgccacaatttatg

SEQ ID NO: 82114 - DNA, 75 bp, synthetic construct
  source 1..75: mol_type = other DNA
ggcgctggaagtgacgacggacaagacaaccgaaaacgtcctgtccgctgtcctcaccctgagggaggtcattat

SEQ ID NO: 82115 - DNA, 75 bp, synthetic construct
  source 1..75: mol_type = other DNA
taaagatatcgttggcgtatggactgtatgttacgggcacaccggaaaagacattatgctcggtaaaacgtatac

SEQ ID NO: 82116 - DNA, 75 bp, synthetic construct
  source 1..75: mol_type = other DNA
ctaaagtgtttaatgccgataaaacgtactttgttttaaacggcacctcctcctccaacaaagtggttttaaacg

SEQ ID NO: 82117 - DNA, 75 bp, synthetic construct
  source 1..75: mol_type = other DNA
gataatctcagtcagattgccttactccgaacgcccaccgcgtccgtcccgcacattccagcaacgcatctggag

SEQ ID NO: 82118 - DNA, 75 bp, synthetic construct
  source 1..75: mol_type = other DNA
gaaagcggcggcggggctgtttgacctgctgaataccaagttcttcttccgctccccgagcgccccgattgcgaa

SEQ ID NO: 82119 - DNA, 75 bp, synthetic construct
  source 1..75: mol_type = other DNA
acggcgtgttgttaggtattttaggtttttttattataaccgtgttgtcatcacgtcattttcatgccgcggtgc

SEQ ID NO: 82120 - DNA, 75 bp, synthetic construct
  source 1..75: mol_type = other DNA
cggcggcgtatttgaaaccaaactcggcgcagttctcagtgaagtcgcttccggtgtgatgaacacgaaaaacaa

SEQ ID NO: 82121 - DNA, 75 bp, synthetic construct
  source 1..75: mol_type = other DNA
tgaaatcaaccggctgaaggcgctggttgcaaaactgcagcgcatgcagttcggtaaaagctcagaaaaacttcg

SEQ ID NO: 82122 - DNA, 75 bp, synthetic construct
  source 1..75: mol_type = other DNA
accagtttcaccggtatgacagataaatggttttacaagctgatcagtgaaggccatttcccgaaacccatcaag

SEQ ID NO: 82123 - DNA, 75 bp, synthetic construct
  source 1..75: mol_type = other DNA
gacccaaattattgctggagggaggttgatccagttgatgctgcaaatgaagctatgagttatcacaacgattaa

SEQ ID NO: 82124 - DNA, 75 bp, synthetic construct
  source 1..75: mol_type = other DNA
ggcttattcaccctgacgacgatcccttcagttgactccattctggtggcatgtatcgcgtatgcgattctcagt

SEQ ID NO: 82125 - DNA, 75 bp, synthetic construct
  source 1..75: mol_type = other DNA
caaagatatcgttggcgtatggactgtatgtcacggacacaccggaaaagacatcatgcccggtaaaacgtatac

SEQ ID NO: 82126 - DNA, 75 bp, synthetic construct
  source 1..75: mol_type = other DNA
cagttaaaagaagaaaacagtaattcgctcttctacccgacaaaatctgttgaagaattgttcgaagtaaaagat

SEQ ID NO: 82127 - DNA, 75 bp, synthetic construct
  source 1..75: mol_type = other DNA
acgaagcaaaagatattttctttaactactgcaattactcatatcacgaaataaaagacgaagaggaagagcaaa

SEQ ID NO: 82128 - DNA, 75 bp, synthetic construct
  source 1..75: mol_type = other DNA
cccgggggcagatcaaagaactgcgtattctggactggagccgggttgaacctctggtggcggatgacggcgagg

SEQ ID NO: 82129 - DNA, 75 bp, synthetic construct
  source 1..75: mol_type = other DNA
ggcggtaagcaatggaaagggctgatgacccgtcgtgatattgagcgtgaagtctgtttgtgggggcagcaatga

SEQ ID NO: 82130 - DNA, 75 bp, synthetic construct
  source 1..75: mol_type = other DNA
ctgccggaagcccgtaagttcggtggctgttatgtgtttggtatccagtcctatgcccagctggaagatatctac

SEQ ID NO: 82131 - DNA, 75 bp, synthetic construct
  source 1..75: mol_type = other DNA
atgactgacacgcattctattgcacaaccgttcgaagcagaagtctctccggcaaataaccgtcaattaaccgtg

SEQ ID NO: 82132 - DNA, 75 bp, synthetic construct
  source 1..75: mol_type = other DNA
aggcgctggcatgggtggagcgcaatattaaagttccactgaccgaaccacagaaagcgggtatagcgtcattct

SEQ ID NO: 82133 - DNA, 75 bp, synthetic construct
  source 1..75: mol_type = other DNA
ctctccgataacaccagaacaaatcgaaatacgtaagctgaggaaaaagctacaacgcattgaaatggagaatga

SEQ ID NO: 82134 - DNA, 75 bp, synthetic construct
  source 1..75: mol_type = other DNA
gcaaccagtgggcagctctgcgtgattccgtacctatgacgttatcggaagatgagatcgcccgtctcaaaggta

SEQ ID NO: 82135 - DNA, 75 bp, synthetic construct
  source 1..75: mol_type = other DNA
acgttgtattacgtacacccaggcagatgaatcaggagcatctctccgcgcagctggttttgttcgtgtgaaaga

SEQ ID NO: 82136 - DNA, 75 bp, synthetic construct
  source 1..75: mol_type = other DNA
ctactgatgtaataatacaccttcaacagattgatattgaatgggattatgcgaataatgtcattattattctgc

SEQ ID NO: 82137 - DNA, 75 bp, synthetic construct
  source 1..75: mol_type = other DNA
atgaccgaaccgttaaaaccacgtattgatttcgacggtcctctggaggtcgatcagaatcctaaattcagggcg

SEQ ID NO: 82138 - DNA, 75 bp, synthetic construct
  source 1..75: mol_type = other DNA
gcattcgaaaaccccaggccacccggagattggctatacgccaggcgttgaaaccaccaccggcccgcttggaca

SEQ ID NO: 82139 - DNA, 75 bp, synthetic construct
  source 1..75: mol_type = other DNA
aagcaccctgcaggagaaagtctccggcctgcgcgtcgtgcaatcgcataatcagcaggaactggagggcgtccc

SEQ ID NO: 82140 - DNA, 75 bp, synthetic construct
  source 1..75: mol_type = other DNA
actggctgcagttgctggtgctggcgttaatcggcgcactggctttcttcgtgaaccactaccgcgacaacgcca

SEQ ID NO: 82141 - DNA, 75 bp, synthetic construct
  source 1..75: mol_type = other DNA
gaacttgaggcttttttgcgggatatgatcaacggcaagcaaaaaagctggctggtgcattgtactgatgcagag

SEQ ID NO: 82142 - DNA, 75 bp, synthetic construct
  source 1..75: mol_type = other DNA
gagcactcagtgttctttcgacggatggacggacgatccgggcgggtacgcattggtgagttaaactgcctgttc

SEQ ID NO: 82143 - DNA, 75 bp, synthetic construct
  source 1..75: mol_type = other DNA
ggtcttaaatcgtaagcgtccattaagtctttcaatgatccgtagactacatgacggacttggaattcctgcaga

SEQ ID NO: 82144 - DNA, 75 bp, synthetic construct
  source 1..75: mol_type = other DNA
actgcgattgacagtgctcatcctaaagtactggctctgcagagttcagctgcgggtagcgcaacaaatgttggt

SEQ ID NO: 82145 - DNA, 75 bp, synthetic construct
  source 1..75: mol_type = other DNA
aaaatatcagtcttatgaagaagcacataaggaattatttaatggcttctttagcgtcgattcaactaaagaaag

SEQ ID NO: 82146 - DNA, 75 bp, synthetic construct
  source 1..75: mol_type = other DNA
tttaaggaagcgtacattcaggctttcaactggatggctgagcttattcagcaaggtctggcgaatctggaggcg

SEQ ID NO: 82147 - DNA, 75 bp, synthetic construct
  source 1..75: mol_type = other DNA
cgtgcaggcctccatccggaatgagattgagcgactctggaatccgcagggtatggccgcacagcctgcagcaga

SEQ ID NO: 82148 - DNA, 75 bp, synthetic construct
  source 1..75: mol_type = other DNA
ccttgcaaaacacattctgccgctgtttccggcgcatgaatgttatgtggagccgttttgtggggcagcagcgct

SEQ ID NO: 82149 - DNA, 75 bp, synthetic construct
  source 1..75: mol_type = other DNA
atgctcacctcagaacaacacaggtgctccaatgaaaaaagaaatttcagcgcagagtttaaacgcgaatccgct

SEQ ID NO: 82150 - DNA, 75 bp, synthetic construct
  source 1..75: mol_type = other DNA
tggaaagcttctggggaacgctgaaaaatgagagcctgagccactatcgttttaataaccgggatgaagccatct

SEQ ID NO: 82151 - DNA, 75 bp, synthetic construct
  source 1..75: mol_type = other DNA
gagatggttctgtcgctgagcggtatgggggccattgataatgccggggatttggagcatgaggtgctgacgccg

SEQ ID NO: 82152 - DNA, 75 bp, synthetic construct
  source 1..75: mol_type = other DNA
gcagagtttgccattacaccgattgtaggtgccgaagtggttaccggttcttcgcggatgaaagcaggtacagcg

SEQ ID NO: 82153 - DNA, 75 bp, synthetic construct
  source 1..75: mol_type = other DNA
ggtcaaacaactgcgtgatgagcgtcagggcaaaacaccaaaagcctctccaataacgccggaacaaatcgaaat

SEQ ID NO: 82154 - DNA, 75 bp, synthetic construct
  source 1..75: mol_type = other DNA
tgcgtgaagcggcagagcgtgcaattccggcaatggaacgcctgttaatgttgccagttgatgatgatttgttaa

SEQ ID NO: 82155 - DNA, 75 bp, synthetic construct
  source 1..75: mol_type = other DNA
tcgctggcaagagccgtcatagaaaaatcagcgctgccaactgtttttagcgaagatacttctgtagaacttatc

SEQ ID NO: 82156 - DNA, 75 bp, synthetic construct
  source 1..75: mol_type = other DNA
gacggaacgtattacagccggagcttatgattacatactgaaacgtggtcaggggattaacagcactaactggta

SEQ ID NO: 82157 - DNA, 75 bp, synthetic construct
  source 1..75: mol_type = other DNA
attatctggggggggattgcttttggtgcagggctggcggctattgcactggctgccggaggcggtggtggaagc

SEQ ID NO: 82158 - DNA, 75 bp, synthetic construct
  source 1..75: mol_type = other DNA
atggggcaggttatgccgggttgggaaaaggtaaaaaaacgcctggacgggatagccgggatgctgttggctgat

SEQ ID NO: 82159 - DNA, 75 bp, synthetic construct
  source 1..75: mol_type = other DNA
aggcggtcaggaggctgaaaaaacagaagtatcctccagaggctcaactgagccgggaagtggaagctcttccgg

SEQ ID NO: 82160 - DNA, 75 bp, synthetic construct
  source 1..75: mol_type = other DNA
gaaaacgacggtgaacccattattccgatgcagtacgtcccgtataacggtggcgcggtgtgggaaccatggtgg

SEQ ID NO: 82161 - DNA, 75 bp, synthetic construct
  source 1..75: mol_type = other DNA
agtgatactggggaacgcagattcaccggtgatgctcggcagtaaccaggtcattgttgaagagcagggcaaact

SEQ ID NO: 82162 - DNA, 75 bp, synthetic construct
  source 1..75: mol_type = other DNA
tgtcaggcaagaactccatttttaacggaaatataagtattgatgaagacgcatctatgaacctgtctgtaggaa

SEQ ID NO: 82163 - DNA, 75 bp, synthetic construct
  source 1..75: mol_type = other DNA
atagctttctgcatcaggcgtcgttcgccacggggtattggtactatgatcggcatcgctcagtccggttggtga

SEQ ID NO: 82164 - DNA, 75 bp, synthetic construct
  source 1..75: mol_type = other DNA
cggctggattgagggaacgctggaggctgacggcgggcaacaggacgaagtaattgccacgctgatggtgtgggc

SEQ ID NO: 82165 - DNA, 75 bp, synthetic construct
  source 1..75: mol_type = other DNA
taagctggaaggaaaaccgcttccgtcacagatgccgacactgaaatgggcctgtctgaaactggcgaaactggg

SEQ ID NO: 82166 - DNA, 75 bp, synthetic construct
  source 1..75: mol_type = other DNA
tacgttggaaagcatctggatacaggggaaactgcgtatgtgggggcgctggtcgtacattggtggcggcaggtc

SEQ ID NO: 82167 - DNA, 75 bp, synthetic construct
  source 1..75: mol_type = other DNA
cgttgagcacaatagagaatttatccttatccataccgttgctggatatggccgcgcagtggcacgtgtccttga

SEQ ID NO: 82168 - DNA, 75 bp, synthetic construct
  source 1..75: mol_type = other DNA
acaggcgcgtttttgcccgcataagcggttgaataatgcctttatgctccatgcttctaccagcccgttctatcc

SEQ ID NO: 82169 - DNA, 75 bp, synthetic construct
  source 1..75: mol_type = other DNA
tggaaactactgtgggttaagctggaaggaaagcagcttccggcgcaaacaccgaccctgaaatgggcctgtttg

SEQ ID NO: 82170 - DNA, 75 bp, synthetic construct
  source 1..75: mol_type = other DNA
agggcggcggcaccatcgatttccctgatgatgtcagccgtgcacgccagaagctgttccgcttcctcgataaca

SEQ ID NO: 82171 - DNA, 75 bp, synthetic construct
  source 1..75: mol_type = other DNA
tgggctacatggcgatctgcatcatgaaaacatcatgttctccagtcgcggctggctggtgatagatcccgtcgg

SEQ ID NO: 82172 - DNA, 75 bp, synthetic construct
  source 1..75: mol_type = other DNA
gaattgtcgaggcttacggttacaaaacgcgccaagcattagctgatcacctaggtatttcaaaaagcacattag

SEQ ID NO: 82173 - DNA, 75 bp, synthetic construct
  source 1..75: mol_type = other DNA
actgttaaaagagaagaatccagacctgattatcggcgtcggcggctgcgtggcatcgcaagaaggcgagcacat

SEQ ID NO: 82174 - DNA, 75 bp, synthetic construct
  source 1..75: mol_type = other DNA
gtccggactgggcagagcgcctgaaaaaggggctgtcgattattccggatccgatttatccggacgaggccgcac

SEQ ID NO: 82175 - DNA, 75 bp, synthetic construct
  source 1..75: mol_type = other DNA
cttgcctgcgatgcacgtaacagtaacgcggtggcgacactgcgggcgcgcaaacatcgcccggcgaaaccgctg

SEQ ID NO: 82176 - DNA, 75 bp, synthetic construct
  source 1..75: mol_type = other DNA
tgttcgctggggtgctccactggcgatcgcccttctgattccggtattcaaaccaattcttaaggaagctgccgg

SEQ ID NO: 82177 - DNA, 75 bp, synthetic construct
  source 1..75: mol_type = other DNA
tttttattgcggcgattatctctatcttcatcctcggcgtggggatcaagaaaggtattggcgtctttgccgaaa

SEQ ID NO: 82178 - DNA, 75 bp, synthetic construct
  source 1..75: mol_type = other DNA
gctgaaaaatgagagcctgagccactatcgttttaatagccgggatgaggccatctcagtaatacgggaatacat

SEQ ID NO: 82179 - DNA, 75 bp, synthetic construct
  source 1..75: mol_type = other DNA
gtcagcgtcgtcactctcgtctggggaatatctccccggcagccttcagggaaaaatatcatcagatggctgctt

SEQ ID NO: 82180 - DNA, 75 bp, synthetic construct
  source 1..75: mol_type = other DNA
gcggccaacgccttcaaccctgcccgggatatggtacgacgtgacgatgatctggatgacctctgccaggtacag

SEQ ID NO: 82181 - DNA, 75 bp, synthetic construct
  source 1..75: mol_type = other DNA
tggggactcagtgaggaagattaccggcgttaccgtaccctgatggaaggtccccgcggtattcagtctccgggg

SEQ ID NO: 82182 - DNA, 75 bp, synthetic construct
  source 1..75: mol_type = other DNA
cgaattcttcggcgacgtcgaaacctaccgcaaggaattgctcggcaccctcaccggcacgcccgcggccggcgc

SEQ ID NO: 82183 - DNA, 75 bp, synthetic construct
  source 1..75: mol_type = other DNA
tactgagtaaaccagcaaaacaccttatcgatgctcgtttaaatactactgttcaaaaaacattgaatttgaagg

SEQ ID NO: 82184 - DNA, 75 bp, synthetic construct
  source 1..75: mol_type = other DNA
ttgcgatttttattgtctttgcaatcacttccgcacttttttggaagataccaaaagcgttcttggttttcctgt

SEQ ID NO: 82185 - DNA, 75 bp, synthetic construct
  source 1..75: mol_type = other DNA
gatccgcaccagcccgttgacccaacgtgaatggcaggtcctggggctgatttactccggttacagcaatgagca

SEQ ID NO: 82186 - DNA, 75 bp, synthetic construct
  source 1..75: mol_type = other DNA
ggcaagtgtgcaacagcaaaactggagcgtgctggcgcgggccattgagcgtggaattaacgcgccgctggcgtc

SEQ ID NO: 82187 - DNA, 75 bp, synthetic construct
  source 1..75: mol_type = other DNA
catagtatttgcgccaaaataccgaagacaggtgttctacagagagaagtgtagagcaataggctgtattttgag

SEQ ID NO: 82188 - DNA, 75 bp, synthetic construct
  source 1..75: mol_type = other DNA
ttacgctttccctcggtctggccgtgatgccgatggtcgaggcggcaccaaccgcccagcaacagttgctggaac

SEQ ID NO: 82189 - DNA, 75 bp, synthetic construct
  source 1..75: mol_type = other DNA
cgagtttagcccaggggtggacgtggtgtttctcgccaccgcccatgaagttagccacgatttagcgccgcaatt

SEQ ID NO: 82190 - DNA, 75 bp, synthetic construct
  source 1..75: mol_type = other DNA
aatatggccatcagcgacatacaggcggcgcgctgtgagtcattcaccatcagcgaaggtgggcgtaatgagtaa

SEQ ID NO: 82191 - DNA, 75 bp, synthetic construct
  source 1..75: mol_type = other DNA
cgcgggcaatatgaacacaaagcgcctgaccatcactccggcaacggataccaccgacgcggtgatggagagcga

SEQ ID NO: 82192 - DNA, 75 bp, synthetic construct
  source 1..75: mol_type = other DNA
ttcgatgatatggtttcgtggtatggaactggctggggaatgtcgttgatgtttttcggaattcttatcatcgga

SEQ ID NO: 82193 - DNA, 75 bp, synthetic construct
  source 1..75: mol_type = other DNA
ctaaaggcggcggctctgccaacaaaacgtatctctaccaggaaaccaaagccctgctgacgcccggcaaactga

SEQ ID NO: 82194 - DNA, 75 bp, synthetic construct
  source 1..75: mol_type = other DNA
gaacctattctggccgcggcggaatcgtcattcaggaagtggctggctgaacaggggcttatcggtcaggacgtg

SEQ ID NO: 82195 - DNA, 75 bp, synthetic construct
  source 1..75: mol_type = other DNA
gcagacggtcagcgtgttggcggacaacagcgcaacggtcgctccgacggttatcaccgagccggacgggacggt

SEQ ID NO: 82196 - DNA, 75 bp, synthetic construct
  source 1..75: mol_type = other DNA
acaatttatcttctactcaacgtctttatgctgacgctgggggcgataataatatttttctctggtcgcgtgtgg

SEQ ID NO: 82197 - DNA, 75 bp, synthetic construct
  source 1..75: mol_type = other DNA
aacggtctgaacattcactgtgtgaaggtcaactacagtcttgcaggaaagggaacactacggcgcgaacttatt

SEQ ID NO: 82198 - DNA, 75 bp, synthetic construct
  source 1..75: mol_type = other DNA
aataaaggaaaagaatattacctgttcttagatgaggttcgaaggaatctgagagttatttatttggcgtattgt

SEQ ID NO: 82199 - DNA, 75 bp, synthetic construct
  source 1..75: mol_type = other DNA
taattcctatgtgaaaggacgctatttgacccacgatcggcaacgggtggcgagtttcaataatgatccgctgat

SEQ ID NO: 82200 - DNA, 75 bp, synthetic construct
  source 1..75: mol_type = other DNA
agcctctgaagaggtagcagcggaaatggcggcgcaaccctgccctggtgaagtggcgaaaagcctgatcacaat

SEQ ID NO: 82201 - DNA, 75 bp, synthetic construct
  source 1..75: mol_type = other DNA
catgaaacccgccaggcgttaagccagcaaacgcctgctgcacaagttgacaccgcattacccacggcgctgaaa

SEQ ID NO: 82202 - DNA, 75 bp, synthetic construct
  source 1..75: mol_type = other DNA
ttcgcctggttgactggatacccatgggtgtcttcctcaacggcgcagatggtttcattcatcatggcggagcag

SEQ ID NO: 82203 - DNA, 75 bp, synthetic construct
  source 1..75: mol_type = other DNA
ggtaccaggcaaggactggaataatcagcagaacatctatcaccgttggttaaaaggtgaaacgaaagcgcaaag

SEQ ID NO: 82204 - DNA, 75 bp, synthetic construct
  source 1..75: mol_type = other DNA
aagctgttggtggtcaaacagtcgctgcccgtttatgcgggttgtcaaatgttgcaattcataagtgggttaaaa

SEQ ID NO: 82205 - DNA, 75 bp, synthetic construct
  source 1..75: mol_type = other DNA
tgaggtactacggttttttgagtccggcgaaacggcggttactggaagaagtggtgtacatcataacggagacag

SEQ ID NO: 82206 - DNA, 75 bp, synthetic construct
  source 1..75: mol_type = other DNA
gacgttgagccgttggctgatgcgttacgggagcgcggggtgagccggttaatatttccggcgctgtatttgtga

SEQ ID NO: 82207 - DNA, 75 bp, synthetic construct
  source 1..75: mol_type = other DNA
ccctatatcattgagttgaacaccgggcaagaaactatcgttatagcccatgccgactatccggataatgaatac

SEQ ID NO: 82208 - DNA, 75 bp, synthetic construct
  source 1..75: mol_type = other DNA
tgacccacgcgcgtgggatatggcaagcctgatggattttgctgtgccggtggtagcgtgtcttctggtctggtt

SEQ ID NO: 82209 - DNA, 75 bp, synthetic construct
  source 1..75: mol_type = other DNA
cgatgacggtaaccacgctcattcctctgacaatcctccagtaccgcctgatgacgataatggcggcaacacacc

SEQ ID NO: 82210 - DNA, 75 bp, synthetic construct
  source 1..75: mol_type = other DNA
aactccatcgtgtggattttgaccctgcgcaggatttactgatatcggtcggcgaccttatcgatcgcggcaccg

SEQ ID NO: 82211 - DNA, 75 bp, synthetic construct
  source 1..75: mol_type = other DNA
gacgaaccggcggcagaccccgccgtctcacgcaggaacaatacgagcaggtcgggcgtttactggccgggggtg

SEQ ID NO: 82212 - DNA, 75 bp, synthetic construct
  source 1..75: mol_type = other DNA
gaagcgcagatggaacgaaaagaatcagcgtttaatcaggcagagtttaataaacttcttcttgagtgtgttgta

SEQ ID NO: 82213 - DNA, 75 bp, synthetic construct
  source 1..75: mol_type = other DNA
gcagagcgcaaagagactggaaaatacacgtctgttgttgatcttgcccgcgccaaagccaaccgacagcacact

SEQ ID NO: 82214 - DNA, 75 bp, synthetic construct
  source 1..75: mol_type = other DNA
gtacttattgggaaaaaaggttattacgtcaacgtgcgtataactggtgacgatgttgatatttctcagcttgag

SEQ ID NO: 82215 - DNA, 75 bp, synthetic construct
  source 1..75: mol_type = other DNA
atggatataacaccttttcttcatgcgctttgtgctgtggctgcgcaggtactggttggtctttttaccggaaac

SEQ ID NO: 82216 - DNA, 75 bp, synthetic construct
  source 1..75: mol_type = other DNA
atgtctatgccattaagcaatacccttcagagccaaattattacagataatcacttccttcatcatccaaaagtc

SEQ ID NO: 82217 - DNA, 75 bp, synthetic construct
  source 1..75: mol_type = other DNA
cgtgccaatccggtcggtggtcagggggtaataaaattaattactcagcatgtaattggtacaaatcatccgtag

SEQ ID NO: 82218 - DNA, 75 bp, synthetic construct
  source 1..75: mol_type = other DNA
ggatgttatcagtgccatcagggcaaaactggattcgctggttactgccgggaaactgattggcgcggagtgctg

SEQ ID NO: 82219 - DNA, 75 bp, synthetic construct
  source 1..75: mol_type = other DNA
gaaatgttcgggcatggcaagcgaatgaatatgccgtggtggggcggttttgatccgcgcgcgtgggatgtggca

SEQ ID NO: 82220 - DNA, 75 bp, synthetic construct
  source 1..75: mol_type = other DNA
ttcgaaggtgagcgccataatgcacttgatgacgcccgttaccaggcaaaatacgtttcagttatctggcaaaaa

SEQ ID NO: 82221 - DNA, 75 bp, synthetic construct
  source 1..75: mol_type = other DNA
cgcgatgtacgtcgatatgaccggcacgcgttcggcatcaggccagcctttttctatcacccttccactgagtta

SEQ ID NO: 82222 - DNA, 75 bp, synthetic construct
  source 1..75: mol_type = other DNA
acaggcatttggtgtacgaatggaattcacccgcggtgatatgctgaaggtctgtccgaaatttgtcacgtcact

SEQ ID NO: 82223 - DNA, 75 bp, synthetic construct
  source 1..75: mol_type = other DNA
caatttgtgcagtagccgtgcaggggctggtcgggtgcattaccggtgactgggtttacggagcgatagcgggtt

SEQ ID NO: 82224 - DNA, 75 bp, synthetic construct
  source 1..75: mol_type = other DNA
atgcctgcttgtgagcttcgcccggccacgcagtacgacaccgacgcggtttacgcgctgatttgtgagctaaaa

SEQ ID NO: 82225 - DNA, 75 bp, synthetic construct
  source 1..75: mol_type = other DNA
aagtgcgaaatctgtcgctcagttaactagcgctctgagcgaactggcaaaacagttttgggaaaaacgaggata

SEQ ID NO: 82226 - DNA, 75 bp, synthetic construct
  source 1..75: mol_type = other DNA
taagttgcacgccattgggtgggttaagcataaatgtattcctggtgctaaatggcccgaaattcaggcagagat

SEQ ID NO: 82227 - DNA, 75 bp, synthetic construct
  source 1..75: mol_type = other DNA
gcagtgctgctgggcggcatggttggcgcggggattgtgcttgggcgtaacgcgctgcgtaattacaacgcgaaa

SEQ ID NO: 82228 - DNA, 75 bp, synthetic construct
  source 1..75: mol_type = other DNA
caagatacgttgttccttttggggagcgaagcgctggagtcgatgattaagcatgaggcgactcgtccgttggtg

SEQ ID NO: 82229 - DNA, 75 bp, synthetic construct
  source 1..75: mol_type = other DNA
agcatgatcagcgctctacaagagcgagcgcaatccgctgttacagtcatggagcaaagtagtcggcaagcgcac

SEQ ID NO: 82230 - DNA, 75 bp, synthetic construct
  source 1..75: mol_type = other DNA
ccaacgcgttaacgaaattaccgacatgaacgcgcaaatagcgactgcggtcgagcagcagggagcagtaagtga

SEQ ID NO: 82231 - DNA, 75 bp, synthetic construct
  source 1..75: mol_type = other DNA
cagcaaacaatgacctatgcgcactttgcacctgattatctccaggacgcggtaaggttcaatccggttgcggag

SEQ ID NO: 82232 - DNA, 75 bp, synthetic construct
  source 1..75: mol_type = other DNA
tagtaggtcgcataggtgatgcatcaaatcggcttagcgaacacacccgaggcctactaaaggatattgagtcaa

SEQ ID NO: 82233 - DNA, 75 bp, synthetic construct
  source 1..75: mol_type = other DNA
ctgcgtttaatcagacagagtttaataaacttcttcttgaatgtgttgtaaaaacacagtcatcagtagcgaaaa

SEQ ID NO: 82234 - DNA, 75 bp, synthetic construct
  source 1..75: mol_type = other DNA
ccgctcctgagaatcgaaacagagaatggtgaacaggcgaaggcgcggcaccgtagcctggcggaggtgttgcag

SEQ ID NO: 82235 - DNA, 75 bp, synthetic construct
  source 1..75: mol_type = other DNA
atcggcgaaattcaggaactggtggtgatgccgcaggcgcgcggtctgaacgtcggcagtaaattactggcatgg

SEQ ID NO: 82236 - DNA, 75 bp, synthetic construct
  source 1..75: mol_type = other DNA
gctcaggactgcgcttataaatttcttgtttgcgaggataaacccggtattccccgccctgccctcgattcctgg

SEQ ID NO: 82237 - DNA, 75 bp, synthetic construct
  source 1..75: mol_type = other DNA
gcagtcttgctcggtgggattatcggttctggtgtggttctcggccgcaacgcgttgcgtaactacaaaccaaaa

SEQ ID NO: 82238 - DNA, 75 bp, synthetic construct
  source 1..75: mol_type = other DNA
atgattgatcgaaccaaactggagcacatcctcgaatatgccaggcagcagaggcatattggtcagcattgtaaa

SEQ ID NO: 82239 - DNA, 75 bp, synthetic construct
  source 1..75: mol_type = other DNA
cgcgaatacaagcagacatggaaaacactggatgacgaactggcctacgctctctggcctggtgatgtggatgcc

SEQ ID NO: 82240 - DNA, 75 bp, synthetic construct
  source 1..75: mol_type = other DNA
ccggtcgcagtcacgatccggaacagattgatttgattgatttactcatgcagttatggcgtgggaaggtaacga

SEQ ID NO: 82241 - DNA, 75 bp, synthetic construct
  source 1..75: mol_type = other DNA
atccgcagcagtttatgtccggagacaagaacccgcagggcggggatgccggcaaggagggcggaaatggcgggt

SEQ ID NO: 82242 - DNA, 75 bp, synthetic construct
  source 1..75: mol_type = other DNA
tggtgttgaactcgtttggtgtccgaattggtaaagaagatattttgtttaaaaaaggaaatgctgtcctcattg

SEQ ID NO: 82243 - DNA, 75 bp, synthetic construct
  source 1..75: mol_type = other DNA
ttacctttcctggcccggcgcggtatatccgaacctgctgatatggccggcggccatgctgctgggactggcggt

SEQ ID NO: 82244 - DNA, 75 bp, synthetic construct
  source 1..75: mol_type = other DNA
gctcaggcgctgattggcaaagatgctaaagatcaggctggcattgacaagatcatgatcgacctggacggcacc

SEQ ID NO: 82245 - DNA, 75 bp, synthetic construct
  source 1..75: mol_type = other DNA
tgggaagaggcgtttgatcgcatcgccaaactgatgaaagaagaccgcgatgctaactacattgcgcaaaacgcc

SEQ ID NO: 82246 - DNA, 75 bp, synthetic construct
  source 1..75: mol_type = other DNA
atggtatgacgatggagcgtgtggatcgcccgacggcagagtgtgccgccgcgctggataaagcgccgttaccga

SEQ ID NO: 82247 - DNA, 75 bp, synthetic construct
  source 1..75: mol_type = other DNA
ggcaacgccccgtcatggaatatgatgcatcccatctcggcaatatggttaaccgactggaagaaacattacccc

SEQ ID NO: 82248 - DNA, 75 bp, synthetic construct
  source 1..75: mol_type = other DNA
gagcgtgatgaaaaagggcagtgggcagcctatgacgccgttcatgatgtccggagagaactctggaaagccctg

SEQ ID NO: 82249 - DNA, 75 bp, synthetic construct
  source 1..75: mol_type = other DNA
tgcaatggcttccatcagtctgattcagctgaaattacgagccgggcggaagctgacgcaggcagaaaccacccg

SEQ ID NO: 82250 - DNA, 75 bp, synthetic construct
  source 1..75: mol_type = other DNA
tctttcctttggcgcggataaaatctccattaactcccctgcgctggcggacccgacgttaattactcgcctggc

SEQ ID NO: 82251 - DNA, 75 bp, synthetic construct
  source 1..75: mol_type = other DNA
tccacaaacaaataatcaatattggtgaattaaaagcgtacctggcaacacagggcgtggagatcaggatatgtt

SEQ ID NO: 82252 - DNA, 75 bp, synthetic construct
  source 1..75: mol_type = other DNA
aactgacgcaggcagaaacaacccgacttaacgccgtgctggattacattgacgcggtgacggcaacagatacca

SEQ ID NO: 82253 - DNA, 75 bp, synthetic construct
  source 1..75: mol_type = other DNA
actatgcggatgccattcgttataatgctcgaacgcctctgcaaggttctttgctgccgttaacccgtctggttt

SEQ ID NO: 82254 - DNA, 75 bp, synthetic construct
  source 1..75: mol_type = other DNA
gaatttatcaccggaagcgaatgacgattttctcgatcgttgcctggacggcggtgactggtaccccttttcaga

SEQ ID NO: 82255 - DNA, 75 bp, synthetic construct
  source 1..75: mol_type = other DNA
ctccgtggttgtcatactgagtaacgggcgtgatgagcgcggtcagtttgcttcgtatgatgtggtggacgatgt

SEQ ID NO: 82256 - DNA, 75 bp, synthetic construct
  source 1..75: mol_type = other DNA
ttgataagtttgttgttgaaacaacaggggtaaaaaattcagtagatttttctctcaatagtcatgatgctcttg

SEQ ID NO: 82257 - DNA, 75 bp, synthetic construct
  source 1..75: mol_type = other DNA
atattgttacgttgcaacgaatcctggggcacgcaacgattcagcaaacaatgacgtacgctcatttttcgccgg

SEQ ID NO: 82258 - DNA, 75 bp, synthetic construct
  source 1..75: mol_type = other DNA
gattctggcagataccatcgctgaggcgcagttcgaaaccattgacgaaccgctgaccccggcgaacgtgaagga

SEQ ID NO: 82259 - DNA, 75 bp, synthetic construct
  source 1..75: mol_type = other DNA
cgccagaaattcaacgaacgtgaggtgatgctcttatggccggacttcatcgcctacaacccgaaaagtggcaaa

SEQ ID NO: 82260 - DNA, 75 bp, synthetic construct
  source 1..75: mol_type = other DNA
gcgccgtggttccggcggccggatttggccgtcgaatgcaaacggaatgtcctaagcaatatctctcaatcggta

SEQ ID NO: 82261 - DNA, 75 bp, synthetic construct
  source 1..75: mol_type = other DNA
cggctgggtagcgtctggcacgcggtgtatgttgaaacccctgccctgcatcgcttaccggagaaaaaacgtcgg

SEQ ID NO: 82262 - DNA, 75 bp, synthetic construct
  source 1..75: mol_type = other DNA
ataatgattattccgccaacgcatcatatccggtggaatgagccagaaaaggctttccatgtccgtaaaaaggta

SEQ ID NO: 82263 - DNA, 75 bp, synthetic construct
  source 1..75: mol_type = other DNA
caccgacgacacttacttctgcgccaccaacgtggtgcaggtgaaccttatccgacaggtacaggagtcacgcag

SEQ ID NO: 82264 - DNA, 75 bp, synthetic construct
  source 1..75: mol_type = other DNA
atgaccctgtgcgtgtttgtgctgattgcttctgaatttatgcccgtcagcctgctcacgccgattgcccgtgac

SEQ ID NO: 82265 - DNA, 75 bp, synthetic construct
  source 1..75: mol_type = other DNA
taaagatatccgtcgtaactactggccggatgctatccgggcgcaaattgatgccctttccccagaggatatgtc

SEQ ID NO: 82266 - DNA, 75 bp, synthetic construct
  source 1..75: mol_type = other DNA
ctattcctgatgaacaggccataaaagaagatagcgctgttgcggtggccactgccattgaagccggtgatgagc

SEQ ID NO: 82267 - DNA, 75 bp, synthetic construct
  source 1..75: mol_type = other DNA
aagttttgcgaaagccatgctgattgaaggggcggatgccaatgcctctgtcaccggtaatgaatccacggtgcc

SEQ ID NO: 82268 - DNA, 75 bp, synthetic construct
  source 1..75: mol_type = other DNA
tggcgggatgatcacagctccgctgctgtccctgttcattattcctgccgcctataaactcatctggctgcgcag

SEQ ID NO: 82269 - DNA, 75 bp, synthetic construct
  source 1..75: mol_type = other DNA
ttatccccgctggcgcggggaacacagcaccactgaaaatctgtacgaaagcaatagcggtttatccccgctggc

SEQ ID NO: 82270 - DNA, 75 bp, synthetic construct
  source 1..75: mol_type = other DNA
gagcacgcacaacttgaacgcctgctgaaatatggcccggcactcgccagccacgccccgcaaggcaaactcctg

SEQ ID NO: 82271 - DNA, 75 bp, synthetic construct
  source 1..75: mol_type = other DNA
gctgaccttaatccacgttgacgggccactctttgaacgggtgctgattaatctgctggagaacgcggtgaaata

SEQ ID NO: 82272 - DNA, 75 bp, synthetic construct
  source 1..75: mol_type = other DNA
acccggtgtaccgtaccagattttgccgctaaaaagcggcgagaaaacctacggactggtggtggtggaaccggg

SEQ ID NO: 82273 - DNA, 75 bp, synthetic construct
  source 1..75: mol_type = other DNA
tgtgatggcagaactgtggattttgttagaaatcaaatatcacttgcatgtcttgctatcttatcttcagagaaa

SEQ ID NO: 82274 - DNA, 75 bp, synthetic construct
  source 1..75: mol_type = other DNA
accgatctgtactgggcgcgctctcgcgtgctggagtatctgaatcaggttcagggaaaactgcctgctggtgtg

SEQ ID NO: 82275 - DNA, 75 bp, synthetic construct
  source 1..75: mol_type = other DNA
tgtcgtgggggcttctgctcagcaattgtcgagggtattaatgtcaataaatagaaccttcccttatcttgcatg

SEQ ID NO: 82276 - DNA, 75 bp, synthetic construct
  source 1..75: mol_type = other DNA
ggtatgccctggagatgtggacggccgggctgagcggaatggaatttgaagaggcgtatgccgccgtgacggagg

SEQ ID NO: 82277 - DNA, 75 bp, synthetic construct
  source 1..75: mol_type = other DNA
tgccgcaggtgcttctgcgcctgaaatcctcgaccagtttctggatgaaaaggaaggtaaccacaccacggcata

SEQ ID NO: 82278 - DNA, 75 bp, synthetic construct
  source 1..75: mol_type = other DNA
ttctgattatttcggtggtctgcgccattgggattatgcgaattattaattcagtaaaaaagattgaacgctttt

SEQ ID NO: 82279 - DNA, 75 bp, synthetic construct
  source 1..75: mol_type = other DNA
gcccaacgcaattggcgaatgcaatgaaactggttcgccagcaaaacggctggacgcagagcgagttggcgaaaa

SEQ ID NO: 82280 - DNA, 75 bp, synthetic construct
  source 1..75: mol_type = other DNA
atttaatcgacgggagagtaaaaaccatcgattacaccaaagaagaattgcgcctgatgcatgcagaaggtgttt

SEQ ID NO: 82281 - DNA, 75 bp, synthetic construct
  source 1..75: mol_type = other DNA
ggctggctggattgtgcggtaccggtatcaaaccgccagacctgattgccaccattgcatgttctgcctgtcacg

SEQ ID NO: 82282 - DNA, 75 bp, synthetic construct
  source 1..75: mol_type = other DNA
tcctggctactgcaatcacaatcccggaacgtctgtgctggcacattacaggctggcggggacgtgtggaacagc

SEQ ID NO: 82283 - DNA, 75 bp, synthetic construct
  source 1..75: mol_type = other DNA
gtgcggggcagtctccggcgctggatgttaccgttcacgcaatcggtaagacccgcagtatcgagcgtatcaaca

SEQ ID NO: 82284 - DNA, 75 bp, synthetic construct
  source 1..75: mol_type = other DNA
atgcaatatgcattagttgatgcgctggaacgaaaatttttgctggatgctcttgaatttggtgttctgaaggac

SEQ ID NO: 82285 - DNA, 75 bp, synthetic construct
  source 1..75: mol_type = other DNA
agcagcaggtccgtcaggccagaaacaatggtggcatcgcgcagcaggattatctggcgttaatctccgaagtga

SEQ ID NO: 82286 - DNA, 75 bp, synthetic construct
  source 1..75: mol_type = other DNA
ggtttgactccctgaccctttgcagggaagccgggatacgtaacaggatgatcctgaaatcccgacagattgggg

SEQ ID NO: 82287 - DNA, 75 bp, synthetic construct
  source 1..75: mol_type = other DNA
aatggaaaaagccgggaaggtcacgcattcgctggggctgaaaagtgcggcggcccgccaggagataggtgttct

SEQ ID NO: 82288 - DNA, 75 bp, synthetic construct
  source 1..75: mol_type = other DNA
tatcgctcgccacgggaatatctacggcagcgggcttgtaatgggttaagtgataacaggtgtctggaaatatag

SEQ ID NO: 82289 - DNA, 75 bp, synthetic construct
  source 1..75: mol_type = other DNA
ctggtctggataaggcgctgtctgctggggctactgaaatcacgaaagaagaatatttcgcccgcaaaaacggta

SEQ ID NO: 82290 - DNA, 75 bp, synthetic construct
  source 1..75: mol_type = other DNA
acgtctttgcccgtaacctgcacgatctgctgatggcggccccagccggactgcgtgcaacgatgggcctcgatc

SEQ ID NO: 82291 - DNA, 75 bp, synthetic construct
  source 1..75: mol_type = other DNA
agaaatacgtcgctacgacaggagtcagaacataatttgtcgcgagtgccggaagagcgaagctatgcagcgtgt

SEQ ID NO: 82292 - DNA, 75 bp, synthetic construct
  source 1..75: mol_type = other DNA
atgcgggcgaaacttctgggaatagttctgacaacccctattgcgatcagctcttttgcttctaccgagactata

SEQ ID NO: 82293 - DNA, 75 bp, synthetic construct
  source 1..75: mol_type = other DNA
gtccttaaagaggctggcgtcacccctgacccggaaaaacaaaaccagctggttgaggcgctgacctcgtttatt

SEQ ID NO: 82294 - DNA, 75 bp, synthetic construct
  source 1..75: mol_type = other DNA
ttcgagttccgctgtgataacggagaaaaactgcgagtcacgttcgcgctggactgctgtgaccgtgaggcactg

SEQ ID NO: 82295 - DNA, 75 bp, synthetic construct
  source 1..75: mol_type = other DNA
catctggtgcgtgcttggtaccgtacgtacggcctgccaaccattgtcactaactgctccaacaactatggccct

SEQ ID NO: 82296 - DNA, 75 bp, synthetic construct
  source 1..75: mol_type = other DNA
cccttttctggtgtgccggcagtcagggcagtatgtacccgtttaacggctatgtttctaacgaattcagtccgt

SEQ ID NO: 82297 - DNA, 75 bp, synthetic construct
  source 1..75: mol_type = other DNA
cgatgtttgtaaataaaggtggtgagcttactttgttccagaaagaccagggacagctttttgataaacagggcc

SEQ ID NO: 82298 - DNA, 75 bp, synthetic construct
  source 1..75: mol_type = other DNA
agctacaggtcggggaatcgacggtaatcaggctgtcgaaggatggcatcaccatcgtgggcggttctgttttca

SEQ ID NO: 82299 - DNA, 75 bp, synthetic construct
  source 1..75: mol_type = other DNA
gagaagcatacagatatgcttgaaataacagagcatccggtagaggtcggggctgctgtcgctgatcatgcctat

SEQ ID NO: 82300 - DNA, 75 bp, synthetic construct
  source 1..75: mol_type = other DNA
ctggttttatcggctctgccgtggtgcgtcatatcattagtgatactggagactccgttatcaatctggataaac

SEQ ID NO: 82301 - DNA, 75 bp, synthetic construct
  source 1..75: mol_type = other DNA
ttcggtgcatgttgacgctgtaaacaatggtggcgaaggcgacggtatacaggcttatacggcgattaaggaaat

SEQ ID NO: 82302 - DNA, 75 bp, synthetic construct
  source 1..75: mol_type = other DNA
gccagagccggaagtacgtggtggcggtgctgatgcgaaacaagacgaattcaacaaattatgccccggcgcaaa

SEQ ID NO: 82303 - DNA, 75 bp, synthetic construct
  source 1..75: mol_type = other DNA
ctgacgttgccgatgcactggatattgaatctgtcgctatcgtcgaaaaagattattttgtggttgatcttttaa

SEQ ID NO: 82304 - DNA, 75 bp, synthetic construct
  source 1..75: mol_type = other DNA
cctggtattaagaattgggttgatgtcatgacaaaaaccgctgaaaactcttttttattgcatgttgagggagat

SEQ ID NO: 82305 - DNA, 75 bp, synthetic construct
  source 1..75: mol_type = other DNA
cgctgctcagaataggcaatgactggtgcattccgaagggaataacgccaacgacgcacattatcaaattgccga

SEQ ID NO: 82306 - DNA, 75 bp, synthetic construct
  source 1..75: mol_type = other DNA
cggcaaactcaatttcaaatctttcacctcatctgtgctgtcagatatggcaaaaattctggcgcaggcaaccat

SEQ ID NO: 82307 - DNA, 75 bp, synthetic construct
  source 1..75: mol_type = other DNA
ggaaaacacttctttaaagtaagtggtagtgaactcgatgatttgagaacctctcaaagaggtttgcaaatttcc

SEQ ID NO: 82308 - DNA, 75 bp, synthetic construct
  source 1..75: mol_type = other DNA
agattggtaaaggcctcgtgctgccccaccattcaggtgtcgtcattcacggaaatgtaaagatcggtgagaatg

SEQ ID NO: 82309 - DNA, 75 bp, synthetic construct
  source 1..75: mol_type = other DNA
ttatgtctgttgcgcggttttatctgtgtatataaaatacatctgtctcattattttctgaataacttgcgtatg

SEQ ID NO: 82310 - DNA, 75 bp, synthetic construct
  source 1..75: mol_type = other DNA
tggaagatgatggcagcatcaatgacgattaccgcattgattacctgcgtgcccatattgaagagatgaaaaaag

SEQ ID NO: 82311 - DNA, 75 bp, synthetic construct
  source 1..75: mol_type = other DNA
atattttgtaagtgttttcagaagatattttggtgttcctccccatcaatattcatcaagattttttttagaaaa

SEQ ID NO: 82312 - DNA, 75 bp, synthetic construct
  source 1..75: mol_type = other DNA
tgatgaaaaagttgttttactcgttatttccgttggaaaaagggaaggtaacgaagtttatcagatcgcagatat

SEQ ID NO: 82313 - DNA, 75 bp, synthetic construct
  source 1..75: mol_type = other DNA
gccattcttcgttacgggcgttatattgatgcctatggtagtgacatggtattacatgccaaacacggtaatggt

SEQ ID NO: 82314 - DNA, 75 bp, synthetic construct
  source 1..75: mol_type = other DNA
aacgtgcagaagtacgtatttttgccggtaatgatccggctcataccgccacaggcagcagcgggatttctcagg

SEQ ID NO: 82315 - DNA, 75 bp, synthetic construct
  source 1..75: mol_type = other DNA
gcttcgacaggttcagaagaatatttatctgtattatgttgtcatcggtatggtccggagtgatgtggtttttta

SEQ ID NO: 82316 - DNA, 75 bp, synthetic construct
  source 1..75: mol_type = other DNA
cagaagtggaactggccacactcacgtgggtggactggtataacaatcgacgattgctgggaaggctgggtcata

SEQ ID NO: 82317 - DNA, 75 bp, synthetic construct
  source 1..75: mol_type = other DNA
tcaaagtcatcacaggtcagtatcgtttatgaagcggggccctgtggttatggactttatcgtcggctggtgaaa

SEQ ID NO: 82318 - DNA, 75 bp, synthetic construct
  source 1..75: mol_type = other DNA
tattggcgttggttactctgccaacgcttgcggaggagacgccgttacaactggtgctgcgcggtgcgcagcacg

SEQ ID NO: 82319 - DNA, 75 bp, synthetic construct
  source 1..75: mol_type = other DNA
aaattttttgtgaagatggcctctatgctgtgtgcgttgaaaatggaaacattgttagtcattaccgcattctgt

SEQ ID NO: 82320 - DNA, 75 bp, synthetic construct
  source 1..75: mol_type = other DNA
ggaaagggcgattgttctcttttctcctgtctactcaaaacatgaagatggcaggtttcttgatagcaacagcac

SEQ ID NO: 82321 - DNA, 75 bp, synthetic construct
  source 1..75: mol_type = other DNA
ggcaagccaggaagcgtgcgataagctaccttccgggcgtgtgtacaacatcaccaacggcgaacatcgcacact

SEQ ID NO: 82322 - DNA, 75 bp, synthetic construct
  source 1..75: mol_type = other DNA
gaatggggtgaggtttaatggtaaatgggagaaaaaacttctttcagatgtagctgatgtttatcaaccaaaaac

SEQ ID NO: 82323 - DNA, 75 bp, synthetic construct
  source 1..75: mol_type = other DNA
ttggcgtcccatgtggtgagttttcaaaattcgcacatgaggatgtcactatggcaaccacccctacccaaactc

SEQ ID NO: 82324 - DNA, 75 bp, synthetic construct
  source 1..75: mol_type = other DNA
aggcgtatgccgaacaggcacgcaaactgtgcttgctgggctacaccgatgcagagcttgctgatttcttcgaag

SEQ ID NO: 82325 - DNA, 75 bp, synthetic construct
  source 1..75: mol_type = other DNA
atggtagtcgttcaggcacctacgttaagccagaaagattcctcggtatcgttaagtacccagacgttgagcgcg

SEQ ID NO: 82326 - DNA, 75 bp, synthetic construct
  source 1..75: mol_type = other DNA
tacgcgaaatcgctgcagacgatggatttcagccccatcactgataaagcctcatataacgccattgaatggccc

SEQ ID NO: 82327 - DNA, 75 bp, synthetic construct
  source 1..75: mol_type = other DNA
ctgcggtattaggtcttatcctcgccggtgcgtcagcgcccgttattctcgatcagttcctgaatgagaaggaag

SEQ ID NO: 82328 - DNA, 75 bp, synthetic construct
  source 1..75: mol_type = other DNA
aggcgctggcatgggtggagaaaaacatccgggtgccgctgaccgaaccccagaaagcggggatcgcgtcattct

SEQ ID NO: 82329 - DNA, 75 bp, synthetic construct
  source 1..75: mol_type = other DNA
tctacaagatgccgctcggcaagctgatgtgctgggtatgtatggcgttctttgtgttcgtgatcgtgctgctga

SEQ ID NO: 82330 - DNA, 75 bp, synthetic construct
  source 1..75: mol_type = other DNA
tggcagcactgctgctcatcaccggctggcatcactattacaacggtaactatcagtccggcatcaccgtgctta

SEQ ID NO: 82331 - DNA, 75 bp, synthetic construct
  source 1..75: mol_type = other DNA
gccgaacgcaaagaaaccgggaaatacacgtctgttgttgatctcgcctacgccagagtcaaccggcagaacact

SEQ ID NO: 82332 - DNA, 75 bp, synthetic construct
  source 1..75: mol_type = other DNA
atgattctcgcactcgacatcaggaacacatatcgcccggataatgagatggcattttactatcatattcattct

SEQ ID NO: 82333 - DNA, 75 bp, synthetic construct
  source 1..75: mol_type = other DNA
tgttaccctaatgcttgaagacaagatggcgcgggaagcagaaaaccgcctgcgaaatgaggagagggaacaact

SEQ ID NO: 82334 - DNA, 75 bp, synthetic construct
  source 1..75: mol_type = other DNA
atgtataattttatcactataatgtatgatgtcttttcatgttttggtgttctggctaaaaaccagaatagccgt

SEQ ID NO: 82335 - DNA, 75 bp, synthetic construct
  source 1..75: mol_type = other DNA
gcgtgtttaccggataatgagcgaaaatagtctgttgttgttacatgacaaaccatcacgacggcagcgggaaca

SEQ ID NO: 82336 - DNA, 75 bp, synthetic construct
  source 1..75: mol_type = other DNA
gcggcaatttaggggcgctgaggggatccgggataacgctggctaaccgtgccggatggatagacacactgatgt

SEQ ID NO: 82337 - DNA, 75 bp, synthetic construct
  source 1..75: mol_type = other DNA
tgaaagtagacaccctgatacacaactcaattatgccaacgaatttgatctgaatatcaaaggctggctcctcaa

SEQ ID NO: 82338 - DNA, 75 bp, synthetic construct
  source 1..75: mol_type = other DNA
gactgctgtgaccgtgaggcactgcactgggcggtcactacgggcggcttcgacagtgaaacagtacaggacgtc

SEQ ID NO: 82339 - DNA, 75 bp, synthetic construct
  source 1..75: mol_type = other DNA
cgtatccgctcaaataattgctacggtcaggtatcccggcgagatcaggaaagtgcgctggcgtgctggggtatc

SEQ ID NO: 82340 - DNA, 75 bp, synthetic construct
  source 1..75: mol_type = other DNA
tgaaagcaggcatcctgatacacgtcttaattatgccaacgaatttgatttgaacgttaaaggctggtttttaaa

SEQ ID NO: 82341 - DNA, 75 bp, synthetic construct
  source 1..75: mol_type = other DNA
gtcgctttgggcgaccggggattgtatttattggtgtggctgcgctctggtggctgataacccgatatggagcat

SEQ ID NO: 82342 - DNA, 75 bp, synthetic construct
  source 1..75: mol_type = other DNA
cagaaactgatgcagtggaaacggcaatgccggacaacgaaaaaaccgaatgcgaagtggaagacgaaccatctg

SEQ ID NO: 82343 - DNA, 75 bp, synthetic construct
  source 1..75: mol_type = other DNA
cagtaaagtcaaagaccaaaattactattctgttgcagtcaatgcaggttattacgtaacgcctaatgcaaaagt

SEQ ID NO: 82344 - DNA, 75 bp, synthetic construct
  source 1..75: mol_type = other DNA
atgcctgttcaagacgttattcccccctatgagcagatgtacctgctaaatcagcagctgatctgcaacgctgac

SEQ ID NO: 82345 - DNA, 75 bp, synthetic construct
  source 1..75: mol_type = other DNA
aatatcacctacgaaaacacatctgacgcaacaaaagaaatggcaaaaacaacgctggacaatacgataaatatt

SEQ ID NO: 82346 - DNA, 75 bp, synthetic construct
  source 1..75: mol_type = other DNA
aaggagatattagtgctgccaacggaagtaccgtcattctgggaagttctcgggtctttactgacaagaatgatg

SEQ ID NO: 82347 - DNA, 75 bp, synthetic construct
  source 1..75: mol_type = other DNA
tactgaacttggacgtgcaaccggcgcgctggatcaggcacgtgcgctgtcaattggttcgaatggttatatctg

SEQ ID NO: 82348 - DNA, 75 bp, synthetic construct
  source 1..75: mol_type = other DNA
aaaaatattttaaccggagcagactttaaacaaccaagaatgaaaagcttgctcgaaaagctttgggatattttg

SEQ ID NO: 82349 - DNA, 75 bp, synthetic construct
  source 1..75: mol_type = other DNA
acaccctttactggattgaaaatggtatattccagacttctgttccttatgttgtaccttatctcgacaaatttc

SEQ ID NO: 82350 - DNA, 75 bp, synthetic construct
  source 1..75: mol_type = other DNA
atgattaagtggccctggaaagtacaagaatcagcacatcaaactgcccttccctggcaggaagcactatcgatc

SEQ ID NO: 82351 - DNA, 75 bp, synthetic construct
  source 1..75: mol_type = other DNA
gatgccaggaatcagtatcgctttcagtgacattctcttttcaatgggggcggcgatgacacttggtggtgttgc

SEQ ID NO: 82352 - DNA, 75 bp, synthetic construct
  source 1..75: mol_type = other DNA
atgcgcttaatctggtcattattttcggtagctgcgcagcattgattctgatgagcttttggtttcgccgtggaa

SEQ ID NO: 82353 - DNA, 75 bp, synthetic construct
  source 1..75: mol_type = other DNA
ttcttgagcgtatccgtaagctgaccccgcagcatgtaatcgcgccgtaccggacagtggatgagtggcgcgagt

SEQ ID NO: 82354 - DNA, 75 bp, synthetic construct
  source 1..75: mol_type = other DNA
gcgacgatttgcaacgactgaatcaggtcgagcagagcaatcagcaacgtgcggcattagcgcaaactcgggcgg

SEQ ID NO: 82355 - DNA, 75 bp, synthetic construct
  source 1..75: mol_type = other DNA
cagaagggagatcgtgaaggtgttcgcgtctttttaaatgcggcaaagaccgaagtattaaatcagcgttatttc

SEQ ID NO: 82356 - DNA, 75 bp, synthetic construct
  source 1..75: mol_type = other DNA
tatgacccgctgcaggggcgatatatcactcaggatccgattggactgaaggggggatggaatttttatcagtat

SEQ ID NO: 82357 - DNA, 75 bp, synthetic construct
  source 1..75: mol_type = other DNA
gcagaaacaggagtattactcccctgtgatttcgacaacggaagggattaacctcggagataaggccagcctttc

SEQ ID NO: 82358 - DNA, 75 bp, synthetic construct
  source 1..75: mol_type = other DNA
caggtaaagagggcatattatctgagaaggcatcccggggactcgcggtaggattactgagtggttttaatacgg

SEQ ID NO: 82359 - DNA, 75 bp, synthetic construct
  source 1..75: mol_type = other DNA
gtgtcagacacactctccgggacaacgcatcctgacgacaatcacgaccgcccctggtggggactcccctgcacc

SEQ ID NO: 82360 - DNA, 75 bp, synthetic construct
  source 1..75: mol_type = other DNA
aaaaatattttaaccggagcagactttaaacaacctcgcgttaagagcttgctggatcgtcttgttgagtttctg

SEQ ID NO: 82361 - DNA, 75 bp, synthetic construct
  source 1..75: mol_type = other DNA
tcacgagcagaaaaaagcaggagtgatatttgaagctgaagaagtcatcactcttttaacgtctgtgcttaaaac

SEQ ID NO: 82362 - DNA, 75 bp, synthetic construct
  source 1..75: mol_type = other DNA
cgcagcattagcagcaaaaagaaaattcgctgatgaagatccattgattcttattttagctgcagatcacaacat

SEQ ID NO: 82363 - DNA, 75 bp, synthetic construct
  source 1..75: mol_type = other DNA
atgagtaagacgaatgtttcaagctccggcagtcgcatcctccgggtactcaaagcgctgcgcggtcatgccctg

SEQ ID NO: 82364 - DNA, 75 bp, synthetic construct
  source 1..75: mol_type = other DNA
ggggagttttatcgggtgttcacaattaatggatccgtcatcaacaaaaatagaacatgcaattgaggagaacga

SEQ ID NO: 82365 - DNA, 75 bp, synthetic construct
  source 1..75: mol_type = other DNA
ctgattgagattcgctcaggttcttatctgggagaggatgacattgtacgttttgctgacaaatatggtcgtgtc

SEQ ID NO: 82366 - DNA, 75 bp, synthetic construct
  source 1..75: mol_type = other DNA
gtgaaaacgggagccgaagctatccgggcgctggccacgcagctcccggcgtttcgtcagaaactgaatgagggc

SEQ ID NO: 82367 - DNA, 75 bp, synthetic construct
  source 1..75: mol_type = other DNA
aactgaaagagcatgaacagtcacgacgtcacccggatgcctcgctgaccgcaaaaggctttgttcaactcagta

SEQ ID NO: 82368 - DNA, 75 bp, synthetic construct
  source 1..75: mol_type = other DNA
atctgtttaaacatccgggcctgcttgatttcagccacacggtggaaccgtttgtggtgtttgatttgcaggggt

SEQ ID NO: 82369 - DNA, 75 bp, synthetic construct
  source 1..75: mol_type = other DNA
aaagatgtggcatttgtcagcagtcggatgagcggtgtctacgttaccagccacgaagggaaagagggctttacc

SEQ ID NO: 82370 - DNA, 75 bp, synthetic construct
  source 1..75: mol_type = other DNA
tggtccactgtaccttattgtttgcaaaatcctgatgatatacttaaatatcagcttcaagatcgagatattgtt

SEQ ID NO: 82371 - DNA, 75 bp, synthetic construct
  source 1..75: mol_type = other DNA
gcaccggcggcgcacagggcgttccggcatggggctgcgagtgcgcggcctgcgccagagcgcggcgctcgccgc

SEQ ID NO: 82372 - DNA, 75 bp, synthetic construct
  source 1..75: mol_type = other DNA
ctgcgaagccgacaccttcggctcctgtggttacgtttatctggctgtttatccgacgcccgaaacaaaaacgta

SEQ ID NO: 82373 - DNA, 75 bp, synthetic construct
  source 1..75: mol_type = other DNA
tgaaaacgggggccgaagccatccgggcgctggccatgcagatcccggcgtttcgtcagaagctgagcgacggct

SEQ ID NO: 82374 - DNA, 75 bp, synthetic construct
  source 1..75: mol_type = other DNA
gtgtcagacacactccccgggacaacgcttcccgacgacaacaaagaccgcccctggtgggggctgccctgcacc

SEQ ID NO: 82375 - DNA, 75 bp, synthetic construct
  source 1..75: mol_type = other DNA
ttaccttgcagaccgcgccggtatcagaggcaggttcagcgacgtagatgcgtaccacctggaccaggcctttcc

SEQ ID NO: 82376 - DNA, 75 bp, synthetic construct
  source 1..75: mol_type = other DNA
aaaaattatccggacaggctgctgacaagatgcaggctggcgtgatcctgctggactttatgcgccgggaattaa

SEQ ID NO: 82377 - DNA, 75 bp, synthetic construct
  source 1..75: mol_type = other DNA
acactggataatctcgcgctggtcacccaaactgtggctgatcaacgtggtgatctccgtaccctgttgcagcag

SEQ ID NO: 82378 - DNA, 75 bp, synthetic construct
  source 1..75: mol_type = other DNA
aagtggagcagaacgacaaactggaatggctgatccgcaaagacggctgtatgcactgttccgatccaggctgcc

SEQ ID NO: 82379 - DNA, 75 bp, synthetic construct
  source 1..75: mol_type = other DNA
gtgtcagacacattctccgggacaactcatcccgacgacaatcgcggccgcccctggtggggactgccctgtacc

SEQ ID NO: 82380 - DNA, 75 bp, synthetic construct
  source 1..75: mol_type = other DNA
gtgtcagacacattctccgggacaactcatcccgatgacaatcacgaccgtccctggtggggactacccagcacc

SEQ ID NO: 82381 - DNA, 75 bp, synthetic construct
  source 1..75: mol_type = other DNA
gttaaactatcattcatcgattttctgtaaggattttatcgtgtcagactcgcgccatgagacaaattatcccga

SEQ ID NO: 82382 - DNA, 75 bp, synthetic construct
  source 1..75: mol_type = other DNA
tggggcattatatggacgctgatttttattcagaaatatattggtcttctaataccgcaggtggaggccgacaat

SEQ ID NO: 82383 - DNA, 75 bp, synthetic construct
  source 1..75: mol_type = other DNA
gttccggcggcgctcgacgctgccagtagcatcgccgaatccgctgcacaaagtacgattacgatgcaagcccgc

SEQ ID NO: 82384 - DNA, 75 bp, synthetic construct
  source 1..75: mol_type = other DNA
atgtatcggatagttctggggaaagtttcgaccttaagcgcagctccactgccaccgggtttacgcgagcaagca

SEQ ID NO: 82385 - DNA, 75 bp, synthetic construct
  source 1..75: mol_type = other DNA
ttagagctacaggaagataaatattgctataaaaatgatctcctatatgcttggtcagcaacatttggtccatat

SEQ ID NO: 82386 - DNA, 75 bp, synthetic construct
  source 1..75: mol_type = other DNA
tgaaagatgccgccaacgcgctgcgctggtgtgttaacgagatggagcgtcgttataaactgatgtctgcgctgg

SEQ ID NO: 82387 - DNA, 75 bp, synthetic construct
  source 1..75: mol_type = other DNA
gtcatgcagttgagtcagcaggtgcagcacttgagcgagcagacagaacgcttgagccagttatacagcgagaac

SEQ ID NO: 82388 - DNA, 75 bp, synthetic construct
  source 1..75: mol_type = other DNA
gcctatatcaatgcgtttaactggatgtcagcagaactccgtaagtacagcgaaagttatgaagcagaacgtaac

SEQ ID NO: 82389 - DNA, 75 bp, synthetic construct
  source 1..75: mol_type = other DNA
actatacggcgttaagtgaacgtgccagcgaatatttattggccgtgatccgtagcaaaccggatgccgtgattt

SEQ ID NO: 82390 - DNA, 75 bp, synthetic construct
  source 1..75: mol_type = other DNA
aaacttgtcacgctaaaccccaaactcaaatcaacagcagccggacgttaccagcttctttcccgttggtgggat

SEQ ID NO: 82391 - DNA, 75 bp, synthetic construct
  source 1..75: mol_type = other DNA
gagaaacattttgactgttatactgtgcgttatctgtacctgcttaacataatagcacttgagctaaagccagat

SEQ ID NO: 82392 - DNA, 75 bp, synthetic construct
  source 1..75: mol_type = other DNA
cgcaaggctgccgatgaactgacctgtatgacagcgcgaattaaccgtggtgaggcgatacctgaaccagtaaaa

SEQ ID NO: 82393 - DNA, 75 bp, synthetic construct
  source 1..75: mol_type = other DNA
agtccattattgatgatctgcgcgatcagatagccctgcgggtgactgaagcaggtgcggatgatgaggaggaat

SEQ ID NO: 82394 - DNA, 75 bp, synthetic construct
  source 1..75: mol_type = other DNA
cgcagggtcaggtacgcgaaatggccgacattatcagcgaactgaacagcctgagcgataaaatccagaaactgt

SEQ ID NO: 82395 - DNA, 75 bp, synthetic construct
  source 1..75: mol_type = other DNA
tcatgaatggtaccggttcaggtgagagtggttacagagataactatacccacgttcagattggtgcagacagaa

SEQ ID NO: 82396 - DNA, 75 bp, synthetic construct
  source 1..75: mol_type = other DNA
atgacattcggctttctgtggatgtggtttcaccatccggcccagccccgttttacccgcaggccactgaatatc

SEQ ID NO: 82397 - DNA, 75 bp, synthetic construct
  source 1..75: mol_type = other DNA
aagaactgaataaatattaccagacctggctgacgggttatacaaggctgacagtaagccaggggatgtgccatc

SEQ ID NO: 82398 - DNA, 75 bp, synthetic construct
  source 1..75: mol_type = other DNA
gacgaccagagcggctatgagcgcggactgacgctgccacttcgccatccttcagggctacacgacggcgccacg

SEQ ID NO: 82399 - DNA, 75 bp, synthetic construct
  source 1..75: mol_type = other DNA
agcgcctgaagcaacattctctggcaaacaaactgatcagcctcttccgtcagtttggcggcacggagttacgtc

SEQ ID NO: 82400 - DNA, 75 bp, synthetic construct
  source 1..75: mol_type = other DNA
tccccgtccctggatgatgatctggtggtgaatttatgcaccagcgaacacctgctggttcatcatccgatgctg

SEQ ID NO: 82401 - DNA, 75 bp, synthetic construct
  source 1..75: mol_type = other DNA
ggctgatcggggtcgatgctattcgtggggctgcaatgagagtaatcggtaataagtttggtggctctaaggagt

SEQ ID NO: 82402 - DNA, 75 bp, synthetic construct
  source 1..75: mol_type = other DNA
atatcgacaaggacgggcgctaccgggtcaacctcgactttgaccgcgatacgtggaaaccgggctatgagagcc

SEQ ID NO: 82403 - DNA, 75 bp, synthetic construct
  source 1..75: mol_type = other DNA
atggctgatacaaaagcaaaactcaccctcaacggggacacagctgttgaactggatgtgctgaaaggcacgctg

SEQ ID NO: 82404 - DNA, 75 bp, synthetic construct
  source 1..75: mol_type = other DNA
cactcctgacccggaatcgtctgtgcgaagtccggctgaaggacggatacagggaagttacggcaacaatggctt

SEQ ID NO: 82405 - DNA, 75 bp, synthetic construct
  source 1..75: mol_type = other DNA
tgagaaatgggtgacagatactgaggcacagcataacgccgcagtagaagcagcagaagcacagcgccagtcact

SEQ ID NO: 82406 - DNA, 75 bp, synthetic construct
  source 1..75: mol_type = other DNA
acggttaatgatgacctgagcgtcagtttatttactcaggagcatcttttagcacatcaccccatgctggaaggg

SEQ ID NO: 82407 - DNA, 75 bp, synthetic construct
  source 1..75: mol_type = other DNA
tatcgttggcaccatatgtctgctctttgcgcttctcatctggctctttttacccgacatcgtctttgccacctg

SEQ ID NO: 82408 - DNA, 75 bp, synthetic construct
  source 1..75: mol_type = other DNA
atgctcaccagcggtgaactgaatccccgaaatcagcataccgtcacgctgtatgcaaaagggctgacctgcgaa

SEQ ID NO: 82409 - DNA, 75 bp, synthetic construct
  source 1..75: mol_type = other DNA
ccaatgcgaagaaagtcttcactgcggcggattgctgggccaacggtcagggcgacccgctgcgcgacgttgaaa

SEQ ID NO: 82410 - DNA, 75 bp, synthetic construct
  source 1..75: mol_type = other DNA
ttttttatgtgattggtgtgaacatatcctttgtcattatctggtttatctcacatgagaaaacacatattcgtt

SEQ ID NO: 82411 - DNA, 75 bp, synthetic construct
  source 1..75: mol_type = other DNA
aagtatttgtacgtaatgaattattgccattgcaaaaaagattacaagaaataaacaatttcatagaagaaggtg

SEQ ID NO: 82412 - DNA, 75 bp, synthetic construct
  source 1..75: mol_type = other DNA
tttgcagcgaacgccatgttcgtacgctgttacgccaggcacaggaggcgggatggctggagtggcaggcgcagt

SEQ ID NO: 82413 - DNA, 75 bp, synthetic construct
  source 1..75: mol_type = other DNA
cattaattgagcagatatatcatatttttcgtcgttatccggcgccgaagcaatttgtggtttgttgtgaatatt

SEQ ID NO: 82414 - DNA, 75 bp, synthetic construct
  source 1..75: mol_type = other DNA
ggcctgctcgataattgtagaacattatctaaaaatgccacttttcgtgaggttttccgaagtttattattatac

SEQ ID NO: 82415 - DNA, 75 bp, synthetic construct
  source 1..75: mol_type = other DNA
ttatgaatatccgtcgcccatacttcccaaagcgcgctggcgttatcagatggtgaatatgtacccggacagcgg

SEQ ID NO: 82416 - DNA, 75 bp, synthetic construct
  source 1..75: mol_type = other DNA
atggtaccccaataaattggaagagcaatataattgttttctttctggtcacaaaattgtctgctcttattatga

SEQ ID NO: 82417 - DNA, 75 bp, synthetic construct
  source 1..75: mol_type = other DNA
tggtcacctggtcttcaccaaaaactacacatcgaaggccgcatatgtgggctatcgccacgaatgtgcctataa

SEQ ID NO: 82418 - DNA, 75 bp, synthetic construct
  source 1..75: mol_type = other DNA
tggatgaagtcgaccgtgaactggcggcaagtgaaacgcgtttacgcgagatggaacgttatgtcacttccgata

SEQ ID NO: 82419 - DNA, 75 bp, synthetic construct
  source 1..75: mol_type = other DNA
tttggcttaaaaaccgtaaaagaatttgttaaagcaattctttatattattttattttttttttgcattggcgat

SEQ ID NO: 82420 - DNA, 75 bp, synthetic construct
  source 1..75: mol_type = other DNA
ccggggggatatttttgacggtgtaaatttcagggggattcaactggcctctgatgacaatatggttccggacag

SEQ ID NO: 82421 - DNA, 75 bp, synthetic construct
  source 1..75: mol_type = other DNA
gatgatggcctgtgttaaaggcctggagcttatcgcggaaatgcgtggtgactgcgccgttttctacaccatcac

SEQ ID NO: 82422 - DNA, 75 bp, synthetic construct
  source 1..75: mol_type = other DNA
acccgtcatgtcagtagttgcggctgtaatattgaagacagtcgcctggcgatgctgggagaagagttcacgttt

SEQ ID NO: 82423 - DNA, 75 bp, synthetic construct
  source 1..75: mol_type = other DNA
cctgcctgatgtcgtggggatggagattgccataaatggtgaggttttctcgttatcccacgaagcctggcagcg

SEQ ID NO: 82424 - DNA, 75 bp, synthetic construct
  source 1..75: mol_type = other DNA
gcgcatcgccgcaatgagatgatggcctgtgttaaaggtctggagcttatcgcggaaatgcgcggtgactgcgcc

SEQ ID NO: 82425 - DNA, 75 bp, synthetic construct
  source 1..75: mol_type = other DNA
tcacctgcctgctgttgccgatgatggcttccgcacatcagttcgaaaccggtcagcgagtgccgccgattggca

SEQ ID NO: 82426 - DNA, 75 bp, synthetic construct
  source 1..75: mol_type = other DNA
acagggtgacaaaaaagcaggtgctccggtactggataacccgcgccttgatgccattctggctgctgctgatgc

SEQ ID NO: 82427 - DNA, 75 bp, synthetic construct
  source 1..75: mol_type = other DNA
ttaataatacagagttcagacattctgatttgtctcactgtgatttttcaatgacagaaggtctcgatataaatc

SEQ ID NO: 82428 - DNA, 75 bp, synthetic construct
  source 1..75: mol_type = other DNA
gcgtcggggaggataaaaaggtctgcttcgagtatccgtcacccattattcccaaaacgcgctggcgctatcaga

SEQ ID NO: 82429 - DNA, 75 bp, synthetic construct
  source 1..75: mol_type = other DNA
ctccgcaacgcgatgaaaagcgccaaaggtccaggcaacttccgcaacctgtttatgtactcgcctaacggcaaa

SEQ ID NO: 82430 - DNA, 75 bp, synthetic construct
  source 1..75: mol_type = other DNA
aagtggtgatgcgtcaggaagccacggtgatcaccgttggcggttccgactacaaaaaactggtgaatctgggcg

SEQ ID NO: 82431 - DNA, 75 bp, synthetic construct
  source 1..75: mol_type = other DNA
tacattaacggcagtcatgctggcttcatcatgtatatgaccgacgccgcgcagaaccaggaagatgtgaacaac

SEQ ID NO: 82432 - DNA, 75 bp, synthetic construct
  source 1..75: mol_type = other DNA
tggtttagcgtggcagcacagcgtagtgatattcttgatgccgtgacactgtcacttaaagtggcggcgctggcg

SEQ ID NO: 82433 - DNA, 75 bp, synthetic construct
  source 1..75: mol_type = other DNA
gcatgggcgttctccagcgaagcgactggagcatgtgttgcacccgtgggtggcgtatctgattttaccactgtt

SEQ ID NO: 82434 - DNA, 75 bp, synthetic construct
  source 1..75: mol_type = other DNA
atgggaaagagtaagaagaaccgcgctgcggcgacgaaacagctccagcttaaaaaccagactacagccgaagca

SEQ ID NO: 82435 - DNA, 75 bp, synthetic construct
  source 1..75: mol_type = other DNA
gctgtgattccgggaggatcattaacggcatttcatgaacgattaatggaactggccagaggcagtattgaaaaa

SEQ ID NO: 82436 - DNA, 75 bp, synthetic construct
  source 1..75: mol_type = other DNA
aaggacgccgaggagctgttcgactggctcattgaggagtgccgcggagaatgcccgccccgtgtcaggaaaaat

SEQ ID NO: 82437 - DNA, 75 bp, synthetic construct
  source 1..75: mol_type = other DNA
tttgtctgttcttggccctatgttgcatgacatagattcagccatggcatccctgagcgatctgcagaaccgccc

SEQ ID NO: 82438 - DNA, 75 bp, synthetic construct
  source 1..75: mol_type = other DNA
actgctgccatcactggtgcagaaggcaagatccaccgtctggaagactggggtcgccgtcagctggcttacccg

SEQ ID NO: 82439 - DNA, 75 bp, synthetic construct
  source 1..75: mol_type = other DNA
gaccgtctgtgcgaaggttcctgcactctgaacgatgagtttggcgcggtgaccatcggcaacattgagcgttat

SEQ ID NO: 82440 - DNA, 75 bp, synthetic construct
  source 1..75: mol_type = other DNA
ttacatggcggtgctgaaatgggaaccccgcgtcaccctgtcatccgtcaccacggcgcgcagttttgacgggcg

SEQ ID NO: 82441 - DNA, 75 bp, synthetic construct
  source 1..75: mol_type = other DNA
agcgttctcatggaacagcccgaaaaaggccattaacccttatctggacccggcggaagttgcgccggtttctgc

SEQ ID NO: 82442 - DNA, 75 bp, synthetic construct
  source 1..75: mol_type = other DNA
ttgcattccagggttaatagttatgtcggaggcgctacacaggctattcctgctggaaccacatacaccaaagtt

SEQ ID NO: 82443 - DNA, 75 bp, synthetic construct
  source 1..75: mol_type = other DNA
gaaagaggtcgatttactccttcgcggcggcagcattccgtcaggagcaggcctgcgaatcttctatcggaacca

SEQ ID NO: 82444 - DNA, 75 bp, synthetic construct
  source 1..75: mol_type = other DNA
agccatttaacggaacaatcccattccggattttacagcgtggacgtgttctggttgaagatacattcagtggta

SEQ ID NO: 82445 - DNA, 75 bp, synthetic construct
  source 1..75: mol_type = other DNA
gcgtaactattctgaatgtcaccaccgtccgttctccgtcagggcatccggtggagacaatgacggagggggcaa

SEQ ID NO: 82446 - DNA, 75 bp, synthetic construct
  source 1..75: mol_type = other DNA
aaactaaataccgaataaaacttatatgggatgacaattataaaaaaaggaatgaagaggagtttttcatttcta

SEQ ID NO: 82447 - DNA, 75 bp, synthetic construct
  source 1..75: mol_type = other DNA
tttctgacccgcatcaacattgtgccggtcagcgaaatgaaaggggaaaaaattggtatcggtgtcaccggctcc

SEQ ID NO: 82448 - DNA, 75 bp, synthetic construct
  source 1..75: mol_type = other DNA
tacaacgcaaaattgcagaccttgaatcgtgtcgtgaagacatcccgtttggccttgatgaaaacgatcacaata

SEQ ID NO: 82449 - DNA, 75 bp, synthetic construct
  source 1..75: mol_type = other DNA
agcggacgcaccattgatcccgcttatgaaattcacctcgcgctctatcaggctataactggcccggaggaagac

SEQ ID NO: 82450 - DNA, 75 bp, synthetic construct
  source 1..75: mol_type = other DNA
gctgccgccgggatctccgagacgctgttgcgtatctccaccggtatagaagatggcgaagatttaattgccgac

SEQ ID NO: 82451 - DNA, 75 bp, synthetic construct
  source 1..75: mol_type = other DNA
ttcaaaacttaaatggtcagcagctttatggattgttagttggtggtggcatcataaacgcagcagtattggcgg

SEQ ID NO: 82452 - DNA, 75 bp, synthetic construct
  source 1..75: mol_type = other DNA
ttatttattgacggctatacatcggcagcagccagtaccgtgccttccctgagccggacactgatttatgactat

SEQ ID NO: 82453 - DNA, 75 bp, synthetic construct
  source 1..75: mol_type = other DNA
ccgtgatgaattaattgatacaactcaggcaaggccaattcagtattgcattaatggaacgtggtataacgcggg

SEQ ID NO: 82454 - DNA, 75 bp, synthetic construct
  source 1..75: mol_type = other DNA
agaataaatccatccgcctgcaggctgaagctgagacatggcaggacgcagtgaaaatcggcgttgacctgctgg

SEQ ID NO: 82455 - DNA, 75 bp, synthetic construct
  source 1..75: mol_type = other DNA
aattcatgcgctctctgcctacctgacgccatcctgtcgggagattctggagagtgatgcccgccgtcgcagtga

SEQ ID NO: 82456 - DNA, 75 bp, synthetic construct
  source 1..75: mol_type = other DNA
atgcgccaggtattatcgtctcttttggtgattgctggacttgtgagtggtcaggcaatcgccgcgcctgaatcc

SEQ ID NO: 82457 - DNA, 75 bp, synthetic construct
  source 1..75: mol_type = other DNA
atgaacccgttatttaatgacatccagatgcgccttttttatctgaatcatgcaccgtattcctggcactggaat

SEQ ID NO: 82458 - DNA, 75 bp, synthetic construct
  source 1..75: mol_type = other DNA
catgggtggcctgcaggccgtgcgtgcgccgttcttcccgccgaatgcgctgctgatcacccgtctggataacct

SEQ ID NO: 82459 - DNA, 75 bp, synthetic construct
  source 1..75: mol_type = other DNA
ggaaccctgcaggctggctgggagctgcggctttatcgggcatgtatgctgcgggggccagtatgatccttggcg

SEQ ID NO: 82460 - DNA, 75 bp, synthetic construct
  source 1..75: mol_type = other DNA
ttgatttcaaacaaccggaggagatggagtttaaccgtgccaggctccgaagggcatttgttcaaatcgggcgtg

SEQ ID NO: 82461 - DNA, 75 bp, synthetic construct
  source 1..75: mol_type = other DNA
ggtggcggagaaatttaccgagaaacattacccatggcctctacgctccacttatcgacgatcgacatcgagcca

SEQ ID NO: 82462 - DNA, 75 bp, synthetic construct
  source 1..75: mol_type = other DNA
tgaacaacctcaacggctatgtcgtcggtaccaacgttaacggcagcgccgggaagctgaaggttaacaatgcca

SEQ ID NO: 82463 - DNA, 75 bp, synthetic construct
  source 1..75: mol_type = other DNA
atgtttccttgccgacaaaaaaagtgacaggaatattattgctgattgtcatttcgggcagtttattttccgctt

SEQ ID NO: 82464 - DNA, 75 bp, synthetic construct
  source 1..75: mol_type = other DNA
aacaaggggctgatccagggctgggaggaatcagaagaaaccttccagaagtggacccgtaagggacgcctgtca

SEQ ID NO: 82465 - DNA, 75 bp, synthetic construct
  source 1..75: mol_type = other DNA
cgctaagcagtgagattattggtgtccagacgctaaaagcgggtgagcgtgtgggctacggcggtcgctatactg

SEQ ID NO: 82466 - DNA, 75 bp, synthetic construct
  source 1..75: mol_type = other DNA
acgtttccaatgagtttaatacattgtacgttgataatataaaaaaagaacctaaaaaatactttgaaagaatag

SEQ ID NO: 82467 - DNA, 75 bp, synthetic construct
  source 1..75: mol_type = other DNA
cacgctcaagatataccccacatcttacatctacgaagatagttcattagggtattggcccagttattcctcact

SEQ ID NO: 82468 - DNA, 75 bp, synthetic construct
  source 1..75: mol_type = other DNA
acatgggaaaaggtggcagcggaaaccctgcgtctggatgtcatcccacctgcgtttgagcaactccgtcggaaa

SEQ ID NO: 82469 - DNA, 75 bp, synthetic construct
  source 1..75: mol_type = other DNA
gtgctgtttcactggatgccacccgtgcgaatgcccggttaccggatgaaagccggcatgacggtcagtcatatc

SEQ ID NO: 82470 - DNA, 75 bp, synthetic construct
  source 1..75: mol_type = other DNA
gtgatcacagtcggtggggtagagattaccggcggctacttctatcttggacagcgaatgaaccctgtcgggcat

SEQ ID NO: 82471 - DNA, 75 bp, synthetic construct
  source 1..75: mol_type = other DNA
gctttcaaacctgatcactctgtacgctaccgataacgagcaggaacagctgcgccgcgaggcactgagtgatca

SEQ ID NO: 82472 - DNA, 75 bp, synthetic construct
  source 1..75: mol_type = other DNA
tcaatgggcgcaagctgtatttgtctccagtaatagatctcttcaacaatgatgttatttcttacagcctttcgg

SEQ ID NO: 82473 - DNA, 75 bp, synthetic construct
  source 1..75: mol_type = other DNA
gcgtcaaagtcaggcgctcagcggtgacgacgcatttcaggtaggaataaggagcatcgcttatgcagtggcaaa

SEQ ID NO: 82474 - DNA, 75 bp, synthetic construct
  source 1..75: mol_type = other DNA
tatcgtagaatttaatcttcctgttgtaatagctaatttagacggagatagaacagtcgataagaacttcattcc

SEQ ID NO: 82475 - DNA, 75 bp, synthetic construct
  source 1..75: mol_type = other DNA
aaatgactgcgcaaattaccatgaatgctggtgctgatagttcgttagtgaacaacaccggaaccatcaataaaa

SEQ ID NO: 82476 - DNA, 75 bp, synthetic construct
  source 1..75: mol_type = other DNA
ccggtgctaaaagacggaaaacctgttgcagcattatcggctggaggtcactttgatccgaaaaagaccgggaaa

SEQ ID NO: 82477 - DNA, 75 bp, synthetic construct
  source 1..75: mol_type = other DNA
ccgtcagttacggcattgtcagactgaacgcaccggtgactgccgccttcaacatgaaacagaccgtggatgcgt

SEQ ID NO: 82478 - DNA, 75 bp, synthetic construct
  source 1..75: mol_type = other DNA
atgttacagcccgtcgacgcagccactggtggtggacggtgccgggatgcctggcaatggtgttactgaacgcag

SEQ ID NO: 82479 - DNA, 75 bp, synthetic construct
  source 1..75: mol_type = other DNA
agctgtttctggccggaagtgccggacttctgcagaccactgaagatgtgcggtttgaaccatgccccggactga

SEQ ID NO: 82480 - DNA, 75 bp, synthetic construct
  source 1..75: mol_type = other DNA
tggcaggagcagccgggagcggatgcagtccggtgcggaaatggcgcaggcggaaatccgcatctgggtgcgcgg

SEQ ID NO: 82481 - DNA, 75 bp, synthetic construct
  source 1..75: mol_type = other DNA
gggagatgaaacgaaggtagctgaagttactgaaatgaagaattcagagagactgaatgatatgtcgcaccttca

SEQ ID NO: 82482 - DNA, 75 bp, synthetic construct
  source 1..75: mol_type = other DNA
ttttcggtctggcttcagtcagtatggtactgggcgatcatcgaaagaacgagaagttcagcctgtggtgcagcg

SEQ ID NO: 82483 - DNA, 75 bp, synthetic construct
  source 1..75: mol_type = other DNA
cgtcacgatagtcactgacagaagctacaacactgaacataatgattttgagaagcgaaaagagaagcagcagaa

SEQ ID NO: 82484 - DNA, 75 bp, synthetic construct
  source 1..75: mol_type = other DNA
gggagacaacttcattcaggtggatttcgacacgccgtggtgtcagccggaaagcgacgttgttgcagaattaag

SEQ ID NO: 82485 - DNA, 75 bp, synthetic construct
  source 1..75: mol_type = other DNA
gcggtactggccggcgtcgctgggaagaattaccggatgatgccagggaaagcattaccgctcttttcaccccaa

SEQ ID NO: 82486 - DNA, 75 bp, synthetic construct
  source 1..75: mol_type = other DNA
gccgtaacgtgctcagcccgtcgaagttgcgggaaaaatgggatgagctttccctgcgcttatcgccgtccgtca

SEQ ID NO: 82487 - DNA, 75 bp, synthetic construct
  source 1..75: mol_type = other DNA
gtacccaacgtccgttcaccggggaagagtatctgaaaagcctgcaggatggtcgcgagatctatatctatggcg

SEQ ID NO: 82488 - DNA, 75 bp, synthetic construct
  source 1..75: mol_type = other DNA
taataaccgagccaacagaatggcgaaaaggccaaaaccgtgcttactggatcaaaatttaccatggcgaaatct

SEQ ID NO: 82489 - DNA, 75 bp, synthetic construct
  source 1..75: mol_type = other DNA
tgctgaataaccgcaccacggatgtgataaacaaccatgctgagaccattggcaacaatcagatgattgcggtta

SEQ ID NO: 82490 - DNA, 75 bp, synthetic construct
  source 1..75: mol_type = other DNA
ttacccagggcggcggagcgatgagttctaacgggatcgtggttgatgcgcatcagcatactggcgtcctgaaag

SEQ ID NO: 82491 - DNA, 75 bp, synthetic construct
  source 1..75: mol_type = other DNA
ccgttcctgaccgcccatacccgccagctcatgggattgccggagtctgcagagtatccgctgacggatgtggaa

SEQ ID NO: 82492 - DNA, 75 bp, synthetic construct
  source 1..75: mol_type = other DNA
gctgatccatcgactatcgccgccaccaacagtgatttaagtaccttaaaggcaacggttgaggatggcagtggt

SEQ ID NO: 82493 - DNA, 75 bp, synthetic construct
  source 1..75: mol_type = other DNA
ggccacagggatcgggtcgttccggtgggccatgtggcgctggcgtggctggggcggtatctgaaagacgtgcgg

SEQ ID NO: 82494 - DNA, 75 bp, synthetic construct
  source 1..75: mol_type = other DNA
atgataaatgggatggtgagaaatgggtgaccgatactgaggcacagcatagcgcagcagtagacgcggcagaag

SEQ ID NO: 82495 - DNA, 75 bp, synthetic construct
  source 1..75: mol_type = other DNA
ctaacggcaacccggtagaaggcataaaagttaatttccgcggaacctccgtcacgctaagcagcaccagcgttg

SEQ ID NO: 82496 - DNA, 75 bp, synthetic construct
  source 1..75: mol_type = other DNA
aggagtttttaactcgccatcctgatgcggttgtattcagccctaaaaagcgccagtggggaacgcaggatgatt

SEQ ID NO: 82497 - DNA, 75 bp, synthetic construct
  source 1..75: mol_type = other DNA
tccgctgagcgcgagcaaacaacataccggcagcagattgactccgcccatgaaatcgttcttaaagaacagcag

SEQ ID NO: 82498 - DNA, 75 bp, synthetic construct
  source 1..75: mol_type = other DNA
tcgcccacttcgagaaacacggcgcgctggagcaagcgcactaccggcccgcagcgcgcgcgccgccgccggccg

SEQ ID NO: 82499 - DNA, 75 bp, synthetic construct
  source 1..75: mol_type = other DNA
agtcgaaaccgccgggcggatttaagctgtggttgtcgcagctgcaaatgaagcatgggcgcaaactggtcattg

SEQ ID NO: 82500 - DNA, 75 bp, synthetic construct
  source 1..75: mol_type = other DNA
ttgcggcgtgttcacgtggtattaacgtcacgatagtcactgacagaagctacaacactgaacataaagattttg

SEQ ID NO: 82501 - DNA, 75 bp, synthetic construct
  source 1..75: mol_type = other DNA
ttggcgtgacggcgcaggtgccgtacacggatgtgtggacgcataaaccggtgcagtactatcccgggaaacatc

SEQ ID NO: 82502 - DNA, 75 bp, synthetic construct
  source 1..75: mol_type = other DNA
atgaaatcgcacctgatgaataaaaaaaccatggcgaaaagctgccgagtaagcgccactgcgttcgataagtgg

SEQ ID NO: 82503 - DNA, 75 bp, synthetic construct
  source 1..75: mol_type = other DNA
cctgccgcttaccatgcaaaggcgcttcccacagatgactccggctatgctggatggacttaaaaaggaagtggc

SEQ ID NO: 82504 - DNA, 75 bp, synthetic construct
  source 1..75: mol_type = other DNA
ccggacgctggaacgggtgcaacaaggaaagcctgagggcgtatttccccgccacagagcgcattctgttcgcgg

SEQ ID NO: 82505 - DNA, 75 bp, synthetic construct
  source 1..75: mol_type = other DNA
tggccccgctgatttcttactttcgtgatgcgcgtgaatcactggggataacgtcgaaacagatagcggaagcca

SEQ ID NO: 82506 - DNA, 75 bp, synthetic construct
  source 1..75: mol_type = other DNA
tctgcgccgggtattcttgttgccggcctggcagtgtttattttgatgagccggagatcacgaatgcagccgtgc

SEQ ID NO: 82507 - DNA, 75 bp, synthetic construct
  source 1..75: mol_type = other DNA
tctgcaccgggtattcttgttgctgggttggcggtgtttattttgatgagccggagatcacgaatacagccgtgc

SEQ ID NO: 82508 - DNA, 75 bp, synthetic construct
  source 1..75: mol_type = other DNA
tgaacaaaacagacaaacgacttctcgacacccttgttgctgccggatatgagcatgacaaagcccgtgacctca

SEQ ID NO: 82509 - DNA, 75 bp, synthetic construct
  source 1..75: mol_type = other DNA
agtgactctttctgctttaccgggtaaagcatcaacggtcagcgcagaaataccatatcagacttttcgtgactt

SEQ ID NO: 82510 - DNA, 75 bp, synthetic construct
  source 1..75: mol_type = other DNA
agtgggaaaaccttattatactcactataacggtatgaagatgatttcagcaaacccgggaaatacctttgataa

SEQ ID NO: 82511 - DNA, 75 bp, synthetic construct
  source 1..75: mol_type = other DNA
tggccccgctgatttcttactttcgtgatgcgcgtgaatcactgggaataacgtcaaaacagatagcggaagcca

SEQ ID NO: 82512 - DNA, 75 bp, synthetic construct
  source 1..75: mol_type = other DNA
cttctgcagaccactgaagatgtgcggtttgaaccatgccccggactgacggctgccgggcgtggcgttgtatcg

SEQ ID NO: 82513 - DNA, 75 bp, synthetic construct
  source 1..75: mol_type = other DNA
ggcggcaaaaacagcgaggatcatgtggtcaatgttgtcacacaatactgaatatcaacctcggcagctcgcctg

SEQ ID NO: 82514 - DNA, 75 bp, synthetic construct
  source 1..75: mol_type = other DNA
ttgacgaaaaagagcgccaggtccgctgtaaaatctgcggtgcggttgtggagccgtttgactggatgctctctg

SEQ ID NO: 82515 - DNA, 75 bp, synthetic construct
  source 1..75: mol_type = other DNA
agattctcgtgtgaaagaacgtatcgcacgagcgggtcaatggtttggcgaaacgttaattgccgatgatgcctt

SEQ ID NO: 82516 - DNA, 75 bp, synthetic construct
  source 1..75: mol_type = other DNA
tgcgccaggaggagcgggaaaggcgaaaaaatatagaaaagctaatccagattgagcgtaatgcgaaagcgcgga

SEQ ID NO: 82517 - DNA, 75 bp, synthetic construct
  source 1..75: mol_type = other DNA
attacctggggacgcataagagcttctgtgcacaggacgttgccgcggtaacaggtgcaaccgtaaccagcataa

SEQ ID NO: 82518 - DNA, 75 bp, synthetic construct
  source 1..75: mol_type = other DNA
gcagaacaatttgccggagctgatttccggctggcgtggtgagttgatggcggaagcattacacaatttattgca

SEQ ID NO: 82519 - DNA, 75 bp, synthetic construct
  source 1..75: mol_type = other DNA
caggtccgttgtaaaatctgcggtgcagttgtggagacgtttgactggatgctctctgtggcaaaaagagaaacc

SEQ ID NO: 82520 - DNA, 75 bp, synthetic construct
  source 1..75: mol_type = other DNA
caggtcattccgttgattgccgcatcaatggccagcagtcagatggataagctgaatgcagcgcttaatcaagga

SEQ ID NO: 82521 - DNA, 75 bp, synthetic construct
  source 1..75: mol_type = other DNA
acaggaacagacgcagaatgatatatgatgcgttaaccattatttgtgaggatgataacagggctaaacaccctg

SEQ ID NO: 82522 - DNA, 75 bp, synthetic construct
  source 1..75: mol_type = other DNA
gaaaaatatagaaaagttaattcagattgagcgtaacgcgaaagcgcggatacgcagggcgaaaaaaacagaact

SEQ ID NO: 82523 - DNA, 75 bp, synthetic construct
  source 1..75: mol_type = other DNA
actgaatacgctgttcccgccggattatgttaatcagttacgtgtctttgcggtggttaaccagttccgtcttca

SEQ ID NO: 82524 - DNA, 75 bp, synthetic construct
  source 1..75: mol_type = other DNA
gagctacctgtctgcctgaattattatggttctggtggtggtgaaattctgcctgcgggacttcaggtcgtgacg

SEQ ID NO: 82525 - DNA, 75 bp, synthetic construct
  source 1..75: mol_type = other DNA
atcaacgaactggaaggcatcttcgaaggtgctggctggaacgtgatcaaagtgatgtggggtagccgttgggat

SEQ ID NO: 82526 - DNA, 75 bp, synthetic construct
  source 1..75: mol_type = other DNA
ggcatgtctataccgcaaaactgggaacgctgtcagagctggttggtgccggagatatgcataatcagcaacata

SEQ ID NO: 82527 - DNA, 75 bp, synthetic construct
  source 1..75: mol_type = other DNA
gggaagtcagctggcgcgtatggtcgaggcttatcgccagaccgacccgtttggcgagctgtatgtgattgccgt

SEQ ID NO: 82528 - DNA, 75 bp, synthetic construct
  source 1..75: mol_type = other DNA
ggcgttatgctgcgcgatccggcgcgttttgatctgcgcggtacgcttactcacgggcgcgatgttgaaattgat

SEQ ID NO: 82529 - DNA, 75 bp, synthetic construct
  source 1..75: mol_type = other DNA
agcaaaaataatgcttgaatccggagtccctcttgcagacatcatgcgctttaccggggtgtcagaagaagagtt

SEQ ID NO: 82530 - DNA, 75 bp, synthetic construct
  source 1..75: mol_type = other DNA
gtgcactacacgcggacacaatatgcagagccgctggtcgaaagtcgctatctttacgacccgctgggccgcagg

SEQ ID NO: 82531 - DNA, 75 bp, synthetic construct
  source 1..75: mol_type = other DNA
cacgttaattgacaataaagccctctctcttttcaagatggatgatcatgaaaaagtgataggcttgattcagaa

SEQ ID NO: 82532 - DNA, 75 bp, synthetic construct
  source 1..75: mol_type = other DNA
tgcggttttttttaggcggcaggtgttacacggctgaaaaccttgaaaaggattatctggctgaagttgctaatt

SEQ ID NO: 82533 - DNA, 75 bp, synthetic construct
  source 1..75: mol_type = other DNA
atgccaaaatggtgctcgaatcgtatgtatttttctggtgaaccggcaaagattgctgagattaaacggctggcc

SEQ ID NO: 82534 - DNA, 75 bp, synthetic construct
  source 1..75: mol_type = other DNA
aactgcaccgccagatatggcaaattgccaatgatgtcagaggttctgttgacggatgggattttaagcaatacg

SEQ ID NO: 82535 - DNA, 75 bp, synthetic construct
  source 1..75: mol_type = other DNA
gacccgggcgaaaacattccgggaaaagtggcagtatttacgggtaagggatggagccatgaagaagaccatcgc

SEQ ID NO: 82536 - DNA, 75 bp, synthetic construct
  source 1..75: mol_type = other DNA
cttcgccttaaaaagcggctccaccacattaacgtcattaacagcggtgaccgatcaaaacggaatcgcgacaac

SEQ ID NO: 82537 - DNA, 75 bp, synthetic construct
  source 1..75: mol_type = other DNA
ggaggctgagtgcacgcgtattaacagcgaagtggtggtcaatggtggcgttactcagggcggcggagcgatgag

SEQ ID NO: 82538 - DNA, 75 bp, synthetic construct
  source 1..75: mol_type = other DNA
cacaggtgtagtcaccgaagtggacagggcaaactggctgtgtcgggtgaaaactggcgacctcgaaaccaactg

SEQ ID NO: 82539 - DNA, 75 bp, synthetic construct
  source 1..75: mol_type = other DNA
cacagattgcacgtgaaaatggcgttgaattattacctgtagaaataacgccggatgagcagaaagaacctgtgg

SEQ ID NO: 82540 - DNA, 75 bp, synthetic construct
  source 1..75: mol_type = other DNA
cgctggaaggttcgacagtgcctcacgttcagcaacttcaccagcggctgattaccgctggcgtcgaaagccatt

SEQ ID NO: 82541 - DNA, 75 bp, synthetic construct
  source 1..75: mol_type = other DNA
tcaaattcaatcgttgaaggcccgcaagagcgctatcagctgaactggcccggtaagcgagaagcactactaaca

SEQ ID NO: 82542 - DNA, 75 bp, synthetic construct
  source 1..75: mol_type = other DNA
gttggcgtgcataacgatcgccagttgctgcaattttgctacacctcagaagtggccgacagtgcgctgaaaatc

SEQ ID NO: 82543 - DNA, 75 bp, synthetic construct
  source 1..75: mol_type = other DNA
gcagcaatagtttgcttccccggtattttctaccgtggcggagcagagcagaaaatccgccagtacctggtcgac

SEQ ID NO: 82544 - DNA, 75 bp, synthetic construct
  source 1..75: mol_type = other DNA
attctgatcgaggccttttatcaccgcctgtatggcagggcaccggaggatgatggggttcacatcatcgctatc

SEQ ID NO: 82545 - DNA, 75 bp, synthetic construct
  source 1..75: mol_type = other DNA
cgctcgtggtatcagtgccagaatctggaatgttcctgcacatttacggcactggagagtgtggataagataatc

SEQ ID NO: 82546 - DNA, 75 bp, synthetic construct
  source 1..75: mol_type = other DNA
ggctggctacagtgccgggtgatatgcgttgtttttattatgatgcagtaacgtctgaatatacgggctggtctg

SEQ ID NO: 82547 - DNA, 75 bp, synthetic construct
  source 1..75: mol_type = other DNA
tcaaggttccacgcgcattgaacgcgtgctggcctccggtactggtgcgcgtattgtcaccagccacgatgatgt

SEQ ID NO: 82548 - DNA, 75 bp, synthetic construct
  source 1..75: mol_type = other DNA
ccgatcataacgagataatttgctcgaccaatattgagcgtatcgtcacaggacgtgatagtgcactgaagcaga

SEQ ID NO: 82549 - DNA, 75 bp, synthetic construct
  source 1..75: mol_type = other DNA
gcagtgggaacgcctgcaacgcggtgttgcgtcattctcgctacaactggcagaaggtcgggcagatctctacac

SEQ ID NO: 82550 - DNA, 75 bp, synthetic construct
  source 1..75: mol_type = other DNA
cctggcagatcgcggagcctatacgggcgtaattgccagttggttacatacccgtgaacccgcgaagaaagaaag

SEQ ID NO: 82551 - DNA, 75 bp, synthetic construct
  source 1..75: mol_type = other DNA
tcagtgtgcaactgaataatctgcaggaaacggcaacatctgccttaagcgatataagtaaaacggtgggagggc

SEQ ID NO: 82552 - DNA, 75 bp, synthetic construct
  source 1..75: mol_type = other DNA
tgcgggatacgccggcgagcatggccgagcgaaatcagcaaatcgccgggatcggcgcggcgctgatcgagcact

SEQ ID NO: 82553 - DNA, 75 bp, synthetic construct
  source 1..75: mol_type = other DNA
cttcggcaacgagcttccggcgtctccagtggagtggctgacagataatggttcatgctaccgggctaatgaaac

SEQ ID NO: 82554 - DNA, 75 bp, synthetic construct
  source 1..75: mol_type = other DNA
cggtgggctaagcgaatttatgttttttatactcttgcggctgccgagtttttgcttgtgtactcaatcgcgcaa

SEQ ID NO: 82555 - DNA, 75 bp, synthetic construct
  source 1..75: mol_type = other DNA
aagctggttacgcttaacccgaaactgaaatccaccgccgccgggcgttatcaactgctgtcgaaatggtgggac

SEQ ID NO: 82556 - DNA, 75 bp, synthetic construct
  source 1..75: mol_type = other DNA
ggtgatttacattgcaaaacgcagagtgattttttcgatattatcggctttaagcaatttctttttgagcaaact

SEQ ID NO: 82557 - DNA, 75 bp, synthetic construct
  source 1..75: mol_type = other DNA
ttcaggatttggtgagtttgttgatcaccttggaatggctgctcttggtccgattgattacttcaatgttcagga

SEQ ID NO: 82558 - DNA, 75 bp, synthetic construct
  source 1..75: mol_type = other DNA
atgctggttgggcgtctggggaaaagcgcacgtcaacgggccttgattaatttatcgctttgttttccggagtac

SEQ ID NO: 82559 - DNA, 75 bp, synthetic construct
  source 1..75: mol_type = other DNA
aacggcctgagcgttccgccagtacggcgacaactggcggcaccaaaacgcccgttgggaccaacgccaattgag

SEQ ID NO: 82560 - DNA, 75 bp, synthetic construct
  source 1..75: mol_type = other DNA
tgtggcactgatttcggaaagcggagccaatccattcggtctgacggtggatgctgtgatggaggagtaccgccg

SEQ ID NO: 82561 - DNA, 75 bp, synthetic construct
  source 1..75: mol_type = other DNA
cacagaaaattattgaagcagccgatgaggttattagtgcgctggccggaactaacgaggatgttaaccctgata

SEQ ID NO: 82562 - DNA, 75 bp, synthetic construct
  source 1..75: mol_type = other DNA
atcaccactgtgctggataaccgtctgatgagtctgacgctggcggacaatcggggctttgaagcggaccagctt

SEQ ID NO: 82563 - DNA, 75 bp, synthetic construct
  source 1..75: mol_type = other DNA
gtggtgctctctgatgcgatgatgggctatctccatttcattgcaaatattccggtcaaaggcactcgctggcta

SEQ ID NO: 82564 - DNA, 75 bp, synthetic construct
  source 1..75: mol_type = other DNA
tgaaatggcaatcaactggcgatgtcggcatcagtagcgcaactcttgcctcaatcgcatgtggactgaaaaaga

SEQ ID NO: 82565 - DNA, 75 bp, synthetic construct
  source 1..75: mol_type = other DNA
aatggcgaagtgaagccgctggatgtgaaagttggcgacatcgttattttcaacgatggctacggtgtgaaatct

SEQ ID NO: 82566 - DNA, 75 bp, synthetic construct
  source 1..75: mol_type = other DNA
ctatattagaaatcatatcattagtaggcctagcattagagactctgacgatgaagagttagttgcaaatatctt

SEQ ID NO: 82567 - DNA, 75 bp, synthetic construct
  source 1..75: mol_type = other DNA
tggatacccgaagaacaattaccaacctggcctgtctgatgtcttttcacaattattcctccgggaaaaaatcag

SEQ ID NO: 82568 - DNA, 75 bp, synthetic construct
  source 1..75: mol_type = other DNA
ggaaagacgctgttgactgggtattacaggaagcatgtcaggctgttcattggtgccgacagatatcagaccttc

SEQ ID NO: 82569 - DNA, 75 bp, synthetic construct
  source 1..75: mol_type = other DNA
acagacggatttatcttgcgcgaaggtgagtttgtcacttcattacaggcactgaaagagatcggaataaaagct

SEQ ID NO: 82570 - DNA, 75 bp, synthetic construct
  source 1..75: mol_type = other DNA
gaaacgtctgtactggcacatatccggctggctggattgtgcggcaccggtaccaaaccgccagacctgattgcc

SEQ ID NO: 82571 - DNA, 75 bp, synthetic construct
  source 1..75: mol_type = other DNA
caatgttgggcactctttggcgatgcaaggtgctagcgctgaagagatagcacatgtactggggcacacctctct

SEQ ID NO: 82572 - DNA, 75 bp, synthetic construct
  source 1..75: mol_type = other DNA
gtcattgataaactggtaacaaagtgctggcaggaagaatcgtacgctgagacccagctgagaaaagtgacgaga

SEQ ID NO: 82573 - DNA, 75 bp, synthetic construct
  source 1..75: mol_type = other DNA
ataaaacactctccaggaaacccggggcgattcaatgggtaaaccgttttgtaaactggtacaactttgaacata

SEQ ID NO: 82574 - DNA, 75 bp, synthetic construct
  source 1..75: mol_type = other DNA
cgccatctaccagaaccagacggtgccgcaaatcgtcgaaaaaatcctgcgcgagcgccatcaaatgcgcggtca

SEQ ID NO: 82575 - DNA, 75 bp, synthetic construct
  source 1..75: mol_type = other DNA
ggcagagtgggcggtaaaaacggtcattgaaaaatttgccgaacagtttgccgcgctaagcgataactatctcaa

SEQ ID NO: 82576 - DNA, 75 bp, synthetic construct
  source 1..75: mol_type = other DNA
ggtacccataacatccccggtgttcatggaagatggaggctatgagctgtttcacatcagcatacttgtccttag

SEQ ID NO: 82577 - DNA, 75 bp, synthetic construct
  source 1..75: mol_type = other DNA
attactgacatgcagcagcgccagcgtgctgctgatgcactcgatgctaaatacacgaaggagttagctgatgcg

SEQ ID NO: 82578 - DNA, 75 bp, synthetic construct
  source 1..75: mol_type = other DNA
cagtgacggtagcgaagtgacggcgcaggtgctgccgctgggctacgccatcggtaagtacttacctgccgacga

SEQ ID NO: 82579 - DNA, 75 bp, synthetic construct
  source 1..75: mol_type = other DNA
ggttttccatcaccggccgcagactacaccgaagacgaactggatctgaatgcctactgtatccgacgtccggct

SEQ ID NO: 82580 - DNA, 75 bp, synthetic construct
  source 1..75: mol_type = other DNA
gtgtgcgtaatctggcgggttataacgaaaaaattgctgaagccgatcgcatgatgcgtccgattccagacccgt

SEQ ID NO: 82581 - DNA, 75 bp, synthetic construct
  source 1..75: mol_type = other DNA
tcattaccggctttaaacatctctcatcgtcacaggacgaagcccgttacgaagtgcgccttgaaccccgtatgg

SEQ ID NO: 82582 - DNA, 75 bp, synthetic construct
  source 1..75: mol_type = other DNA
cgtatctactgtgacgatccgcaacgatctggcgtttctggaaaagcaggggatcgctgtgcgtgcctatggtgg

SEQ ID NO: 82583 - DNA, 75 bp, synthetic construct
  source 1..75: mol_type = other DNA
gggtgtggcttaccagacgacggtaggcggcattatgaatacctcggtggcgttgttgcagtcctcacaggtagg

SEQ ID NO: 82584 - DNA, 75 bp, synthetic construct
  source 1..75: mol_type = other DNA
cggtgaaaggggccgggaccacactgtgggtttataaggggaacggtgacccttatgcaaacccgctgtcagatg

SEQ ID NO: 82585 - DNA, 75 bp, synthetic construct
  source 1..75: mol_type = other DNA
gtgcgacacgggaagcgcgatatgaacgatacgatacctcaatggtttattgcggtgataacctgaagggtgaga

SEQ ID NO: 82586 - DNA, 75 bp, synthetic construct
  source 1..75: mol_type = other DNA
caggcgaggaaatcttctgcgacgaacatggtcgcgtgcgggtgaagttcaactgggaccgttataacccggcag

SEQ ID NO: 82587 - DNA, 75 bp, synthetic construct
  source 1..75: mol_type = other DNA
ggatgtgtttcgtggctgggtgagcgccattggtaaagcggtgaccgccaaagaggtgatcacccgtacggtaaa

SEQ ID NO: 82588 - DNA, 75 bp, synthetic construct
  source 1..75: mol_type = other DNA
ctttgctacttctttctggatggtatggtgaggttttattgtctttttgtcatgaaataatgtttttaattaaga

SEQ ID NO: 82589 - DNA, 75 bp, synthetic construct
  source 1..75: mol_type = other DNA
atgggagcggatgttacagagttctcggtacaggggaaaagtggtacctgtcgccagttctccgatctgtttaac

SEQ ID NO: 82590 - DNA, 75 bp, synthetic construct
  source 1..75: mol_type = other DNA
gcagacagcttctccctgttagccatccccttctttgtactggcgggtgagatcatgaacgcgggcggcctgtcg

SEQ ID NO: 82591 - DNA, 75 bp, synthetic construct
  source 1..75: mol_type = other DNA
atgagtgaaaagagtcacggcagagaagaaatccgtcttcacattgtttgcgatgtccctgatgaacttattgat

SEQ ID NO: 82592 - DNA, 75 bp, synthetic construct
  source 1..75: mol_type = other DNA
ttgccgaatgaggctgactatcggaagttacaggcactgttttcccgtatagcggcagagaagtttcaggaacaa

SEQ ID NO: 82593 - DNA, 75 bp, synthetic construct
  source 1..75: mol_type = other DNA
cgttttcgaacgtgggattatcaatgtatttaagggattgagctgggactacaaaaccaataatccctgttattt

SEQ ID NO: 82594 - DNA, 75 bp, synthetic construct
  source 1..75: mol_type = other DNA
cttgacgaaaacctgccacagatactggctgattacctgatggaaactaccggaaacgcgcctgagaagttgcta

SEQ ID NO: 82595 - DNA, 75 bp, synthetic construct
  source 1..75: mol_type = other DNA
atgacggcccaggcggaagcgcaggaacttaaaaacgagcgcgaacgcggcgaggtgattgatacaaagttttgc

SEQ ID NO: 82596 - DNA, 75 bp, synthetic construct
  source 1..75: mol_type = other DNA
ggaagcgcgtcagcaatctcctgatggctgcgtgatggtattcgctgcccgtattcgccagggggaaacctatgc

SEQ ID NO: 82597 - DNA, 75 bp, synthetic construct
  source 1..75: mol_type = other DNA
ccggaccagccgattattatggggcgtacctaccaccaggaaaaccgcacacccggcagcctgccggggacgaag

SEQ ID NO: 82598 - DNA, 75 bp, synthetic construct
  source 1..75: mol_type = other DNA
atttccatcgcgcgcacgctgccattgcggccggacagctggcagtggaaaagaaaatggacgaacttttgccgt

SEQ ID NO: 82599 - DNA, 75 bp, synthetic construct
  source 1..75: mol_type = other DNA
ggagggcgatctcccggctattagcgaagccaacatcctgagtacctttgaacaactccaccacaataaacggga

SEQ ID NO: 82600 - DNA, 75 bp, synthetic construct
  source 1..75: mol_type = other DNA
gcagcagttgctggatgaaaaccagcgtcagcgtgatgcgctggagcgcagtgcgccgctgaccatcacgccgtc

SEQ ID NO: 82601 - DNA, 75 bp, synthetic construct
  source 1..75: mol_type = other DNA
cactacgtaaaattggctttgatacctttaaattaaacggctgtgaagaattaggcattattgatgattcacgga

SEQ ID NO: 82602 - DNA, 75 bp, synthetic construct
  source 1..75: mol_type = other DNA
aaaaatgagtggagtcgcgagactcttaatcgctggattaatggtaagtgctcacctaagacgctgacgtcagcc

SEQ ID NO: 82603 - DNA, 75 bp, synthetic construct
  source 1..75: mol_type = other DNA
ctcaccgtaaagcgcagcggtggtacttcaccggatattccgtggcagagcctgccagcgtcacaccgtggtgat

SEQ ID NO: 82604 - DNA, 75 bp, synthetic construct
  source 1..75: mol_type = other DNA
aagctttcctcgatatggtggcatggtcagaaggaacggataacggacggcagaaaaccagaaatcatggttatg

SEQ ID NO: 82605 - DNA, 75 bp, synthetic construct
  source 1..75: mol_type = other DNA
tatttgattggtcaggatcccgcacgcattaacgacttgtggcaagtgatgtaccgcgctggtttttatcgcggt

SEQ ID NO: 82606 - DNA, 75 bp, synthetic construct
  source 1..75: mol_type = other DNA
tttctgtggccgggagagtgaggcatatcatctgtactgacctttcacgccagtggaagctgcgggatgtcagca

SEQ ID NO: 82607 - DNA, 75 bp, synthetic construct
  source 1..75: mol_type = other DNA
gccaatccatttggcctgacggtggatgctgtgatggaggagtatcgccgctggcgtaatgagtcctggcgatat

SEQ ID NO: 82608 - DNA, 75 bp, synthetic construct
  source 1..75: mol_type = other DNA
tgaagcaggcatgtcctccgccgttacagtacacttcgatgaatcagtgtatttaaacagcttttcttttggtat

SEQ ID NO: 82609 - DNA, 75 bp, synthetic construct
  source 1..75: mol_type = other DNA
atgacaaacacgaaaaaagcggccccgatatggagccgcctttctgaacaattaacccgctgcgccttatgtgta

SEQ ID NO: 82610 - DNA, 75 bp, synthetic construct
  source 1..75: mol_type = other DNA
atgccagcgcctctgtatggtgcggacgacgcgcgccgctgttccggcaattccgtattggaggtgctggaaaat

SEQ ID NO: 82611 - DNA, 75 bp, synthetic construct
  source 1..75: mol_type = other DNA
tttgagatgattttaggtaaaccagcgtatacgcataatacctttattgagctattacttgaaggaggcatcagc

SEQ ID NO: 82612 - DNA, 75 bp, synthetic construct
  source 1..75: mol_type = other DNA
gtttgccgggaataaagaagatattgtcggtattggtctgggatccatccgttgctgccgtgcgttattgaaagc

SEQ ID NO: 82613 - DNA, 75 bp, synthetic construct
  source 1..75: mol_type = other DNA
tcaatttcattatgggaaagtgaccatacagccccgcgcgggcaaaatttgcatcgcctcgccgaggtattgcaa

SEQ ID NO: 82614 - DNA, 75 bp, synthetic construct
  source 1..75: mol_type = other DNA
gccactgcagcagatcggttgccttattttaccggagcagaccgcgcagcactgacaacccttacagctattggt

SEQ ID NO: 82615 - DNA, 75 bp, synthetic construct
  source 1..75: mol_type = other DNA
attagctctcgtaatgtaagacggtttggtgaaattagtggaaatgtaggtacagaaactcgccctcgcaacgtt

SEQ ID NO: 82616 - DNA, 75 bp, synthetic construct
  source 1..75: mol_type = other DNA
atgaataaagcatttgaacaatgggtccaccagcgttacggcaatcgctatgacctgacacgagatgttgacggt

SEQ ID NO: 82617 - DNA, 75 bp, synthetic construct
  source 1..75: mol_type = other DNA
tactcatcatccttcacatctggctctgtagacagggtgatgatcacttctggagtgaatccagattaaacatct

SEQ ID NO: 82618 - DNA, 75 bp, synthetic construct
  source 1..75: mol_type = other DNA
ctatcgccagcaggatctggtggactactcgccggtcagcgaaaaacaccttgccgacggcatgacggtcggcga

SEQ ID NO: 82619 - DNA, 75 bp, synthetic construct
  source 1..75: mol_type = other DNA
tgttcgccagcagcggctgaaattaaacctgtccggaaggctggcgataaaggtgattgcagagccaccggataa

SEQ ID NO: 82620 - DNA, 75 bp, synthetic construct
  source 1..75: mol_type = other DNA
cgtctccacgatacagcgatcaagtgtgctggcacccagcaattacgagaaagaattagccgtgttttaggcgac

SEQ ID NO: 82621 - DNA, 75 bp, synthetic construct
  source 1..75: mol_type = other DNA
aaccgcgacgcccagccgtttattgccgactggatggcgaagcagttgcagcctttagtaaatcatgactcataa

SEQ ID NO: 82622 - DNA, 75 bp, synthetic construct
  source 1..75: mol_type = other DNA
gagtcgtagcgccaatggatggaattgttattgccattgtcactcagcaagggcaaaccgttaactcaaaccaga

SEQ ID NO: 82623 - DNA, 75 bp, synthetic construct
  source 1..75: mol_type = other DNA
attgttgctatttctaatcaatggggcattgttaatattgaactcttgattgagtttgtacggcaaaatggtttt

SEQ ID NO: 82624 - DNA, 75 bp, synthetic construct
  source 1..75: mol_type = other DNA
aagaactacatgctttagaaaaaacgacatttactctggaaggattacaggaacgttatgatttacaggaagcaa

SEQ ID NO: 82625 - DNA, 75 bp, synthetic construct
  source 1..75: mol_type = other DNA
cggtgtacacgccggcgcgaaaaatccacctgtaccactgcgaccatcgcggcctgccgctggcgcttgtcagca

SEQ ID NO: 82626 - DNA, 75 bp, synthetic construct
  source 1..75: mol_type = other DNA
ctgttgctggcacgcgcgttacagggcgttggcggcgcgatgatggtgccggtcggcaggttgacggtgatgaaa

SEQ ID NO: 82627 - DNA, 75 bp, synthetic construct
  source 1..75: mol_type = other DNA
ggatgtttctggccgggcgtggagcctttccgctttttgccctggtatgggggctgaatctgtcccgccatgcgc

SEQ ID NO: 82628 - DNA, 75 bp, synthetic construct
  source 1..75: mol_type = other DNA
tcttattcaccaacaacataaacgcattcgtgaggcttatggtccggcatcgatttttgctggttcctacggctg

SEQ ID NO: 82629 - DNA, 75 bp, synthetic construct
  source 1..75: mol_type = other DNA
tccatcacagtaataaaggttctcagtatgtatcgctggcctacatgcagcgacttaaggaagccggattactgg

SEQ ID NO: 82630 - DNA, 75 bp, synthetic construct
  source 1..75: mol_type = other DNA
catcgacttcattcgcgaatgagatggcggagatgcgtcagcaggtaatggaagggcagattggtggatttctcc

SEQ ID NO: 82631 - DNA, 75 bp, synthetic construct
  source 1..75: mol_type = other DNA
tactcatcatccttcacatctggctctgtagacagggtggtgatcacttctggagtaaatccagattaaacatct

SEQ ID NO: 82632 - DNA, 75 bp, synthetic construct
  source 1..75: mol_type = other DNA
accagcagggaaaaagcacgggaaaatattaagaaaataaaaagcatgctcagcgcatccagaggtaaaaaatga

SEQ ID NO: 82633 - DNA, 75 bp, synthetic construct
  source 1..75: mol_type = other DNA
gtggcatggtggttaccgtgcctttttgtggcgaccgccgaaacataaccggacggtgagggtggtatgccggga

SEQ ID NO: 82634 - DNA, 75 bp, synthetic construct
  source 1..75: mol_type = other DNA
cctggagtctgcacagctctattgaagaagtgatggcggaagtagacatcctgtacatgacccgcgtgcaaaaag

SEQ ID NO: 82635 - DNA, 75 bp, synthetic construct
  source 1..75: mol_type = other DNA
aattgaactcactaagcatggatgccctgaaggctggatggtctcaacttttcggctctgacgcgtctcaggaaa

SEQ ID NO: 82636 - DNA, 75 bp, synthetic construct
  source 1..75: mol_type = other DNA
gcttgcacgtctggatgttatgaccattaaagcgcagatctccgaagccgatatcacccgtatttccgctgggca

SEQ ID NO: 82637 - DNA, 75 bp, synthetic construct
  source 1..75: mol_type = other DNA
aatgttaagagctgcccacagagagacacagcacactcttaccctgtaattaactgggttcaggcaggattattc

SEQ ID NO: 82638 - DNA, 75 bp, synthetic construct
  source 1..75: mol_type = other DNA
gggatgaattcgaccttgatgaagcagtgtggcatctaccagcagaacgcgttaaaaacggcgacgctattgata

SEQ ID NO: 82639 - DNA, 75 bp, synthetic construct
  source 1..75: mol_type = other DNA
attatgctctgaacaagccgggtttatcgccgcaagacgtggcatcgtttctggctaatgcgctggcgtttacac

SEQ ID NO: 82640 - DNA, 75 bp, synthetic construct
  source 1..75: mol_type = other DNA
tgtcgatgaaattcgcttttttaaacatgtcttctggatatgtttaccgcatcgacacattccagccatatgtcg

SEQ ID NO: 82641 - DNA, 75 bp, synthetic construct
  source 1..75: mol_type = other DNA
tcgcacgttttcgaggatttatcacaatttcagcattattttcatcataaaccgagagtcgccagaaagctggcg

SEQ ID NO: 82642 - DNA, 75 bp, synthetic construct
  source 1..75: mol_type = other DNA
catacgcttggcattattgatgcactgttggttcataagatggccagggctttattgtcgttggtggacgctggt

SEQ ID NO: 82643 - DNA, 75 bp, synthetic construct
  source 1..75: mol_type = other DNA
atacgtctgaagggtgttttgatattggtgttctgctcagtaaccgggagtttactgaagatgccattaagatga

SEQ ID NO: 82644 - DNA, 75 bp, synthetic construct
  source 1..75: mol_type = other DNA
ttaccggatatcatctcgccatgaccgccgagtatgatttagtcattctggatatcatgctacctgatgtgaacg

SEQ ID NO: 82645 - DNA, 75 bp, synthetic construct
  source 1..75: mol_type = other DNA
agtctgattcaactgaaattacaggccggacggaagctgacgcaggcagaaacaacccgacttaacgctgtgctg

SEQ ID NO: 82646 - DNA, 75 bp, synthetic construct
  source 1..75: mol_type = other DNA
ccaaagggtttactgttgattattccaatggcttcggtgatgcaatggatgcttatgaggaaaacatccgcgctg

SEQ ID NO: 82647 - DNA, 75 bp, synthetic construct
  source 1..75: mol_type = other DNA
actcagttgcggagcaaaactggggaaacacaacatacaaacaggcagactggcatacatcacaccccgacttcg

SEQ ID NO: 82648 - DNA, 75 bp, synthetic construct
  source 1..75: mol_type = other DNA
aagatggagttatgcgccgcacgatgggaagagtttgatttagatggtgcggtatggcatttgccggaagaacgc

SEQ ID NO: 82649 - DNA, 75 bp, synthetic construct
  source 1..75: mol_type = other DNA
gctgttccgccgcaagtattacgaaaacggcgcacatgccggatacatcatgtacgtcactgatgccgtgcagga

SEQ ID NO: 82650 - DNA, 75 bp, synthetic construct
  source 1..75: mol_type = other DNA
gcaaactatacatttactgactctcgtcgaaaaagtgatgacgaaagtctcaatggcaagtcgctgaaaggggaa

SEQ ID NO: 82651 - DNA, 75 bp, synthetic construct
  source 1..75: mol_type = other DNA
ggaatcctggttaaatgaactatcttttgctgtgattgctccgctataccgtgttgcccccgaacaaacagaaca

SEQ ID NO: 82652 - DNA, 75 bp, synthetic construct
  source 1..75: mol_type = other DNA
tgttcgccagcagcaactgaaattaaacctgtccggaaggccggcaatagaaattattgcagagccaccggataa

SEQ ID NO: 82653 - DNA, 75 bp, synthetic construct
  source 1..75: mol_type = other DNA
cggcgcaaattacaatgttgagcgtctcgttattacgcctgctgatgagaccacgctgccgccaacgcctgccgt

SEQ ID NO: 82654 - DNA, 75 bp, synthetic construct
  source 1..75: mol_type = other DNA
tttaaaaataagttgaccagttacgatataggtacaaaagatccagtcaccgggttaaacacttttatttatgat

SEQ ID NO: 82655 - DNA, 75 bp, synthetic construct
  source 1..75: mol_type = other DNA
tcgtcgcacctgatgttgtggaggagctggactatgaaaccatcctgacagagcgaaaggcgacgctcgtctcac

SEQ ID NO: 82656 - DNA, 75 bp, synthetic construct
  source 1..75: mol_type = other DNA
gcatatttcagccaatgcgcggtccgatttgcgctcgctgccgtcaaatgttcgcctggttgactggatacccat

SEQ ID NO: 82657 - DNA, 75 bp, synthetic construct
  source 1..75: mol_type = other DNA
cttcaacagccacaacgaaggctggcaaagccactgagcaagccactgcagcagcgaggtctgcttctgcagcaa

SEQ ID NO: 82658 - DNA, 75 bp, synthetic construct
  source 1..75: mol_type = other DNA
ttatgtcgtaacgctgacctcccgaggtcaggatgtggcggaaggtcgtgcccgcgttgccggtgtcaagcgtcc

SEQ ID NO: 82659 - DNA, 75 bp, synthetic construct
  source 1..75: mol_type = other DNA
tgaacgccttagagcagctgcaacaggactatatgcagcggctgagcgaatgggagagcgccttcgtggaattgc

SEQ ID NO: 82660 - DNA, 75 bp, synthetic construct
  source 1..75: mol_type = other DNA
aaaaagccgaggcagccgctgcggcactgaagaagaaagcggaagcggcagaagcagctgcagctgaagcaagaa

SEQ ID NO: 82661 - DNA, 75 bp, synthetic construct
  source 1..75: mol_type = other DNA
gttgatggtgtcaatacgacctatgcaggtaaatggatattttatgggaagtcttaaccaggatggtttatcgaa

SEQ ID NO: 82662 - DNA, 75 bp, synthetic construct
  source 1..75: mol_type = other DNA
aaccgtgtcagatgattttatgcatgctgttctcagtaactgcgtcacaagaatcgtacttcctgcaccggagaa

SEQ ID NO: 82663 - DNA, 75 bp, synthetic construct
  source 1..75: mol_type = other DNA
ctgggactggatgacagtgctctggacacagaattttccattggtggtactgaactgctgctgtttaagcagatg

SEQ ID NO: 82664 - DNA, 75 bp, synthetic construct
  source 1..75: mol_type = other DNA
agagattatcgaagttgatgtgctcaacatgatctacaaagttgccggtgtggatgtgctggaaaaacaccgcgc

SEQ ID NO: 82665 - DNA, 75 bp, synthetic construct
  source 1..75: mol_type = other DNA
atgaacatgcgtaatattaatgttattacagcccgcgctgtgccggataaaaacgtatcagatgattttatgcat

SEQ ID NO: 82666 - DNA, 75 bp, synthetic construct
  source 1..75: mol_type = other DNA
cgctgaaagagctaggtcacccgacccgtttgttcatatttaaacatcttgtcaaagccggggaacaagggttgc

SEQ ID NO: 82667 - DNA, 75 bp, synthetic construct
  source 1..75: mol_type = other DNA
aaccggcgtgaggtgctgcatacagaaggcggggccgggctgaagcgggtggtgaaaaaagaactggcggacggc

SEQ ID NO: 82668 - DNA, 75 bp, synthetic construct
  source 1..75: mol_type = other DNA
aacgtcttcgccaccgctggatgcgcctgcgcttatatcgtttccccggttctgttttgaccgattaccggatac

SEQ ID NO: 82669 - DNA, 75 bp, synthetic construct
  source 1..75: mol_type = other DNA
atgcgtatagagtttgttttgccttacccgccaacggtgaacacctactggcggcgtcgtggcagcacatatttt

SEQ ID NO: 82670 - DNA, 75 bp, synthetic construct
  source 1..75: mol_type = other DNA
ctggcgcggcctttccggctggaacttctattttctggttaagttcggcctgttgtgggcgggatatcttaactt

SEQ ID NO: 82671 - DNA, 75 bp, synthetic construct
  source 1..75: mol_type = other DNA
cggcttctttatgcagtcgctggacaccaccatcgttaacaccgcgcttccctcaatggcgcaaagcctcgggga

SEQ ID NO: 82672 - DNA, 75 bp, synthetic construct
  source 1..75: mol_type = other DNA
tggtggcgttccgcagagaccatgttgcttctggcaatgtggttgcctttctccggcaccagttacggcattgcc

SEQ ID NO: 82673 - DNA, 75 bp, synthetic construct
  source 1..75: mol_type = other DNA
cgcgcttcttgcccggggattttttcccggtgttctacatcctgcatctgactgtgctgggcattctggcgctgt

SEQ ID NO: 82674 - DNA, 75 bp, synthetic construct
  source 1..75: mol_type = other DNA
atgtttgagttttatatggcagaacttcttcgcaaccgctggatgcgcctgcgcttatatcgttttcctggttct

SEQ ID NO: 82675 - DNA, 75 bp, synthetic construct
  source 1..75: mol_type = other DNA
cgccacgctgttccgccggaagtattacattaacggcagccatgcgggcttcatcatgtacatgaccgacgccgc

SEQ ID NO: 82676 - DNA, 75 bp, synthetic construct
  source 1..75: mol_type = other DNA
ccactggtcgatatcgtgctcaacagtacgcaggcgtctttctgtaccgaataccacgtcgtgaccggaggctcg

SEQ ID NO: 82677 - DNA, 75 bp, synthetic construct
  source 1..75: mol_type = other DNA
ctgtcaccagtccgtctccggcctgcgtcaccatctccgtgctgtcacgtgaaaataacggtgtcgcatccgaag

SEQ ID NO: 82678 - DNA, 75 bp, synthetic construct
  source 1..75: mol_type = other DNA
gtgctgacgtggtgtgagacgcgcagcctgtggcgtactgccgcggccatactcctgatggcactgtgggggcct

SEQ ID NO: 82679 - DNA, 75 bp, synthetic construct
  source 1..75: mol_type = other DNA
ctctcagggaacaccagcaaaagataataagaatataacggcaacactccagtttactccgactgaaagccagaa

SEQ ID NO: 82680 - DNA, 75 bp, synthetic construct
  source 1..75: mol_type = other DNA
gagcactgggtcattctcgccggcaccggccaggtgacggtcaacggcaagcagttcctgctgaccgagaaccag

SEQ ID NO: 82681 - DNA, 75 bp, synthetic construct
  source 1..75: mol_type = other DNA
agggatatctggttattgcctgcggcggcggcggtattccggtggtgcgagacgggcaacaactgaaaggtgtag

SEQ ID NO: 82682 - DNA, 75 bp, synthetic construct
  source 1..75: mol_type = other DNA
aggaaagccggatgcggttgaaactatagcaaatgcttacgtgaagctcggtcgccatcgagaaggtgtcgtggg

SEQ ID NO: 82683 - DNA, 75 bp, synthetic construct
  source 1..75: mol_type = other DNA
tccgcaatgagcttatcccgctacaggacaggattcgggaaataaacggctggctcggtcaggatattgtggcat

SEQ ID NO: 82684 - DNA, 75 bp, synthetic construct
  source 1..75: mol_type = other DNA
gtaaagccgagcaaggtcttacaaaaagtttcaacggtgacacgctttttaaagtcgcagcggcactgcagtgtt

SEQ ID NO: 82685 - DNA, 75 bp, synthetic construct
  source 1..75: mol_type = other DNA
ctaactttattcgtcagatcatcgatgaagatctggccagtggtaagcacaccacagtacacacccgtttcccgc

SEQ ID NO: 82686 - DNA, 75 bp, synthetic construct
  source 1..75: mol_type = other DNA
gcgccataaaaagtcctgggataaggatgttcagcgtttcacgcaatacattgaacctcgtctggggaagatacg

SEQ ID NO: 82687 - DNA, 75 bp, synthetic construct
  source 1..75: mol_type = other DNA
gttcaggtcggtaacacccacggaggtaatacatcgtctggcaccagtggttacagttctcttaattatcgtgga

SEQ ID NO: 82688 - DNA, 75 bp, synthetic construct
  source 1..75: mol_type = other DNA
ctgaaagcgcaggtccgcaaggattttgaggcacaaatcgacacttacgttgatgaggtgctggcaaaacttatt

SEQ ID NO: 82689 - DNA, 75 bp, synthetic construct
  source 1..75: mol_type = other DNA
attgccgtgggcaactgcccggaaagctataagccacaactggctgaaggcagcgggcgcacccagaccgtgcgc

SEQ ID NO: 82690 - DNA, 75 bp, synthetic construct
  source 1..75: mol_type = other DNA
atcccgcccgtttaaatccatccgtacagcgagcaagtcgctgtcgggggatatccgggaaacacaaaaatcact

SEQ ID NO: 82691 - DNA, 75 bp, synthetic construct
  source 1..75: mol_type = other DNA
tgtgtgcggaaatacagagatggaacacgaggaagagtctgaagtcgtcagatgtgtaggctgcgggaaagaatt

SEQ ID NO: 82692 - DNA, 75 bp, synthetic construct
  source 1..75: mol_type = other DNA
tccggacggctggcaataaaaattattgcagagccaccggataagcgccgccgtgacctggacaatattctgaaa

SEQ ID NO: 82693 - DNA, 75 bp, synthetic construct
  source 1..75: mol_type = other DNA
cgtaccgcaacgacgcggcgatcgtgtttcgccgcctgatccgctccctgccgacgcggcgggcggtgatcggcg

SEQ ID NO: 82694 - DNA, 75 bp, synthetic construct
  source 1..75: mol_type = other DNA
ccaccacaccggccgggtgcgggtgtttgtctcggaagcgcaggcgatcaaggcgatcaagcgggaagagattgt

SEQ ID NO: 82695 - DNA, 75 bp, synthetic construct
  source 1..75: mol_type = other DNA
gtcctgcactgaccggaacgccaacaacgccaactgcgccaaaagggactaataatactcagatcgcaagcacgg

SEQ ID NO: 82696 - DNA, 75 bp, synthetic construct
  source 1..75: mol_type = other DNA
cgcaggacgacgcgttttatgcggtgatcacccacgcggcggggccgcagggcgctctgccgctgaccccgcaga

SEQ ID NO: 82697 - DNA, 75 bp, synthetic construct
  source 1..75: mol_type = other DNA
aaaaggacaaaatcaatccggtggtgttttacacctccgccggactgattttgttgttttccctgacaacgatcc

SEQ ID NO: 82698 - DNA, 75 bp, synthetic construct
  source 1..75: mol_type = other DNA
gatggttcaagcacatacttcatgttgaccgcctccggtgacaatcttggaacatggaatagtttaagaccgctt

SEQ ID NO: 82699 - DNA, 75 bp, synthetic construct
  source 1..75: mol_type = other DNA
tgcacttgaaaaggcacggcaggaggccgaagcccttgccacacagtttaaaaacaccgaacgtccgacccgtgc

SEQ ID NO: 82700 - DNA, 75 bp, synthetic construct
  source 1..75: mol_type = other DNA
gaaatgtacgacgccgatgtctcgcccacgctgatatccaaagtgaccgatgcggttaaagaacaggtctctgaa

SEQ ID NO: 82701 - DNA, 75 bp, synthetic construct
  source 1..75: mol_type = other DNA
cagcgacaccaaaagctgttaaggcggtaatggatgaaacgaacaagaaagcaccattaaacagcccggcactga

SEQ ID NO: 82702 - DNA, 75 bp, synthetic construct
  source 1..75: mol_type = other DNA
cgtctggcggctaatggcaagaaaggaaaggtgattctcggcgcgatgatgcgcaagctggcacaggtggcgtat

SEQ ID NO: 82703 - DNA, 75 bp, synthetic construct
  source 1..75: mol_type = other DNA
gatgttccagcgccatgcgccgctggcggttcgtctcgacggtacgcagttccagttgaaatggatgtggcaaat

SEQ ID NO: 82704 - DNA, 75 bp, synthetic construct
  source 1..75: mol_type = other DNA
ggcggggcagcctccgggctggccggtatcctgtgaagccggtattctcacccccgtctgggctatcgccatcga

SEQ ID NO: 82705 - DNA, 75 bp, synthetic construct
  source 1..75: mol_type = other DNA
cactggctccgaacctgttctttggcaccaccattgccgtaaacattctggttctgtctaaacataaaacggata

SEQ ID NO: 82706 - DNA, 75 bp, synthetic construct
  source 1..75: mol_type = other DNA
gcaggcgcaggtgcttgaatcggcaaagcgtgccgccaacgggctgcagacgaaatacaacagcctcactgagtc

SEQ ID NO: 82707 - DNA, 75 bp, synthetic construct
  source 1..75: mol_type = other DNA
gtgaagaaaaaccagacccggatcaccgggatggataaccagatcctgtcgttgtacgccaaaggcctgacaacc

SEQ ID NO: 82708 - DNA, 75 bp, synthetic construct
  source 1..75: mol_type = other DNA
taacgccggtatccagcgccgtcatccttttactgagttccctgaacaagagtggaatgatgtgatcgcagtaaa

SEQ ID NO: 82709 - DNA, 75 bp, synthetic construct
  source 1..75: mol_type = other DNA
gaaaaacgcatctggccatagctcttggcgtaaaagcggtggatgcgggacatcgggtactgtttatgccactgg

SEQ ID NO: 82710 - DNA, 75 bp, synthetic construct
  source 1..75: mol_type = other DNA
tcttgggcgtctggcaattgatcgttcattacaggggcagggatggggagcaacactggttgctcatgccatgaa

SEQ ID NO: 82711 - DNA, 75 bp, synthetic construct
  source 1..75: mol_type = other DNA
ccggcgttgggccacttattgcaacggcagcggtggccaccatgggggaaacatcagcgtttaaatcagggcgag

SEQ ID NO: 82712 - DNA, 75 bp, synthetic construct
  source 1..75: mol_type = other DNA
cagatcaactcactgcatggcacgttccttgaatttggtgaaacccttcacaaaggtcgggcagcgatggatcgg

SEQ ID NO: 82713 - DNA, 75 bp, synthetic construct
  source 1..75: mol_type = other DNA
aagccatcacgctgaaaatcgacccgtcagtggttctggcaacccgcaaatatgtggatgataaaatctcagagc

SEQ ID NO: 82714 - DNA, 75 bp, synthetic construct
  source 1..75: mol_type = other DNA
ttgcttatgccattctgaatgccatcagcctgtccgcagacggggacggtgactggtgtcagatcatgccagccg

SEQ ID NO: 82715 - DNA, 75 bp, synthetic construct
  source 1..75: mol_type = other DNA
tactcggtgcacttttctaccgcttcatcagtgagaatttttccagctacatggaagcaggggatgagagcatac

SEQ ID NO: 82716 - DNA, 75 bp, synthetic construct
  source 1..75: mol_type = other DNA
ctgagctgaatgctgagctgaaaaccacggtcagcaaaatcgaccagttgcgtaaagatattgatgcgattgtgg

SEQ ID NO: 82717 - DNA, 75 bp, synthetic construct
  source 1..75: mol_type = other DNA
tcgcgcagaccgtaagccccgtatctgtatgctccgcaccgttgccggtgacgagctggccgcccgccgcaccct

SEQ ID NO: 82718 - DNA, 75 bp, synthetic construct
  source 1..75: mol_type = other DNA
accagattgaaattatcacccagaaacagccgaaccccagccgtgactggttaaacccaaacctcggttacgtca

SEQ ID NO: 82719 - DNA, 75 bp, synthetic construct
  source 1..75: mol_type = other DNA
ttgagccagctggtaatgctattacccctgaacaacgcgaaattcagcagattaaagcgcagataaagcgccttg

SEQ ID NO: 82720 - DNA, 75 bp, synthetic construct
  source 1..75: mol_type = other DNA
gaaatccccgggggctttgtcgtcatcaaacattgatatcagatacaacgaatctgcgtcctgtaccccggaaaa

SEQ ID NO: 82721 - DNA, 75 bp, synthetic construct
  source 1..75: mol_type = other DNA
tgaccatttgcgtaaatggatacggttgtataagcaggaacttcagggtattgagccagctggtaatgctattac

SEQ ID NO: 82722 - DNA, 75 bp, synthetic construct
  source 1..75: mol_type = other DNA
atgggcggcattgtgccgattctgcggtgatttacattgcaaaacgcagagtgattttttcgatattatcggctt

SEQ ID NO: 82723 - DNA, 75 bp, synthetic construct
  source 1..75: mol_type = other DNA
gattctgcaaaaacatttgttcaggagactctgaaagatacctgggaatcttctgacgagtggtttgttcactaa

SEQ ID NO: 82724 - DNA, 75 bp, synthetic construct
  source 1..75: mol_type = other DNA
tctggtgcagagggtactacgtcgatacggtgggtaagaacacggcgaagatacaggattacataaagcaccagc

SEQ ID NO: 82725 - DNA, 75 bp, synthetic construct
  source 1..75: mol_type = other DNA
ctcaggagaaccccgctgacccggcggcgtgtttgccgttgttccgtgtcagtggtggcgcattatagggagtta

SEQ ID NO: 82726 - DNA, 75 bp, synthetic construct
  source 1..75: mol_type = other DNA
agcgcgttgagatcccgacctatgaaaccgggccgcaggatatacatcccatgttcctcgaaaatcgcgtttatc

SEQ ID NO: 82727 - DNA, 75 bp, synthetic construct
  source 1..75: mol_type = other DNA
gtaacagagattaacactgaactggctgcacgccgtgaatactggcaggaacagggctacatccgggccgctgat

SEQ ID NO: 82728 - DNA, 75 bp, synthetic construct
  source 1..75: mol_type = other DNA
cgtaaagacctcaaaccactgcttgcagtggcgaagaaatcccgccggtatggatggcttaaagaatatgattct

SEQ ID NO: 82729 - DNA, 75 bp, synthetic construct
  source 1..75: mol_type = other DNA
ttatctgtgtcagtatgctattgcagcgatacagaatggaaaaataggtgcgctgcgtgtgctgggtaatgcaga

SEQ ID NO: 82730 - DNA, 75 bp, synthetic construct
  source 1..75: mol_type = other DNA
tttcccgcgaccgttggctaactcgcgatgagcttatcaggctattcgaggctatgcgcaccgcaaaaggattca

SEQ ID NO: 82731 - DNA, 75 bp, synthetic construct
  source 1..75: mol_type = other DNA
ggctaacgcgacgatgcttggcagtaagctgaatctgacgcaaatggccgttggtgatgcgaatggtgtcttgcc

SEQ ID NO: 82732 - DNA, 75 bp, synthetic construct
  source 1..75: mol_type = other DNA
cgacatggattaattctggtatgagtgagtttgacagccggttgtttgcagccattaacgatatgctgctggata

SEQ ID NO: 82733 - DNA, 75 bp, synthetic construct
  source 1..75: mol_type = other DNA
caggggctttggaaatacaggggaatgtattgaagttaaaacaaatgaacctttgaacaacgtgatggaaacact

SEQ ID NO: 82734 - DNA, 75 bp, synthetic construct
  source 1..75: mol_type = other DNA
attcgttgctgaataactttgcaatcagtgatcgagttgcaaggactactgagcaatgggatcattgccgtcaaa

SEQ ID NO: 82735 - DNA, 75 bp, synthetic construct
  source 1..75: mol_type = other DNA
tgctggctgctgtggcacgtcgtgactatgaacaacgccgggaacgtcaaagacaggggattagtaaagctaaaa

SEQ ID NO: 82736 - DNA, 75 bp, synthetic construct
  source 1..75: mol_type = other DNA
atgactgagcgcatagaatttgttttgccttacccgccgtcggtgaacacctactggcgccgtcgtggtggcgta

SEQ ID NO: 82737 - DNA, 75 bp, synthetic construct
  source 1..75: mol_type = other DNA
tctgccgtcagtgcatggaccgctgccgggcgggtgaaacgtggcccccggacctggctgagtttgttgcgctga

SEQ ID NO: 82738 - DNA, 75 bp, synthetic construct
  source 1..75: mol_type = other DNA
cctcgagatgcgttcaaaggggattgagcgccagatgaccgaaggggagttaaaacgacttgcagaacggcaact

SEQ ID NO: 82739 - DNA, 75 bp, synthetic construct
  source 1..75: mol_type = other DNA
accattttaagagctgtagataaagaatccgcgcacgaatttgttcaggaaacactgcaggaagcctgggaaacc

SEQ ID NO: 82740 - DNA, 75 bp, synthetic construct
  source 1..75: mol_type = other DNA
cacatcctttaagccgcagggctctgacagtttcgcgggagccatctgcaaaaattgtggtcaccttgtaactga

SEQ ID NO: 82741 - DNA, 75 bp, synthetic construct
  source 1..75: mol_type = other DNA
gctaacgcaaaatataccgctcaggacgccacgacggcacaaaaagggatagtccagctcagtagtgccaccaac

SEQ ID NO: 82742 - DNA, 75 bp, synthetic construct
  source 1..75: mol_type = other DNA
atgtctggaaaaaatccattctggaattatgattataatgcagcacaacgcaacagagagatagtagattcatat

SEQ ID NO: 82743 - DNA, 75 bp, synthetic construct
  source 1..75: mol_type = other DNA
gaggagattaacaacagctaccagacgatggagcgcaagttaatgccgatcggccacccgatggtgaacggcaaa

SEQ ID NO: 82744 - DNA, 75 bp, synthetic construct
  source 1..75: mol_type = other DNA
ttactggcgacgtcgtggcagcacatattttgtatcaaaagccggtgagcgttatcgccgtgatgtggcgcttat

SEQ ID NO: 82745 - DNA, 75 bp, synthetic construct
  source 1..75: mol_type = other DNA
attcagacgctgccgatggatggttttcaccattacaatagctggctggatgcgcatcaattgcgccccttcaaa

SEQ ID NO: 82746 - DNA, 75 bp, synthetic construct
  source 1..75: mol_type = other DNA
tcacgctctgtgctttactttttaccaccctgcctttaacgcctatggcccatgcttcaaagcaagccagggaga

SEQ ID NO: 82747 - DNA, 75 bp, synthetic construct
  source 1..75: mol_type = other DNA
ttttctgttgaccgctgggatgagagctggacagaaagcgtcaagcgccgcgttgtgcaggacgctttttatatc

SEQ ID NO: 82748 - DNA, 75 bp, synthetic construct
  source 1..75: mol_type = other DNA
tcgcagtctcagaagggcgtgctgcggggcctgcattatcagctggatccgcatgcgcaaggcaaactggtgcgc

SEQ ID NO: 82749 - DNA, 75 bp, synthetic construct
  source 1..75: mol_type = other DNA
ctgacgtactggtatttgaaccccgggtgtttggtgatgcgcgcggtttcttctttgagagtttcagcagcaagg

SEQ ID NO: 82750 - DNA, 75 bp, synthetic construct
  source 1..75: mol_type = other DNA
tacactggagtgaactgtctcccgaagagcaaatccttttctgggaggattacgaatcgggcagggccacgtcat

SEQ ID NO: 82751 - DNA, 75 bp, synthetic construct
  source 1..75: mol_type = other DNA
atgtttaatgtgattactcacccggccgcactggatgaactgctggaattaccagacaatctgcgtggtcgtatg

SEQ ID NO: 82752 - DNA, 75 bp, synthetic construct
  source 1..75: mol_type = other DNA
agtttttggtgatgagcgtggtttctttatggaaagctttaatcagaaagttttcgaagaagctgtaggacgtaa

SEQ ID NO: 82753 - DNA, 75 bp, synthetic construct
  source 1..75: mol_type = other DNA
atgaacgtaattaaaacagaaattcctgatgtgttaattttcgagccgaaagtttttggtgatgagcgtggtttc

SEQ ID NO: 82754 - DNA, 75 bp, synthetic construct
  source 1..75: mol_type = other DNA
gaactgtcccggcagcagaaaaacctgctctggcaggtgatcaaagggcgggtactgtttccggcgctgaccgcg

SEQ ID NO: 82755 - DNA, 75 bp, synthetic construct
  source 1..75: mol_type = other DNA
gactattagataaggaattacgaagggcttcggtatcattaaaaactttgaagagtaaaggggtgagttcacttg

SEQ ID NO: 82756 - DNA, 75 bp, synthetic construct
  source 1..75: mol_type = other DNA
cctctacactgggcgcaccgatgagtttggccaaatagagtttgctttacgaatgatgcaagctgaaacaggcgc

SEQ ID NO: 82757 - DNA, 75 bp, synthetic construct
  source 1..75: mol_type = other DNA
agcttattgttagccactttaatgtcaggaagcttaagctctgttagtgttttggctattctctctcctcttgga

SEQ ID NO: 82758 - DNA, 75 bp, synthetic construct
  source 1..75: mol_type = other DNA
ccaactatcctgatcagcaacctttcaccggaagaattgtgggcgttcatcagtccccggattgccgacaggatc

SEQ ID NO: 82759 - DNA, 75 bp, synthetic construct
  source 1..75: mol_type = other DNA
ggaaacaccgggcagcagtgcagtgcgcagcagataaaccgcagtgagttcacaaactatacctgtgagcgggac

SEQ ID NO: 82760 - DNA, 75 bp, synthetic construct
  source 1..75: mol_type = other DNA
ctttaatgaaaacaatatccgcccagcaggcgataagtactctcaaatatatggttgatggtgaggtttattttt

SEQ ID NO: 82761 - DNA, 75 bp, synthetic construct
  source 1..75: mol_type = other DNA
aacaatacacagattgccaccacggcatttgtgaaatcggcgattgcggcaatggtgggttctgcacctgcggca

SEQ ID NO: 82762 - DNA, 75 bp, synthetic construct
  source 1..75: mol_type = other DNA
catccgggcgcgattctggcgtgtcgtttttgttgctgtgttttgcctctttgccagatcgcgctcattcctcag

SEQ ID NO: 82763 - DNA, 75 bp, synthetic construct
  source 1..75: mol_type = other DNA
tgctctggcgggtgatcaaagggcggatactgtttccggcgctgaccgcgctcagcgtcacgggcgggattttcc

SEQ ID NO: 82764 - DNA, 75 bp, synthetic construct
  source 1..75: mol_type = other DNA
tggcattgatcttgaaatgtcctggctaaattatgtgttgcttggcaaggtttatgaaatgaaggggatgaaccg

SEQ ID NO: 82765 - DNA, 75 bp, synthetic construct
  source 1..75: mol_type = other DNA
ctgaaatttgacgattgctataactttgcacggtgtcttgcaagacaccataacgataatatcgaggatatcaaa

SEQ ID NO: 82766 - DNA, 75 bp, synthetic construct
  source 1..75: mol_type = other DNA
taagctggcatctcaccgcgaattcaccacctggcgtgcagagctggatggtaaacctgttatcgtctgctctac

SEQ ID NO: 82767 - DNA, 75 bp, synthetic construct
  source 1..75: mol_type = other DNA
tacatcaataagcagcttattgttagccactttaatgtcaggaagcttaagctctgttagtgttttggctattct

SEQ ID NO: 82768 - DNA, 75 bp, synthetic construct
  source 1..75: mol_type = other DNA
tggttgcttgcagtcaggtgtttcgggcctgcggctttttgtgttccttggtaagtggttacgattcttttgtgt

SEQ ID NO: 82769 - DNA, 75 bp, synthetic construct
  source 1..75: mol_type = other DNA
aaaaggatggatagcagggaggatcgccgtgctaaaaaaattagtctgacatctgaaggtatgttttttattcag

SEQ ID NO: 82770 - DNA, 75 bp, synthetic construct
  source 1..75: mol_type = other DNA
aaaggaattttgatggtctgcccggtgcaaaagatatcattttgggcgagttaaccaagagggttcaccggatct

SEQ ID NO: 82771 - DNA, 75 bp, synthetic construct
  source 1..75: mol_type = other DNA
tgccgctggcgctcatcagcacggaaggggcaacagcgtggtgcgcagaatatgatgaatggggcaacctgctga

SEQ ID NO: 82772 - DNA, 75 bp, synthetic construct
  source 1..75: mol_type = other DNA
acgggtggggcgctgggagccgcgcgtctggcctgtcttgctgcgggaaaaccactggcggcagtgtgtgaaaaa

SEQ ID NO: 82773 - DNA, 75 bp, synthetic construct
  source 1..75: mol_type = other DNA
tatttattttcaatttatcaggttgcggttataacgatattcaaacctatgatgaacaggttaatgcctcctggt

SEQ ID NO: 82774 - DNA, 75 bp, synthetic construct
  source 1..75: mol_type = other DNA
gtattgccacgggcaccaatatcaacagtggaacgcaaaatatcaagagcggcgggaaagctgacacgacaaata

SEQ ID NO: 82775 - DNA, 75 bp, synthetic construct
  source 1..75: mol_type = other DNA
agtgggtgtccagtttggtagcgcggcggaaatggccattcttcaggaaattatcaatgcccggtacgaaagtat

SEQ ID NO: 82776 - DNA, 75 bp, synthetic construct
  source 1..75: mol_type = other DNA
ctgcaatggttctgccgtctggtgggggtaacggaaacagagttactggaagagattgcccaactttctgatgca

SEQ ID NO: 82777 - DNA, 75 bp, synthetic construct
  source 1..75: mol_type = other DNA
gctgtgggttgagcaccaggataaggggcggctggagctgaacttcctgatcccgaacatggagctgctgactgg

SEQ ID NO: 82778 - DNA, 75 bp, synthetic construct
  source 1..75: mol_type = other DNA
tgaaggtgtacgtggatgatcagatggcaaaacatcttgcagcaccggacccgcattcacagtatgcacccaaag

SEQ ID NO: 82779 - DNA, 75 bp, synthetic construct
  source 1..75: mol_type = other DNA
tgggcgatggtggcggaacattgccgacgccggacgcaaagcagagtgcactggtaaatgagaaacgccgggctg

SEQ ID NO: 82780 - DNA, 75 bp, synthetic construct
  source 1..75: mol_type = other DNA
ttcctgattgaagaattagccgttggcgcacagttcaacattccgtacatccatgtactggtcaataacgcctat

SEQ ID NO: 82781 - DNA, 75 bp, synthetic construct
  source 1..75: mol_type = other DNA
ctgattaaccagaaacgcattgcaccgctgaatcttctgagtgttgacccgaataaccagagccagattattgcg

SEQ ID NO: 82782 - DNA, 75 bp, synthetic construct
  source 1..75: mol_type = other DNA
ccgtttttcagcaggattttactgatatcgaaaaacggcttttacagagcggcgaagattatattgcgatgcttg

SEQ ID NO: 82783 - DNA, 75 bp, synthetic construct
  source 1..75: mol_type = other DNA
acgtcattgagcattatgcgtcactggatttgctgattgtcgacgaagtcggcgttcagtttggcagtgcggctg

SEQ ID NO: 82784 - DNA, 75 bp, synthetic construct
  source 1..75: mol_type = other DNA
atccgttcggcacaaccgtaaccgcagaaacgttacgcaataccttcgcaccgttgacgcaatgggaagataaat

SEQ ID NO: 82785 - DNA, 75 bp, synthetic construct
  source 1..75: mol_type = other DNA
tcagggctttaagccacaggagagtatccccagctataacgcgaatccggacgagacaaaatattacggtggcgt

SEQ ID NO: 82786 - DNA, 75 bp, synthetic construct
  source 1..75: mol_type = other DNA
ccgtactctggcggcctccggtatcaaagacttccgcaaaatgctggctcattgcgaagccgttaccccgattcg

SEQ ID NO: 82787 - DNA, 75 bp, synthetic construct
  source 1..75: mol_type = other DNA
tcagttttatatttccgagaaaaaagatgatgtgatcggcaaggtggtgaagagcgaagatattcctgccgctac

SEQ ID NO: 82788 - DNA, 75 bp, synthetic construct
  source 1..75: mol_type = other DNA
aagctgtggagcacaaacagctacgcccgctggatgtgcaatttgccctgaccgtggcgggagatgaacatcctg

SEQ ID NO: 82789 - DNA, 75 bp, synthetic construct
  source 1..75: mol_type = other DNA
ccggacgccggtatatcggtatcgagctgcttgagcagtatcaccgtgccggacagcaacgtctggctgccgtac

SEQ ID NO: 82790 - DNA, 75 bp, synthetic construct
  source 1..75: mol_type = other DNA
ctggcactgcttacgccattcaacatcggcatgatcaccagcgacgactggggcagctatggccgggaggtgccg

SEQ ID NO: 82791 - DNA, 75 bp, synthetic construct
  source 1..75: mol_type = other DNA
gcaaggagagcgattcagctaagctggacgcatggattgctgaactgcctctgaacttgcaggaggagggaaagg

SEQ ID NO: 82792 - DNA, 75 bp, synthetic construct
  source 1..75: mol_type = other DNA
cccgtgtgatcggcttcactcctggcagaataattacctggagcagtattcccgaaaaattgcctgttatcttgc

SEQ ID NO: 82793 - DNA, 75 bp, synthetic construct
  source 1..75: mol_type = other DNA
atgaacgaattaactcaacaagaaaatattaactctaatgttgcggttttcagccctcagtccctggctgcaatt

SEQ ID NO: 82794 - DNA, 75 bp, synthetic construct
  source 1..75: mol_type = other DNA
atgttgctgtttgtcacgcccacttctgaacctactcgctctacaacgccgttgtttacagaacgctgcccagca

SEQ ID NO: 82795 - DNA, 75 bp, synthetic construct
  source 1..75: mol_type = other DNA
ccacaaaacccgctgccggacgtgctgggctggaaatattctggcaatcgtcatcacccgacggaaaagcccgtt

SEQ ID NO: 82796 - DNA, 75 bp, synthetic construct
  source 1..75: mol_type = other DNA
gtggcgcttatctgcgagcttgatgagcaatggagctacgttggcagtaaagcccggcaacacttctggtacgcg

SEQ ID NO: 82797 - DNA, 75 bp, synthetic construct
  source 1..75: mol_type = other DNA
gtcggtgaacgataaagacacgctgaaagccgggaagctcaccatcgattacgactacacgccagtgccgccact

SEQ ID NO: 82798 - DNA, 75 bp, synthetic construct
  source 1..75: mol_type = other DNA
gggaatggagatgggggcccgtaaagaggcttacgatgttatcgcattctctccggagggcagtaaaaagatctt

SEQ ID NO: 82799 - DNA, 75 bp, synthetic construct
  source 1..75: mol_type = other DNA
cgcgccagccgtcaggtgacagtcccggcggtgatgctggaaaaagtgatggcgctggcaggcagtgaaatgaag

SEQ ID NO: 82800 - DNA, 75 bp, synthetic construct
  source 1..75: mol_type = other DNA
atcctggcggatatcgctcatcagttctggcatattccgcatgaaaaaatctggattgaagaccagtcaacaaac

SEQ ID NO: 82801 - DNA, 75 bp, synthetic construct
  source 1..75: mol_type = other DNA
gcttgcgcagtgcgggctgacggtggagcaactggccagacaggtggagccggaatacacaccggcgcgaaaagc

SEQ ID NO: 82802 - DNA, 75 bp, synthetic construct
  source 1..75: mol_type = other DNA
accgcgtactcaaaaaagatgcgctgatggtcagcttctacggctggaaccgcgtcgatcgctttatggccgcct

SEQ ID NO: 82803 - DNA, 75 bp, synthetic construct
  source 1..75: mol_type = other DNA
gcacctgttgaggcgcaaccacagggtattacggctgtcctgttagcgcccatcgacggcttgtacaaccatcaa

SEQ ID NO: 82804 - DNA, 75 bp, synthetic construct
  source 1..75: mol_type = other DNA
atgaatatcagaaaactgttttgtccgggcaacaccccccggattttattgtttttattcttttttgttgtttct

SEQ ID NO: 82805 - DNA, 75 bp, synthetic construct
  source 1..75: mol_type = other DNA
atcaggcgctgcgtgagatagcaaaacaggcaacaccagacgaatgggtcgcatttatttcgacggatactggta

SEQ ID NO: 82806 - DNA, 75 bp, synthetic construct
  source 1..75: mol_type = other DNA
agccttcttcaccgaacacaacgccaccttcccggcacgttcttgcgttgaagttgcccgtctgccgaaagacgt

SEQ ID NO: 82807 - DNA, 75 bp, synthetic construct
  source 1..75: mol_type = other DNA
gaagagattacctacactgcacgcggtgtggctgccgacccggacgacgtcctattttcgggcaatcgtgcaacg

SEQ ID NO: 82808 - DNA, 75 bp, synthetic construct
  source 1..75: mol_type = other DNA
cacgccgtgcccgtattcttcgcggcgcgctagcgcgtcgtaaacggttggcggaaaaattcattaatccgatgg

SEQ ID NO: 82809 - DNA, 75 bp, synthetic construct
  source 1..75: mol_type = other DNA
aaaatgcagggatccagctaattgatggtgacagaggcaaaaattatcctaaacataatgattttatggagaatg

SEQ ID NO: 82810 - DNA, 75 bp, synthetic construct
  source 1..75: mol_type = other DNA
gttcctccgatatcacattaaaagcaagtcatgttggtgcgtttgccttagggaaaacaggaagcaccgttgcga

SEQ ID NO: 82811 - DNA, 75 bp, synthetic construct
  source 1..75: mol_type = other DNA
cgttgcagaagcgaagatgtattttcaggggatgccgcaggttgactattcaagcccggaggctatgcagcagtc

SEQ ID NO: 82812 - DNA, 75 bp, synthetic construct
  source 1..75: mol_type = other DNA
cactggtagcgatactggtgccttttttattggtggggtgcgtcagcctggataaggcgcgccagcttttcgata

SEQ ID NO: 82813 - DNA, 75 bp, synthetic construct
  source 1..75: mol_type = other DNA
aaacagcatggtctatttcactgacagcgcaaacaataagaaattccatacgctgacggtcgatgagctggcaac

SEQ ID NO: 82814 - DNA, 75 bp, synthetic construct
  source 1..75: mol_type = other DNA
ttgaagccggggcggatgaagatacacacttccgcgcgaccagcctggagacgctgcgcaacatggtggcggcag

SEQ ID NO: 82815 - DNA, 75 bp, synthetic construct
  source 1..75: mol_type = other DNA
tgggggagttttctggcagacgccagttatggatatgggatctgctgtggtatacggcgcaatcaaaggtttgtg

SEQ ID NO: 82816 - DNA, 75 bp, synthetic construct
  source 1..75: mol_type = other DNA
gagaaatgttctggctagcgtgagcgatgataaacgtatccaggtgcttcttatatcatggtgctttggcggatt

SEQ ID NO: 82817 - DNA, 75 bp, synthetic construct
  source 1..75: mol_type = other DNA
gaatttaagggaaaaagtagtagtttatggcctcgatatgttctttgatgctgcagttggaggaggacgtagaga

SEQ ID NO: 82818 - DNA, 75 bp, synthetic construct
  source 1..75: mol_type = other DNA
gagaaatgttctcgcgagcgttagtgatgacaaacgtatccaggtacttcttatctcatggtgttttggtggatt

SEQ ID NO: 82819 - DNA, 75 bp, synthetic construct
  source 1..75: mol_type = other DNA
aagagataaaactgattaatgcaaacggagcagaacaatggtcagcaagacaacttgggaaactactgggttatt

SEQ ID NO: 82820 - DNA, 75 bp, synthetic construct
  source 1..75: mol_type = other DNA
ctgatatcaccgtcactgcagacgctatcgctgactggatgtagcaatattatactgccggagaaacttccggag

SEQ ID NO: 82821 - DNA, 75 bp, synthetic construct
  source 1..75: mol_type = other DNA
ttctcattgcgctgggattcaacccgttgaaggcggcgattgcttccctcgtagcaaataccgttccgaccgcat

SEQ ID NO: 82822 - DNA, 75 bp, synthetic construct
  source 1..75: mol_type = other DNA
ttgaaaatactttaaaagatattctattagctaatgctgctctaacattcatttttgcaataccaatggctatta

SEQ ID NO: 82823 - DNA, 75 bp, synthetic construct
  source 1..75: mol_type = other DNA
tcctgcgggaaacacggaaaatacacgcgctatgtgctgacgggcccggatgtaagggggaaagctgtcaaacgg

SEQ ID NO: 82824 - DNA, 75 bp, synthetic construct
  source 1..75: mol_type = other DNA
cgggcgctctatccgccgacggatgaatcatcctgacaggttgaaatatcccatgaagcgcgtcggcaagcgcgg

SEQ ID NO: 82825 - DNA, 75 bp, synthetic construct
  source 1..75: mol_type = other DNA
agctgataacgaaatcgactctgattattttgctatcacctcaacgaatgagaacggtactgaaattgatcatga

SEQ ID NO: 82826 - DNA, 75 bp, synthetic construct
  source 1..75: mol_type = other DNA
taaccatgttttttctgaacgtcttgctgttatcagtcatggacgatacactccacttttgccccatgtatctgc

SEQ ID NO: 82827 - DNA, 75 bp, synthetic construct
  source 1..75: mol_type = other DNA
gagcgtttctccaattgcagggtattcgcctgatacggcctatgacgctgtgactctggcaacggcgagagatcc

SEQ ID NO: 82828 - DNA, 75 bp, synthetic construct
  source 1..75: mol_type = other DNA
gaggatgtcctgagcaaaatggccgcgctgttcggacagaagaaacctgcccggatactgagagaggaattttcc

SEQ ID NO: 82829 - DNA, 75 bp, synthetic construct
  source 1..75: mol_type = other DNA
tcgcccgtgaactggggattggctggatttgccagcagggtgagaaactgtatgcgatacaaccagaagaaacgc

SEQ ID NO: 82830 - DNA, 75 bp, synthetic construct
  source 1..75: mol_type = other DNA
attaattaagaccaccccgatattattcaacattgtacgttatcttggtgcgttttatttgctctatctggggag

SEQ ID NO: 82831 - DNA, 75 bp, synthetic construct
  source 1..75: mol_type = other DNA
gagcctagtagtttctatgctttttataatcgtcgttttaacgagtatgttaacaccatgttaatggaaaaagat

SEQ ID NO: 82832 - DNA, 75 bp, synthetic construct
  source 1..75: mol_type = other DNA
aggtagtggaacctcggaagcaacagctatagtttccggcgttctggcagcgatggtctcatgtaatccccgtgc

SEQ ID NO: 82833 - DNA, 75 bp, synthetic construct
  source 1..75: mol_type = other DNA
taacctgctggcaacagcgctgtgcgtactggcgtggggctacttcctccatcagggcgtggtcgatccgctggg

SEQ ID NO: 82834 - DNA, 75 bp, synthetic construct
  source 1..75: mol_type = other DNA
cctcaaggcggaagaactgactgataacgccggaattgctctgcgttttcgggactgcgagtttgataattatct

SEQ ID NO: 82835 - DNA, 75 bp, synthetic construct
  source 1..75: mol_type = other DNA
ctgacaataacctaaatcagttagattattgtcatttaataaataatgacattctttcatcattagactggcccc

SEQ ID NO: 82836 - DNA, 75 bp, synthetic construct
  source 1..75: mol_type = other DNA
agcttttgccattctcaccggattcagtcgtcactcatggtgatttctcacttgataaccttatttttgacgagg

SEQ ID NO: 82837 - DNA, 75 bp, synthetic construct
  source 1..75: mol_type = other DNA
tatggcttccctcattgcctcacgttatgggatttatggtgtttatcctcatgctctgatatccagtagaagagt

SEQ ID NO: 82838 - DNA, 75 bp, synthetic construct
  source 1..75: mol_type = other DNA
cgctggctgaatgtgtttaatcaaaaggggacgttatatccggatatggatgtcgatggtcgtatcgggccacgt

SEQ ID NO: 82839 - DNA, 75 bp, synthetic construct
  source 1..75: mol_type = other DNA
gtgagaaagttaagccgacttgaaaaatatcacatgaacaaggtttcaatgcgcagtccgtcaaagattgtcgcc

SEQ ID NO: 82840 - DNA, 75 bp, synthetic construct
  source 1..75: mol_type = other DNA
atggttggccccgatccgtcagtattaaaacctgatccgtcagataaaagatcttttcgtccggaagcttcgcaa

SEQ ID NO: 82841 - DNA, 75 bp, synthetic construct
  source 1..75: mol_type = other DNA
caggacgaaaccgtccctgccggacaccgaccgcctcctcaaatttttgtgcacgggaatttttttgaaaataat

SEQ ID NO: 82842 - DNA, 75 bp, synthetic construct
  source 1..75: mol_type = other DNA
ttgaagcagaggcttttaactgtcctcactgtggtgtatatgcccgtcagttctggcgtaggatgtatggaagtg

SEQ ID NO: 82843 - DNA, 75 bp, synthetic construct
  source 1..75: mol_type = other DNA
cgtctgggcgtctttgtacctacccttaagtcactgaagaacagtaaaaaaaatacactgtcacgcaccgatgcc

SEQ ID NO: 82844 - DNA, 75 bp, synthetic construct
  source 1..75: mol_type = other DNA
aactgaagacaatcagcgactgtcttagcttgctggcaaaaataaaagaaaccattgaagagattaaatttcagc

SEQ ID NO: 82845 - DNA, 75 bp, synthetic construct
  source 1..75: mol_type = other DNA
atgaaatcgcggtcaggcagtggaaggaaaaatcgcgccagctttccgggcgggaagaccttacccccgccgact

SEQ ID NO: 82846 - DNA, 75 bp, synthetic construct
  source 1..75: mol_type = other DNA
cgggaagaccttacccccgccgactggagcaatctggagctgtattgcgttaactactccatataccgcaaagcc

SEQ ID NO: 82847 - DNA, 75 bp, synthetic construct
  source 1..75: mol_type = other DNA
aaaattttaagagtacctatcaattactggttaactcagcacgaatattgtttgttgaaaaaggctatcaagctg

SEQ ID NO: 82848 - DNA, 75 bp, synthetic construct
  source 1..75: mol_type = other DNA
tgcctgtcaggagcatacgtgtttgccgaatctgctcgagcgtcagttcgctgtaccggagccagacagggtatg

SEQ ID NO: 82849 - DNA, 75 bp, synthetic construct
  source 1..75: mol_type = other DNA
gatttgcccctatatttccagacacctgttatcacttaacccattactggcctgctgccgcagatattcccgtgg

SEQ ID NO: 82850 - DNA, 75 bp, synthetic construct
  source 1..75: mol_type = other DNA
gaagtcaggcgcgatttgttgatatccccgaacctgtctgcggtaaaggagaagtgctaatcaatgttgagcgtg

SEQ ID NO: 82851 - DNA, 75 bp, synthetic construct
  source 1..75: mol_type = other DNA
gctggatgtctgcaacggcacgctgacggcctgcaagctccggcacggagacagcaacgaactgccgttcggcgg

SEQ ID NO: 82852 - DNA, 75 bp, synthetic construct
  source 1..75: mol_type = other DNA
ttttttatcgcccggcagcaattaaaaccagaccgaatgaagtatggcaggaccagttaattctgaacaaagtca

SEQ ID NO: 82853 - DNA, 75 bp, synthetic construct
  source 1..75: mol_type = other DNA
gtcgtctgcaatccgtacgctatgccgctaccgcgaagtttgacccggaacataaagtctggcgtctgtcgcagg

SEQ ID NO: 82854 - DNA, 75 bp, synthetic construct
  source 1..75: mol_type = other DNA
atgaaaacaatcgaacaaaaaattgaacagtgccgcaagtggcagaaggcagccagagaacgagcgatcgctcgg

SEQ ID NO: 82855 - DNA, 75 bp, synthetic construct
  source 1..75: mol_type = other DNA
ttgtcgccaataaagacacgctggtgatgattggcgatttaagttctcacggcgtgttgttaggtattttagggt

SEQ ID NO: 82856 - DNA, 75 bp, synthetic construct
  source 1..75: mol_type = other DNA
gcttggttttaagctggtggtggtctgtgatgacaacacacaggattaccccacaaaaactgacctgggcggtcg

SEQ ID NO: 82857 - DNA, 75 bp, synthetic construct
  source 1..75: mol_type = other DNA
gattagatagagctcgcattgttgaactcaagcttgcgggcaacaaagacgaagagctgtatcgtgaactgctgt

SEQ ID NO: 82858 - DNA, 75 bp, synthetic construct
  source 1..75: mol_type = other DNA
tcgaacaggaaacggcgcaactcatacccgccgatgatgtgcgaaaagagatggctatatggggggaaatcgtaa

SEQ ID NO: 82859 - DNA, 75 bp, synthetic construct
  source 1..75: mol_type = other DNA
ttttttagaaaaagccggatatgtaaaaaggatggatagcagggaggatcgccgtgctaaaaaaatcagtctgac

SEQ ID NO: 82860 - DNA, 75 bp, synthetic construct
  source 1..75: mol_type = other DNA
ataagccagaaacttcagtttaccagaactaatattacccgcattacagattttttagaaaaagccggatatgta

SEQ ID NO: 82861 - DNA, 75 bp, synthetic construct
  source 1..75: mol_type = other DNA
gcctgggattttctcaaaattacaggttccggccatgaaggaagcatgacctccattcatgccgggtcagcaaaa

SEQ ID NO: 82862 - DNA, 75 bp, synthetic construct
  source 1..75: mol_type = other DNA
gtgaaagcgatgattatttaaaaaccataattaaaacaactcagctttctgaagagctaccgaagaaattgccat

SEQ ID NO: 82863 - DNA, 75 bp, synthetic construct
  source 1..75: mol_type = other DNA
gatctttctcggcgatcgtgatcaactggcctcggttgaggctggggctgtgctgggcgatatctgcgcttatgc

SEQ ID NO: 82864 - DNA, 75 bp, synthetic construct
  source 1..75: mol_type = other DNA
gatgaatgtaaaatcagacaaatatcatgaaagtaacggaaccagtattgaaaataccggtaacggaaatattct

SEQ ID NO: 82865 - DNA, 75 bp, synthetic construct
  source 1..75: mol_type = other DNA
cagaaaaacctggttgcctacgtccctcagtcagaagaggttgactggtcatttcctgtactggtggaagatgtg

SEQ ID NO: 82866 - DNA, 75 bp, synthetic construct
  source 1..75: mol_type = other DNA
taaaaaaaacagcgttatccggagatgaagaaagtattgagttactgcataatattgcgttaggttatgatgaat

SEQ ID NO: 82867 - DNA, 75 bp, synthetic construct
  source 1..75: mol_type = other DNA
ggcgttacgcatcctgaaagttcatgaattactcgacagggctggtattgcccgccgcttccagaactgcgagtt

SEQ ID NO: 82868 - DNA, 75 bp, synthetic construct
  source 1..75: mol_type = other DNA
gaactggcccggcggcaggaagagctgctctggaagctggtcaaagggcggatactgtacccgtcgctgacggcg

SEQ ID NO: 82869 - DNA, 75 bp, synthetic construct
  source 1..75: mol_type = other DNA
gaggttaaatctggcgtattaattcttgctgcacctgatgctcttggtcggactgagtatttatatttatcccgt

SEQ ID NO: 82870 - DNA, 75 bp, synthetic construct
  source 1..75: mol_type = other DNA
acacagcgggtctttatgcaacatggtatgccaatgatgaaacacacaatggttcttatcttgatagctggctgc

SEQ ID NO: 82871 - DNA, 75 bp, synthetic construct
  source 1..75: mol_type = other DNA
ttcttcattgggcgaatatacagatggtcgggtcagtggatatgaaggcaaggataaaaatccacagggcattaa

SEQ ID NO: 82872 - DNA, 75 bp, synthetic construct
  source 1..75: mol_type = other DNA
tatcagagcgaattactggagcctgttagcgggtccttcgtggcggtttaacgaatacctcagtgtgtatgcaat

SEQ ID NO: 82873 - DNA, 75 bp, synthetic construct
  source 1..75: mol_type = other DNA
atcgggcagagttcagcatcaaagcgatgtgtcgtgtacttcgggttgcccgcagcggttggtatgtctggctca

SEQ ID NO: 82874 - DNA, 75 bp, synthetic construct
  source 1..75: mol_type = other DNA
gaaggtggcgcgggcggtttcgatggcgctgaagaactggatccgttgttcgatcaggcggtgcagtttgtcact

SEQ ID NO: 82875 - DNA, 75 bp, synthetic construct
  source 1..75: mol_type = other DNA
ggccttggcatcaccatgcctaacctgcatgaaatgggtggcgagaacgcgccgatcatcatggcacagctgaaa

SEQ ID NO: 82876 - DNA, 75 bp, synthetic construct
  source 1..75: mol_type = other DNA
ggatgcaaaggtggcgcatcagaagagtaaagagaagacgctggtgacgtaccacgccgacggcccgccgaccac

SEQ ID NO: 82877 - DNA, 75 bp, synthetic construct
  source 1..75: mol_type = other DNA
agaagcatggtctgaagctggtcggtcagatagagccgattaccattgaccgggtgacgcaatacgcggaaaccg

SEQ ID NO: 82878 - DNA, 75 bp, synthetic construct
  source 1..75: mol_type = other DNA
acgaagttctgggaaaagagggcggttacgtcaatcaccaggatgataaaggcggaccgacaaaatggggtatta

SEQ ID NO: 82879 - DNA, 75 bp, synthetic construct
  source 1..75: mol_type = other DNA
cttgctcgaggccgcgattaaattccaacctggatgctgatttatatgggtataaatgggctcgcgataatgtcg

SEQ ID NO: 82880 - DNA, 75 bp, synthetic construct
  source 1..75: mol_type = other DNA
tttagatttaagtttaatcaagttcctactattttatctgcatttaaagattcacgaaaacttgataattctgaa

SEQ ID NO: 82881 - DNA, 75 bp, synthetic construct
  source 1..75: mol_type = other DNA
tatttcttgccggatgtacttcgcaaatgaagtattccaatgtcgtcaggattaggaatgtatgttcctcagata

SEQ ID NO: 82882 - DNA, 75 bp, synthetic construct
  source 1..75: mol_type = other DNA
ctttacaccaaatcctcctgcaattttgtatgtgaagggggggaagcatatattatctgagttgcccggtgtagc

SEQ ID NO: 82883 - DNA, 75 bp, synthetic construct
  source 1..75: mol_type = other DNA
ggttcatctgcatgaggcagaacctaaggttatccatcaggcgctggaagacaaaatcgctcaggcccccgcatt

SEQ ID NO: 82884 - DNA, 75 bp, synthetic construct
  source 1..75: mol_type = other DNA
gtgaagaaacacaaaatgacagctgtgagaaaatactgacgccgacagagtggaaactactgtgggttaagctgg

SEQ ID NO: 82885 - DNA, 75 bp, synthetic construct
  source 1..75: mol_type = other DNA
gccgctgccggacatcacacaggagcgttttttacgtcttccggaagtgatgcacctgtgcggcctgtcacgctc

SEQ ID NO: 82886 - DNA, 75 bp, synthetic construct
  source 1..75: mol_type = other DNA
gtcgccgctcagtactttccttattgatatctgccttgatatatgctccgcccgggatggcggcctttacttcta

SEQ ID NO: 82887 - DNA, 75 bp, synthetic construct
  source 1..75: mol_type = other DNA
gcgaaagtgatcgccagcgcctattccgatctcggtttcgacgtagatttaagcccgatgttctctacacctgaa

SEQ ID NO: 82888 - DNA, 75 bp, synthetic construct
  source 1..75: mol_type = other DNA
gttgcttcaggccaaacgcgtgattatggacgaggatgccacccagttgtcagacaacgacctgatggagcagat

SEQ ID NO: 82889 - DNA, 75 bp, synthetic construct
  source 1..75: mol_type = other DNA
tgcagacccgggataaccttgagcgcatggtggttatcgcggtgcgggtgctgggcctgcggcagggaggtatca

SEQ ID NO: 82890 - DNA, 75 bp, synthetic construct
  source 1..75: mol_type = other DNA
acagacaaatttgcgaaatgttcagccgggcacaacgggatccgttctggataaaaaacatcaagagcccggaaa

SEQ ID NO: 82891 - DNA, 75 bp, synthetic construct
  source 1..75: mol_type = other DNA
gatgccctctgttattacagtgatgacggtctggcggaggcggataataatgctgcggaaagagcgcttcgtgca

SEQ ID NO: 82892 - DNA, 75 bp, synthetic construct
  source 1..75: mol_type = other DNA
gcaacagcctgaaattcgtgtcgtggaaggattacaaagccgtcaccagcgggctgaaagcggtatatcaggccc

SEQ ID NO: 82893 - DNA, 75 bp, synthetic construct
  source 1..75: mol_type = other DNA
gccgtggagcttgtggtgcgcggacgtcacaaagaagtggattccggtgagtggaagacgggcgaaagcaacacc

SEQ ID NO: 82894 - DNA, 75 bp, synthetic construct
  source 1..75: mol_type = other DNA
gcgtgatgataccggggaagtacaggccgtggagcttgtggtgcgtggacgtcacaaagaagtggactccggcga

SEQ ID NO: 82895 - DNA, 75 bp, synthetic construct
  source 1..75: mol_type = other DNA
acgtcatgagatgaattacaccgtacaggaagcgttaaagccggtaacggttggcgatgcgctcacctactggct

SEQ ID NO: 82896 - DNA, 75 bp, synthetic construct
  source 1..75: mol_type = other DNA
agccgatcgtaaaacgcacttcagctcctgggcgcgaagaggcattgtttcagatcggctggcaggagagatact

SEQ ID NO: 82897 - DNA, 75 bp, synthetic construct
  source 1..75: mol_type = other DNA
atgcggttgagcacacgtcgctgggacaggtgacggccatgtacggtctgccgtgggggctgacggtgtacgggg

SEQ ID NO: 82898 - DNA, 75 bp, synthetic construct
  source 1..75: mol_type = other DNA
gcctgttcgcgtcaagtaataccgcaacggctgctgcgcaaaaatttccgtctggattaattttacagtgcggtc

SEQ ID NO: 82899 - DNA, 75 bp, synthetic construct
  source 1..75: mol_type = other DNA
gggacatggcgtgatatgggttataccgatgagcaaatgcaaaaccccgaatatcaggctgacgctggcgcgcgc

SEQ ID NO: 82900 - DNA, 75 bp, synthetic construct
  source 1..75: mol_type = other DNA
ccatatcctgagcgtactgccggaatggccctccaaccgtgttgacgaactgctgccatggaacgtagtttatca

SEQ ID NO: 82901 - DNA, 75 bp, synthetic construct
  source 1..75: mol_type = other DNA
gaatatgtggggcgcaactaactggacgcgaacaggatttgttgcgcattgtaactatggatttgaaggtggagc

SEQ ID NO: 82902 - DNA, 75 bp, synthetic construct
  source 1..75: mol_type = other DNA
tcggaaacgccaataatttttcgtgacgaaagcatgcgcaccgcctgctctcccgacggtttatgcagcgacggt

SEQ ID NO: 82903 - DNA, 75 bp, synthetic construct
  source 1..75: mol_type = other DNA
tataccagtccacccacgttagtgtggccagttccacttctgcacggtttttccagctcttacggtgtattacct

SEQ ID NO: 82904 - DNA, 75 bp, synthetic construct
  source 1..75: mol_type = other DNA
cgacctcgaaacgcatcgccaaagtggcgtttaccggctcaacggaagtgggccaacaaattatgcaatacgcca

SEQ ID NO: 82905 - DNA, 75 bp, synthetic construct
  source 1..75: mol_type = other DNA
agcacaggctcaaaacgggtttggtgcgtttaaaaatatagaatactcctgcacgttcaatgctgatactggtga

SEQ ID NO: 82906 - DNA, 75 bp, synthetic construct
  source 1..75: mol_type = other DNA
attgccagcgcctttaatatgcctctcgatgttctgttctggtgtgccggttcgcagggaagtatgtacccgttc

SEQ ID NO: 82907 - DNA, 75 bp, synthetic construct
  source 1..75: mol_type = other DNA
gccatatcctgagcgtactgccggaatggccctccaaccgtgttgacgaactgctgccatggaacgtagttttca

SEQ ID NO: 82908 - DNA, 75 bp, synthetic construct
  source 1..75: mol_type = other DNA
tagcgtcatcagacatgcgataaagaaacggaaagtgttcccgacagatgaatcggtgaaaaaagtggtgtggct

SEQ ID NO: 82909 - DNA, 75 bp, synthetic construct
  source 1..75: mol_type = other DNA
ggtatttacttgaaggtgctgacccaggaagtcaggatgcgttagcaaatgcggaacctgactcccagggtacgc

SEQ ID NO: 82910 - DNA, 75 bp, synthetic construct
  source 1..75: mol_type = other DNA
cggtgaggacggccacgagacgttcttcctggtcgaagaggtcagaaagaacgagtttggctttgctgaaggcgc

SEQ ID NO: 82911 - DNA, 75 bp, synthetic construct
  source 1..75: mol_type = other DNA
ccgtctgaacggtatcgatccggaagcgtatctgcgccatatcctgagcgtactgccggaatggccttccaaccg

SEQ ID NO: 82912 - DNA, 75 bp, synthetic construct
  source 1..75: mol_type = other DNA
gagatggccgtcgatttaaccccagtgtttttaaagatacttatcaatatggttatacaagctcaggtcaaaata

SEQ ID NO: 82913 - DNA, 75 bp, synthetic construct
  source 1..75: mol_type = other DNA
ctggatgctaaacgcaatgcgctggatatgtggacggagcggttagggatactggcgggaacacatgaaaacgta

SEQ ID NO: 82914 - DNA, 75 bp, synthetic construct
  source 1..75: mol_type = other DNA
gacaataacacagcggaaagagcgcttcgtgcagtctgtcttggaaagaaaaattacgtgttcttcggtagcgat

SEQ ID NO: 82915 - DNA, 75 bp, synthetic construct
  source 1..75: mol_type = other DNA
acttctggcccatgttgtcaccgggaaatatgcagaccatctgccgttataccgccagtcagaaatataccgtcg

SEQ ID NO: 82916 - DNA, 75 bp, synthetic construct
  source 1..75: mol_type = other DNA
gcgtgaactgacaattgcggtaaacaatattattcctggtgatttgctggtggcatttattcgagattttgaacg

SEQ ID NO: 82917 - DNA, 75 bp, synthetic construct
  source 1..75: mol_type = other DNA
ttagcggtgaggaaggtgacatttccccctacactgctgaaatggcgagagaattagcaatatggtatggtaatg

SEQ ID NO: 82918 - DNA, 75 bp, synthetic construct
  source 1..75: mol_type = other DNA
tgccgcggatggacggactggatttcctcgaaaaattaatgcgtttgcgtccaatgcccgttgtgatggtttctt

SEQ ID NO: 82919 - DNA, 75 bp, synthetic construct
  source 1..75: mol_type = other DNA
aggagggatggttgtacctcgctggcatcaaagatgtttatacgtgcgaaattgtcggctacgccatgggagagc

SEQ ID NO: 82920 - DNA, 75 bp, synthetic construct
  source 1..75: mol_type = other DNA
atgagtcagcttgatgacaccatccttgatgcgctgacgcacgttactttcccaaagggttttgcacaggcagag

SEQ ID NO: 82921 - DNA, 75 bp, synthetic construct
  source 1..75: mol_type = other DNA
tgccgcggatggacggactggattttctcgaaaaattaatgcgtttgcgcccaatgcccgttgtgatggtttctt

SEQ ID NO: 82922 - DNA, 75 bp, synthetic construct
  source 1..75: mol_type = other DNA
gtcctggttgcggtagtgatatggcctatctcagcgaagtcagcgcggagcaactggagctggtctccagcgccc

SEQ ID NO: 82923 - DNA, 75 bp, synthetic construct
  source 1..75: mol_type = other DNA
gaaaaaggataaaatcaactggttactggatttactgtatgaacaaaacagagttgtaccggttattgagggaaa

SEQ ID NO: 82924 - DNA, 75 bp, synthetic construct
  source 1..75: mol_type = other DNA
gagcgtgaccgcctcatttggctcaaaggtcgaggtgtggcttgccccgaggtgatcaactggcaggaggaacag

SEQ ID NO: 82925 - DNA, 75 bp, synthetic construct
  source 1..75: mol_type = other DNA
tacgcgaaactggttgagagttacagtacagaaaaggaaatatgggcgcaaaaacaaaaagcactggagtcaaaa

SEQ ID NO: 82926 - DNA, 75 bp, synthetic construct
  source 1..75: mol_type = other DNA
gtatccctgcatgggtgatgtcgcatccattgcgtcatgtgtttttacaaggctatcttgatactgatgggacac

SEQ ID NO: 82927 - DNA, 75 bp, synthetic construct
  source 1..75: mol_type = other DNA
cggtttgagtatgggacctgaacgggaccgtggtggctttaattatcgttgttctgcgccattattttctgatga

SEQ ID NO: 82928 - DNA, 75 bp, synthetic construct
  source 1..75: mol_type = other DNA
tgcatcagggaatgaccagcctcagttggttgccagcctcgtccctgatgaacagcgcatcagcttctggccgca

SEQ ID NO: 82929 - DNA, 75 bp, synthetic construct
  source 1..75: mol_type = other DNA
ttggtttagctgtacgggggatcttaaagatacagcgttccttgaatttgaagtggctggagacgggaagttaat

SEQ ID NO: 82930 - DNA, 75 bp, synthetic construct
  source 1..75: mol_type = other DNA
acagcgtggtgcgcagaatacgatgaatggggcaacctgctgaatgaagagaacccgcatcagctgcagcagctt

SEQ ID NO: 82931 - DNA, 75 bp, synthetic construct
  source 1..75: mol_type = other DNA
gagccgtagtgagcacaatattctgtttgattttgcacgttcacgccgcgctctggcgcaatttaatccgcatgt

SEQ ID NO: 82932 - DNA, 75 bp, synthetic construct
  source 1..75: mol_type = other DNA
atatttgactctctaatattgaataatccgggactagcattagatataacaatgatagcttctcgtggaaatgtt

SEQ ID NO: 82933 - DNA, 75 bp, synthetic construct
  source 1..75: mol_type = other DNA
acatccgcatcccgtatgccacggacccggcgggcaaccggctgccggacccggagctgcacccggacagtacac

SEQ ID NO: 82934 - DNA, 75 bp, synthetic construct
  source 1..75: mol_type = other DNA
ccatgatgggtggtgatgcatttagcaagtggattggaaacaatgcaaccagattgtctaatcagggggtagacc

SEQ ID NO: 82935 - DNA, 75 bp, synthetic construct
  source 1..75: mol_type = other DNA
tttacttttgataataattactttaatgataaatatcaaggaattccaattggcggatataacaagttaatagaa

SEQ ID NO: 82936 - DNA, 75 bp, synthetic construct
  source 1..75: mol_type = other DNA
ctacgacccgctgggccgccggacggggaaacgggtgtggcgtcgcgagcgtgacctgacgggatggatgtcgct

SEQ ID NO: 82937 - DNA, 75 bp, synthetic construct
  source 1..75: mol_type = other DNA
ggaaacaccagcaataccagacaccgctaaggtttttgattgtggctataataagatacaagaaattcgatactt

SEQ ID NO: 82938 - DNA, 75 bp, synthetic construct
  source 1..75: mol_type = other DNA
aagttaacggacaacgattttcttatggaattactggtgggaatgtttttttagttgtcttgtttttgttttttt

SEQ ID NO: 82939 - DNA, 75 bp, synthetic construct
  source 1..75: mol_type = other DNA
acgataaaacaacacgagttagtatctgatgatgcaatcataaatgaattatcaagtgagttagtcagttgtctt

SEQ ID NO: 82940 - DNA, 75 bp, synthetic construct
  source 1..75: mol_type = other DNA
ggtaaagaaaaatcagacccgtattaccgggatggataaccagatcctgtcgttgtatgccaaagggatgaccac

SEQ ID NO: 82941 - DNA, 75 bp, synthetic construct
  source 1..75: mol_type = other DNA
ttgaagggttaaaacttggtgacttcaacgaacatcagattgacctgttcggtgatgcctatgagttcctgattt

SEQ ID NO: 82942 - DNA, 75 bp, synthetic construct
  source 1..75: mol_type = other DNA
agctctcgaaaaccttggtttgggagaagcggcaaagaggaatgtggggacaggagaaaatcaggtaccggatat

SEQ ID NO: 82943 - DNA, 75 bp, synthetic construct
  source 1..75: mol_type = other DNA
agtcgcgccatcgtcgtccgttaccggcacaccttccccgtgaaatacaccgcctggagccagaagaaagctgtt

SEQ ID NO: 82944 - DNA, 75 bp, synthetic construct
  source 1..75: mol_type = other DNA
tggcttctataagagagatcattactcaggcgcacgataacgggaccgggatgccgttgtcggttgtgagagaaa

SEQ ID NO: 82945 - DNA, 75 bp, synthetic construct
  source 1..75: mol_type = other DNA
tgccgaaattatcgacgcaaacaatgaggattacatttcctatccctttccctaaaaaagcggactgcgccattc

SEQ ID NO: 82946 - DNA, 75 bp, synthetic construct
  source 1..75: mol_type = other DNA
aaagaggaagaagctaaatgtctcgatgatgctcattgctacgcttcgaaacataaagctggtgattatatttgt

SEQ ID NO: 82947 - DNA, 75 bp, synthetic construct
  source 1..75: mol_type = other DNA
cgctgctggggacgttattactttccggctgtgccggaacgaactccgattttgagtgtgatgccaccacatccg

SEQ ID NO: 82948 - DNA, 75 bp, synthetic construct
  source 1..75: mol_type = other DNA
atggaaaatggtgatgacagcatctgttatgcggcacttgatgacggcattattactgatgacattaaagacgat

SEQ ID NO: 82949 - DNA, 75 bp, synthetic construct
  source 1..75: mol_type = other DNA
tatatatgtaaaaagcggtttcaggaacgctgaatatatcggcataagaaactggcttgctggcattcgcatcaa

SEQ ID NO: 82950 - DNA, 75 bp, synthetic construct
  source 1..75: mol_type = other DNA
accagtatcaatgcttttgctaagcataacgtgcttaatattgaaaccaagcctgttaacatcccagttaataat

SEQ ID NO: 82951 - DNA, 75 bp, synthetic construct
  source 1..75: mol_type = other DNA
taccactatcaggggatgtgcaaaatcgtccgggaggcttacgacaagaccgtttcattcaaacgcaccaccgca

SEQ ID NO: 82952 - DNA, 75 bp, synthetic construct
  source 1..75: mol_type = other DNA
agttctgaaaagttaccttgggactcttggcaaaattatcgaaaggttacagtagatgggcggcaatatgcacaa

SEQ ID NO: 82953 - DNA, 75 bp, synthetic construct
  source 1..75: mol_type = other DNA
gcggacaataacacagcggaaagagcgcttcgtgcagtctgtctcggaaagaaaaattacgtgttcttcggtagc

SEQ ID NO: 82954 - DNA, 75 bp, synthetic construct
  source 1..75: mol_type = other DNA
taacaggagtttttgtttgccaaaaatggaaaggagaacccggtggcgtgattgcggaatgtcatgttaactgcc

SEQ ID NO: 82955 - DNA, 75 bp, synthetic construct
  source 1..75: mol_type = other DNA
taacaccgttaaggataaaaatgcccgcctggctgcggttctgaaaggggttgaagggttaaaacttggtgactt

SEQ ID NO: 82956 - DNA, 75 bp, synthetic construct
  source 1..75: mol_type = other DNA
ggttgccctgaacaaaacccgcccttacaccgccagcgagacgttgctgctggacgtgtcccgtgccatctaccc

SEQ ID NO: 82957 - DNA, 75 bp, synthetic construct
  source 1..75: mol_type = other DNA
ggaaacgctacgccgatctggcggcaggggccgggcatggcgggatggactggttcgtgatccacgcttttgtcg

SEQ ID NO: 82958 - DNA, 75 bp, synthetic construct
  source 1..75: mol_type = other DNA
atggcaaagactatccttgccccgtcactgagtgaacgggtctatacgggtacgcacggtaatgagtcggtggca

SEQ ID NO: 82959 - DNA, 75 bp, synthetic construct
  source 1..75: mol_type = other DNA
ggcctgaagaaaggtgatgtgattattggcgcgaaccagcaggcagtgaaaaacatcgctgaactgcgtaaagtt

SEQ ID NO: 82960 - DNA, 75 bp, synthetic construct
  source 1..75: mol_type = other DNA
agcaagcgttcaaagccctatgtacagaactcaatgcacaaggcagtattaacgtcgtcaattattcccaacatg

SEQ ID NO: 82961 - DNA, 75 bp, synthetic construct
  source 1..75: mol_type = other DNA
ataacttcctcgcggattactatcgcaccacccaggagctggcttcaaacattttccgtaaaggctatcagtggc

SEQ ID NO: 82962 - DNA, 75 bp, synthetic construct
  source 1..75: mol_type = other DNA
aagcggctgacctgattgttaaaggtatggaaggcgcaatcaacgcgaagaccgtaacctatgacttcgaacgtc

SEQ ID NO: 82963 - DNA, 75 bp, synthetic construct
  source 1..75: mol_type = other DNA
attgcacacgccgttcgttttgagtgccagacgtatcctcgtccttacaaagtcgccatgctgatgcaagcgcca

SEQ ID NO: 82964 - DNA, 75 bp, synthetic construct
  source 1..75: mol_type = other DNA
ccatgcgtattcaccaacagcatcctgcatcccgtctttttccgttctgtaccggtaaataccgctggcacggca

SEQ ID NO: 82965 - DNA, 75 bp, synthetic construct
  source 1..75: mol_type = other DNA
gtcgccatcccggaaattccccagccgcagccgctgaatccgcaaggcgaagcggtggcaaatgattttatcccc

SEQ ID NO: 82966 - DNA, 75 bp, synthetic construct
  source 1..75: mol_type = other DNA
cgatggcggagagcatcaatggcctttacaaagcggaggtaatacaccgtaagagctggaaaaaccgtgcagaag

SEQ ID NO: 82967 - DNA, 75 bp, synthetic construct
  source 1..75: mol_type = other DNA
gaggacttaaagcgagacatcattgattacataaactattataatcaattgaggataaaggaaaaacttggcggt

SEQ ID NO: 82968 - DNA, 75 bp, synthetic construct
  source 1..75: mol_type = other DNA
aacgtttttctttcagcaccgcgttattcgggatgctggttctgaccttaggtatgggtttaggccgctttctct

SEQ ID NO: 82969 - DNA, 75 bp, synthetic construct
  source 1..75: mol_type = other DNA
aggctgggacggaagttactgtcgttctcaaaatcggtggagttgcatgacaaggtcatcgggcattatctgaac

SEQ ID NO: 82970 - DNA, 75 bp, synthetic construct
  source 1..75: mol_type = other DNA
caacgcaagctcttgcaattttaaagcagataaaacagttttatggggcccatgacttgatatttattggtgatc

SEQ ID NO: 82971 - DNA, 75 bp, synthetic construct
  source 1..75: mol_type = other DNA
ttatcaccggtccctggaaacgcctcgtatacgatgcggagggacggatacagcgtgcaggttattcactatgtt

SEQ ID NO: 82972 - DNA, 75 bp, synthetic construct
  source 1..75: mol_type = other DNA
tgaaaaagatatcaaagcagcatacagaaaagccgctttaaaatatcatccagatcgtaacccgttaggggctga

SEQ ID NO: 82973 - DNA, 75 bp, synthetic construct
  source 1..75: mol_type = other DNA
tttgattttctcatggctaacattgacaaaatcaatcagtttcaaagtactgatgaaaacgcacgttacaactac

SEQ ID NO: 82974 - DNA, 75 bp, synthetic construct
  source 1..75: mol_type = other DNA
ttctacagtcagtgctcattaacgataacaaagtgccacgagactggatttttaccgcagtatatgtagaaaaaa

SEQ ID NO: 82975 - DNA, 75 bp, synthetic construct
  source 1..75: mol_type = other DNA
gttaagccagcaacgttaaccgttgcatttaaaaaagcccgggattctgtggattacaactggcgtgctaatggc

SEQ ID NO: 82976 - DNA, 75 bp, synthetic construct
  source 1..75: mol_type = other DNA
gcctttaaaggctatacccgccgctcaaaaaagattggtctcattaaatttacacaataataatggcaggcaaga

SEQ ID NO: 82977 - DNA, 75 bp, synthetic construct
  source 1..75: mol_type = other DNA
gtttttacaatctggaagaaattgatcgctggatcgagcgtcaggcatcggcaaggccaagacgtcaccttgctt

SEQ ID NO: 82978 - DNA, 75 bp, synthetic construct
  source 1..75: mol_type = other DNA
ggtcaccggtacagacaacgccgcagatgcagctgccgcacgcaaggcgaaggcgctgccgttcggcgggcggct

SEQ ID NO: 82979 - DNA, 75 bp, synthetic construct
  source 1..75: mol_type = other DNA
tgttacctatatgctatttaattaaaaacattattctatgttttcaaggcgttagtgtttatcccggagcgagaa

SEQ ID NO: 82980 - DNA, 75 bp, synthetic construct
  source 1..75: mol_type = other DNA
acattcgaatgtaaagaaattggggattgcaattttactactgcaatagttgataatgtcatatttagatgtcga

SEQ ID NO: 82981 - DNA, 75 bp, synthetic construct
  source 1..75: mol_type = other DNA
agaaaattattcgtgataccggtggttcatcaaccgtttctgtttttctgaatagttaccgaaaaattcaacagg

SEQ ID NO: 82982 - DNA, 75 bp, synthetic construct
  source 1..75: mol_type = other DNA
gaaaggaataaaaaaaggtacgttaaaaaaggcccgggaaaaatcgtttatggaaggaagggaatataagcatgt

SEQ ID NO: 82983 - DNA, 75 bp, synthetic construct
  source 1..75: mol_type = other DNA
gctactcccgttcctgatgaacagcgcatcagtttctggccgcaacattttggcctcattccacagtgggtgacc

SEQ ID NO: 82984 - DNA, 75 bp, synthetic construct
  source 1..75: mol_type = other DNA
tgggaagttaccccgcatgaaatccgcccagatatttatcctaacccaaccgacggtttacctgttggatgtaag

SEQ ID NO: 82985 - DNA, 75 bp, synthetic construct
  source 1..75: mol_type = other DNA
ttcagtatttgcacttctactttgttgtccgagcagaatctctgagattttagccttacctgctgattgtgagat

SEQ ID NO: 82986 - DNA, 75 bp, synthetic construct
  source 1..75: mol_type = other DNA
ctggcgacggaagtgatgtgccggatgaacatcgcaggcgcgtcctttgccaacatcgaaggcgtaaaagcgatg

SEQ ID NO: 82987 - DNA, 75 bp, synthetic construct
  source 1..75: mol_type = other DNA
agaaaaataggggttggaaataaagtctttgattccattgatgcaatgcacgaagattatatcaattttgcgaaa

SEQ ID NO: 82988 - DNA, 75 bp, synthetic construct
  source 1..75: mol_type = other DNA
tagccccttacgtgtcatcattccagctcaaaaaagaatgatttcggctaacttacatgtaaataatccgccttc

SEQ ID NO: 82989 - DNA, 75 bp, synthetic construct
  source 1..75: mol_type = other DNA
gttaagccagcaacgttaacagttgcatttaaaaaagcgcgggactctgtagattacaactggtgcgctaatggt

SEQ ID NO: 82990 - DNA, 75 bp, synthetic construct
  source 1..75: mol_type = other DNA
gtttgctgcgcgttgtcgacagtatgacagctttggtttttacgcggcactaagccagttattgctggtgttagt

SEQ ID NO: 82991 - DNA, 75 bp, synthetic construct
  source 1..75: mol_type = other DNA
aagccgttgcgccagcctgggcaattcgccgctgaagagtgtgtaacggttgtcggcccgaaaggttctctgact

SEQ ID NO: 82992 - DNA, 75 bp, synthetic construct
  source 1..75: mol_type = other DNA
cagcaagtctggatttaacaagagcggcagcttttgccattcgtattgtggcaattgctgttctggtctgggcaa

SEQ ID NO: 82993 - DNA, 75 bp, synthetic construct
  source 1..75: mol_type = other DNA
agtgcttcaggccgatgcttacggtggctaccgggcgttatacgaatccggcagaataacggaagccgcgtgtat

SEQ ID NO: 82994 - DNA, 75 bp, synthetic construct
  source 1..75: mol_type = other DNA
cgcacgccatctgacaccagtcgctctcgcggttgccactgtttttatgctggctggctgtgaaaagagtgatga

SEQ ID NO: 82995 - DNA, 75 bp, synthetic construct
  source 1..75: mol_type = other DNA
ggtgacggcagttgtgcagcctgctatccgttcggttgaaaaggataatgacggcaaccgcattaccaaaaatta

SEQ ID NO: 82996 - DNA, 75 bp, synthetic construct
  source 1..75: mol_type = other DNA
atgaattcgcgctcagcaaataacataactaatgattttcagcacgaagccaggatattaaacagcatatggctc

SEQ ID NO: 82997 - DNA, 75 bp, synthetic construct
  source 1..75: mol_type = other DNA
gtggaggcatccggtgccagcctggagaaggggcggcatgaccagctgcttacagcgcttcgtgcgctgctgtta

SEQ ID NO: 82998 - DNA, 75 bp, synthetic construct
  source 1..75: mol_type = other DNA
cgcgattacacctggaacgacaacggcgaactcatccgcatcagcagcccgcgccagacccggagttacagctac

SEQ ID NO: 82999 - DNA, 75 bp, synthetic construct
  source 1..75: mol_type = other DNA
actcaaagcacagtccgcagtagcaggttgctcaatgattcaggtgttgagtgctaaggtccatcaactggcgga

SEQ ID NO: 83000 - DNA, 75 bp, synthetic construct
  source 1..75: mol_type = other DNA
gagccgggtctgaagttccggccggttcacagtctggaagaactcaacgcgctggccgcgaaatggcgcagccac

SEQ ID NO: 83001 - DNA, 75 bp, synthetic construct
  source 1..75: mol_type = other DNA
ctggatttactgtatgaacaaaacagagttgtaccggttattgagggaaaaacgttgtatgtcgcacctaacttt

SEQ ID NO: 83002 - DNA, 75 bp, synthetic construct
  source 1..75: mol_type = other DNA
ctgcggcgcggcggcgttgtttattgctgcgcttatcagcacagtacaattatttaagctgcaagtggtcacttc

SEQ ID NO: 83003 - DNA, 75 bp, synthetic construct
  source 1..75: mol_type = other DNA
gtaccccaacagccttcgaagaacaatgcaacggcgggtctgcgaatggaagctacagtatggtgcagagcagga

SEQ ID NO: 83004 - DNA, 75 bp, synthetic construct
  source 1..75: mol_type = other DNA
tcattagttctttcttgtttagcccgctggcatccgctgcactggttacttcagtaacagcgaatcagaatcgac

SEQ ID NO: 83005 - DNA, 75 bp, synthetic construct
  source 1..75: mol_type = other DNA
aacttttgacaactctgccctgaccgtacctgtgcgactcattccagaggagcttgaacttttcaactggataaa

SEQ ID NO: 83006 - DNA, 75 bp, synthetic construct
  source 1..75: mol_type = other DNA
acgtgccgattgttttactctcggcattaaagcgccagtgcgtgaatccgggcaactggaaaatgccggtgacgc

SEQ ID NO: 83007 - DNA, 75 bp, synthetic construct
  source 1..75: mol_type = other DNA
ggctggctggattgtgtggcaccggtaccaaaccgccagacctgattgccaccattgcatgttctgcctgccacg

SEQ ID NO: 83008 - DNA, 75 bp, synthetic construct
  source 1..75: mol_type = other DNA
cgcaacataacactaaaaatatcaagctgatggctattgttcaccgtctacagcagattatggtcaacgaaaatc

SEQ ID NO: 83009 - DNA, 75 bp, synthetic construct
  source 1..75: mol_type = other DNA
tgtccttgccgtcgattccctcttttgtgttgtcgggattactgttgctttgcttgccgttttcttcatttgcca

SEQ ID NO: 83010 - DNA, 75 bp, synthetic construct
  source 1..75: mol_type = other DNA
cgacgtcagcatggcggtttctacgccgcgcggcctggtgacgccggttctgcgtgatgtcgataccctcggcat

SEQ ID NO: 83011 - DNA, 75 bp, synthetic construct
  source 1..75: mol_type = other DNA
ccaggcggtggatattgaagtcagccttcacgaagacttttcgtcggtgattcagtcacgacgcgcctggtttag

SEQ ID NO: 83012 - DNA, 75 bp, synthetic construct
  source 1..75: mol_type = other DNA
tggctgcgttacgtcattgaacatatccaggactggccggcaaaccgggtacgcgatctgttgccctggaaagtt

SEQ ID NO: 83013 - DNA, 75 bp, synthetic construct
  source 1..75: mol_type = other DNA
gaaaatgctcactgtgtcgccaattatcaactgccaccagagagtcagcagcagttattaacccagctatcagct

SEQ ID NO: 83014 - DNA, 75 bp, synthetic construct
  source 1..75: mol_type = other DNA
aatccagactgggcgaagcgttcagctatgtactgaatcagtgggatgccctctgttattacagtgatgacggtc

SEQ ID NO: 83015 - DNA, 75 bp, synthetic construct
  source 1..75: mol_type = other DNA
ccaccgaattaaaaccgctggtggatgtgccggttatcttcccgcgcggcggcggttgcacgctgacctttccgg

SEQ ID NO: 83016 - DNA, 75 bp, synthetic construct
  source 1..75: mol_type = other DNA
tgccgaaatagtccgggataattacgggcggcttaacgatatcggtcagtatagagttgcatcgtcatccgcaga

SEQ ID NO: 83017 - DNA, 75 bp, synthetic construct
  source 1..75: mol_type = other DNA
ggttgctacgccaatagataatgccggaacagtcggcctcgatgaacaagaacggccagatgaatctgaggaagg

SEQ ID NO: 83018 - DNA, 75 bp, synthetic construct
  source 1..75: mol_type = other DNA
tcggcagaaaaacatgtgccggacaacagcgcatgcacaccacttcaggatcgtttggccgacgcatcaactgag

SEQ ID NO: 83019 - DNA, 75 bp, synthetic construct
  source 1..75: mol_type = other DNA
ttgtgctaagtgactttgctgcgcacaaattcaactttccgcagggggatgcaggtaaaactgtacttgtagagt

SEQ ID NO: 83020 - DNA, 75 bp, synthetic construct
  source 1..75: mol_type = other DNA
ctcctggaagatgttccgtactgttgcggtggaggaggcaaaaaatcttctcagtaagggaggtgaaattgccgt

SEQ ID NO: 83021 - DNA, 75 bp, synthetic construct
  source 1..75: mol_type = other DNA
agtgcaggatattcccggtgtgctggccgtgtttgccgaacgccgtaaagacagttttggcccgtatgtccggct

SEQ ID NO: 83022 - DNA, 75 bp, synthetic construct
  source 1..75: mol_type = other DNA
gacgcaacaggacaccatccgccagatggccgaatacaaccgcctgctctcacagcgggtggcggcttatgcttc

SEQ ID NO: 83023 - DNA, 75 bp, synthetic construct
  source 1..75: mol_type = other DNA
ggctggctggattgtgcggcaccggtattaaaccgccagacctgattgccaccattgcatgttctgcctgtcacg

SEQ ID NO: 83024 - DNA, 75 bp, synthetic construct
  source 1..75: mol_type = other DNA
agtgcaggatattcccggcgttcttgccgtgtttgctgaacgccgtaaggacagttttggcccgtatgtccggct

SEQ ID NO: 83025 - DNA, 75 bp, synthetic construct
  source 1..75: mol_type = other DNA
ggagatatgcataatcagcaacatatcacgcttgccggttacgaaaaagaaacccagtcgcctgtcgatgaactg

SEQ ID NO: 83026 - DNA, 75 bp, synthetic construct
  source 1..75: mol_type = other DNA
tctgcaggaagcggcgctatgcaatcagcaacgttcttgatgatatgagtgtggcggacgttgggaaaaaaccgg

SEQ ID NO: 83027 - DNA, 75 bp, synthetic construct
  source 1..75: mol_type = other DNA
gagccggagatgatgccggtaaacgccctgaccgggaagccttatacgggcgtgaatgtcctgttgttgtggctg

SEQ ID NO: 83028 - DNA, 75 bp, synthetic construct
  source 1..75: mol_type = other DNA
ttccggattaccgccgaaaggaaaaatccgtatcgctggagaaaatggttttcctgcatggtccgaaattccacc

SEQ ID NO: 83029 - DNA, 75 bp, synthetic construct
  source 1..75: mol_type = other DNA
tgttacgcctgaatcggagaatgcgaattataagacatggattgccgttacaggcatggatagctatacaaaaat

SEQ ID NO: 83030 - DNA, 75 bp, synthetic construct
  source 1..75: mol_type = other DNA
gcgatgacgtataccaaaagcaaaacgtttaaaaccgaaactggcgcacgtcgctggctggaaagaaattcaggt

SEQ ID NO: 83031 - DNA, 75 bp, synthetic construct
  source 1..75: mol_type = other DNA
aatttcattggcatttatcgtttaaattttctggcgcgatagcagcgtgcttgtccctgtctcttgtgggaacag

SEQ ID NO: 83032 - DNA, 75 bp, synthetic construct
  source 1..75: mol_type = other DNA
tgatgacgaaatatgggtactgttcaatgtcatgaacggcaaccgcgctgaaatgagcccggaagccgccggcat

SEQ ID NO: 83033 - DNA, 75 bp, synthetic construct
  source 1..75: mol_type = other DNA
gaacgtactcagcctggtgcatggggacgtattcagctgactgatgccattgccgagctggcgaaaaaacagtcc

SEQ ID NO: 83034 - DNA, 75 bp, synthetic construct
  source 1..75: mol_type = other DNA
gcgctcatcagcgaagacggcaatacggcgtggcgcggggagtatgatgaatggggcaaccagcttaatgaagag

SEQ ID NO: 83035 - DNA, 75 bp, synthetic construct
  source 1..75: mol_type = other DNA
tcacttatcctttattttgggggggattgctatgtcctgatttttgttctgatccattatttaggatttatgggg

SEQ ID NO: 83036 - DNA, 75 bp, synthetic construct
  source 1..75: mol_type = other DNA
tcagtgcgcaactgaataatctgcaggacacagcaacgtctgccttaagcgatatcagtaaaacggtgggagggc

SEQ ID NO: 83037 - DNA, 75 bp, synthetic construct
  source 1..75: mol_type = other DNA
agggccaggaactttgagccggaggcgggttactggctgaaccgctatctcaccagcgatggcattcgcagagcc

SEQ ID NO: 83038 - DNA, 75 bp, synthetic construct
  source 1..75: mol_type = other DNA
atgagcgaacagctttctctttccgtctctgacctgacgcgtatcctggtcgaagacgcgttaagtgaaatgttt

SEQ ID NO: 83039 - DNA, 75 bp, synthetic construct
  source 1..75: mol_type = other DNA
acgaatctctggtatgtggcgtgtttcccaatcaggacggcacattcaccgccatgacgtataccaaaagcaaat

SEQ ID NO: 83040 - DNA, 75 bp, synthetic construct
  source 1..75: mol_type = other DNA
acgaatctctggtgtacggcgtgttccccaaccaggacggcacgttcaccgcgatgacgtataccaaaagcaaaa

SEQ ID NO: 83041 - DNA, 75 bp, synthetic construct
  source 1..75: mol_type = other DNA
tgtactgcgcaaactgaaatccgtcattaccagtaagtacgggcgtcacaagcttgccagtgacggtacccgctt

SEQ ID NO: 83042 - DNA, 75 bp, synthetic construct
  source 1..75: mol_type = other DNA
gcgcactatgcggatgccattcgttataatgctcgaacgcctctgcaaggttctttgctgccgttaacccgtctg

SEQ ID NO: 83043 - DNA, 75 bp, synthetic construct
  source 1..75: mol_type = other DNA
acccgctaacacgagaaccaataacgtcatcaatgattgtaagtcaagaacaatgtatttatgaccaaaccaaag

SEQ ID NO: 83044 - DNA, 75 bp, synthetic construct
  source 1..75: mol_type = other DNA
acaaacctttaatcgcagaatttaaagacatcgataaactttcctctgcggactttgaaattttcgttcgcgatt

SEQ ID NO: 83045 - DNA, 75 bp, synthetic construct
  source 1..75: mol_type = other DNA
gcagatggacattgagaacttcgacgttagcccgttcctttgtggtgtcatcgctctgtcactgctgtatgccgc

SEQ ID NO: 83046 - DNA, 75 bp, synthetic construct
  source 1..75: mol_type = other DNA
ttggctaatgatcaacgtcttgtttcatttaaaataactaaggatgttaatgaacgagattttattgagcgttat

SEQ ID NO: 83047 - DNA, 75 bp, synthetic construct
  source 1..75: mol_type = other DNA
agtggacggtgaatttacggtaaaacgcctgcaattgcgtcctgtcccggcgctgattccgatgaacccggattt

SEQ ID NO: 83048 - DNA, 75 bp, synthetic construct
  source 1..75: mol_type = other DNA
atgactacttttaccagagagcagttaatagctcacgcagaggagaccattgaagcacagagactgtgcataccg

SEQ ID NO: 83049 - DNA, 75 bp, synthetic construct
  source 1..75: mol_type = other DNA
caggtggtacaggtgggtaaaaatgacctctccccacctgtacagacctgtaccatttatttaatttttacccat

SEQ ID NO: 83050 - DNA, 75 bp, synthetic construct
  source 1..75: mol_type = other DNA
acgctgaccgcacggaacaggtgcaggagaaagcgtcagtggaggaaatcagtctgccgctgctgacgaaaatgt

SEQ ID NO: 83051 - DNA, 75 bp, synthetic construct
  source 1..75: mol_type = other DNA
gaaaattatctctacctgggcacctgcgtctgataataacaacacaactgcgtatatcagggctgtatcgcaacg

SEQ ID NO: 83052 - DNA, 75 bp, synthetic construct
  source 1..75: mol_type = other DNA
atcgcgcaggcgatcgtgtcgatgttaaagtgatgggccgcgagttccacgatccgttgcattcatcccccatcg

SEQ ID NO: 83053 - DNA, 75 bp, synthetic construct
  source 1..75: mol_type = other DNA
gttggcttgcaggctttgcagggtatttcatctgtcatggatatgtataagcagatggatcagcagaagcggcag

SEQ ID NO: 83054 - DNA, 75 bp, synthetic construct
  source 1..75: mol_type = other DNA
cgctaatcgttatttctggtgctgcttatgcggcaccggagataaatattaagcaaagcgaatcttcattacctg

SEQ ID NO: 83055 - DNA, 75 bp, synthetic construct
  source 1..75: mol_type = other DNA
tgaacgtgattaaagaggcgatcgtgctctgcggtcgtcctgtctccacgcacgtgctgccgcccgcctcgccgc

SEQ ID NO: 83056 - DNA, 75 bp, synthetic construct
  source 1..75: mol_type = other DNA
cgcagcaggcggataagttcgcacagcaacaacgggcaaaacgggcagccattgaggcgaaaaaccgggggctta

SEQ ID NO: 83057 - DNA, 75 bp, synthetic construct
  source 1..75: mol_type = other DNA
ggtacgcggctggtttggtgatgatgagccggaacaatatgcacaggctacgaaacgaggagaacggaataacaa

SEQ ID NO: 83058 - DNA, 75 bp, synthetic construct
  source 1..75: mol_type = other DNA
gttgcattcaccgcgaaaattgccagcggtctcgacgacctgtactgggcctctcagcgcacaggcgcgacggtg

SEQ ID NO: 83059 - DNA, 75 bp, synthetic construct
  source 1..75: mol_type = other DNA
ggctggaggtgacattagcacgaaggaaggtttgtacacaggcgagtctattgcgataggagcgaaaacgaaagc

SEQ ID NO: 83060 - DNA, 75 bp, synthetic construct
  source 1..75: mol_type = other DNA
aactgatggccgccgcgaaagaatttgagcaggacagcctcagcctgcaggccatcgaaaaggaagcggaccgtc

SEQ ID NO: 83061 - DNA, 75 bp, synthetic construct
  source 1..75: mol_type = other DNA
aactaaaacctgccgtctacagcctgattagccgcgatatcggcagcgccctgacgaccattgagagcgtggcgc

SEQ ID NO: 83062 - DNA, 75 bp, synthetic construct
  source 1..75: mol_type = other DNA
gcgcgggcggtagcctggacctgagcgccatcggggatatcggcaatatcagctcagtcatcagcggtaaaaccg

SEQ ID NO: 83063 - DNA, 75 bp, synthetic construct
  source 1..75: mol_type = other DNA
cttgttggttccgccctgaatacacagtcacagaccctgaccaacagcggtctgttgcagggggaggcctcactc

SEQ ID NO: 83064 - DNA, 75 bp, synthetic construct
  source 1..75: mol_type = other DNA
aatcaggcatcctcaacgcacccgcacttaacccgcttcggcgggttttgttttttcctggcattctggtttaca

SEQ ID NO: 83065 - DNA, 75 bp, synthetic construct
  source 1..75: mol_type = other DNA
ctgtttgatgacgtggttaagttgtttgagtttgatacaaccactcagaagttagaaagcccagcaaaggaggca

SEQ ID NO: 83066 - DNA, 75 bp, synthetic construct
  source 1..75: mol_type = other DNA
atggcgcaaaattccagactacacaattctgataattcagccgtctttgccagcaggcacgggcggcgttctcat

SEQ ID NO: 83067 - DNA, 75 bp, synthetic construct
  source 1..75: mol_type = other DNA
ccgagcagaaaactcctgatgtaaatgcccgcacctctcaggcatctgacaatacccgcaaagtcgtgcaaagta

SEQ ID NO: 83068 - DNA, 75 bp, synthetic construct
  source 1..75: mol_type = other DNA
cctcagcagaatgggcagccacagagtgctgacgcgacgaaaaaaggtggcgcgaaaacaaaaggccgtggacgt

SEQ ID NO: 83069 - DNA, 75 bp, synthetic construct
  source 1..75: mol_type = other DNA
agacacggatacgagattaagaaagccctcagcctcgattatcgtcactggataatctccgtcaggcttccttac

SEQ ID NO: 83070 - DNA, 75 bp, synthetic construct
  source 1..75: mol_type = other DNA
aaccagctgacggcggtggtgtacccggacgggctggagagccgccgggaatatgatgaaccgggcaggctggta

SEQ ID NO: 83071 - DNA, 75 bp, synthetic construct
  source 1..75: mol_type = other DNA
ggctcacggcgcagacggacgcggcgggacggcggacagagtacggtctgaatgtggtgtccggcgatatcacgg

SEQ ID NO: 83072 - DNA, 75 bp, synthetic construct
  source 1..75: mol_type = other DNA
ctcagttgcgactgctgtaacggcaaagggcgatatccgtgtgaatgccggtcatgacatcgtactgggtactgc

SEQ ID NO: 83073 - DNA, 75 bp, synthetic construct
  source 1..75: mol_type = other DNA
atcttcattggcccgaaagcagacactattcgcctgatgggtgacaaagtgtcggcaatcgcggcgatgaaaaaa

SEQ ID NO: 83074 - DNA, 75 bp, synthetic construct
  source 1..75: mol_type = other DNA
cgggcaggagcgtgaccgggctgccataactgaacgggaagccgcgctgccggagagtgtactgcgtgaaccaca

SEQ ID NO: 83075 - DNA, 75 bp, synthetic construct
  source 1..75: mol_type = other DNA
gctgaccagcatcggactggtggtttgccgttcatgtattcgcattggggcgggctggctgcgtaatcatggcta

SEQ ID NO: 83076 - DNA, 75 bp, synthetic construct
  source 1..75: mol_type = other DNA
atgaagcccgtcgtctgcgtgccgaacgctggaaagcagaaaatcaggaagggatggctgaggtcgcccggttta

SEQ ID NO: 83077 - DNA, 75 bp, synthetic construct
  source 1..75: mol_type = other DNA
tcgagttccgctgtgataacggagaaaaactgcgggtcacgttcgcgctggactgctgtgaccgtgaggcactgc

SEQ ID NO: 83078 - DNA, 75 bp, synthetic construct
  source 1..75: mol_type = other DNA
ccaatggcatttaatgccccctttgccgtgtcacagaacagtgccgacgcctcttatttacagcagatggcgctg

SEQ ID NO: 83079 - DNA, 75 bp, synthetic construct
  source 1..75: mol_type = other DNA
atgtttgaagaacgtttagagactattcggtctgtttgtgaaaacttaaagttacaaaataagccaaccttaaga

SEQ ID NO: 83080 - DNA, 75 bp, synthetic construct
  source 1..75: mol_type = other DNA
atgtcggactgtcaccctgttttattgcccgaaggccctttctcacgcgaacaggcgatggctgtcacaacagct

SEQ ID NO: 83081 - DNA, 75 bp, synthetic construct
  source 1..75: mol_type = other DNA
cgaatggctgattcagaactaccgcaggcgtgggtatgagtttaggaaagccctcagcctcgattatcgtcactg

SEQ ID NO: 83082 - DNA, 75 bp, synthetic construct
  source 1..75: mol_type = other DNA
gggttatatgcaagcgtttgtgaagtatggactacgcaacctgaaagaaggcgctaagttccgcaaaggcattga

SEQ ID NO: 83083 - DNA, 75 bp, synthetic construct
  source 1..75: mol_type = other DNA
tgctgattgaaacacagggcgaggtctgcctccttccccttcccggtgatgcagcagagcggttgtttccgtcgg

SEQ ID NO: 83084 - DNA, 75 bp, synthetic construct
  source 1..75: mol_type = other DNA
cagaaagattgcggtggttgcaggaggaaaacgtcggggaaatagacgaagaagaactggaatcctttttatatg

SEQ ID NO: 83085 - DNA, 75 bp, synthetic construct
  source 1..75: mol_type = other DNA
aacgtaatatcgctgagttaaaaactcgagatttattagcacccattaaggccgtggagatctctggacgtcttg

SEQ ID NO: 83086 - DNA, 75 bp, synthetic construct
  source 1..75: mol_type = other DNA
tttgtgaacagcggcggacgctattcacaggggctgtttaaccggcgcaatgacttcaggaactggtgtatgaac

SEQ ID NO: 83087 - DNA, 75 bp, synthetic construct
  source 1..75: mol_type = other DNA
ctgatatcaaacattacattcttattctgaaacgggaaaacggggtgacctggctggataatttcggggaaacag

SEQ ID NO: 83088 - DNA, 75 bp, synthetic construct
  source 1..75: mol_type = other DNA
atgcaaaaaatcgacctcggcaacaacgaatccatagtgtgtggcgtgtttcccaaccaggacggtacgttcacc

SEQ ID NO: 83089 - DNA, 75 bp, synthetic construct
  source 1..75: mol_type = other DNA
gtcggtacggtcggatgcggatccaccggtaacgtggaaaaccgcctgtacacacaggaggaagtggccgggcgg

SEQ ID NO: 83090 - DNA, 75 bp, synthetic construct
  source 1..75: mol_type = other DNA
ccggtaacgcacgtttcacgcaacgaactacaggcattacacattgcacgagctgaagaactaccagctgttact

SEQ ID NO: 83091 - DNA, 75 bp, synthetic construct
  source 1..75: mol_type = other DNA
gtaggctacgccaccagcgcgccgaccacggtaaccaccggtgtggttaacagctacgcgacttacgaaattact

SEQ ID NO: 83092 - DNA, 75 bp, synthetic construct
  source 1..75: mol_type = other DNA
ggttggcgctctttctatcgatggaagcaccgcaacaggcgttatcaaagaagcgatgatctacgccaacgtgat

SEQ ID NO: 83093 - DNA, 75 bp, synthetic construct
  source 1..75: mol_type = other DNA
tcattgctcatcgtctgtctacagtaaaaaatgcagaccgcattattgtcatggaaaaagggaaaattgttgaac

SEQ ID NO: 83094 - DNA, 75 bp, synthetic construct
  source 1..75: mol_type = other DNA
atgttaggagcaatagaaaaacgctttggcgataaaggagcggaacggccaatccagtggctgactgataacggt

SEQ ID NO: 83095 - DNA, 75 bp, synthetic construct
  source 1..75: mol_type = other DNA
tattgctcgcaacctggaacagcagatcaacaacggacgaagttttgcacaaatatctcaggattttatgcttca

SEQ ID NO: 83096 - DNA, 75 bp, synthetic construct
  source 1..75: mol_type = other DNA
gtgttactgacgtcactgcatgaatggatggtggagaagaatggtacgctgtcgaaaaaatccagactgggcgaa

SEQ ID NO: 83097 - DNA, 75 bp, synthetic construct
  source 1..75: mol_type = other DNA
aaatgagcccggaagctgccggtattgccgcctgtctgatgacgtacagccatcatgcctgtcgtacggagtgtt

SEQ ID NO: 83098 - DNA, 75 bp, synthetic construct
  source 1..75: mol_type = other DNA
actgttttaaatctgattcttggatttatcatcggcggcatcgtggtgctgggagtgaaagccgtagcgaaaatg

SEQ ID NO: 83099 - DNA, 75 bp, synthetic construct
  source 1..75: mol_type = other DNA
aaatcatcaccccctgggcgacgaaggttgctgagaactttaccgccgacattgcgcgccagaatgaaaagcagt

SEQ ID NO: 83100 - DNA, 75 bp, synthetic construct
  source 1..75: mol_type = other DNA
tggatggcactttattgatgcctgaccatcatttaggtgagaaaaccctctctactttggcgcgactgcgtgaac

SEQ ID NO: 83101 - DNA, 75 bp, synthetic construct
  source 1..75: mol_type = other DNA
ttatggcccccgaaccggatgacgatgatgacgaaacatgggtactgttcaatgccatgaacggcaaccgcgctg

SEQ ID NO: 83102 - DNA, 75 bp, synthetic construct
  source 1..75: mol_type = other DNA
attgccgtgggcaactgcccggaaagctataagccgcaactggctgaaggcagcgggcgtacccagaccgtgcgc

SEQ ID NO: 83103 - DNA, 75 bp, synthetic construct
  source 1..75: mol_type = other DNA
caatggctgcaaccattgaggcttctaaattaccagttaaccacgagaaaactgatatgactagtttagcaattg

SEQ ID NO: 83104 - DNA, 75 bp, synthetic construct
  source 1..75: mol_type = other DNA
tgcccgcgcctttaccgtcgctaaagtgacccgcctggatattctggaagatattcgcgggacactgcagcaggc

SEQ ID NO: 83105 - DNA, 75 bp, synthetic construct
  source 1..75: mol_type = other DNA
cagtgcggcagtgatgtacagcctgatcggaagctgcaaactcaacggcattgagccggaagcctggatgcgcca

SEQ ID NO: 83106 - DNA, 75 bp, synthetic construct
  source 1..75: mol_type = other DNA
tgtatcacgaatattcgattgaaaaagtagcacgtattgaaggtgatgcacaaacattaaaatcagcaaacactt

SEQ ID NO: 83107 - DNA, 75 bp, synthetic construct
  source 1..75: mol_type = other DNA
gcgtaccgctgggggttattggcgtgatttatgaagcgcgcccgaacgtgacggttgatgtcgcttcgctgtgcc

SEQ ID NO: 83108 - DNA, 75 bp, synthetic construct
  source 1..75: mol_type = other DNA
ggccagcctgaatatctgagaaaacgaataacggaaataattaatgaatctgatataagactgactgtagacgaa

SEQ ID NO: 83109 - DNA, 75 bp, synthetic construct
  source 1..75: mol_type = other DNA
gcactgtggcacgtctcatggcagttatgggacttgccggtgttctccggggtaaaaaggtccgtacgaccatca

SEQ ID NO: 83110 - DNA, 75 bp, synthetic construct
  source 1..75: mol_type = other DNA
ccgtgtgatccgtgccggttataagctgctgaacctgcaaacttacttcaccgctggggtgaaagaagtgcgtgc

SEQ ID NO: 83111 - DNA, 75 bp, synthetic construct
  source 1..75: mol_type = other DNA
caacaggtaaaccgccttgagcgcggcgttgcttactatatagaagccggtacgctgaccaatgaacaatggcag

SEQ ID NO: 83112 - DNA, 75 bp, synthetic construct
  source 1..75: mol_type = other DNA
cccgtgggaagggaaaagcaaaccgggctcattgttttctaaatgtataaaagaaatggattcattccggttcca

SEQ ID NO: 83113 - DNA, 75 bp, synthetic construct
  source 1..75: mol_type = other DNA
atataactggaactttgctggggcaggagcttcgtaaacgtaaaactcctcagaaaaaaaattgccattactcag

SEQ ID NO: 83114 - DNA, 75 bp, synthetic construct
  source 1..75: mol_type = other DNA
tgcggaaatccgggaataccgcgatgataaactgtacagcgtaaggcacctggtgtttaacggctttgagctgat

SEQ ID NO: 83115 - DNA, 75 bp, synthetic construct
  source 1..75: mol_type = other DNA
gaaggcgtatttacggtgaatgctgcggaagcggacagtgttattcatcttctctcactgccagtgggcatccgt

SEQ ID NO: 83116 - DNA, 75 bp, synthetic construct
  source 1..75: mol_type = other DNA
aaggcgcgaaagaagcaggcaaaatgcgtgcagaaggcaaagattacatcgttaaagatggcgatgtgatgaact

SEQ ID NO: 83117 - DNA, 75 bp, synthetic construct
  source 1..75: mol_type = other DNA
tacaaaaaaaaatatgggcaggatcttacaggacattatcttgaggtactgaaaccttgcatagtctgtttcagg

SEQ ID NO: 83118 - DNA, 75 bp, synthetic construct
  source 1..75: mol_type = other DNA
ggtcatcaactggcaggaggaacaggagggtgcatgcttggtgataacggcaattccgggagtaccggcggctga

SEQ ID NO: 83119 - DNA, 75 bp, synthetic construct
  source 1..75: mol_type = other DNA
tgcgccagagcagcatttaacgaccctgagtggtttgtagaaaaccatcacgctgttcgtcaggcaaagagaaag

SEQ ID NO: 83120 - DNA, 75 bp, synthetic construct
  source 1..75: mol_type = other DNA
atgcttttaattcaacctggatttggacttagcatcaaaaaaggccacatgtttggcgagaaagagtcacaacga

SEQ ID NO: 83121 - DNA, 75 bp, synthetic construct
  source 1..75: mol_type = other DNA
gaaatgcttcctgccgcactagcagctgaaggaatgtcgcctgtgttgggttatggaatgtttatcttcggtctg

SEQ ID NO: 83122 - DNA, 75 bp, synthetic construct
  source 1..75: mol_type = other DNA
aagaaagcaatggaaaaagttatatagatatcattgaggaaaaagccggattacatacgcattatgatattccgg

SEQ ID NO: 83123 - DNA, 75 bp, synthetic construct
  source 1..75: mol_type = other DNA
cgccgatagcggcctcccggctggcacattacaacggaggggcgagcctgagcttccgttacctggaccacaaaa

SEQ ID NO: 83124 - DNA, 75 bp, synthetic construct
  source 1..75: mol_type = other DNA
gcagctatttgcagcgggcggttattccactaaaaggcgaactgaccgtaggtgatgattatactgcaggcgatt

SEQ ID NO: 83125 - DNA, 75 bp, synthetic construct
  source 1..75: mol_type = other DNA
catcgaggcagagataaggggaatgacggcggagcagcgccttgccgaacgtcagttgaaaacgaaaccgctgct

SEQ ID NO: 83126 - DNA, 75 bp, synthetic construct
  source 1..75: mol_type = other DNA
cgggatcaaactgtgcgaatcttacaaccgccagtacggacgcgattaccgctcggtcatgccgaccaacctgta

SEQ ID NO: 83127 - DNA, 75 bp, synthetic construct
  source 1..75: mol_type = other DNA
aagaacttgtctggtggcatggacggacgagttttaaggggcaggtcatcgctccggcctgcacgctggccatgg

SEQ ID NO: 83128 - DNA, 75 bp, synthetic construct
  source 1..75: mol_type = other DNA
ttgcgggtcactctgaaaactttagccaccttgagcgccgcttcacgctgcgtggtcagacggtgtatgcgctaa

SEQ ID NO: 83129 - DNA, 75 bp, synthetic construct
  source 1..75: mol_type = other DNA
ctgtattgctgcttgcactgctaacctccacgagctttgctgcgggtaagaatgtcaatgttgagttcagcaaag

SEQ ID NO: 83130 - DNA, 75 bp, synthetic construct
  source 1..75: mol_type = other DNA
tcccgccggtgctggtgcagatgctcgaccggctggaaagtgaaatcctggctgaccgggtgagtgaggaaagcc

SEQ ID NO: 83131 - DNA, 75 bp, synthetic construct
  source 1..75: mol_type = other DNA
ccacaccttctgtttccgtaacaactgcatcagggaataaccagtctcaactggttgccactcctgtccctgatg

SEQ ID NO: 83132 - DNA, 75 bp, synthetic construct
  source 1..75: mol_type = other DNA
gtctgaccgaagcccaggcacaggagatgtaccgttatctggcgattgctaactacgaagatcgctttgtggtgc

SEQ ID NO: 83133 - DNA, 75 bp, synthetic construct
  source 1..75: mol_type = other DNA
catcacgcctgtcgtacagagaattatgccatgacggtccattattatcggttgcgggattacgccctgcagcat

SEQ ID NO: 83134 - DNA, 75 bp, synthetic construct
  source 1..75: mol_type = other DNA
ttttttacaatgattatgttaattaaatcaataaacttacaaaaagaggctaacatcagcattattaaacaaaat

SEQ ID NO: 83135 - DNA, 75 bp, synthetic construct
  source 1..75: mol_type = other DNA
acttctggatgagcaaaactgcctgatgctgcatgaactctggctgcagagcggtactggccggcgtcgctggga

SEQ ID NO: 83136 - DNA, 75 bp, synthetic construct
  source 1..75: mol_type = other DNA
cagtaatgataaaggcgattggccagaagctggcggcggcaggcgtacaggatgcaaatttttaccctgatggta

SEQ ID NO: 83137 - DNA, 75 bp, synthetic construct
  source 1..75: mol_type = other DNA
ttttaatgcgctggctaatgccggtaatgctctggccgttggtagtcagtcctctgcaaataaaaacgatgctct

SEQ ID NO: 83138 - DNA, 75 bp, synthetic construct
  source 1..75: mol_type = other DNA
ttataccctgcgggttgtccgtaatggtcagccattaaaggcgggagattattatgccgcattacgttttaaggt

SEQ ID NO: 83139 - DNA, 75 bp, synthetic construct
  source 1..75: mol_type = other DNA
cgccgcgccacagatgaaggtattcagctgtttgtggtcggaagtgccggacttctgctgaccactgaagatatc

SEQ ID NO: 83140 - DNA, 75 bp, synthetic construct
  source 1..75: mol_type = other DNA
aagtattacatcaacggcagccatgcgggtttcatcatgtacatgaccgacgcagcacagaaccaggaggacgtg

SEQ ID NO: 83141 - DNA, 75 bp, synthetic construct
  source 1..75: mol_type = other DNA
acctcgataaccgtgctctctcggaagcgttggaaaaattatggcgccgccactgtcgcctggctcgcgggtcct

SEQ ID NO: 83142 - DNA, 75 bp, synthetic construct
  source 1..75: mol_type = other DNA
atgccaaactggtgctcgaatcgtatgtatttttctgccgaaccggcacagattactgagattaaacgactggcc

SEQ ID NO: 83143 - DNA, 75 bp, synthetic construct
  source 1..75: mol_type = other DNA
tgaaggcccggagggtaagagaatgtattatggcatgtaccattgtgaggagggatatgttgaatatgcgaatga

SEQ ID NO: 83144 - DNA, 75 bp, synthetic construct
  source 1..75: mol_type = other DNA
ctgcctccttccccttcccggcgatgcagcagagcagttgttcccgtcagtgcggttccgtgtcagggaacgcag

SEQ ID NO: 83145 - DNA, 75 bp, synthetic construct
  source 1..75: mol_type = other DNA
ggggatgtggagaaggccgcgaaagtatttgttatgaatgagttactaccaattcaaaaacatattctgcaactt

SEQ ID NO: 83146 - DNA, 75 bp, synthetic construct
  source 1..75: mol_type = other DNA
cgtacggagtgttatgccatgacggttcattattaccgtctgcgggactacgccctgcagcatccggaatgcaac

SEQ ID NO: 83147 - DNA, 75 bp, synthetic construct
  source 1..75: mol_type = other DNA
atgaccaataatcccccttcagcacgtgttcagcccggcgagtatggtttccccctcaaattaaaagcccgctac

SEQ ID NO: 83148 - DNA, 75 bp, synthetic construct
  source 1..75: mol_type = other DNA
acttgggataaaacctacccgaagcaaactgacaaatcggcgatgggaatgggacacctgatccgggcgaaccgt

SEQ ID NO: 83149 - DNA, 75 bp, synthetic construct
  source 1..75: mol_type = other DNA
gctggggctgggtgttggcagcaccattgccggaaccactgataccaccgcaaaagagcgtgagcctgtcgatcc

SEQ ID NO: 83150 - DNA, 75 bp, synthetic construct
  source 1..75: mol_type = other DNA
cgtcacgtcgatgaaggatggcgtggattacatttcagtgataaagcagactgagcagaaagtgcctgatgtggt

SEQ ID NO: 83151 - DNA, 75 bp, synthetic construct
  source 1..75: mol_type = other DNA
cttcgtgttaattcggggcaggagtcgactctctctaacggtgaacaggtgcccgttcttgggagtgtgtcttat

SEQ ID NO: 83152 - DNA, 75 bp, synthetic construct
  source 1..75: mol_type = other DNA
tcttcaacaacgaattagagaggtgaacaattggctacatgatgacgtaataaaattccaagattactccttgta

SEQ ID NO: 83153 - DNA, 75 bp, synthetic construct
  source 1..75: mol_type = other DNA
ttctgcatatcactggtatacagaacggtatggcgtgaagtggccttgtgggtatgacctgaatatcagtagtca

SEQ ID NO: 83154 - DNA, 75 bp, synthetic construct
  source 1..75: mol_type = other DNA
gttaaaaaacagtttgattatcaggagccggtgcagaatatgccagggcaacaatctactactggcagtaacttt

SEQ ID NO: 83155 - DNA, 75 bp, synthetic construct
  source 1..75: mol_type = other DNA
ctccgcaatgcgatgaaaagcgccaaagggccgggcaacttccgcaacttgtttatgtactcacccaacggaaag

SEQ ID NO: 83156 - DNA, 75 bp, synthetic construct
  source 1..75: mol_type = other DNA
aatcgacaacaacatcgcagagaacgccttacggggagtggccgtaggccggaaaaactggctcttcgcgggttc

SEQ ID NO: 83157 - DNA, 75 bp, synthetic construct
  source 1..75: mol_type = other DNA
aagtcgcggcgaaggatgaatttctgaacatcaagaacgtcagccgcgatgacatgatggcggctcaccgcgtac

SEQ ID NO: 83158 - DNA, 75 bp, synthetic construct
  source 1..75: mol_type = other DNA
attacagaaacgcatggaggagttaaaccattggctgggtgagaaagttattgcattttcatcctattgtttatg

SEQ ID NO: 83159 - DNA, 75 bp, synthetic construct
  source 1..75: mol_type = other DNA
gtttatgtactcccccaatggcaaaaaggatggtattcagatcatcccactgtcagaggtagcggcaaaagatga

SEQ ID NO: 83160 - DNA, 75 bp, synthetic construct
  source 1..75: mol_type = other DNA
aggataaaacattactaccatttttcagcgatgagcgggtaattcgtgcagcaggtggtgcaggtgcactgtctg

SEQ ID NO: 83161 - DNA, 75 bp, synthetic construct
  source 1..75: mol_type = other DNA
aacaccaacctcaaaataggtgaaggcctggtcattcttggtgctgaaaaaaccttcaacaatatctatatggcc

SEQ ID NO: 83162 - DNA, 75 bp, synthetic construct
  source 1..75: mol_type = other DNA
caaggactacaatccgctgattggccgaaccggtgtagatgtgggtaaatccttctctggtaaggactggaaagt

SEQ ID NO: 83163 - DNA, 75 bp, synthetic construct
  source 1..75: mol_type = other DNA
gacctggaaagaatgctgtatctgttcagcggcaaaccgatccccgacaaccgggaaaacatcaccattcatctg

SEQ ID NO: 83164 - DNA, 75 bp, synthetic construct
  source 1..75: mol_type = other DNA
ttgcagagccaccggataagcgccgccgtgacctggacaatattctgaaagcaccgctggatgcgctgacgcatg

SEQ ID NO: 83165 - DNA, 75 bp, synthetic construct
  source 1..75: mol_type = other DNA
tacgttttgctaccatcgtgcctggcgcttattgctggcatcatgctgatgataatgaatttgaatcagggatga

SEQ ID NO: 83166 - DNA, 75 bp, synthetic construct
  source 1..75: mol_type = other DNA
gttcagtatcagatactttaagaagggctccgcgcatatcacgttcagaaaaccagaactggttgatcggctaaa

SEQ ID NO: 83167 - DNA, 75 bp, synthetic construct
  source 1..75: mol_type = other DNA
atgagcgaacagtacctgattacgctcgacgagtggaaacctaagcggttcagtctcccaataacaaacactacc

SEQ ID NO: 83168 - DNA, 75 bp, synthetic construct
  source 1..75: mol_type = other DNA
acagtcatatcactggagggttaattgctgtttctgaactatcaggcagagtatcattcagaacatcagccaaga

SEQ ID NO: 83169 - DNA, 75 bp, synthetic construct
  source 1..75: mol_type = other DNA
cattcccaacaataccggcggttttggggatgtggaaaaggccagtcgcgtcttcacaagaaacgaaatagtacc

SEQ ID NO: 83170 - DNA, 75 bp, synthetic construct
  source 1..75: mol_type = other DNA
ctactggtttgtgcaatacggcatgactacgcagccgtatcagttcacgaaaggcagcatttttcatctgatgga

SEQ ID NO: 83171 - DNA, 75 bp, synthetic construct
  source 1..75: mol_type = other DNA
gggagtaattcaacacaggaagcgcagttctccgtactcgatgccatcaccgccagcgagctaattaacgatatt

SEQ ID NO: 83172 - DNA, 75 bp, synthetic construct
  source 1..75: mol_type = other DNA
ggattttcgctgcggctgctggctgatggagaaaccggaaatggcaatgaaagccatcacccggaaccttgaccg

SEQ ID NO: 83173 - DNA, 75 bp, synthetic construct
  source 1..75: mol_type = other DNA
atggactgcgaggaaagacatctcggttggcatcgatccggtaaaagcgaaaaaggcttcgtctaacaacaattc

SEQ ID NO: 83174 - DNA, 75 bp, synthetic construct
  source 1..75: mol_type = other DNA
gagtcggtccctgcaggcttcagtgtgctgaaggatctggacgatctggactccctgctgattgtggatatcggt

SEQ ID NO: 83175 - DNA, 75 bp, synthetic construct
  source 1..75: mol_type = other DNA
tgaggcatttcacaaggcggaagaggaactgaaacgggaagggcataccgtcctgaatccggcagtgcttccgga

SEQ ID NO: 83176 - DNA, 75 bp, synthetic construct
  source 1..75: mol_type = other DNA
accagaacaaggatgaggtgtttaagcggggagtgattaacgtcttcagggaactgagctggaattataaaacca

SEQ ID NO: 83177 - DNA, 75 bp, synthetic construct
  source 1..75: mol_type = other DNA
ggcggataaatccggggaacttgacgcactggcagaaaacattggtcagaaatttctgaccacgttcagaacggt

SEQ ID NO: 83178 - DNA, 75 bp, synthetic construct
  source 1..75: mol_type = other DNA
tgagcacatttgaacaactgcaccagaataaggatgaggtgtttgagcgaggggtgatcaacgtcttcagagggc

SEQ ID NO: 83179 - DNA, 75 bp, synthetic construct
  source 1..75: mol_type = other DNA
ttactttcggagcgctttccggaaacatcccggatgttactggaggactgggagcgttatctggggttgcctgaa

SEQ ID NO: 83180 - DNA, 75 bp, synthetic construct
  source 1..75: mol_type = other DNA
ctactggcgacgtcatggcaatacgtatttcatctcggaagccggaaagcgttatcgccgtgatgtggcgctaat

SEQ ID NO: 83181 - DNA, 75 bp, synthetic construct
  source 1..75: mol_type = other DNA
cagattaccagcaaattaccacctcaaagccagcaataccaatgcctgcaagcaatactgtaccagcagattacc

SEQ ID NO: 83182 - DNA, 75 bp, synthetic construct
  source 1..75: mol_type = other DNA
tgatgatcatcgtgcgcgaggggctggaagcgctgctgattgttgcggcaatcgtggcctacatggtgaaaaaca

SEQ ID NO: 83183 - DNA, 75 bp, synthetic construct
  source 1..75: mol_type = other DNA
ggatgctggaaaaccgcccggaccagcgcacaggacgcacgtggcgccgcaaggctctcgaatacttcctgaacg

SEQ ID NO: 83184 - DNA, 75 bp, synthetic construct
  source 1..75: mol_type = other DNA
tggaatgtattctgaaccgttataagcctgcatggcagacgtttatttacgtgtatgcaaacagccatgaagagg

SEQ ID NO: 83185 - DNA, 75 bp, synthetic construct
  source 1..75: mol_type = other DNA
cggcggtgggataccgccatatgaatgtgctggacgatattcttacgccactgcgggtttatgatgccagtgcgc

SEQ ID NO: 83186 - DNA, 75 bp, synthetic construct
  source 1..75: mol_type = other DNA
taacgtgcgtgaactgaccccggcaattctggcggtactaccgctggaatatcgcggccacctggttgagcagga

SEQ ID NO: 83187 - DNA, 75 bp, synthetic construct
  source 1..75: mol_type = other DNA
agtggaatgcaggcagatcgcctggctgacctggaaagaatgttgcatctgctcagcggtaaaccgatccccgac

SEQ ID NO: 83188 - DNA, 75 bp, synthetic construct
  source 1..75: mol_type = other DNA
tggatgtcgtggagatggtatccgcagatagcgccgcacttctgaagaaaatcaaatggcctgataaggttaaaa

SEQ ID NO: 83189 - DNA, 75 bp, synthetic construct
  source 1..75: mol_type = other DNA
caactgaaacagatgtttgcccgccagcaaatcacagcggcggatgccaacctgctgaccggttacggtatcaac

SEQ ID NO: 83190 - DNA, 75 bp, synthetic construct
  source 1..75: mol_type = other DNA
cgggcaacaggcagatcgacttgccgacctggaaagaatgctacacctgttcagcggcaaaccgatccccgacaa

SEQ ID NO: 83191 - DNA, 75 bp, synthetic construct
  source 1..75: mol_type = other DNA
tggcgcacaacgctatcaggaatggatgtcgtggagatggtatccgcagatagcgccgcacttctgaagaaaatc

SEQ ID NO: 83192 - DNA, 75 bp, synthetic construct
  source 1..75: mol_type = other DNA
tgggaatccacccaccttgccgggcgccggtgctgtgtggaaatccgcccaccttgccgggcgccggtgccgtgt

SEQ ID NO: 83193 - DNA, 75 bp, synthetic construct
  source 1..75: mol_type = other DNA
tcgagaaccaactcccccatcatttcaaagacacgctgcgtattgccagcgctcgtctcttcaatctgcagagta

SEQ ID NO: 83194 - DNA, 75 bp, synthetic construct
  source 1..75: mol_type = other DNA
gtttgatgaaatcaatattgtgcgtggcctgcctgttcctggcgggcggctggggataaaaatcacagaactgga

SEQ ID NO: 83195 - DNA, 75 bp, synthetic construct
  source 1..75: mol_type = other DNA
gcccctgaatggcaaatgaaacgggaaatgttgagtcagtgttatacaactaaatggcgagatattcccctggcc

SEQ ID NO: 83196 - DNA, 75 bp, synthetic construct
  source 1..75: mol_type = other DNA
atatcgccgggcaggttaaagccccgacggcacggctgaaactggcgctggaaagcgggttgctggtaacggcac

SEQ ID NO: 83197 - DNA, 75 bp, synthetic construct
  source 1..75: mol_type = other DNA
atcgtcaacaatctggtgagatgggaccggtggggatttcatcttatcaccggacaacaggctgaccgactcgcc

SEQ ID NO: 83198 - DNA, 75 bp, synthetic construct
  source 1..75: mol_type = other DNA
gtggcatttgaagagaagtatggttcccaactggagctgatatttcgttttatcgatcgcgcgctggcgattggt

SEQ ID NO: 83199 - DNA, 75 bp, synthetic construct
  source 1..75: mol_type = other DNA
gcaccctaatccgtatcttcgcccttcatgagttacatcgactgaaagaacatggcttaacgcgcggggcgcttc

SEQ ID NO: 83200 - DNA, 75 bp, synthetic construct
  source 1..75: mol_type = other DNA
gaacctacgtgtgcaaggagcttgtttactcctacgccatgtggattagcgcagcctttgcgctgaaggttatcc

SEQ ID NO: 83201 - DNA, 75 bp, synthetic construct
  source 1..75: mol_type = other DNA
cccgccgtggcgtggaggaggatgtttactggtgggtgccgtccttcaacgagccgacagccttcacgcccggct

SEQ ID NO: 83202 - DNA, 75 bp, synthetic construct
  source 1..75: mol_type = other DNA
cggaagcgttgcgccttgctgctgatcttgctgagcagaaaatgcaactggaaaaccagctcgcaattgccgcac

SEQ ID NO: 83203 - DNA, 75 bp, synthetic construct
  source 1..75: mol_type = other DNA
gaacgaaagagcttcgttccatgctatggaagaacgtcgattttgaaaacaggattatcaccatcgacgccagtg

SEQ ID NO: 83204 - DNA, 75 bp, synthetic construct
  source 1..75: mol_type = other DNA
gcacgccggacacagaactgtttttactgccgggaatggctaaccgtcacgggctgattactggcgcaacgggga

SEQ ID NO: 83205 - DNA, 75 bp, synthetic construct
  source 1..75: mol_type = other DNA
gcacttcgcgatgatgcaggcgcagaacaatgtgttgatgatgaccggggttagcccgtcaatcggtaaaacctt

SEQ ID NO: 83206 - DNA, 75 bp, synthetic construct
  source 1..75: mol_type = other DNA
ttcgtcgcggcgtgcgcgtcctgctggataatgccaccgccaccatcaaccctgggcagaaagtcggcctggtgg

SEQ ID NO: 83207 - DNA, 75 bp, synthetic construct
  source 1..75: mol_type = other DNA
ccggctcatcaccgcttgaagtcgctgccgcaaaagcctgtgcggaaattgaaaaaacgccggtcagtattcgtg

SEQ ID NO: 83208 - DNA, 75 bp, synthetic construct
  source 1..75: mol_type = other DNA
aaagcgcgatggtgctgcgcgacggtgcgaagtttgaagcgcaggcgggcgatccaaagcaggcgctggaaacct

SEQ ID NO: 83209 - DNA, 75 bp, synthetic construct
  source 1..75: mol_type = other DNA
taaggccagatctttatcctcaccctgaagatggaattcctgattcgttacgcaaaatttcaaatccaagcttag

SEQ ID NO: 83210 - DNA, 75 bp, synthetic construct
  source 1..75: mol_type = other DNA
agatgagcgtaatggcttgattaatcactccccggtgtatggcaagtacgaggatgacgtggaccgggaatccgc

SEQ ID NO: 83211 - DNA, 75 bp, synthetic construct
  source 1..75: mol_type = other DNA
atcgcggattaaagaacctgaaacagtcagactgtatcttggattttacaaactcttattcggggattttagccc

SEQ ID NO: 83212 - DNA, 75 bp, synthetic construct
  source 1..75: mol_type = other DNA
cgatggtatgagccgccagtgagttttgacgggctggcgcgcacctttcgcgccgccgtgcatcacagctcaccg

SEQ ID NO: 83213 - DNA, 75 bp, synthetic construct
  source 1..75: mol_type = other DNA
atgtctgaaatcacagtctcccgtccggaagtggtcaacgggcatacggacgttatcggctcaaccagtatccga

SEQ ID NO: 83214 - DNA, 75 bp, synthetic construct
  source 1..75: mol_type = other DNA
ggaaagaggactatgaagatgagatgttcagtatcagatactttaagaagggctccgcgtatatcacgttcagaa

SEQ ID NO: 83215 - DNA, 75 bp, synthetic construct
  source 1..75: mol_type = other DNA
tccgcaatgaactcattccattacaggagagaataaagtcaataaatgaatggttagatatggaagtcataaaat

SEQ ID NO: 83216 - DNA, 75 bp, synthetic construct
  source 1..75: mol_type = other DNA
atgtctgatatcacagcctcccgtccggaagttgtcaacgggcatacggacgttatctgctcaaccagtatccgc

SEQ ID NO: 83217 - DNA, 75 bp, synthetic construct
  source 1..75: mol_type = other DNA
acagtaaattcaacctgttcaacagtagccgtatcgatgccatcaacatcaccgaagtgcgcgacaaagcggagg

SEQ ID NO: 83218 - DNA, 75 bp, synthetic construct
  source 1..75: mol_type = other DNA
tcgaattattcattaaaaatccgcttgataacgggcttacccgtggcgaacaaatggaactggcacgaattgcgc

SEQ ID NO: 83219 - DNA, 75 bp, synthetic construct
  source 1..75: mol_type = other DNA
gtttgatgaaattaatattgtgcgcggtctgcctgttccaggcggacggcttggtgtgaaaatttacgaaataac

SEQ ID NO: 83220 - DNA, 75 bp, synthetic construct
  source 1..75: mol_type = other DNA
gaataaggatgaggtgtttgagcgaggtgtgatcaacctcttcagagggctgagctggaattacaaaaccaattg

SEQ ID NO: 83221 - DNA, 75 bp, synthetic construct
  source 1..75: mol_type = other DNA
aagccggagaacgtcgggtcgctgggtgatattgagaaagtggcaaaggtctttgtccgcaatgagcttatcccg

SEQ ID NO: 83222 - DNA, 75 bp, synthetic construct
  source 1..75: mol_type = other DNA
ataaaataggccagttattagtggatgccggtcctgccaatgcgatgaagatcattgctcgtgctaaattatcac

SEQ ID NO: 83223 - DNA, 75 bp, synthetic construct
  source 1..75: mol_type = other DNA
aaggacgggcttcagatcatcccgttgtcagaagtcgcagcgaaagatgaatttctgaacatcaagaacgtgagc

SEQ ID NO: 83224 - DNA, 75 bp, synthetic construct
  source 1..75: mol_type = other DNA
tgcatggtattcagcccagtctgttgtttaagtggaaaaaacaataccaggaaggaagtctcactgctgttgctg

SEQ ID NO: 83225 - DNA, 75 bp, synthetic construct
  source 1..75: mol_type = other DNA
atgagtgaccggctgttacccgttggctcgtcgccgctggaagttgccgccgctactgcactctctgagattcag

SEQ ID NO: 83226 - DNA, 75 bp, synthetic construct
  source 1..75: mol_type = other DNA
atgatgaggcggggaggctgaaggcgcagacggatgcggcgggacggcggacggagtaccgactgcatatggcgt

SEQ ID NO: 83227 - DNA, 75 bp, synthetic construct
  source 1..75: mol_type = other DNA
acggtcgcgcacgccgtggccgcctggtctttgatcgtggcgtagtggaaacgccttgttttatgcctgttggca

SEQ ID NO: 83228 - DNA, 75 bp, synthetic construct
  source 1..75: mol_type = other DNA
gttctgcccgacaggaatattcaccggaatttgaacaggcctggcaggaatatcccaaacgtgctggtggcaatt

SEQ ID NO: 83229 - DNA, 75 bp, synthetic construct
  source 1..75: mol_type = other DNA
atccaggacattcccggctgtctgtatacaggcggtgtggtctgtgatggtgatgttattactgtttatcccgga

SEQ ID NO: 83230 - DNA, 75 bp, synthetic construct
  source 1..75: mol_type = other DNA
cggcggcccgccttcgggtcgcggcgccgtactgcgagttagcggccgcacgcggccggttacgggggacactac

SEQ ID NO: 83231 - DNA, 75 bp, synthetic construct
  source 1..75: mol_type = other DNA
caaaaaagttacgtcagatacgtaaggcggaagggttaacacaaaagcagtttgcggatattactgggttgtctt

SEQ ID NO: 83232 - DNA, 75 bp, synthetic construct
  source 1..75: mol_type = other DNA
tctggcccgctgcgtggcgtgggcaaatatctctgttcaggttctttttccactcgctgtcacctttaccccagt

SEQ ID NO: 83233 - DNA, 75 bp, synthetic construct
  source 1..75: mol_type = other DNA
aactgcgtattctggactggagccgggttgaacctctggtggcggatgacggcgaggtgttctaccgcatcacgc

SEQ ID NO: 83234 - DNA, 75 bp, synthetic construct
  source 1..75: mol_type = other DNA
gctgaataccttaaaaattgcctggagcagtaccgatgagcaagggctggaatacttccatcagctgaaaaaatc

SEQ ID NO: 83235 - DNA, 75 bp, synthetic construct
  source 1..75: mol_type = other DNA
ccggtaacttttcagcgtgggttattgaagcctgcaggagaaggctggcaacagatgcaacgcatctgcgtccgg

SEQ ID NO: 83236 - DNA, 75 bp, synthetic construct
  source 1..75: mol_type = other DNA
tttttattcgttccagtgaactcagatatgcccgctggtctgaaattgatattgacaatgccatgtggactattc

SEQ ID NO: 83237 - DNA, 75 bp, synthetic construct
  source 1..75: mol_type = other DNA
tgccctgaaggtggtttatgacctcgggaaaaaagcagcagcggactttatgcaacagcaggcccgtgatggtgg

SEQ ID NO: 83238 - DNA, 75 bp, synthetic construct
  source 1..75: mol_type = other DNA
atccgcaaaatggagcgggcaggaaaagccacgcattcgctgggtctgaaaagtgcagcggcccgccaggagata

SEQ ID NO: 83239 - DNA, 75 bp, synthetic construct
  source 1..75: mol_type = other DNA
atcgttccagcagtttttgctgacgcactaccatatggatcacgtccaggggctgtttccgctgcgctggggcgt

SEQ ID NO: 83240 - DNA, 75 bp, synthetic construct
  source 1..75: mol_type = other DNA
taggtgacaatgatgcggctggtgaatcacttgtgaagtctttcggaaaaggttttgtggccccggatcttgacg

SEQ ID NO: 83241 - DNA, 75 bp, synthetic construct
  source 1..75: mol_type = other DNA
tcagcaaacaggctgtagccatactgacagaacttcagacatgggcaggtgaaaatggtctgatatttacgggtg

SEQ ID NO: 83242 - DNA, 75 bp, synthetic construct
  source 1..75: mol_type = other DNA
tttcgtgggatgttcagcgctgatggcgatggtctgctacctcttcgtagttggcgacattaaacgtatggaatt

SEQ ID NO: 83243 - DNA, 75 bp, synthetic construct
  source 1..75: mol_type = other DNA
tgtgcactttattggcgacacaacggcggcaaaaattatcgagttgacgcctgacccaggcagcataatcgccgg

SEQ ID NO: 83244 - DNA, 75 bp, synthetic construct
  source 1..75: mol_type = other DNA
ccatgtggactattccagccgaacgcgaacctctgccaggcgtaaaattctcacaccggggatccaagatgcgaa

SEQ ID NO: 83245 - DNA, 75 bp, synthetic construct
  source 1..75: mol_type = other DNA
tgaccgaagataaacccggagaagctcattcatcagcctggaccctggctgcaaaacgtgggcgggatgcaggag

SEQ ID NO: 83246 - DNA, 75 bp, synthetic construct
  source 1..75: mol_type = other DNA
ccactcaaaactgaccttcggttatctgctggaaacggcacacagccgggtggcgtggctgtctgacaccgctgg

SEQ ID NO: 83247 - DNA, 75 bp, synthetic construct
  source 1..75: mol_type = other DNA
atgcggttgaacgtcagatgagtcatcaggagcgcaacggagtacgtgccgcgtatattcataaagcagaacatc

SEQ ID NO: 83248 - DNA, 75 bp, synthetic construct
  source 1..75: mol_type = other DNA
gagaacgccgcgaagcgtgaagcacagcgcgagaaaaccatcacgaggttacttaatgaaaacgaagattttcgc

SEQ ID NO: 83249 - DNA, 75 bp, synthetic construct
  source 1..75: mol_type = other DNA
ctgattggtcgtcacaccattatggtggctaacctggcaccacgtaaaatgcgcttcggtatctccgaaggcatg

SEQ ID NO: 83250 - DNA, 75 bp, synthetic construct
  source 1..75: mol_type = other DNA
acctgcgctgcgaactgccgcatcacaccacactgccgctgtttgaaaaactggttcagcgcgaaccggtgacgc

SEQ ID NO: 83251 - DNA, 75 bp, synthetic construct
  source 1..75: mol_type = other DNA
tgggaagccattcgccacggttatcaaacggtgatggttgccggtggtgccgaagagttatgcccttcagaagca

SEQ ID NO: 83252 - DNA, 75 bp, synthetic construct
  source 1..75: mol_type = other DNA
atgaaaccacttttatccgcaatagcaactgcgcttattctcttttctgcgcagggcgttgcggaacaaaccacg

SEQ ID NO: 83253 - DNA, 75 bp, synthetic construct
  source 1..75: mol_type = other DNA
ataccgcggtgtattccggaccggtgatgccgtggattgaccctgttaaggaggctgaggcctggaaaatccaga

SEQ ID NO: 83254 - DNA, 75 bp, synthetic construct
  source 1..75: mol_type = other DNA
ttcagtccttaccccattttcgctttatccagcagtcattgcttacatttgttccggctgacagcccaccggaat

SEQ ID NO: 83255 - DNA, 75 bp, synthetic construct
  source 1..75: mol_type = other DNA
accgtccttctccaacaccagaacaattagccttaataaatgatgaaaagaaatctgcactgatagcagaggcaa

SEQ ID NO: 83256 - DNA, 75 bp, synthetic construct
  source 1..75: mol_type = other DNA
ctgatcgggcgtcacaccattatggtggccaacctggcaccgcgtaaaatgcgctttggtatctccgaaggcatg

SEQ ID NO: 83257 - DNA, 75 bp, synthetic construct
  source 1..75: mol_type = other DNA
tggtagcaaaatatcttgatggcgttactgtacgtaaagtgatttacgtaccaggtaaactcctcaatctggtcg

SEQ ID NO: 83258 - DNA, 75 bp, synthetic construct
  source 1..75: mol_type = other DNA
cgggccacgttttcccacttcgcgctcaggctggtggtgtactgacgcgtggcggccatactgaagcgactattg

SEQ ID NO: 83259 - DNA, 75 bp, synthetic construct
  source 1..75: mol_type = other DNA
gttcacctctacggcaacaatcgctgcgggtaacaacggtactgcacgtttttacggcaccattgaagactcagt

SEQ ID NO: 83260 - DNA, 75 bp, synthetic construct
  source 1..75: mol_type = other DNA
gccaggctataccgctgcggtgggacgatctgaaactgctcgacgtcctgctgtccaggtcagaacggctggtgg

SEQ ID NO: 83261 - DNA, 75 bp, synthetic construct
  source 1..75: mol_type = other DNA
ccgctggcattcgaagaaaagcatggttcccaggttgatttaatttttcattttcttgatcacgcctttgcaacc

SEQ ID NO: 83262 - DNA, 75 bp, synthetic construct
  source 1..75: mol_type = other DNA
gcccaacgcaaaaatgcccggaaggtggtgaaatctaaatcgatggtgaccgaagagattggtgtcaatcatgtg

SEQ ID NO: 83263 - DNA, 75 bp, synthetic construct
  source 1..75: mol_type = other DNA
attagcaatacagcagacaaacagattacagccgtaacaattaatgcggcagatgaagaccttaatgttgctttt

SEQ ID NO: 83264 - DNA, 75 bp, synthetic construct
  source 1..75: mol_type = other DNA
ttgcactctccctatggaagacgggtgcatgaaccctgggcgctggcgattgccgggcgaatacatgccctatgg

SEQ ID NO: 83265 - DNA, 75 bp, synthetic construct
  source 1..75: mol_type = other DNA
ccatagtttgcttgttccactcgatcatcccttgacgcaaattacaccattgacgctggaatcaatagcgaagtg

SEQ ID NO: 83266 - DNA, 75 bp, synthetic construct
  source 1..75: mol_type = other DNA
cttgcggttatgctgaatttactggtttttattcgttccagtgaactcagataagcccgttggtctgaaattgat

SEQ ID NO: 83267 - DNA, 75 bp, synthetic construct
  source 1..75: mol_type = other DNA
atcagttcctgttcgccgaaatactgaccacgctcggtcatattaatcgttcagcaattaacgtgttgttattgc

SEQ ID NO: 83268 - DNA, 75 bp, synthetic construct
  source 1..75: mol_type = other DNA
ttgcagagccaccggataagcgccgtcgtgacctggacaatatcctgaaagcaccactggatgcactgacacatg

SEQ ID NO: 83269 - DNA, 75 bp, synthetic construct
  source 1..75: mol_type = other DNA
ctgtggccatggattccgggcgatggcgtgcagtgcattgattgaatcaggtttgtggtcccgcgatgctgtgga

SEQ ID NO: 83270 - DNA, 75 bp, synthetic construct
  source 1..75: mol_type = other DNA
gcggtgaacactctgaaaccctggtggccgggattgtttgacggtaacacgccccggcttcttgcctgtggtatc

SEQ ID NO: 83271 - DNA, 75 bp, synthetic construct
  source 1..75: mol_type = other DNA
tgattcagcgttatatggaagctgaaatggcggtgctggacggaaaatccgtcacctttaatggtcagcagatga

SEQ ID NO: 83272 - DNA, 75 bp, synthetic construct
  source 1..75: mol_type = other DNA
aacaatacttgcccgtataaaccgttatgaaaatttatcgagagttgaaaaaagccgtctggatgatttcaggag

SEQ ID NO: 83273 - DNA, 75 bp, synthetic construct
  source 1..75: mol_type = other DNA
cgggagcagacatctgattcactggatcaacttgctcaacagaatctggccgcctggatgattgacatcatccgt

SEQ ID NO: 83274 - DNA, 75 bp, synthetic construct
  source 1..75: mol_type = other DNA
cagaaagcgcgcgatagcgtcaaaaccatcaaaggggttaaacgctataaacagagccagctactggcggtgggg

SEQ ID NO: 83275 - DNA, 75 bp, synthetic construct
  source 1..75: mol_type = other DNA
cgccagcatcggacgccgagatccagttgattcgttcgcgcctggtgcttggtaaaacggtggacgatctcgacc

SEQ ID NO: 83276 - DNA, 75 bp, synthetic construct
  source 1..75: mol_type = other DNA
attgccaaatttgacctgatcccgcgcggtcaggtgccgccaaatccttctgaactgttgatgagcgaacgcttt

SEQ ID NO: 83277 - DNA, 75 bp, synthetic construct
  source 1..75: mol_type = other DNA
acccgcgatgtcgagtctggtcagcaggtctatatgcaactgctgaataaagagcaggagctgaaaatcaccgaa

SEQ ID NO: 83278 - DNA, 75 bp, synthetic construct
  source 1..75: mol_type = other DNA
cgagcagtttgatgaaatcaatattgtgcgcggtcagactgttcccggtgggcggctggggataaaaatcacaga

SEQ ID NO: 83279 - DNA, 75 bp, synthetic construct
  source 1..75: mol_type = other DNA
cgagcagtttgatgaaatcaatattgtgcgcggactgcctgttcctggtggtcggctggggataaaaatcacaga

SEQ ID NO: 83280 - DNA, 75 bp, synthetic construct
  source 1..75: mol_type = other DNA
cctctgtgccgtggtttacaccttcttcgccacgccgatatacagcgccgacgcactggtacaaatcgaacaaag

SEQ ID NO: 83281 - DNA, 75 bp, synthetic construct
  source 1..75: mol_type = other DNA
gatatcatgctgcctgatgtaaacggctgggatatcatccgtatgctgcgcagtgccggaaaggggatgccggta

SEQ ID NO: 83282 - DNA, 75 bp, synthetic construct
  source 1..75: mol_type = other DNA
cgggattatttgacggtgacacgccccggcttctggcctgcggtatccgggacgtgttactggaagacgtggcgc

SEQ ID NO: 83283 - DNA, 75 bp, synthetic construct
  source 1..75: mol_type = other DNA
tccacagtcaacggaggctgccatcatggctacgatcccaaccctcactcaacctgaaattgccatcgttgatgg

SEQ ID NO: 83284 - DNA, 75 bp, synthetic construct
  source 1..75: mol_type = other DNA
tttctctctccgaagctcgtgcaaaacgggatgaggcccgaaaactaatttcggcggggattgacccttgcgaac

SEQ ID NO: 83285 - DNA, 75 bp, synthetic construct
  source 1..75: mol_type = other DNA
gttatggtaccggcgcaatggtgttgtgctggcactgcgacaaccaactgcgtgaccagacatccgaatcactcg

SEQ ID NO: 83286 - DNA, 75 bp, synthetic construct
  source 1..75: mol_type = other DNA
acccgcgacggttttgcgtttcttgccatgggcttcactggtaaacgtgctgcccggttcaaagaggcatacatc

SEQ ID NO: 83287 - DNA, 75 bp, synthetic construct
  source 1..75: mol_type = other DNA
ctgccagtggccacacggcgattatcatcacagcgaaaccgttattcaccgttatggtaccggcgcaatggtgtt

SEQ ID NO: 83288 - DNA, 75 bp, synthetic construct
  source 1..75: mol_type = other DNA
tgatcaaactcttcaatttaaaagtttgatgctcaaagaattaaacttcgtaatgaattacgtgttcactcttga

SEQ ID NO: 83289 - DNA, 75 bp, synthetic construct
  source 1..75: mol_type = other DNA
aaaaccgacctcatcccggaagggggtatccgtacggatgatgagcgcacccaccggtaccattacgacagtcag

SEQ ID NO: 83290 - DNA, 75 bp, synthetic construct
  source 1..75: mol_type = other DNA
ctccgccggtcattgtttacaacgcctgccagaaggtgagcctctgcccgatgccgggaagcgagcccacaacta

SEQ ID NO: 83291 - DNA, 75 bp, synthetic construct
  source 1..75: mol_type = other DNA
gtaagcgcagtcacgaccgctggtggaatgcaaacagtagatataacgctggtggcaggcccggcagacgcctcg

SEQ ID NO: 83292 - DNA, 75 bp, synthetic construct
  source 1..75: mol_type = other DNA
atgaaggataatatcgtagattttcaaagaatcagggacagcatgaatgatcattcaaccgatgttgcaaatgat

SEQ ID NO: 83293 - DNA, 75 bp, synthetic construct
  source 1..75: mol_type = other DNA
aaattatcgtaaaagaaggagagtcagtccggaaaggggatgtgttattaaagcttacagcactgggagctgaag

SEQ ID NO: 83294 - DNA, 75 bp, synthetic construct
  source 1..75: mol_type = other DNA
acaggccagaaccgaagcacaggccgacgctgcgacgcgcttttcttctcatcttgacgccatgattcgccacat

SEQ ID NO: 83295 - DNA, 75 bp, synthetic construct
  source 1..75: mol_type = other DNA
aaaagtgcattagaaaaattccagactgcaaatactgcgttaaataaagccgatctgttcaaaagcactaccgtt

SEQ ID NO: 83296 - DNA, 75 bp, synthetic construct
  source 1..75: mol_type = other DNA
ctacagtggtgggcagattttctggatgcgaacagagaacaatgtatcagcccgtttgaatatgcaaagattaac

SEQ ID NO: 83297 - DNA, 75 bp, synthetic construct
  source 1..75: mol_type = other DNA
gagattatgataacgccatccctcataatacggaatgtttcccggactgcgcgtcaacacctccctcaggctatt

SEQ ID NO: 83298 - DNA, 75 bp, synthetic construct
  source 1..75: mol_type = other DNA
accatcatcaatgtcaccacgccaccaaagtggaaggtgaaaaagcagaagctggccgagaaagcagcccgggaa

SEQ ID NO: 83299 - DNA, 75 bp, synthetic construct
  source 1..75: mol_type = other DNA
gatggtgttcgtcagggcggaagcagtgacgtgactcccaacggtttttctgccatgaataccgggttcatgccc

SEQ ID NO: 83300 - DNA, 75 bp, synthetic construct
  source 1..75: mol_type = other DNA
tacagaagaaagtgtatgatgagaaaggagaatacctgaaagcctggacggtggtggatgcaggtctgtcgtgga

SEQ ID NO: 83301 - DNA, 75 bp, synthetic construct
  source 1..75: mol_type = other DNA
gtttgatgaaatcaatattgtacgtggtcagcttgttcctggtggtcggttgggtgtgaagatttacaaaattga

SEQ ID NO: 83302 - DNA, 75 bp, synthetic construct
  source 1..75: mol_type = other DNA
agcatggctgagaaaaacgccaggtttgattacgacggcaaggacacaggctggtcaccggagttttctaactgg

SEQ ID NO: 83303 - DNA, 75 bp, synthetic construct
  source 1..75: mol_type = other DNA
aaagtgggcggctggcactggagggcagcatcgcctacatcgtcaaccacgcgttcgctaaaagcctgtttttcc

SEQ ID NO: 83304 - DNA, 75 bp, synthetic construct
  source 1..75: mol_type = other DNA
agcattcctcaggaatcctgatccccgctacgccggagaccagtgatttactgcaatcaaaaatcaaactcggct

SEQ ID NO: 83305 - DNA, 75 bp, synthetic construct
  source 1..75: mol_type = other DNA
gccgggctgtggcgcttattgttcgccagcagcggctgaaattaagcctgtccggaaggctggcgataaagatta

SEQ ID NO: 83306 - DNA, 75 bp, synthetic construct
  source 1..75: mol_type = other DNA
atggcgcacgaactacaactcatcaagcagtcatcaggaatcctgatccccgcgacgccggagaccagcgatatt

SEQ ID NO: 83307 - DNA, 75 bp, synthetic construct
  source 1..75: mol_type = other DNA
gtcccacctgcatcgtcggtcaggttatctgtctgggaccacggtcccacctgcatcgtcggtcaggtaatctgc

SEQ ID NO: 83308 - DNA, 75 bp, synthetic construct
  source 1..75: mol_type = other DNA
aggtcgttcaggtcgtggaacaggccaaagactggcgggaagccgtggcgatttcatgccggccgttgattgaaa

SEQ ID NO: 83309 - DNA, 75 bp, synthetic construct
  source 1..75: mol_type = other DNA
cgagcagtttgatgaaatcaatattgtacgtggtcagccagtatctggtggacggctgggtgtgaagatttacaa

SEQ ID NO: 83310 - DNA, 75 bp, synthetic construct
  source 1..75: mol_type = other DNA
aaaaacgcgaaataactgagtctgttatcgcgatttatcagaacgaattaaatctcctgtctgatgtggtcaatt

SEQ ID NO: 83311 - DNA, 75 bp, synthetic construct
  source 1..75: mol_type = other DNA
atgatattaaagttgatattgatggttacttattagaagaacacttcatgaatgagcttaatctttctaatattt

SEQ ID NO: 83312 - DNA, 75 bp, synthetic construct
  source 1..75: mol_type = other DNA
tattttgtatcaaaagccggtgagcgttatcgccgtgatgtggcgcttattgttcgccagcagcgactgaaatta

SEQ ID NO: 83313 - DNA, 75 bp, synthetic construct
  source 1..75: mol_type = other DNA
tcagctaacttatgatgacagagcgctacaattttttcgtacttttgtccttgcaaccgaacaatcaacctattt

SEQ ID NO: 83314 - DNA, 75 bp, synthetic construct
  source 1..75: mol_type = other DNA
gggccagctaaacatgcttcatcgtcggtccgggctgccacgaccaagtgacagcaatgctgtttcactggttat

SEQ ID NO: 83315 - DNA, 75 bp, synthetic construct
  source 1..75: mol_type = other DNA
gcaaataataaaccgtcaagtgatatggcgaacagaatcaaaccagttgtaagcgatttacaaatcgatatatac

SEQ ID NO: 83316 - DNA, 75 bp, synthetic construct
  source 1..75: mol_type = other DNA
ggatactcggctggtcagagcgggtgccgggtgctgaggacgtgctgccagcgccgctgccgccgtaccgggagc

SEQ ID NO: 83317 - DNA, 75 bp, synthetic construct
  source 1..75: mol_type = other DNA
catacaccacgtcagcggtggggacgggatactggttactgcagctgctggacagggtttccccgtctcagtggg

SEQ ID NO: 83318 - DNA, 75 bp, synthetic construct
  source 1..75: mol_type = other DNA
tggaccggctttgatggacagaaaaatgcagagaacaacgctcgttatgttgccgcgttcaacccaaaggttgct

SEQ ID NO: 83319 - DNA, 75 bp, synthetic construct
  source 1..75: mol_type = other DNA
acgacccaatgtcatcgggtcaaaatggcccgatgatcctacagagaatacaacagagattactacagagaataa

SEQ ID NO: 83320 - DNA, 75 bp, synthetic construct
  source 1..75: mol_type = other DNA
agcctaactggacgacctgggcgaatgatgtgcgcatgatgcgtatgctggatggacgtagtcaccgacagattt

SEQ ID NO: 83321 - DNA, 75 bp, synthetic construct
  source 1..75: mol_type = other DNA
taattgtcacttttaatcgcgagcatttactgcaacaaacacttgatgcagtattaaatcaaacattccccctac

SEQ ID NO: 83322 - DNA, 75 bp, synthetic construct
  source 1..75: mol_type = other DNA
ggccgattatattgacattaggatacgcagcattatctatatttcgaggtgatctagatgtggctctaaaagtat

SEQ ID NO: 83323 - DNA, 75 bp, synthetic construct
  source 1..75: mol_type = other DNA
gtcaatctgaagcaacagtcggattgtcacgtatgccccaacgcggtatggtttacggaatcaatggattcacaa

SEQ ID NO: 83324 - DNA, 75 bp, synthetic construct
  source 1..75: mol_type = other DNA
atgatcttgctacaactctcctcagcgcaggggccggaagaatgttgtctcgcagtgaaaaaggcgctggagcga

SEQ ID NO: 83325 - DNA, 75 bp, synthetic construct
  source 1..75: mol_type = other DNA
cgggtgtgtcatacaccacgtcagcggtggggacgggatactggctactgcagttgctggacaaagtctccccat

SEQ ID NO: 83326 - DNA, 75 bp, synthetic construct
  source 1..75: mol_type = other DNA
gcgaatgttccatcaccagattgaacgtggcaacccgcgacggacatttacagggatggcttttatcgaaggata

SEQ ID NO: 83327 - DNA, 75 bp, synthetic construct
  source 1..75: mol_type = other DNA
tcgaaaaatcttccaccagaaagctacccagtcggcgcaccaatcccgtggccatcagataccgttccgtctggt

SEQ ID NO: 83328 - DNA, 75 bp, synthetic construct
  source 1..75: mol_type = other DNA
ctggtgtccggtttcgttgatttcctgtgcgaatcagtaggtcgggaacatacgccagcccttagtgatgctgca

SEQ ID NO: 83329 - DNA, 75 bp, synthetic construct
  source 1..75: mol_type = other DNA
gagtgggtaaccattcaggctggattttacaccgaacatttttatccggacggtagccatgggcgtcgggcgaaa

SEQ ID NO: 83330 - DNA, 75 bp, synthetic construct
  source 1..75: mol_type = other DNA
atcagacacggagaacgatgtgatcgctccacaaatatatgtctgtcagaacgtgatggcatcacaataaatgga

SEQ ID NO: 83331 - DNA, 75 bp, synthetic construct
  source 1..75: mol_type = other DNA
accccagcacagattaacaataacgttagtacctggcttgataaaaccagtcacgaaataaaacatatttattca

SEQ ID NO: 83332 - DNA, 75 bp, synthetic construct
  source 1..75: mol_type = other DNA
tcatgccctgtatcttgatggtcgccgggaaatgatgcaatggtacgctgactacattgattcactttctgagca

SEQ ID NO: 83333 - DNA, 75 bp, synthetic construct
  source 1..75: mol_type = other DNA
acaccatgagtacaattctgcacgaacagggttttaattctgcctggattgaaattcaattagctcatgtggata

SEQ ID NO: 83334 - DNA, 75 bp, synthetic construct
  source 1..75: mol_type = other DNA
cgctgggcgtacgcgcggtgggcagtatgaacggcagtgccggtctggtgtattccccggtctaccacatcgcca

SEQ ID NO: 83335 - DNA, 75 bp, synthetic construct
  source 1..75: mol_type = other DNA
agagaataatccgcctcagtttgttgccagcctcgtccctgatgaacagcgcatcagcttctggccgcagcactt

SEQ ID NO: 83336 - DNA, 75 bp, synthetic construct
  source 1..75: mol_type = other DNA
cgtcatcacagaaagtgctgatggatatcagccagcggacgggcacggcattttcagataatgcggccctgtttg

SEQ ID NO: 83337 - DNA, 75 bp, synthetic construct
  source 1..75: mol_type = other DNA
tctggggcgtgaaattaatcatgaaatctgggctgacagtatcagtaccggaaagatggtggccggagcggatga

SEQ ID NO: 83338 - DNA, 75 bp, synthetic construct
  source 1..75: mol_type = other DNA
gctgacggcgacggatctgggtcatggcgacgggcgcgggcgttgggtgaaacaggtgtatggctaccgctggaa

SEQ ID NO: 83339 - DNA, 75 bp, synthetic construct
  source 1..75: mol_type = other DNA
gctggatggaccgtctgtgtgaagactactgcggtggtatctggagtctgtacaccctgaacaacggtggagcat

SEQ ID NO: 83340 - DNA, 75 bp, synthetic construct
  source 1..75: mol_type = other DNA
cgggctgatgggcgaggccgggcctgaagcaatcatgccactgacacgggcagcggacggctctcttggggtcag

SEQ ID NO: 83341 - DNA, 75 bp, synthetic construct
  source 1..75: mol_type = other DNA
cccccgtctgggctatcgccatcgagcgtggaaactccggcgatagcgttatttgctattcacaggaggctgcca

SEQ ID NO: 83342 - DNA, 75 bp, synthetic construct
  source 1..75: mol_type = other DNA
acgaaattctgggaaaagagggcggttacgtcaatcacccggatgataaaggtggtccgactaaatggggcatca

SEQ ID NO: 83343 - DNA, 75 bp, synthetic construct
  source 1..75: mol_type = other DNA
aactggaggctaaagggctgtaccggagagcggcggcgcggtgggctgaggttatgcaactggtgaacaccgata

SEQ ID NO: 83344 - DNA, 75 bp, synthetic construct
  source 1..75: mol_type = other DNA
atccagatgcaaacggcgagatgaactggagtgcgtataacggtacgttatatggcagctactacatcactgttc

SEQ ID NO: 83345 - DNA, 75 bp, synthetic construct
  source 1..75: mol_type = other DNA
ttgtgcataccgctgcgtttcatcaaaaggaaactaatgaattgcaattgccaaacaatcattggcatcctggtt

SEQ ID NO: 83346 - DNA, 75 bp, synthetic construct
  source 1..75: mol_type = other DNA
atgcgtatagagtttgttttgccttatccgccgacggtgaatacttactggcgacgtcgtggcaacacatatttt

SEQ ID NO: 83347 - DNA, 75 bp, synthetic construct
  source 1..75: mol_type = other DNA
ctatctgggcatggttctgctggtctacctcttcttaagtgcggagatgaatttttatcaccggcagatattgtc

SEQ ID NO: 83348 - DNA, 75 bp, synthetic construct
  source 1..75: mol_type = other DNA
ctggttgccactcccgtccctgatgaacagcgcatcagcttctggccgcagcactttggcctcattccacagtgg

SEQ ID NO: 83349 - DNA, 75 bp, synthetic construct
  source 1..75: mol_type = other DNA
ggcagcacaccgtacacaggcggatatggggatagaaatcgcaaaatctgtctggcggaactaccagacagacaa

SEQ ID NO: 83350 - DNA, 75 bp, synthetic construct
  source 1..75: mol_type = other DNA
attacatcaaatcagttccgcggtttttcaagcatagcgactgctgcaaacgctgtattaggtcgttatatcgct

SEQ ID NO: 83351 - DNA, 75 bp, synthetic construct
  source 1..75: mol_type = other DNA
tggccagagtctacccgaccctccgtcttcccgatttacgcggtgagtttatccgtggatgggacgacgggcgca

SEQ ID NO: 83352 - DNA, 75 bp, synthetic construct
  source 1..75: mol_type = other DNA
tcattggtaaacgcccaatatctgaaattaagccattagaactgcttgaagtacttaagcgcatcgaaaaacgtg

SEQ ID NO: 83353 - DNA, 75 bp, synthetic construct
  source 1..75: mol_type = other DNA
cgctacgcgatcatcactggccgtgctgaatacaatccggcgcctgatttagcaatcgctttggctattcccaag

SEQ ID NO: 83354 - DNA, 75 bp, synthetic construct
  source 1..75: mol_type = other DNA
tctcgaaagaaagcgtatcgcaagtgattgagttacttggttataaaggacgtgctacaggtcacggttttaggc

SEQ ID NO: 83355 - DNA, 75 bp, synthetic construct
  source 1..75: mol_type = other DNA
gaagatacagcaggaagggagcgaagacggtcacggtgtggtgttcccggctgaactggtggggctgctggacag

SEQ ID NO: 83356 - DNA, 75 bp, synthetic construct
  source 1..75: mol_type = other DNA
acccgccgacggtgaacacttactggcgacgccgtggcagcacatattttatatctgaggagggaaagcgctatc

SEQ ID NO: 83357 - DNA, 75 bp, synthetic construct
  source 1..75: mol_type = other DNA
gaaccagtggcattcgtactgccgggaacggcgttccgtgtctctgccagtgtggcagccgaaatgacagaacat

SEQ ID NO: 83358 - DNA, 75 bp, synthetic construct
  source 1..75: mol_type = other DNA
aagaggggttatggcgtgaacgccgtcgtaaaattgcccgtatatatcaacgccgcatgcgacgaccatcttacg

SEQ ID NO: 83359 - DNA, 75 bp, synthetic construct
  source 1..75: mol_type = other DNA
gaaaatgcgtaggccgcacattgttcctttatcgactcaggtagttgacctttttaaacagctcaaacctattac

SEQ ID NO: 83360 - DNA, 75 bp, synthetic construct
  source 1..75: mol_type = other DNA
atgaccgaacgcatagaatttgttttgccttactcgccgacggtgaacacttactggcgacgccgtggcagcaca

SEQ ID NO: 83361 - DNA, 75 bp, synthetic construct
  source 1..75: mol_type = other DNA
cgttactgtggcacttcgccctgatgtggattctgctgattaatgccacgatctatcttactctgggaatttgta

SEQ ID NO: 83362 - DNA, 75 bp, synthetic construct
  source 1..75: mol_type = other DNA
ggttctgcgcgacaggcggttaaaaacccgcgacgggctgtacgtttgcctgcgtgagggcgagcgcgaagggtg

SEQ ID NO: 83363 - DNA, 75 bp, synthetic construct
  source 1..75: mol_type = other DNA
cggtcagtttattgagtcaccgcgcaccggggaaaccattcgggtaagtcggttagctgaacctttctggcagga

SEQ ID NO: 83364 - DNA, 75 bp, synthetic construct
  source 1..75: mol_type = other DNA
ctgggtatcctgaccccgggggtaaagacgcacggtccgctgacaatcacctggacctgtgctgatggtgggaca

SEQ ID NO: 83365 - DNA, 75 bp, synthetic construct
  source 1..75: mol_type = other DNA
ccatgcacaatatttagagaaaaggaaagaaatgatgcaatggtatagtgatagattatatccgaaaatgaatat

SEQ ID NO: 83366 - DNA, 75 bp, synthetic construct
  source 1..75: mol_type = other DNA
taaaacgatttatccgcgttcctgatgttttaaatcgagtgggatttagtcgcacgactttatatgaacgtatta

SEQ ID NO: 83367 - DNA, 75 bp, synthetic construct
  source 1..75: mol_type = other DNA
atgatcttgctacaactctcctctgctcaggggccggaagaatgttgtctcgcagtgagaaaagcactggacagg

SEQ ID NO: 83368 - DNA, 75 bp, synthetic construct
  source 1..75: mol_type = other DNA
ggcctgctgacgtacctgacaaacctttatttcaagattaaagaagataagcgcaaggctgcgagaggtgaataa

SEQ ID NO: 83369 - DNA, 75 bp, synthetic construct
  source 1..75: mol_type = other DNA
atgcccgcacatgcagtaccaattgatataaaagaacagggcgttacctggttattaccaccttatagttggtcc

SEQ ID NO: 83370 - DNA, 75 bp, synthetic construct
  source 1..75: mol_type = other DNA
gcgcaaatcacctggatgggtgtgaaagattccgaccatacccggaaagacggaacgcgcattgaaacggaaggc

SEQ ID NO: 83371 - DNA, 75 bp, synthetic construct
  source 1..75: mol_type = other DNA
ccggtcactggaatatgataattttccggaaatcagcgaggcgaatatcctgagcacatttgaacaactgcacca

SEQ ID NO: 83372 - DNA, 75 bp, synthetic construct
  source 1..75: mol_type = other DNA
accggtggggatttcatcttatcaccgggcaacaggccgatcgacttgccgacctggaaagaatgctgcatctgt

SEQ ID NO: 83373 - DNA, 75 bp, synthetic construct
  source 1..75: mol_type = other DNA
atttcccgtctgactaacgagcgatgggctgatgtggaaccatccttgcgggagtttttttgcgataacagcgat

SEQ ID NO: 83374 - DNA, 75 bp, synthetic construct
  source 1..75: mol_type = other DNA
ccggaaatcagtgaagcgaacattctgagcacatttgaacaactgcaccagaataaggatgaggtgtttgagcga

SEQ ID NO: 83375 - DNA, 75 bp, synthetic construct
  source 1..75: mol_type = other DNA
atggcgacggacaccccacggattccagaacaaggcgtggccactctgcctgatgaggcttgggagcgtgcgcgc

SEQ ID NO: 83376 - DNA, 75 bp, synthetic construct
  source 1..75: mol_type = other DNA
gatcagttcacggaacggctggaatcaatggcaacggataactgtgcccgctgggtgttgtctgtcgtgcgtcgg

SEQ ID NO: 83377 - DNA, 75 bp, synthetic construct
  source 1..75: mol_type = other DNA
gaactaatattacccgcattacagattttttagaaaaagccggatatgtaaaaaggacggatagcagggaggatc

SEQ ID NO: 83378 - DNA, 75 bp, synthetic construct
  source 1..75: mol_type = other DNA
tatgacccgctgcaggggcggtatatcactcaggatccgattgggctgaaggggggatggaatttttatcagtat

SEQ ID NO: 83379 - DNA, 75 bp, synthetic construct
  source 1..75: mol_type = other DNA
cgattccgggagaacgtgagccactggagggagttaagcattctcagcgtggttcgaagatgcggactccacatc

SEQ ID NO: 83380 - DNA, 75 bp, synthetic construct
  source 1..75: mol_type = other DNA
atgttgatagcaaagtatctctgtctgctgaagcccttttggctgcgtaagaataataaaacttcagtgttgtta

SEQ ID NO: 83381 - DNA, 75 bp, synthetic construct
  source 1..75: mol_type = other DNA
tcatgcggataccgtggcatttgaagagaagtatggctctcagctggagctgatatttcgttttatcgatcgtgc

SEQ ID NO: 83382 - DNA, 75 bp, synthetic construct
  source 1..75: mol_type = other DNA
ggcgcgttaccagagtctggcagcagcagaggcaacgggtggattaggctctacagcaacaggaaaccagttagc

SEQ ID NO: 83383 - DNA, 75 bp, synthetic construct
  source 1..75: mol_type = other DNA
gcaaagaaaggcatctttatcagcgccgacgcgcaggataaggcgcagggtcaggtacgcgaaatggccgacatt

SEQ ID NO: 83384 - DNA, 75 bp, synthetic construct
  source 1..75: mol_type = other DNA
gcccaggaaaagcgtaaaaaccactctggaaagaggctatcttgaggccgcattaaagattaagccgggccatac

SEQ ID NO: 83385 - DNA, 75 bp, synthetic construct
  source 1..75: mol_type = other DNA
aatttggcagtaaaattatcgtcaacaacctggtgaggtgggaccggtgggggtttcatcttatcaccgggcaac

SEQ ID NO: 83386 - DNA, 75 bp, synthetic construct
  source 1..75: mol_type = other DNA
aggctccgcgcacatcaggttcaggaaaccagaactggttgacaggctgaatgatattattgcgaaacactatcc

SEQ ID NO: 83387 - DNA, 75 bp, synthetic construct
  source 1..75: mol_type = other DNA
agaacgcaggacagtaatatccgtaatgatgtaaaacatcaggttgataatatggtcacagaatataaagggaat

SEQ ID NO: 83388 - DNA, 75 bp, synthetic construct
  source 1..75: mol_type = other DNA
accggtggggatttcatctgaacagcgggcaacaggcagatcgacttgccgacctggaaagaatgctgcacctgt

SEQ ID NO: 83389 - DNA, 75 bp, synthetic construct
  source 1..75: mol_type = other DNA
ggggtgatcaacgtcttcagagggctgaactggaattacaaaaccaattccccctgtaaatttggcagtaaaatt

SEQ ID NO: 83390 - DNA, 75 bp, synthetic construct
  source 1..75: mol_type = other DNA
cgggcaacaggcagatcgacttaccgacctggaaagaatgctgcacctgttcagcggcaaaccgatccccgacaa

SEQ ID NO: 83391 - DNA, 75 bp, synthetic construct
  source 1..75: mol_type = other DNA
tctttgcctggatggaacaaattgatcaggctacacctgtaacgccaggcgcagttacagcgaatgcgacctacg

SEQ ID NO: 83392 - DNA, 75 bp, synthetic construct
  source 1..75: mol_type = other DNA
ggcctgctgacgtatctgactaacctgtatttcaaaatcagagaggaccgtcgtaaggtggcgcggggagagtag

SEQ ID NO: 83393 - DNA, 75 bp, synthetic construct
  source 1..75: mol_type = other DNA
gttggtcgatattcacaggcaaatgcagaaaaaagtatttctttaggtgcatcagcaagagctattgaaaataac

SEQ ID NO: 83394 - DNA, 75 bp, synthetic construct
  source 1..75: mol_type = other DNA
catttttacactcggctccgatggtcagggacgtattggcgccagagcaatagattacggcggtgtacgtaacat

SEQ ID NO: 83395 - DNA, 75 bp, synthetic construct
  source 1..75: mol_type = other DNA
aatcgaaattttttattatttctaaaattgaagtattttcagctgctttgtctcttttattagctattatattag

SEQ ID NO: 83396 - DNA, 75 bp, synthetic construct
  source 1..75: mol_type = other DNA
ttgctaatcgttctttatttcctatattaagccagaagaaaaataattacaaagaaataaatgatatttatttaa

SEQ ID NO: 83397 - DNA, 75 bp, synthetic construct
  source 1..75: mol_type = other DNA
cacttgctctgaaaaagaaaatcggtagcaacgacgaaattcagaaagtaactcattggattgacacaggctttc

SEQ ID NO: 83398 - DNA, 75 bp, synthetic construct
  source 1..75: mol_type = other DNA
ggattttcgctgcggttgctggctgatggagaaaccggaaaccgcaatgaaagccatcacacgcaatcttgatcg

SEQ ID NO: 83399 - DNA, 75 bp, synthetic construct
  source 1..75: mol_type = other DNA
atcatcaacaacctggtaaggtgggacagatgggggtttcaccttatcaccgggcaacaggccgatcgacttgcc

SEQ ID NO: 83400 - DNA, 75 bp, synthetic construct
  source 1..75: mol_type = other DNA
ccgggaaaacatcacccttcgtctggatgatcacatccagtccgttcagggtaaagagtgctatgaagatgagat

SEQ ID NO: 83401 - DNA, 75 bp, synthetic construct
  source 1..75: mol_type = other DNA
tcagaaactttattactacttcactgggattggaagttaatgaagcaaagaccaggatccgccatatctcagaag

SEQ ID NO: 83402 - DNA, 75 bp, synthetic construct
  source 1..75: mol_type = other DNA
ggagcgaagggggctgaaaaggggaattaaggatgattgttattatggtgaaccagaaggttatccctgtctgta

SEQ ID NO: 83403 - DNA, 75 bp, synthetic construct
  source 1..75: mol_type = other DNA
atgtcctgttctcgttcagttgtattactgaataacgccttaaaaatcgccgttatgaaaaatggcgatttatct

SEQ ID NO: 83404 - DNA, 75 bp, synthetic construct
  source 1..75: mol_type = other DNA
tcttcagcttgcacacgaaccgccatcacatgtggttgttccggcaatacataaagatcgccatcaaatccgcag

SEQ ID NO: 83405 - DNA, 75 bp, synthetic construct
  source 1..75: mol_type = other DNA
ggaatggcatccggccgtatgttgttaaacaaccttgtcatttttgctcctcaacgggcttttgatgagcgaaca

SEQ ID NO: 83406 - DNA, 75 bp, synthetic construct
  source 1..75: mol_type = other DNA
tccagtatggtgtttttgaagttcaacggcgcgaaattctctgccactgattaccctgtgctggcgaaagtgttt

SEQ ID NO: 83407 - DNA, 75 bp, synthetic construct
  source 1..75: mol_type = other DNA
ggaacaagaggcgataacgtttgaagtagtcgccagagactggcacgccagcaatcagaagtggtcggcatcgca

SEQ ID NO: 83408 - DNA, 75 bp, synthetic construct
  source 1..75: mol_type = other DNA
gctggtaccccgacagtacagcacgggaggtcggacgacattgttagggattagcaagcggggcaacaaaaagat

SEQ ID NO: 83409 - DNA, 75 bp, synthetic construct
  source 1..75: mol_type = other DNA
tcaccggttttcgctcttatttgccagacgcattacgtctaagattcgacgagcaattatctgtccgggctatcg

SEQ ID NO: 83410 - DNA, 75 bp, synthetic construct
  source 1..75: mol_type = other DNA
cgccacatcggcgggcacggctatggctctatctatcccggccctatcggcgcggtgatttctccgctgctcggc

SEQ ID NO: 83411 - DNA, 75 bp, synthetic construct
  source 1..75: mol_type = other DNA
atatggtgattttgaaaatggtattcctgttcacgataccattgccagagttgtatcctgtatcagtcctgcaaa

SEQ ID NO: 83412 - DNA, 75 bp, synthetic construct
  source 1..75: mol_type = other DNA
attaatcggcgaaatttgtctgctggaaaaaggcgtcaatacagtggtcgccaaagcgcataatctgtttcacca

SEQ ID NO: 83413 - DNA, 75 bp, synthetic construct
  source 1..75: mol_type = other DNA
gatgtggtcaatttacttgttaaacgcgctgtatttcataagcaaatttcatccgtggatgaactaacaaaatta

SEQ ID NO: 83414 - DNA, 75 bp, synthetic construct
  source 1..75: mol_type = other DNA
gctggggattggtattttactggtggtgaaatgcgccaaccttccggcgatggttttagcaaccttactcggtgc

SEQ ID NO: 83415 - DNA, 75 bp, synthetic construct
  source 1..75: mol_type = other DNA
ccaaagcacaaaatctgtttcgccactcacgtaagaagccagcgcatgaatcttttattcagaattatgtcgcga

SEQ ID NO: 83416 - DNA, 75 bp, synthetic construct
  source 1..75: mol_type = other DNA
gatgaactgggtactgaagcggtacatatgttacaacaaagacttgtacgtcctgatgcaactgttggtgcatta

SEQ ID NO: 83417 - DNA, 75 bp, synthetic construct
  source 1..75: mol_type = other DNA
acggcgaccggctgaccacgatacagaacgacaggagccgcatccagacgatttatcagccggggagcttcacac

SEQ ID NO: 83418 - DNA, 75 bp, synthetic construct
  source 1..75: mol_type = other DNA
atatcaaataatataatacaaggtaaggaagccaaaaatgaatttaccataaattctataatatggacaaaaaag

SEQ ID NO: 83419 - DNA, 75 bp, synthetic construct
  source 1..75: mol_type = other DNA
tggaagccttgtgttgggttttctcacttatctgacaaatctgtatttcaaaatcagagaagacagacgaaaggc

SEQ ID NO: 83420 - DNA, 75 bp, synthetic construct
  source 1..75: mol_type = other DNA
acagatgggggtttcatcttatcaccgggcaacaggccgatcgacttgccgatctggaaagaatgctgcacctgt

SEQ ID NO: 83421 - DNA, 75 bp, synthetic construct
  source 1..75: mol_type = other DNA
aaatatagtaatttttctgtcgtacaatttccagaactcaatcatcaggagactttcgctgctgcactctggaat

SEQ ID NO: 83422 - DNA, 75 bp, synthetic construct
  source 1..75: mol_type = other DNA
tgtgccgtaaatgtcataacgaactgcacgccggggtaaaagattttgaagaaaaacacggcagccagctgttgt

SEQ ID NO: 83423 - DNA, 75 bp, synthetic construct
  source 1..75: mol_type = other DNA
atgtctcagaactggatgcggcacttcgaattgcagttagtcgattcgaaggggaacgctactgattttggtagc

SEQ ID NO: 83424 - DNA, 75 bp, synthetic construct
  source 1..75: mol_type = other DNA
tacttgtctgtatctccttcatttcctttgctgataccggttgcggaccatttacgatcaactggaaagcgcaag

SEQ ID NO: 83425 - DNA, 75 bp, synthetic construct
  source 1..75: mol_type = other DNA
ggaacaagaggcgataacgtttgaagtggttgccagagactggcacgccagtaatcagaaatggtcggcatcgca

SEQ ID NO: 83426 - DNA, 75 bp, synthetic construct
  source 1..75: mol_type = other DNA
gtggcagatgacctcgcctctctggtactggacgcgcgaatggagcaagaaggctatgcccgcagttccatcaac

SEQ ID NO: 83427 - DNA, 75 bp, synthetic construct
  source 1..75: mol_type = other DNA
gtaatctattattaatggctacgctattaggtagcgcactatttgccagggctgcggaaaaagaaatgaccattg

SEQ ID NO: 83428 - DNA, 75 bp, synthetic construct
  source 1..75: mol_type = other DNA
gttattgcgccaagcataattttaaacaaaataaaccaattaacgggataatgaattatatttattatttttatt

SEQ ID NO: 83429 - DNA, 75 bp, synthetic construct
  source 1..75: mol_type = other DNA
aattaactttcatgatggcatcgccggaaatcagccaggattttcacgatttaatttcaccagtaactctgtggg

SEQ ID NO: 83430 - DNA, 75 bp, synthetic construct
  source 1..75: mol_type = other DNA
atcactttcaaaaggctggaactgattgacagaattaacgatataatagccaggtactttccttctgtgctctca

SEQ ID NO: 83431 - DNA, 75 bp, synthetic construct
  source 1..75: mol_type = other DNA
ttttcttatacttcgctgtctggggaatggcttcagtgattgaattgcagtactggcgtaacgctgatacctatc

SEQ ID NO: 83432 - DNA, 75 bp, synthetic construct
  source 1..75: mol_type = other DNA
aaaacgccggtgtttatactgctacatggtcggcgcaaatggcgggagactctcaccacgcgacgctgaagttgt

SEQ ID NO: 83433 - DNA, 75 bp, synthetic construct
  source 1..75: mol_type = other DNA
tacctggtttggttcggcgaaattggcgtgcatgaattcgcgtatctggtgaaaaactacgtagctgcggttaac

SEQ ID NO: 83434 - DNA, 75 bp, synthetic construct
  source 1..75: mol_type = other DNA
gggcgacgggataaaaatttctgagcttaaagtcactttcaatattcagaaaatgcctgcgaccatatttaatgg

SEQ ID NO: 83435 - DNA, 75 bp, synthetic construct
  source 1..75: mol_type = other DNA
cctggcgtgatggcctgtaccggaatgcgccgaataaagagagtgccgacgaggaatacggctgcattcccaaaa

SEQ ID NO: 83436 - DNA, 75 bp, synthetic construct
  source 1..75: mol_type = other DNA
accggtggggctttcatcttatcaccgggcaacaggcagatcgacttgctgatctggaaataatgctacacctgt

SEQ ID NO: 83437 - DNA, 75 bp, synthetic construct
  source 1..75: mol_type = other DNA
gcaacaaagcagcggaccatgatggggctcggagccttcccctccctttcacttgctgatgctcgaagtctaaga

SEQ ID NO: 83438 - DNA, 75 bp, synthetic construct
  source 1..75: mol_type = other DNA
cagatatactaaagctggtgtgtatactccctataatgatattggttacttggtatatgatgtcgtatatggatt

SEQ ID NO: 83439 - DNA, 75 bp, synthetic construct
  source 1..75: mol_type = other DNA
ggcgcgtcagggcagccgactgtatcggcgacaaatgtccataacactggatttgatattacagtgtcgcccggt

SEQ ID NO: 83440 - DNA, 75 bp, synthetic construct
  source 1..75: mol_type = other DNA
atcttatccactacttcaatgagagcagtcaggacattgatcatgtgctggatgttttcatccgcacgaacagcg

SEQ ID NO: 83441 - DNA, 75 bp, synthetic construct
  source 1..75: mol_type = other DNA
gctgaaaggctggcagcggtcggcaggcgctaaggcagaactggcactggcggagaaactggggcatgcagttat

SEQ ID NO: 83442 - DNA, 75 bp, synthetic construct
  source 1..75: mol_type = other DNA
gcttatcgacagttatcgccgtggcgagcaaccgcttcttgcgccgctgatgcgtatcaaacactatatggcgct

SEQ ID NO: 83443 - DNA, 75 bp, synthetic construct
  source 1..75: mol_type = other DNA
atgaatcaacaactttttgatgacagcacccttatccgcatttttgctttgcatgagttacacaatctcaaagat

SEQ ID NO: 83444 - DNA, 75 bp, synthetic construct
  source 1..75: mol_type = other DNA
taaattcattaaaatattgtagttttaaaaatgtagttttttcaggagtgataaacagccctaaccttgaaggtc

SEQ ID NO: 83445 - DNA, 75 bp, synthetic construct
  source 1..75: mol_type = other DNA
agcgagtacagcaatgaatgaagctggtttaaattcagatgtgattgaagcagcgcttgctcacattgagaagaa

SEQ ID NO: 83446 - DNA, 75 bp, synthetic construct
  source 1..75: mol_type = other DNA
actcctgaccatggtgcgcccttctgaggcctccggtgctcggtgggcagagttcgatctcgattcaaagttctg

SEQ ID NO: 83447 - DNA, 75 bp, synthetic construct
  source 1..75: mol_type = other DNA
atcattgatgtgttcgccggatacatcgtgggatggcaggtctcatcatccatggaaacaacattcgtgctggat

SEQ ID NO: 83448 - DNA, 75 bp, synthetic construct
  source 1..75: mol_type = other DNA
cctcttacccgccatccggcaaggagaaaggctatgaagcgcaaccctctggtggtgtgtctgctcattatctgc

SEQ ID NO: 83449 - DNA, 75 bp, synthetic construct
  source 1..75: mol_type = other DNA
agatcgatctcgcagcaaaggtctggacgattccacccgaacggatgaaggccaagcgtgagcacattgttcctc

SEQ ID NO: 83450 - DNA, 75 bp, synthetic construct
  source 1..75: mol_type = other DNA
aaaagattgatagcttcggtgactggtcaccacagactgaacatccagctatcgctattcagcgcaaagagcacg

SEQ ID NO: 83451 - DNA, 75 bp, synthetic construct
  source 1..75: mol_type = other DNA
tcagtcacaggtaaattctattgatgcgaaatatcaggaactgcgggcagaactccatgaagcccggaaaaacat

SEQ ID NO: 83452 - DNA, 75 bp, synthetic construct
  source 1..75: mol_type = other DNA
atgattaacctgtcacttaccgaccttaaccgcattcagtttcgtgagaaatttaccgggcagttgttggttaat

SEQ ID NO: 83453 - DNA, 75 bp, synthetic construct
  source 1..75: mol_type = other DNA
cgtcagtgcgctgatgaatgcgaaacccggacgcgacctttgctggctcctgacccgtcatccggaaaagccgga

SEQ ID NO: 83454 - DNA, 75 bp, synthetic construct
  source 1..75: mol_type = other DNA
ggtgcaagggctgagctggcactggaggagaaaccgggccatgcggtgatttttcaggaggtgggcagtgaatat

SEQ ID NO: 83455 - DNA, 75 bp, synthetic construct
  source 1..75: mol_type = other DNA
gggatccttctggtcccatgcagccgtggcggttccggctttacaaccggtgatgcggggcaattcagcgagatc

SEQ ID NO: 83456 - DNA, 75 bp, synthetic construct
  source 1..75: mol_type = other DNA
ttctggctcctgtttaaaggggaaatgttacgacgtacattagtcgcgattactgttttaattgcaatgaacatt

SEQ ID NO: 83457 - DNA, 75 bp, synthetic construct
  source 1..75: mol_type = other DNA
ccacagtgggttcgggcctgaagatgcagatcgtcgacaatcaggacatgacgatatcggtctgggtatttcccg

SEQ ID NO: 83458 - DNA, 75 bp, synthetic construct
  source 1..75: mol_type = other DNA
tccggcgggacggaaccgtccgcttttcctgataccctgccgggttacaccgaatatggccgggacaacggcatc

SEQ ID NO: 83459 - DNA, 75 bp, synthetic construct
  source 1..75: mol_type = other DNA
gaggctcaatatattgttgggttttattataatcgcgatagcgcaattgactctccggacgacgaaaaggccttt

SEQ ID NO: 83460 - DNA, 75 bp, synthetic construct
  source 1..75: mol_type = other DNA
aatattatctgaataaagaaggtgatacgtttcatctggtgaagcgagtaaaaactttttctaagtctgcgactt

SEQ ID NO: 83461 - DNA, 75 bp, synthetic construct
  source 1..75: mol_type = other DNA
gatggctggcgaataagcaaagacaaaacacgtgcttttgcgcccgggcataaagttttgaggattaacaaatga

SEQ ID NO: 83462 - DNA, 75 bp, synthetic construct
  source 1..75: mol_type = other DNA
gaccagagagatactggaaaataagctggcagacatattttttgagaaacatattgatagcaaaatagacataaa

SEQ ID NO: 83463 - DNA, 75 bp, synthetic construct
  source 1..75: mol_type = other DNA
ttgaaattaacaagcgagtatttaaagcgatagttggggcaaaaccattaggttatccgcacaacgcagatggac

SEQ ID NO: 83464 - DNA, 75 bp, synthetic construct
  source 1..75: mol_type = other DNA
cgcaaagcatgaataaacagattactatgacggtattcactggtaatcctagggttggccgtttcggattgcttt

SEQ ID NO: 83465 - DNA, 75 bp, synthetic construct
  source 1..75: mol_type = other DNA
tacggacatccccctttgcagtaaaagaaccctgttacagcaatgccgctgtggaaaagcttccattgcccacac

SEQ ID NO: 83466 - DNA, 75 bp, synthetic construct
  source 1..75: mol_type = other DNA
gtacgtgattacgggattacagaccacccgctccgaactggatcgctacgggaaggcaaaaaagattgagttctc

SEQ ID NO: 83467 - DNA, 75 bp, synthetic construct
  source 1..75: mol_type = other DNA
cccggacgtgatctctgctggctcctgacccgtcatccggaaaagccggaataccacgtggtgctgtgcgtcaga

SEQ ID NO: 83468 - DNA, 75 bp, synthetic construct
  source 1..75: mol_type = other DNA
gtgctttccggcgtgctttatcctgaaattacaggtggcgaagtgtcgctttcattgctgaccacgcaggcatat

SEQ ID NO: 83469 - DNA, 75 bp, synthetic construct
  source 1..75: mol_type = other DNA
aataacccagcagacgcatggccgattatcactgaaaacaacatcagcataattttagacaatccctcaatgccg

SEQ ID NO: 83470 - DNA, 75 bp, synthetic construct
  source 1..75: mol_type = other DNA
ctgacgtttcttcctgaagaaattcgccagaaaatccttgaacatctccacggtgttattcattacgagcccgtg

SEQ ID NO: 83471 - DNA, 75 bp, synthetic construct
  source 1..75: mol_type = other DNA
aaaacagactatcctaaggaatttattatcaataatagaattaaaaaaacaaaaagagtacaatcatgttgtttt

SEQ ID NO: 83472 - DNA, 75 bp, synthetic construct
  source 1..75: mol_type = other DNA
agccgtttttcgttaagcgtggaaggtgatgatcttttgttcacgctacaactggagacgccgcatgagggttaa

SEQ ID NO: 83473 - DNA, 75 bp, synthetic construct
  source 1..75: mol_type = other DNA
tggcgaaaagagaaactaggctggcagatgatgtaaagctattgcgccaggaggaacaggaaaggcggaaaaata

SEQ ID NO: 83474 - DNA, 75 bp, synthetic construct
  source 1..75: mol_type = other DNA
atgaacatgttctttgactggtggttcgccacatcaccccgcctccgccagttttgctgggcattctggttgctg

SEQ ID NO: 83475 - DNA, 75 bp, synthetic construct
  source 1..75: mol_type = other DNA
gcagacccaagacgtaactcaggaaaccatgttcctgttgggcacagaggctctgggcgcaatggttgccaacga

SEQ ID NO: 83476 - DNA, 75 bp, synthetic construct
  source 1..75: mol_type = other DNA
catcgacggaagatcagttcgctgaccgggcaaaagagatgctggagcagttcgttcagcagcggggacataaaa

SEQ ID NO: 83477 - DNA, 75 bp, synthetic construct
  source 1..75: mol_type = other DNA
tctttagcaccgaaacaggagaatcaaaagaaatcacagctccgggtgattaccctgataatacaaccactatcg

SEQ ID NO: 83478 - DNA, 75 bp, synthetic construct
  source 1..75: mol_type = other DNA
atgagcagaaagaacctgtggcggccattgcgccgtctttatccacttccactcagaccagagtcagtgccagtt

SEQ ID NO: 83479 - DNA, 75 bp, synthetic construct
  source 1..75: mol_type = other DNA
aaccccgcagaacattttcaaatgagtttaaacttcaaatggttaaactggcttcacaactaggagcctctgttg

SEQ ID NO: 83480 - DNA, 75 bp, synthetic construct
  source 1..75: mol_type = other DNA
ataactttgctgttgtttgtagcgtggcacttcgcggtcttttacgcccactgcctgtcaccaccgttgaatggg

SEQ ID NO: 83481 - DNA, 75 bp, synthetic construct
  source 1..75: mol_type = other DNA
tccccggagtttaaacagttctttagtcaatacagcattgctgtgggctcaaccggaaatctggggttatcaatc

SEQ ID NO: 83482 - DNA, 75 bp, synthetic construct
  source 1..75: mol_type = other DNA
ttaatagcagtaatggtccggaacaaattgatttacttgatttagtgctacagctgtggcgtggaaagtgggtaa

SEQ ID NO: 83483 - DNA, 75 bp, synthetic construct
  source 1..75: mol_type = other DNA
cgatcgtgatgctggtgggcgcggtttgcagacatttgacctacgtaccactattcatgtagttaccgggataga

SEQ ID NO: 83484 - DNA, 75 bp, synthetic construct
  source 1..75: mol_type = other DNA
accttattgccgtacaggcaggaaacatcgtcgtttataactatgatggtgaaacacgggaatatatttccgaat

SEQ ID NO: 83485 - DNA, 75 bp, synthetic construct
  source 1..75: mol_type = other DNA
ggagacgttaattggtcgcttcagttctgccttctctgcattagcagaaacgctggataatcaggaagaaccaga

SEQ ID NO: 83486 - DNA, 75 bp, synthetic construct
  source 1..75: mol_type = other DNA
tattaccgtctataactatgatggtgaaactcgggaatatatttccacttcaaatgaatatcttgccattggtgt

SEQ ID NO: 83487 - DNA, 75 bp, synthetic construct
  source 1..75: mol_type = other DNA
caactgaatatcttgccattggtgtcggtattcctgcatattcctgtttagatgcccctggcacacataaggcgg

SEQ ID NO: 83488 - DNA, 75 bp, synthetic construct
  source 1..75: mol_type = other DNA
gaaattcaggctgctcagggagacagggctgctgtatcgcagctgagaggctgggattatcgcgatcgccgtaaa

SEQ ID NO: 83489 - DNA, 75 bp, synthetic construct
  source 1..75: mol_type = other DNA
ggaacgtggatctgtgtttgtggtagcggtgacggcatgaaactgatcgctctgacacaaaaaagagcgtttcat

SEQ ID NO: 83490 - DNA, 75 bp, synthetic construct
  source 1..75: mol_type = other DNA
atcatcaagataattaaagatgatatatcagaatcaaagcacactaaaagtatatgcttgcttaacggaaatctt

SEQ ID NO: 83491 - DNA, 75 bp, synthetic construct
  source 1..75: mol_type = other DNA
tgttttgaaaaatattttagcagaaaaatatagtaatttttctgtcgtacaatttccagaactcaatcatcagga

SEQ ID NO: 83492 - DNA, 75 bp, synthetic construct
  source 1..75: mol_type = other DNA
gtaagagaatatcttttaaaattcggccgttataatcttattcaaagcgaaaagcgcggccagtggagcatgaag

SEQ ID NO: 83493 - DNA, 75 bp, synthetic construct
  source 1..75: mol_type = other DNA
gttccagggtgggcgggagatcgcccgtcaggccggcgtgatgggcgcgcaggacatcgtgcgctggacgtcgac

SEQ ID NO: 83494 - DNA, 75 bp, synthetic construct
  source 1..75: mol_type = other DNA
atgacagacattacagccaatgtgatcgtatcgatgccttcgcaactcttcactatggctcgttcttttaaagcc

SEQ ID NO: 83495 - DNA, 75 bp, synthetic construct
  source 1..75: mol_type = other DNA
tgtttttatcagcgatgctcatgacaggtcatttgttaaacaaagttgtcctccagcccgtttggctgtgtatct

SEQ ID NO: 83496 - DNA, 75 bp, synthetic construct
  source 1..75: mol_type = other DNA
aaaatcgctgtgcgagattcgttacagagacggacacagggaggtggcggctttcatggcttacgaatccggtaa

SEQ ID NO: 83497 - DNA, 75 bp, synthetic construct
  source 1..75: mol_type = other DNA
agcccttgaactgatgacgcaaatcgaatcgaccgtgaccagcctgcaccgtgaggctgaagcacagttccggcc

SEQ ID NO: 83498 - DNA, 75 bp, synthetic construct
  source 1..75: mol_type = other DNA
tttattgtaatgccgttaccacccgacgccattctgatcactaaagaatctcacatggattctgtcagccacttc

SEQ ID NO: 83499 - DNA, 75 bp, synthetic construct
  source 1..75: mol_type = other DNA
tgggcgttaaataacatcaactttaccatcaataaaggtgagtcagcgggaattattggacgcaatggttctggc

SEQ ID NO: 83500 - DNA, 75 bp, synthetic construct
  source 1..75: mol_type = other DNA
gagtggcagtatttacaggtaagggatggagccatgaagaggaccatcgcaatgagactgtttactcaaccgaaa

SEQ ID NO: 83501 - DNA, 75 bp, synthetic construct
  source 1..75: mol_type = other DNA
gccactggcctgaaattttaaaacattacggactgccgccagtcacgggtaaaaagcacttcaaaggggaatgtc

SEQ ID NO: 83502 - DNA, 75 bp, synthetic construct
  source 1..75: mol_type = other DNA
agaacttcctgcccggaaaaccagcttcatgagagggctgatatacggtgcaggattagtgctggcacttctgac

SEQ ID NO: 83503 - DNA, 75 bp, synthetic construct
  source 1..75: mol_type = other DNA
ttttctgaccagagtcatttttcaacggtatttaagcaacgctttgggatgacgccaggcgagtatcgacgtaaa

SEQ ID NO: 83504 - DNA, 75 bp, synthetic construct
  source 1..75: mol_type = other DNA
ttaccgataccgaacgcaaggtgaaaatggcgattgttgattggcgcgtgacgccacaaatctccattaatgacc

SEQ ID NO: 83505 - DNA, 75 bp, synthetic construct
  source 1..75: mol_type = other DNA
gaggggacacctaattatttctcgcagcgcattttacactggcgtgatgaagccgcgttttttcacgttaatgtc

SEQ ID NO: 83506 - DNA, 75 bp, synthetic construct
  source 1..75: mol_type = other DNA
cgctggcgtggtttatgggcatgttgccagaaagcaacgaaccgatgacgcaagaactgattatggtgccaacgc

SEQ ID NO: 83507 - DNA, 75 bp, synthetic construct
  source 1..75: mol_type = other DNA
acgataagggaaggaaaaagcgtaatcgtcttcccattcaggtggtgaaaattccgatggcggtcccactgaaac

SEQ ID NO: 83508 - DNA, 75 bp, synthetic construct
  source 1..75: mol_type = other DNA
ttattcagcgattaaaaaatggtcgctggcatgtcatgcagcgtgtggccgggaaaaaccgttaccccattgatg

SEQ ID NO: 83509 - DNA, 75 bp, synthetic construct
  source 1..75: mol_type = other DNA
agatgagtcctcgcagttcgatgacgaaatcgttgacaatatcttcggtgcactcaccagagactttctgaaata

SEQ ID NO: 83510 - DNA, 75 bp, synthetic construct
  source 1..75: mol_type = other DNA
agttcgggcaggatttcacattatacgaagcacttcgcacggttgatcgtctgcttcgcgggcaaagttttatta

SEQ ID NO: 83511 - DNA, 75 bp, synthetic construct
  source 1..75: mol_type = other DNA
ttttgcctgatttaagccgccgtgggtatttgtccaagaatgcttcaagctccaatcgttttggcctggtgaatg

SEQ ID NO: 83512 - DNA, 75 bp, synthetic construct
  source 1..75: mol_type = other DNA
ccttttgaccttgatgtactgctggatgtggatgccattattgtcacccacacacaccctgaccactgggatgaa

SEQ ID NO: 83513 - DNA, 75 bp, synthetic construct
  source 1..75: mol_type = other DNA
gcggtggtggtgacaccgtgaagtacacgaccagaaacagcctttaccgtgtctatatggccttcatggcataca

SEQ ID NO: 83514 - DNA, 75 bp, synthetic construct
  source 1..75: mol_type = other DNA
tcaaggaatacgccagagataatcaaattatcgaatttgtgaacgtaccagaagatggtgaaacgttgacattct

SEQ ID NO: 83515 - DNA, 75 bp, synthetic construct
  source 1..75: mol_type = other DNA
gactgccgggtgtgcaggctgatatggaaattgtgcccggtgagcagccaggggaaagtgacattcttattaccc

SEQ ID NO: 83516 - DNA, 75 bp, synthetic construct
  source 1..75: mol_type = other DNA
cttatgctccctttcggtttttgacgctttccgcttattgcagaatctgttgaatgtaccgaaggaagaacgaga

SEQ ID NO: 83517 - DNA, 75 bp, synthetic construct
  source 1..75: mol_type = other DNA
ctgatgacagctcttgatagtatggaaaaagctgttgatgattcaatgggaacattaccagaaaagatttccgag

SEQ ID NO: 83518 - DNA, 75 bp, synthetic construct
  source 1..75: mol_type = other DNA
cacgttgtacgaagcactacgcactgttgatcgtctactgcgcggacagaatttcattaaacaggctgatttata

SEQ ID NO: 83519 - DNA, 75 bp, synthetic construct
  source 1..75: mol_type = other DNA
tttgctctaagcagtggcgacaatcagttcgggcaggatttcacattatacgaagcacttcgcacggttgatcgt

SEQ ID NO: 83520 - DNA, 75 bp, synthetic construct
  source 1..75: mol_type = other DNA
taataatgacaatcgtaaatattatatttttctattcctttcaatcgactgcggatgaaatggttttaataaaaa

SEQ ID NO: 83521 - DNA, 75 bp, synthetic construct
  source 1..75: mol_type = other DNA
ttccggtatcagcgccagctgagcaataccccgctgaccccacaggaacagtttgccatcggtaaccgctggacg

SEQ ID NO: 83522 - DNA, 75 bp, synthetic construct
  source 1..75: mol_type = other DNA
atgagacaacaacgtaattcacgctttcgcaatggcgcagaacgccatgctaaccgtttcgctaccagcgcatca

SEQ ID NO: 83523 - DNA, 75 bp, synthetic construct
  source 1..75: mol_type = other DNA
gatttaggtattatgcagataaatacccatgcatggttaaaacttatcagtaagagtttttttaacggagatgag

SEQ ID NO: 83524 - DNA, 75 bp, synthetic construct
  source 1..75: mol_type = other DNA
ccagcgcccttcttgcctcgtcgttgttattaaccatcggacgcggcgctacgctgccatttatgaccatttact

SEQ ID NO: 83525 - DNA, 75 bp, synthetic construct
  source 1..75: mol_type = other DNA
caggttcgcgccaaagtgaccgccgcccgtgctgacacgcgtccgggtatgaccacggaacaactccgccagcgc

SEQ ID NO: 83526 - DNA, 75 bp, synthetic construct
  source 1..75: mol_type = other DNA
gataacattgccgattcgccgctggcggacaaaatcgccgccgctaaccagcaggcgctggagcgtattatccag

SEQ ID NO: 83527 - DNA, 75 bp, synthetic construct
  source 1..75: mol_type = other DNA
agaacgttattgcgcgtgcaaactatgtttaccgtgaagcgcatgatcaaatcagcaaaagcagtcgtaccgaca

SEQ ID NO: 83528 - DNA, 75 bp, synthetic construct
  source 1..75: mol_type = other DNA
ccaggaaggcattaatgcggtcatgctcgactttactcatgtcatgatcgatatgatgcaggcgaatacgccttt

SEQ ID NO: 83529 - DNA, 75 bp, synthetic construct
  source 1..75: mol_type = other DNA
gcaaatagtactggcgtagcagaagatgaacactatgatctctcaaatatctttaatagcaccaataaccagcca

SEQ ID NO: 83530 - DNA, 75 bp, synthetic construct
  source 1..75: mol_type = other DNA
aggtgtaaaagttagcggtgacaaaaatgttgtgattaatgctacaggctccaccatcacagctcaaggtgaagg

SEQ ID NO: 83531 - DNA, 75 bp, synthetic construct
  source 1..75: mol_type = other DNA
cgcacattaatggaccgctttaatgaatcactctggtctggtgatttagtcgggtcagaagaaccggatgaacaa

SEQ ID NO: 83532 - DNA, 75 bp, synthetic construct
  source 1..75: mol_type = other DNA
attgcggtcttccaggccttttcacgggtgattcgtgaagcgggtaagcgcttcgtggtcatggatacggcaccc

SEQ ID NO: 83533 - DNA, 75 bp, synthetic construct
  source 1..75: mol_type = other DNA
cgaaaaaggggatagtacagctcagcagtgcgaccaacagcacttccgagtcactggcggcaacgccaaaagccg

SEQ ID NO: 83534 - DNA, 75 bp, synthetic construct
  source 1..75: mol_type = other DNA
caagcctgccgcctggcaaaataacctgccactgacgccagcagataaagtctccggttataacaacttctatga

SEQ ID NO: 83535 - DNA, 75 bp, synthetic construct
  source 1..75: mol_type = other DNA
gacagatgacggcacaacacctgcgagagctggagcggaaccgtcgccatgcaactttggtcgcagtgctccttg

SEQ ID NO: 83536 - DNA, 75 bp, synthetic construct
  source 1..75: mol_type = other DNA
gtggaaatatggctttaaagggattaaatcgatagtcagtattaagctgacccgcgagcgtccgccaaccacctg

SEQ ID NO: 83537 - DNA, 75 bp, synthetic construct
  source 1..75: mol_type = other DNA
atcgaggccgtcatgtcctgggattcctttgccgagagcgtcaccgaggcgcagaagctcgcgcaacccgatgac

SEQ ID NO: 83538 - DNA, 75 bp, synthetic construct
  source 1..75: mol_type = other DNA
gagctggaaaaactcccgaagaacctgcgccactgtctgggggaagactttgcgcgttcgggtgacctgaccgta

SEQ ID NO: 83539 - DNA, 75 bp, synthetic construct
  source 1..75: mol_type = other DNA
tgacctacgccaggctgacgtggttgcaggcatggtacatccgcgacgaaacctattcggcggctcttgcggatt

SEQ ID NO: 83540 - DNA, 75 bp, synthetic construct
  source 1..75: mol_type = other DNA
gcggtactaaacttgctgccgcgctgattggtgctgacaggcagatccgcgatcgccgtgaactccccacgcctg

SEQ ID NO: 83541 - DNA, 75 bp, synthetic construct
  source 1..75: mol_type = other DNA
tgggctggctgcctaccgtgggagcagacagttggcagcactacattttaccctccctgacgctcggcgcggcag

SEQ ID NO: 83542 - DNA, 75 bp, synthetic construct
  source 1..75: mol_type = other DNA
acgacagccagcaccgcctggtgttctacacgcggatacagcatggcgagccactggtcgagagccgctacctct

SEQ ID NO: 83543 - DNA, 75 bp, synthetic construct
  source 1..75: mol_type = other DNA
gacggtggagaacccggagacgggggaactgctgtggcagcatgagacgaaacacgcctacaacgaacaggggct

SEQ ID NO: 83544 - DNA, 75 bp, synthetic construct
  source 1..75: mol_type = other DNA
agcgaagattatatgcgtaccgcgagggcgaaaggggtgagcgaaacctgggttgtcctcaaacacgggctacgt

SEQ ID NO: 83545 - DNA, 75 bp, synthetic construct
  source 1..75: mol_type = other DNA
ccaagatcgtaaaaatatgggggaacagtttattaccggttctcaataatggagatcttgttgccgttgatattt

SEQ ID NO: 83546 - DNA, 75 bp, synthetic construct
  source 1..75: mol_type = other DNA
tttgtttactgtatctctttaatgattgtttctctgtggtggttttttattgtttttatttatataagtgaactt

SEQ ID NO: 83547 - DNA, 75 bp, synthetic construct
  source 1..75: mol_type = other DNA
gtggagtggctgacctacggcagcggttacctggcgggcatgaagctgggcgggacgccgctggtcgagtatacg

SEQ ID NO: 83548 - DNA, 75 bp, synthetic construct
  source 1..75: mol_type = other DNA
tctctggaatttaaagacatcatctactaacgcacaattgctacaggtcggtgtattaggcacgggtgaactgaa

SEQ ID NO: 83549 - DNA, 75 bp, synthetic construct
  source 1..75: mol_type = other DNA
gagtcctttgagatcccctggaatccgaacacccgtaccgaggtgagcaccctctgcatcagccagttccgctac

SEQ ID NO: 83550 - DNA, 75 bp, synthetic construct
  source 1..75: mol_type = other DNA
cagaaaggcaagttctggagggaagttcatttgttttatgttgcggtgaaaaaataaacagcactataagtgaat

SEQ ID NO: 83551 - DNA, 75 bp, synthetic construct
  source 1..75: mol_type = other DNA
gaaattcagtagattgacgctgggtgttttgctggcactaagcggttcagcgtctggtgcgagtctggaagttga

SEQ ID NO: 83552 - DNA, 75 bp, synthetic construct
  source 1..75: mol_type = other DNA
gaaattgcaggacagcttttatatcaacgtttcctgggatgcgctgaacacggcatacagtgaacacccggagtg

SEQ ID NO: 83553 - DNA, 75 bp, synthetic construct
  source 1..75: mol_type = other DNA
cagaaggctgcaacatgatattgcgcgggaacatggctttgacatgagagacggagtgagcagacagaaccgaac

SEQ ID NO: 83554 - DNA, 75 bp, synthetic construct
  source 1..75: mol_type = other DNA
ggaattgcactctacaggtatttcaggcctgctcggaattaactcgcagggtaggtaaaacatcaacggttaatt

SEQ ID NO: 83555 - DNA, 75 bp, synthetic construct
  source 1..75: mol_type = other DNA
ctggcgatgaactttggcatccggggcctgaacccgcgcctcgccagccgctcgaccgtcctgatggacggcatc

SEQ ID NO: 83556 - DNA, 75 bp, synthetic construct
  source 1..75: mol_type = other DNA
tggagtgcaactgaaattaaaggcgttgacgttaatggcacttcaacaagtgaggtttatcgatatgattttaaa

SEQ ID NO: 83557 - DNA, 75 bp, synthetic construct
  source 1..75: mol_type = other DNA
tccgtgccggagagacaaaaactggcccaacagagtgccggtaaggtgctgacattgctggatctctctgaagtc

SEQ ID NO: 83558 - DNA, 75 bp, synthetic construct
  source 1..75: mol_type = other DNA
gtttcgccttttgcggtagtgaagcggacagcgatccccatggcagtcggtttcgtggtgaatatgattgccact

SEQ ID NO: 83559 - DNA, 75 bp, synthetic construct
  source 1..75: mol_type = other DNA
caatagccaccttaataatttcactcaacgcaaacgcgaatgatattaaaacccttcaaaagcagcttaaaccat

SEQ ID NO: 83560 - DNA, 75 bp, synthetic construct
  source 1..75: mol_type = other DNA
ctaacgacagtacaacgacaatcgcaacaaatgatatggtgcaagagcatgttactaacttcactaaagaactgt

SEQ ID NO: 83561 - DNA, 75 bp, synthetic construct
  source 1..75: mol_type = other DNA
aatggcgaagccctgctggcactactggataacgccctgcctgcgggtgtggaaaatgaacaatcaccaaactgc

SEQ ID NO: 83562 - DNA, 75 bp, synthetic construct
  source 1..75: mol_type = other DNA
tcgaagaacaggccattcacattgtccgccgtgatgtaacacccggctttattgccacagagctgattatctggc

SEQ ID NO: 83563 - DNA, 75 bp, synthetic construct
  source 1..75: mol_type = other DNA
tgaagtttgatgatgcgacagggagagaacaggtctacatccacgcgcagaagaacatggataccgaagtgctca

SEQ ID NO: 83564 - DNA, 75 bp, synthetic construct
  source 1..75: mol_type = other DNA
atgcaaacacaaaaaccgactctcgaactgctaacctgcgtaggcgcttatcgcgacaacccaaccgcgcttttt

SEQ ID NO: 83565 - DNA, 75 bp, synthetic construct
  source 1..75: mol_type = other DNA
ataagtttaaaaataacgtgctggcgctgggtgacctggctaagtatttcaacttacctactattcttaccacca

SEQ ID NO: 83566 - DNA, 75 bp, synthetic construct
  source 1..75: mol_type = other DNA
tcagcaggtcgagtcgttctggcgctcactgaaaaccatggtggatcgcgttgatttccgtgaaaacatcaaggt

SEQ ID NO: 83567 - DNA, 75 bp, synthetic construct
  source 1..75: mol_type = other DNA
tcgtccgaacagcatacttaaagccggtcagcatcgttatcagcgggcattcatccagcgattaaataatgggcg

SEQ ID NO: 83568 - DNA, 75 bp, synthetic construct
  source 1..75: mol_type = other DNA
aaaacgaattacgcgagtttaagaacagacccgaaacaatcgggttagttggtaaaaatgcccgctccctcatcc

SEQ ID NO: 83569 - DNA, 75 bp, synthetic construct
  source 1..75: mol_type = other DNA
gtagtgaactcgatgatttgagaacctctcaaagaggtttgcaaatttcccccaaaactcgctccctcatcctct

SEQ ID NO: 83570 - DNA, 75 bp, synthetic construct
  source 1..75: mol_type = other DNA
gcattgccagcagaccatccgcgttcgtgacaatattccgctgctctcctggctgatgctcaaagggcgctgccg

SEQ ID NO: 83571 - DNA, 75 bp, synthetic construct
  source 1..75: mol_type = other DNA
tggagcactgccaacaaccggaggaacagtttcaggtccgttgtctgttacaggtggattaactggttcattgaa

SEQ ID NO: 83572 - DNA, 75 bp, synthetic construct
  source 1..75: mol_type = other DNA
gatttaccgtggaaccctcggtgcagcagcgttttgaaaacgcagtaaaggagagcactgaatttacaaaaaaat

SEQ ID NO: 83573 - DNA, 75 bp, synthetic construct
  source 1..75: mol_type = other DNA
ttatcaggtgataccagagggcattaaactgtcgtcacggataagaatatacaacatttctgataacaaaacatc

SEQ ID NO: 83574 - DNA, 75 bp, synthetic construct
  source 1..75: mol_type = other DNA
agtacctcacactacgacaaaaatgtttttattgttgcaacttgcgtaattattcaggtcagtttggaacgcact

SEQ ID NO: 83575 - DNA, 75 bp, synthetic construct
  source 1..75: mol_type = other DNA
accgcgatgacgtataccaaaagcaaaacgtttaaaaccgaatctggcgcgcgtcgctggttagcaagaaactct

SEQ ID NO: 83576 - DNA, 75 bp, synthetic construct
  source 1..75: mol_type = other DNA
aaagtgactcgtgcgtttcaggccgcagcagtgccagatgaaatggttgcagttttccctgtgataaatgatatt

SEQ ID NO: 83577 - DNA, 75 bp, synthetic construct
  source 1..75: mol_type = other DNA
ttcaccgcgatgacgtataccaaaagcaaaacgtttaaaactgaagctggcgcgcgtcgctggttagccagaaac

SEQ ID NO: 83578 - DNA, 75 bp, synthetic construct
  source 1..75: mol_type = other DNA
aagaagcctcagttgctggcaaggctggacaggctggagcagcaggggcagattgcgttacccggatttgataaa

SEQ ID NO: 83579 - DNA, 75 bp, synthetic construct
  source 1..75: mol_type = other DNA
cagggcgtggatgatgcacggagcatagcccgtaaacaggtgatgtccttatcatggttcctggggggacggcag

SEQ ID NO: 83580 - DNA, 75 bp, synthetic construct
  source 1..75: mol_type = other DNA
agattcgtgagcagcttgctgcgtatgagagcagtctggcggacagtaatgccagtgcccgggcatctgacgaag

SEQ ID NO: 83581 - DNA, 75 bp, synthetic construct
  source 1..75: mol_type = other DNA
atgcagcaggtttttgttccgctcccccggcgttaaggggaaatgaggtcaacatggatactatcgatcttggca

SEQ ID NO: 83582 - DNA, 75 bp, synthetic construct
  source 1..75: mol_type = other DNA
gcgtccgattacgcctcacaggcagcacagcttgcgacggagggtatctcagggatggtgaataacatcacggag

SEQ ID NO: 83583 - DNA, 75 bp, synthetic construct
  source 1..75: mol_type = other DNA
tacctgtcgccgctggggtgggagcacatcaacctgaccggcgattatgtctggcggcagagccgcaggctggag

SEQ ID NO: 83584 - DNA, 75 bp, synthetic construct
  source 1..75: mol_type = other DNA
acatatttcaaagggatgaaagaacttgctgacaagaaatttattgctgagaccatgatacagaactattatttt

SEQ ID NO: 83585 - DNA, 75 bp, synthetic construct
  source 1..75: mol_type = other DNA
gaacgggcagcctatgaattatttatggagaagcgtttcggggaatctgtagatcgccgcagagcaaaaaatggc

SEQ ID NO: 83586 - DNA, 75 bp, synthetic construct
  source 1..75: mol_type = other DNA
ctacccgacattgcgcccaatggttggcggcaccctgaacatcaagcatgtccgcgcccactgggacgacatcct

SEQ ID NO: 83587 - DNA, 75 bp, synthetic construct
  source 1..75: mol_type = other DNA
gctaccgccagaaggatgcggacctgcagtctcagtatcagacaggggatatcagtgaggatttttacagacagg

SEQ ID NO: 83588 - DNA, 75 bp, synthetic construct
  source 1..75: mol_type = other DNA
tgtttatgagttctcccgcatatctaatgaggtgcagttagaaatcgatgaggctataaaaaacattctaagaaa

SEQ ID NO: 83589 - DNA, 75 bp, synthetic construct
  source 1..75: mol_type = other DNA
acccagttcagtcaggcgctggcgcagggtgtattgcgtggtgaggagtttaattcggtcaatgaaagtggtgac

SEQ ID NO: 83590 - DNA, 75 bp, synthetic construct
  source 1..75: mol_type = other DNA
tattcggcggccttggccgagctggtcaaccaccagtatcgccacgcctttgccgcccactggggcgacggcacg

SEQ ID NO: 83591 - DNA, 75 bp, synthetic construct
  source 1..75: mol_type = other DNA
ttgatgaacaggccagccgggtgaaatccctgcaggaaaaaatcgctggatatcagtatgttctggctaaccctg

SEQ ID NO: 83592 - DNA, 75 bp, synthetic construct
  source 1..75: mol_type = other DNA
ctggtctggatgatattgccagagatctggaacttctcagcagagcggaaagcaataaagtactgcgtgatgcca

SEQ ID NO: 83593 - DNA, 75 bp, synthetic construct
  source 1..75: mol_type = other DNA
gagcgaaccgggaaactgaagaaaaatgtggttgttctgacgaagcgttcaaagcgtcgcggggaaattatttct

SEQ ID NO: 83594 - DNA, 75 bp, synthetic construct
  source 1..75: mol_type = other DNA
atgtctgaattaactctgtcccctgaattattacaaatatccgctgaagtacaggatgctttaaaaaataaaaaa

SEQ ID NO: 83595 - DNA, 75 bp, synthetic construct
  source 1..75: mol_type = other DNA
gcgctgaagagaaagcggctattcgttacctgagcttcctgacgctaaaaccaacaatgtacatcgccaacgtca

SEQ ID NO: 83596 - DNA, 75 bp, synthetic construct
  source 1..75: mol_type = other DNA
aaagaagcaggcgtttccagagagcagaaagtaaagctgataaattttaattgcgagaaacttctgtcctcgtga

SEQ ID NO: 83597 - DNA, 75 bp, synthetic construct
  source 1..75: mol_type = other DNA
atgatgaacggacaaactgacaacgtaaaaatatttatgcaagaaatccagtcactggtatacaatcatatcatt

SEQ ID NO: 83598 - DNA, 75 bp, synthetic construct
  source 1..75: mol_type = other DNA
ctttataccagtaatcaattttcatgttcttaagcggatttattggtggttgcgacattgcttaatgaatcctta

SEQ ID NO: 83599 - DNA, 75 bp, synthetic construct
  source 1..75: mol_type = other DNA
ctccacgctaatgacgatggcgcaaggggcgtggcgcaaaaacggcgcaacccgcgtgctggcagccattgacgc

SEQ ID NO: 83600 - DNA, 75 bp, synthetic construct
  source 1..75: mol_type = other DNA
gatatcctcggtcctcatctccccgcgtccgatgccgggttccaggcgctgattagccggctttactggtgggca

SEQ ID NO: 83601 - DNA, 75 bp, synthetic construct
  source 1..75: mol_type = other DNA
gatgacatcctttcacagtttgcagaacagattagtggcgctgttggtatcccactggtgcggctgtttggacag

SEQ ID NO: 83602 - DNA, 75 bp, synthetic construct
  source 1..75: mol_type = other DNA
caatgtattaaatcaactacacatagattttagagcacaaagtggcgcaatggctaatggttctcgacaaatatt

SEQ ID NO: 83603 - DNA, 75 bp, synthetic construct
  source 1..75: mol_type = other DNA
tatccccgctggcgcggggaacacccgaacggctcggcgctctcatacccccaaatcggtttatccccgctggcg

SEQ ID NO: 83604 - DNA, 75 bp, synthetic construct
  source 1..75: mol_type = other DNA
acaacgagtctctggtatacggcgtgtttccaaaccaagacggcacgttcacggcgatgacgtataccaaaagca

SEQ ID NO: 83605 - DNA, 75 bp, synthetic construct
  source 1..75: mol_type = other DNA
tcgcgctgctggcggtggtgatgacgctcatgatggcgccgggtcatctgctgctgcagattctccagtgtctgg

SEQ ID NO: 83606 - DNA, 75 bp, synthetic construct
  source 1..75: mol_type = other DNA
aaagaagataaacccttctctggtgaaagttatgtacgtctgcaggttgaaatttttctttcatcacttgagctt

SEQ ID NO: 83607 - DNA, 75 bp, synthetic construct
  source 1..75: mol_type = other DNA
ttcaccgcgatgacgtataccagaagcaaaacgtttaaaactgaagctggcgcgcgtcgctggttaaccagaaac

SEQ ID NO: 83608 - DNA, 75 bp, synthetic construct
  source 1..75: mol_type = other DNA
ttcagcggtggtgctggttggttcaaattagcaacggtaaccatgccgcaggcgagttctgttgtttcaattacg

SEQ ID NO: 83609 - DNA, 75 bp, synthetic construct
  source 1..75: mol_type = other DNA
ttagccaatattattttcgtcgacttccagcaacaaggtgaaagaggactgacgaacgcgcctgatgaagacccg

SEQ ID NO: 83610 - DNA, 75 bp, synthetic construct
  source 1..75: mol_type = other DNA
aagccgttcgcttttgctgaactgctggcgcgggtgcgcactctcctgcggcgcggggcggcggtgattatcgaa

SEQ ID NO: 83611 - DNA, 75 bp, synthetic construct
  source 1..75: mol_type = other DNA
cagccggatacagtcaccgctgaaaattacgcgcgtgtggtggctgaggtgatgcgccgtgacggtattgagctt

SEQ ID NO: 83612 - DNA, 75 bp, synthetic construct
  source 1..75: mol_type = other DNA
cgcaatgctgccctgattgaccagcaaaaaatccgggaacagttgcagtcccgggaggagacactgaagaatgag

SEQ ID NO: 83613 - DNA, 75 bp, synthetic construct
  source 1..75: mol_type = other DNA
ggatcgatttacgggctgaaggcagtaaaactcacagagaatggcgtattccggttgcgcgccagttacagccac

SEQ ID NO: 83614 - DNA, 75 bp, synthetic construct
  source 1..75: mol_type = other DNA
gtaattaccgggcttggtattgtcggtgaagtcgatggtgatgaccccgcagtattcagaccaatacaaaaatac

SEQ ID NO: 83615 - DNA, 75 bp, synthetic construct
  source 1..75: mol_type = other DNA
cttaaagttacaagccaatccagccttaagaattaaaaacaaacgtcaagttatcacctcacgcaaaccaaaaac

SEQ ID NO: 83616 - DNA, 75 bp, synthetic construct
  source 1..75: mol_type = other DNA
aaagctataagccagaactggctgaaggctccggacgtgcgcagacctgccgcatggttattattctcagcaacg

SEQ ID NO: 83617 - DNA, 75 bp, synthetic construct
  source 1..75: mol_type = other DNA
gaacccgtaccgccgtaaattcagtatccttgtgcgtatcctcgctgacgggcgcaccacagacatcccgctggg

SEQ ID NO: 83618 - DNA, 75 bp, synthetic construct
  source 1..75: mol_type = other DNA
gcagaacctgaaggactatccggatgtcgccgagaagatgctgaatatggccgagtggtgggtgtgtctgaccat

SEQ ID NO: 83619 - DNA, 75 bp, synthetic construct
  source 1..75: mol_type = other DNA
tatcggcccaataaccattgctggcatcgttctgctgatcattgtggccaaatttactggcaatcttaaactggg

SEQ ID NO: 83620 - DNA, 75 bp, synthetic construct
  source 1..75: mol_type = other DNA
taatccgccgcgttgccggaatcagccagcaggttgacgaacaggccacgcagccggacagcgtgaccgctgaaa

SEQ ID NO: 83621 - DNA, 75 bp, synthetic construct
  source 1..75: mol_type = other DNA
ctgaaggtgacggaggccatttccacggggctgaaaatctccggtgccagtacggctgaggcgggttcggtgatc

SEQ ID NO: 83622 - DNA, 75 bp, synthetic construct
  source 1..75: mol_type = other DNA
aaaaaatccgggaacagttgcgatcccgggaagagaccctgaagaatgataatgtggctgcgcgtgcatcaaatg

SEQ ID NO: 83623 - DNA, 75 bp, synthetic construct
  source 1..75: mol_type = other DNA
ctggggctggcgccggagcaggtgggcgcaatgcgcctgggcgataacaaaagtgcgctgctgggctggaccagc

SEQ ID NO: 83624 - DNA, 75 bp, synthetic construct
  source 1..75: mol_type = other DNA
cagactggtcagcggaacagaaatccagacgaaatattgttcaactgcagcccgtagcgtcggtgcggcattcga

SEQ ID NO: 83625 - DNA, 75 bp, synthetic construct
  source 1..75: mol_type = other DNA
gtgacagcacggccaccgcctaccggaaggcacatcatcaccttctgagtctgtatgcagagcatgagctggaac

SEQ ID NO: 83626 - DNA, 75 bp, synthetic construct
  source 1..75: mol_type = other DNA
tgacctgggatgaactgcttgatgagtattttttctcgagaaacctgcgtccggatacggaatggagttaccgca

SEQ ID NO: 83627 - DNA, 75 bp, synthetic construct
  source 1..75: mol_type = other DNA
cgagctgctggcccggccggagggcttcgaccatctgcacctggttggcgagaacttcgccaccctgcgccgcta

SEQ ID NO: 83628 - DNA, 75 bp, synthetic construct
  source 1..75: mol_type = other DNA
gtcggcgtgcgcgattccacctatgtgcttgacggcttgctgtaccacgagtccgacctacggattgaggagcac

SEQ ID NO: 83629 - DNA, 75 bp, synthetic construct
  source 1..75: mol_type = other DNA
gtaagaactacctgcaaaatcaggaaggttttgttcatatttgccggctggatacggcgggcgcacgagtactgg

SEQ ID NO: 83630 - DNA, 75 bp, synthetic construct
  source 1..75: mol_type = other DNA
gcttcagtcgtctggaaaatgaaattgctgaactgaataaaaaactgtcggcgctgatgccttctgaagatgaaa

SEQ ID NO: 83631 - DNA, 75 bp, synthetic construct
  source 1..75: mol_type = other DNA
acaaattactgaatttaccattaagcatcctggtaaaaagcaagtctattccggcagatcctgccccggaactgg

SEQ ID NO: 83632 - DNA, 75 bp, synthetic construct
  source 1..75: mol_type = other DNA
gtcaaggatggcttggtgatgatatcagcatccctgaatgcgatgtaatcaatcggatgcttctacctgaaccgc

SEQ ID NO: 83633 - DNA, 75 bp, synthetic construct
  source 1..75: mol_type = other DNA
gagaacacagcaaacgttactttcttaaaggacgagtaaggagacgaccggaattactggaggagagtgattaca

SEQ ID NO: 83634 - DNA, 75 bp, synthetic construct
  source 1..75: mol_type = other DNA
tacagtttgccgacaaccgccagtatgttgttggcgcgacgctaccggtgctgttaaaagaaggtcagtacgacg

SEQ ID NO: 83635 - DNA, 75 bp, synthetic construct
  source 1..75: mol_type = other DNA
acgtgttgcaggtaatgccggcagtacgggaggatttgtctattctccggtgtacaatatcgccatacagaacga

SEQ ID NO: 83636 - DNA, 75 bp, synthetic construct
  source 1..75: mol_type = other DNA
atgctggtggagtggggaccggttatcccggaagggaaggtcgagatcactatcagtaagtatgagaaaccggcg

SEQ ID NO: 83637 - DNA, 75 bp, synthetic construct
  source 1..75: mol_type = other DNA
cgctgatttatctcggttcggcggcgctgattgtacccattgcggtacgcctcggtctgggatcggtacttggct

SEQ ID NO: 83638 - DNA, 75 bp, synthetic construct
  source 1..75: mol_type = other DNA
agtacatattcactaatcgacaatgtgatgtgtacagtgagatcatgcagaatgattattttagtttttctggcc

SEQ ID NO: 83639 - DNA, 75 bp, synthetic construct
  source 1..75: mol_type = other DNA
cactcttaccgttactgtttacccctgtgacaaaagcccggacaccagaaatgcctgttctggaaaaccgggctg

SEQ ID NO: 83640 - DNA, 75 bp, synthetic construct
  source 1..75: mol_type = other DNA
gccgcaccttggcggtaaactggtctatgaacagtattatggcgatgaagtggccctgttcgataaagacgatcg

SEQ ID NO: 83641 - DNA, 75 bp, synthetic construct
  source 1..75: mol_type = other DNA
aaggtatcaatctgcagatactggataaccagggttatccggcccgtgtcggtaaagtgatgccaccgttattac

SEQ ID NO: 83642 - DNA, 75 bp, synthetic construct
  source 1..75: mol_type = other DNA
ccagcgcacagggcaagcccccgctggatattcacgttctgccgcgtgataagcactggcaaaagctgctgatgg

SEQ ID NO: 83643 - DNA, 75 bp, synthetic construct
  source 1..75: mol_type = other DNA
ctggatgtcccggcacaagttagtgaaaataatttaaccccgccaccgggtaatagcagcggcaaccttgagcaa

SEQ ID NO: 83644 - DNA, 75 bp, synthetic construct
  source 1..75: mol_type = other DNA
ttattgttgcgttagccgtaatctggggtggtggcacatggtacacaggtacgcaaattcagcctggtgtcgaaa

SEQ ID NO: 83645 - DNA, 75 bp, synthetic construct
  source 1..75: mol_type = other DNA
acgataaatgggatggtgagaaatgggtgacagatactgaggcacagcatagtgccgcagtagacgcagcagaag

SEQ ID NO: 83646 - DNA, 75 bp, synthetic construct
  source 1..75: mol_type = other DNA
tccttgagcgcattttttggtggcttagagaatcggccgaactgcatctacatcgagaagatcagccacttgagc

SEQ ID NO: 83647 - DNA, 75 bp, synthetic construct
  source 1..75: mol_type = other DNA
ctctcgtccccaaaatggatatagaagtcgcaggcaatcctgatataaaaccggggatggtaatagagattatcg

SEQ ID NO: 83648 - DNA, 75 bp, synthetic construct
  source 1..75: mol_type = other DNA
ggtgaaacacgggaatatatttccacatcaactgaatatcttgctgtgggtgtcggtatcccggcatgttcctgt

SEQ ID NO: 83649 - DNA, 75 bp, synthetic construct
  source 1..75: mol_type = other DNA
ggggagcctggaccgcagggcttacaggggctgaaaggtgataccggagcgcgaggcgctcagggcgtaccgggg

SEQ ID NO: 83650 - DNA, 75 bp, synthetic construct
  source 1..75: mol_type = other DNA
tctgagccgattgttaagctgctgcaggaaaatgcgtatcgggaggttatctggcgtcagcgggtgaatgagtcg

SEQ ID NO: 83651 - DNA, 75 bp, synthetic construct
  source 1..75: mol_type = other DNA
gttatacaatttgccgttctgtggatttaaaatcatgggaatatgtgtcagaccatcgtggtgaaattgtctata

SEQ ID NO: 83652 - DNA, 75 bp, synthetic construct
  source 1..75: mol_type = other DNA
gggtaaggccggagtacaaccctacgaccggcaccagaacgtaatttgccgggaatgtcgtaacagcgaatcaat

SEQ ID NO: 83653 - DNA, 75 bp, synthetic construct
  source 1..75: mol_type = other DNA
cgatgccgcgctttatctttatcccggccccgaaagcgagccggtgctcagtgcggcaaaagcgaagctgcaggc

SEQ ID NO: 83654 - DNA, 75 bp, synthetic construct
  source 1..75: mol_type = other DNA
caactgaaattacaggccggacggaagttgacgcaggcagaaacaacccgacttaacgccgtgctggattacatt

SEQ ID NO: 83655 - DNA, 75 bp, synthetic construct
  source 1..75: mol_type = other DNA
aactggcgcaatataattcgtggctggattatctggacgcactggagctggttgatacctccagtgtgccagata

SEQ ID NO: 83656 - DNA, 75 bp, synthetic construct
  source 1..75: mol_type = other DNA
cgccataccgaagcattgggcgagctgacccgctatctcggcatcggcgattatgaaagctggtcagaggccgac

SEQ ID NO: 83657 - DNA, 75 bp, synthetic construct
  source 1..75: mol_type = other DNA
gaactcgaaggtgataagggaccacgctttgttaactcgctttccgcgccattgtacgtgcaagaaacacgtagc

SEQ ID NO: 83658 - DNA, 75 bp, synthetic construct
  source 1..75: mol_type = other DNA
aagcaacttataactttaaataacatgccagcatggggtgatattcctccacctacacgagaagaattaattgtc

SEQ ID NO: 83659 - DNA, 75 bp, synthetic construct
  source 1..75: mol_type = other DNA
ccgatgcaatactacggtttcagtccgattacgaagaaaccgctgctgttccattgttcccattcgctgagagag

SEQ ID NO: 83660 - DNA, 75 bp, synthetic construct
  source 1..75: mol_type = other DNA
ggagacgatgttgcagcagctggtggcgatgaacgcgcgactgaagagcgccgcgccggatattattgcggcgcg

SEQ ID NO: 83661 - DNA, 75 bp, synthetic construct
  source 1..75: mol_type = other DNA
ccggtggctgacctcgtgctcagcagtgcgcaggcgtcattttgcactgattacagcattgtgatcgggggctcg

SEQ ID NO: 83662 - DNA, 75 bp, synthetic construct
  source 1..75: mol_type = other DNA
gcttgagcgtggcgggtccggtcggagcatacgagtatcacggtcgcagtgccgacgggcgtgtcgctgacgtgt

SEQ ID NO: 83663 - DNA, 75 bp, synthetic construct
  source 1..75: mol_type = other DNA
agaggctacggcgctggttgcagcatgtacgaagatgaaggacgcggaggagccaaaagaaagcgcctacgacct

SEQ ID NO: 83664 - DNA, 75 bp, synthetic construct
  source 1..75: mol_type = other DNA
gaacatggggcgcattgtcgttgacgtcgatggtgttaatcttgctgaactgattaacgtggcctgcgacaatgg

SEQ ID NO: 83665 - DNA, 75 bp, synthetic construct
  source 1..75: mol_type = other DNA
tagaaggattccttcatggtgtattgaccgtgttccggctgatgctcaattaattggtgagtctggttcttacac

SEQ ID NO: 83666 - DNA, 75 bp, synthetic construct
  source 1..75: mol_type = other DNA
tctccggagtttaaacagttctttagccaatacagcattgctgtgggctcaaccggaaatctggggttatcaatc

SEQ ID NO: 83667 - DNA, 75 bp, synthetic construct
  source 1..75: mol_type = other DNA
acctggtttaatcctggcacgacctcattggctgaaggtttaccttatgttggcctgaccgaacaggatgttcag

SEQ ID NO: 83668 - DNA, 75 bp, synthetic construct
  source 1..75: mol_type = other DNA
gaaaaaccacgctaccgatgagcgttggatctaccggatacgacacgcaactggattacgtggttaaggggatta

SEQ ID NO: 83669 - DNA, 75 bp, synthetic construct
  source 1..75: mol_type = other DNA
attaccgctttgcgctggaatccatctcgaaagtctgtacgttagcccttgcgttagaagatgtcggcccgcagg

SEQ ID NO: 83670 - DNA, 75 bp, synthetic construct
  source 1..75: mol_type = other DNA
ccactggctgacattgtgctcagtaaataccaggcatcctgttgcaccgaataccgcatcgctgacgggggtgct

SEQ ID NO: 83671 - DNA, 75 bp, synthetic construct
  source 1..75: mol_type = other DNA
aatttattgccacagtagcgggtgatattaccgtctataactatgacaacacgacacgggaatacatttcatcat

SEQ ID NO: 83672 - DNA, 75 bp, synthetic construct
  source 1..75: mol_type = other DNA
ctgctcggcaccatcggtctggtatcgccccagcagctgccggtggttgtctacaagctatcactcatcacgctg

SEQ ID NO: 83673 - DNA, 75 bp, synthetic construct
  source 1..75: mol_type = other DNA
gattacattgacgcggtggaggcaacagataccagcaccgcgcctgatgtcatctggcctgaactgccggaggcg

SEQ ID NO: 83674 - DNA, 75 bp, synthetic construct
  source 1..75: mol_type = other DNA
cacctatgcgcaactctatagctgatgctattaagagtatgtctgagactcattccaaaaccctgtctgaattta

SEQ ID NO: 83675 - DNA, 75 bp, synthetic construct
  source 1..75: mol_type = other DNA
atcgcaaatatccgcagggactaccttcacaaagtcacaacgaccgtcagcaaaaaccacgcaatgatagtcatt

SEQ ID NO: 83676 - DNA, 75 bp, synthetic construct
  source 1..75: mol_type = other DNA
tgcaatggcttccatcagtctgattcaactgaaattgcaggccggacgtaaactgacgcaggcagaaacaactag

SEQ ID NO: 83677 - DNA, 75 bp, synthetic construct
  source 1..75: mol_type = other DNA
ggtatgagcgtcaagggtacaataccacccgcccgaatgagataaggtcggagtatgaacgtgatctttcccggt

SEQ ID NO: 83678 - DNA, 75 bp, synthetic construct
  source 1..75: mol_type = other DNA
tgacccaagcctgatgcaggctatctgccttgctcatgatataggacatccccccttcggtcatggtggtgaggt

SEQ ID NO: 83679 - DNA, 75 bp, synthetic construct
  source 1..75: mol_type = other DNA
atgaaaattcgcgccttattggtagcaatgagcgtggcaacggtactgaccggttgccagaatatggactccaac

SEQ ID NO: 83680 - DNA, 75 bp, synthetic construct
  source 1..75: mol_type = other DNA
gagtgtttctcgcaactcatcctggcaataagacagtgtatccacatctctctgatgactgagcgatggtatccg

SEQ ID NO: 83681 - DNA, 75 bp, synthetic construct
  source 1..75: mol_type = other DNA
aaggggcaacagaatggtgcgcagaatacgatgagtggggcaacctgctgaatgaagagaacccgcatcagctgc

SEQ ID NO: 83682 - DNA, 75 bp, synthetic construct
  source 1..75: mol_type = other DNA
ttgctgaacgttgcgggattaatcctgtcactctccgggcctggcaacgccgctacggtttgttaaaaccacagc

SEQ ID NO: 83683 - DNA, 75 bp, synthetic construct
  source 1..75: mol_type = other DNA
tggttgccacgggggccggctccatgtcatgggagtaccgttacaccctgaacgcggtgattgaggatttcagcg

SEQ ID NO: 83684 - DNA, 75 bp, synthetic construct
  source 1..75: mol_type = other DNA
acgaaacaaacccgtttttagagcttatgacgatcccgatgaaagggaaacggatacaagtatctcgtcttgggc

SEQ ID NO: 83685 - DNA, 75 bp, synthetic construct
  source 1..75: mol_type = other DNA
aatgcgtaaaggattttattttataaaccccaattttgtatttaatggagatcgaatagcatttacaaccctaat

SEQ ID NO: 83686 - DNA, 75 bp, synthetic construct
  source 1..75: mol_type = other DNA
caggttacaagtcctggccaaaacatcaggtggtgctggttttggtgctctggtcggagaagaactgtctataac

SEQ ID NO: 83687 - DNA, 75 bp, synthetic construct
  source 1..75: mol_type = other DNA
gctgatgtcattatggtgctggttggcctgatttgcggcatcacgctgtttgttgaagtgggcgtcgtgctattg

SEQ ID NO: 83688 - DNA, 75 bp, synthetic construct
  source 1..75: mol_type = other DNA
caggaagcgttaaagccggtaacggttggcgatgcgctcacctactggcttgagtcgtacgcaaaggaaaaccgc

SEQ ID NO: 83689 - DNA, 75 bp, synthetic construct
  source 1..75: mol_type = other DNA
aggaatgggattttaaagaaatgctctggaccgtgccgaaagaacacagcaaaacgaaggtagcaatattcaggc

SEQ ID NO: 83690 - DNA, 75 bp, synthetic construct
  source 1..75: mol_type = other DNA
gccggaacgggaaggggggcaccaccggaacgcattaagctgggaaattatcctgatctgagcctgaaatcagcc

SEQ ID NO: 83691 - DNA, 75 bp, synthetic construct
  source 1..75: mol_type = other DNA
ttagcgcttttttcaatccagttgaatgcacctataggtggacgcggttactatcctgggctacgtggcggaggg

SEQ ID NO: 83692 - DNA, 75 bp, synthetic construct
  source 1..75: mol_type = other DNA
aggcttaatcaccctcactggtcactgcatgacatccggcgcacctttacaaccatgctgaacgatttaggcgtt

SEQ ID NO: 83693 - DNA, 75 bp, synthetic construct
  source 1..75: mol_type = other DNA
ccatactgctacccattgcgctgatgttggttaaaacgattgccgaattgaatatggcgcgtgagagtggtttgt

SEQ ID NO: 83694 - DNA, 75 bp, synthetic construct
  source 1..75: mol_type = other DNA
tcccgtcgaaacaggggcatggaaagacgctattgactgggtgctcaaagaggcttgccaggctgtaaacattga

SEQ ID NO: 83695 - DNA, 75 bp, synthetic construct
  source 1..75: mol_type = other DNA
cagatggtataacgagcggcgtataaaattatcgctgggtgcagtcagccctgaaatgtaccgccaacaatgtgg

SEQ ID NO: 83696 - DNA, 75 bp, synthetic construct
  source 1..75: mol_type = other DNA
atgtttgattacaagatttccaaacatccgcattttgatgaagcctgtcgggctttcgcactgcgtcacaacatg

SEQ ID NO: 83697 - DNA, 75 bp, synthetic construct
  source 1..75: mol_type = other DNA
aggcagcagaacctgcatccctggatggactgagcgaacccatcgggaaatttccgatggtcgatgactggcatc

SEQ ID NO: 83698 - DNA, 75 bp, synthetic construct
  source 1..75: mol_type = other DNA
ttttattatataaatcctaattttgtttttaatggcgatagagttgcattcacaacagttcttgaaatgaataaa

SEQ ID NO: 83699 - DNA, 75 bp, synthetic construct
  source 1..75: mol_type = other DNA
atttaccgcgaatttaacggtatttctgttttatgggatccgatatatgcaccggtggaccttgagcgtcatccc

SEQ ID NO: 83700 - DNA, 75 bp, synthetic construct
  source 1..75: mol_type = other DNA
cagatcatcatggggagaccggaagatgaggacacccttaaacgcgttgatgccgtgatccggaaaaaataccgt

SEQ ID NO: 83701 - DNA, 75 bp, synthetic construct
  source 1..75: mol_type = other DNA
attcactgcctgccatgtgtaccgattaatgaggtagcaaaagagaaactgccgcattacgtcatgagtgcaacc

SEQ ID NO: 83702 - DNA, 75 bp, synthetic construct
  source 1..75: mol_type = other DNA
aaatttctttaaacaatccctgcccctactggcggctctactgttaatgctaatgctggtgacatatatcccggc

SEQ ID NO: 83703 - DNA, 75 bp, synthetic construct
  source 1..75: mol_type = other DNA
gcaggcccgtttacaggctaacccggcgatggcgagtgcagttgataccgtgactggcctcggtgcttcattcgg

SEQ ID NO: 83704 - DNA, 75 bp, synthetic construct
  source 1..75: mol_type = other DNA
taattaatcgctgggcaccgcctactgataaaaatgacactatgtcgtatatcaaagcagtgtgcgaacaacttg

SEQ ID NO: 83705 - DNA, 75 bp, synthetic construct
  source 1..75: mol_type = other DNA
ccctggttcagacctggtagggaaggttgaaatgactgagtggttagttgactttgctgcccagcttcgcaaagg

SEQ ID NO: 83706 - DNA, 75 bp, synthetic construct
  source 1..75: mol_type = other DNA
tgatgcctgggttgaagaatggaatcaggttgacagaactcctggcgagccactgtacaaaactgtgccactcta

SEQ ID NO: 83707 - DNA, 75 bp, synthetic construct
  source 1..75: mol_type = other DNA
cgcattcctgacagaacaccctgagacagaactgacactggatgaatggtcctgtgcaatatcctgcatcaccac

SEQ ID NO: 83708 - DNA, 75 bp, synthetic construct
  source 1..75: mol_type = other DNA
gtcgtgccggccgtctggccggggctgcggggatgctgtttcttttcacccttgccatacccgttcaggcggctg

SEQ ID NO: 83709 - DNA, 75 bp, synthetic construct
  source 1..75: mol_type = other DNA
ccaggcggtggatattgaagtcagccgtcacgaagacttttcgtcggtgattcagtcacgacgcgcctggtttag

SEQ ID NO: 83710 - DNA, 75 bp, synthetic construct
  source 1..75: mol_type = other DNA
atgtcgatggcaagagccgcctgctgcgtggtctggacagcaataaagaccagagctacttcctttatacgctca

SEQ ID NO: 83711 - DNA, 75 bp, synthetic construct
  source 1..75: mol_type = other DNA
cagatagaatcgcttattgtctggcagatcccgaatacctacatcattgaattccggggcaaaccactggaacaa

SEQ ID NO: 83712 - DNA, 75 bp, synthetic construct
  source 1..75: mol_type = other DNA
attttgaagtgcgcagtccgctgacgtcagttcaggcgggagacagtgagctgctgacggtaggagaaatcacat

SEQ ID NO: 83713 - DNA, 75 bp, synthetic construct
  source 1..75: mol_type = other DNA
ctccggttctcaccggcgcggtggctgcaatggcggatgagccgtttgattatatcggtctgccgttcaacgaca

SEQ ID NO: 83714 - DNA, 75 bp, synthetic construct
  source 1..75: mol_type = other DNA
gcggcgagcatgattaccgaaagccagtgctaccaactggaacaaaatcttcaccagcaacgcattgccattgag

SEQ ID NO: 83715 - DNA, 75 bp, synthetic construct
  source 1..75: mol_type = other DNA
gaaaggggtgaaagagacgtggccagcggcgctggttgctgggggaagcttcgctgtcactcagttctttacctc

SEQ ID NO: 83716 - DNA, 75 bp, synthetic construct
  source 1..75: mol_type = other DNA
cgcgatcgtgcgcatcagatccgccatgcgtttgatcgcgccacttttgccctgatcgacaagctgaaaaacgat

SEQ ID NO: 83717 - DNA, 75 bp, synthetic construct
  source 1..75: mol_type = other DNA
gatcatgatgtacttctagcaggtttcccctgtcaaccgttcagccttgcgggcgtaagcaagaaaaactcgctc

SEQ ID NO: 83718 - DNA, 75 bp, synthetic construct
  source 1..75: mol_type = other DNA
cgcacagggctgcgccagaacttccgtatcttccagaatgaggacatcgaaagcatactcgctacgatcctgaaa

SEQ ID NO: 83719 - DNA, 75 bp, synthetic construct
  source 1..75: mol_type = other DNA
cttccggccgctgctcagcccggaaggctggctgcccccggtgattgacgaagcccgggacgtggcacatgtcac

SEQ ID NO: 83720 - DNA, 75 bp, synthetic construct
  source 1..75: mol_type = other DNA
atgaaatatccgacaggcgtggaaaaccatggagggaaattacgtatctggtttgtttataaaggcgtaagagtc

SEQ ID NO: 83721 - DNA, 75 bp, synthetic construct
  source 1..75: mol_type = other DNA
gaaattcctgtcagcctcaattactacggcttcggtgggggcgaagtgctgccagcgggcgtacagattgccgtg

SEQ ID NO: 83722 - DNA, 75 bp, synthetic construct
  source 1..75: mol_type = other DNA
atcgtctgaacgtggagcctgcggttttccgtggttttaccacaccggaactggggctggcggccctgacaggcg

SEQ ID NO: 83723 - DNA, 75 bp, synthetic construct
  source 1..75: mol_type = other DNA
caggctccggtgaccaacggcgataacgtcacgacgattgccagcagtatcaaagatgccatcaatgccgttccg

SEQ ID NO: 83724 - DNA, 75 bp, synthetic construct
  source 1..75: mol_type = other DNA
ttcgcacccgtagctgggaggataacggtatcacccgttacgtcaccgaaatccttgttaaaaccacgggcacca

SEQ ID NO: 83725 - DNA, 75 bp, synthetic construct
  source 1..75: mol_type = other DNA
atgattcagctgatagcgacttcatcattctcgtatccaaaagaaccaggtagggtcaacgaagattcattgctt

SEQ ID NO: 83726 - DNA, 75 bp, synthetic construct
  source 1..75: mol_type = other DNA
agaagatgataaaggtttaacattattagaaattgccggcgcaatgattatcatcgcaatagttgtcgcgctcgc

SEQ ID NO: 83727 - DNA, 75 bp, synthetic construct
  source 1..75: mol_type = other DNA
atgtgtccagcgtggtgtgcagttgcgcagtgaagatgacgcgactgacgacgctgaccgcacggaacaggtgca

SEQ ID NO: 83728 - DNA, 75 bp, synthetic construct
  source 1..75: mol_type = other DNA
aggttcatactctggtgccagttatgcttcatccatggcaatcgctgaactttcagcattgacaagtttatcttt

SEQ ID NO: 83729 - DNA, 75 bp, synthetic construct
  source 1..75: mol_type = other DNA
ttcgtttcacctccagaggacgtgaatacgaagtcgacgaacgtctgattaccacaatcgacaaacaccgctcag

SEQ ID NO: 83730 - DNA, 75 bp, synthetic construct
  source 1..75: mol_type = other DNA
cagttgcagcgccctggcgttggccgttgggatattagtgccggacaaattatcgatgacagcttgcgtcatgaa

SEQ ID NO: 83731 - DNA, 75 bp, synthetic construct
  source 1..75: mol_type = other DNA
tgtggaggtggacaaggttgcagaggctttcggaaaactgaccaccgacccgacgtcggggctgactgcgatggc

SEQ ID NO: 83732 - DNA, 75 bp, synthetic construct
  source 1..75: mol_type = other DNA
atgctaccggtgcttatcaccgagagatagccaaaaaaatggggggtaaaggtcattttactaccccaatgatgc

SEQ ID NO: 83733 - DNA, 75 bp, synthetic construct
  source 1..75: mol_type = other DNA
tttttttgtgcgtactgtattgccacgtttttttcgcgtcagaattatggcggggcgtacggggccgacttcggt

SEQ ID NO: 83734 - DNA, 75 bp, synthetic construct
  source 1..75: mol_type = other DNA
gcctggctttcagggcagcgttatttcgaactttggccgcgtgtgattaacttgcgccattcaggagttttatga

SEQ ID NO: 83735 - DNA, 75 bp, synthetic construct
  source 1..75: mol_type = other DNA
gctatgcgggcacctatgcaatcgccaacgtcctgctgacgctggcagggacaatcatcgtcatggtatggccag

SEQ ID NO: 83736 - DNA, 75 bp, synthetic construct
  source 1..75: mol_type = other DNA
gatcagcctgccgatggtcggggtcacctcgctggcggtggcgacaggtgcgctggcgtacgcctggtaccaggg

SEQ ID NO: 83737 - DNA, 75 bp, synthetic construct
  source 1..75: mol_type = other DNA
gtctggggcgggcaaaacgtttatttcccgatgggcatggtatggaaggtcagtcagcgcgaccgggaaatcttc

SEQ ID NO: 83738 - DNA, 75 bp, synthetic construct
  source 1..75: mol_type = other DNA
acgctgaccgcacggaacaggtgcaggaaaaagcgtcagtggaggaaatcagtctgccactgctgacgaaaatgt

SEQ ID NO: 83739 - DNA, 75 bp, synthetic construct
  source 1..75: mol_type = other DNA
aagctaactggtttaacgatgctcaggaacacactttcaatctcgatattcgggaagtcacgctcagtgataaac

SEQ ID NO: 83740 - DNA, 75 bp, synthetic construct
  source 1..75: mol_type = other DNA
acgaagttgccgatgctgcagaaatgggaaaaaacgatccaaagattatcgatgggaagcattttttgcctcagc

SEQ ID NO: 83741 - DNA, 75 bp, synthetic construct
  source 1..75: mol_type = other DNA
ggcggtgagcgtggtggataacaccttcttaagcccggcattacaaaatccgctggcattaggtgccgatctggt

SEQ ID NO: 83742 - DNA, 75 bp, synthetic construct
  source 1..75: mol_type = other DNA
ccaagaacgcggtcgaaaaccacttcgacacctcttatgaattagaatctctccttgaacagcgcgtgaagcgtc

SEQ ID NO: 83743 - DNA, 75 bp, synthetic construct
  source 1..75: mol_type = other DNA
gggatcaaaagcccgataggtatcaaggtgtccggaacggttctgtccgatatcgatgcaacggcgcagagtatc

SEQ ID NO: 83744 - DNA, 75 bp, synthetic construct
  source 1..75: mol_type = other DNA
cacgacctttcagaactgcgttctttgcaggactggtttctgaaatttgaactgaagaccatcccgaacgtggct

SEQ ID NO: 83745 - DNA, 75 bp, synthetic construct
  source 1..75: mol_type = other DNA
aagatgtccgggccggcgcattgcagtcctcgctgtccattctgttacatacccattatgccattcgtctttggg

SEQ ID NO: 83746 - DNA, 75 bp, synthetic construct
  source 1..75: mol_type = other DNA
tggactatctgcaaggacacaaagacggcctggagtgggctgcacaattggcagaagccaatcatccgcaaacag

SEQ ID NO: 83747 - DNA, 75 bp, synthetic construct
  source 1..75: mol_type = other DNA
cggatggcgaagcggggatgaatctgctggcccgcagcgctgtcacccaggcgcgtcagcgcgtgggggccgccc

SEQ ID NO: 83748 - DNA, 75 bp, synthetic construct
  source 1..75: mol_type = other DNA
tatttctatatggacggcggttttgttgcggattaattcataaagaaatgcatttgggtgttggctggaagagac

SEQ ID NO: 83749 - DNA, 75 bp, synthetic construct
  source 1..75: mol_type = other DNA
acggtttgaagagcagcagagcgcgaagcaggccgccatcagcgcaaaagcccgtggtctcactgaccgtcaggc

SEQ ID NO: 83750 - DNA, 75 bp, synthetic construct
  source 1..75: mol_type = other DNA
tatcccccggcggggtttgttgttgccggggcgttgtgcctgttctggtcgtggctggtggcgcgatatctcgac

SEQ ID NO: 83751 - DNA, 75 bp, synthetic construct
  source 1..75: mol_type = other DNA
cgctggcggaatatccgtatgcgggggcgtttttccgctgtctgaacggaagccgccggatttcgctgtctgacc

SEQ ID NO: 83752 - DNA, 75 bp, synthetic construct
  source 1..75: mol_type = other DNA
aacatataaacagtccgtagctaatttaggtactgctggcttagaaacccgccctcgtaatattgcatttaatta

SEQ ID NO: 83753 - DNA, 75 bp, synthetic construct
  source 1..75: mol_type = other DNA
ctgccacggaagtccaggcactggcggagggtaattacgctgtcaatgccagtgtcagcgatcgggcagggaaca

SEQ ID NO: 83754 - DNA, 75 bp, synthetic construct
  source 1..75: mol_type = other DNA
tgcgccagcacatccacaatgacgcgcattacgccagcctgatggcggttattcgtgaaaaggaagaaacactga

SEQ ID NO: 83755 - DNA, 75 bp, synthetic construct
  source 1..75: mol_type = other DNA
attatgcaggatctggcatggaaactgactaaccgcctgatccatgcgccaacgaaatcacttcaacaggccgcc

SEQ ID NO: 83756 - DNA, 75 bp, synthetic construct
  source 1..75: mol_type = other DNA
tgtggccgtagagctggggattgaagatcttggccttgtcgccaactggttcagtggtgacgtactcccttcctt

SEQ ID NO: 83757 - DNA, 75 bp, synthetic construct
  source 1..75: mol_type = other DNA
gtgggaaacttaccgacagcatgggggttaatcgtgccaatatactcatcattagcggcattgttgttgtcgtgc

SEQ ID NO: 83758 - DNA, 75 bp, synthetic construct
  source 1..75: mol_type = other DNA
ctgtttcccggtgaggacggttacagccgcagcgagtcactctggctggtgcgcggcggcgtggcgaaactggat

SEQ ID NO: 83759 - DNA, 75 bp, synthetic construct
  source 1..75: mol_type = other DNA
gctcaggaaaccagcgaatttatggcgtggctgcgtgcacaaagcgccagcgaaaccattcgcgagtatcgcagc

SEQ ID NO: 83760 - DNA, 75 bp, synthetic construct
  source 1..75: mol_type = other DNA
tgtatataaagcttctgaaaaaacatatgcatttacaaattctctacataatgaatatgttgcgcagatggagca

SEQ ID NO: 83761 - DNA, 75 bp, synthetic construct
  source 1..75: mol_type = other DNA
atggccgaaagtgccgccttgctggttgatgaagtactgcctgaacaacccatgcgtcagtgggtgttgagcttc

SEQ ID NO: 83762 - DNA, 75 bp, synthetic construct
  source 1..75: mol_type = other DNA
tacactcagcgcattgagcgacataatctgaatctgagacaacatctggcaaggccgggacggaagtcactgtcg

SEQ ID NO: 83763 - DNA, 75 bp, synthetic construct
  source 1..75: mol_type = other DNA
taaacaaacgatttagtgaaaatcctttcatcaaagatttgataattcctgtaaaaaacaaacaagtaagaatat

SEQ ID NO: 83764 - DNA, 75 bp, synthetic construct
  source 1..75: mol_type = other DNA
ttcgctttcaggataaacgaaatctgatatacatttatgctattggacttattctgataggcttttattggaaga

SEQ ID NO: 83765 - DNA, 75 bp, synthetic construct
  source 1..75: mol_type = other DNA
gatgtgcttcgccgtatacaccatgttatcggagagctacccacatatggttatcgtcgggtatgggcgctgctt

SEQ ID NO: 83766 - DNA, 75 bp, synthetic construct
  source 1..75: mol_type = other DNA
atgacgatcacaaaacaacgagtagaaaaaatcatatatcgccatgaaatgggactgaacagcgatgtcactgcc

SEQ ID NO: 83767 - DNA, 75 bp, synthetic construct
  source 1..75: mol_type = other DNA
tcagtgttgaccatcaaatcaatgcccagatagtagtcgaacctgtacccgtttcagtcgcagaccagataattt

SEQ ID NO: 83768 - DNA, 75 bp, synthetic construct
  source 1..75: mol_type = other DNA
tttcagactggaaagattcaaaagatttcgacttttacgaagaacgaccagcgcgcggctgggatgtccgggctg

SEQ ID NO: 83769 - DNA, 75 bp, synthetic construct
  source 1..75: mol_type = other DNA
cttggttcaggtagtgatacatttatccagggggatgctactgacaataacgatacaacattatctggtttattg

SEQ ID NO: 83770 - DNA, 75 bp, synthetic construct
  source 1..75: mol_type = other DNA
tgctgcgcattcagcgtgatgtcaccacgtacaggaaaaacgcttacggggttgcggataacagctacctcgaca

SEQ ID NO: 83771 - DNA, 75 bp, synthetic construct
  source 1..75: mol_type = other DNA
atattgaggaaaacaggcttataccgtgtgctttaaccacacgctttgtttctgatgttgcaggtcgtatcagtt

SEQ ID NO: 83772 - DNA, 75 bp, synthetic construct
  source 1..75: mol_type = other DNA
cagcgacgacgagggtggctatgtggactgcgtggcgctcgatgccgccctgctggaaaaactccaggctgtcgc

SEQ ID NO: 83773 - DNA, 75 bp, synthetic construct
  source 1..75: mol_type = other DNA
taggcggtaatacatgggtcgaatgcacaagagctgcatacgtaagagcaaaagacaagggtgaattaaccagag

SEQ ID NO: 83774 - DNA, 75 bp, synthetic construct
  source 1..75: mol_type = other DNA
aatacagaacggagttatctggggggaatgaaacccgcccacgtaacattgccttcaattatattgtgagagcag

SEQ ID NO: 83775 - DNA, 75 bp, synthetic construct
  source 1..75: mol_type = other DNA
ccaatagaacgcccaaaagtctacttgaccaagtattggtcagtacaaagacaatcattgtcaaaagcggttatc

SEQ ID NO: 83776 - DNA, 75 bp, synthetic construct
  source 1..75: mol_type = other DNA
attccacatgcgcgactggtggcagccgacaaaagcaaacttcttcggacacctgaaaaagccgcagattatcgc

SEQ ID NO: 83777 - DNA, 75 bp, synthetic construct
  source 1..75: mol_type = other DNA
gtggcgataacgcgctgatgttgcccgagcaggcgagcaatatccggctacaaagtagtgaaacgccgcaggaga

SEQ ID NO: 83778 - DNA, 75 bp, synthetic construct
  source 1..75: mol_type = other DNA
ggtcatgtggcgttaaatctccccgccgccgataaaccgagccgctatttgttaaccgtctccgccagtgacggc

SEQ ID NO: 83779 - DNA, 75 bp, synthetic construct
  source 1..75: mol_type = other DNA
cttccgcgccggtttctgctgcgccactgctgcaggtgagcggcgcactcatcgccattattgccctgatcctcg

SEQ ID NO: 83780 - DNA, 75 bp, synthetic construct
  source 1..75: mol_type = other DNA
gcagtacctccagtagaagccgctgccgctgtttctccgctggcatctggcgtgaaaaaagcgacactggcgacg

SEQ ID NO: 83781 - DNA, 75 bp, synthetic construct
  source 1..75: mol_type = other DNA
aatcagtgctgttagccctggcagccgaaaaagggcaggcgtgggtcgctaacgcaattactgaagaatatctgc

SEQ ID NO: 83782 - DNA, 75 bp, synthetic construct
  source 1..75: mol_type = other DNA
tgccacattctggctgtacgaaagagtacactgttgccaatcgacacaattatccggcatcaagtgagcgatatc

SEQ ID NO: 83783 - DNA, 75 bp, synthetic construct
  source 1..75: mol_type = other DNA
ctgacaaccagtgacagcacctttgtgctgcgttctgactctacaggctctgataaggtggtagtaaaaaacaaa

SEQ ID NO: 83784 - DNA, 75 bp, synthetic construct
  source 1..75: mol_type = other DNA
gattttgaattttcgccaatgaaagcgttgctggatgatggtccacacgaaccgttgtttacgccaattgttgaa

SEQ ID NO: 83785 - DNA, 75 bp, synthetic construct
  source 1..75: mol_type = other DNA
gccaggggggcggcgaattgcccctggtaccaggcaaggactggaataatcagcagaacatctatcaccgttggt

SEQ ID NO: 83786 - DNA, 75 bp, synthetic construct
  source 1..75: mol_type = other DNA
ggaaaaaattcagaagctgatcccagcaattctggcaatccttccgcgggagctgcgtcaccgactctgcatctt

SEQ ID NO: 83787 - DNA, 75 bp, synthetic construct
  source 1..75: mol_type = other DNA
gccaggggggcggcgaattgcccctggtaccaggcaaggactggaacaatcagcagaatatctatcaccgttggt

SEQ ID NO: 83788 - DNA, 75 bp, synthetic construct
  source 1..75: mol_type = other DNA
cgttatctgctcaaccagcattcgccacattctggctgtacgaaagagtacactgttgcaaatcgacacacttat

SEQ ID NO: 83789 - DNA, 75 bp, synthetic construct
  source 1..75: mol_type = other DNA
actgtatgtggatgtggcaaaaggctatggcacaggcctgctggtttcccgtgcgtcgtatgaggcagaaaagag

SEQ ID NO: 83790 - DNA, 75 bp, synthetic construct
  source 1..75: mol_type = other DNA
tggcgatgatgaagccatcttcagaccaatacaaaaatacatcaatggcacatggtataacgtcgcacaggtgta

SEQ ID NO: 83791 - DNA, 75 bp, synthetic construct
  source 1..75: mol_type = other DNA
tggctgataatatgcaggatggcgtccggattgcccgtgataatcctgacagcggtgtggtggtgagaattgccg

SEQ ID NO: 83792 - DNA, 75 bp, synthetic construct
  source 1..75: mol_type = other DNA
ggaggcgctggcctccacacgggttatgacggacggacagtcagaaacggtgctgaccggtaatctggtgatggc

SEQ ID NO: 83793 - DNA, 75 bp, synthetic construct
  source 1..75: mol_type = other DNA
ggtttgaaccatgccccggactgacggctgccggacgtggtgttgtatcgccggagaatatcgcgttcacccgct

SEQ ID NO: 83794 - DNA, 75 bp, synthetic construct
  source 1..75: mol_type = other DNA
cgtgcgaccgttgtttgccgatcgttgccaggccggttttccttcgcctgccactgattatgctgagcaggaact

SEQ ID NO: 83795 - DNA, 75 bp, synthetic construct
  source 1..75: mol_type = other DNA
tatcagccgtcagatcccggtggattatgaatcacagggacgccgggtgaactacggcttttcactgacagcggg

SEQ ID NO: 83796 - DNA, 75 bp, synthetic construct
  source 1..75: mol_type = other DNA
acttatatgcgcgaatacgagggcaaaggcgcggcggcgatgggcttctttatgaatcttttcatcgcatcgatg

SEQ ID NO: 83797 - DNA, 75 bp, synthetic construct
  source 1..75: mol_type = other DNA
gcatggcgatgaatgcctgggcatatcctgacggtgagaaggtgccagctgctgctattgccagagcgtattttg

SEQ ID NO: 83798 - DNA, 75 bp, synthetic construct
  source 1..75: mol_type = other DNA
cgcattgagcgacataatctgaatctgagacaacatctggcaaggctggggcggaagtcactgtcgttctcaaaa

SEQ ID NO: 83799 - DNA, 75 bp, synthetic construct
  source 1..75: mol_type = other DNA
agccgaagtcgtcaggtgttaaagtgtcagccggtgagcgtcaggaagacctgacgcatgcggcgctgctggcgc

SEQ ID NO: 83800 - DNA, 75 bp, synthetic construct
  source 1..75: mol_type = other DNA
aagccggtgaactggcggcaagggataaggctgagcgtgacgcgtcacagctgaaatataccgaagaggcacaga

SEQ ID NO: 83801 - DNA, 75 bp, synthetic construct
  source 1..75: mol_type = other DNA
gagacagaatttacacctgctgaacttgccgccttccgggactactgggcagcggaggggaaagtgtttacgcag

SEQ ID NO: 83802 - DNA, 75 bp, synthetic construct
  source 1..75: mol_type = other DNA
cgggtcgccattatttgcttataattctctcagtgaaaaatggtctctggctggagtcaccctgcataataatgg

SEQ ID NO: 83803 - DNA, 75 bp, synthetic construct
  source 1..75: mol_type = other DNA
tgatcatcgacggtatcaaaaccaacgttgatctgcagatccgcatcatgaatgacgagaacttccagcatggtg

SEQ ID NO: 83804 - DNA, 75 bp, synthetic construct
  source 1..75: mol_type = other DNA
cagggctgagcgtgagtcgtcacagctgaagtataccggagaggcgcagaaggcgtatgagcgcctgctgacgcc

SEQ ID NO: 83805 - DNA, 75 bp, synthetic construct
  source 1..75: mol_type = other DNA
cagagcaggctgtcagggatattgccgggctggagcgtgaccggtctgccatatctgaacgggaagccgcgctgc

SEQ ID NO: 83806 - DNA, 75 bp, synthetic construct
  source 1..75: mol_type = other DNA
cacgaaatgtcacgcacatgtcacgacaagtcacgacagataaagatacagatacagaattaaaccccacacata

SEQ ID NO: 83807 - DNA, 75 bp, synthetic construct
  source 1..75: mol_type = other DNA
tcaccgctgaatgtgcgcacggtgccgtattctgcggagtccgtcagcgaactggcggactccattaaaggtgtc

SEQ ID NO: 83808 - DNA, 75 bp, synthetic construct
  source 1..75: mol_type = other DNA
accttcggtggaaaccccatcggaaggctcaaaattttttggttttgatatggataacgaattcatcagtggttt

SEQ ID NO: 83809 - DNA, 75 bp, synthetic construct
  source 1..75: mol_type = other DNA
gtgcgctgctgcaaatcgacacacttatccggcaactggctgaaatctcggtactgacggaaagcattggcggta

SEQ ID NO: 83810 - DNA, 75 bp, synthetic construct
  source 1..75: mol_type = other DNA
atgcgcagataaaacgcggtgatttactgtatgtggatgtggcaaaaggctatggcacaggcctgctggtttccc

SEQ ID NO: 83811 - DNA, 75 bp, synthetic construct
  source 1..75: mol_type = other DNA
cgtgttgcaggaaaaaatggattacccacatgggcactaatacctccaccatcgcatgaagaacttattcaacag

SEQ ID NO: 83812 - DNA, 75 bp, synthetic construct
  source 1..75: mol_type = other DNA
ggtgccgggctacgcagacagacaacggaagcgttctccggcaagaaaatcaccgccacgatgttcaagggcagc

SEQ ID NO: 83813 - DNA, 75 bp, synthetic construct
  source 1..75: mol_type = other DNA
tgagtctttcagccttacccgtagaggcatcaacggtcagcgctgaaataccatatcagactttccgtgattttg

SEQ ID NO: 83814 - DNA, 75 bp, synthetic construct
  source 1..75: mol_type = other DNA
aagatcccaacggcctgaaaacctttgtgaacaccacgctgggcgagacctgggaagaggccgtgggcgaaaaac

SEQ ID NO: 83815 - DNA, 75 bp, synthetic construct
  source 1..75: mol_type = other DNA
tgccgatcatcaaagtgccgccgctaacgacattcgtcagatgattcaggataaccgtctgcggctgatgcaact

SEQ ID NO: 83816 - DNA, 75 bp, synthetic construct
  source 1..75: mol_type = other DNA
tggcgaattacgatagatcgtgtgcttgatgtagtgcaggagacagaccttcgcaatcagggaaaatttttcccc

SEQ ID NO: 83817 - DNA, 75 bp, synthetic construct
  source 1..75: mol_type = other DNA
cttgacaggattgactcattaattttcaccgctccggtattttttattttatacgctactgctgttactgaagga

SEQ ID NO: 83818 - DNA, 75 bp, synthetic construct
  source 1..75: mol_type = other DNA
gttgcccgggaaaatctgctgcaggagcgacttcagcagatggagcgggatatggtccgtgacctgcagaaagag

SEQ ID NO: 83819 - DNA, 75 bp, synthetic construct
  source 1..75: mol_type = other DNA
ggtaccagggggattccacgctttcagcgtttaataaaaccctggttctttccggtaatcagtccggactgactg

SEQ ID NO: 83820 - DNA, 75 bp, synthetic construct
  source 1..75: mol_type = other DNA
ctaattcgtagcaaatcagctgaatcgacagagggaggggtccatagtggacaaggtgttttagactcgctggta

SEQ ID NO: 83821 - DNA, 75 bp, synthetic construct
  source 1..75: mol_type = other DNA
tcagagccggagccaccggcgcggtaaaacctcagcatttcttgccaatctccggggagcatgggaggacagagc

SEQ ID NO: 83822 - DNA, 75 bp, synthetic construct
  source 1..75: mol_type = other DNA
gtggaatgactatcgcgcaaagtctctgcaatcagacaccccagccaccgacgcattcctggctgaagtacgggc

SEQ ID NO: 83823 - DNA, 75 bp, synthetic construct
  source 1..75: mol_type = other DNA
acgctgtccggtctgctgtacccggaaattaccggcggtgaggtgtcgctgacactgctgaacacccaggcctac

SEQ ID NO: 83824 - DNA, 75 bp, synthetic construct
  source 1..75: mol_type = other DNA
cgctgggtgcctggctggatgtgtgctccacgtccacagacggataccactgaacgcaccgacaaccaggtcaat

SEQ ID NO: 83825 - DNA, 75 bp, synthetic construct
  source 1..75: mol_type = other DNA
gctgaaaaagcagtttcctacctgccagattaccgtgacgaccgaagtgtataacggcgtctgggatgcgattat

SEQ ID NO: 83826 - DNA, 75 bp, synthetic construct
  source 1..75: mol_type = other DNA
cgcagtgaagatgacgtgactgacgacgctgaccgcacggaacaggtgcaggaaaaagcgtcagtggaggaaatc

SEQ ID NO: 83827 - DNA, 75 bp, synthetic construct
  source 1..75: mol_type = other DNA
ctttaatcacatcgttttaaaagccagtgaaaatggcgtgcccgtttatctgcgtgatgttgcgaaggtccagat

SEQ ID NO: 83828 - DNA, 75 bp, synthetic construct
  source 1..75: mol_type = other DNA
atgaatcagcaacgatttgatgaaagcaccctaatccgcatcttcgcgatttatgagctatatcgactgaaagaa

SEQ ID NO: 83829 - DNA, 75 bp, synthetic construct
  source 1..75: mol_type = other DNA
ttgcctatggcatcatggttaaaaccatggccgtggttgcgccactggtactgcatttacctgctgaagaaatcg

SEQ ID NO: 83830 - DNA, 75 bp, synthetic construct
  source 1..75: mol_type = other DNA
acccgcctggatgttgaagtgaatggctttaacggtggtgttctgaacggtgttccttctgcatatcactggtat

SEQ ID NO: 83831 - DNA, 75 bp, synthetic construct
  source 1..75: mol_type = other DNA
acgatgaaagcaggtaaatcaaccaccatcaacgccattgtggggcaggaaattctgcccaaccgtaaccgcccc

SEQ ID NO: 83832 - DNA, 75 bp, synthetic construct
  source 1..75: mol_type = other DNA
ggggcaacctgctgaatgaagagaacccgcaccagctgcagcagctcatccgcctgccgggtcagcagtatgatg

SEQ ID NO: 83833 - DNA, 75 bp, synthetic construct
  source 1..75: mol_type = other DNA
caaaggcacctgccagatcgaaaaagccgctaacgagtcggcgcattttatgcgtttttatgtgccctgcccgca

SEQ ID NO: 83834 - DNA, 75 bp, synthetic construct
  source 1..75: mol_type = other DNA
ttactatcttaccaagggatttcgatgggatgaagtaaatacatctggacgggtatgtttcgatatcggagaaag

SEQ ID NO: 83835 - DNA, 75 bp, synthetic construct
  source 1..75: mol_type = other DNA
aagccctcagcctcgattatcgtcactggataatctacgtcagactcccttattccgaacgcccaccgcgtccgt

SEQ ID NO: 83836 - DNA, 75 bp, synthetic construct
  source 1..75: mol_type = other DNA
acggtggtgttctgaacggtgttctttctgcatatcactggtatacggaacagtatggcgtgaagtggcctgtgg

SEQ ID NO: 83837 - DNA, 75 bp, synthetic construct
  source 1..75: mol_type = other DNA
aaatccctggcactgctggcatggacgctctgcctgaatgtgtttggcagcggagcgtacagtaaaccagcacaa

SEQ ID NO: 83838 - DNA, 75 bp, synthetic construct
  source 1..75: mol_type = other DNA
gttgccctgaacggctatatcgccattctggaaggcaaacagcaggaaaccgaagcgcaaacccaggctcgcctt

SEQ ID NO: 83839 - DNA, 75 bp, synthetic construct
  source 1..75: mol_type = other DNA
tgaatttcaggaccgcagagcggttcgggctgattcaggtggtgaacaaaccggttgtgttctggtttgagcagt

SEQ ID NO: 83840 - DNA, 75 bp, synthetic construct
  source 1..75: mol_type = other DNA
gtgaggctgaagcacagttccggcctgagctggagaaaatcgtcagcgggattgaaacaggttttcgtggcacgg

SEQ ID NO: 83841 - DNA, 75 bp, synthetic construct
  source 1..75: mol_type = other DNA
ggcactgaaggcggtttatgacgtagcccgtaaggcggcaatggatgttgtgaccgggcagatgcgcgatggtgg

SEQ ID NO: 83842 - DNA, 75 bp, synthetic construct
  source 1..75: mol_type = other DNA
actggcctctgtacgagaaaatcgcacaggcatttaagcaggctgccgcagagctgggaactgccatcgaatggg

SEQ ID NO: 83843 - DNA, 75 bp, synthetic construct
  source 1..75: mol_type = other DNA
atggctggccgctttatgaatcacgcctgaagggagaactgcacgttatcagcaagcgatatacgcagcgcattg

SEQ ID NO: 83844 - DNA, 75 bp, synthetic construct
  source 1..75: mol_type = other DNA
aaacaaccctctttaagcggctgcctgcgaattaccgtcggaacccgtgaagaaagccagcgcgtcattgacgcc

SEQ ID NO: 83845 - DNA, 75 bp, synthetic construct
  source 1..75: mol_type = other DNA
gcaaatctctgtgttaaacaggccacggtgacggcgatgtttaaaccgtatcatccagtatgcattgtgtctgct

SEQ ID NO: 83846 - DNA, 75 bp, synthetic construct
  source 1..75: mol_type = other DNA
tcgggcgctcattcgtaccgtacgggaaaccgtggtgtcagtcgcacgggccgtctgggactggatatttttctg

SEQ ID NO: 83847 - DNA, 75 bp, synthetic construct
  source 1..75: mol_type = other DNA
ccttatggctggacacctgtccgggtggtctgccgtaaatggtcgtccagtgtgggggcgctgtgggtcacggta

SEQ ID NO: 83848 - DNA, 75 bp, synthetic construct
  source 1..75: mol_type = other DNA
atgcggtggtggctaatgtcacgcagcataacggcgagtggaagacactgagcagtgacaaagtggggaaaacgg

SEQ ID NO: 83849 - DNA, 75 bp, synthetic construct
  source 1..75: mol_type = other DNA
aagtggcaatataatcacaacggtgagctcgttattacgggcgacaataccacagtaaacaacactggaaaaacc

SEQ ID NO: 83850 - DNA, 75 bp, synthetic construct
  source 1..75: mol_type = other DNA
tcgcgctttttgcgaaccaggtaaagacgccatcctctactgcccgccaacgtacggcatgtacagcgtcagcgc

SEQ ID NO: 83851 - DNA, 75 bp, synthetic construct
  source 1..75: mol_type = other DNA
gtttaagcgtcgccgggtcagtgggagcctatcagtatcatggtcgcagtgctgacgggcgtgtcgccgatattt

SEQ ID NO: 83852 - DNA, 75 bp, synthetic construct
  source 1..75: mol_type = other DNA
cgcctgattgatgcacataaccaggccgtggactttgctgttcgtcaggtggaggcgctggcctccacacgggtg

SEQ ID NO: 83853 - DNA, 75 bp, synthetic construct
  source 1..75: mol_type = other DNA
tgtcaccggtctggctggacagccggagccgttatctgcgggatatgtaccgtccggggatggtgatggagcagt

SEQ ID NO: 83854 - DNA, 75 bp, synthetic construct
  source 1..75: mol_type = other DNA
cgaactaaaagaaattctacgcgctattgatggtgatgtgttcgctccctattacagtgcgttaatgcgcttgtt

SEQ ID NO: 83855 - DNA, 75 bp, synthetic construct
  source 1..75: mol_type = other DNA
gaaagtcgcgatacgtaccgtgcgtgatgttgtggtgtcggttgcacgggctgtatgggactggattttcttctg

SEQ ID NO: 83856 - DNA, 75 bp, synthetic construct
  source 1..75: mol_type = other DNA
accttgctaacgggaaatacactgcacaggatgccaccacagcgcgaaaaggtcttgtccagctcagtagcgcca

SEQ ID NO: 83857 - DNA, 75 bp, synthetic construct
  source 1..75: mol_type = other DNA
cctgtattgcattggctctgagtggtcagggctgggcggcagatatcacagagatagaaaccaccacaggtgaaa

SEQ ID NO: 83858 - DNA, 75 bp, synthetic construct
  source 1..75: mol_type = other DNA
cattcttcgccatattctcgaaggtaaggaggcggtcacgccgctgatggagagagtacccggcgaactcatgga

SEQ ID NO: 83859 - DNA, 75 bp, synthetic construct
  source 1..75: mol_type = other DNA
tgacagaattcgttgttgcgattatcattctgggcgccgtagcgtggctcggaatgcttgctccgtctcaggtca

SEQ ID NO: 83860 - DNA, 75 bp, synthetic construct
  source 1..75: mol_type = other DNA
ccctgcagcctgggaagcgcctcacccgcttgaacgcgcgttgcgtgccctggtagtccgccaccaggcgctgac

SEQ ID NO: 83861 - DNA, 75 bp, synthetic construct
  source 1..75: mol_type = other DNA
cagagcaggctgtcagggatattgccgggcaggagcgtgaccgggctgtcacttctgaacgggaagccgtactgc

SEQ ID NO: 83862 - DNA, 75 bp, synthetic construct
  source 1..75: mol_type = other DNA
tgcagtttatgctggttctgctggcagcctgggccatagcctggggggccatgtttgtcatggggcaggctgttc

SEQ ID NO: 83863 - DNA, 75 bp, synthetic construct
  source 1..75: mol_type = other DNA
tcccattaagcaagcaggcaatagcaaccctgagagaaattcagaagctcagtggagatcaggaaatcatcttca

SEQ ID NO: 83864 - DNA, 75 bp, synthetic construct
  source 1..75: mol_type = other DNA
aaaagctgaaccgtatgctggaggaaatgtttgatgaatctgacatgtggctgacgtctgaatttccaactgtac

SEQ ID NO: 83865 - DNA, 75 bp, synthetic construct
  source 1..75: mol_type = other DNA
ctgaccgcacagggccacaaagcaacggtatttgaagatcctgaattaagcgactggctgccctatcaggataag

SEQ ID NO: 83866 - DNA, 75 bp, synthetic construct
  source 1..75: mol_type = other DNA
gtgatgcagcagtacagaaagttctggataacctgtcacagcaaaaacttgttcacagagatgtgctgccgttct

SEQ ID NO: 83867 - DNA, 75 bp, synthetic construct
  source 1..75: mol_type = other DNA
tcaataatatgtttgatcgcctggagggggcattccggaaactgtcagatttctcgtctgacatcgcgcatgagc

SEQ ID NO: 83868 - DNA, 75 bp, synthetic construct
  source 1..75: mol_type = other DNA
aatttaagaaactgatagatattgacttctcattcaatgaagacatcaatataatatcaggaaccaatgggacat

SEQ ID NO: 83869 - DNA, 75 bp, synthetic construct
  source 1..75: mol_type = other DNA
gcatcacgtcgcaacacccggattcagacagcgcgtctgaccggcggtgagcggagtctgctggccgccggggtg

SEQ ID NO: 83870 - DNA, 75 bp, synthetic construct
  source 1..75: mol_type = other DNA
tttacgcggcgctgcatgttgagggggtgcagcgtgtcgagctggcatcaccgcaggccgatattgtgctgagta

SEQ ID NO: 83871 - DNA, 75 bp, synthetic construct
  source 1..75: mol_type = other DNA
attcttccttaaaaattcgatggaagaagtcgccgcgattaaagatatcggcaactactttgaccgcgcagaata

SEQ ID NO: 83872 - DNA, 75 bp, synthetic construct
  source 1..75: mol_type = other DNA
tacacgtaccgggcgttcagcgagtcgagctgaagaaaccagcgcagaatgtggtgatcagtaacacccagtcag

SEQ ID NO: 83873 - DNA, 75 bp, synthetic construct
  source 1..75: mol_type = other DNA
atcagcacggaaggggcaacagcgtggtgcgcagaatatgatgaatggggcaacctgctgaatgaagagaacccg

SEQ ID NO: 83874 - DNA, 75 bp, synthetic construct
  source 1..75: mol_type = other DNA
acatccccgtatcttattgatatttctgttgatgataattatgaccaaaacaatggtgtgatgattgatgaaaat

SEQ ID NO: 83875 - DNA, 75 bp, synthetic construct
  source 1..75: mol_type = other DNA
aacaatatagcaagcagtatgattactattctgagttggcaaaaataggctcaagcttgctcgagcaggaattgg

SEQ ID NO: 83876 - DNA, 75 bp, synthetic construct
  source 1..75: mol_type = other DNA
gggatggatgcctcgcgcacggattataccgatatcattgcccggtctgtgaagattaatgcgggtatctgggcg

SEQ ID NO: 83877 - DNA, 75 bp, synthetic construct
  source 1..75: mol_type = other DNA
tgacactgtatgaagccattgtccgcgactataccggcaggacaccggaagcacgggagcagacgctgattgtca

SEQ ID NO: 83878 - DNA, 75 bp, synthetic construct
  source 1..75: mol_type = other DNA
cggataacatcaaggtaacgcgcccggaggatttggcgctggccgaattttacctcacccgaaccatccatcagg

SEQ ID NO: 83879 - DNA, 75 bp, synthetic construct
  source 1..75: mol_type = other DNA
gtagatgatatcgcgaaactcgccgggcaaaagctcgtagctcgggccaaaccgggggaatatgtacaagggata

SEQ ID NO: 83880 - DNA, 75 bp, synthetic construct
  source 1..75: mol_type = other DNA
aatggagagattgtgatcatcaccaccggcagttcggcgcgtatgagcaacaacaaagatcactcggtgattgac

SEQ ID NO: 83881 - DNA, 75 bp, synthetic construct
  source 1..75: mol_type = other DNA
gccgtcaccgatgacccggcaagcctcggcacggaatacctggaattctgccgcacggcaaaacacaaccccctg

SEQ ID NO: 83882 - DNA, 75 bp, synthetic construct
  source 1..75: mol_type = other DNA
atgtgcgccatttatcaggaatgccattatgagccttccgtggtgcaggttcatgctcaggcctctgccgttgcg

SEQ ID NO: 83883 - DNA, 75 bp, synthetic construct
  source 1..75: mol_type = other DNA
cacggtgttagccgacggcacatggaacctcggcgttccggcggcagacgtcagcaactggcctgcgggtacggt

SEQ ID NO: 83884 - DNA, 75 bp, synthetic construct
  source 1..75: mol_type = other DNA
gcatgcgctgctggcgcatccccgggtgaaacgtgtcgtcattgccataagtcctggcgatagccgttttgcaca

SEQ ID NO: 83885 - DNA, 75 bp, synthetic construct
  source 1..75: mol_type = other DNA
ttattgaacaatcgttgtctcgttcaactgaagcaacgctcagtatcatgggcgttacaaacccgcagttgcgtg

SEQ ID NO: 83886 - DNA, 75 bp, synthetic construct
  source 1..75: mol_type = other DNA
tctggaagagtttatcgtggtggccatcgtctgtgccctgttcctgtggcacgtacgttctgccctggtggcgat

SEQ ID NO: 83887 - DNA, 75 bp, synthetic construct
  source 1..75: mol_type = other DNA
accagcattaacggtgacagagcagctagttctcttgatagtctgtcttcagcagcagttaaaacagcaggtgca

SEQ ID NO: 83888 - DNA, 75 bp, synthetic construct
  source 1..75: mol_type = other DNA
atgcaacacgaactacagcctgattcactggttgatttgaaattcatcatggctgatactggcttcggtaaaacc

SEQ ID NO: 83889 - DNA, 75 bp, synthetic construct
  source 1..75: mol_type = other DNA
gcaggtattctgctgggcgtcggttccgcgaatttcagctggctgcccgccgttgtatcgcatgttatggcagaa

SEQ ID NO: 83890 - DNA, 75 bp, synthetic construct
  source 1..75: mol_type = other DNA
acaaagcaaatggcgatggccatggtttatctgcaacttacactattgacggtttctcatttgctggtgcttatg

SEQ ID NO: 83891 - DNA, 75 bp, synthetic construct
  source 1..75: mol_type = other DNA
cggtggtttctgagcagataaaggcgcgggccggtgagacatcgctggaaaccgctatcagtctgcagaaagccg

SEQ ID NO: 83892 - DNA, 75 bp, synthetic construct
  source 1..75: mol_type = other DNA
ggaacaaccatcttgaacgggactacgttgcgcgcagtcaggggcatgaagtttttgtgctcaatgcagattcgg

SEQ ID NO: 83893 - DNA, 75 bp, synthetic construct
  source 1..75: mol_type = other DNA
ggagcggttattacaactgggtacagcatgaaccctcagacataaaacaaagtgatgagcggctaaaactggaga

SEQ ID NO: 83894 - DNA, 75 bp, synthetic construct
  source 1..75: mol_type = other DNA
atacctgtaatggaaatttagacgctccacttgtttcaataatcattgcaacttataattctgaacttgatatag

SEQ ID NO: 83895 - DNA, 75 bp, synthetic construct
  source 1..75: mol_type = other DNA
caccgcttttaccgggatattgatgttattcgtgccctgaagaaacagcatgccgtctgcggctacagctggacc

SEQ ID NO: 83896 - DNA, 75 bp, synthetic construct
  source 1..75: mol_type = other DNA
cactgacggcacttatttctgcgccaccaacgtggcgcgggtgaatcttatccgacaggtacaggagccacgcag

SEQ ID NO: 83897 - DNA, 75 bp, synthetic construct
  source 1..75: mol_type = other DNA
caaaaatggatatcccttatttattgaggttcataataaaggtagctggagtgaggagaatactggtgacaatga

SEQ ID NO: 83898 - DNA, 75 bp, synthetic construct
  source 1..75: mol_type = other DNA
atctttgacagggaaaaagagcagcagcgactgcagcaggcgcaactcattggtgagattggtaaccaggtggca

SEQ ID NO: 83899 - DNA, 75 bp, synthetic construct
  source 1..75: mol_type = other DNA
gggtaacgattcagaccctgaaacagaccagggatataaccggcgaaatactcgaaacgtgggtggacggtcaca

SEQ ID NO: 83900 - DNA, 75 bp, synthetic construct
  source 1..75: mol_type = other DNA
cgggcgggagacgaaattttactataacgacgggaaccagctgacggcggtggtgtacccggacgggctggagag

SEQ ID NO: 83901 - DNA, 75 bp, synthetic construct
  source 1..75: mol_type = other DNA
attagtgctaaagatgcaaaaagcacacagaaagcctggaattgtcgtcactccagacagtcaaacgataaaaaa

SEQ ID NO: 83902 - DNA, 75 bp, synthetic construct
  source 1..75: mol_type = other DNA
actggattgtttaggattcagtcctgcaatgttaaatactttaaaatgccttggaaacaagcgaggtatgattct

SEQ ID NO: 83903 - DNA, 75 bp, synthetic construct
  source 1..75: mol_type = other DNA
ccgttggtgtgcctgttccgtggccttcagccacaccaccaacaggctggctgaaatgcaacggtgcaccttttt

SEQ ID NO: 83904 - DNA, 75 bp, synthetic construct
  source 1..75: mol_type = other DNA
gcagtcagttagccgacgacagtcgtcatgagggggattccattcgcttcctctatgcgaaatcgatgaacacct

SEQ ID NO: 83905 - DNA, 75 bp, synthetic construct
  source 1..75: mol_type = other DNA
ttcatcaaagatgaaaatggcaaaccgcaggtgccgttccacaccgtttacatgaccggcctgattcgtgatgac

SEQ ID NO: 83906 - DNA, 75 bp, synthetic construct
  source 1..75: mol_type = other DNA
gaactgctggaaaaacgtaccggcaatatgatgcagccgcagctggcggacaaaatccgtaagcgcaccgagaag

SEQ ID NO: 83907 - DNA, 75 bp, synthetic construct
  source 1..75: mol_type = other DNA
tgccacgccgcccgtggtgaccattaatccggtggcaaccgataacgtcattaacacgccggaacacactcaggc

SEQ ID NO: 83908 - DNA, 75 bp, synthetic construct
  source 1..75: mol_type = other DNA
gcaggcattctgtatgagttcacctggaaccagttctgtgactggtatctggagctgaccaagccggtaatgaac

SEQ ID NO: 83909 - DNA, 75 bp, synthetic construct
  source 1..75: mol_type = other DNA
atgcgcaaattcacactaaacatattcacgctttccctcggtctggccgtcatgccgatggtcgaggcagcacca

SEQ ID NO: 83910 - DNA, 75 bp, synthetic construct
  source 1..75: mol_type = other DNA
accgccatcagtcaccagaagtctgcacttcacacgccggcacaacaggccattcatctggcccttcctgtggtg

SEQ ID NO: 83911 - DNA, 75 bp, synthetic construct
  source 1..75: mol_type = other DNA
cagttcccgaacggcattgagccgcacggtactgacgcgctgcgcttcaccctggcggcgctggcttctaccggt

SEQ ID NO: 83912 - DNA, 75 bp, synthetic construct
  source 1..75: mol_type = other DNA
atgaaaaagaaaaaccgccccgtacagcaggcggctaactcagatattcgcacgtctgatattacgccgaccacc

SEQ ID NO: 83913 - DNA, 75 bp, synthetic construct
  source 1..75: mol_type = other DNA
actatgtccgagcagttctgagctatcttggcatagattttgatgaggcggatatagtattaagtgtttgccatt

SEQ ID NO: 83914 - DNA, 75 bp, synthetic construct
  source 1..75: mol_type = other DNA
gctggctttaaggcactggctgacatgagtccgtttgaatccctgctgattgtggatttaggcggaaccacgctg

SEQ ID NO: 83915 - DNA, 75 bp, synthetic construct
  source 1..75: mol_type = other DNA
gtatacaagcaaggaccccagaaataaagtcaaaaatttttttcttgacaggcggtaaaacagcaatcatatcaa

SEQ ID NO: 83916 - DNA, 75 bp, synthetic construct
  source 1..75: mol_type = other DNA
catttttggcggcaaagcgggcggcgtgttcttttgtgcttcggatatcggctgggtggtagggcattcgtatat

SEQ ID NO: 83917 - DNA, 75 bp, synthetic construct
  source 1..75: mol_type = other DNA
agtgaacgcggtggcgtcaatgctgcgctcactgggcgtgcagcgtggcgatcgggtgctggtgtatatgccgat

SEQ ID NO: 83918 - DNA, 75 bp, synthetic construct
  source 1..75: mol_type = other DNA
tatcaagcgcctgcggatgattgaacgcgatctgcacacacagttatccagtgtcgggtgtgacgtaggcgagta

SEQ ID NO: 83919 - DNA, 75 bp, synthetic construct
  source 1..75: mol_type = other DNA
agccggacggcacggtggagatcagtgtcaccagccagacggcgggagtcagtactgtcactgccagcatcaaca

SEQ ID NO: 83920 - DNA, 75 bp, synthetic construct
  source 1..75: mol_type = other DNA
tggttttcctcattgggagcgacaacggtactggcggctgatggggtggatgcccttgagttgctgggaggtttc

SEQ ID NO: 83921 - DNA, 75 bp, synthetic construct
  source 1..75: mol_type = other DNA
ttccgtatccgcgtaatgctgaaaaagcgcgctacctgaaacacgttggtatttacgcttatcgtcgcgatgtgc

SEQ ID NO: 83922 - DNA, 75 bp, synthetic construct
  source 1..75: mol_type = other DNA
aagtcggcttccggtatagtaacacatgactatgatgccgattatatttgtggttgtggtgaaattatgtgtcct

SEQ ID NO: 83923 - DNA, 75 bp, synthetic construct
  source 1..75: mol_type = other DNA
tgcttgaagtcttactggcgatgagtattttcaccgctgttgctctgactttaatgagcagtatgcaagggcaac

SEQ ID NO: 83924 - DNA, 75 bp, synthetic construct
  source 1..75: mol_type = other DNA
ctggataaagggaaagtgaaatcacaatgccgactgaaaagtaatgagattgttggttctcctgaattttttctg

SEQ ID NO: 83925 - DNA, 75 bp, synthetic construct
  source 1..75: mol_type = other DNA
acaagttactaccattaagtattctctgcaggataaaaacggcagtaaaggtgattatcttgtaaaccagtcagg

SEQ ID NO: 83926 - DNA, 75 bp, synthetic construct
  source 1..75: mol_type = other DNA
agtgctgggtcaggcgcaggggacgcggctcaggggaggcgatacggtgaccgttaaggcgctcggggaggcggg

SEQ ID NO: 83927 - DNA, 75 bp, synthetic construct
  source 1..75: mol_type = other DNA
tgagtccgtttgaatccctgctgattgtggatttgggcggaaccacgctggatgtggcaaaggttcaggggcaac

SEQ ID NO: 83928 - DNA, 75 bp, synthetic construct
  source 1..75: mol_type = other DNA
ttcgggtcgcctgctcgggtgatatcgacggcactgttgcaaagttagcgatgaggcagccttttgtcttattca

SEQ ID NO: 83929 - DNA, 75 bp, synthetic construct
  source 1..75: mol_type = other DNA
attcgtgaaaaggaagaaacactgaaacaacgagtgatccgcgcgctggcgggtttttcgggttacgggcgggtg

SEQ ID NO: 83930 - DNA, 75 bp, synthetic construct
  source 1..75: mol_type = other DNA
gcagcgcattagcgacagctattgttatggctctttctgcaccagcattcgctgctgataacgcggtatcaactg

SEQ ID NO: 83931 - DNA, 75 bp, synthetic construct
  source 1..75: mol_type = other DNA
ttgggacttgaaccgaagaacacggcggtgcggagtccggagagtaacggaatagcagagagcttcgtgaaaacg

SEQ ID NO: 83932 - DNA, 75 bp, synthetic construct
  source 1..75: mol_type = other DNA
ctcaccggctctggcgacacatggatcaacagcaaacctgccgcgcgggccgcggcgactgcggcatcgcggcag

SEQ ID NO: 83933 - DNA, 75 bp, synthetic construct
  source 1..75: mol_type = other DNA
ctggactgagtgcgataccttcgaagggtattacgattggtcgagaaacaaatggtgggcagttactgacgatgg

SEQ ID NO: 83934 - DNA, 75 bp, synthetic construct
  source 1..75: mol_type = other DNA
ctgccgctggcgctcatcagcacggaaggggcaacagcgtggtgcgcagaatatgatgaatggggcaacctgctg

SEQ ID NO: 83935 - DNA, 75 bp, synthetic construct
  source 1..75: mol_type = other DNA
atggcaagtcaacacattaatatccataacagcggtgtgatgtcgggaaatgtcaccactgcaggtgatgtgaac

SEQ ID NO: 83936 - DNA, 75 bp, synthetic construct
  source 1..75: mol_type = other DNA
atgaaagcgaaaggcatcccgtttaacgaagtaaaagaaaaacttctcaacactccagaagccatcaaaggatat

SEQ ID NO: 83937 - DNA, 75 bp, synthetic construct
  source 1..75: mol_type = other DNA
atggaacacggtgcccgtttaagtaccagtcgtgtaatggccatcgcctttatatttatgtcagtgcttattgtt

SEQ ID NO: 83938 - DNA, 75 bp, synthetic construct
  source 1..75: mol_type = other DNA
taaggagtcatccagaattaataattcttggattaatggtgatgattatcgccatgctcataattccattgccca

SEQ ID NO: 83939 - DNA, 75 bp, synthetic construct
  source 1..75: mol_type = other DNA
acgaagtaaaggaaaaacttctcaacactccagaagctatcaaaggatacgaagaggctgataaagagctggaga

SEQ ID NO: 83940 - DNA, 75 bp, synthetic construct
  source 1..75: mol_type = other DNA
tcgggctgctgcccggcgcgctggtgggcggcatgctggccgaccgctatggccgcaagcgtattctcattgcct

SEQ ID NO: 83941 - DNA, 75 bp, synthetic construct
  source 1..75: mol_type = other DNA
ctgggttatcgctcgccacgggaatatctacggcagcgggcttataatgggttaagtgataacaggtgtctggaa

SEQ ID NO: 83942 - DNA, 75 bp, synthetic construct
  source 1..75: mol_type = other DNA
gcgcactgcttgccggtgaggaaaacgccagactgcgtgcagcccactggttacatgagaggggcctgaaagtat

SEQ ID NO: 83943 - DNA, 75 bp, synthetic construct
  source 1..75: mol_type = other DNA
tgttggggcttgaaccgaagaacacggcggtgcggagtccggagagtaacggcatagcagagagcttcgtgaaaa

SEQ ID NO: 83944 - DNA, 75 bp, synthetic construct
  source 1..75: mol_type = other DNA
tgtatccgggaagcaaagggaaatgaatttttttatcttcatcttggggtaccttatcgagttgcggttgtgcaa

SEQ ID NO: 83945 - DNA, 75 bp, synthetic construct
  source 1..75: mol_type = other DNA
gtgtgaaattcccgtcgccactctgagccttactcatcgcttccttcacctcttcttcttcagcaaggatgaaga

SEQ ID NO: 83946 - DNA, 75 bp, synthetic construct
  source 1..75: mol_type = other DNA
accgcctgacgttgaccgttgggctttgctttttagttgccctgatggaagggctggatttacaggccgccggta

SEQ ID NO: 83947 - DNA, 75 bp, synthetic construct
  source 1..75: mol_type = other DNA
ctcagtggctgatggttcgacggcgaacatgctgcgggtgagggtgaccgatgtgttcgggaatgtacttgccgg

SEQ ID NO: 83948 - DNA, 75 bp, synthetic construct
  source 1..75: mol_type = other DNA
ctgatgtcccgggcgctgcacgaccagctcagtacggaagaagggcgttctgaaatggtggatggcgtgacacat

SEQ ID NO: 83949 - DNA, 75 bp, synthetic construct
  source 1..75: mol_type = other DNA
ccgatggcgcacgataccaaattatacaattctgatgattctgccgtctttgccagcaggcgcggacggtgtttt

SEQ ID NO: 83950 - DNA, 75 bp, synthetic construct
  source 1..75: mol_type = other DNA
ccaactggtcagtcagaaggatgcgcaggggcgtgaaacccgttatgagtacagcgccgcaggcgacctgacagc

SEQ ID NO: 83951 - DNA, 75 bp, synthetic construct
  source 1..75: mol_type = other DNA
actacgaggagatgaaaacgaccgggatctttaagaaaaaatgcccggaagaacactacgtcgctttccgcgcat

SEQ ID NO: 83952 - DNA, 75 bp, synthetic construct
  source 1..75: mol_type = other DNA
ttcagcggtcgctgaatttgaacgagatcttttacttgaacgaacttattcagggatagcaagagcacgggatgc

SEQ ID NO: 83953 - DNA, 75 bp, synthetic construct
  source 1..75: mol_type = other DNA
catttaagcgcatgcggcgtgctcacccaggtgggaaaggattatgttgtcgcccgcaaacccgaacagaacgat

SEQ ID NO: 83954 - DNA, 75 bp, synthetic construct
  source 1..75: mol_type = other DNA
atgtcccgctttttgatttgtagttttgccctggttttactttatcccgccgggattgatatgtacctcgttggt

SEQ ID NO: 83955 - DNA, 75 bp, synthetic construct
  source 1..75: mol_type = other DNA
ccatcggcattaatttaattggtgactatacccatgctgacttaggcacaggcagcaccattaagagtaacgatg

SEQ ID NO: 83956 - DNA, 75 bp, synthetic construct
  source 1..75: mol_type = other DNA
ataccaaagccgatcgtctcgctgaattaaaaatccgttcgccctcaattcaactgataaaatttggcgctattg

SEQ ID NO: 83957 - DNA, 75 bp, synthetic construct
  source 1..75: mol_type = other DNA
gctccggctgttcctggaacccaagtgggaggccgtcaccgctgatgccatggtggtcaaaggtagctatcgggc

SEQ ID NO: 83958 - DNA, 75 bp, synthetic construct
  source 1..75: mol_type = other DNA
catgctggcggagaatcatacgcattcggtgccgagagccgacgacgactggcgctcatttctgatcgggaatgc

SEQ ID NO: 83959 - DNA, 75 bp, synthetic construct
  source 1..75: mol_type = other DNA
cttaaacaggcagaaaatcagagacgctatcagcgaacatacaacatccgtgaaacagcaactggatacgctgag

SEQ ID NO: 83960 - DNA, 75 bp, synthetic construct
  source 1..75: mol_type = other DNA
attctgataccgaccttgccatccggcatgggcggcgttcacacgcatttaaaaccgactggtaccaacacccac

SEQ ID NO: 83961 - DNA, 75 bp, synthetic construct
  source 1..75: mol_type = other DNA
cgtttattggcgtcctgctctctggctgggtcgcggatctgctggtacgtaagggcttttcactgggctttgcgc

SEQ ID NO: 83962 - DNA, 75 bp, synthetic construct
  source 1..75: mol_type = other DNA
tacgcaaaacggcgacagcgccggatgcgtggtggtggctccgccagccgtgccgggcggcaagttccgcattct

SEQ ID NO: 83963 - DNA, 75 bp, synthetic construct
  source 1..75: mol_type = other DNA
aaacggggcgcaatactggccgggcagataccatgaacgtaaccatgcggtggctaatcagcatctgagcggtgg

SEQ ID NO: 83964 - DNA, 75 bp, synthetic construct
  source 1..75: mol_type = other DNA
gactatgggccactggatcagatgcagctcaccaccgccgcccgctactgccagctcattatgaaggagcacaaa

SEQ ID NO: 83965 - DNA, 75 bp, synthetic construct
  source 1..75: mol_type = other DNA
acgatgcacgcactgtttaacgaaccgctgcagggcgagtccgccaataccagcaatattgtggagattttttga

SEQ ID NO: 83966 - DNA, 75 bp, synthetic construct
  source 1..75: mol_type = other DNA
gcgctcaccgccagcgcagccggattgattgtggttactcgccgcgcgtggcgagtcgaggaaaatgaagcactc

SEQ ID NO: 83967 - DNA, 75 bp, synthetic construct
  source 1..75: mol_type = other DNA
tgccatccggcatgggcggcgttcacacgcatttaaaaccgactggtaccaacacccaccatgtactgaagaaca

SEQ ID NO: 83968 - DNA, 75 bp, synthetic construct
  source 1..75: mol_type = other DNA
ttacaggtattcgccttggcggtctgtcatctgttcagacatggaaaggccccggctggtctgacaggtcaggtt

SEQ ID NO: 83969 - DNA, 75 bp, synthetic construct
  source 1..75: mol_type = other DNA
caaatcctgaacaacgccgcaccattctggaggagtacggcttcaagttcgatcgccgaatccgcgaagatgaat

SEQ ID NO: 83970 - DNA, 75 bp, synthetic construct
  source 1..75: mol_type = other DNA
aaggcggtcagcaccacgcagggcgggctgacgcgcagtatggagtacgatgctgccggacgtgtcatcagtctg

SEQ ID NO: 83971 - DNA, 75 bp, synthetic construct
  source 1..75: mol_type = other DNA
gaaaaatacctggcgggtggtgctgagccgggatgagcttgagccggacacgccccgtcttattgaagtatccgg

SEQ ID NO: 83972 - DNA, 75 bp, synthetic construct
  source 1..75: mol_type = other DNA
tagggtacagtcgttggcaacatggtgaatatctgaatgcgatagtaaactggtattatcaacaatatcaaacag

SEQ ID NO: 83973 - DNA, 75 bp, synthetic construct
  source 1..75: mol_type = other DNA
ctggtgcaggtcctggtcagaacaaatgacggtggcagacaggccgtccgggaatacatcgtcataactgacgaa

SEQ ID NO: 83974 - DNA, 75 bp, synthetic construct
  source 1..75: mol_type = other DNA
gttttctgtaagccggaagccttctctgcaattcgattctctgcgggtatggcaaacgcattccagtatgtaagc

SEQ ID NO: 83975 - DNA, 75 bp, synthetic construct
  source 1..75: mol_type = other DNA
gtatggggtggcattcggcgaaaaaggcattaatccgctgaccagaacctcgtttattattaccgaagatctgac

SEQ ID NO: 83976 - DNA, 75 bp, synthetic construct
  source 1..75: mol_type = other DNA
tgttcttccggtggattatcagagattaaacttcgggagattgacgacccattatcaacatgtaaacaaaggcga

SEQ ID NO: 83977 - DNA, 75 bp, synthetic construct
  source 1..75: mol_type = other DNA
tctaaagatgttggtatttcaaatggtctaagaatccagctaacttttcaggaaattaactttaaagctattgtg

SEQ ID NO: 83978 - DNA, 75 bp, synthetic construct
  source 1..75: mol_type = other DNA
ggtgatatcactgtcaccaacacagctccgcaacatatgactgcaaccttgcaggataaaaatggcaacccacta

SEQ ID NO: 83979 - DNA, 75 bp, synthetic construct
  source 1..75: mol_type = other DNA
tttacggacgcttttacctggttaatttcgataacgtcaaagcagtctccatgtctgacagtgaagaatgtggcg

SEQ ID NO: 83980 - DNA, 75 bp, synthetic construct
  source 1..75: mol_type = other DNA
gctgccggacgtgtcatcagtctgactaacgagaacggcagccacagcgacttcagctacgatgcgctggaccgg

SEQ ID NO: 83981 - DNA, 75 bp, synthetic construct
  source 1..75: mol_type = other DNA
aggctgggaagatatagaggattttggggaaacacatcccgattttttgaagcaatatggtgattttgaaaatgg

SEQ ID NO: 83982 - DNA, 75 bp, synthetic construct
  source 1..75: mol_type = other DNA
agactttggtgagtcggaatggattagttacaccgggtcaggttatctgctccgcctggaggcgtggttatttcc

SEQ ID NO: 83983 - DNA, 75 bp, synthetic construct
  source 1..75: mol_type = other DNA
ccgataccatcaacgttctggccctgaatgcgggccggatcgctgtggatattgacggcattgaactggctgcgc

SEQ ID NO: 83984 - DNA, 75 bp, synthetic construct
  source 1..75: mol_type = other DNA
ctacctgatcctgcaggactggtttattggtgccgtcacccgcccgatgtatcgtgcctggctgaaacaggctgt

SEQ ID NO: 83985 - DNA, 75 bp, synthetic construct
  source 1..75: mol_type = other DNA
cgaagtataaatctgatggtcgtaaactggctaaaggcagttatagcgacaatgtacgccttgacccgtgggtgt

SEQ ID NO: 83986 - DNA, 75 bp, synthetic construct
  source 1..75: mol_type = other DNA
atgagcgcatcggcactggtttgcctcgcccctggtagtgaagagactgaagccgtcaccactatcgacctcttg

SEQ ID NO: 83987 - DNA, 75 bp, synthetic construct
  source 1..75: mol_type = other DNA
acttcactaacgtggctaactactggtaaaggcccaaagtttgacgatgcaagaaatgatgtaattgctattaca

SEQ ID NO: 83988 - DNA, 75 bp, synthetic construct
  source 1..75: mol_type = other DNA
cgcctgaacataatctgttgcgagtgccggaatagtgaagttatgcagcgcgtgctggcgttttatcaggggaaa

SEQ ID NO: 83989 - DNA, 75 bp, synthetic construct
  source 1..75: mol_type = other DNA
gcaatacgacaccgaactgccctggtttgaacacactgacgacgggctgacagagcacggtcaacagtgtcctta

SEQ ID NO: 83990 - DNA, 75 bp, synthetic construct
  source 1..75: mol_type = other DNA
attggtatcgaccagtggtcaaccgtgtatgcgttccaggaactgaaactctctaaagcggtggcgattcagggc

SEQ ID NO: 83991 - DNA, 75 bp, synthetic construct
  source 1..75: mol_type = other DNA
tttgaacacactgacgacgggctgacagcgcacggtcagcagtgtccttatgtcagaccggaacgcagggaggta

SEQ ID NO: 83992 - DNA, 75 bp, synthetic construct
  source 1..75: mol_type = other DNA
cagcccccgcattgccgacaggatcacagacggggggcgcaactggttgtcgttcaactggcccagctaccgttc

SEQ ID NO: 83993 - DNA, 75 bp, synthetic construct
  source 1..75: mol_type = other DNA
atgcagaccttcttcccgaatatcccggtggccacaccgaccaccttcctggtcaacgtcaacacacttgaggca

SEQ ID NO: 83994 - DNA, 75 bp, synthetic construct
  source 1..75: mol_type = other DNA
atgagcagaaaacactggacacacagaataccgcgagtggcggcgaaatgggcactggtagcgatactggtgcct

SEQ ID NO: 83995 - DNA, 75 bp, synthetic construct
  source 1..75: mol_type = other DNA
gcaatacgacactgaacggccctggtttgaacacgctgacgaagggctgacggagcacggtcatgagtgccctta

SEQ ID NO: 83996 - DNA, 75 bp, synthetic construct
  source 1..75: mol_type = other DNA
caacctggacattctcccgcgcagaaaatatcgatcctctcgccagactgcatctgaaggcatccgctcagcaaa

SEQ ID NO: 83997 - DNA, 75 bp, synthetic construct
  source 1..75: mol_type = other DNA
cggcttctcaggtctgcgaaattgttgacggtgttcggcagtgtctgcagaacttatcgcctgtaagagcagaat

SEQ ID NO: 83998 - DNA, 75 bp, synthetic construct
  source 1..75: mol_type = other DNA
ggactggaagcggccagagccaaaggtcgtattggtggcagacgtccgaagctcaccgcgagtgagtgggaacag

SEQ ID NO: 83999 - DNA, 75 bp, synthetic construct
  source 1..75: mol_type = other DNA
gaagttagcctgcaaccgtatggcgtctttactcatcgccatcaaccagagatcgccacacacctcggtgctgac

SEQ ID NO: 84000 - DNA, 75 bp, synthetic construct
  source 1..75: mol_type = other DNA
caatgtcaccacgattattatggggagcagtactgcacacactgccagaccggaggattcagtattccccggaca

SEQ ID NO: 84001 - DNA, 75 bp, synthetic construct
  source 1..75: mol_type = other DNA
ctgtatgaacacctgtccggcgtaccgccacatcggcggacacggctatggctctatctatcctggacctatcgg

SEQ ID NO: 84002 - DNA, 75 bp, synthetic construct
  source 1..75: mol_type = other DNA
caatgtcaccacgattattatggggagcggtactgcacacactgccagaccggaggtttcagtgaggaggcagtg

SEQ ID NO: 84003 - DNA, 75 bp, synthetic construct
  source 1..75: mol_type = other DNA
ggaattatctttgacaatgatgaggatagaacggattcggcagcactgttgccctgtatcgaacaggccagagag

SEQ ID NO: 84004 - DNA, 75 bp, synthetic construct
  source 1..75: mol_type = other DNA
gttcctcgcctgaaggtagcgatcatctatgatgttggcatatcgactttgtataagaggtttccggtggcgtag

SEQ ID NO: 84005 - DNA, 75 bp, synthetic construct
  source 1..75: mol_type = other DNA
ggaattatcttcgacaacgatgaggataaaacagattcggcagcactgttgccctgtatcgcacaggccagggag

SEQ ID NO: 84006 - DNA, 75 bp, synthetic construct
  source 1..75: mol_type = other DNA
atgaaaaaattactgcgtctttttttcccgctctcgctgcgggtacgttttctgttggcaacggcagcggtagta

SEQ ID NO: 84007 - DNA, 75 bp, synthetic construct
  source 1..75: mol_type = other DNA
tagtggatgttgataatccagaatcatcgacagaatctgttggtatcggtgcaggtgttgacgcttcagttatga

SEQ ID NO: 84008 - DNA, 75 bp, synthetic construct
  source 1..75: mol_type = other DNA
tacagcgttgttttatcggcactggcccgctttacagccaggggcgaaaaaggtcatcgtcttatttcatcgcgg

SEQ ID NO: 84009 - DNA, 75 bp, synthetic construct
  source 1..75: mol_type = other DNA
tggcgcaggtatgtcagcgactgttagctgaaacggagcgactggacgtgctggtcaatgcggcgggaattttgc

SEQ ID NO: 84010 - DNA, 75 bp, synthetic construct
  source 1..75: mol_type = other DNA
ctgtattttcagccctgaccctgggtgttgcgacaagtgcgtctgctgctaccacggttaatggtggtactgttc

SEQ ID NO: 84011 - DNA, 75 bp, synthetic construct
  source 1..75: mol_type = other DNA
aaatcagtggcactaagtccgacagaccggggcttaaaaaactgctcaggacactatcggcaggagacactctgg

SEQ ID NO: 84012 - DNA, 75 bp, synthetic construct
  source 1..75: mol_type = other DNA
caatgtcatcacgattattatggggagcggtactgcactcactgccatacagggcacttcagtgaggagggagtg

SEQ ID NO: 84013 - DNA, 75 bp, synthetic construct
  source 1..75: mol_type = other DNA
atgctttccagaggtgacaccctggtcgtatggaagttagatcgtcttgggcgcagcatgcgtcacttagttgtg

SEQ ID NO: 84014 - DNA, 75 bp, synthetic construct
  source 1..75: mol_type = other DNA
atgaaaaagttaacagtggcggctttggcagtagcaactcttctctctggcagtgcctttgcgcatgaagccggc

SEQ ID NO: 84015 - DNA, 75 bp, synthetic construct
  source 1..75: mol_type = other DNA
agcagcagtcggtggtgaattatgaacagaaaatccagaacgcctttaaagaagtggcagatgcgctggcattac

SEQ ID NO: 84016 - DNA, 75 bp, synthetic construct
  source 1..75: mol_type = other DNA
tactggtgaaaaaaagcggagcggtgctcagtgaaggggcatttgaagcctatgccacattacaggtggattacc

SEQ ID NO: 84017 - DNA, 75 bp, synthetic construct
  source 1..75: mol_type = other DNA
gctgataaatataaacagactcaaacgccacgtaatttatcgattattagtccaacagggcttggcgatcgcgcc

SEQ ID NO: 84018 - DNA, 75 bp, synthetic construct
  source 1..75: mol_type = other DNA
aagtcgctatctttacgacccgctgggccgcagggtggcaaaacgggtatggcggcgtgaacgggacctgacggg

SEQ ID NO: 84019 - DNA, 75 bp, synthetic construct
  source 1..75: mol_type = other DNA
taaacagttccaccgttccgggcgtatcgtcgcggctatttgcgccgcgccagccaccgtgctggtcccgcacga

SEQ ID NO: 84020 - DNA, 75 bp, synthetic construct
  source 1..75: mol_type = other DNA
ggcgtgctgctggcgtacatgttctttggtcgtggtagcgctaaacagtctgcgggcggtgcggcaatcatccac

SEQ ID NO: 84021 - DNA, 75 bp, synthetic construct
  source 1..75: mol_type = other DNA
tcggcgcaatccggcgtgtggtggagccgctcggctatctcatcaacgtgacggagtggtgggaaaacagtgacc

SEQ ID NO: 84022 - DNA, 75 bp, synthetic construct
  source 1..75: mol_type = other DNA
cgcaagaaggactttccggtaaagccatgagacgtgtcgtaatgggcagtttcgcgggcgcgttgatggaatggt

SEQ ID NO: 84023 - DNA, 75 bp, synthetic construct
  source 1..75: mol_type = other DNA
cgctaacatcacgccaatggccgtggcctccacgcatgtggtgtgcgatcctacccgtacccgcaagttacttct

SEQ ID NO: 84024 - DNA, 75 bp, synthetic construct
  source 1..75: mol_type = other DNA
ccggcgcatccgcgttacattcagaccgtctggggtctgggctacgtctttgtaccggacggttctaaagcatga

SEQ ID NO: 84025 - DNA, 75 bp, synthetic construct
  source 1..75: mol_type = other DNA
aaatcagtggcactaagtccgacagaccggggctgaaaaagctgctcaggacactatcggcaggagacacgctgg

SEQ ID NO: 84026 - DNA, 75 bp, synthetic construct
  source 1..75: mol_type = other DNA
aagcgtttttccagccagggatatgttgagcccggaaaatacaatttacaggttcaactaaataaacagccattg

SEQ ID NO: 84027 - DNA, 75 bp, synthetic construct
  source 1..75: mol_type = other DNA
atgacagaagccgaaatactgcgattaatccgccgcgtctctggaatcagccagcagcatgacgaacaggccacg

SEQ ID NO: 84028 - DNA, 75 bp, synthetic construct
  source 1..75: mol_type = other DNA
atgaccgagaccgaagcgctcgggataatccgcagtattaccggaatcagccagcaggctgacgaacaggccacg

SEQ ID NO: 84029 - DNA, 75 bp, synthetic construct
  source 1..75: mol_type = other DNA
gtaccgtcgccgcgtgcagatgtaccaggagaaagaaaaaattacgtaccagtggaagaagccggagcggttacg

SEQ ID NO: 84030 - DNA, 75 bp, synthetic construct
  source 1..75: mol_type = other DNA
tgagttgctggcataccgtcgccgttctcaacaacggagggagagcgcgaaaaatacttaccagtggaagaagcc

SEQ ID NO: 84031 - DNA, 75 bp, synthetic construct
  source 1..75: mol_type = other DNA
tgtatatttgaacgaatacagcttgacaactttaactttcgcgattgtgagttcgaaaaatgtcgcttcgtaaac

SEQ ID NO: 84032 - DNA, 75 bp, synthetic construct
  source 1..75: mol_type = other DNA
acattgccgatctctgaataccttgacgccaacaatcagaaaaataagcaaaacattgaaagaaagaaaaaaaat

SEQ ID NO: 84033 - DNA, 75 bp, synthetic construct
  source 1..75: mol_type = other DNA
acattatcggcaggcgacacactggttgtctggaagctggatcggctggggcgcagtatgcggcatcttgtcgtg

SEQ ID NO: 84034 - DNA, 75 bp, synthetic construct
  source 1..75: mol_type = other DNA
cctgggtgccacctgaaatgattgaacgtattgaagttctgcgtggtccggcagctgcgcgttatggcaacggcg

SEQ ID NO: 84035 - DNA, 75 bp, synthetic construct
  source 1..75: mol_type = other DNA
caactgattaagcgtctgcagcaattcgtaccggatgccttacccgtggtgcgtaaagccagccggcactgcaga

SEQ ID NO: 84036 - DNA, 75 bp, synthetic construct
  source 1..75: mol_type = other DNA
tacagtcagtaaattatgtgcaagccagaaagagtttgatgattttttaacgctggcagaaaaactgaaagaaaa

SEQ ID NO: 84037 - DNA, 75 bp, synthetic construct
  source 1..75: mol_type = other DNA
tggtggttttctttattgcaacagaagtgatagcacaagtggtagcgcaatgcgtattgaaaatgcaatggttga

SEQ ID NO: 84038 - DNA, 75 bp, synthetic construct
  source 1..75: mol_type = other DNA
ctctatcgacaccagtacaccaatggggcgctttttctttcacgtaatgggggcgctggcagaaatggaacgtga

SEQ ID NO: 84039 - DNA, 75 bp, synthetic construct
  source 1..75: mol_type = other DNA
gaaaagacttctctacatggatcactgatcgcatctctgaatatgacttcaccattgggcacgattactcagtcc

SEQ ID NO: 84040 - DNA, 75 bp, synthetic construct
  source 1..75: mol_type = other DNA
atgctttccagaggtgataccctggtcgtatggaagttagaccgtcttgggcgcagcatgcgtcacttagttgtg

SEQ ID NO: 84041 - DNA, 75 bp, synthetic construct
  source 1..75: mol_type = other DNA
agctatgcaaatacgcagtttaaaaatgttccgtcaacttttcaggtgggttatatcaatgactttggtggatta

SEQ ID NO: 84042 - DNA, 75 bp, synthetic construct
  source 1..75: mol_type = other DNA
aaccaacgtttatctctcaaatcctccccacattatctcagtactttaaccactcaaaagggagtatttttaatg

SEQ ID NO: 84043 - DNA, 75 bp, synthetic construct
  source 1..75: mol_type = other DNA
gctgtcagtgcatggaccatatgcctgccgtctcccactggctgcgttatgccgattcagcccgcgtcgttaatg

SEQ ID NO: 84044 - DNA, 75 bp, synthetic construct
  source 1..75: mol_type = other DNA
atacctgacccgaaaagggatccttgccgcaccgggcgtccgtctgaataacaagaatgaactcgtcatcccttt

SEQ ID NO: 84045 - DNA, 75 bp, synthetic construct
  source 1..75: mol_type = other DNA
taatgatcaaatatctaaaataacacaaaaacaatacacttttgatgaagtagcaagaaatgaaaaaaatacaat

SEQ ID NO: 84046 - DNA, 75 bp, synthetic construct
  source 1..75: mol_type = other DNA
agtttaaacgcgaatccgctcaactggttgttgaccagaaatacacggtggcagatgccgcgaaagctatggatg

SEQ ID NO: 84047 - DNA, 75 bp, synthetic construct
  source 1..75: mol_type = other DNA
gcgtgtgaaagtccgtgagccacgttttgatgtgcgtattggtggcgatggtgcgcattgcacggtaatccgcta

SEQ ID NO: 84048 - DNA, 75 bp, synthetic construct
  source 1..75: mol_type = other DNA
ttcctgtttcgcaaccaataatcattaacgctgctggatatccggtatataacggacagattgccaaattcgtta

SEQ ID NO: 84049 - DNA, 75 bp, synthetic construct
  source 1..75: mol_type = other DNA
gaattaagtcctccctgcttatgggattctcgttacgcatgtcagcaaaaaatgcgaattttcaacttactatca

SEQ ID NO: 84050 - DNA, 75 bp, synthetic construct
  source 1..75: mol_type = other DNA
aatcgatgccagccaggggcgtccttccattgatttactgcgcgcgttaattgctcaggaaccgctgctcggtgc

SEQ ID NO: 84051 - DNA, 75 bp, synthetic construct
  source 1..75: mol_type = other DNA
cacggacatacagcgaccgttcatgccgcaggaaatgcggaaaataccgttaaaaatattgcgtttaactacatt

SEQ ID NO: 84052 - DNA, 75 bp, synthetic construct
  source 1..75: mol_type = other DNA
aaaacactgctggcggtagagattaaactggcgcagaaagattttgctggcgcgcaaaacttgctggcgaaaatc

SEQ ID NO: 84053 - DNA, 75 bp, synthetic construct
  source 1..75: mol_type = other DNA
tgtttgtgcggaatgagttaatgccattgcaaaagaattttgaatcactgaataactgggctggaaaagaaatta

SEQ ID NO: 84054 - DNA, 75 bp, synthetic construct
  source 1..75: mol_type = other DNA
tgctggcagaagaacattacccgctgccggaacgtacccagcagacgctggaacatgccctgctgaatgccattg

SEQ ID NO: 84055 - DNA, 75 bp, synthetic construct
  source 1..75: mol_type = other DNA
gccaccgctattatgacccgctgcaggggcggtatatcactcaggatccgattgggctgaaggggggatggaatt

SEQ ID NO: 84056 - DNA, 75 bp, synthetic construct
  source 1..75: mol_type = other DNA
tttttattggccgcaacggcaacgtcggtgaaattggccatattcaggtcgaaccgctgggtgaacgctgccact

SEQ ID NO: 84057 - DNA, 75 bp, synthetic construct
  source 1..75: mol_type = other DNA
gcagaaccaggaggacgtgaacaaccttcgcaatgcgatgaaaagcgccaaaggaccaggtaacttccgcaatct

SEQ ID NO: 84058 - DNA, 75 bp, synthetic construct
  source 1..75: mol_type = other DNA
ctatgtggaatgcgtacaaacagatcgctggtatgagccgccagtaagctttgacggactggcgcgcaccttccg

SEQ ID NO: 84059 - DNA, 75 bp, synthetic construct
  source 1..75: mol_type = other DNA
accggacataaatcaggagatctatggcctgcccggctatctttctgctattccgtcagccctgctcaatgagtc

SEQ ID NO: 84060 - DNA, 75 bp, synthetic construct
  source 1..75: mol_type = other DNA
gtagttggttgattgagattgaaggtaaagtaagtttaagaaaattaacaagaattccagttggaaaagtaaaaa

SEQ ID NO: 84061 - DNA, 75 bp, synthetic construct
  source 1..75: mol_type = other DNA
gacgtgaacgggacctgacgggctggatgtcgctgtcacggaaaccgcaagtgacctggtacggctgggacggcg

SEQ ID NO: 84062 - DNA, 75 bp, synthetic construct
  source 1..75: mol_type = other DNA
aaggacgggcttcagattatcccgttgtcagaggtggcggcgaaggatgagtttttgaatatcaagaacgtgagc

SEQ ID NO: 84063 - DNA, 75 bp, synthetic construct
  source 1..75: mol_type = other DNA
ttcttgtttctgaagataaatttacaggtattgataacgaaactcatgaatttatgaatgatgatgatgctgctt

SEQ ID NO: 84064 - DNA, 75 bp, synthetic construct
  source 1..75: mol_type = other DNA
cgttgggtttcctggtctttggcccgcaattgttgattggtgtggctgctgttggctttgtacctaaaaaagcga

SEQ ID NO: 84065 - DNA, 75 bp, synthetic construct
  source 1..75: mol_type = other DNA
cgccacgctgttccgccgaaagtattacattaacggcagtcatgctggcttcatcatgtacatgaccgatgccgc

SEQ ID NO: 84066 - DNA, 75 bp, synthetic construct
  source 1..75: mol_type = other DNA
gctaaccagtcagagcggacagttaccgcctgactttatgcgtaatatgcagaaagccagcctgcagtgcagcat

SEQ ID NO: 84067 - DNA, 75 bp, synthetic construct
  source 1..75: mol_type = other DNA
gaactgatgcgcctgatggttgaactcaaaaggcaggggaaaaccgtagtgacggtactccacgatctgaatcag

SEQ ID NO: 84068 - DNA, 75 bp, synthetic construct
  source 1..75: mol_type = other DNA
aggggaaagcgttcttcacaatgcgaagtaatcattgataaagaaatgattcttctttttgctgatggacattat

SEQ ID NO: 84069 - DNA, 75 bp, synthetic construct
  source 1..75: mol_type = other DNA
tcaaactatcaccgctgggtcatagataacaaagataaattaggccttaaaaatagcgatgactaccattcattt

SEQ ID NO: 84070 - DNA, 75 bp, synthetic construct
  source 1..75: mol_type = other DNA
ggcggggcagcctccgggctggccggtatccgttagagccggtatttccacccccgtctgggctatcgccatcga

SEQ ID NO: 84071 - DNA, 75 bp, synthetic construct
  source 1..75: mol_type = other DNA
ggcggggcagccttcgggctggccggtttccaataaggccggtattcctacccccgttcgggtcaccacccatga

SEQ ID NO: 84072 - DNA, 75 bp, synthetic construct
  source 1..75: mol_type = other DNA
attgcatgctatttgatggttcgatccggtaggcaactagttgatgcacctgaaatcgacctgaaatatcaaata

SEQ ID NO: 84073 - DNA, 75 bp, synthetic construct
  source 1..75: mol_type = other DNA
ttatcaggcgcaagaagtaccgtgcctatcgtggagaacaggggcgaacttgtaataatttactgaagagacaat

SEQ ID NO: 84074 - DNA, 75 bp, synthetic construct
  source 1..75: mol_type = other DNA
taaaagccaaacttcagccgaagcattcagcttcggtgatcccattccagtacttgaccgccgcgaactgctgga

SEQ ID NO: 84075 - DNA, 75 bp, synthetic construct
  source 1..75: mol_type = other DNA
atcagggatgcggttcgctgcaactgaacggtgccgacctgctgacggatgacagtctgctgacggccgttctga

SEQ ID NO: 84076 - DNA, 75 bp, synthetic construct
  source 1..75: mol_type = other DNA
ctttagttgtggaactggagatatcgttgatctatcctctctggacttacgtaatgtcgatttagattattatga

SEQ ID NO: 84077 - DNA, 75 bp, synthetic construct
  source 1..75: mol_type = other DNA
agagtgatgaagaaatagtagccttggtcataaaacaacgcacagaagccgctgttgagttccagcgttcaattg

SEQ ID NO: 84078 - DNA, 75 bp, synthetic construct
  source 1..75: mol_type = other DNA
gaacggcgcagatcttctgacggataacagcctgctgactgcggtcattatttcactgtttacggacaggcgggc

SEQ ID NO: 84079 - DNA, 75 bp, synthetic construct
  source 1..75: mol_type = other DNA
tcaggtttaaaattctggctgaaacagctatcaaatttcggtgttattgaaatgaaagagctgtctttttctaca

SEQ ID NO: 84080 - DNA, 75 bp, synthetic construct
  source 1..75: mol_type = other DNA
atgaaggtcaccggctggccgcactctggcaggcgctgccggaagaactccgcttaagtccgcatcgttatctgg

SEQ ID NO: 84081 - DNA, 75 bp, synthetic construct
  source 1..75: mol_type = other DNA
tgagcccgtcaaagctccgcgaaaaatgggacgaactggtcatccgcctgggacgttcacctgtacagcgttgtg

SEQ ID NO: 84082 - DNA, 75 bp, synthetic construct
  source 1..75: mol_type = other DNA
attacaaaaaatactcgaagaaataaataattggttagacaatacaataatacaattcaaaaattactcattgac

SEQ ID NO: 84083 - DNA, 75 bp, synthetic construct
  source 1..75: mol_type = other DNA
ccttgaacaggccctgcaacagtccgcctccaactggggcgagctggaaaaagaatttatgcgatttaaagcgga

SEQ ID NO: 84084 - DNA, 75 bp, synthetic construct
  source 1..75: mol_type = other DNA
aaaagagcgcgtgccggagtcggtattttttgaatgtgaggctatagcccgtagcaaagcactggaaacagatta

SEQ ID NO: 84085 - DNA, 75 bp, synthetic construct
  source 1..75: mol_type = other DNA
gagctgctcaacgatctggataaactggatcactggccagacaccgttaaaaccatgcagcgtaactggatcggt

SEQ ID NO: 84086 - DNA, 75 bp, synthetic construct
  source 1..75: mol_type = other DNA
gctcaacgccaacagaagctacggcgcctaaaaacgcaggcgtaactgccgaggctttcagctttggtgacccga

SEQ ID NO: 84087 - DNA, 75 bp, synthetic construct
  source 1..75: mol_type = other DNA
attgttgagatggttctccaagttgatcggtttgaaaaatacatgatgtggctaataaaagataagacaatgcct

SEQ ID NO: 84088 - DNA, 75 bp, synthetic construct
  source 1..75: mol_type = other DNA
ataacgctgaaaaagcaaattgaacaacatgaattgcgaattgtcagtctggatgttccaacatcatggcaagcc

SEQ ID NO: 84089 - DNA, 75 bp, synthetic construct
  source 1..75: mol_type = other DNA
aataccgcttcaagaaaggattaaagaactcaatgaatggttaggggatgaagttattagatttgcgaaatatac

SEQ ID NO: 84090 - DNA, 75 bp, synthetic construct
  source 1..75: mol_type = other DNA
ctgccttttggtaataaaaacgaaaagagcggtaaaaaaaacgttcagctaatcattggctatcgcggcatgatt

SEQ ID NO: 84091 - DNA, 75 bp, synthetic construct
  source 1..75: mol_type = other DNA
agtacttccgtcaaacataaactcaagcgtgttgaccgattgttgggtaacccacttctacacaaggatgtcccc

SEQ ID NO: 84092 - DNA, 75 bp, synthetic construct
  source 1..75: mol_type = other DNA
ccctaacgataacggaactacagatcgcgctgttatttataaggggaagcatggttgcatgagtatatacccagg

SEQ ID NO: 84093 - DNA, 75 bp, synthetic construct
  source 1..75: mol_type = other DNA
ttcattgtctctgctatggggcgcgaagggcttgaactccttctggatgaaatgattcacgatctgaatactcat

SEQ ID NO: 84094 - DNA, 75 bp, synthetic construct
  source 1..75: mol_type = other DNA
aggaaatcctgccggccactgatcattgccctgaatgtgacgaaccgctgcgccatatccgcgatgcggtgagtg

SEQ ID NO: 84095 - DNA, 75 bp, synthetic construct
  source 1..75: mol_type = other DNA
ggggctttttacgatgcaggaacacgatcagcgagaatgccgaataacacaactactatagacaaaaccgatgac

SEQ ID NO: 84096 - DNA, 75 bp, synthetic construct
  source 1..75: mol_type = other DNA
acaggggaaaatggtgaattttcctttagctggggcgaaaccatctcctttggtatcgatacctttgaactgggt

SEQ ID NO: 84097 - DNA, 75 bp, synthetic construct
  source 1..75: mol_type = other DNA
ttctgttatctgtcctggcagtgggatgctcacagcaaaaagctgatgagccccggcaattagtgacggtgtatc

SEQ ID NO: 84098 - DNA, 75 bp, synthetic construct
  source 1..75: mol_type = other DNA
cagatggtgacttgtgggctttcattggcgacgagctaaagatgggaattccggaaaatgaccggattcgcgaac

SEQ ID NO: 84099 - DNA, 75 bp, synthetic construct
  source 1..75: mol_type = other DNA
acttctatctggcttccggcgatcctctttggtcacggactgctgctggcattaacgccggttatcgcgcaatta

SEQ ID NO: 84100 - DNA, 75 bp, synthetic construct
  source 1..75: mol_type = other DNA
aaccttatgctatcgcaaaaattgcaggtattaaattatgtgaatcttataaccgtcagtttgggcgtgattacc

SEQ ID NO: 84101 - DNA, 75 bp, synthetic construct
  source 1..75: mol_type = other DNA
agttcgctggtttaatatgtaaggataatagtggcagatatttctcaacagcacctaaccgaggagaaagaaaag

SEQ ID NO: 84102 - DNA, 75 bp, synthetic construct
  source 1..75: mol_type = other DNA
accgcctgtctgtccggctttcgctgattatcagccgtctgctcgcgggggaaacgctgaatatgcgcaaactgg

SEQ ID NO: 84103 - DNA, 75 bp, synthetic construct
  source 1..75: mol_type = other DNA
ataagtaatggagagtatctaaccactgaagacgaaagccatgctgtgaaagtggatgacggtgtaactggatat

SEQ ID NO: 84104 - DNA, 75 bp, synthetic construct
  source 1..75: mol_type = other DNA
cagctggtgacggttgaagaagccctggctttgcttaaatcgcgcggatggctggtaatgccacgagatgaactg

SEQ ID NO: 84105 - DNA, 75 bp, synthetic construct
  source 1..75: mol_type = other DNA
gaaagagatcctcgcccagctttcgcaatatccggtttccactcgtttgtcgctcaccggcaccattattgtggg

SEQ ID NO: 84106 - DNA, 75 bp, synthetic construct
  source 1..75: mol_type = other DNA
tgccaaaggttctcgtgataccagcgtgtcagaagaaggtgttgtgattggttatgacaccacggatggcgaact

SEQ ID NO: 84107 - DNA, 75 bp, synthetic construct
  source 1..75: mol_type = other DNA
atataactggcaacatgcaatatcagaagaacgcgctatccgttgtgccaaaagattaattcaatgtaaaggata

SEQ ID NO: 84108 - DNA, 75 bp, synthetic construct
  source 1..75: mol_type = other DNA
tcttgaatttggtgttctgaaggactggaaagaaaatccggtaaaagaacttcctgatattgatgaatctgttca

SEQ ID NO: 84109 - DNA, 75 bp, synthetic construct
  source 1..75: mol_type = other DNA
attttaaagcaatagataaccacgggaaggaaataacaaacagaaaaggattacctaatgtctgcagagttcatg

SEQ ID NO: 84110 - DNA, 75 bp, synthetic construct
  source 1..75: mol_type = other DNA
gtcagcgccagtatacgtactgaacatcagcctgctatgccctggaaagtcataccgttatacatcgcaagccgc

SEQ ID NO: 84111 - DNA, 75 bp, synthetic construct
  source 1..75: mol_type = other DNA
gccggaaagccgttgccgcaggcgaccgcgtaaaccgtcagttcgtggcagggcttcgtctatgtggcgttcatc

SEQ ID NO: 84112 - DNA, 75 bp, synthetic construct
  source 1..75: mol_type = other DNA
agtaattctcatgtgattccggcgcttttgcgccgctttcatgatgctgtggaaaacaattctccgaatgttgtt

SEQ ID NO: 84113 - DNA, 75 bp, synthetic construct
  source 1..75: mol_type = other DNA
ttatgtcgtactgcatcatgaaagtgtgcaccgggcgctggcgcgatctgaacctgtgtgtggtggtggtcgcag

SEQ ID NO: 84114 - DNA, 75 bp, synthetic construct
  source 1..75: mol_type = other DNA
gccagacggaccagcgaatctttccgcatggatgagacttaagaataaagaattacctccttcagtacataacta

SEQ ID NO: 84115 - DNA, 75 bp, synthetic construct
  source 1..75: mol_type = other DNA
gtcgttacgctgtttttgccgcccaatttttgggtgagcggcgtgaaggcgattgctgaagcggcgatggtcggc

SEQ ID NO: 84116 - DNA, 75 bp, synthetic construct
  source 1..75: mol_type = other DNA
aataacacgatacaatgggactccgttaaaaagggatatagtgcggcacatggtacagatgccaccagcaccatc

SEQ ID NO: 84117 - DNA, 75 bp, synthetic construct
  source 1..75: mol_type = other DNA
aacgtcgtgcctgcaggctggcaggtctgtccctgtcaacctgccgatattcggctcagcgtccggctgctgacg

SEQ ID NO: 84118 - DNA, 75 bp, synthetic construct
  source 1..75: mol_type = other DNA
tgggggcctctggctccggaaaagacagtctgttgacggaactccgccagcgggaacaaactcagctactggtag

SEQ ID NO: 84119 - DNA, 75 bp, synthetic construct
  source 1..75: mol_type = other DNA
tgaatgtggtgttaagcacggttatcgtgctgacgctctttttttatcgtcgtggtgagtcgagacataaaccgc

SEQ ID NO: 84120 - DNA, 75 bp, synthetic construct
  source 1..75: mol_type = other DNA
gaaaagatttatctgcggttgtggagaatatggagattgggacaggacagcgtggcgacggtcgtcatgcttttg

SEQ ID NO: 84121 - DNA, 75 bp, synthetic construct
  source 1..75: mol_type = other DNA
ggaattgatgagttgttgctggaggcgttcagcagttttactgagatcatgtcccggcaatatcaggcatttttt

SEQ ID NO: 84122 - DNA, 75 bp, synthetic construct
  source 1..75: mol_type = other DNA
tattgccaccagtcacagaaacaccgagaacaccagatttcagcggtcgctgaatttgaacgagatcttttactt

SEQ ID NO: 84123 - DNA, 75 bp, synthetic construct
  source 1..75: mol_type = other DNA
gcaaatggcattgtcggattactggcaacccgcggaacagttaaacgttcttatactcatgagctgatcgcgcgt

SEQ ID NO: 84124 - DNA, 75 bp, synthetic construct
  source 1..75: mol_type = other DNA
aaacggcggagggattgttgagaggttattctggtattttgacgggaaaactattgcgttgccacaggtgcgtaa

SEQ ID NO: 84125 - DNA, 75 bp, synthetic construct
  source 1..75: mol_type = other DNA
tgcgcgaggcggcgaaacaggcaacgcaagatgaatgggtagcatatattttgccgggtcataacggcatttatc

SEQ ID NO: 84126 - DNA, 75 bp, synthetic construct
  source 1..75: mol_type = other DNA
gcgctccggagcttttaccctttctgaaatattatgcgaccctgctgctcgacaatatggcccgccgtcgagccc

SEQ ID NO: 84127 - DNA, 75 bp, synthetic construct
  source 1..75: mol_type = other DNA
taatgatcagattaccaatattgatactgatgttgcttatgatgcctacctggttggctggtatggcactggagt

SEQ ID NO: 84128 - DNA, 75 bp, synthetic construct
  source 1..75: mol_type = other DNA
ttgaaaaatataacactgggcaactcttcgggttagatggtataaaagcagataatccaataaaagcaaagcaag

SEQ ID NO: 84129 - DNA, 75 bp, synthetic construct
  source 1..75: mol_type = other DNA
gctggctcttgttgaggaatacaacgagatagccagccgtgtaggcatggatgagttcagtgtcatgcttcgtgg

SEQ ID NO: 84130 - DNA, 75 bp, synthetic construct
  source 1..75: mol_type = other DNA
cagttatctgagcaggaaaaatccctgctgacccatgagaaagagacgctggagtacaaacgccagctggctgag

SEQ ID NO: 84131 - DNA, 75 bp, synthetic construct
  source 1..75: mol_type = other DNA
tgttaacgttgttacagagaatagccagatggttgtaaaccacggcgttggcttctccgttcaaatcactgttaa

SEQ ID NO: 84132 - DNA, 75 bp, synthetic construct
  source 1..75: mol_type = other DNA
ctgattttatcgaaagaacactggccctaatcgatcaatataacaatatgattgaggggaagcccttccctgagc

SEQ ID NO: 84133 - DNA, 75 bp, synthetic construct
  source 1..75: mol_type = other DNA
ttcagcgtgacattatcctgtgggcggtacgctggtactgtaaatacggcattagctaccgtgaactgcaggaga

SEQ ID NO: 84134 - DNA, 75 bp, synthetic construct
  source 1..75: mol_type = other DNA
cccttgcgctggctgtggtcgcttgcaacactgccagtaccgtttcacttcctgcattacgcgaaaagttcgact

SEQ ID NO: 84135 - DNA, 75 bp, synthetic construct
  source 1..75: mol_type = other DNA
cctcaagggcggtgatagctcgttcggatcggtaatagcccctggtggtgaaggtggtggaaaatcaggagtcac

SEQ ID NO: 84136 - DNA, 75 bp, synthetic construct
  source 1..75: mol_type = other DNA
cgtcgacagttccgcgctgccatggctgggcgagcagttctcactgtctggcgatggctgggagctggcggaatc

SEQ ID NO: 84137 - DNA, 75 bp, synthetic construct
  source 1..75: mol_type = other DNA
ggaggaacccgtcttctggtggataccgatggtgtcggaggtgtgccggttgacggtggtcgggtttataccaac

SEQ ID NO: 84138 - DNA, 75 bp, synthetic construct
  source 1..75: mol_type = other DNA
catacgataatagctattcacacacgtcaggacgtggcgggcacggagctaatggcgtgctggtaattcgggagt

SEQ ID NO: 84139 - DNA, 75 bp, synthetic construct
  source 1..75: mol_type = other DNA
gaagggcttgggaatctgttttcctatacagtacagcttaaaacgcctgacaccctgaacctcggatatgtctcc

SEQ ID NO: 84140 - DNA, 75 bp, synthetic construct
  source 1..75: mol_type = other DNA
atacaatagaaggttttgaagatcttgttaaactagtaaaaggaacaaaagtaaaaataatagtatggattaatg

SEQ ID NO: 84141 - DNA, 75 bp, synthetic construct
  source 1..75: mol_type = other DNA
cggccgtctgattcaggaaactgcccctgacggcgatatcacccgctaccgttatgataatccacacagtgactt

SEQ ID NO: 84142 - DNA, 75 bp, synthetic construct
  source 1..75: mol_type = other DNA
acggccggacacagtgtgtggtggacatcccggcacatccggacccggcacaacagttgctgctgccctgtcgtc

SEQ ID NO: 84143 - DNA, 75 bp, synthetic construct
  source 1..75: mol_type = other DNA
ggcgcagcaacagcgttttacccgatctggcatcttgaagttgaaagtctgctggtggtgaaaaataaccgtggt

SEQ ID NO: 84144 - DNA, 75 bp, synthetic construct
  source 1..75: mol_type = other DNA
gcacaggggatgtgggagctgattgataacagccagcttgacgatgagatggcggagatgaagaccaccatcacc

SEQ ID NO: 84145 - DNA, 75 bp, synthetic construct
  source 1..75: mol_type = other DNA
cctgcatgcagggggcatgaacggaggaacccggctgttggtggacaccgatggtgtcggaggcgtgcctgtcga

SEQ ID NO: 84146 - DNA, 75 bp, synthetic construct
  source 1..75: mol_type = other DNA
gatggtgcttgagcgcaaactctcctcagcgaaaggtgcgctcgacactctgggcaaccggatcaacggcctgca

SEQ ID NO: 84147 - DNA, 75 bp, synthetic construct
  source 1..75: mol_type = other DNA
cgatgctggcgatcgttttaatggatcacctgttacggcagcgggcgcaaaatgccgatgtgaagactgatattc

SEQ ID NO: 84148 - DNA, 75 bp, synthetic construct
  source 1..75: mol_type = other DNA
atgtggaaaacactgcatcaactggcgatcccaccacggctgtatcaaatctgtggctggtttataccgtggctg

SEQ ID NO: 84149 - DNA, 75 bp, synthetic construct
  source 1..75: mol_type = other DNA
tgctgaaagattgtgcgggaaaaccaatacagaactgcactattcaactgaaggcaaagcgtaacagcaccacgg

SEQ ID NO: 84150 - DNA, 75 bp, synthetic construct
  source 1..75: mol_type = other DNA
tgtcatggcagagctggctgatcagtatcttctcgatgagtcggaaaagcgcgcggggaatatcagtgcggtgaa

SEQ ID NO: 84151 - DNA, 75 bp, synthetic construct
  source 1..75: mol_type = other DNA
tgcgtgttgagctgggagcagcaaaaaaacgcatagaagagctggaggctaatcgtgtggtgcttgaggtggaaa

SEQ ID NO: 84152 - DNA, 75 bp, synthetic construct
  source 1..75: mol_type = other DNA
ctggaagagatctacgccctgtgcagtgcgtattcgatcacttacgacatgccgctagcactgcatctcgatcat

SEQ ID NO: 84153 - DNA, 75 bp, synthetic construct
  source 1..75: mol_type = other DNA
acctacgaactctggggcaagaacaacgacatgaacctttcaacccacgatggcggaaaagagcaagtcgttctc

SEQ ID NO: 84154 - DNA, 75 bp, synthetic construct
  source 1..75: mol_type = other DNA
gtgttgatatatgcagtggcaattaccaactcacttacggaacagctggcaaagcatatggttattgatcttcgc

SEQ ID NO: 84155 - DNA, 75 bp, synthetic construct
  source 1..75: mol_type = other DNA
gccgttcacgttcgaatggaacggtcgcacctggaatgctggcccagactcactggcccgtctctatccggtggt

SEQ ID NO: 84156 - DNA, 75 bp, synthetic construct
  source 1..75: mol_type = other DNA
atgagcggtgagtttggtgaaatcatccccttcactgtaacagcagagatgctggacaaagaaaaagaactgaaa

SEQ ID NO: 84157 - DNA, 75 bp, synthetic construct
  source 1..75: mol_type = other DNA
ccccggctcgttcaaacatattgccctggaagagatctacgccctgtgcagtgcgtattcgatcacttacgacat

SEQ ID NO: 84158 - DNA, 75 bp, synthetic construct
  source 1..75: mol_type = other DNA
tcaccctgtaaatttggcagtaaaattatcgtcaacaatctggtgagatgggaccagtggggatttcatcttatc

SEQ ID NO: 84159 - DNA, 75 bp, synthetic construct
  source 1..75: mol_type = other DNA
cagcagcgccgggatttatgggaagcggaaaatcagtatgtggtcctgaaagaggccgccacgaaacggcagtta

SEQ ID NO: 84160 - DNA, 75 bp, synthetic construct
  source 1..75: mol_type = other DNA
gattcagtcggggactgggatatgcaggaaaatttacaagtcttgctgactggatcactgagtttggtaaggctg

SEQ ID NO: 84161 - DNA, 75 bp, synthetic construct
  source 1..75: mol_type = other DNA
atcactacaactcgaacccagaagacgaaaagcagttgtgataaaagaatgtgtagatatgtatgtgcctaaccc

SEQ ID NO: 84162 - DNA, 75 bp, synthetic construct
  source 1..75: mol_type = other DNA
taaccgcaacgattgaacaacgcggaccacaaacggctgatgagctggctacattgtttggtaccacatcacgca

SEQ ID NO: 84163 - DNA, 75 bp, synthetic construct
  source 1..75: mol_type = other DNA
tatcaacaatgccttggctctcaaagcgcctttggcaagccctgcattaacgggtgtccctactgcgcctaccgc

SEQ ID NO: 84164 - DNA, 75 bp, synthetic construct
  source 1..75: mol_type = other DNA
atggagattaaacaattccagcgagctgctggtatcagcgaggcactggccgcacgctggttctcgcatataact

SEQ ID NO: 84165 - DNA, 75 bp, synthetic construct
  source 1..75: mol_type = other DNA
atgaacagggcaacaataggattttatctggcagttgtgctggggagttgcagtatgaacggtgtctcacaggct

SEQ ID NO: 84166 - DNA, 75 bp, synthetic construct
  source 1..75: mol_type = other DNA
attcctggtttgtggttagtgcccggactcatgctaatgggcctgctgatgctggtcgcacgcgacttctctttg

SEQ ID NO: 84167 - DNA, 75 bp, synthetic construct
  source 1..75: mol_type = other DNA
ctggggcgagtgggcagaaagtgcgacggacagtttttcgcaggttaaaagcgtggccacgcagacctttgacgg

SEQ ID NO: 84168 - DNA, 75 bp, synthetic construct
  source 1..75: mol_type = other DNA
tcaagacggatgagaaatctaatgagattacagctatcccagaacttcttaacatgctggatattaaaggaaaaa

SEQ ID NO: 84169 - DNA, 75 bp, synthetic construct
  source 1..75: mol_type = other DNA
tgaataacgcaccgttgctgattgcgcacgtttgcggaacggaagctgatccgcaaatacgcagtcagcagataa

SEQ ID NO: 84170 - DNA, 75 bp, synthetic construct
  source 1..75: mol_type = other DNA
tgaaaagagtcacggcagagaagaaacccgtcttcatattgtttgcgatgtccctgatgagcttattgatttcac

SEQ ID NO: 84171 - DNA, 75 bp, synthetic construct
  source 1..75: mol_type = other DNA
tgacccgctgcaggggaggtatatcactcaggatccgattgggctgaaggggggatggaatttttatcagtatcc

SEQ ID NO: 84172 - DNA, 75 bp, synthetic construct
  source 1..75: mol_type = other DNA
cggctggaccggaacggccaggtcacggcggtgacagcctcaggcaccgggctgggctatggcgaaggcgatgag

SEQ ID NO: 84173 - DNA, 75 bp, synthetic construct
  source 1..75: mol_type = other DNA
atgcttaccacccttatttatcgtagccatatacgtgacgacgaacctgtcaaaaaaatcgaagaaatggtttcg

SEQ ID NO: 84174 - DNA, 75 bp, synthetic construct
  source 1..75: mol_type = other DNA
tactcaaaggccacaatttataacttcgtggcgcccgggcattgctacggtaacctggaatcagtgtaatggtcc

SEQ ID NO: 84175 - DNA, 75 bp, synthetic construct
  source 1..75: mol_type = other DNA
acgcaacgaatggccgcccgttttattcccgtaatgagcttatagaacaattggtcattcgtgatatggatatta

SEQ ID NO: 84176 - DNA, 75 bp, synthetic construct
  source 1..75: mol_type = other DNA
cagataacggcggtcccgcgtcttgcggtgtatgacccgacggtacagtttgaattctggttctcagaaaaacgc

SEQ ID NO: 84177 - DNA, 75 bp, synthetic construct
  source 1..75: mol_type = other DNA
atgcgacgctatgcgtcttatccgacctacagttcagttcaccccgcaggcctgataagccgcgtcagcgtcgca

SEQ ID NO: 84178 - DNA, 75 bp, synthetic construct
  source 1..75: mol_type = other DNA
atcgtactaacagtaaggaacttgttggtaaaacagctgtgtatgaagaagacaggcctatggcatttgctggat

SEQ ID NO: 84179 - DNA, 75 bp, synthetic construct
  source 1..75: mol_type = other DNA
accagacggtcccggatggtttcgggggcacagagccgcggatgacctttaatgcgtacctgtcacaacagcgta

SEQ ID NO: 84180 - DNA, 75 bp, synthetic construct
  source 1..75: mol_type = other DNA
acaaaaacaatgctggcctccacttacagccagccagatgcgaaccaatactcttatctggtatattaaaaatgt

SEQ ID NO: 84181 - DNA, 75 bp, synthetic construct
  source 1..75: mol_type = other DNA
gaccgacagcgccagctgtgatgaggtgatgcctttaatcgcgcaggaaagagtgactcacgtcgccctggttcc

SEQ ID NO: 84182 - DNA, 75 bp, synthetic construct
  source 1..75: mol_type = other DNA
ggcgtggattgcgcgcagtattaacccacaactcaatcacatcgacagcttcctgatgaataaacacttcatgcg

SEQ ID NO: 84183 - DNA, 75 bp, synthetic construct
  source 1..75: mol_type = other DNA
atgtcaaaaccccgatggaccattgaacaaaaaaggcagcacgttgctgcctggcgcgccagtggtcttacacgt

SEQ ID NO: 84184 - DNA, 75 bp, synthetic construct
  source 1..75: mol_type = other DNA
actgctgatttcactggtagtttccataccctgtgcgctgctgtcggtctttctggtcctgaaaggttgggcact

SEQ ID NO: 84185 - DNA, 75 bp, synthetic construct
  source 1..75: mol_type = other DNA
gaaaacaaaaaacggtattccctatgtggccgggattggcgcggggattgaggatgttgatggtcagaccctgag

SEQ ID NO: 84186 - DNA, 75 bp, synthetic construct
  source 1..75: mol_type = other DNA
gtgatgctgttgaacgtcagatgagtcacatggagcgaaattcagtgagggctgcgtatatccataaagcagaac

SEQ ID NO: 84187 - DNA, 75 bp, synthetic construct
  source 1..75: mol_type = other DNA
atgaaatggtttaacaccttaagtcacaaccgttggctggaacaggaaaccgaccgcatctttgattttggtaaa

SEQ ID NO: 84188 - DNA, 75 bp, synthetic construct
  source 1..75: mol_type = other DNA
tgctattgataccagcacgccgatggggcgttttttctttcatgtgatgggtgccctggctgaaatggaacgaga

SEQ ID NO: 84189 - DNA, 75 bp, synthetic construct
  source 1..75: mol_type = other DNA
aggtgttctggcgaccgactgcattacgcaagaaagcaggagaaaaggtcgaactgcagttacaggtcagccagc

SEQ ID NO: 84190 - DNA, 75 bp, synthetic construct
  source 1..75: mol_type = other DNA
atcaccccactggattccgcggtgcccaataccgcgcaggcgctgatcgaccagaccagccagttgctgccgcgc

SEQ ID NO: 84191 - DNA, 75 bp, synthetic construct
  source 1..75: mol_type = other DNA
gggccggcacatccaccagaaccgcctgctcaagctggcccgcgagggtgggcagatgacgcccaaagacctcgg

SEQ ID NO: 84192 - DNA, 75 bp, synthetic construct
  source 1..75: mol_type = other DNA
tggaggacatacaggaaacgcagagcgaaaacgacgttattttccagcagtttgttaataaggctaaacaggcac

SEQ ID NO: 84193 - DNA, 75 bp, synthetic construct
  source 1..75: mol_type = other DNA
cggcagataacgccagcgtgaagcagagcgggcagctcatcgaacaactatcgctgggcgtttacgacgcggtgc

SEQ ID NO: 84194 - DNA, 75 bp, synthetic construct
  source 1..75: mol_type = other DNA
tctggttcgaaaggggggatctcacactgtacggcaggcggcaaatttgtctgtaatgatggttctattagtgca

SEQ ID NO: 84195 - DNA, 75 bp, synthetic construct
  source 1..75: mol_type = other DNA
aaactggaaaacatcttttttatgtaatcttgctagactactatatagcatatttaatggtagtaactatttttg

SEQ ID NO: 84196 - DNA, 75 bp, synthetic construct
  source 1..75: mol_type = other DNA
agtgatattaaaaatacaaaacatacaaaatgaaactatagaatttaaggaaacaagagaaagattgaaggaact

SEQ ID NO: 84197 - DNA, 75 bp, synthetic construct
  source 1..75: mol_type = other DNA
ccacgggagctattacatgaaaggctggcagtcagtcgatatgccagaaattattcaccactgccagcgttacag

SEQ ID NO: 84198 - DNA, 75 bp, synthetic construct
  source 1..75: mol_type = other DNA
tctggcgcgaagcgagtggtgagcgaatttaccgcactggggatcgcgggcgctactttgctgacgggcaagtcg

SEQ ID NO: 84199 - DNA, 75 bp, synthetic construct
  source 1..75: mol_type = other DNA
actcattgtcgagcggacacgcgccggactggaagcggccagagccaaagggcgtattggtggcagacgtccgaa

SEQ ID NO: 84200 - DNA, 75 bp, synthetic construct
  source 1..75: mol_type = other DNA
caactcgctgacggattattttgttgaggtcggtaaattgtttcaggagatgcacgggcgcgggaaagagaagta

SEQ ID NO: 84201 - DNA, 75 bp, synthetic construct
  source 1..75: mol_type = other DNA
cgctctctcaatgcgttattagcttaatgaaggtgaatgtaagccttgacgattttatctctctggtgagcgatt

SEQ ID NO: 84202 - DNA, 75 bp, synthetic construct
  source 1..75: mol_type = other DNA
gtttgtgcgcccggcgtttgatgtgcgcagtgaacaggcagcccgggtggcgattgcgcggatgaaccgggccat

SEQ ID NO: 84203 - DNA, 75 bp, synthetic construct
  source 1..75: mol_type = other DNA
tttttactctgacgataaaggaaataaagtaacaaaagaaaatgatgtttatgatagtctaaatttttcaagcaa

SEQ ID NO: 84204 - DNA, 75 bp, synthetic construct
  source 1..75: mol_type = other DNA
ttgttgccggaaaaaccagaagtagctcatgagattgccagacatttttgcgggcaaaaagggttatatgcgctg

SEQ ID NO: 84205 - DNA, 75 bp, synthetic construct
  source 1..75: mol_type = other DNA
ctaccgtcgccggatacagacgtacagggaaaaagccaaaataacgtaccagtggaagaagccggagcggttacg

SEQ ID NO: 84206 - DNA, 75 bp, synthetic construct
  source 1..75: mol_type = other DNA
atgaacccgttatttaacgatattcagatgcgtcttttttatctgaaccactcgccgtactcctggcactggaat

SEQ ID NO: 84207 - DNA, 75 bp, synthetic construct
  source 1..75: mol_type = other DNA
atcttggggtggggtatagccatggtgccggtgtggaatccccgtggaacgcggtagctggtgtgaactggtcgt

SEQ ID NO: 84208 - DNA, 75 bp, synthetic construct
  source 1..75: mol_type = other DNA
acttatgacttttttgagcaatgcccccatcggatggcatgtgcaaaatgctcattttatatgccaaaatcttca

SEQ ID NO: 84209 - DNA, 75 bp, synthetic construct
  source 1..75: mol_type = other DNA
gaaccagagttcttgagttgctggcctaccgtcgccgcgtggagatgtatcgggagaaggagaaaataacgtacc

SEQ ID NO: 84210 - DNA, 75 bp, synthetic construct
  source 1..75: mol_type = other DNA
gttgcagtggtgggcggattatctggatgcgaatcgggagaagggggtgagtccgtttgattactctaaagacaa

SEQ ID NO: 84211 - DNA, 75 bp, synthetic construct
  source 1..75: mol_type = other DNA
ctggcgaccacaatccatggaaacctatgagtgaaaatacggtgaataacgcgttacgcctgatgggctacaata

SEQ ID NO: 84212 - DNA, 75 bp, synthetic construct
  source 1..75: mol_type = other DNA
cgatgagtaaagcctggtcactgtgtaatacgctggatgaggcgaaacccttacaggaggagttcgcgtttcttt

SEQ ID NO: 84213 - DNA, 75 bp, synthetic construct
  source 1..75: mol_type = other DNA
gaaaccattgctcgcgaatggcatgccagtaacaagcgctggagtgaagaccatcgatcgcgtgttcttcgctat

SEQ ID NO: 84214 - DNA, 75 bp, synthetic construct
  source 1..75: mol_type = other DNA
atgtttctgaaaacagaacaatttgaatataacggtgtgtctgtcacgctttctgagctgtctgcgctgcagcgg

SEQ ID NO: 84215 - DNA, 75 bp, synthetic construct
  source 1..75: mol_type = other DNA
ggtgctcttgaaactttacaaaaaatgatgtctgaatgtatatatcatgaaggcaacgcctttgtcattatggga

SEQ ID NO: 84216 - DNA, 75 bp, synthetic construct
  source 1..75: mol_type = other DNA
tgagtcgcatggtgcgccgttgcagacagccgaacctgaatacctggacggcctgagcgaaccgatcgggaaatt

SEQ ID NO: 84217 - DNA, 75 bp, synthetic construct
  source 1..75: mol_type = other DNA
atgactgaatctgaaatactgcgattaatccgccgtgctggtggaatcagccagctggctgacgaacaggccaag

SEQ ID NO: 84218 - DNA, 75 bp, synthetic construct
  source 1..75: mol_type = other DNA
tacgggcgcttccctggtgcgttgccgtggccatctctggatgccatatcaatgcctgggctgatgaagatattc

SEQ ID NO: 84219 - DNA, 75 bp, synthetic construct
  source 1..75: mol_type = other DNA
tgatcgcgggagggcatacatttggtaaagcacatggtgcagcgtctcctgaaaaatgtattggcgcagggcctg

SEQ ID NO: 84220 - DNA, 75 bp, synthetic construct
  source 1..75: mol_type = other DNA
taccagggcttgttcgcgccgaaaggtgttcgacctgagacgttactccgacaggttaacaccgtctcgttaccg

SEQ ID NO: 84221 - DNA, 75 bp, synthetic construct
  source 1..75: mol_type = other DNA
atgcaaaatcttaatcctcagcgtaaggctttcctcgatatggtggcatggtcagaaggaacggataacggacgg

SEQ ID NO: 84222 - DNA, 75 bp, synthetic construct
  source 1..75: mol_type = other DNA
cttgaaagaggggtaaatatatctgtaagaatgcagaagcaaattttatcagaaaagccgtatgttgcattcaga

SEQ ID NO: 84223 - DNA, 75 bp, synthetic construct
  source 1..75: mol_type = other DNA
gtatcccgctgttgcgtggcgataatgaacagcaactggcggcgcgtgtcagggcgcacctttgcgcacagcgtc

SEQ ID NO: 84224 - DNA, 75 bp, synthetic construct
  source 1..75: mol_type = other DNA
tatccactgcagttaacgggcttccattacaaagcgcgtacccactccagctacggcaatattgatgtgttacag

SEQ ID NO: 84225 - DNA, 75 bp, synthetic construct
  source 1..75: mol_type = other DNA
attccggactatggcatgcagtgcgctgattgaatcaggtttgtggtcccgcgatgctgttgaaaggcagatgag

SEQ ID NO: 84226 - DNA, 75 bp, synthetic construct
  source 1..75: mol_type = other DNA
gacccggttagcctgatcgccttcgacaaagtcgtaatgactgctgatgctgttaagcaagttgaggagatgctg

SEQ ID NO: 84227 - DNA, 75 bp, synthetic construct
  source 1..75: mol_type = other DNA
ttatcaaaagacgaaccgagaaaatattgcagtgaagcttgtgccgaaaaagaccagatggcacacgaactttaa

SEQ ID NO: 84228 - DNA, 75 bp, synthetic construct
  source 1..75: mol_type = other DNA
atggacactccatacattgagttatttgcaggtagtcagcaggtatccacgacgctggtacattttgctgctgat

SEQ ID NO: 84229 - DNA, 75 bp, synthetic construct
  source 1..75: mol_type = other DNA
gtttaagccgtgggatggtcaggaatctggcaaggctgtttatctgacttcgtaccccgtggacacgtcgacgca

SEQ ID NO: 84230 - DNA, 75 bp, synthetic construct
  source 1..75: mol_type = other DNA
ataaagggacgccgtggtcaatccgggaagttatccgccgttttggctttggtgaagtggatctgattgaaggca

SEQ ID NO: 84231 - DNA, 75 bp, synthetic construct
  source 1..75: mol_type = other DNA
gggggcgttacagaaaaaactctttatcgacggcaagcgtgtcggggacagggagtatgcggaggtgctgatcgc

SEQ ID NO: 84232 - DNA, 75 bp, synthetic construct
  source 1..75: mol_type = other DNA
cgcacaaatccgcccttcttccgtggtgaccaaagactacacctttaaacgacccggctgggcagggcgttttga

SEQ ID NO: 84233 - DNA, 75 bp, synthetic construct
  source 1..75: mol_type = other DNA
atatcgatcggttgattgaactggtcggcgggcgcggcaatattgcgacggtgagccactgtattactcgtctgc

SEQ ID NO: 84234 - DNA, 75 bp, synthetic construct
  source 1..75: mol_type = other DNA
actggcctgagagcgtcgacaccgacgcgaaaaaatgtgccgcctttgcgggttctggtgtatctgttcagccgc

SEQ ID NO: 84235 - DNA, 75 bp, synthetic construct
  source 1..75: mol_type = other DNA
aatgcggcaagaccgtttccggttttttacgggcggcagctctcggtaagaaagttaactcactgactgatgatc

SEQ ID NO: 84236 - DNA, 75 bp, synthetic construct
  source 1..75: mol_type = other DNA
agacttgtcacgctaaacccgaagcttaaatcaacagccgcaggccggtatcagcttctttcacgctggtgggat

SEQ ID NO: 84237 - DNA, 75 bp, synthetic construct
  source 1..75: mol_type = other DNA
gatggcgatcagttttttccgttgggatgggcaatggttttacagcgtgcggctggtactcaccacattgcggat

SEQ ID NO: 84238 - DNA, 75 bp, synthetic construct
  source 1..75: mol_type = other DNA
gatgtgcagcaatgctataccgccaaagagcgccgtttgcagcaacataccagtgcgcagcttcatgcaggcgag

SEQ ID NO: 84239 - DNA, 75 bp, synthetic construct
  source 1..75: mol_type = other DNA
agtatgaacataaaattggcgacctgatttcccggtttaaagaggctggtggggtggtaaatgaagttgagctat

SEQ ID NO: 84240 - DNA, 75 bp, synthetic construct
  source 1..75: mol_type = other DNA
atgatgacagcaatggtaagttattaataaataataacagtaaagtttatgttgtctcctctcaggatcagagtc

SEQ ID NO: 84241 - DNA, 75 bp, synthetic construct
  source 1..75: mol_type = other DNA
tatgtgatacccgccgtgcaatgtatcagcgccagcttagcgagattgaggttgagaaacacgcgcgcaggctgc

SEQ ID NO: 84242 - DNA, 75 bp, synthetic construct
  source 1..75: mol_type = other DNA
tctaaaccagttagatcctgaggttcggcgagatctcatgcgaggcgctgaagaaaaacagcgtgtgattgagat

SEQ ID NO: 84243 - DNA, 75 bp, synthetic construct
  source 1..75: mol_type = other DNA
ccgtgagttttgtgtccagtacggcgaaaccgattacgatttcctgtgccggatggcggcggaggaaggcatctt

SEQ ID NO: 84244 - DNA, 75 bp, synthetic construct
  source 1..75: mol_type = other DNA
gtgggtaagcatcattggaaagtggaaaaacaacccgagtggtacgtgaaagctgtcagaaaaactatcgcggca

SEQ ID NO: 84245 - DNA, 75 bp, synthetic construct
  source 1..75: mol_type = other DNA
atgttctttaaaacatcaaacccttccgcgctggctgcgtggcaaaaataccagcaggactgccagaaagttaag

SEQ ID NO: 84246 - DNA, 75 bp, synthetic construct
  source 1..75: mol_type = other DNA
cgtacggtaatgttatggcaggcctgcagattgacagtaaagttgatgcttcaaacgattttatagcattcagac

SEQ ID NO: 84247 - DNA, 75 bp, synthetic construct
  source 1..75: mol_type = other DNA
atggctctcaccgatatcaaagttaggactaccaagccctccgacaaacccttcaaactcacagatgggcagggt

SEQ ID NO: 84248 - DNA, 75 bp, synthetic construct
  source 1..75: mol_type = other DNA
atagatctctatgtaatgatatggaatactctggtattgtctgtaaagatactaatggaaaatattttgcatcta

SEQ ID NO: 84249 - DNA, 75 bp, synthetic construct
  source 1..75: mol_type = other DNA
cgattgttcgtattacagaataagtacttatcgaaaatgtacattgtaatgcgcacttattttgagaaacctcga

SEQ ID NO: 84250 - DNA, 75 bp, synthetic construct
  source 1..75: mol_type = other DNA
actcaagtcatttgacgcttttcgcgaatgggtaaccattcaggccggattttacaccgaacatttttatccgga

SEQ ID NO: 84251 - DNA, 75 bp, synthetic construct
  source 1..75: mol_type = other DNA
gcacattttccccggagttcaggctcgaagctatcgaacaggttgttaaataccagcgagatgctcgggaagttg

SEQ ID NO: 84252 - DNA, 75 bp, synthetic construct
  source 1..75: mol_type = other DNA
cccgacaaataaattgcctgatttacgtggtgagttcattcgtggctgggatgacggaagaggaatagatactaa

SEQ ID NO: 84253 - DNA, 75 bp, synthetic construct
  source 1..75: mol_type = other DNA
aagaaggtaaccacaccacggcataccgtgatggtgcgggtatctggaccatctgccgtggtgccacccgggtgg

SEQ ID NO: 84254 - DNA, 75 bp, synthetic construct
  source 1..75: mol_type = other DNA
ttagcaagtgaacgagatgctacggaaacagtctataacctcttcggggtaagcgtacagcctgaaccgtctggt

SEQ ID NO: 84255 - DNA, 75 bp, synthetic construct
  source 1..75: mol_type = other DNA
cgggagataaagagtatgcagaggtcctcgttgccattacagaacttgcaaacactctgcgaagagacttaatgg

SEQ ID NO: 84256 - DNA, 75 bp, synthetic construct
  source 1..75: mol_type = other DNA
gattctgtgtaaataccttttctcagaagtggccgtccaggcggtcaccgaactcgataataaagcggctcattg

SEQ ID NO: 84257 - DNA, 75 bp, synthetic construct
  source 1..75: mol_type = other DNA
gtaccagaaaaattgcaggtaagacactggaacgtttgaagaagttgatctggctggcggcacaggatgtgaaga

SEQ ID NO: 84258 - DNA, 75 bp, synthetic construct
  source 1..75: mol_type = other DNA
gtaccagaaaaattgctgggaaaacgcaggaacgcctgaaaaaattaatctggctggcggcgcaggcagtaaaag

SEQ ID NO: 84259 - DNA, 75 bp, synthetic construct
  source 1..75: mol_type = other DNA
acaaggcgatatttttgttcaaaaggcacctgcttgtaccattggggacttaacagaggccataaaacagttatg

SEQ ID NO: 84260 - DNA, 75 bp, synthetic construct
  source 1..75: mol_type = other DNA
tttgtggtgctggcggattaactcatggtttacagcttgcggggcttgatgtcgttgcaggcatagaccttgagg

SEQ ID NO: 84261 - DNA, 75 bp, synthetic construct
  source 1..75: mol_type = other DNA
cttttgtgaaatcagcgattgcagcaatggtgggttctgcacccgcggcactggatacactgaacgaactggcgg

SEQ ID NO: 84262 - DNA, 75 bp, synthetic construct
  source 1..75: mol_type = other DNA
cgctgactaatttgagtggaaaggatgtaactggtcttctcacataccttggtttgggagaagcggcaaaacgga

SEQ ID NO: 84263 - DNA, 75 bp, synthetic construct
  source 1..75: mol_type = other DNA
caaaaagcgggtattgcgtcattctgtccctataacattggccccggtaaatgttttccgtcaacgttctataag

SEQ ID NO: 84264 - DNA, 75 bp, synthetic construct
  source 1..75: mol_type = other DNA
atgcctccatcattacgaaaagccgttgctgcggctattggtggcggggctattgctatagcatctgtgttaatc

SEQ ID NO: 84265 - DNA, 75 bp, synthetic construct
  source 1..75: mol_type = other DNA
cagaaagcgggtatcgcgtcattttgtccctataacattggccccggtaagtgtttcccgtcgacgttttataag

SEQ ID NO: 84266 - DNA, 75 bp, synthetic construct
  source 1..75: mol_type = other DNA
gactggtgagagacgctgatgattttgtcgcagtggcgatcgctggtttcaatcagatgaatcgtggtggtccgg

SEQ ID NO: 84267 - DNA, 75 bp, synthetic construct
  source 1..75: mol_type = other DNA
cgggctggctgcgtaatcatggctataacaagcgcatggtcgcggtggcgggggatttagccgccggacaaatgc

SEQ ID NO: 84268 - DNA, 75 bp, synthetic construct
  source 1..75: mol_type = other DNA
ttgataccgatttgcatttcatttgataccgctgaaaaacgccgatacgcaacttatttgatactaaatcggcgc

SEQ ID NO: 84269 - DNA, 75 bp, synthetic construct
  source 1..75: mol_type = other DNA
atgaacgtaaaaatcagatacagcctgtcggctgctgttctggcactgattgccgccagtgctcctgcccccgac

SEQ ID NO: 84270 - DNA, 75 bp, synthetic construct
  source 1..75: mol_type = other DNA
aacatctggctcaacaaaacctggctgcctggatgattgacgtcatccgtcacgcaatgaatggcacgcaggagc

SEQ ID NO: 84271 - DNA, 75 bp, synthetic construct
  source 1..75: mol_type = other DNA
tgatgattccgccattgaaacggacgttagcggcctggggattgagctacagcaaaacggccagccgtttaagct

SEQ ID NO: 84272 - DNA, 75 bp, synthetic construct
  source 1..75: mol_type = other DNA
gcggtacaaaatggcctacttgattataatccagctcaagatatggctggcgcaatcgctgtagctaaacgagta

SEQ ID NO: 84273 - DNA, 75 bp, synthetic construct
  source 1..75: mol_type = other DNA
cctgagtaacataatgcgccatgcggttcatcaggggttaatcgatacgaacccggcagcaaatcttggcggcgt

SEQ ID NO: 84274 - DNA, 75 bp, synthetic construct
  source 1..75: mol_type = other DNA
gtacggctgcggcgctcggtggggcgacggtattcgggctgtttaccggaacggatttcgggattgtgtttggtg

SEQ ID NO: 84275 - DNA, 75 bp, synthetic construct
  source 1..75: mol_type = other DNA
aggataagaggtattaatgagaattttgttgggatggattttacctgtgaattccgaccagaaaaaatgaccaat

SEQ ID NO: 84276 - DNA, 75 bp, synthetic construct
  source 1..75: mol_type = other DNA
gccatgccgggcgcatgtggccgggaattgcgctgagctgctcgctgggaaatatcgccgcatccatcctgcttt

SEQ ID NO: 84277 - DNA, 75 bp, synthetic construct
  source 1..75: mol_type = other DNA
gtgtgggagacggggtatcaggtctggggtaacacgatacaggagaaggaccacggcggggtggagcagaacctg

SEQ ID NO: 84278 - DNA, 75 bp, synthetic construct
  source 1..75: mol_type = other DNA
atcaggagctggttaaactggtagccgaacgcagcaaccaaccgctgcatgatgtagacttggataaatacctat

SEQ ID NO: 84279 - DNA, 75 bp, synthetic construct
  source 1..75: mol_type = other DNA
gagtcaccaggagcgtagctctgtgcgagcagcttacatccataaggcggaacatcttggggagcgtaggttgat

SEQ ID NO: 84280 - DNA, 75 bp, synthetic construct
  source 1..75: mol_type = other DNA
tgtaaagtactttattatcgttttaatgatgatacaagaaataagttggaaaaaatgaaatggtgggaaaaagat

SEQ ID NO: 84281 - DNA, 75 bp, synthetic construct
  source 1..75: mol_type = other DNA
cgtatccgctcaaataactgttatggtcaggtatcccgtcgcgaccaggagagtgcgctggcgtgctggggaatc

SEQ ID NO: 84282 - DNA, 75 bp, synthetic construct
  source 1..75: mol_type = other DNA
ccgttatgagggaaagcaaaaaatgctggcacttggggtttatcctgaaatcacactagcggatgccagagtacg

SEQ ID NO: 84283 - DNA, 75 bp, synthetic construct
  source 1..75: mol_type = other DNA
cgtattcgttcaaacaactgttacggtcaggtatcccgtcgtgaccaggagagcgcgctggcgtgctggggaatc

SEQ ID NO: 84284 - DNA, 75 bp, synthetic construct
  source 1..75: mol_type = other DNA
atcaggaactggttaatctggtcgccgaacgcagcaaccagaagctgcacgatgtagatctggatagctacctat

SEQ ID NO: 84285 - DNA, 75 bp, synthetic construct
  source 1..75: mol_type = other DNA
caagcgccagtgtcagcgagctaaagaaaaacccgatggcgacagtcagcgccggtgatggtttcccggtcgcta

SEQ ID NO: 84286 - DNA, 75 bp, synthetic construct
  source 1..75: mol_type = other DNA
ctatgacgcggaatataagcagactgagccgggtaaggctgagcaggttgatattaccggaaaccatgtggctct

SEQ ID NO: 84287 - DNA, 75 bp, synthetic construct
  source 1..75: mol_type = other DNA
tgtcggctgccgttctggcgttgattgccatcggtgcgcctgcgcctgatattctcgaccagtttctggatgaaa

SEQ ID NO: 84288 - DNA, 75 bp, synthetic construct
  source 1..75: mol_type = other DNA
tagctgtcccatctgtttctattgagaaatacagtgaactgactgggttatctatcgatactatcaatgacatgc

SEQ ID NO: 84289 - DNA, 75 bp, synthetic construct
  source 1..75: mol_type = other DNA
accgcatagtacgatggtgtttatcgggattcagctgccagaggaagagattcgggcagcgtttgaagggttgag

SEQ ID NO: 84290 - DNA, 75 bp, synthetic construct
  source 1..75: mol_type = other DNA
gctggtggattaaggacggtggcagagactgccgtattcgttcaaacaactgttacggtcaggtatcccgtcgtg

SEQ ID NO: 84291 - DNA, 75 bp, synthetic construct
  source 1..75: mol_type = other DNA
tagctgttccatctgtttctattgagaaatacagcgaactgactggcttatctatcgacaccatcaatgacatgc

SEQ ID NO: 84292 - DNA, 75 bp, synthetic construct
  source 1..75: mol_type = other DNA
gctaacaccccaggcgatggcagaaaaattgattcctgaaactgatgctgagttattaatctggtctgatgccac

SEQ ID NO: 84293 - DNA, 75 bp, synthetic construct
  source 1..75: mol_type = other DNA
atgagctggttattcgtctggggcgttcgcctgtacagcgttgcgtgaatcacatttctgaaccggataccgaaa

SEQ ID NO: 84294 - DNA, 75 bp, synthetic construct
  source 1..75: mol_type = other DNA
agaaacacccggatgcgcatacctggaatgtcccgaagcgacagtggggaacccgggaggatttgacgtgtgcac

SEQ ID NO: 84295 - DNA, 75 bp, synthetic construct
  source 1..75: mol_type = other DNA
gcgcacaatgcggatgctggatggcagaactcacagacaaatttgcgaaatgtttggtcgggtacagcgggatcc

SEQ ID NO: 84296 - DNA, 75 bp, synthetic construct
  source 1..75: mol_type = other DNA
caggataaggtgaaaacaactaatcagatgcatgcttttctgctggaatttggtatcagcgttccgcgaggtgct

SEQ ID NO: 84297 - DNA, 75 bp, synthetic construct
  source 1..75: mol_type = other DNA
atagaagtgaaatatccttcagtacatgttgcaccacttcagaataacgatctactggaagactttttctcacct

SEQ ID NO: 84298 - DNA, 75 bp, synthetic construct
  source 1..75: mol_type = other DNA
cgctgagcctggtgtactggaacagacagcccgggcttatattgaatcgcatggtgctgttgaacgtcatcttgg

SEQ ID NO: 84299 - DNA, 75 bp, synthetic construct
  source 1..75: mol_type = other DNA
atggatagaacaaatcatgtcagttccggcgccggtgatggtagcccgcgaaacattgcatttaactacattgtg

SEQ ID NO: 84300 - DNA, 75 bp, synthetic construct
  source 1..75: mol_type = other DNA
ggtcacgatccaggaaggtaaccgccttcttacggtggaaaaaggccacaagatcaccggagtactgaaagggtc

SEQ ID NO: 84301 - DNA, 75 bp, synthetic construct
  source 1..75: mol_type = other DNA
actggttatccgcctggggcgttcgcccgcgcagcgttgcgtgaatcatatttctgaaccggataccgaaattcc

SEQ ID NO: 84302 - DNA, 75 bp, synthetic construct
  source 1..75: mol_type = other DNA
tcaatggcagggaaaccacagcgcctgcaggactgactggtgccctgaatatgagtctgcatgagctggaaaaaa

SEQ ID NO: 84303 - DNA, 75 bp, synthetic construct
  source 1..75: mol_type = other DNA
tgctgaagaggccaggcgtatggcagagaatgccagaggccctaaaggtgataccggaccgaaaggtgatgcagg

SEQ ID NO: 84304 - DNA, 75 bp, synthetic construct
  source 1..75: mol_type = other DNA
ctggtaaatgagaaacgccgggctgcgttgaatatgctctatatcgacccgcagaacagcagccagattattgct

SEQ ID NO: 84305 - DNA, 75 bp, synthetic construct
  source 1..75: mol_type = other DNA
aatacccagaaaattttccgctgggtagagaaagacacccctgatgcagttgaaaaaattcaggcgttgttacca

SEQ ID NO: 84306 - DNA, 75 bp, synthetic construct
  source 1..75: mol_type = other DNA
atgtcctgttctcattcagttgtattactgaataacgccttaaaaatcgccgttatgaaaaatggcgatttgtct

SEQ ID NO: 84307 - DNA, 75 bp, synthetic construct
  source 1..75: mol_type = other DNA
ttaccacgcctcatgtgactattgaacgttatagcgagctgacagggctatccatcgatactatcaatgacatgt

SEQ ID NO: 84308 - DNA, 75 bp, synthetic construct
  source 1..75: mol_type = other DNA
tggctaatgaaccgcacccgattgatggcctgtccggtgaatatgcggagaaatcccttgaagaatgggcggaac

SEQ ID NO: 84309 - DNA, 75 bp, synthetic construct
  source 1..75: mol_type = other DNA
tttacgacctgcacagccataccacagcttccgatggctgcctgacgccagaagcattggtgcaccgtgcagtcg

SEQ ID NO: 84310 - DNA, 75 bp, synthetic construct
  source 1..75: mol_type = other DNA
gacgcagaacgatccgcgcgtcaccaaagtggggaactttctgcgccgcacctcgctggatgaattgccgcagtt

SEQ ID NO: 84311 - DNA, 75 bp, synthetic construct
  source 1..75: mol_type = other DNA
agcttattaatcatcagcttaatattgatggtcgtggcggtgatcgttatgggactggtgttgtatgccggatag

SEQ ID NO: 84312 - DNA, 75 bp, synthetic construct
  source 1..75: mol_type = other DNA
gcgcggcgaaaccgacacgctggagaaaatggaaaaacgcgtcgagttcgaccttgagtacatccgcgaatggag

SEQ ID NO: 84313 - DNA, 75 bp, synthetic construct
  source 1..75: mol_type = other DNA
aatccccatcggacaaacgactgaatagtgaagagcttaagaaattaatgttaaatattaaaggtgttgctgaag

SEQ ID NO: 84314 - DNA, 75 bp, synthetic construct
  source 1..75: mol_type = other DNA
atgacaatttccctgcataatccccggacaagcgcccctaacaccgcagcggcgaccagcatatccccgctggac

SEQ ID NO: 84315 - DNA, 75 bp, synthetic construct
  source 1..75: mol_type = other DNA
caccaaaagaatcctggagtttgacagttcaaatggtgttctgtacgcgctgaaacataaaagacactatcgccg

SEQ ID NO: 84316 - DNA, 75 bp, synthetic construct
  source 1..75: mol_type = other DNA
ccgcattcacagtatgcacccaaagaaagtccgacgtttaccggaactcccaaagcgccaacgccagcggcgggg

SEQ ID NO: 84317 - DNA, 75 bp, synthetic construct
  source 1..75: mol_type = other DNA
ttcagcccatcaactgatgaagtctggttaccggagcgccatctattcgctgatgcggctaacttctatgctacc

SEQ ID NO: 84318 - DNA, 75 bp, synthetic construct
  source 1..75: mol_type = other DNA
ccgtgatggcgcgggtatctggaccatctgtcgcggtgccattctggtggatggtaaacctgtcgtcccgggcat

SEQ ID NO: 84319 - DNA, 75 bp, synthetic construct
  source 1..75: mol_type = other DNA
ctgttaccggcgatcgaaaaggcgatgccgcctttgctggtggcccgtatgcgcagtcacagttctgaatattac

SEQ ID NO: 84320 - DNA, 75 bp, synthetic construct
  source 1..75: mol_type = other DNA
gctgaaatagcccggacttatttcgaactggggatgacgttccctgaactgtacgacgacagccatccggaagcc

SEQ ID NO: 84321 - DNA, 75 bp, synthetic construct
  source 1..75: mol_type = other DNA
gaacgtggtatctggggctggctctggattgatgctcaaactctgcgctgcgcggacgagccagtactggctcag

SEQ ID NO: 84322 - DNA, 75 bp, synthetic construct
  source 1..75: mol_type = other DNA
gttgcagagggttctaaggccatcagaatcacaacggaccaactggaactactcaaagcacagtccgcagtagca

SEQ ID NO: 84323 - DNA, 75 bp, synthetic construct
  source 1..75: mol_type = other DNA
gcgttttcgtaaaaatccgtctcttggaatgggcgactggcgattctttattagtgagccgggaattatttcaat

SEQ ID NO: 84324 - DNA, 75 bp, synthetic construct
  source 1..75: mol_type = other DNA
attggtgttgtggcactgatcgctatcgccacctggctgctgcacaatcaggaagttgcgcgtatggcgctgggc

SEQ ID NO: 84325 - DNA, 75 bp, synthetic construct
  source 1..75: mol_type = other DNA
tgacgttctcagtaccggttaccccccatacgttccgtcactcctacgcgatgcatatgctgtacgccggcatac

SEQ ID NO: 84326 - DNA, 75 bp, synthetic construct
  source 1..75: mol_type = other DNA
acgagactttttcggcaaaaacgccatttcgctgttactgctgctgcccattgcgctgccgggcattgtcactgg

SEQ ID NO: 84327 - DNA, 75 bp, synthetic construct
  source 1..75: mol_type = other DNA
atgactggcctcataccttcagctacttctcagggctcaatgaccgccctgccagtgaccatcgactatcccgca

SEQ ID NO: 84328 - DNA, 75 bp, synthetic construct
  source 1..75: mol_type = other DNA
aggtggtcaggagactggatcatctacaggctcgactaagccggaaagtggaaactcctctggacacgtgaacga

SEQ ID NO: 84329 - DNA, 75 bp, synthetic construct
  source 1..75: mol_type = other DNA
tgggggaatgtcggtgtgcaactaggtgataaaggctatagcgatactcagggcatgctgggagtgaaatatagc

SEQ ID NO: 84330 - DNA, 75 bp, synthetic construct
  source 1..75: mol_type = other DNA
ctgcgccagatgctggagcagcaggtgcgccagaaccctctttcagcagacgacgcccgctttatcggggagctg

SEQ ID NO: 84331 - DNA, 75 bp, synthetic construct
  source 1..75: mol_type = other DNA
aatttaaggaagaggccgtccgccagatcaccgagcggggctattctattgctgaagtatctgaacggctcggcg

SEQ ID NO: 84332 - DNA, 75 bp, synthetic construct
  source 1..75: mol_type = other DNA
tctgggcctgcgtgaggcgcaccgtcaggcgcagcttgcgatgctcgccgaatgggtgaatgagctaccggacgg

SEQ ID NO: 84333 - DNA, 75 bp, synthetic construct
  source 1..75: mol_type = other DNA
taagatgcacggttacgatctcaccacacagcctttgcagtttgccatgaataatcagcatatgaatggcggcat

SEQ ID NO: 84334 - DNA, 75 bp, synthetic construct
  source 1..75: mol_type = other DNA
gcgggcagtgggagtaaatgggttctccccgcgcggaagatgcaacaccgcatgattccccacattcaggaaagc

SEQ ID NO: 84335 - DNA, 75 bp, synthetic construct
  source 1..75: mol_type = other DNA
ttcttaatctcgtatccgtgtctgcggtaacactgaatcagccattcggcctgttcttcagtgcatggagggtgt

SEQ ID NO: 84336 - DNA, 75 bp, synthetic construct
  source 1..75: mol_type = other DNA
gaagcggccgccgtcgacggggtgacattctcggtgccggtcaccccgcatacgttccgccactcctacgcgatg

SEQ ID NO: 84337 - DNA, 75 bp, synthetic construct
  source 1..75: mol_type = other DNA
tggttaagttatcccggattcgttcctcagttaggaaataacgcagacagtgtaatctttgttaatccgttgcaa

SEQ ID NO: 84338 - DNA, 75 bp, synthetic construct
  source 1..75: mol_type = other DNA
gcgtcacgccggacagcctgccgccggtggagtggctgacctacggcagcggttacctggcgggcatgaagctgg

SEQ ID NO: 84339 - DNA, 75 bp, synthetic construct
  source 1..75: mol_type = other DNA
gccttgtcggggctgtgctggctattgctgccacgctgccgggttttcagcagcttcacacctccgtggagggac

SEQ ID NO: 84340 - DNA, 75 bp, synthetic construct
  source 1..75: mol_type = other DNA
aacgtcagcgacagtaagctggaaggcgtgaaagtcgattcttatgaactgggctggcgctttaccggtgacaac

SEQ ID NO: 84341 - DNA, 75 bp, synthetic construct
  source 1..75: mol_type = other DNA
ctggatgattgcgcaacaacataaaagcctgctgcgttttctgacctgtggtagcgtcgatgacggcaaaagtac

SEQ ID NO: 84342 - DNA, 75 bp, synthetic construct
  source 1..75: mol_type = other DNA
tcgctggcctctactcaatcgcgccgacatttgttccagcgcgcagtttttgtgaatctcaccaatcccaaaagt

SEQ ID NO: 84343 - DNA, 75 bp, synthetic construct
  source 1..75: mol_type = other DNA
gtcttgttgattttattatccggctttcgattacagcgattgtcatttccccggtaattatctggtcgtgggata

SEQ ID NO: 84344 - DNA, 75 bp, synthetic construct
  source 1..75: mol_type = other DNA
gacgatgctcgtcacatgttcgatggcaggaaggcagaaaatatccgcatcattaacgtacgcggtgacagcatg

SEQ ID NO: 84345 - DNA, 75 bp, synthetic construct
  source 1..75: mol_type = other DNA
tccgtggatgctgagggtaacgagtataacttcctcgcggattactatcgcaccacccaggagctggcttcaaac

SEQ ID NO: 84346 - DNA, 75 bp, synthetic construct
  source 1..75: mol_type = other DNA
cgtttctggtcgttggatttcctgattttttacgcttactacattgtttgcgtaggactttttgcatttttctgg

SEQ ID NO: 84347 - DNA, 75 bp, synthetic construct
  source 1..75: mol_type = other DNA
gtggtgtttgaaattgacctgctgaagtcgcaggaaattaacctggactacatccttggtctgattttcgaccac

SEQ ID NO: 84348 - DNA, 75 bp, synthetic construct
  source 1..75: mol_type = other DNA
aagcagcccaagatgctaaaagtttagagtttctaagtaagcaattaccacaagtcaggggagatttagatcttt

SEQ ID NO: 84349 - DNA, 75 bp, synthetic construct
  source 1..75: mol_type = other DNA
tcaattgccctggtcagtccggttgagttttcgacatcatcatggcgacgcgccgttctgtctcttgaagagcat

SEQ ID NO: 84350 - DNA, 75 bp, synthetic construct
  source 1..75: mol_type = other DNA
tgcgtgagcagctcacgatcgccaccgctgatttgagtggagcaacaaaaggtcagcttgaagcctggcaggaga

SEQ ID NO: 84351 - DNA, 75 bp, synthetic construct
  source 1..75: mol_type = other DNA
caggaacacatcccggtgaacacaatccccgttaaccagcctccccggttcttcgacgaatacattctgacaccg

SEQ ID NO: 84352 - DNA, 75 bp, synthetic construct
  source 1..75: mol_type = other DNA
agtctgcagccatggtaccggcagtgtattctgccggacagtctgcacaacttcctgttgccattgattatccgg

SEQ ID NO: 84353 - DNA, 75 bp, synthetic construct
  source 1..75: mol_type = other DNA
gccttctgcaggttattcctgagaacattgaaaactattatcttattctctgggtcccgaatgatgctgttcctt

SEQ ID NO: 84354 - DNA, 75 bp, synthetic construct
  source 1..75: mol_type = other DNA
ttcccgcgtcagcattggagcaaaagcaaaaaattcctccagctatagcagccctgcggaaaagcaaatttaagg

SEQ ID NO: 84355 - DNA, 75 bp, synthetic construct
  source 1..75: mol_type = other DNA
atgaagcagattaaagaactccagcgcctgctcggcaagaaaacgatggaaaatgaactcctcaaagaagccgtt

SEQ ID NO: 84356 - DNA, 75 bp, synthetic construct
  source 1..75: mol_type = other DNA
cagcggaccgaaaaagccgccaggacggcaggaagaatgcccgccggtcagcagactcaccggctggttccgctc

SEQ ID NO: 84357 - DNA, 75 bp, synthetic construct
  source 1..75: mol_type = other DNA
gttcattattgttggtacctatagccgccgtgttaatgtcagtggtgaggtcacaacctggccaagagctgtcaa

SEQ ID NO: 84358 - DNA, 75 bp, synthetic construct
  source 1..75: mol_type = other DNA
ctttaccgctacctttttccagaaacatactctgcttaatgttctggtgaactacagcgtttttgacagtagtca

SEQ ID NO: 84359 - DNA, 75 bp, synthetic construct
  source 1..75: mol_type = other DNA
atggcctgaaaccgaagtatgaagcgcaccacgacgtgcgttataccgcaaaagcggtgcgtgcagcggtagagc

SEQ ID NO: 84360 - DNA, 75 bp, synthetic construct
  source 1..75: mol_type = other DNA
ccccccatgagctgcgtcctgatatttatccaaatccaaatgatggattaccagagtgctattcaaaagttagcg

SEQ ID NO: 84361 - DNA, 75 bp, synthetic construct
  source 1..75: mol_type = other DNA
gcgggccagatgctgaaaaaagaaggcgtcacgctgatggttgaagccattcacgcccgcccgggcagtgagttt

SEQ ID NO: 84362 - DNA, 75 bp, synthetic construct
  source 1..75: mol_type = other DNA
aggtgctggaaaacccccttcagcgttcagataaccattttctggatgagctggttcgtaaacagcaggcttcgc

SEQ ID NO: 84363 - DNA, 75 bp, synthetic construct
  source 1..75: mol_type = other DNA
ggttcgacgctgattatgcagcacacgcgccatccttttgtgctggcagctttgttttctggcgttggcattggc

SEQ ID NO: 84364 - DNA, 75 bp, synthetic construct
  source 1..75: mol_type = other DNA
tgcgggtgcagcgtctggtggccaggtcgatgcggctaacctgatcaaaccgttgctctccagcggtaaaattcg

SEQ ID NO: 84365 - DNA, 75 bp, synthetic construct
  source 1..75: mol_type = other DNA
tgccaaagtcagggcgataattcagacagatatatcagcaagctggacgcttggtgcgattgcgttacgcctgca

SEQ ID NO: 84366 - DNA, 75 bp, synthetic construct
  source 1..75: mol_type = other DNA
aagtatgggctgcaggcctgaaatatgatgcgaacaatatctatctggctaccacatattctgaaactcagaata

SEQ ID NO: 84367 - DNA, 75 bp, synthetic construct
  source 1..75: mol_type = other DNA
cagggaaaacaacatttgaagcagcagccagcggttttcttcaacgctttgaccctttaatgtttgttgtggatt

SEQ ID NO: 84368 - DNA, 75 bp, synthetic construct
  source 1..75: mol_type = other DNA
atttatggtgatgtgattgccgatgcccaaccgctggatttgctggtgaatagcagttatttcgcgattaactga

SEQ ID NO: 84369 - DNA, 75 bp, synthetic construct
  source 1..75: mol_type = other DNA
acaccgtcaaacctaaagataagccttacaagctggctgatggtggtggtttgtatctcttgattaaacctaatg

SEQ ID NO: 84370 - DNA, 75 bp, synthetic construct
  source 1..75: mol_type = other DNA
atctcgcttggcgtttacccaacgatcactcttgccgatgctcgttcccgtcgtgatgaagctcgaaaacttgtg

SEQ ID NO: 84371 - DNA, 75 bp, synthetic construct
  source 1..75: mol_type = other DNA
actctcagcagttagccaaaagtactttggtatgagtccagccacagcagaagcaaaagcaaacgcttgtaagtt

SEQ ID NO: 84372 - DNA, 75 bp, synthetic construct
  source 1..75: mol_type = other DNA
gccggactgacgcttgacgacgttgatcgcatgtcagtacgtgaattgcgtcagtctcttcgcgaagcccgcgaa

SEQ ID NO: 84373 - DNA, 75 bp, synthetic construct
  source 1..75: mol_type = other DNA
gttatgaaatctttaaaaatagcagtgtattgctctctgctatgtagcatagggagttggggcttatatcgaagt

SEQ ID NO: 84374 - DNA, 75 bp, synthetic construct
  source 1..75: mol_type = other DNA
gttttttagtgactgtacttatatggtttattgccatatttatcatgtcggtaatgatgtttttcttcatcagag

SEQ ID NO: 84375 - DNA, 75 bp, synthetic construct
  source 1..75: mol_type = other DNA
gtgctggaactccacatggcgaatgaaacctgcccgaataatcttgcaccaacaacgtctaccacgctgacgatg

SEQ ID NO: 84376 - DNA, 75 bp, synthetic construct
  source 1..75: mol_type = other DNA
tataaagggcggtgcgttagccttcaaaaattggtcaatcacttcacatttacgttggttaaactgcaatacaac

SEQ ID NO: 84377 - DNA, 75 bp, synthetic construct
  source 1..75: mol_type = other DNA
acggtcagggtgacagttaccggagaagcagaggaaagcggcaccctgagtctgtatgtcgggcgctcccgtgta

SEQ ID NO: 84378 - DNA, 75 bp, synthetic construct
  source 1..75: mol_type = other DNA
ttcaccgtgccagactccatctgcagtgaatccgcatcagggattgcaacagaaagcaaaagtgcctcagcatcc

SEQ ID NO: 84379 - DNA, 75 bp, synthetic construct
  source 1..75: mol_type = other DNA
agaaatacattacgttttgatgagatgaacagattcaaaggtattgtagaacatctgcccatcgacaaagaatat

SEQ ID NO: 84380 - DNA, 75 bp, synthetic construct
  source 1..75: mol_type = other DNA
gagaacgccgcccgtgcctgctggcaggggcggcagagttatccgaattgtaaaatttggtatcgtgcgccatct

SEQ ID NO: 84381 - DNA, 75 bp, synthetic construct
  source 1..75: mol_type = other DNA
gacccgacgctgttttcacagtacggcattcgcagcgtgccggccctggtggtgttctgcagccaggggcacgac

SEQ ID NO: 84382 - DNA, 75 bp, synthetic construct
  source 1..75: mol_type = other DNA
taatcgcttatcatttggttgctgatagctcaatgcctcctcgtgatgcatgggatgcagctgtcgcagaggtta

SEQ ID NO: 84383 - DNA, 75 bp, synthetic construct
  source 1..75: mol_type = other DNA
tgctaaaaatgcagagtatatggcaagactggcaggacttattcaccattcgagcggtgaagagggggacatttc

SEQ ID NO: 84384 - DNA, 75 bp, synthetic construct
  source 1..75: mol_type = other DNA
gcgcacgcgcctgcttaccagttataaaacgcttttcggtaacagcggttttaactgttatttgctgatgctgat

SEQ ID NO: 84385 - DNA, 75 bp, synthetic construct
  source 1..75: mol_type = other DNA
ttaaatatggcgatcaaaaggccggcaattttctgcaaacggaattctggcccgcgatgcataagaacgcccagg

SEQ ID NO: 84386 - DNA, 75 bp, synthetic construct
  source 1..75: mol_type = other DNA
cgcaagaatccgtttggtgatatcaaatcggatggcacggtgaaaacggctctcgaaaaccttggtttgggagaa

SEQ ID NO: 84387 - DNA, 75 bp, synthetic construct
  source 1..75: mol_type = other DNA
ctaaaacacgggcgcggttgcccgaaatgcgctgggaagatgaagttatcgcacgaagaacatattgccgctatc

SEQ ID NO: 84388 - DNA, 75 bp, synthetic construct
  source 1..75: mol_type = other DNA
caagaaaaattggtatttcaggtatgcagtaccagtgagcaagaaaagaaccaaaatgagccttgggacatatcc

SEQ ID NO: 84389 - DNA, 75 bp, synthetic construct
  source 1..75: mol_type = other DNA
tacgcgaaactggttgagaattacagtacagaaaaggaaatatgggagcaaaaacaaaaagcactggagtcaaaa

SEQ ID NO: 84390 - DNA, 75 bp, synthetic construct
  source 1..75: mol_type = other DNA
tggtgtaagcgtaaaagagaacgaaaggaggaacagagtatttaaaagtgctcgtaaggcaggtgtaaggctgac

SEQ ID NO: 84391 - DNA, 75 bp, synthetic construct
  source 1..75: mol_type = other DNA
atggcaaaaatcgctaagaagctcactgacactgaaatcaaaagcaccaagccagccgataaagaaatcaacttg

SEQ ID NO: 84392 - DNA, 75 bp, synthetic construct
  source 1..75: mol_type = other DNA
gtcatgcattagtaaccccatctgctgctgaagatattctgagcaaactttttggcggcatcagtggtgatgtta

SEQ ID NO: 84393 - DNA, 75 bp, synthetic construct
  source 1..75: mol_type = other DNA
aaataaatccacaatccatacagcaacatccagaaaaaaatgaacttaactggatgctcgaattaaatcaatgga

SEQ ID NO: 84394 - DNA, 75 bp, synthetic construct
  source 1..75: mol_type = other DNA
gttcgactcctgacgcaggatatgcaaaggggtgatattctgattactaaatcgttaacttgttttggtaatacg

SEQ ID NO: 84395 - DNA, 75 bp, synthetic construct
  source 1..75: mol_type = other DNA
ttgcgaaaccaggcaagctatttacaaaatgcttctcagttaatatccgactcagcacgagtaaatagccgtatt

SEQ ID NO: 84396 - DNA, 75 bp, synthetic construct
  source 1..75: mol_type = other DNA
gcaagtctgattgagtacacaacagcatgggctattggtcagggtgtcagatttaccgacaggaggtacgaatga

SEQ ID NO: 84397 - DNA, 75 bp, synthetic construct
  source 1..75: mol_type = other DNA
aaaccgtcagttcgtggcagaacgtcctgaccagctgtgggtggctgattttacttacgtcagcacatggcaggg

SEQ ID NO: 84398 - DNA, 75 bp, synthetic construct
  source 1..75: mol_type = other DNA
cagtttgttatgaataatcctgaaggtgagcgagcggattcacccaaggtgattatagaagtttcactttccact

SEQ ID NO: 84399 - DNA, 75 bp, synthetic construct
  source 1..75: mol_type = other DNA
gagcatgacacacgcatctctgttattgcttctgatgcggagcataccgttttcctcaagaaaggcagcttcgct

SEQ ID NO: 84400 - DNA, 75 bp, synthetic construct
  source 1..75: mol_type = other DNA
ctactgaaagatctttccgaccaggttctctggttcggcaataaatacgattccgacgactggaaagacctcatc

SEQ ID NO: 84401 - DNA, 75 bp, synthetic construct
  source 1..75: mol_type = other DNA
tatgagtgggaagatattgacgacaacactgtcagcactggcgtaaacagcagcgaagtgtttaataacaccatc

SEQ ID NO: 84402 - DNA, 75 bp, synthetic construct
  source 1..75: mol_type = other DNA
gtaaaccatttaattccagaaactccagattttctgaaaaagcaactgaccaatccctgtccagtgaagattttg

SEQ ID NO: 84403 - DNA, 75 bp, synthetic construct
  source 1..75: mol_type = other DNA
cgttggccgatcctaactggttacgtcgtcaggtgggggttgtgttgcaggacaatgtgctgcttaatcgcagta

SEQ ID NO: 84404 - DNA, 75 bp, synthetic construct
  source 1..75: mol_type = other DNA
gaaattgatacgtattgaaatgcagatggctgaagggttcatcgatggttgcctttctatgctagacataacact

SEQ ID NO: 84405 - DNA, 75 bp, synthetic construct
  source 1..75: mol_type = other DNA
ttaaggagcgggtgatccgcaacagtctgcggccccctgccgtgcccggtatcggacgcacggagaaatacggca

SEQ ID NO: 84406 - DNA, 75 bp, synthetic construct
  source 1..75: mol_type = other DNA
ttaatatataaagtaaatataattaatgctagttcaaaaaaagatgttttttttatgaaagcccaacatcaaccc

SEQ ID NO: 84407 - DNA, 75 bp, synthetic construct
  source 1..75: mol_type = other DNA
gtttgatgaaatcaatattgtgcgcggtcagctcgttcctggtgggcggctggggataaaaatcacagaactgga

SEQ ID NO: 84408 - DNA, 75 bp, synthetic construct
  source 1..75: mol_type = other DNA
gtgcagcctgggtatatcctgatttcaacacagattacaccctgccggcataccagagaggccagaacaatgaag

SEQ ID NO: 84409 - DNA, 75 bp, synthetic construct
  source 1..75: mol_type = other DNA
caggcgtggattgatgatggcgatacgtcattaccaccagaaaaaattcaggttcctttcatgttaacgccacca

SEQ ID NO: 84410 - DNA, 75 bp, synthetic construct
  source 1..75: mol_type = other DNA
tcggggagtcctgtgcaccgtgggtgtttgacctggtggcggccctgtttggctcctacgatgcgcagaccggtg

SEQ ID NO: 84411 - DNA, 75 bp, synthetic construct
  source 1..75: mol_type = other DNA
acggcaataaccgcgccatccgtctgcctcgcgatctggattttgagggggtgagtgagttggagattgtccgcg

SEQ ID NO: 84412 - DNA, 75 bp, synthetic construct
  source 1..75: mol_type = other DNA
atgagtgcaaatatccgcgcccgttatgaagcgtcgccgcgttctgccaatgccgaagctcttcgtcagctggct

SEQ ID NO: 84413 - DNA, 75 bp, synthetic construct
  source 1..75: mol_type = other DNA
ttgcagagccaccggataagcgtcgtcgcgacctggacaacattctgaaagcaccgctggatgcgctgacgcatg

SEQ ID NO: 84414 - DNA, 75 bp, synthetic construct
  source 1..75: mol_type = other DNA
tctgaaaatacaggacacgcgactgaaaaatggagatattgcagctacaactcacaaagaaaaaactcgaatggc

SEQ ID NO: 84415 - DNA, 75 bp, synthetic construct
  source 1..75: mol_type = other DNA
caacttcactggagcgccgactggcgcaaacctgtagcgggatttctgatttgcaggtgccgctgcgtgacttgt

SEQ ID NO: 84416 - DNA, 75 bp, synthetic construct
  source 1..75: mol_type = other DNA
cgctggggttcttgttggtgcaggtgattaacaccattctgagctatttcgtgatgataagacccattcttggac

SEQ ID NO: 84417 - DNA, 75 bp, synthetic construct
  source 1..75: mol_type = other DNA
tgggcgatgacgaaagtattaacgcaacaatgaccgcgcgccacggcgcactgtttgaagtcgaatttaatgatg

SEQ ID NO: 84418 - DNA, 75 bp, synthetic construct
  source 1..75: mol_type = other DNA
acggcaacaaccgtgccatccgccttccacgcgatctggattttgagggggtgagcgagctggagatcgtccggg

SEQ ID NO: 84419 - DNA, 75 bp, synthetic construct
  source 1..75: mol_type = other DNA
agataactggaaacaggcaatatcagaagaatgtgccattcgctatgcaaacagattaattcaatgtgaaggata

SEQ ID NO: 84420 - DNA, 75 bp, synthetic construct
  source 1..75: mol_type = other DNA
atatcgacggcgtgctgatgcacgataacgtcgccgtaccgggtgcagcggaatttttgcacgggattatggata

SEQ ID NO: 84421 - DNA, 75 bp, synthetic construct
  source 1..75: mol_type = other DNA
gtcaaagctaataatgtcaaagtcaattatgaaactattatgattgcccccttagaaagtcagagtgttaatgtc

SEQ ID NO: 84422 - DNA, 75 bp, synthetic construct
  source 1..75: mol_type = other DNA
gcgcactgcgaagagccgtggagcctctcggctacctgattgaagtaaaggagtggtggcaactcaatgaggagc

SEQ ID NO: 84423 - DNA, 75 bp, synthetic construct
  source 1..75: mol_type = other DNA
aaatcggatacaagttggattatctgcaggttcaattttaatcgaggctgcgttaaatagcggaacgataactca

SEQ ID NO: 84424 - DNA, 75 bp, synthetic construct
  source 1..75: mol_type = other DNA
tggtgtgtatcttcgtctgcagacccggcggcagtgtgtttcccgcgaagacctggcctgctggaaagtggaccg

SEQ ID NO: 84425 - DNA, 75 bp, synthetic construct
  source 1..75: mol_type = other DNA
ccaatatcaccaccaacactaacagtatcaataccctgacggattccgttggcgaccttaaagacgatgccctgc

SEQ ID NO: 84426 - DNA, 75 bp, synthetic construct
  source 1..75: mol_type = other DNA
ttccatcagctttattgccgcgatgtggtatgtcggcgcgacctgtgccgatctggtcggctactggctttatga

SEQ ID NO: 84427 - DNA, 75 bp, synthetic construct
  source 1..75: mol_type = other DNA
tgttcgccagcagcgactgaaattaaacctgtccggaaggctggcaataaaaattattgcagagccaccggataa

SEQ ID NO: 84428 - DNA, 75 bp, synthetic construct
  source 1..75: mol_type = other DNA
aaaaacactttatccgtaacgcaatgcttcttgcgattgttactggtcagcgccgtgatgacatttgccacatgc

SEQ ID NO: 84429 - DNA, 75 bp, synthetic construct
  source 1..75: mol_type = other DNA
gcaccgctggatgcgctgacgcacgcggggttgttaatggacgatgagcagtttgatgaaatcaatattgtacgt

SEQ ID NO: 84430 - DNA, 75 bp, synthetic construct
  source 1..75: mol_type = other DNA
tatggaaacgacattcgtgctggatgctctggagcaggcgttatgggcccgtcgaccgtccggcacagtccatca

SEQ ID NO: 84431 - DNA, 75 bp, synthetic construct
  source 1..75: mol_type = other DNA
taccggtgggtgtcaaatgaccgtatcggaaagccaccggcttaccagtatctcggggagggggaaacctcgcgc

SEQ ID NO: 84432 - DNA, 75 bp, synthetic construct
  source 1..75: mol_type = other DNA
gtcttttttatcgtccgcgctcacgcacgccagaattatggtgggctgggcaggggagccgaaaggctcgccggt

SEQ ID NO: 84433 - DNA, 75 bp, synthetic construct
  source 1..75: mol_type = other DNA
ctggccagagcctacccgaccctccgtcttcccgatttacgcggtgaatttattcgtggctgggatgacggacgt

SEQ ID NO: 84434 - DNA, 75 bp, synthetic construct
  source 1..75: mol_type = other DNA
gattaccttggtttgggggaaggctctgcgctgcccgttggtgtgcccgttccatggccctcagccacgctgcca

SEQ ID NO: 84435 - DNA, 75 bp, synthetic construct
  source 1..75: mol_type = other DNA
tctgacgctgccctcgctggatgaggcggtgaacactctgaaaccctggtggccgggattgtttgacggtaacac

SEQ ID NO: 84436 - DNA, 75 bp, synthetic construct
  source 1..75: mol_type = other DNA
gacattgtaaccaccggtagcaccaagtacttcaagaccaacaccgatggcgtagatgccaacgcccagggtaaa

SEQ ID NO: 84437 - DNA, 75 bp, synthetic construct
  source 1..75: mol_type = other DNA
ttttcgggctgcggtgcttataccttagtccctgtcagataatggtggtccgggcggggcagccttcgggctggc

SEQ ID NO: 84438 - DNA, 75 bp, synthetic construct
  source 1..75: mol_type = other DNA
aatcgacgattgctggaaaggctgggccatactcctccggcagaagcagaaaagcttattatgcttccatcggaa

SEQ ID NO: 84439 - DNA, 75 bp, synthetic construct
  source 1..75: mol_type = other DNA
cgtaaatacgtcgttgatgatgagaagctgcaaaacttctccgttgatacccagttgcagagcaagtttgccact

SEQ ID NO: 84440 - DNA, 75 bp, synthetic construct
  source 1..75: mol_type = other DNA
tctaatccatagtcggcaccagaaacaaccaaagccgatgagtaaagacaacctgagcgactactttgccaaagc

SEQ ID NO: 84441 - DNA, 75 bp, synthetic construct
  source 1..75: mol_type = other DNA
atgaaaaatgatattggtcagcggttgcgtgaggaaagggaaagattgggacttagtcaagttgctatgagcgac

SEQ ID NO: 84442 - DNA, 75 bp, synthetic construct
  source 1..75: mol_type = other DNA
cgggtctcatcgtccatggaaacgacattcgtgctggatgcactggagcaggcgttatgggcccgtcgaccgtcc

SEQ ID NO: 84443 - DNA, 75 bp, synthetic construct
  source 1..75: mol_type = other DNA
gggctgacggtggagcggctggcggcacagatagagccggtttatttgcctgagcgaaaaatacatctttatcac

SEQ ID NO: 84444 - DNA, 75 bp, synthetic construct
  source 1..75: mol_type = other DNA
cgggcactggcagtaagtatccagcatctctgtcgggtggtatggtcaagcgtgttgcgctagcccgtgccttag

SEQ ID NO: 84445 - DNA, 75 bp, synthetic construct
  source 1..75: mol_type = other DNA
gcgaccgacggtcatgttgcctggttaggtaaagagttgctgggcatgaagcccgatgaatggcgtgccgttcgc

SEQ ID NO: 84446 - DNA, 75 bp, synthetic construct
  source 1..75: mol_type = other DNA
actccatgctgcaggaaaccatcacccgactctcgggccttgaaatccatgaaccgatggtcatctgtaacgaag

SEQ ID NO: 84447 - DNA, 75 bp, synthetic construct
  source 1..75: mol_type = other DNA
tgggcagtgccagcgtatcgggattgctcgtgctcttattcttgaaccgaagctgattatctgtgatgagccggt

SEQ ID NO: 84448 - DNA, 75 bp, synthetic construct
  source 1..75: mol_type = other DNA
caaccgccgccgcgctcactacgctgatgctcgcgcttattgatatttctgttattgctgacagggcgcataagc

SEQ ID NO: 84449 - DNA, 75 bp, synthetic construct
  source 1..75: mol_type = other DNA
gcttactctggtgatcttattttcgctgccctgttatgctgcatggtctgtttttattagccccattttgcgacg

SEQ ID NO: 84450 - DNA, 75 bp, synthetic construct
  source 1..75: mol_type = other DNA
caaagaggtggtggcggcactggtaaccgtcgcgaaaaagctgcgtgcctttgtgtatgcgggctgtcccggctg

SEQ ID NO: 84451 - DNA, 75 bp, synthetic construct
  source 1..75: mol_type = other DNA
cgtccggcgtttgggtagcctgtttactgacatgggcggcaattccggtagcactggctgcgttaattaagaatg

SEQ ID NO: 84452 - DNA, 75 bp, synthetic construct
  source 1..75: mol_type = other DNA
atgaaaaagaaagtaatcagcgggctgtttctgatgttatggatggggctgttaatcgaagcaatggtgtatccg

SEQ ID NO: 84453 - DNA, 75 bp, synthetic construct
  source 1..75: mol_type = other DNA
gtgaatttgatgccgccggtatcagcttcccgtacccgcaaatggatgtgaactttaagcgggtgaaagaagaca

SEQ ID NO: 84454 - DNA, 75 bp, synthetic construct
  source 1..75: mol_type = other DNA
gcactggctgcgttaattaagaacggcccgctctggcaggagttgagggcatctttgctgaagagcattacccga

SEQ ID NO: 84455 - DNA, 75 bp, synthetic construct
  source 1..75: mol_type = other DNA
ctgatgatggctggattcaggcgtattttcatggcccacgtggccgggctgcttatcaggcagcggcaattaaca

SEQ ID NO: 84456 - DNA, 75 bp, synthetic construct
  source 1..75: mol_type = other DNA
tcaaatcgattattgataaattaagcctggcaggcaaaagcggcgaaggtctgtattttatcgacaaagaactct

SEQ ID NO: 84457 - DNA, 75 bp, synthetic construct
  source 1..75: mol_type = other DNA
cttgatgtactgaatatcgccgccgattatgcggaatatgtggcagaggcgcgttatagaagaaaatttcctgag

SEQ ID NO: 84458 - DNA, 75 bp, synthetic construct
  source 1..75: mol_type = other DNA
aacgaaacgttccccgcgcctgcctatgcgtgcggccttcgtgcgtacattgaccatgagcagggctggcacaaa

SEQ ID NO: 84459 - DNA, 75 bp, synthetic construct
  source 1..75: mol_type = other DNA
atgctttcggactcaggtgaagcacaatcgcaagagagtattcaggacaaaatatctcaatgtaagtttcctgtt

SEQ ID NO: 84460 - DNA, 75 bp, synthetic construct
  source 1..75: mol_type = other DNA
gttatcgcggacagggcacataagcacgccaccagcgaaacagaatatgccggggctttcgttcctcactcactg

SEQ ID NO: 84461 - DNA, 75 bp, synthetic construct
  source 1..75: mol_type = other DNA
tgcccgtgcgcagcgcgatgactggctgaagaaagagatactgcgcgtatacgatgggaatcatcaggtatacgg

SEQ ID NO: 84462 - DNA, 75 bp, synthetic construct
  source 1..75: mol_type = other DNA
gcagtctgaagatgaattgttacgccagcgggagaaaatcaaccgcagtctggatgtgctggaaggatatctggt

SEQ ID NO: 84463 - DNA, 75 bp, synthetic construct
  source 1..75: mol_type = other DNA
tgtcgcagtggcgatcgctggtttcaatcagatgaatcgtggtggtccggcgggaaatgccctggtgatgcacta

SEQ ID NO: 84464 - DNA, 75 bp, synthetic construct
  source 1..75: mol_type = other DNA
ggtcacggccattaatgatattgactccagtgtgattggtatcgtggctgttgctgatgatgctgatgcaaaaac

SEQ ID NO: 84465 - DNA, 75 bp, synthetic construct
  source 1..75: mol_type = other DNA
tgcgggtccgggagaatgcggatctggtcacggccattaatgatattgactccagtgtgattggtatcgtggctg

SEQ ID NO: 84466 - DNA, 75 bp, synthetic construct
  source 1..75: mol_type = other DNA
atgcgcaatttcactgaaactgttcatgtgatcaatgtgtgcaacataaactcacaaaaacatgttgcagcggtg

SEQ ID NO: 84467 - DNA, 75 bp, synthetic construct
  source 1..75: mol_type = other DNA
ttggctatgctgatgctgaaaattataagagaagggagaataaagaattacttaacaaagtgttcatacgtgata

SEQ ID NO: 84468 - DNA, 75 bp, synthetic construct
  source 1..75: mol_type = other DNA
ctggctcgcaatacccagaaaattttccgctgggtaaagaaagatactcctgatgccgttgaaaaaatgcaggct

SEQ ID NO: 84469 - DNA, 75 bp, synthetic construct
  source 1..75: mol_type = other DNA
catttgatgaccagttttgcagaggggttttgcagaggttttgcagagaaaattaaaaacgatatcctgcggaga

SEQ ID NO: 84470 - DNA, 75 bp, synthetic construct
  source 1..75: mol_type = other DNA
cccgaaaggggccggtttgctggattacgtcaacagcgaaaaccgtctgcgctacccggaatatcgtgcgccagg

SEQ ID NO: 84471 - DNA, 75 bp, synthetic construct
  source 1..75: mol_type = other DNA
tcgagatcggttaaaggtgttttaagaggactgcattttcaaataaaaccttattctcaagcaaaattagtccgc

SEQ ID NO: 84472 - DNA, 75 bp, synthetic construct
  source 1..75: mol_type = other DNA
cgtgataccggtggttcatcaaccgtttctgtttttctgaatagttaccgaaaaattcaacaggaaagatatgaa

SEQ ID NO: 84473 - DNA, 75 bp, synthetic construct
  source 1..75: mol_type = other DNA
caacatgagtttccaaacaaaaaagtcgtaaatgattcatatactcatgatttgtcgcaacttctcaaaattgcc

SEQ ID NO: 84474 - DNA, 75 bp, synthetic construct
  source 1..75: mol_type = other DNA
catattctgcatattggctatggaataataatcaaccgaagccatttttcaaggattacaagactgttgcggaaa

SEQ ID NO: 84475 - DNA, 75 bp, synthetic construct
  source 1..75: mol_type = other DNA
ctggttaccctggaatctgtcggggaaggcagcatgttttcccgcctgagtgattatttccaccataaggcctga

SEQ ID NO: 84476 - DNA, 75 bp, synthetic construct
  source 1..75: mol_type = other DNA
ctacaagttattattcacctgagtatgaaagatctatcatatggaatgatgaagatcttgtaattaagtggccta

SEQ ID NO: 84477 - DNA, 75 bp, synthetic construct
  source 1..75: mol_type = other DNA
ctactaattattattgtcctgaatttgaagcgggaataagttggtgtgatggttttttgaacataaattggcctc

SEQ ID NO: 84478 - DNA, 75 bp, synthetic construct
  source 1..75: mol_type = other DNA
cggcaatttaggggcagcctgtgtcaccgctgtcacttacggcttccttcaggttcatgatggcagccagtgggt

SEQ ID NO: 84479 - DNA, 75 bp, synthetic construct
  source 1..75: mol_type = other DNA
ttcagcaatggctttcccaaatcaatcaggtatgcggaaattttaccggacgcctgctgactgagcgttacacgg

SEQ ID NO: 84480 - DNA, 75 bp, synthetic construct
  source 1..75: mol_type = other DNA
ggggtgtcttcacttatgtctaaagttggcgatgtcgctaacaaagttggttcaaacatcgtgaaaacagttact

SEQ ID NO: 84481 - DNA, 75 bp, synthetic construct
  source 1..75: mol_type = other DNA
ttgcatcgaaaatttcggcagtggcaaatggtttaactacttcttcgcgctctattggtacaactgtgctgaata

SEQ ID NO: 84482 - DNA, 75 bp, synthetic construct
  source 1..75: mol_type = other DNA
tcgcctccatgcggctgtttgcccgcttatccctggatagcgccttgccggatcgcaccaccatcatgaatttcc

SEQ ID NO: 84483 - DNA, 75 bp, synthetic construct
  source 1..75: mol_type = other DNA
tcgcctccatgcggctgtttgcccgcttatccctggatagcgccatgccggagcgcaccaccatcatgaatttcc

SEQ ID NO: 84484 - DNA, 75 bp, synthetic construct
  source 1..75: mol_type = other DNA
tggcgtgaggtgatggtattacagcgcagactggaggcgctgtctgcatcaccggggaacgatttgccacgcaca

SEQ ID NO: 84485 - DNA, 75 bp, synthetic construct
  source 1..75: mol_type = other DNA
aaagctaccaaatggtattgaggcatattttgctaagaaacatcccaaagtatatgaagactttgatattccatt

SEQ ID NO: 84486 - DNA, 75 bp, synthetic construct
  source 1..75: mol_type = other DNA
ttcgcccagcttctgtatggaacgggcatgcggatcagtgagggtttgcaactgcgggtcaaggatctggatttc

SEQ ID NO: 84487 - DNA, 75 bp, synthetic construct
  source 1..75: mol_type = other DNA
ctgtcttatcttctgtatttatgagtgctggtattttcgctgctgaagtagataccggaactttaaccattaaag

SEQ ID NO: 84488 - DNA, 75 bp, synthetic construct
  source 1..75: mol_type = other DNA
tcgcctccatgcggctgtttgcccgcttatccctggatagcgccgtgccggaacgcaccaccatcatgaatttcc

SEQ ID NO: 84489 - DNA, 75 bp, synthetic construct
  source 1..75: mol_type = other DNA
atgagacctaacatttcaatcactcttaccacgcctcatgtgactattgaacgctatagcgagctgacagggcta

SEQ ID NO: 84490 - DNA, 75 bp, synthetic construct
  source 1..75: mol_type = other DNA
gtgatctgtccgcgttccaaggggtataccatgttggtagcagcgaagtgctgatccgttttgatgctcggctgg

SEQ ID NO: 84491 - DNA, 75 bp, synthetic construct
  source 1..75: mol_type = other DNA
atggcgctgttaaccctgaccagtaccctggtgggatggtacaacctgcgctttatcagccaggtggaaaaagac

SEQ ID NO: 84492 - DNA, 75 bp, synthetic construct
  source 1..75: mol_type = other DNA
cattggggattttctgaccagagtcatttttcaacggtatttaagcaacgctttgggatgacgccaggcgagtat

SEQ ID NO: 84493 - DNA, 75 bp, synthetic construct
  source 1..75: mol_type = other DNA
atgaataaaaaatacgaactggttgttaaagggataaataattacccggataagattactgttactgtggcactg

SEQ ID NO: 84494 - DNA, 75 bp, synthetic construct
  source 1..75: mol_type = other DNA
tgtcgcagtggcgatcgccggtttcaaccagatgaatcgtggtggcccggcgggaaatgccgtggctgtacattg

SEQ ID NO: 84495 - DNA, 75 bp, synthetic construct
  source 1..75: mol_type = other DNA
ctggggcgaggatgaggataaagtggagtcagatccgtttgcggcgctggaagacgcgctgagctttgcagcaat

SEQ ID NO: 84496 - DNA, 75 bp, synthetic construct
  source 1..75: mol_type = other DNA
gggtatttatttaaaggtggcgaaatgagaccatacccgggaatagctggcggttttataggttctggtgcttca

SEQ ID NO: 84497 - DNA, 75 bp, synthetic construct
  source 1..75: mol_type = other DNA
acctcagttgaagtgtacaacttcatcaagtcaaagaccattgcctatgccaaagggcgcaagaaagccatgaca

SEQ ID NO: 84498 - DNA, 75 bp, synthetic construct
  source 1..75: mol_type = other DNA
aatgctggcctgcggcacgcggatactgggcgtgaaggaatacaactgcgataaacctgactgcccccacgtcag

SEQ ID NO: 84499 - DNA, 75 bp, synthetic construct
  source 1..75: mol_type = other DNA
gggctggaacccggtatcttctgcgccatccatacgtatggtcgtcgtctcaactggcatccgcatgtgcatgtg

SEQ ID NO: 84500 - DNA, 75 bp, synthetic construct
  source 1..75: mol_type = other DNA
tctacatccgttggtaactatggctttggtcactacgacttaaaccttcctcaatcacagctattcgccgggcga

SEQ ID NO: 84501 - DNA, 75 bp, synthetic construct
  source 1..75: mol_type = other DNA
agtcaggtagtatgtccatgtgagttttcagattttagagattattcctcttggacaaatgcaaatgaatttaca

SEQ ID NO: 84502 - DNA, 75 bp, synthetic construct
  source 1..75: mol_type = other DNA
tatccgtgatgtggcacagccgtgtgcggaggtgctggttcgcctgggaaaggcggagtacatcacggtgcgacg

SEQ ID NO: 84503 - DNA, 75 bp, synthetic construct
  source 1..75: mol_type = other DNA
tgatgacggcagataccccccatgatgaacgacaggacatcattcgccgttttgaagagggtgcgaccaaaataa

SEQ ID NO: 84504 - DNA, 75 bp, synthetic construct
  source 1..75: mol_type = other DNA
ggcgaagggcgtcagtctggagctcaacgctgttccgctgccgcaggcgctgaacatgatttacgttcaggtgtt

SEQ ID NO: 84505 - DNA, 75 bp, synthetic construct
  source 1..75: mol_type = other DNA
ggaatgagccagaggtcgtgagggcgctcagaggtgcattaaaacacggactgagaacaccaaatcgtcagcaga

SEQ ID NO: 84506 - DNA, 75 bp, synthetic construct
  source 1..75: mol_type = other DNA
attaccaagtgactcacgagatacagggcagattgaacaggattgcgattattgggtggggatccatcgtgaagg

SEQ ID NO: 84507 - DNA, 75 bp, synthetic construct
  source 1..75: mol_type = other DNA
tgcccggcattacccgcgcatggacataccgtcactggatgggaacgggaactgtcggtgtgatgattgccagca

SEQ ID NO: 84508 - DNA, 75 bp, synthetic construct
  source 1..75: mol_type = other DNA
aaaaaaattggtttttacaccattggcgataaaagcatttacctgtatgacctacgccgcatggatgaaatcatg

SEQ ID NO: 84509 - DNA, 75 bp, synthetic construct
  source 1..75: mol_type = other DNA
tcagttacgatgcgctggaccggctggtacagcagggcggctttgacgggcggacgcaacgttatcattatgacc

SEQ ID NO: 84510 - DNA, 75 bp, synthetic construct
  source 1..75: mol_type = other DNA
gagcgtgtgaatcagcgccatgaaatgaacaccgacgcgtcgttgctgtttctggcagagcgtgaccactatgcg

SEQ ID NO: 84511 - DNA, 75 bp, synthetic construct
  source 1..75: mol_type = other DNA
cccgtatccgcgttgaccttgctcagaacggtatcaggccgcagcgatgggagcttgaggcgctggcgcgtggcg

SEQ ID NO: 84512 - DNA, 75 bp, synthetic construct
  source 1..75: mol_type = other DNA
cgcggagttgcgttcgttcctgctgcgtgatggttatccgcagggagaactgaaggtatcgcgtatcagtgaggc

SEQ ID NO: 84513 - DNA, 75 bp, synthetic construct
  source 1..75: mol_type = other DNA
gacggaatcacagtggagaagcctggtgctgaaagccggaggaaaatactggcatgtgtacatgtcgaaaaaaac

SEQ ID NO: 84514 - DNA, 75 bp, synthetic construct
  source 1..75: mol_type = other DNA
taaggttttggttaaatccgatcgtgatggtctgtctgtcagagtatcaccgaaaggtcgcgtagtgttccaata

SEQ ID NO: 84515 - DNA, 75 bp, synthetic construct
  source 1..75: mol_type = other DNA
ccgacaaccgcgctgacgttacccgtcggctgggagaccatattcatgaaaaccggcacagcaaccactatgagg

SEQ ID NO: 84516 - DNA, 75 bp, synthetic construct
  source 1..75: mol_type = other DNA
gcggcgcgaagtggtcggcgattgctacggtgatcatcatcggcctcgggctggtgcagatgaccgtgctggcgc

SEQ ID NO: 84517 - DNA, 75 bp, synthetic construct
  source 1..75: mol_type = other DNA
ttcgaccgcgaatatgtctccagttgctatcgtgattatgcatgttactggggcgcagaacgtcaggtcgttgca

SEQ ID NO: 84518 - DNA, 75 bp, synthetic construct
  source 1..75: mol_type = other DNA
cgaagtacaggaactgcggagggagctttatcaggttaaacaggctgttaagggaatgcgtgacgggatgtttag

SEQ ID NO: 84519 - DNA, 75 bp, synthetic construct
  source 1..75: mol_type = other DNA
attataacgcgctgaacaactatattcgaaacctgaaagacccggtaaacccgcaggatgcatccacaaagaatt

SEQ ID NO: 84520 - DNA, 75 bp, synthetic construct
  source 1..75: mol_type = other DNA
catgggattatgagtttaaatacagattgctgttctggtgtatttctctctgcggaatggttttgtatccggttg

SEQ ID NO: 84521 - DNA, 75 bp, synthetic construct
  source 1..75: mol_type = other DNA
ggtgctgcaggtgcagccaccggcgaggtggtgggaatgatagccacacagatgtacggtaagccggtgagtgaa

SEQ ID NO: 84522 - DNA, 75 bp, synthetic construct
  source 1..75: mol_type = other DNA
gtagtgtggttatctgaatactcagagaacagtatcaatatcaacatggataacgtgccggacaacatggaattc

SEQ ID NO: 84523 - DNA, 75 bp, synthetic construct
  source 1..75: mol_type = other DNA
catcaatccagatgatctccaatggcatgattacgaaaaggctagggcactgttgcaaatagtcggtggtgataa

SEQ ID NO: 84524 - DNA, 75 bp, synthetic construct
  source 1..75: mol_type = other DNA
atggcggatatgaatcgcaccacgaaaggtgcattgctaggcgcaggcgttggtttacttactggcaatggtgtt

SEQ ID NO: 84525 - DNA, 75 bp, synthetic construct
  source 1..75: mol_type = other DNA
gtacagcagaaacaggcccgctctttaccaaagaatcgtctggcactgtgggaattattagcattccgggtgtta

SEQ ID NO: 84526 - DNA, 75 bp, synthetic construct
  source 1..75: mol_type = other DNA
acagccttgataatgcggtaatggagaacttctttggtcacctgaaagaagaaatgtactatcgccgggactaca

SEQ ID NO: 84527 - DNA, 75 bp, synthetic construct
  source 1..75: mol_type = other DNA
gcggtggatgtggaatatgcggcagctgcttctgaaagcgtggtcagaaggtctggcgatgccggaatcgttgtc

SEQ ID NO: 84528 - DNA, 75 bp, synthetic construct
  source 1..75: mol_type = other DNA
gcaaagaacgcaggacagtaatatccgtaatgatgtaaaacatcaggttgataatatggtcacagaatataaagg

SEQ ID NO: 84529 - DNA, 75 bp, synthetic construct
  source 1..75: mol_type = other DNA
tgagtcgtgatccgttcgaatgcgtgctgtgtggcggccggatggtgtaccggcgtgccatagcggggctgaata

SEQ ID NO: 84530 - DNA, 75 bp, synthetic construct
  source 1..75: mol_type = other DNA
agggagtggtggcaactcaacgaggagccggggacgttccgtatcgttgttggcgtgcttgagcagggtattacc

SEQ ID NO: 84531 - DNA, 75 bp, synthetic construct
  source 1..75: mol_type = other DNA
ttgcaggtgccgctgcgtgacttgtggaatccggctacctgtccggtcagcttcctgccttatctcgcctgggcg

SEQ ID NO: 84532 - DNA, 75 bp, synthetic construct
  source 1..75: mol_type = other DNA
caggtctgatggcggttattctgaccgggtgcggtaacctcagtaatgtttcaccggaaggaacgactgacgaac

SEQ ID NO: 84533 - DNA, 75 bp, synthetic construct
  source 1..75: mol_type = other DNA
tgttaggccataaatccagaaaaatgaccgaccgatacaatgatgatcgtggtaaagactggattatcgtagata

SEQ ID NO: 84534 - DNA, 75 bp, synthetic construct
  source 1..75: mol_type = other DNA
aaataccaggacaagagccattacaggtattgatggtgatataagaatcaacaaggcgttatgggtgattgccga

SEQ ID NO: 84535 - DNA, 75 bp, synthetic construct
  source 1..75: mol_type = other DNA
agtacatggcgtgggatatggctctcggctgggtcgtctggcaacaacgcgcgggcatgagtctttcaactgcac

SEQ ID NO: 84536 - DNA, 75 bp, synthetic construct
  source 1..75: mol_type = other DNA
ctgcggaatgtataggctgtcatgcttgtgaaattgcctgtgcggtggcacacaatcaagaaaactggccgctga

SEQ ID NO: 84537 - DNA, 75 bp, synthetic construct
  source 1..75: mol_type = other DNA
caagaacaacgtcaggctaagcttgaagccttccgccagaaactgttagaagatggtatcgatcctgcggagcta

SEQ ID NO: 84538 - DNA, 75 bp, synthetic construct
  source 1..75: mol_type = other DNA
tatctggcggagcgcggcgtcgataaaacgatcctcaaaaaactctgtatcgataatcccggacgattattgacc

SEQ ID NO: 84539 - DNA, 75 bp, synthetic construct
  source 1..75: mol_type = other DNA
gcgattatgttgatgaatttttttcaagtagcgataaaaatcttgtaagaagtaaagataataatcttgaagcat

SEQ ID NO: 84540 - DNA, 75 bp, synthetic construct
  source 1..75: mol_type = other DNA
agcaaaaagctattctattggtaaaagctaaggaaaagatcagtttctggacaactgaactgcaattgggaatca

SEQ ID NO: 84541 - DNA, 75 bp, synthetic construct
  source 1..75: mol_type = other DNA
gaaagaaatcgtgatcagcgcgccggatggcgcggtgttccgctacgacacggacgcaggcgcactgagcgccag

SEQ ID NO: 84542 - DNA, 75 bp, synthetic construct
  source 1..75: mol_type = other DNA
ggccagagagtctgataatcctgagcaggccgagatccacaatttcctgatgctggatattgaacgccgggttta

SEQ ID NO: 84543 - DNA, 75 bp, synthetic construct
  source 1..75: mol_type = other DNA
gctcgcgcaggcattcaaccgatcccgggacgcctcgcgttcttcccgaatcgtcgcgcggcgatggcggattta

SEQ ID NO: 84544 - DNA, 75 bp, synthetic construct
  source 1..75: mol_type = other DNA
ttcgtgccggaatgatcggtgaaataggtgtctcaccgacatttaccgaagccgagcataacagcttgcgggctg

SEQ ID NO: 84545 - DNA, 75 bp, synthetic construct
  source 1..75: mol_type = other DNA
gattgcgtggatttggtacattaaagcacttcaggaggtcgatacatcgaaagcacctgacatcacttggccagc

SEQ ID NO: 84546 - DNA, 75 bp, synthetic construct
  source 1..75: mol_type = other DNA
atgtcgtcgccacgcaaaagtgcgatgagctgcgcggcagcaacctgttgttgatcacccaactggatgataacc

SEQ ID NO: 84547 - DNA, 75 bp, synthetic construct
  source 1..75: mol_type = other DNA
gctgaaatactctcccagtacgcaaatgcaggcgcgcggtggaatggatgtcgggcgtccgcaaagtcgggggat

SEQ ID NO: 84548 - DNA, 75 bp, synthetic construct
  source 1..75: mol_type = other DNA
cgcttcgggctgacctggataccggcagtggtgcgtcaggacgggagttcactggttgtcacatcggcagctatg

SEQ ID NO: 84549 - DNA, 75 bp, synthetic construct
  source 1..75: mol_type = other DNA
cgcttcgggctgacttatatcccggcagtggtgcgtcaggacgggaattcactggttgttacgtcagcagcgatg

SEQ ID NO: 84550 - DNA, 75 bp, synthetic construct
  source 1..75: mol_type = other DNA
gagcgaggacgggcacggcgtggtatttccggctgaactggtgcggctgctggacaggctggaggaagaaatccg

SEQ ID NO: 84551 - DNA, 75 bp, synthetic construct
  source 1..75: mol_type = other DNA
agccattgctatgcaaactaccgccttcctgtaaaaaaaggaccagcagggctctatcttactagtgcagtatgc

SEQ ID NO: 84552 - DNA, 75 bp, synthetic construct
  source 1..75: mol_type = other DNA
gaccaccgccatcactgcggatacagagcatcgtttcagtggtctgccgctcggggaatacaccctgacagtcag

SEQ ID NO: 84553 - DNA, 75 bp, synthetic construct
  source 1..75: mol_type = other DNA
aggggtacatgacgttagccgggcatcgagcctttcaacagcgaaagcacagattgaacttgtggcacaggaaat

SEQ ID NO: 84554 - DNA, 75 bp, synthetic construct
  source 1..75: mol_type = other DNA
gatgcaaatagaaatatttctacaggaagtaaagatttactgcaaagcgaaggaaaagctagagagaagaaagct

SEQ ID NO: 84555 - DNA, 75 bp, synthetic construct
  source 1..75: mol_type = other DNA
atgtttgacaggcttgagcaaaaaggaattctttttatcgatacaacagagacaaatgtcttatatgatcgcacg

SEQ ID NO: 84556 - DNA, 75 bp, synthetic construct
  source 1..75: mol_type = other DNA
ttatgcacaagggaaattggtgcgctgcgttgttggtgaagtttttgacgtagctgttgatattcgtaaatcgtc

SEQ ID NO: 84557 - DNA, 75 bp, synthetic construct
  source 1..75: mol_type = other DNA
ccgtccgttcccgtgcccgtgtggctatccataccactggcggtcgcgtaacggggcagcatcaccgtttacctg

SEQ ID NO: 84558 - DNA, 75 bp, synthetic construct
  source 1..75: mol_type = other DNA
tgttctggtgtatttctctctgcggaatggttttgtatccggttgccagatggtgtattgaaaatactgccctga

SEQ ID NO: 84559 - DNA, 75 bp, synthetic construct
  source 1..75: mol_type = other DNA
cgggagaataacgatatttattcgtcatgccgcctgatagtgaagaaaaatggtgctgaaatttataaccgtacc

SEQ ID NO: 84560 - DNA, 75 bp, synthetic construct
  source 1..75: mol_type = other DNA
tcaacgcggttgccgaagctggcagcattacccaggctgcagcaaaagtgcatcgcgtgccgtcgaatctcacta

SEQ ID NO: 84561 - DNA, 75 bp, synthetic construct
  source 1..75: mol_type = other DNA
aaaaatataaatatccattggcctatagttgatattcctatattgtcaaagaaagatcataataacacttcatta

SEQ ID NO: 84562 - DNA, 75 bp, synthetic construct
  source 1..75: mol_type = other DNA
gcggattgcattatcagttagaaccttatgcgcaaggaaaattggtacgctgcgttgttggtgaggtttttgatg

SEQ ID NO: 84563 - DNA, 75 bp, synthetic construct
  source 1..75: mol_type = other DNA
gagagcattggtatacaatggcctaaagcaactgacaagatgttgatatcttcaaaagataaaaaaggtttggat

SEQ ID NO: 84564 - DNA, 75 bp, synthetic construct
  source 1..75: mol_type = other DNA
tctgtgataacgactatgccgggaccatgaccggcggacgtatcctgtccatcgatgccgccagccgcaccctga

SEQ ID NO: 84565 - DNA, 75 bp, synthetic construct
  source 1..75: mol_type = other DNA
ggccgggattatttaacggtgacacgccccggcttctggcctgcggtatccgggacgtgttactggaagacgtgg

SEQ ID NO: 84566 - DNA, 75 bp, synthetic construct
  source 1..75: mol_type = other DNA
tgacacttaagcggaagacagagggaacagcgcctgtccgcagccggaaaaccatcatcaatgtcaccacgccac

SEQ ID NO: 84567 - DNA, 75 bp, synthetic construct
  source 1..75: mol_type = other DNA
actgagtatatttctcaggaggaggaagcgtatgcggcagagcgtctggcaaaaatccgccgtcagaaccggaga

SEQ ID NO: 84568 - DNA, 75 bp, synthetic construct
  source 1..75: mol_type = other DNA
atacctataccacgccgccattcccggttcctgatccgaaagaattcaacgattatattctggtttttccggcgg

SEQ ID NO: 84569 - DNA, 75 bp, synthetic construct
  source 1..75: mol_type = other DNA
aagaacatggtattaaacaaagcatgtccagaaaaggcaattgtctggataatgctgtggtggagtgtttctttg

SEQ ID NO: 84570 - DNA, 75 bp, synthetic construct
  source 1..75: mol_type = other DNA
aaaggctcctggcctgtaccggagaagctgcgtctgataaaagccggaatgaataaggatcagatatatcaactg

SEQ ID NO: 84571 - DNA, 75 bp, synthetic construct
  source 1..75: mol_type = other DNA
cccgctgctttcccggcaggatttctcggcgctggcgctggactggtttgtgttcggtaacgcatttcttgagct

SEQ ID NO: 84572 - DNA, 75 bp, synthetic construct
  source 1..75: mol_type = other DNA
ctgtggtggagtgtttctttggaaccttaaagtcggagtgtttttatcttgatgagttcagtaatataagcgaac

SEQ ID NO: 84573 - DNA, 75 bp, synthetic construct
  source 1..75: mol_type = other DNA
agcctgctgctggtagacagtgcgctgcgcattacagctttaggtgacactgtcacaatccaggcactttccggc

SEQ ID NO: 84574 - DNA, 75 bp, synthetic construct
  source 1..75: mol_type = other DNA
tacccagattattcagcatctcgacaccatagaacggcttagtcggggactgtcatcccgggaacgccaacaact

SEQ ID NO: 84575 - DNA, 75 bp, synthetic construct
  source 1..75: mol_type = other DNA
gcgccggacgttcaatatcaataactttaaccgcagaacaatggttcagggcgcaggtttggtcatgcctgactg

SEQ ID NO: 84576 - DNA, 75 bp, synthetic construct
  source 1..75: mol_type = other DNA
aaaatgctcactgtatcgccaattatcaactgccaccagagagtcagcagcagttattaacccagctatcagctg

SEQ ID NO: 84577 - DNA, 75 bp, synthetic construct
  source 1..75: mol_type = other DNA
atcgtgaacaaaacctttgaaggcaccgttgccattagccgcgatgactttgaagacgacaatctcggcatctac

SEQ ID NO: 84578 - DNA, 75 bp, synthetic construct
  source 1..75: mol_type = other DNA
atcaccaaagtcgatcttctggcaatactggaacctatctggttaaccaagaatgaaactgccagtcgtctacgt

SEQ ID NO: 84579 - DNA, 75 bp, synthetic construct
  source 1..75: mol_type = other DNA
ggcggacatgttcagaaaactgtattacgacaacggatcccacgccgggtgcatcatctacatcggtgcagcgca

SEQ ID NO: 84580 - DNA, 75 bp, synthetic construct
  source 1..75: mol_type = other DNA
cgccgccgaaaaggcgttttcgctggccaacaggaatgccgcagctggcggcactgttgctggtgctgctggtcg

SEQ ID NO: 84581 - DNA, 75 bp, synthetic construct
  source 1..75: mol_type = other DNA
ttgaagaaggctctgcaggaaaaaaagcattggatatgtttggtttattcaatgttactcagatggcattagaaa

SEQ ID NO: 84582 - DNA, 75 bp, synthetic construct
  source 1..75: mol_type = other DNA
gaactgaaggatgctgttacggaatatattgaatactacaacagcagaagaattagcctgaaattaaaaggtctg

SEQ ID NO: 84583 - DNA, 75 bp, synthetic construct
  source 1..75: mol_type = other DNA
cggtcggcaatcagtgcggtaaatgtgtccgggccgcgcgtgaagtgatggaggatgaattaatgcaactgccgg

SEQ ID NO: 84584 - DNA, 75 bp, synthetic construct
  source 1..75: mol_type = other DNA
ctgggaagcaatgccctctactggtggctgcatgcgcaacgttacattcctggtcagccggaactcgcactgaac

SEQ ID NO: 84585 - DNA, 75 bp, synthetic construct
  source 1..75: mol_type = other DNA
ggattttcagggcggtcttgaagacgccccgtcgcagtacagcaaaattgcaatggtggtgaactcttccacccg

SEQ ID NO: 84586 - DNA, 75 bp, synthetic construct
  source 1..75: mol_type = other DNA
atttttcaggagatgggccgttctgcggcagttcagccggatgagctgatttttaaacttctgaaagatggcttt

SEQ ID NO: 84587 - DNA, 75 bp, synthetic construct
  source 1..75: mol_type = other DNA
ccccgccaatgaaatgcttgaggagcgttatgctgtcagcgtggcgacccgtaacaaggctgaagctctgcgtct

SEQ ID NO: 84588 - DNA, 75 bp, synthetic construct
  source 1..75: mol_type = other DNA
ctttatcactgcgaccaccggggactgccgctggcgcttatcagcgaagacggcaatacggcgtggagcgcggaa

SEQ ID NO: 84589 - DNA, 75 bp, synthetic construct
  source 1..75: mol_type = other DNA
gcttatgacgagaatcatcatgaagagaaacgttttaatatttttatatcgattccctttgattggggtgatgac

SEQ ID NO: 84590 - DNA, 75 bp, synthetic construct
  source 1..75: mol_type = other DNA
atgaccagccatatcatcagcgccattctgacccttgtttttattgagataggcgtaatagagatctatttgttt

SEQ ID NO: 84591 - DNA, 75 bp, synthetic construct
  source 1..75: mol_type = other DNA
atgtccagaaaaggcaattgtctggataatgctgtggtggagtgtttctttggaaccttaaagtcggagtgtttt

SEQ ID NO: 84592 - DNA, 75 bp, synthetic construct
  source 1..75: mol_type = other DNA
cgtatgcggcagcgcgtctggataaaatccgccgccagaaccggataaaggcagaacttcaggccgtgcttgatg

SEQ ID NO: 84593 - DNA, 75 bp, synthetic construct
  source 1..75: mol_type = other DNA
gaaaaggattattgagtaaagtcagaaaatcaggcgcgtatcaatatgtatactcagtcacatctgaattcaatg

SEQ ID NO: 84594 - DNA, 75 bp, synthetic construct
  source 1..75: mol_type = other DNA
ttctctaccttattcagccgctgatctggatacggctctgggtgcgcggacgtaaggctccggcctatcgaaaac

SEQ ID NO: 84595 - DNA, 75 bp, synthetic construct
  source 1..75: mol_type = other DNA
tcagcacagtaattaacaaatcagctaaagccggtttatccggcgtaattatccacgcagtgacatgtattcagg

SEQ ID NO: 84596 - DNA, 75 bp, synthetic construct
  source 1..75: mol_type = other DNA
agcaagagaaaaagcaaattaagataaatgaaaaaataaacacattaattggaatttttaataaaactattgcaa

SEQ ID NO: 84597 - DNA, 75 bp, synthetic construct
  source 1..75: mol_type = other DNA
agtcgtacatattttctgcaataatctatattggtaaagataacttcaccagtaacgatgtggctcaaattctta

SEQ ID NO: 84598 - DNA, 75 bp, synthetic construct
  source 1..75: mol_type = other DNA
atattgaatactacaacagcagaagaattagcctgaaattaaaaggtctgactccaattgaatatcggaatcaga

SEQ ID NO: 84599 - DNA, 75 bp, synthetic construct
  source 1..75: mol_type = other DNA
atgactggaacgtgcgcacccataccgccagcgggctggtagagcgcgtgaaagcgagcacgatgggcgatcggg

SEQ ID NO: 84600 - DNA, 75 bp, synthetic construct
  source 1..75: mol_type = other DNA
gtttgaacctccaaaaccgggaacaacaaagcctgagaagaagacaccgcctccgttgccgccttcctgccaggc

SEQ ID NO: 84601 - DNA, 75 bp, synthetic construct
  source 1..75: mol_type = other DNA
aaggctaaatccatacagggtgtggacatggcagatgcgatcggcaagctgtttaaagcctataaagcgggtaat

SEQ ID NO: 84602 - DNA, 75 bp, synthetic construct
  source 1..75: mol_type = other DNA
tcctttaacggatgatgaattaatgcagtttgtgccttcggtattttccggtgataaacatgagtcccggagtga

SEQ ID NO: 84603 - DNA, 75 bp, synthetic construct
  source 1..75: mol_type = other DNA
atgctgatgagctgaaagacggtttgcaggcagaggtcacgttgccggcaggcacggcagaaggtgcagttatta

SEQ ID NO: 84604 - DNA, 75 bp, synthetic construct
  source 1..75: mol_type = other DNA
aggtcatttccctaaacccatcaaactggggcgcagcagccgctggtacaaaagtgaagtggagcagtggatgca

SEQ ID NO: 84605 - DNA, 75 bp, synthetic construct
  source 1..75: mol_type = other DNA
atggataagaagcaagtaacggatttaaggtcggaactactcgattcacgttttggcgctaagtcaatttccact

SEQ ID NO: 84606 - DNA, 75 bp, synthetic construct
  source 1..75: mol_type = other DNA
tgtcgcgctcacatggaacaatctccggaaaaccctcctggtccatcaggcatcagaaggccttttcgataatga

SEQ ID NO: 84607 - DNA, 75 bp, synthetic construct
  source 1..75: mol_type = other DNA
atgaaaataataatttttagagtgctaacttttttctttgttatcttttctgttaatgtggttgcgaaggaattt

SEQ ID NO: 84608 - DNA, 75 bp, synthetic construct
  source 1..75: mol_type = other DNA
cgcttgctgtagcaggtatgttttcagcccaggcactggctgatgggagcaaaacaggcttttatgtgaccggaa

SEQ ID NO: 84609 - DNA, 75 bp, synthetic construct
  source 1..75: mol_type = other DNA
gggcagggtaatccggtcagcgtggaggtccagtccgtcaccgacggcgtgaaggtgaaagtgagccgtgttcct

SEQ ID NO: 84610 - DNA, 75 bp, synthetic construct
  source 1..75: mol_type = other DNA
cattcgttaatagatgactgccttgcaatactcgacaatagtaaaaaagaggaagctcttcaagatgatattttt

SEQ ID NO: 84611 - DNA, 75 bp, synthetic construct
  source 1..75: mol_type = other DNA
tcgactgcgacggtacgctggtcgatagcgaggtcatttgctctcgcgcctatgtcacgatgttcagggaatttg

SEQ ID NO: 84612 - DNA, 75 bp, synthetic construct
  source 1..75: mol_type = other DNA
actgtggtagccgctgtgcacttcgtctacatgttaaagataatgaagtcacctgggtggaaactgacaacaccg

SEQ ID NO: 84613 - DNA, 75 bp, synthetic construct
  source 1..75: mol_type = other DNA
ttaccagcggcggtaatcctccggcattttccctgacaccggacgggcggctgacggcgaaaaatgccgatatca

SEQ ID NO: 84614 - DNA, 75 bp, synthetic construct
  source 1..75: mol_type = other DNA
gtgagttgtattaatgacctgaacacaggtgataccagaggtggttccgttcatctggatgcgcagaccgttatg

SEQ ID NO: 84615 - DNA, 75 bp, synthetic construct
  source 1..75: mol_type = other DNA
ctctgtatactcattcgtcgtcagcacgaccgagggcgcgaccatgactgcaagcgtcactgacgctaacggcaa

SEQ ID NO: 84616 - DNA, 75 bp, synthetic construct
  source 1..75: mol_type = other DNA
atggtgcaacagatgcaacaccggtagttgccattccggaagcggcagatggtgtgaatgccgaagagctgaagg

SEQ ID NO: 84617 - DNA, 75 bp, synthetic construct
  source 1..75: mol_type = other DNA
atccggaggactgggatttgttgctgacggatgtgttccataaaacatggccgctggcttctgatccggatgtgc

SEQ ID NO: 84618 - DNA, 75 bp, synthetic construct
  source 1..75: mol_type = other DNA
tgtcgtttattatcggcgtactgggggcggatgtgatggcgtcttatctggtcgaaaaactggggcttcacagta

SEQ ID NO: 84619 - DNA, 75 bp, synthetic construct
  source 1..75: mol_type = other DNA
tgggctcaataagctctgccaacgggacggctgctaatgcactgggagccacggcggaagctaacggggatatgg

SEQ ID NO: 84620 - DNA, 75 bp, synthetic construct
  source 1..75: mol_type = other DNA
gattcctcacttaccccggttgatggttctctgcttgtatgcgctctggatggggaatatcgcgtaaaaagatac

SEQ ID NO: 84621 - DNA, 75 bp, synthetic construct
  source 1..75: mol_type = other DNA
gtcgcccttcggattacctgccggaggtggctgatgatatctgtgcgctgcttgcctccggggaaagtctggtta

SEQ ID NO: 84622 - DNA, 75 bp, synthetic construct
  source 1..75: mol_type = other DNA
tggggaatatcgcgtaaaaagataccggaagtacccacgtcagcatctggaggatttaagaaccggtaagaagga

SEQ ID NO: 84623 - DNA, 75 bp, synthetic construct
  source 1..75: mol_type = other DNA
tcattattaaacggaggtggtaaaggggtagatttgaggttacttgaaaatggaggacaactacctggtatctat

SEQ ID NO: 84624 - DNA, 75 bp, synthetic construct
  source 1..75: mol_type = other DNA
taagcaatatcgttttatttccggtaaaagaggatgacccacgtaatcaggttaattttctctatgagccatcgg

SEQ ID NO: 84625 - DNA, 75 bp, synthetic construct
  source 1..75: mol_type = other DNA
gctaaccgttttacttctaatattaaaggcctgactcaggctgcacgtaacgccaacgacggtatttctgttgca

SEQ ID NO: 84626 - DNA, 75 bp, synthetic construct
  source 1..75: mol_type = other DNA
tcactggcgaaaaagctgaagaggcgtacaacgattatatctcagcgatcgcctatgctcgggcggaagaagaat

SEQ ID NO: 84627 - DNA, 75 bp, synthetic construct
  source 1..75: mol_type = other DNA
cgtcatttcactcccacatggatgtcgggcatcaacttctttttcgaccacgatcttagccgttaccactcccgc

SEQ ID NO: 84628 - DNA, 75 bp, synthetic construct
  source 1..75: mol_type = other DNA
ctttataattcaaatattggacgtcatacttatattcagaggaattgtacaatattgaacacgtcaatcggtcgg

SEQ ID NO: 84629 - DNA, 75 bp, synthetic construct
  source 1..75: mol_type = other DNA
tcgagttctatcgagcgtctgtcttctggcttgcgtattaacagcgcgaaggatgacgccgcaggtcaggcgatt

SEQ ID NO: 84630 - DNA, 75 bp, synthetic construct
  source 1..75: mol_type = other DNA
cacttgctgtggcaggcatgttttcagcccagaccctggctgatgagagcaaaacaggcttttatatgaccggta

SEQ ID NO: 84631 - DNA, 75 bp, synthetic construct
  source 1..75: mol_type = other DNA
aatggttctggttctgtggcgaatactgcggcgactaaagctgatttggctgctgctgcaattggtacccctggg

SEQ ID NO: 84632 - DNA, 75 bp, synthetic construct
  source 1..75: mol_type = other DNA
taaaactacagccgcagatgtactgtctagcctcgctgatggtacgactattacagccacaggcgtgaaaaatgg

SEQ ID NO: 84633 - DNA, 75 bp, synthetic construct
  source 1..75: mol_type = other DNA
ggttcggcgtttggtcgcacgttacaaccacaacttagccaggcgagttttgaaaatctgctggctgccgaaatg

SEQ ID NO: 84634 - DNA, 75 bp, synthetic construct
  source 1..75: mol_type = other DNA
ttttctgctggaatttggcatcagcgttccacgaggagctgccgttattagccgactgagtacccttcttgagga

SEQ ID NO: 84635 - DNA, 75 bp, synthetic construct
  source 1..75: mol_type = other DNA
atcgccagcgtcatcaccgccgctatcttccagatgctgtttactaactccggcgccagccgtgaactgctggaa

SEQ ID NO: 84636 - DNA, 75 bp, synthetic construct
  source 1..75: mol_type = other DNA
caggtacagacatctataataagagtttgaaagatgtcaatcagattctggatgattcagcattacagatgaaaa

SEQ ID NO: 84637 - DNA, 75 bp, synthetic construct
  source 1..75: mol_type = other DNA
cgtcagcagcgcatggacgcctggcgggcagcgtgcctgcaaaatccgcaaggtattctctgctgcgcccgtggc

SEQ ID NO: 84638 - DNA, 75 bp, synthetic construct
  source 1..75: mol_type = other DNA
tcaaagcggcggcaggtcccatcagtgctgcattcgaaccacttaagcctgtgtttcagtggattggcgacaaag

SEQ ID NO: 84639 - DNA, 75 bp, synthetic construct
  source 1..75: mol_type = other DNA
agccaccaccacggctgcagggctggcaatgggcgcgccagtgatggcggcggtaaaaagctataccagcatgga

SEQ ID NO: 84640 - DNA, 75 bp, synthetic construct
  source 1..75: mol_type = other DNA
atgcgctgaactatctggatgataacgctatgtcgaaaggggcagacatcattgatgtcatgcaacgcctgggcg

SEQ ID NO: 84641 - DNA, 75 bp, synthetic construct
  source 1..75: mol_type = other DNA
atcacgcacaggcccaacgcatcgataccgattatcagcgcctcaaaaaactcatctggccggagggtaacagtt

SEQ ID NO: 84642 - DNA, 75 bp, synthetic construct
  source 1..75: mol_type = other DNA
gcgccagccgctgatggatattctgtacacggtgaaaagcgtcacgggggcgttgcgtcgctgggtggaagctaa

SEQ ID NO: 84643 - DNA, 75 bp, synthetic construct
  source 1..75: mol_type = other DNA
acgaaggatgcgatgggaactatccagcgtgtgctggagaaggtgaacgcactgccgcaggacaagcgtctgtct

SEQ ID NO: 84644 - DNA, 75 bp, synthetic construct
  source 1..75: mol_type = other DNA
aaaccctcgataccagcattatcggcgcaattatcatttccggcattgtgacggcgctgcataaccgtctgttcg

SEQ ID NO: 84645 - DNA, 75 bp, synthetic construct
  source 1..75: mol_type = other DNA
ttggtgcgtaccgtaccgccgcgcccgacggaacaagggcaaaaactgctggcactgctgcgccaggtggagttg

SEQ ID NO: 84646 - DNA, 75 bp, synthetic construct
  source 1..75: mol_type = other DNA
tcagcgcaggatgaatgtagcgcgtgccaggtatgcccgttcgctggaggtgcgtgatcgtattgcaggtgccgg

SEQ ID NO: 84647 - DNA, 75 bp, synthetic construct
  source 1..75: mol_type = other DNA
ggggatatggctttgcggggatgtatgacagcggcgggtatatcccgcgcgggcagtttggcatcgtcggtgaaa

SEQ ID NO: 84648 - DNA, 75 bp, synthetic construct
  source 1..75: mol_type = other DNA
gtatttaaagtgctgccgattatcgactgggataaccgaactatttatcagtatctgcaaaaacatggcctgaaa

SEQ ID NO: 84649 - DNA, 75 bp, synthetic construct
  source 1..75: mol_type = other DNA
taccagaacaagagccattacaggcattgacggtgatatccgaatcaacaaagcattatggatgattgccgaaca

SEQ ID NO: 84650 - DNA, 75 bp, synthetic construct
  source 1..75: mol_type = other DNA
gttgtttgataactgggcatcgctggtgtggtatgactctccggcgcgtattcgccagttgcagaatatgaatat

SEQ ID NO: 84651 - DNA, 75 bp, synthetic construct
  source 1..75: mol_type = other DNA
aggggacagggaggctgggatctgagccgggaactgaactgcttcagggtcgatgatgaaaacaatgtcattcgg

SEQ ID NO: 84652 - DNA, 75 bp, synthetic construct
  source 1..75: mol_type = other DNA
caacatgtcgaaagcgcagatcatccagcaggcgggtaactctgtgctgtctaaagctaaccaggtaccgcagca

SEQ ID NO: 84653 - DNA, 75 bp, synthetic construct
  source 1..75: mol_type = other DNA
atggtttgcatacctgctgtaattattggagtgggattatcgtatacaatcctaaatatatggttaggtaaagaa

SEQ ID NO: 84654 - DNA, 75 bp, synthetic construct
  source 1..75: mol_type = other DNA
gattgagttattacgcgattgtataaaacaatttaaccctgcaagttataatgatttaataaatggattaagtga

SEQ ID NO: 84655 - DNA, 75 bp, synthetic construct
  source 1..75: mol_type = other DNA
gagcctgaaaactgattctattgcagcaatttctacgcagaaaacagaagatcctttggctgctatcgataaagc

SEQ ID NO: 84656 - DNA, 75 bp, synthetic construct
  source 1..75: mol_type = other DNA
atgcggaaaaatataacgagtgggtgaggaaattttctgagcagatttttaaaattactggcgacgagaatgcgg

SEQ ID NO: 84657 - DNA, 75 bp, synthetic construct
  source 1..75: mol_type = other DNA
taatctgcccggtgaatatgtactttcttccagctttggcattcaggcggcggtgagcctgcatctggtgaatca

SEQ ID NO: 84658 - DNA, 75 bp, synthetic construct
  source 1..75: mol_type = other DNA
cggtcaggacttttataatcagaactcctatatttttggcgtaacatacaatggagttgattatgattcgactgc

SEQ ID NO: 84659 - DNA, 75 bp, synthetic construct
  source 1..75: mol_type = other DNA
cacagacaccgataatggactaacgactgcggctactcagaaagatcaactgattaaagttgccgctgactctga

SEQ ID NO: 84660 - DNA, 75 bp, synthetic construct
  source 1..75: mol_type = other DNA
atggaatcgaaatcagtcgatacccgcagtatatatcgtgaactgggtgcaacgctgagttacaacatgcgtctg

SEQ ID NO: 84661 - DNA, 75 bp, synthetic construct
  source 1..75: mol_type = other DNA
gtctggatatcgctgaccaggatggcattggtccggatgaagaagcacagctcaagaaaattgctcaggcgctgc

SEQ ID NO: 84662 - DNA, 75 bp, synthetic construct
  source 1..75: mol_type = other DNA
atttacgcggcgtcagttatgacggactggatcgtagcgtggacgtggctatttcgcggttaagaaaaaaactgc

SEQ ID NO: 84663 - DNA, 75 bp, synthetic construct
  source 1..75: mol_type = other DNA
atgtttggtattttcaaaaagaaaacccgcaaggccattactgaagtgaagaaaatggagaatcgcgatgcggtg

SEQ ID NO: 84664 - DNA, 75 bp, synthetic construct
  source 1..75: mol_type = other DNA
aaaatgatgctggcaaatattgccagtattgaaataccgccgattaattgtacgtatctcgaatggctacaaaag

SEQ ID NO: 84665 - DNA, 75 bp, synthetic construct
  source 1..75: mol_type = other DNA
atgggctccctaaacatataccaagatattctcccaacactcaacatgtattcaggactgaaaccttgctataac

SEQ ID NO: 84666 - DNA, 75 bp, synthetic construct
  source 1..75: mol_type = other DNA
gaacgggtgcgtctgtggccagtctctgggggaagtgcgtgttccacaccggggaaatgtagtggagaaagttat

SEQ ID NO: 84667 - DNA, 75 bp, synthetic construct
  source 1..75: mol_type = other DNA
atatgcacaaaaagctctggagctggccaccagctcaccagacgagttccgcgtaatgctgaaaactcagtttca

SEQ ID NO: 84668 - DNA, 75 bp, synthetic construct
  source 1..75: mol_type = other DNA
aaaatgattaacacctgtaatgagtatcagaaaagacacggtaagaagacactctttgaggtacctgaagtctga

SEQ ID NO: 84669 - DNA, 75 bp, synthetic construct
  source 1..75: mol_type = other DNA
ctgctctctccggacgaacgtaccgctatgcgtcagggcgtcatcagccagcgtacagcctggatccacgagcag

SEQ ID NO: 84670 - DNA, 75 bp, synthetic construct
  source 1..75: mol_type = other DNA
gtgctaatctatgacaggaaggttaaagtttcaccgacacttgatgtcccgttacctgaaaatattccaagaaaa

SEQ ID NO: 84671 - DNA, 75 bp, synthetic construct
  source 1..75: mol_type = other DNA
ggtaaaactctccgactctcacggtctgtatctgctcgtcaatccgggcggttcgcgcatctggtatctcaaata

SEQ ID NO: 84672 - DNA, 75 bp, synthetic construct
  source 1..75: mol_type = other DNA
agaacacccggtatcagtatgaccgccacggtcaggtggtgcagataacggatgcgcgcggggggaataaatacc

SEQ ID NO: 84673 - DNA, 75 bp, synthetic construct
  source 1..75: mol_type = other DNA
cgcacgctggttctcgcatataacttctgcgatgaaagagtttggtatcagcaaacccgaagatcaggcaatgtt

SEQ ID NO: 84674 - DNA, 75 bp, synthetic construct
  source 1..75: mol_type = other DNA
ggttcgtctgaccagtacacctgacatcagccgcctgccacaggacagggaatcccttttttacttcagtcttcg

SEQ ID NO: 84675 - DNA, 75 bp, synthetic construct
  source 1..75: mol_type = other DNA
cgacctgtgggcgcgattccaggactttcagacccgtatccgtgacgcgattatcaagcgccagtcgctcgattt

SEQ ID NO: 84676 - DNA, 75 bp, synthetic construct
  source 1..75: mol_type = other DNA
cccgcctcagattgaaggttacatcctcaccggctctggtgacacatggatcaacagcaaacctgccgcgcgggc

SEQ ID NO: 84677 - DNA, 75 bp, synthetic construct
  source 1..75: mol_type = other DNA
gaggccgagctggccgtcatgcaggctatcgctgaaaagccgggagcgttacgcgttctgacacatacgcttaac

SEQ ID NO: 84678 - DNA, 75 bp, synthetic construct
  source 1..75: mol_type = other DNA
cattaccggtgacaattgcagcactcgtcctgtgcctgccgttgctgctgacaggttgcgggaactcgaaaaacg

SEQ ID NO: 84679 - DNA, 75 bp, synthetic construct
  source 1..75: mol_type = other DNA
acgccaactttcttcgggaactggctgaaagcctgccccgcatactgccggaaggtggcccggacaaagctgcgc

SEQ ID NO: 84680 - DNA, 75 bp, synthetic construct
  source 1..75: mol_type = other DNA
aaaccgaatgaatttagcgttgacgatgacgctgctaacctgatagttgctaatcctcaggacagtgaaggcgac

SEQ ID NO: 84681 - DNA, 75 bp, synthetic construct
  source 1..75: mol_type = other DNA
cgtgataataattcttttgagaataagaaaaaaatcatttacattaatagcataccatttagagcatacaatata

SEQ ID NO: 84682 - DNA, 75 bp, synthetic construct
  source 1..75: mol_type = other DNA
gttcgtgcagcttatatccatacttcagagcatttggacgaacgtcgattgatgatgcaatggtgggcggatttc

SEQ ID NO: 84683 - DNA, 75 bp, synthetic construct
  source 1..75: mol_type = other DNA
ccttccccctatggcaatgtgcttcaccttaaaggtgccaccgctgctggcgaaggtgagttattcattggctgg

SEQ ID NO: 84684 - DNA, 75 bp, synthetic construct
  source 1..75: mol_type = other DNA
tactgattctgccaactggtctgaatgggcgcaggtctatacgtcaaaagattcaattcccggcgtcaatgccaa

SEQ ID NO: 84685 - DNA, 75 bp, synthetic construct
  source 1..75: mol_type = other DNA
ggccaatcttcaccgaatcgctatggataacgaggccctgagagcaaccttttctcatgtatgtgacgaatggag

SEQ ID NO: 84686 - DNA, 75 bp, synthetic construct
  source 1..75: mol_type = other DNA
atgtccggtgccgaatgtctggcacagggatttgctgatcaggtgacaccagccgttaaggcaatggcatgtatt

SEQ ID NO: 84687 - DNA, 75 bp, synthetic construct
  source 1..75: mol_type = other DNA
gcgagtttctccatcaagacacctgggtcggtaacgccgttgagcgtctggcagatgctttaagccagcaaaatg

SEQ ID NO: 84688 - DNA, 75 bp, synthetic construct
  source 1..75: mol_type = other DNA
atgactggtttgaaagccgttttgtcatttatcggcaccattatattggttgcattcggcgcatttggttttggt

SEQ ID NO: 84689 - DNA, 75 bp, synthetic construct
  source 1..75: mol_type = other DNA
aggcacacgggcttattgctgggggaagtgaaacaggaggccagcgtatcgcagtatggaagattagcgcacagg

SEQ ID NO: 84690 - DNA, 75 bp, synthetic construct
  source 1..75: mol_type = other DNA
gcgctccggagagcgcgaaggcgggcagcagtgacggacgtcccgggaaagtcggtgcggatgacggcacgcagg

SEQ ID NO: 84691 - DNA, 75 bp, synthetic construct
  source 1..75: mol_type = other DNA
tcattcttctgggcgggtttgtgctcctgctccgtcaggccggtcgtgcagcgcatccacttctgcagtcattgc

SEQ ID NO: 84692 - DNA, 75 bp, synthetic construct
  source 1..75: mol_type = other DNA
ggcagccttgcggcgaagtcacggaagaagataaatcagtcgccagtgaactactgaaacggagactggcgcaaa

SEQ ID NO: 84693 - DNA, 75 bp, synthetic construct
  source 1..75: mol_type = other DNA
gggcctgttccggcggatgcgacggaagaacagcggcaggcatatctggcaaaactgcgtgatacgccggaatac

SEQ ID NO: 84694 - DNA, 75 bp, synthetic construct
  source 1..75: mol_type = other DNA
aaaaaggaatacaaacaacataaaaaaaacagaggagattattcaaactgcggaaaaagatacaaaatattcact

SEQ ID NO: 84695 - DNA, 75 bp, synthetic construct
  source 1..75: mol_type = other DNA
caatcaacatggcgacatcaatcacacccatgaggtgcttcaggatgacagcaagtgcgagatgattgttggcat

SEQ ID NO: 84696 - DNA, 75 bp, synthetic construct
  source 1..75: mol_type = other DNA
gacaccaacaaccagtatcagcgatctgctggttgtggtgatgaaaaaatccacagcaggtatcagtatcagctg

SEQ ID NO: 84697 - DNA, 75 bp, synthetic construct
  source 1..75: mol_type = other DNA
gtgcgatttttaatggcgatgagaaatcgatgacactgaatatcgccaatgataacaaacagcttccctatctgg

SEQ ID NO: 84698 - DNA, 75 bp, synthetic construct
  source 1..75: mol_type = other DNA
cctgagtccgcatgtgtacctggcgacaaacagccttcaggggccgtggtggatactcagctggccggagcgggt

SEQ ID NO: 84699 - DNA, 75 bp, synthetic construct
  source 1..75: mol_type = other DNA
ggacccggtgtacacgccggcgcgaaaaatccacctgtaccactgcgaccatcgcggcctgccgctggcccttat

SEQ ID NO: 84700 - DNA, 75 bp, synthetic construct
  source 1..75: mol_type = other DNA
gtttaagccgtgggatggtcaggaatctggcaaggctgtttatctgacttcgtaccccgtggacacgtcaaagca

SEQ ID NO: 84701 - DNA, 75 bp, synthetic construct
  source 1..75: mol_type = other DNA
acagtcagcaccggctggtgcactacacgcggacacaatatgcagagccgctggtcgaaagtcgctatctttacg

SEQ ID NO: 84702 - DNA, 75 bp, synthetic construct
  source 1..75: mol_type = other DNA
atgagccggttgccgccgtgacgccgggccagtctgccgttttctataacggtgaagtgtgcctcggtggcggta

SEQ ID NO: 84703 - DNA, 75 bp, synthetic construct
  source 1..75: mol_type = other DNA
gcccgaagtttgttttatgctgtgagcgttatcgttatattccttactggatggggagtaggtattgttttcttt

SEQ ID NO: 84704 - DNA, 75 bp, synthetic construct
  source 1..75: mol_type = other DNA
aacagagtgatatctcagttagttccgactatatctggcgttcatgatatgactgaaactgtaagatatattaac

SEQ ID NO: 84705 - DNA, 75 bp, synthetic construct
  source 1..75: mol_type = other DNA
agttggttgcagcgcgtgttgctgcggctctggggttatatattcgtaaaggagatggacaggattatgaagatg

SEQ ID NO: 84706 - DNA, 75 bp, synthetic construct
  source 1..75: mol_type = other DNA
cagccgccagattgagatctacccgattgccggaacacgtccacgcggtcgtcgtgccgatggttcactggacag

SEQ ID NO: 84707 - DNA, 75 bp, synthetic construct
  source 1..75: mol_type = other DNA
gggcaagggtattccggttggcaaccctacggagcctggagcaatccaccacaaggtgttatagacactttaatc

SEQ ID NO: 84708 - DNA, 75 bp, synthetic construct
  source 1..75: mol_type = other DNA
gaagcagggaagggggcttatgatgcacaggtgaagaatgatgagcaggatgtcacccttgcagaccatgaatcc

SEQ ID NO: 84709 - DNA, 75 bp, synthetic construct
  source 1..75: mol_type = other DNA
ttccatatggcggcctatcaaagcagaccggatgccaacgcggttgttcacaatcatgccgttcattgcacggca

SEQ ID NO: 84710 - DNA, 75 bp, synthetic construct
  source 1..75: mol_type = other DNA
ttgtggggctgagggggcaactgttcagtacggattatgacgttttcatcggtcgtccgttttcaaaaccggcgg

SEQ ID NO: 84711 - DNA, 75 bp, synthetic construct
  source 1..75: mol_type = other DNA
gggcatggctgaatatggtggtcgccgcggggttactgaaaattccgtcggatgtggatatgaaaacgttatata

SEQ ID NO: 84712 - DNA, 75 bp, synthetic construct
  source 1..75: mol_type = other DNA
gcagttcttcctcggtgaccggaaagcagcggtagccctgatgaacaacctcaatctctcctgcaggctcaaaag

SEQ ID NO: 84713 - DNA, 75 bp, synthetic construct
  source 1..75: mol_type = other DNA
attttgccgccccccgttataacctgctggccaacaccgccaacaacgctgcaacgatcactttcagccagtggc

SEQ ID NO: 84714 - DNA, 75 bp, synthetic construct
  source 1..75: mol_type = other DNA
aaagttttgctccagaagaggcacgattcattatatttaacaccgagaatcataatgactatgaagtcaaaattg

SEQ ID NO: 84715 - DNA, 75 bp, synthetic construct
  source 1..75: mol_type = other DNA
gtcaacgacaaaggaggcaacagtgccggaactgaacgacagtatcagcgcgacaccgaaagccagcatgaagaa

SEQ ID NO: 84716 - DNA, 75 bp, synthetic construct
  source 1..75: mol_type = other DNA
gctgaagcctggaaaattcagatccggggtggtgcggcgacagaatcagactgggtgcgcgccagtggtcgtaat

SEQ ID NO: 84717 - DNA, 75 bp, synthetic construct
  source 1..75: mol_type = other DNA
atgactgaaatcgttgcagataaaacggtagaagtagttaaaaacgcaatcgaaaccgcagatggagcattagat

SEQ ID NO: 84718 - DNA, 75 bp, synthetic construct
  source 1..75: mol_type = other DNA
gtgttgcgaaggcgtttatatccagacatcaccgacacaataaacctccggtggggcataaattcagtattggtc

SEQ ID NO: 84719 - DNA, 75 bp, synthetic construct
  source 1..75: mol_type = other DNA
ttaccgaaaatcgttttggatggaatagcatgatggttggcttttcattagcgggtcttggtcttttacactcag

SEQ ID NO: 84720 - DNA, 75 bp, synthetic construct
  source 1..75: mol_type = other DNA
catcatattcagttgatggaattcaggttgttggagcaagaaataccggatggactgcagccacaggtacgccac

SEQ ID NO: 84721 - DNA, 75 bp, synthetic construct
  source 1..75: mol_type = other DNA
gccattggaaattcaatgcctgtaccggtcatgaaatggattggtcgaagaatacaggaagcgttaaacgaagtt

SEQ ID NO: 84722 - DNA, 75 bp, synthetic construct
  source 1..75: mol_type = other DNA
agagcagatgcataactattaccgtttagcagatttagttgttgttccttctcaggtagaagaagctttttgtat

SEQ ID NO: 84723 - DNA, 75 bp, synthetic construct
  source 1..75: mol_type = other DNA
gggtaaaagcgccagcggtaaaccactaccggttatcactatcacacgtaaggacggcgacagtcaccgctttac

SEQ ID NO: 84724 - DNA, 75 bp, synthetic construct
  source 1..75: mol_type = other DNA
tgccggttacggcttctggcagatggctgtcgcggtaaaaggcgatctgacgctggataacctctggaagggctg

SEQ ID NO: 84725 - DNA, 75 bp, synthetic construct
  source 1..75: mol_type = other DNA
taaagaagggctggctattcatgtgatagccaaaaagatggaattaagcaatcgtgctgtatccagtattgtata

SEQ ID NO: 84726 - DNA, 75 bp, synthetic construct
  source 1..75: mol_type = other DNA
agtggatcggctcccgcgtcatcgagaagatgaaagcctatggctatgccatcgtgaacaaaacctttgaaggca

SEQ ID NO: 84727 - DNA, 75 bp, synthetic construct
  source 1..75: mol_type = other DNA
ggaaggggaaccgcgcccatctggctgacacttggaaaatatcctgatctgagtctcaaatcagcgagagagatg

SEQ ID NO: 84728 - DNA, 75 bp, synthetic construct
  source 1..75: mol_type = other DNA
acgctttccggtgttcttatgccggagataacaggcggcaggctgtcgttgctggcactggagcagatggcagaa

SEQ ID NO: 84729 - DNA, 75 bp, synthetic construct
  source 1..75: mol_type = other DNA
tgagaaaggcgatctgaaaggctttgagttcggcgtatttgactggcacgccaacggcacggcgaccgatgcgaa

SEQ ID NO: 84730 - DNA, 75 bp, synthetic construct
  source 1..75: mol_type = other DNA
tccagaacctggtctggtgccacaagcactacaggtaaccatgcgcactctgttccaattggtgctcatgcgcac

SEQ ID NO: 84731 - DNA, 75 bp, synthetic construct
  source 1..75: mol_type = other DNA
ctgcgtgaagcccttctgtcctggcttgcgaagggggaaaaaattaattattccgcacaggatagcgacatttta

SEQ ID NO: 84732 - DNA, 75 bp, synthetic construct
  source 1..75: mol_type = other DNA
agttttacatgaacatctggggtatgacgggcctgaaactccagaagcaatgacattgttcatccgtgagaaaat

SEQ ID NO: 84733 - DNA, 75 bp, synthetic construct
  source 1..75: mol_type = other DNA
ttgcattaatacctgcccggcttatcgtcagatcggcggacatggttatggttcaatatatccgggaccaatcgg

SEQ ID NO: 84734 - DNA, 75 bp, synthetic construct
  source 1..75: mol_type = other DNA
tgaaattcctccgaagagtgataaggcgaatgtgctgcagatagccctgcagaccaaaatcaagctgttttaccg

SEQ ID NO: 84735 - DNA, 75 bp, synthetic construct
  source 1..75: mol_type = other DNA
caacaacacccgcgcagagcactggctggccttccgtcacgcatccggcactgaacaatgcaccggcggtgaaaa

SEQ ID NO: 84736 - DNA, 75 bp, synthetic construct
  source 1..75: mol_type = other DNA
tcctgcataccgatgaggagatcattccttacgagtgtgacgggttgagcgcgtatcgcacgcgtccattactgg

SEQ ID NO: 84737 - DNA, 75 bp, synthetic construct
  source 1..75: mol_type = other DNA
agtgtatatggcgaaggatgtgaacgcctttgcaatggctaacggctgtatccgcgtctatagcgggctgatgga

SEQ ID NO: 84738 - DNA, 75 bp, synthetic construct
  source 1..75: mol_type = other DNA
ttctggaggttcaggacggtggtgaggctaagcatgttgagcaacaatccggcggcgcattaattgcttccacaa

SEQ ID NO: 84739 - DNA, 75 bp, synthetic construct
  source 1..75: mol_type = other DNA
gtgagcaccattcaaacagggatcacagagcaggttattgcgtggctctttgaccacctgccaacggtgtatgca

SEQ ID NO: 84740 - DNA, 75 bp, synthetic construct
  source 1..75: mol_type = other DNA
catgattctgatggtctgctggttcgcctgatggatattcatgaagtgggacgggaaatccgccgtcaactggag

SEQ ID NO: 84741 - DNA, 75 bp, synthetic construct
  source 1..75: mol_type = other DNA
aacactggttcagaccgtaacgggatcgctggcgtgcggcgttcttgccatggccgtggccgggtcgctgcgctt

SEQ ID NO: 84742 - DNA, 75 bp, synthetic construct
  source 1..75: mol_type = other DNA
aaccccggcgacattggttacgctttcgcaactggagatgagcagccattaccagatgatgagtcaggtcttcca

SEQ ID NO: 84743 - DNA, 75 bp, synthetic construct
  source 1..75: mol_type = other DNA
aaaagtcttgattggcgtgaacggggggccgtaaagaaaggtaaagtgtctgcggctgtgttagctgaagtcagg

SEQ ID NO: 84744 - DNA, 75 bp, synthetic construct
  source 1..75: mol_type = other DNA
ttatgacgatgctattgcagatatagtaaaaacatttgaaagttcagggtgtgatgctgtttatggtgatttgga

SEQ ID NO: 84745 - DNA, 75 bp, synthetic construct
  source 1..75: mol_type = other DNA
cccggctttcttccggaaggatacgatggaagaggtggccgccattaaggatattggcaatcactttgagcgtgc

SEQ ID NO: 84746 - DNA, 75 bp, synthetic construct
  source 1..75: mol_type = other DNA
aaagagtgcattaaaaatgcaagtgctacttttaaaaaagcagccagagctgagtattatgagcaagggcattca

SEQ ID NO: 84747 - DNA, 75 bp, synthetic construct
  source 1..75: mol_type = other DNA
tgaaatctgcgctggaaggctggggagtatgcggcaccaccaccaccttcggtgatccgagacgtgcctgggtga

SEQ ID NO: 84748 - DNA, 75 bp, synthetic construct
  source 1..75: mol_type = other DNA
gtccctgctgtgagaaagtgttcagcggaaaaatgccggcacatatccttccgaaaagtgctgttgagccatcgg

SEQ ID NO: 84749 - DNA, 75 bp, synthetic construct
  source 1..75: mol_type = other DNA
atcctgaatttatctggcgcttttactcctgccagaaacgtcactatcacttcgttattgcaccgacagaagatg

SEQ ID NO: 84750 - DNA, 75 bp, synthetic construct
  source 1..75: mol_type = other DNA
ctcggcgcatctggacaaactgcttcctcagactggggacgaagaaaaaacaacaacacgtcctgttcgtaagcc

SEQ ID NO: 84751 - DNA, 75 bp, synthetic construct
  source 1..75: mol_type = other DNA
gagcgaacccggcatttatagccagccagatggggcatgaaactgcgcaaatggtgtatgaaatttacggtatgt

SEQ ID NO: 84752 - DNA, 75 bp, synthetic construct
  source 1..75: mol_type = other DNA
ctgcggcgcttcctgaaaatgccggaaggggctgcaccggatggcagcggtgtcccggtactggctgtgttccgt

SEQ ID NO: 84753 - DNA, 75 bp, synthetic construct
  source 1..75: mol_type = other DNA
gtatgcttaacccgttcaccccgcacatctgcttcacgctgtggcaggaactgaaaggcgaaggcgatatcgaca

SEQ ID NO: 84754 - DNA, 75 bp, synthetic construct
  source 1..75: mol_type = other DNA
atcctgaatttatctggcgcttttactcctgccaaaaacgtcactatcacttcgttattgcaccaacagaagatg

SEQ ID NO: 84755 - DNA, 75 bp, synthetic construct
  source 1..75: mol_type = other DNA
cgcagggtgaattacccttagtacctacagtagaagttgttgctgatggcattcctatgggggtgcttaatgatg

SEQ ID NO: 84756 - DNA, 75 bp, synthetic construct
  source 1..75: mol_type = other DNA
gctggattatcaggattacccgatcccggccgccaaacgtggagcgatgggtcgtcgtacgctgggtattggtgt

SEQ ID NO: 84757 - DNA, 75 bp, synthetic construct
  source 1..75: mol_type = other DNA
aaccttggtataataaatggacccgaggtcgtatgattcaatttaataccgcctcgccttataaaaatgcttcgg

SEQ ID NO: 84758 - DNA, 75 bp, synthetic construct
  source 1..75: mol_type = other DNA
ggcatgccggaatatcttggcgcattactctcggccagcctgtctcattcggcggacatgttcagaaaactgtac

SEQ ID NO: 84759 - DNA, 75 bp, synthetic construct
  source 1..75: mol_type = other DNA
accttcggaaataaccgtcaccctgctgactgaaccggacaccaataccaatgcggagggtgaatcagccgccgt

SEQ ID NO: 84760 - DNA, 75 bp, synthetic construct
  source 1..75: mol_type = other DNA
tggtggaagccctcacccacttgcgcatttacgtcgaagcggcaattgatttccctgatgaagagatcgatttcc

SEQ ID NO: 84761 - DNA, 75 bp, synthetic construct
  source 1..75: mol_type = other DNA
aattatggtgggcgaagtggacgccacgaccgcaagcggtattcacggtctggctgatgaaaacgaagatattcg

SEQ ID NO: 84762 - DNA, 75 bp, synthetic construct
  source 1..75: mol_type = other DNA
ccaggcagacgttggcgcagtggtttgaagagaagggatttcagaagggatatcaagaggaactccagaaggtaa

SEQ ID NO: 84763 - DNA, 75 bp, synthetic construct
  source 1..75: mol_type = other DNA
agtcgtacatattttccgcaataatctatattgctaaagataacttcaccagtaacgatgtggctcaaattctta

SEQ ID NO: 84764 - DNA, 75 bp, synthetic construct
  source 1..75: mol_type = other DNA
gatgtaaaaaatcgtacatcagataccatagcaaacttgcttgcggacaagttttaccagaaacatatcgattcg

SEQ ID NO: 84765 - DNA, 75 bp, synthetic construct
  source 1..75: mol_type = other DNA
attgaagtccagtatgatgaaaagaatggcacggcgattactaaacaggtattcggcacagcagagaaactcatt

SEQ ID NO: 84766 - DNA, 75 bp, synthetic construct
  source 1..75: mol_type = other DNA
aaatggatatgatgcccgccatgctgcatttttagaagataactttaaaatattatctcagtataataaagagta

SEQ ID NO: 84767 - DNA, 75 bp, synthetic construct
  source 1..75: mol_type = other DNA
acatgaatgaccgttctggtcaggtggatcaagacagccagactgcctacatctactcttctgctcacttcgcga

SEQ ID NO: 84768 - DNA, 75 bp, synthetic construct
  source 1..75: mol_type = other DNA
aaaacagcgggctttacgctgccgctgttgcaacacctgatcactcgccagccgcacgccaaagggcgtcgtccg

SEQ ID NO: 84769 - DNA, 75 bp, synthetic construct
  source 1..75: mol_type = other DNA
ggcatctggaagtggaaagcctgctggtgttgaaaaacaaccgtggggtggaaggcaaccgcgtgcgtcatatgg

SEQ ID NO: 84770 - DNA, 75 bp, synthetic construct
  source 1..75: mol_type = other DNA
tgtgcttcgtttactggataaaaatagcgtcagcctggatcttgctacgcttgggatgtcaccacaaaaccagtg

SEQ ID NO: 84771 - DNA, 75 bp, synthetic construct
  source 1..75: mol_type = other DNA
atcggcgagaaatttgaattatccgagggcacggtgagttttatttatcaccgtcgtcggactgccgaagatgtt

SEQ ID NO: 84772 - DNA, 75 bp, synthetic construct
  source 1..75: mol_type = other DNA
gcgaacgcattagatatcgccgaaaaaacctcaaatacacccaaaggtctcttgctaaagtcctgaaaatttctc

SEQ ID NO: 84773 - DNA, 75 bp, synthetic construct
  source 1..75: mol_type = other DNA
atgctaaagccggggtggattaccaggggtcaatgcagaattacgtcgctcagggtttttcgcagtacgaagctt

SEQ ID NO: 84774 - DNA, 75 bp, synthetic construct
  source 1..75: mol_type = other DNA
tctggaaaaatgctgttttactgcggaccaactggcgtcgactgactaccgcactcggagaaggtggcaaattac

SEQ ID NO: 84775 - DNA, 75 bp, synthetic construct
  source 1..75: mol_type = other DNA
ggtgacggatatcgaggcacagcatagcgccgcactagacgcggcagaagtaaagcgccagtcgctgattgatgc

SEQ ID NO: 84776 - DNA, 75 bp, synthetic construct
  source 1..75: mol_type = other DNA
tcgatgagtggaaaccaaaacggttcagtctcccaataacaaacactaccctggtgaaatacggaaaactaggat

SEQ ID NO: 84777 - DNA, 75 bp, synthetic construct
  source 1..75: mol_type = other DNA
tgacgccacgctgacagaaaaaggttttactcagttaagcagtgcaacaaacagcaccagtgaaaagctggcagc

SEQ ID NO: 84778 - DNA, 75 bp, synthetic construct
  source 1..75: mol_type = other DNA
aaaacccgcgggagcggcagcagaaaaacctgcgactgaaaaacccgcgactgaaaaacccgcagcatcagacaa

SEQ ID NO: 84779 - DNA, 75 bp, synthetic construct
  source 1..75: mol_type = other DNA
gccataaataacaggcgcatcgtgcccgtggctgtactgggcattgacaacattaatgaacatgaacgcactgag

SEQ ID NO: 84780 - DNA, 75 bp, synthetic construct
  source 1..75: mol_type = other DNA
cttcatatgaacgcaattatccagaggaaggcggctttgctcaggggatgcttgagatcctcgaaggcgggaatt

SEQ ID NO: 84781 - DNA, 75 bp, synthetic construct
  source 1..75: mol_type = other DNA
aagtggcagtatttacgggtaagggatggcgccatgaagaagaccaccgcaatgagactgtttactcaatcgaaa

SEQ ID NO: 84782 - DNA, 75 bp, synthetic construct
  source 1..75: mol_type = other DNA
taacaagctgtggaacgccagccgttttgtgctgatgaacacggaaggtcaggattgcggcttcaacggcggtga

SEQ ID NO: 84783 - DNA, 75 bp, synthetic construct
  source 1..75: mol_type = other DNA
tcgcggtaaaaggaaaccaggggcggctaaataaagcctttgaggaaaaatttccgctgaaagaattaaataatc

SEQ ID NO: 84784 - DNA, 75 bp, synthetic construct
  source 1..75: mol_type = other DNA
tggttgcttattttattatggggtttctggttattgctgtcattttatctgttttaggtcaggtggaaattgttg

SEQ ID NO: 84785 - DNA, 75 bp, synthetic construct
  source 1..75: mol_type = other DNA
gcttaataataaaggagaatatatttttatcagaaatagtgtcccgggattgagttcagtatgcataccgtatca

SEQ ID NO: 84786 - DNA, 75 bp, synthetic construct
  source 1..75: mol_type = other DNA
tggtttgaactagaaatggattcatctattttcagttgcatggcccgctgttcaagaatgcaatgtggtgaagtt

SEQ ID NO: 84787 - DNA, 75 bp, synthetic construct
  source 1..75: mol_type = other DNA
cctggctgccgccgtcccgctgggataacggtattcccggactgttgtttgactacaacatcaacgggacggtga

SEQ ID NO: 84788 - DNA, 75 bp, synthetic construct
  source 1..75: mol_type = other DNA
ccttcatcgataaaatctgggaatggaaagcggaatccggcggcaccattactcgtcagatgcgtcgtctcggca

SEQ ID NO: 84789 - DNA, 75 bp, synthetic construct
  source 1..75: mol_type = other DNA
caaagatctgattggcaaatatgtcattctgccgctggttaaccgtcgtattccgatcgttggcgacgaacacgc

SEQ ID NO: 84790 - DNA, 75 bp, synthetic construct
  source 1..75: mol_type = other DNA
ctttatcgtcttgaattggcggaacctgataatccagatgtcgttgcggcgcgttttcgctatctgctgcgtaag

SEQ ID NO: 84791 - DNA, 75 bp, synthetic construct
  source 1..75: mol_type = other DNA
aggtatttgcgggatacgtttcctgcagactggataatccaatgtgctcttgaaacaggaacctcactgaaatgg

SEQ ID NO: 84792 - DNA, 75 bp, synthetic construct
  source 1..75: mol_type = other DNA
gtctgctgcggtaagcgcagccgagggtgatgaatcagtaacgaccactgttaatggcggtgttattcattttaa

SEQ ID NO: 84793 - DNA, 75 bp, synthetic construct
  source 1..75: mol_type = other DNA
attaatcagatagcaccagaagtaagagggaaaacgatgttgttagggcattggctaggaggcaaagaaattcca

SEQ ID NO: 84794 - DNA, 75 bp, synthetic construct
  source 1..75: mol_type = other DNA
cgaacgtcagtgaaaacgaagaaacattgctgactggcgtcaatgaaaacgtgtatgaagatcagagcattggcg

SEQ ID NO: 84795 - DNA, 75 bp, synthetic construct
  source 1..75: mol_type = other DNA
gggacggttacagtcaccatcagcgatgatcataactttgaccgtcaaatcattattccgcccattatctttaac

SEQ ID NO: 84796 - DNA, 75 bp, synthetic construct
  source 1..75: mol_type = other DNA
taacttcaacgttcctgaatttatgctgaaacgcttcctgaaaatgccggaaggcccggcaccagatggtagtgg

SEQ ID NO: 84797 - DNA, 75 bp, synthetic construct
  source 1..75: mol_type = other DNA
catgtataaagctgaaggtaatgttctttccattggtcataaaaatggtattacattcaggaactggtttgaaaa

SEQ ID NO: 84798 - DNA, 75 bp, synthetic construct
  source 1..75: mol_type = other DNA
tcctgctgggaagcctgttcagccttagcgcctgtgtgcagcaaagcgaagtgcgacagatgaaacacagcgtca

SEQ ID NO: 84799 - DNA, 75 bp, synthetic construct
  source 1..75: mol_type = other DNA
actagcaccggaagttcgtggtaaaataatgttgtttggccactggttaggggagaaagaaatacctgaccctta

SEQ ID NO: 84800 - DNA, 75 bp, synthetic construct
  source 1..75: mol_type = other DNA
aaaatcaccaacttactggcaggcactgtatcctctgacagcactgacgccattaatggctcacaactttatggc

SEQ ID NO: 84801 - DNA, 75 bp, synthetic construct
  source 1..75: mol_type = other DNA
ggcagcgaccgccgcctccgcacgatttttgataccaacatgcgcaccgcccgcgcggcgggccagtgggaacgc

SEQ ID NO: 84802 - DNA, 75 bp, synthetic construct
  source 1..75: mol_type = other DNA
ccgctattatgacccgctgcaggggaggtatatcactcaggatccgattgggctgaaggggggatggaattttta

SEQ ID NO: 84803 - DNA, 75 bp, synthetic construct
  source 1..75: mol_type = other DNA
tatcgttcgcaaaactgccgttgaacgtgatcgccagaacgcgtggacacgcggaaaaaaacaaacttttcgcga

SEQ ID NO: 84804 - DNA, 75 bp, synthetic construct
  source 1..75: mol_type = other DNA
cgccagctaaaccacgtcgaagcagcagaactactgcgtgtaactgctgaagcaatccagaacgaagcgcaggag

SEQ ID NO: 84805 - DNA, 75 bp, synthetic construct
  source 1..75: mol_type = other DNA
ctcattctgaccattgtcatacgacccgttcagtggctgcgtgatgcgctggttgacgttgtgctgcccggtatg

SEQ ID NO: 84806 - DNA, 75 bp, synthetic construct
  source 1..75: mol_type = other DNA
cgccagctaaaccacgttgaagcagcagaactactgcgtgtaactgctgaaacaatccagaatgaagcgcaggag

SEQ ID NO: 84807 - DNA, 75 bp, synthetic construct
  source 1..75: mol_type = other DNA
ccgcgctggccgcgtggcaaaaatatcagcaggactgccagaaagttaaggatgaggcaaaacgccttgaggccg

SEQ ID NO: 84808 - DNA, 75 bp, synthetic construct
  source 1..75: mol_type = other DNA
aatcgccaaactggggccgtatgagttcatctgtacgggtcgcccggacgaaggcatcccggcggtttgcttcaa

SEQ ID NO: 84809 - DNA, 75 bp, synthetic construct
  source 1..75: mol_type = other DNA
gctgatattaaagccacaactgattgccagtgcgtggtggtcggtggcagcgttggtctggcagaagggtatctg

SEQ ID NO: 84810 - DNA, 75 bp, synthetic construct
  source 1..75: mol_type = other DNA
actgacggaacttcttgggcaaaaagaagagaacagttggcgcattatgctaatgacaatgcttatctcacaacc

SEQ ID NO: 84811 - DNA, 75 bp, synthetic construct
  source 1..75: mol_type = other DNA
agccaaccagattgaaggcgatattgtcaaaacagtgggtaaggctttcccgcgggactcccgggcaccggagcg

SEQ ID NO: 84812 - DNA, 75 bp, synthetic construct
  source 1..75: mol_type = other DNA
ctgcgcggaaacatattgcgctggtggcacacgatcactgcaaacaaatgctgatgagctgggtggaacggcatc

SEQ ID NO: 84813 - DNA, 75 bp, synthetic construct
  source 1..75: mol_type = other DNA
ccgtgaggatgccggaacataccgctgtctgccggagccggaagcggtgctgacggaggcagaagaagaacgcct

SEQ ID NO: 84814 - DNA, 75 bp, synthetic construct
  source 1..75: mol_type = other DNA
ttgataacgtttccatctacgccagctatgcgtatgtgaacgcggaaatccgcgagaaaggcgacacctacggca

SEQ ID NO: 84815 - DNA, 75 bp, synthetic construct
  source 1..75: mol_type = other DNA
gccaaccagtacggccttaatccctggacgaaagaaatttacgccttccctgataagcagaacggcatcgttccg

SEQ ID NO: 84816 - DNA, 75 bp, synthetic construct
  source 1..75: mol_type = other DNA
gtgttcatcaagctggtctgagtaccacaatacaattcactcgcgcagaagacaaaataatgagcggtacagtat

SEQ ID NO: 84817 - DNA, 75 bp, synthetic construct
  source 1..75: mol_type = other DNA
tgcagatgctgggacgtgcaccacagcagaacgctcaggcgcaaccgaagcctcagcagaatgggcagccacaga

SEQ ID NO: 84818 - DNA, 75 bp, synthetic construct
  source 1..75: mol_type = other DNA
ggatcgacaaagaagaatatccgcaatctgcagcaatcgacctgcgttgcgtaaacatggttgccgatctgtggc

SEQ ID NO: 84819 - DNA, 75 bp, synthetic construct
  source 1..75: mol_type = other DNA
agactacaaagcctccctgaaatatctcagcgatcacccgaaactgcagggtattgcccagcagaacagctttaa

SEQ ID NO: 84820 - DNA, 75 bp, synthetic construct
  source 1..75: mol_type = other DNA
attcccattcaaccgccacactgacttttattgcgcatgatgcagcaggtaatcctgttatcgggctggtgctct

SEQ ID NO: 84821 - DNA, 75 bp, synthetic construct
  source 1..75: mol_type = other DNA
ggctggtgaatatctgcgcaagggcgcgcaggtctacatcgaggggcaactccgtacccgtagctgggaagataa

SEQ ID NO: 84822 - DNA, 75 bp, synthetic construct
  source 1..75: mol_type = other DNA
aaaacggtgctgaaatttataaccgtaccgcgctggataatacgctgatttacagtggtgttattgatatgccag

SEQ ID NO: 84823 - DNA, 75 bp, synthetic construct
  source 1..75: mol_type = other DNA
aacggactatatcgttggatattacagcgcactaagaccgcacgaatataacggtgggttacccccaaacgaatc

SEQ ID NO: 84824 - DNA, 75 bp, synthetic construct
  source 1..75: mol_type = other DNA
ttgcgcacagagataccaggtggcttttcaccggaagaagcgcaggaactcctggataatctggtgcgcagccat

SEQ ID NO: 84825 - DNA, 75 bp, synthetic construct
  source 1..75: mol_type = other DNA
gctcactgcttgccgatgaggaaaacgcaaggctgcgtgcaacccactggctacatgagagaggcctgaaagtat

SEQ ID NO: 84826 - DNA, 75 bp, synthetic construct
  source 1..75: mol_type = other DNA
gctgaaaagcaaatatgcgccggatgaggtgcacaccttcaacagcctgctgcaatattacgacggtgaagccga

SEQ ID NO: 84827 - DNA, 75 bp, synthetic construct
  source 1..75: mol_type = other DNA
tggaaggtatcgttgaagatgatatgaacatcatccaacagatcataatggatgacgatcttgaagatgacatcg

SEQ ID NO: 84828 - DNA, 75 bp, synthetic construct
  source 1..75: mol_type = other DNA
gccttgagcagtcatgaactgaacgggcgattaagcgaactcttaagtcatattcctcttgaggtgatggcaacc

SEQ ID NO: 84829 - DNA, 75 bp, synthetic construct
  source 1..75: mol_type = other DNA
gtcttacaagctgataagaaagaaattacgataattaataaaaacgaaaacacgacactcactcaaaccattgct

SEQ ID NO: 84830 - DNA, 75 bp, synthetic construct
  source 1..75: mol_type = other DNA
atgaatactgctcgtctgaaccagggcacaccattgttgctcaatgcagtaagcaaacattacgcggaaaatatc

SEQ ID NO: 84831 - DNA, 75 bp, synthetic construct
  source 1..75: mol_type = other DNA
gccaatattgagttactctcagacagcggacgcaaatcactgatagacagaattaaaggcggtgacgcaatcact

SEQ ID NO: 84832 - DNA, 75 bp, synthetic construct
  source 1..75: mol_type = other DNA
gggctgcagattgtaaattttgccagttgaatggtaaatatttttgctcactttacaatgtaaaacttcttcgct

SEQ ID NO: 84833 - DNA, 75 bp, synthetic construct
  source 1..75: mol_type = other DNA
gcggcagacaggattgcgatgattaatcctgcgaatggcaacacaaagccgatgtttgttggtcagggcgatcag

SEQ ID NO: 84834 - DNA, 75 bp, synthetic construct
  source 1..75: mol_type = other DNA
tatttcgttggggataccaacgaggatatgttcctggaaatccttgcgttggagtagataaattccctaaaccaa

SEQ ID NO: 84835 - DNA, 75 bp, synthetic construct
  source 1..75: mol_type = other DNA
atcgtcctgggcaatattctggcaatcgatccggcggatatcctgcaactcactatcattggcattctctcgatc

SEQ ID NO: 84836 - DNA, 75 bp, synthetic construct
  source 1..75: mol_type = other DNA
accacacggataaaaacgcgactatttccgcggatattgtcagtggcagcgagggcctgggctatatcaatgcgc

SEQ ID NO: 84837 - DNA, 75 bp, synthetic construct
  source 1..75: mol_type = other DNA
gttaaccgatcgttttccccgcctgctcatgattgctgtaactattggcagtgtgaccagtttcctcggcgcgtg

SEQ ID NO: 84838 - DNA, 75 bp, synthetic construct
  source 1..75: mol_type = other DNA
tcgaggataaattttctggcaaggagctggcgacgcctctattaaaaagcttctcagagaactgtagacaaaatg

SEQ ID NO: 84839 - DNA, 75 bp, synthetic construct
  source 1..75: mol_type = other DNA
aagatttaaaagcagatgtcaccactgccgacaaagtatggatcttcgctcatttgctgatgccgcgtctggcac

SEQ ID NO: 84840 - DNA, 75 bp, synthetic construct
  source 1..75: mol_type = other DNA
ctatatcgacctgattggcaagtatgttcaccatgataatgagtacactgcaacctttgccggactcggaacccg

SEQ ID NO: 84841 - DNA, 75 bp, synthetic construct
  source 1..75: mol_type = other DNA
gttgcgctcgatgctgccctgctggaaaaactccaggctgttgctgaacaccttcgggaagccgaaggctgggaa

SEQ ID NO: 84842 - DNA, 75 bp, synthetic construct
  source 1..75: mol_type = other DNA
accggtatcgacatcgacatgcacatcgacgctgccagcggtggcttcctggcaccgttcgtcgccccggatatc

SEQ ID NO: 84843 - DNA, 75 bp, synthetic construct
  source 1..75: mol_type = other DNA
ggaaacgcaaaggtaatcgagctgggcagtccgcgtcgtctggcaaccatttataacgtcaatacccgtacggcg

SEQ ID NO: 84844 - DNA, 75 bp, synthetic construct
  source 1..75: mol_type = other DNA
ttattcagtcagcctgggaaacgacaaagaatgtgcccggcgttggtgcgttgtttggtgaactggcagaagaga

SEQ ID NO: 84845 - DNA, 75 bp, synthetic construct
  source 1..75: mol_type = other DNA
gatcagaaaactgggtaaaggcgatcatctggtgaagctgaaaaccagcccgcaggcacgaaaaaagtggccggg

SEQ ID NO: 84846 - DNA, 75 bp, synthetic construct
  source 1..75: mol_type = other DNA
atggcgcttaaagcgacaatttataaagcgacggttaatgtggccgatctcgaccgcaaccagtttctcgatgcc

SEQ ID NO: 84847 - DNA, 75 bp, synthetic construct
  source 1..75: mol_type = other DNA
tgacgcatgggcatggataggtgatcatacactgggggcactcagtctgatcactgacgtggtggccggaaccgt

SEQ ID NO: 84848 - DNA, 75 bp, synthetic construct
  source 1..75: mol_type = other DNA
tacctcgccgttgttctcgacctgttcgcaagaaaaccagtgggctgggccatgtcgttctcgccggacagcagg

SEQ ID NO: 84849 - DNA, 75 bp, synthetic construct
  source 1..75: mol_type = other DNA
gtggcgctcgatgccgccctgctggaaaaactccaggctgtcgcagagttccttcgggaagccgaaggctgggaa

SEQ ID NO: 84850 - DNA, 75 bp, synthetic construct
  source 1..75: mol_type = other DNA
ccgcagataacgaatccgggcatgtacaggccgttatcgcagaaaaagacttccagtttttcgaaaagttgggct

SEQ ID NO: 84851 - DNA, 75 bp, synthetic construct
  source 1..75: mol_type = other DNA
ccgccaccagccgttttctgaatgtagaagaagcgggtaaaacgctgcgcatccattttaatgactgcggacaag

SEQ ID NO: 84852 - DNA, 75 bp, synthetic construct
  source 1..75: mol_type = other DNA
agcactatctgccgcttaatccacagcagttgccggggctgtcgtgggatctggcgctgaataccgccgtcagct

SEQ ID NO: 84853 - DNA, 75 bp, synthetic construct
  source 1..75: mol_type = other DNA
cctctcagtcacaactaatttctacccgcgagttagctaatattattggctatgaagtacaaactattcgagctt

SEQ ID NO: 84854 - DNA, 75 bp, synthetic construct
  source 1..75: mol_type = other DNA
gcggctgggttatctggcgtgatgaagaagcgctgccgcaggaactggtgttcaacgttgactacctcggtggtc

SEQ ID NO: 84855 - DNA, 75 bp, synthetic construct
  source 1..75: mol_type = other DNA
aaagaagaatatccgcaatccgcagccatcgacctgcgttgcgtaaatatggttgccgatctgtggcatgcgcct

SEQ ID NO: 84856 - DNA, 75 bp, synthetic construct
  source 1..75: mol_type = other DNA
ttaaaaagcggctctgccacattaacgtcattaacagcggtgaccgatcaaaacggaatcgcgacaacaagcgtg

SEQ ID NO: 84857 - DNA, 75 bp, synthetic construct
  source 1..75: mol_type = other DNA
ctggaaattttactacaggacaacaaccagaagctgcgttatccagaaccagttacatacagcgaattggttact

SEQ ID NO: 84858 - DNA, 75 bp, synthetic construct
  source 1..75: mol_type = other DNA
gccagaaaaaggcagataccgtttattaccccgcacaagttatacgcggaaacagattttcaactgaaaaagagg

SEQ ID NO: 84859 - DNA, 75 bp, synthetic construct
  source 1..75: mol_type = other DNA
atcaataaaaactggatcgacaaagaagaatatccgcaatccgcagccatcgacctgcgttgcgtaaatatggtt

SEQ ID NO: 84860 - DNA, 75 bp, synthetic construct
  source 1..75: mol_type = other DNA
cctggctggatgtgtgcaccacatccacagacagatgccactgaacgcaccgataacctggctgatgccgcctga

SEQ ID NO: 84861 - DNA, 75 bp, synthetic construct
  source 1..75: mol_type = other DNA
gttatcagtcatatgcccaaaagtaaggaggaagctcttacagttatcagagaaattgaaaacagaaaaagacgt

SEQ ID NO: 84862 - DNA, 75 bp, synthetic construct
  source 1..75: mol_type = other DNA
gcgtgagggtaccgtgctcagtgaacggcagcgtgaaatgatggcttcgctgaccacccggcttgaacgtctgaa

SEQ ID NO: 84863 - DNA, 75 bp, synthetic construct
  source 1..75: mol_type = other DNA
gctgctgccagtcactcttacgctggatatagtaacgtcaccactccagttcctgattttatgcacgaccagaaa

SEQ ID NO: 84864 - DNA, 75 bp, synthetic construct
  source 1..75: mol_type = other DNA
ccgacaaaagcaaacttcttcggacacctgaaaaagccgcagattatcgcagccctgaatgatgccggactgtcc

SEQ ID NO: 84865 - DNA, 75 bp, synthetic construct
  source 1..75: mol_type = other DNA
cagtacaccggaaggaagctggctaacagttatatccggaaaacgcccaatggggcagttttctgtagatagttt

SEQ ID NO: 84866 - DNA, 75 bp, synthetic construct
  source 1..75: mol_type = other DNA
gccacccggatggatgtcctgaccacaatccgtgaggaagtggagcgggctgtcagtgaaggcatcacccgtgag

SEQ ID NO: 84867 - DNA, 75 bp, synthetic construct
  source 1..75: mol_type = other DNA
tgccgcaggtatgacgtttctggttgcctaccctctgctatactgggcgggtgcaacgccgagtgccattagcgg

SEQ ID NO: 84868 - DNA, 75 bp, synthetic construct
  source 1..75: mol_type = other DNA
ggcgtcattctgaccttactttcagccatcaccattagtgtgggagaaaaagcccgcctgccaacatacggtatt

SEQ ID NO: 84869 - DNA, 75 bp, synthetic construct
  source 1..75: mol_type = other DNA
aagccatagaacgtttagttgaagcatatgggttcggtacccgtcaggctctctgtgatcatttaggtgtttcta

SEQ ID NO: 84870 - DNA, 75 bp, synthetic construct
  source 1..75: mol_type = other DNA
gctgcagcagcttatccgcctgccggggcagcagtatgatgaggagtccggcctgtattacaaccgccaccgcta

SEQ ID NO: 84871 - DNA, 75 bp, synthetic construct
  source 1..75: mol_type = other DNA
gggagtgaaattacctcgaccacggataaaaaactgggtgaccaggccgtgaccatacagcaaatccagcgggtt

SEQ ID NO: 84872 - DNA, 75 bp, synthetic construct
  source 1..75: mol_type = other DNA
gccatgaacttcggtattcgcggactcaacccgcgccttgccagccgctccacggtgctaatggacggtatcccg

SEQ ID NO: 84873 - DNA, 75 bp, synthetic construct
  source 1..75: mol_type = other DNA
ctaaaagtggtcgggcagaaagcgacgggcataaacgtttctggcgatgcgaatacagtgaatatcactggtaac

SEQ ID NO: 84874 - DNA, 75 bp, synthetic construct
  source 1..75: mol_type = other DNA
aacaacactggaaaaaccatcgtcgacggcaaaggcgccaccggaactgaaatcgcgggtaataacgcggtggtg

SEQ ID NO: 84875 - DNA, 75 bp, synthetic construct
  source 1..75: mol_type = other DNA
ggaaaaaattcagaaattgatccctgcggttctggcaattcttcctcgcgagctgcgtcaccgactctgcatctt

SEQ ID NO: 84876 - DNA, 75 bp, synthetic construct
  source 1..75: mol_type = other DNA
atgcgagagttcaaccattttgattttgaactcaacgggataattagggcttttttacgcactgcggttaatgat

SEQ ID NO: 84877 - DNA, 75 bp, synthetic construct
  source 1..75: mol_type = other DNA
tggtatggtgacgttagcgtgtattccgaccgcagtattttattttttaccactggcaatcggtaaatttaatga

SEQ ID NO: 84878 - DNA, 75 bp, synthetic construct
  source 1..75: mol_type = other DNA
tatggtgaaagcatcaacccgcgtcaccctggacacaccggaggtggtttgcaccaacaaactgattaccggcac

SEQ ID NO: 84879 - DNA, 75 bp, synthetic construct
  source 1..75: mol_type = other DNA
gtggtgaaccaggacggcgagctggatgtgagcggcggcggtcacggtattgatatcaccggcgacagcgcgacg

SEQ ID NO: 84880 - DNA, 75 bp, synthetic construct
  source 1..75: mol_type = other DNA
atatgatcctgattctggctatacgacgctgagtgatgagacgtaccgcatcattctgaaagcgaaaatcgctat

SEQ ID NO: 84881 - DNA, 75 bp, synthetic construct
  source 1..75: mol_type = other DNA
ctgaagatgtaatcccaggtgatgtggtcataacatctaaaggcaaacgatgtgcggttaaatctttctggatgg

SEQ ID NO: 84882 - DNA, 75 bp, synthetic construct
  source 1..75: mol_type = other DNA
tctggggaattaacaccctgtttggtccgtttgttctggatctgttcactgacggtgataacgccaaatgtgctg

SEQ ID NO: 84883 - DNA, 75 bp, synthetic construct
  source 1..75: mol_type = other DNA
atgaacactctcgcaaatattcaggaactcgcgcgcgcactgcgcaacatgatccgcaccggcattatcgtcgaa

SEQ ID NO: 84884 - DNA, 75 bp, synthetic construct
  source 1..75: mol_type = other DNA
ttattggttcggcgaatattgatgtggctgggtattcacatcatccattgaattatgcggattcgaatcccggaa

SEQ ID NO: 84885 - DNA, 75 bp, synthetic construct
  source 1..75: mol_type = other DNA
ccggtgctggacagtgaggggaataccaatatctccggtgtcacggtggtgttccgggccggtgagcaggagcag

SEQ ID NO: 84886 - DNA, 75 bp, synthetic construct
  source 1..75: mol_type = other DNA
gcgcgctgcgtgcggcagacagcgaaaccagcgccctcatcgctgacactgtcatccgcaaccgcaatgatcgtc

SEQ ID NO: 84887 - DNA, 75 bp, synthetic construct
  source 1..75: mol_type = other DNA
ctgttgatgataattatgaccaaaacaatggtgtgatgattgatgaaaataacagcgcctcgggatatgaccatt

SEQ ID NO: 84888 - DNA, 75 bp, synthetic construct
  source 1..75: mol_type = other DNA
tatggtttactgatggctgtcaccggtgcgctgattgatgaatcgcttgtggaaaaagcgaataagttctggggt

SEQ ID NO: 84889 - DNA, 75 bp, synthetic construct
  source 1..75: mol_type = other DNA
taattacagactccttcccatgatcgacattctggtatggtcaaaattatataaagtacgtatatcagaagaccg

SEQ ID NO: 84890 - DNA, 75 bp, synthetic construct
  source 1..75: mol_type = other DNA
atccctttaattatcccctcaacctcttgtaactttcccactcttgagctccacatagtccaaacgccggatgca

SEQ ID NO: 84891 - DNA, 75 bp, synthetic construct
  source 1..75: mol_type = other DNA
ttatcgcacagagttgctacgtgtttgatggcgagcaggatgaaatatctgatgcgtatatctgcgcaacagatg

SEQ ID NO: 84892 - DNA, 75 bp, synthetic construct
  source 1..75: mol_type = other DNA
acggccagcgtgacggcttctgattctgttactgccacggtgccggtggtcatggtgaaagcgtcaacccgcatc

SEQ ID NO: 84893 - DNA, 75 bp, synthetic construct
  source 1..75: mol_type = other DNA
ctacgggctggtgacctttacctggggcaacgtcagcgccattgaccgcgaacgcgggctggtggtgatcaagcc

SEQ ID NO: 84894 - DNA, 75 bp, synthetic construct
  source 1..75: mol_type = other DNA
gttcatgatggtcgccaaatggtgcgaatgggctatacagcaggatggtttgcaagaaaacctgcaaaaaaaact

SEQ ID NO: 84895 - DNA, 75 bp, synthetic construct
  source 1..75: mol_type = other DNA
cgtattgaaaaaacaaatcgggaatcatcaccgttgggtatttgtgtacaaggaaagctgtaccaaaccagacgg

SEQ ID NO: 84896 - DNA, 75 bp, synthetic construct
  source 1..75: mol_type = other DNA
ctatgacgacttccgcgacttcagccgtcgccaaccactgacccagcaacaaaaggacgccgctcgtcagcgtta

SEQ ID NO: 84897 - DNA, 75 bp, synthetic construct
  source 1..75: mol_type = other DNA
taagcggactcattcggctcttggtatggatgaggaagcgagagggtacttcaggcgttatcgcgataaagattg

SEQ ID NO: 84898 - DNA, 75 bp, synthetic construct
  source 1..75: mol_type = other DNA
gctgccaccagcgaagtgtggtggccggaagatgcggaccatattgcttttattcgcgggcgtattggttttgaa

SEQ ID NO: 84899 - DNA, 75 bp, synthetic construct
  source 1..75: mol_type = other DNA
accctctaaagccaatgtcagttcctttttaaagaaaatacgcgctgtaatcaaaggcaacaaagctatggatca

SEQ ID NO: 84900 - DNA, 75 bp, synthetic construct
  source 1..75: mol_type = other DNA
cggcccccaccattaccagcggtggcagtcctccggtattttccctgacatcagacggaaagctgaccgctaaaa

SEQ ID NO: 84901 - DNA, 75 bp, synthetic construct
  source 1..75: mol_type = other DNA
accatcaacacattgtggccaaggtcgcatttaacaaagttgacaatgagatctggctggctttatggcgttggg

SEQ ID NO: 84902 - DNA, 75 bp, synthetic construct
  source 1..75: mol_type = other DNA
aagtggatgagtttgctcttgatgtagatgtttattctgaagatgaagacaacgacgaattagacaataactctc

SEQ ID NO: 84903 - DNA, 75 bp, synthetic construct
  source 1..75: mol_type = other DNA
gctttcggaaaactgaccactgacccgacgtcggggctgattgcgatggcgaagcagttccataacgtgacggcg

SEQ ID NO: 84904 - DNA, 75 bp, synthetic construct
  source 1..75: mol_type = other DNA
agtcctcgacgaatgtttactactgtatccaaagcggcattgatggcgatcgggcagggcgtcaggatggcggca

SEQ ID NO: 84905 - DNA, 75 bp, synthetic construct
  source 1..75: mol_type = other DNA
ctattagtaagactatggcttttcaaaatcatgacgaagcgcgaaggccagataatcccaaaactttatttgatg

SEQ ID NO: 84906 - DNA, 75 bp, synthetic construct
  source 1..75: mol_type = other DNA
cgcaggcttcttatctacatggatgagttctggcaatggatcaataacgaagcgttcagggactttgtttacaac

SEQ ID NO: 84907 - DNA, 75 bp, synthetic construct
  source 1..75: mol_type = other DNA
aaccacagaaaaataacatcagaaaaaaatattcctgacacatcacaaacgggaagaataacgggcgacgcgcca

SEQ ID NO: 84908 - DNA, 75 bp, synthetic construct
  source 1..75: mol_type = other DNA
cagcgtgaggcgattattaacagcgcccgtgcgacgtccagttccagttttttgcagtgcagtagcattattcgc

SEQ ID NO: 84909 - DNA, 75 bp, synthetic construct
  source 1..75: mol_type = other DNA
gtttttttcctgatagcagttactttgacggctttattctattataaaaaggtcgtagaaaaagaaaaaagtctg

SEQ ID NO: 84910 - DNA, 75 bp, synthetic construct
  source 1..75: mol_type = other DNA
ctggaacgtgagagtcaattgtatggttcatttgatggagcaatgaagttcattaaaggtgatgcaattgctggc

SEQ ID NO: 84911 - DNA, 75 bp, synthetic construct
  source 1..75: mol_type = other DNA
cagtacagccgaattggcaaggctgtgcaaagcggcaatgtggaaccggaaaaagcgcgtacttgggaggtcggc

SEQ ID NO: 84912 - DNA, 75 bp, synthetic construct
  source 1..75: mol_type = other DNA
gtttctgctgttattctttctatcggtgttgcaggagttacagtttatctgacttttgctggcgttcgtaaagta

SEQ ID NO: 84913 - DNA, 75 bp, synthetic construct
  source 1..75: mol_type = other DNA
tgctgctgaacttcgccatggccgctcaggcagagtgtaatatctccagtagcatacaaaatatcgactatggca

SEQ ID NO: 84914 - DNA, 75 bp, synthetic construct
  source 1..75: mol_type = other DNA
tcaggaggcggctaatctgattgctgacaagcagggggctgtaaatgccagggcggtacagcaattgaaagggcc

SEQ ID NO: 84915 - DNA, 75 bp, synthetic construct
  source 1..75: mol_type = other DNA
cgcatcacagctgaagtataccggagaggcgcagaaggcgtatgagcgtctgctgacgccgctggagaaatatac

SEQ ID NO: 84916 - DNA, 75 bp, synthetic construct
  source 1..75: mol_type = other DNA
cagaaattgaagaattacagcgcaatacagcaataaaaatgcgtcgtctgaactaccagactatatccgccactc

SEQ ID NO: 84917 - DNA, 75 bp, synthetic construct
  source 1..75: mol_type = other DNA
atgcttccccgttttgccggtatttttcaacagggaaaccgctggcttaactggctggagaaacaaccgggaggg

SEQ ID NO: 84918 - DNA, 75 bp, synthetic construct
  source 1..75: mol_type = other DNA
tcagcgtatcccgggtgatggataatgccacccatgtggcggtgtactctggctcttacctgaaaaaccgccggt

SEQ ID NO: 84919 - DNA, 75 bp, synthetic construct
  source 1..75: mol_type = other DNA
gcgggctgacaccagtgaacccggacgatataatcagcttctccaaaagcaagtgagcggatacattcgggacgc

SEQ ID NO: 84920 - DNA, 75 bp, synthetic construct
  source 1..75: mol_type = other DNA
ggcaactcgattttcaccaataccgcgtcgttttcgccagcacagggagtcggcgtacagttgacgcgcaacgga

SEQ ID NO: 84921 - DNA, 75 bp, synthetic construct
  source 1..75: mol_type = other DNA
ccttgccgaaggcgaagaagctctcagcttcagcgaatttaaacaggcgctttccagttcggcaaaagctaacaa

SEQ ID NO: 84922 - DNA, 75 bp, synthetic construct
  source 1..75: mol_type = other DNA
atgcgcggcaacattgaacacaccggcggtgaactctcatcaaacggtaaggtactgcatacccataaacacccc

SEQ ID NO: 84923 - DNA, 75 bp, synthetic construct
  source 1..75: mol_type = other DNA
accggaaaaagaagccatcgtggataacggtgcccgctttgagccgcagtcaggctccctgaacagcgtcatccc

SEQ ID NO: 84924 - DNA, 75 bp, synthetic construct
  source 1..75: mol_type = other DNA
attaactggatgcgtgattgccattcatcaaatgataaagacgtcattgcaattgatggaaaaacgctccggcac

SEQ ID NO: 84925 - DNA, 75 bp, synthetic construct
  source 1..75: mol_type = other DNA
atgcgtggcagtctcctttcggtccataatagcagaacaaaagaaagaacccgaaatgacggtcagatattatat

SEQ ID NO: 84926 - DNA, 75 bp, synthetic construct
  source 1..75: mol_type = other DNA
cagtcatatcttaatcaggcatatgaaaagattaatgactggagaactgagttacagctgggcacgattagtgat

SEQ ID NO: 84927 - DNA, 75 bp, synthetic construct
  source 1..75: mol_type = other DNA
cgactggcttcagtggctgacccatcgcgccggacgttcgcgcacatggtgggcaccttccgtgggggaacaggt

SEQ ID NO: 84928 - DNA, 75 bp, synthetic construct
  source 1..75: mol_type = other DNA
atgaaaactatcaatactgttgttgctgctatggctctttcaactctgtcatttggcgtgttcgcggcggaaccg

SEQ ID NO: 84929 - DNA, 75 bp, synthetic construct
  source 1..75: mol_type = other DNA
gccagaacttctttgataccgaacaccctgtttaccccaaagtggatggctccggtgatgcacagatggtcagca

SEQ ID NO: 84930 - DNA, 75 bp, synthetic construct
  source 1..75: mol_type = other DNA
agtcactatcgataaaattaatcagcagattgtgaacgttgaagcgattaacttctcactccctcagcaagagaa

SEQ ID NO: 84931 - DNA, 75 bp, synthetic construct
  source 1..75: mol_type = other DNA
ggctgggtgatcgataaccctgaagatacgtttgatgtggataatctggatgtgttcggtattgatggaacggag

SEQ ID NO: 84932 - DNA, 75 bp, synthetic construct
  source 1..75: mol_type = other DNA
ccatcaccgcaaccgtgccgctggtactggtgaaagcctcaaccagtatcaccctcgacacccccgaggtgattt

SEQ ID NO: 84933 - DNA, 75 bp, synthetic construct
  source 1..75: mol_type = other DNA
ttacaaaaacagaaacaggcggtgctcagaaatggattaaagaacaaaagcaactgctatcaaagtgttttgaca

SEQ ID NO: 84934 - DNA, 75 bp, synthetic construct
  source 1..75: mol_type = other DNA
atttgtgttcggtgcttccgcccgtcgcaatgtgggctacggcttctggcagatggcctacatgatgcagtcacc

SEQ ID NO: 84935 - DNA, 75 bp, synthetic construct
  source 1..75: mol_type = other DNA
gacaacaccacaccggggaaattgctggttcaggagatcgagtttgtaaggggcagaacgccagccgggctgtat

SEQ ID NO: 84936 - DNA, 75 bp, synthetic construct
  source 1..75: mol_type = other DNA
accccctgttacgttttttgtcagaacgtttcaccctctggctggatgatttcggctcaggaaatgcaggcttaa

SEQ ID NO: 84937 - DNA, 75 bp, synthetic construct
  source 1..75: mol_type = other DNA
accaccttctaaccataggatgagatgccataggtgtaacgcctcctatctgttccctaaatctgcattttctaa

SEQ ID NO: 84938 - DNA, 75 bp, synthetic construct
  source 1..75: mol_type = other DNA
acctcgcagaacaatgtcaacggtatcacctccacgctgaccggcagcgcggggcaggctgtacttggtaaggcg

SEQ ID NO: 84939 - DNA, 75 bp, synthetic construct
  source 1..75: mol_type = other DNA
ctcaactagaaaaattaatatcaataattgatagacctgtgaagaatcgactttgtgataagatagctaacaatc

SEQ ID NO: 84940 - DNA, 75 bp, synthetic construct
  source 1..75: mol_type = other DNA
attccacatgcgcgactggtggcagccgacgaaagcaaacttcttcggacacctgcaaaagccgcagattatcga

SEQ ID NO: 84941 - DNA, 75 bp, synthetic construct
  source 1..75: mol_type = other DNA
gcgagcgtggagcactgctgtacgggctgatcggcacctgccgtctgaacggtatcgatccggaagcgtatctgc

SEQ ID NO: 84942 - DNA, 75 bp, synthetic construct
  source 1..75: mol_type = other DNA
aagtctgcccgtgttggttattccaaaatgctgttgggtgtttatgcctacttcatagagcataagcagcgcaac

SEQ ID NO: 84943 - DNA, 75 bp, synthetic construct
  source 1..75: mol_type = other DNA
ctggattatctcgatgcgctggaatctgtggacatatccagcgcaccagatatcaactggcctgagtcgccggag

SEQ ID NO: 84944 - DNA, 75 bp, synthetic construct
  source 1..75: mol_type = other DNA
ttatgctggcgggtgtactgctcgcgagctttaatgcctctgctatcccggggttctggcagcagggttacggtc

SEQ ID NO: 84945 - DNA, 75 bp, synthetic construct
  source 1..75: mol_type = other DNA
agctctattgagctactggatggctgaaatcatcaggcgtgaaaaaatggatgtttggcgactattaagagagaa

SEQ ID NO: 84946 - DNA, 75 bp, synthetic construct
  source 1..75: mol_type = other DNA
ctgccgaaggagaaaagctgtcgagaactgaccaggccaatgactatatgaacaaaaagcaatggcccggcaagg

SEQ ID NO: 84947 - DNA, 75 bp, synthetic construct
  source 1..75: mol_type = other DNA
cttttctgttgctaattcagttggtgttaatgctcacatttttgtttgcccttatgatgaaagtgcaaccctttt

SEQ ID NO: 84948 - DNA, 75 bp, synthetic construct
  source 1..75: mol_type = other DNA
tactgcctggctcattattgaatgagtcagcagaatcacgcaatcaaacaacaccaagacagactggcgaaatcc

SEQ ID NO: 84949 - DNA, 75 bp, synthetic construct
  source 1..75: mol_type = other DNA
acgacgatgtatttaacgaagcacctgaatttaccggtgaatcaacttcaaacgatgcagaaaaagacaaagttg

SEQ ID NO: 84950 - DNA, 75 bp, synthetic construct
  source 1..75: mol_type = other DNA
actgattaaatcaccgctgaatgtgcgcacggtgccgtattctgcggagtccgtcagcgaactggcggagtccat

SEQ ID NO: 84951 - DNA, 75 bp, synthetic construct
  source 1..75: mol_type = other DNA
caaaaaatcatcgacggtatgaaagaagcgggcgtggaagtcatcaccgatctcgaccgcaaagcctttagcgat

SEQ ID NO: 84952 - DNA, 75 bp, synthetic construct
  source 1..75: mol_type = other DNA
acctcttcatttccaggctacattaaaacaagacggtaatattgctatagaaccgggggattttaaagccaccag

SEQ ID NO: 84953 - DNA, 75 bp, synthetic construct
  source 1..75: mol_type = other DNA
atgcgcggcctgcgcatgaataccctcggctggttcgattttaaatcagcgtggtttgcgccaccggatccatga

SEQ ID NO: 84954 - DNA, 75 bp, synthetic construct
  source 1..75: mol_type = other DNA
ggttggcgtgcaggtggactcggagcagtttggcagtcagcaggtgagccgtaattatcatcttcgcgggcgcat

SEQ ID NO: 84955 - DNA, 75 bp, synthetic construct
  source 1..75: mol_type = other DNA
gtcccacgtggcgcgtttgcatggaattcagcccagtctgttgtttaagtggaagaaacaataccaggaaggaag

SEQ ID NO: 84956 - DNA, 75 bp, synthetic construct
  source 1..75: mol_type = other DNA
tcggtgatttgctgggctattcgccccgccacgttcagcgaatgctgaaactggcagaccttgcgcctgtcatcc

SEQ ID NO: 84957 - DNA, 75 bp, synthetic construct
  source 1..75: mol_type = other DNA
aggcggcttcttcggctgcaacagccgcatccgtccatgcgcagacggtggagaagaacgcacaggctcatgaac

SEQ ID NO: 84958 - DNA, 75 bp, synthetic construct
  source 1..75: mol_type = other DNA
tgttcccgtcggtgcggtttcgtgtcagggaacgcagtcgccataaatccgcgctggtcatgcagaagtacagcc

SEQ ID NO: 84959 - DNA, 75 bp, synthetic construct
  source 1..75: mol_type = other DNA
ttactttggctggcgcaccatcgttccgatatttaccgtcaggcatcaaccatcaccatgatcagcgactggctg

SEQ ID NO: 84960 - DNA, 75 bp, synthetic construct
  source 1..75: mol_type = other DNA
gcaactggtttacaaactactgactgctgagcaggaatatgaagccacaggcagtgaggaaacactgaaggcggt

SEQ ID NO: 84961 - DNA, 75 bp, synthetic construct
  source 1..75: mol_type = other DNA
gccgatgcaccgccggaagcaatttcgggttacgtggtttgccggactgccacgctgaacgggtgggagcatgtg

SEQ ID NO: 84962 - DNA, 75 bp, synthetic construct
  source 1..75: mol_type = other DNA
cgcggtgtctggttgcgtgaaggagagcatattgacagagaagggaatgttaccggaacgccccgtcattcaagg

SEQ ID NO: 84963 - DNA, 75 bp, synthetic construct
  source 1..75: mol_type = other DNA
tcaatatccccgagaaacagaccctggcgatcagcactgatacgctggtggcgggcaaccatttcctccctgata

SEQ ID NO: 84964 - DNA, 75 bp, synthetic construct
  source 1..75: mol_type = other DNA
agaactcaattcgtgggacctataaccatgctcagtatctagaagggaggatggagatgatgcagtggtatgcag

SEQ ID NO: 84965 - DNA, 75 bp, synthetic construct
  source 1..75: mol_type = other DNA
atatagccagtgggaagatttcagcggcgatcagtcatacaaagacaaatcattcgattttaaacttcgcctgtg

SEQ ID NO: 84966 - DNA, 75 bp, synthetic construct
  source 1..75: mol_type = other DNA
atggttcctgacaccacgaaatacggacgggcaattatccgtttgcttggcgctacccgtgttggtcaccttgat

SEQ ID NO: 84967 - DNA, 75 bp, synthetic construct
  source 1..75: mol_type = other DNA
ggagcaatattccagatttgaattacgcctacgtaaacatttatcactggcggaagagtctctctggcaaaaatg

SEQ ID NO: 84968 - DNA, 75 bp, synthetic construct
  source 1..75: mol_type = other DNA
ctgaaagcgtcagtttgaacgcttttaaacaaccgaaggcgttctatctcatcttctcgattgagttatgggaac

SEQ ID NO: 84969 - DNA, 75 bp, synthetic construct
  source 1..75: mol_type = other DNA
tgcagcacctgacggtggaggtgagcgcagctgacggacagtatctggcgctggcgaaatgggacacgccgcggg

SEQ ID NO: 84970 - DNA, 75 bp, synthetic construct
  source 1..75: mol_type = other DNA
tctgatagtacgaaaaaacggtgctgaaatttataaccgaacggctctggataatacgctgatatatacgggtgt

SEQ ID NO: 84971 - DNA, 75 bp, synthetic construct
  source 1..75: mol_type = other DNA
ttcagcctgatgtttaccacaaaggtttttgtacgcgaaaaaaagaacttgtgaaaacgtcaggacatcatgcaa

SEQ ID NO: 84972 - DNA, 75 bp, synthetic construct
  source 1..75: mol_type = other DNA
atggataagaagcaagtaacggatttaaggtcggaactactcgattcacgttttggcgctaagtctatttccact

SEQ ID NO: 84973 - DNA, 75 bp, synthetic construct
  source 1..75: mol_type = other DNA
gaaaaacggtgctgaaatttataaccgtaccgcgatggataatacgctggtttacagtggtgttattgatatgcc

SEQ ID NO: 84974 - DNA, 75 bp, synthetic construct
  source 1..75: mol_type = other DNA
acgttgtattacgtacacccaggcagatgaatcaggagcatctcttcgcgcagctggttttgttcgtgtgaaaga

SEQ ID NO: 84975 - DNA, 75 bp, synthetic construct
  source 1..75: mol_type = other DNA
gcttacattattcaattacttttttaaaaacggcttggttttaaaacttcacaaggatacatgtctactaaagtt

SEQ ID NO: 84976 - DNA, 75 bp, synthetic construct
  source 1..75: mol_type = other DNA
gtcgcaggtctcggatctcttaaaaacgaccgtcaatgtggtggataccggtatcggtaacgatctaccaacaat

SEQ ID NO: 84977 - DNA, 75 bp, synthetic construct
  source 1..75: mol_type = other DNA
ttgcttaatgtcgcgcaatggcaacgcaaagaaggtcacgggcaactgacggacgggattctggctttgcctgcc

SEQ ID NO: 84978 - DNA, 75 bp, synthetic construct
  source 1..75: mol_type = other DNA
tgcaacctgtcaggccggtcctgaatttctccgcgctgcagcgcgatgtcatccggatggtggcgtttgtggcga

SEQ ID NO: 84979 - DNA, 75 bp, synthetic construct
  source 1..75: mol_type = other DNA
ccggtatcgacatcgacatgcacatcgacgccgccagcggtggcttcctggcaccgttcgtcgccccggatatcg

SEQ ID NO: 84980 - DNA, 75 bp, synthetic construct
  source 1..75: mol_type = other DNA
gctgactggctgacagcgattgagatgtacaaaccaactgtgcgcatcgtggaagttaatgtgccacgcgccgct

SEQ ID NO: 84981 - DNA, 75 bp, synthetic construct
  source 1..75: mol_type = other DNA
ttggtcgtgaagattcgctggatgcgcagattgccactttgcaggagaaagtgtcgcgggcgaaaagactcccct

SEQ ID NO: 84982 - DNA, 75 bp, synthetic construct
  source 1..75: mol_type = other DNA
atggcaaaagtggctgacgggatccgctacgccgaacgtgttgttgcaggagaaattgttgctggcgaatttgtc

SEQ ID NO: 84983 - DNA, 75 bp, synthetic construct
  source 1..75: mol_type = other DNA
gctgtgccagcagagtgagatgcagcagcaaccgtcaggcaatccgtttgatcagtcttctcagccgcagcaaca

SEQ ID NO: 84984 - DNA, 75 bp, synthetic construct
  source 1..75: mol_type = other DNA
gtcggcacgtgatgggtatggatttgaggctgactggtcagagttttataccacatcacgaaagccaacacctgc

SEQ ID NO: 84985 - DNA, 75 bp, synthetic construct
  source 1..75: mol_type = other DNA
aatcacgacgctgggtgactacccgaaaaatacaaccactatcgccccgttaacaccatacgataaatgggatgg

SEQ ID NO: 84986 - DNA, 75 bp, synthetic construct
  source 1..75: mol_type = other DNA
atcatcgttatgggtcgtcatgatgatgagtcgactctcgctcgagtggatgaggcgatcaacaggacatataag

SEQ ID NO: 84987 - DNA, 75 bp, synthetic construct
  source 1..75: mol_type = other DNA
ctgctgtggccgcaggagaacaggtcgttcctgcctctgaacttgctgctgccatgaagcagattaaagaactcc

SEQ ID NO: 84988 - DNA, 75 bp, synthetic construct
  source 1..75: mol_type = other DNA
acgctgaacgcacggaacaggtgcgtaagactgatgcggtggaggaaatcagtctgccgctactgacgaaaatgt

SEQ ID NO: 84989 - DNA, 75 bp, synthetic construct
  source 1..75: mol_type = other DNA
agtaaaccagcacaaatcagcctggaatgtaaacattattcgctgaccagcgatgcgccgtcagggaaggaaggt

SEQ ID NO: 84990 - DNA, 75 bp, synthetic construct
  source 1..75: mol_type = other DNA
ctcttcggtatccgtaccgttttaaggaggaggtgaaacgcatcgctaaggaagaggggatgtcagaaaactcag

SEQ ID NO: 84991 - DNA, 75 bp, synthetic construct
  source 1..75: mol_type = other DNA
attatggacagtgatgatggtgagcaggcctttctgcatggcctggagagcctgatccgggggtttgggcactgt

SEQ ID NO: 84992 - DNA, 75 bp, synthetic construct
  source 1..75: mol_type = other DNA
gattggctacttcatgaccggcatgtcgctacttaagcctgacctgattttcatcgccctggggactatcgctgt

SEQ ID NO: 84993 - DNA, 75 bp, synthetic construct
  source 1..75: mol_type = other DNA
atattggccaacaaccggtgaatgaaatcaaaccgctggttctgcttaatgtgctgcgtcgaattgaaagccgtg

SEQ ID NO: 84994 - DNA, 75 bp, synthetic construct
  source 1..75: mol_type = other DNA
gctggtaaataactggtatcccacagcaagtatcagcgatttgctggttgtggtgatgaagaaagccactgcagg

SEQ ID NO: 84995 - DNA, 75 bp, synthetic construct
  source 1..75: mol_type = other DNA
aggtccaggcttttgggggctttttgactgcaatggtcatccccaatatcggtgcttttattgcctggggattta

SEQ ID NO: 84996 - DNA, 75 bp, synthetic construct
  source 1..75: mol_type = other DNA
cggtgcagttgatggcgatgatccggcagtattcagaccaatacaaaaatacatcaatggcacatggtataacgt

SEQ ID NO: 84997 - DNA, 75 bp, synthetic construct
  source 1..75: mol_type = other DNA
ggatattgtgcagggttcagcaggtgtgctgataggtgcgccgacgggagtggcctgctcggtatgtcccaacag

SEQ ID NO: 84998 - DNA, 75 bp, synthetic construct
  source 1..75: mol_type = other DNA
atgaaatcattaaccacggaaacagcgctggatattctgattgcatggctgcaggacaatatcgactgcgaatcg

SEQ ID NO: 84999 - DNA, 75 bp, synthetic construct
  source 1..75: mol_type = other DNA
aacgcgatccagtcggaaacggtggtgttcctcgtgtgctctgggaaatcaggataatgagtaccactggtattc

SEQ ID NO: 85000 - DNA, 75 bp, synthetic construct
  source 1..75: mol_type = other DNA
tgtactggatgtgctgggtacgaaaatcggttatgcaatgtttgctgtgctgtgggccgtgttctgtggtgcaac

SEQ ID NO: 85001 - DNA, 75 bp, synthetic construct
  source 1..75: mol_type = other DNA
cagtcagccagtggtcacaaaatgggtcagtacataaggtagtgtctgcggccagtgtgaatacaagtgctgcag

SEQ ID NO: 85002 - DNA, 75 bp, synthetic construct
  source 1..75: mol_type = other DNA
acagcacaaaaaggaattgtccagctcagtagtgcaaccaacagcgcatctgaaacgcttgccgcgacaccgaaa

SEQ ID NO: 85003 - DNA, 75 bp, synthetic construct
  source 1..75: mol_type = other DNA
ggtgatcccgatgaatgtgcaggatattgaaccgacgatattacgggctacagggagtatccatcctctggatgt

SEQ ID NO: 85004 - DNA, 75 bp, synthetic construct
  source 1..75: mol_type = other DNA
tcggtacgtggggtaacacggaaacaccaaacgggacggttacagtcaccatcagcgatgatcataactttgacc

SEQ ID NO: 85005 - DNA, 75 bp, synthetic construct
  source 1..75: mol_type = other DNA
tcgtcgaccggtgcgaacaactggacgccgacaacgtacatcagcgatttactggttgtggtgatgaagaaatcc

SEQ ID NO: 85006 - DNA, 75 bp, synthetic construct
  source 1..75: mol_type = other DNA
acaccgccggaggggtttgaatcctctggttcagaaacggtgctggggacggaagtgaaatatgacacaccgatc

SEQ ID NO: 85007 - DNA, 75 bp, synthetic construct
  source 1..75: mol_type = other DNA
cgaacgggccatcagtgccccgctcaccagtgtggtgccccgtatcagttccctcacggtgaatctgtctccggg

SEQ ID NO: 85008 - DNA, 75 bp, synthetic construct
  source 1..75: mol_type = other DNA
gtcgaagcgtcactcgaccaggcggttaataacggcctggtggctccgggtgtatggaatggcggcccgatcggc

SEQ ID NO: 85009 - DNA, 75 bp, synthetic construct
  source 1..75: mol_type = other DNA
ggcagatattgtattaagtgcgcaggattctgatgtcattaaaacctatgttgctcttgggctggggatcggatt

SEQ ID NO: 85010 - DNA, 75 bp, synthetic construct
  source 1..75: mol_type = other DNA
acgcaggcgcagcgtgcggaagaggcccgcacctcttcgctatcttcttctgacagttcccgccctctctcagcc

SEQ ID NO: 85011 - DNA, 75 bp, synthetic construct
  source 1..75: mol_type = other DNA
aagcatccctagcgaatggagcttcacttgagaaacaactggaggctattgatgaaaaactgacactcacgtcca

SEQ ID NO: 85012 - DNA, 75 bp, synthetic construct
  source 1..75: mol_type = other DNA
gttgcacgacatttggacgatggattaacacttgaagtaaatcgcacatgtaccacaggagaacgcaacgctaac

SEQ ID NO: 85013 - DNA, 75 bp, synthetic construct
  source 1..75: mol_type = other DNA
ttgatgaacgccacggcctggactggttgcagaactacgtgcagaccaacctttacaacctgctgtacacctcga

SEQ ID NO: 85014 - DNA, 75 bp, synthetic construct
  source 1..75: mol_type = other DNA
ccggatgcagactggctgaaagtggctgcggcgatcgaatcctcttctgtaagccgtattctggcgattacgaca

SEQ ID NO: 85015 - DNA, 75 bp, synthetic construct
  source 1..75: mol_type = other DNA
gcggaaaaaaagttcttaacactgttcccggagcagaagcggattgtgaatttgcgttcccaggtgacgatggcg

SEQ ID NO: 85016 - DNA, 75 bp, synthetic construct
  source 1..75: mol_type = other DNA
gcggtaattgtgctgattctcggtaaaggttccccacgtcaggaaggtctaccctctctggaagagatgatgccg

SEQ ID NO: 85017 - DNA, 75 bp, synthetic construct
  source 1..75: mol_type = other DNA
ggtgccgtcgatttacgtgtcactaacgccatgtttcgcaataacatcgctaatgatggcaaaggtggcgcaatt

SEQ ID NO: 85018 - DNA, 75 bp, synthetic construct
  source 1..75: mol_type = other DNA
gcatccgattgatggcctgtctggtgaatatgcggagaaatcccttgaagaatgggcggaacagattcgcaaagg

SEQ ID NO: 85019 - DNA, 75 bp, synthetic construct
  source 1..75: mol_type = other DNA
tgagtcgatttttaaaagtgcagcagtgcacaacgcgggcggaaattcgtgggcgctgttaggttcgactttctc

SEQ ID NO: 85020 - DNA, 75 bp, synthetic construct
  source 1..75: mol_type = other DNA
ctgggttatctggcgtgatgaagaagcgctgccgcaggaactggtgttcaacgttgactacctcggcggtcagat

SEQ ID NO: 85021 - DNA, 75 bp, synthetic construct
  source 1..75: mol_type = other DNA
acactgaaaaatataacgagtgggtgaaaaaattctctgaacagatttttaaaattactggcgacgagaatgtgg

SEQ ID NO: 85022 - DNA, 75 bp, synthetic construct
  source 1..75: mol_type = other DNA
accacgagatctgaaagtgaatgaaacaaatgctgaatatctggtgcgtaaatttgctgaagcggaggccaagat

SEQ ID NO: 85023 - DNA, 75 bp, synthetic construct
  source 1..75: mol_type = other DNA
agaaaattaaggaggttccgcaagcggctaacgtccaggcaccgcgtgagacaagcatcatcacgtttaataatt

SEQ ID NO: 85024 - DNA, 75 bp, synthetic construct
  source 1..75: mol_type = other DNA
acgccaggtgcttaaagaggacaacggcaatatttcgcaaaccgcaaaatctcctgcagagcgcaagagggcgca

SEQ ID NO: 85025 - DNA, 75 bp, synthetic construct
  source 1..75: mol_type = other DNA
tcgccgttgttctcgacctgttcgcaagaaaaccagtgggctgggccatgtcgttctcgccggacagcaggctca

SEQ ID NO: 85026 - DNA, 75 bp, synthetic construct
  source 1..75: mol_type = other DNA
ggatgtccattccttgtgggtttatggctggcgatgcgcaacgggttatctgccgcatcgatgaatgccggggat

SEQ ID NO: 85027 - DNA, 75 bp, synthetic construct
  source 1..75: mol_type = other DNA
gtccagttacttcgacaccgtacatcatcgactgctgatgaaggctgtacgccgcaggatcagtgacgcacgttt

SEQ ID NO: 85028 - DNA, 75 bp, synthetic construct
  source 1..75: mol_type = other DNA
tgtgctctctgtcgatatgaaaagcaaagtggatatggcgaacccggcgagctgtcagctttttgcgcaaaaatt

SEQ ID NO: 85029 - DNA, 75 bp, synthetic construct
  source 1..75: mol_type = other DNA
cgagacagcggcaaaacgggcagaggatattgcatccgccgtggcgcttgaggatgcgagcacgacgaaaaaggg

SEQ ID NO: 85030 - DNA, 75 bp, synthetic construct
  source 1..75: mol_type = other DNA
taaattcgcccgctactgggatgtggagttgcgtgagatccctatgcgccccggtcagttgtttatggacccgaa

SEQ ID NO: 85031 - DNA, 75 bp, synthetic construct
  source 1..75: mol_type = other DNA
aggggcagaggagaatgtattgtcatcattgttccagaacttttatcactctggatcatgtaaatacaacgccgc

SEQ ID NO: 85032 - DNA, 75 bp, synthetic construct
  source 1..75: mol_type = other DNA
atgagcgaaaaacatccagggcctttagtggtcgaaggtaaactggcagacgcggagcgcatgaagcttgagagc

SEQ ID NO: 85033 - DNA, 75 bp, synthetic construct
  source 1..75: mol_type = other DNA
tgtttgcggtgagtatcacctcgtccggcaatcccccgacgttttccctgacgccggaagggaagctgacagcca

SEQ ID NO: 85034 - DNA, 75 bp, synthetic construct
  source 1..75: mol_type = other DNA
gtgaagtggcgttactcactgcgctggaaactgccttatccctgtcctggcgagcatgaactggtttcagaagtg

SEQ ID NO: 85035 - DNA, 75 bp, synthetic construct
  source 1..75: mol_type = other DNA
ggggggcggtatatactcgattgggtaatatttcctgtgagataaaaattggtgagcaatggtttccttttactg

SEQ ID NO: 85036 - DNA, 75 bp, synthetic construct
  source 1..75: mol_type = other DNA
ggtaagcagtgctgcagaagtgtatatccgcaaaatggagcaggcaggaaaagccacgcattcgctgggtctgaa

SEQ ID NO: 85037 - DNA, 75 bp, synthetic construct
  source 1..75: mol_type = other DNA
aaaaatccattcagcttgccagccagctggcggaagaggaacgggctctgcgtcagcaacatgacctggatatcg

SEQ ID NO: 85038 - DNA, 75 bp, synthetic construct
  source 1..75: mol_type = other DNA
atataacaggtgcattattcgataaaaacacctcatggttagaaggttttgatcctatagctcatggggctatat

SEQ ID NO: 85039 - DNA, 75 bp, synthetic construct
  source 1..75: mol_type = other DNA
cgaggtatcggtgattgtctggatgaggccgagcaagagcttatcgttaccattaacaaatatgccagtcagttg

SEQ ID NO: 85040 - DNA, 75 bp, synthetic construct
  source 1..75: mol_type = other DNA
atgggcggaaaaccggcggcgcggcagggtgatatgacccgcaagggactggatattgtgcagggttcagcgggg

SEQ ID NO: 85041 - DNA, 75 bp, synthetic construct
  source 1..75: mol_type = other DNA
ccttcagaaaataaggctgggaaaatattaactcagccctttgctttaggtacaaaatattccgcttattgtgaa

SEQ ID NO: 85042 - DNA, 75 bp, synthetic construct
  source 1..75: mol_type = other DNA
gcgcgactggtggcagccgacaaaagcaaacttcttcggacacctgaaaaagccgcagattatcgcagccctgaa

SEQ ID NO: 85043 - DNA, 75 bp, synthetic construct
  source 1..75: mol_type = other DNA
tggacacgctggagagcgccatcggttttcacatgcgtgactggtggcagccgacaaaagcaaacttcttcggac

SEQ ID NO: 85044 - DNA, 75 bp, synthetic construct
  source 1..75: mol_type = other DNA
atgagtgaccaacccgttctgttcagcagagcggcggcttcttgccgcctgacattgaaccgtgaagataaatgt

SEQ ID NO: 85045 - DNA, 75 bp, synthetic construct
  source 1..75: mol_type = other DNA
gcatcgatgaccgagaacggtcatcgtcgggatatgcaccctgccgaacagattgccggattccgcgcaatggcg

SEQ ID NO: 85046 - DNA, 75 bp, synthetic construct
  source 1..75: mol_type = other DNA
taactttgtgaatcttagagggttgagacaaccggatggccgtcctctttatgaatatcatgcaaccaatgatga

SEQ ID NO: 85047 - DNA, 75 bp, synthetic construct
  source 1..75: mol_type = other DNA
ggatggatcattctatggcacgctttgcgccgccagcagtgagaagcgccagtggagtgaacgcgcggaacaggt

SEQ ID NO: 85048 - DNA, 75 bp, synthetic construct
  source 1..75: mol_type = other DNA
acacgccggttgaggtaaaggacaatcttaagtccacgcagatgatgagcgtgattgatgccattggtgaagggc

SEQ ID NO: 85049 - DNA, 75 bp, synthetic construct
  source 1..75: mol_type = other DNA
ggagcgcactcttcgccgcattctgcagcgccctgaaggcattatcacgctctcaggccccaccggctcaggaaa

SEQ ID NO: 85050 - DNA, 75 bp, synthetic construct
  source 1..75: mol_type = other DNA
atgcatacagtttctgaaaacaagtgcggtaaatacgcattactgctgcaacaggccagagccgaagcacaggcc

SEQ ID NO: 85051 - DNA, 75 bp, synthetic construct
  source 1..75: mol_type = other DNA
tgatacagcggtaccgtgaagcggaaatggccgtactggaggggaagtctgtcaccttcaacggacagcaactga

SEQ ID NO: 85052 - DNA, 75 bp, synthetic construct
  source 1..75: mol_type = other DNA
ccgcagtcagcatcgacaacgtgaaacctggtgtcactacagactggaaagaaaccgctgatggcgtctataagg

SEQ ID NO: 85053 - DNA, 75 bp, synthetic construct
  source 1..75: mol_type = other DNA
tggcaccgcgtggtgctgttcggcaagctcgcggaagtggcaggtgaatatctgcgcaagggtgcgcaggtctac

SEQ ID NO: 85054 - DNA, 75 bp, synthetic construct
  source 1..75: mol_type = other DNA
gcatcaatgactgaaaacggtcagcgtcgggatatgcaccctgccgaacagattgccggattccgcgcaatggcg

SEQ ID NO: 85055 - DNA, 75 bp, synthetic construct
  source 1..75: mol_type = other DNA
tccatcaatgacgcttatgtcgttgaagactatggcaagtgcgcgatgatcactggcctgaagttcgccgacagc

SEQ ID NO: 85056 - DNA, 75 bp, synthetic construct
  source 1..75: mol_type = other DNA
ccggtcagttgatcgcatcgcgtaagacgatcggcaacctgccttcgttcatcgcgcctttcttccctgatggca

SEQ ID NO: 85057 - DNA, 75 bp, synthetic construct
  source 1..75: mol_type = other DNA
gcaaagttagcgatgaggcagccttttgtcttattcaaaggccttacatttcaaaaactctgcttaccaggcgca

SEQ ID NO: 85058 - DNA, 75 bp, synthetic construct
  source 1..75: mol_type = other DNA
ctaatacaacctccacaacaggaagcttcacacaacagaatcgtaatgggatgttgcttccaggagagtcagatg

SEQ ID NO: 85059 - DNA, 75 bp, synthetic construct
  source 1..75: mol_type = other DNA
aagaagaaggtctggaattactgggggctacctattccggcatgacggatgtcatcaagggcacacaatttgatc

SEQ ID NO: 85060 - DNA, 75 bp, synthetic construct
  source 1..75: mol_type = other DNA
tacctcaaggttaatggtgaaagtgctgctggaagaagtacagcgtcttgctatcccaatgttgaccagtgcaac

SEQ ID NO: 85061 - DNA, 75 bp, synthetic construct
  source 1..75: mol_type = other DNA
cgatatcaggtacaactgagtcttcgccagaaataccagcaacagctggagcagttgaggcgggatagtgagcag

SEQ ID NO: 85062 - DNA, 75 bp, synthetic construct
  source 1..75: mol_type = other DNA
tgcggttccgtgtcagggagcgcagtcgccacaaatccgcactggtcatgcaaaagtacagccgccagcaggcga

SEQ ID NO: 85063 - DNA, 75 bp, synthetic construct
  source 1..75: mol_type = other DNA
aatggcgttgatatgcgcgacatacggatccgcgttcttgaaatgctggcctacaatcgccgtgtagagatgtac

SEQ ID NO: 85064 - DNA, 75 bp, synthetic construct
  source 1..75: mol_type = other DNA
tgtttatgctgcgcaccgtgccgtatcaggaactgcagtatcagcgcagctggcgacatgcggctaacagccggg

SEQ ID NO: 85065 - DNA, 75 bp, synthetic construct
  source 1..75: mol_type = other DNA
agcatcacgacgagctgcatgcggataccgtggcatttgaagagaagtatggctcccagctggagctgatatttc

SEQ ID NO: 85066 - DNA, 75 bp, synthetic construct
  source 1..75: mol_type = other DNA
cattactgttcaatgccaataaagcctatgaccggcaggtagtagaaggcgtaggggaatatttacaggcgtcac

SEQ ID NO: 85067 - DNA, 75 bp, synthetic construct
  source 1..75: mol_type = other DNA
cggaaggtcgggcagatctctacacggaaatgcctgtgaaggtcagtggctttaaacagccaatagatgatgcgg

SEQ ID NO: 85068 - DNA, 75 bp, synthetic construct
  source 1..75: mol_type = other DNA
cgccgtatggagctgatgaacaccattgccggaattgaacgctatgcggccagcgttggtgatgtgggaatgttt

SEQ ID NO: 85069 - DNA, 75 bp, synthetic construct
  source 1..75: mol_type = other DNA
gttgcgacgggtgcggttttattaatgcgaaccgggccacgctgaccacggggcagcctcagatgaaaaacggca

SEQ ID NO: 85070 - DNA, 75 bp, synthetic construct
  source 1..75: mol_type = other DNA
gtgtataaatacacggcacaatcgctccgccataagcgacagcttgtggcaggtctgaagaatacttcatataac

SEQ ID NO: 85071 - DNA, 75 bp, synthetic construct
  source 1..75: mol_type = other DNA
gggggctgaagctgccgacgctgcgccagcgcctgttccgctgtgtgagtatccgtgagaacgatgacggcacgt

SEQ ID NO: 85072 - DNA, 75 bp, synthetic construct
  source 1..75: mol_type = other DNA
attcgtgaaaaggaagaaacactgaaacaacgcgtgatccgcgcgctggcgggtttttcgggttacgggcgggtg

SEQ ID NO: 85073 - DNA, 75 bp, synthetic construct
  source 1..75: mol_type = other DNA
gttcaaaatcaaaatggttgaactctcgcatcgaccagagatctccgtagcgcaactcgctcgtgagcatgggat

SEQ ID NO: 85074 - DNA, 75 bp, synthetic construct
  source 1..75: mol_type = other DNA
cgccagagccaatcaacagtacactgaaaattcaacaggaaaaatcagcccggtcattgctgccattcatcgcga

SEQ ID NO: 85075 - DNA, 75 bp, synthetic construct
  source 1..75: mol_type = other DNA
ctacaaggtcgacgtatattccctgcgccaggccttgtgctgtatggcgaatatcttccgcaagcggtttgtgcc

SEQ ID NO: 85076 - DNA, 75 bp, synthetic construct
  source 1..75: mol_type = other DNA
cgtctgtgatatacgacgggcagaaattcacatatcctgttgctgatgagtggccggggtttactggtatatatg

SEQ ID NO: 85077 - DNA, 75 bp, synthetic construct
  source 1..75: mol_type = other DNA
cgtcaccgacactggcaagctgcgtaatatcgccatcgcccagggattcaccgacttcgtgcgcctgctgtcagg

SEQ ID NO: 85078 - DNA, 75 bp, synthetic construct
  source 1..75: mol_type = other DNA
gcatattaagtgcggcaatcgccactcgtactgagcggcgcagtggtctggcggcgttgtttagttcacgggaat

SEQ ID NO: 85079 - DNA, 75 bp, synthetic construct
  source 1..75: mol_type = other DNA
atcgttgtatttccaggatgaaatgacaatgaaaagctacccggttaacattatcgtcggttcccgctatgaccg

SEQ ID NO: 85080 - DNA, 75 bp, synthetic construct
  source 1..75: mol_type = other DNA
gccgtcagtcgcgaacgtcagacgggaatgcggatggtgcagtctgtgcttgagcgcatcggggaggcgaaatga

SEQ ID NO: 85081 - DNA, 75 bp, synthetic construct
  source 1..75: mol_type = other DNA
gacgatcagccgtttgaccggcagattgttattccggcggtggcattcagcggcgctaaacatgagagagagcat

SEQ ID NO: 85082 - DNA, 75 bp, synthetic construct
  source 1..75: mol_type = other DNA
ggacagaccgcaaatacaacctggatgtgtatagctatatttatgctgaacactatccgctctggattgactggt

SEQ ID NO: 85083 - DNA, 75 bp, synthetic construct
  source 1..75: mol_type = other DNA
ggttcagaccaagtggtttcagcgctggctgaacgtgttcaacattcagggcacgctctatcccgaactgattgc

SEQ ID NO: 85084 - DNA, 75 bp, synthetic construct
  source 1..75: mol_type = other DNA
cagggtccaactctgccgataatatagcgggcgtttattacagacccgttcaaaagtatataaatggcacctggt

SEQ ID NO: 85085 - DNA, 75 bp, synthetic construct
  source 1..75: mol_type = other DNA
ccgttttattgacttgtttgctgggatcggtggcctccggagtggttttgacgccattggcgggaaatgcgtgtt

SEQ ID NO: 85086 - DNA, 75 bp, synthetic construct
  source 1..75: mol_type = other DNA
attgcgatgagaacgagcaccgcttcaattcagacatccgtgacatcactcttagcaaccggcccgaggttactg

SEQ ID NO: 85087 - DNA, 75 bp, synthetic construct
  source 1..75: mol_type = other DNA
ttttatccatgcttatctgtaattgctatctgctgcctattaccatgggtaaacaatatcattaacgtatggcaa

SEQ ID NO: 85088 - DNA, 75 bp, synthetic construct
  source 1..75: mol_type = other DNA
gccaccggcccgaaggcctccccgcgccacgtcgagctggtcgacgcgttctgcgcccgcctcgatgccatcctg

SEQ ID NO: 85089 - DNA, 75 bp, synthetic construct
  source 1..75: mol_type = other DNA
agtgaaggtattactctggggcaaagaacaggagatacgagcgcattggtcgttgctccaggagttagtggagct

SEQ ID NO: 85090 - DNA, 75 bp, synthetic construct
  source 1..75: mol_type = other DNA
atccggaaggaaacattgactttacatcgttgtatttccaggatgaaatgacaatgaaaagctacccggttaaca

SEQ ID NO: 85091 - DNA, 75 bp, synthetic construct
  source 1..75: mol_type = other DNA
atcttgtttctatggcgatgatcgcctctggtattggtacctggttacaagtaaaccgctacggcatcgtcggtt

SEQ ID NO: 85092 - DNA, 75 bp, synthetic construct
  source 1..75: mol_type = other DNA
cctgttgagcacggctaacacatggagtgcacgccagactttcaacggcgggatcaccggggcgctgacagggaa

SEQ ID NO: 85093 - DNA, 75 bp, synthetic construct
  source 1..75: mol_type = other DNA
agtcgcatgctgccgaattaccttgagaatctgcaaaatccgctgtggctggtaactcaggaatatgaatcatga

SEQ ID NO: 85094 - DNA, 75 bp, synthetic construct
  source 1..75: mol_type = other DNA
gaaatcaataatcaggtgaatttcagcgaaagcctgtgtccatttactaattccggtatcttgtattcgccagag

SEQ ID NO: 85095 - DNA, 75 bp, synthetic construct
  source 1..75: mol_type = other DNA
atgaaaatcacccctgaacaggtttgtgaggctctggatgcctgggtatgtcgaccaggaatgacacaggagcaa

SEQ ID NO: 85096 - DNA, 75 bp, synthetic construct
  source 1..75: mol_type = other DNA
tattgctggcccaggtgacagtgatgtcactgacagtgattttccttgctgctgacaggcgttttttttcatggg

SEQ ID NO: 85097 - DNA, 75 bp, synthetic construct
  source 1..75: mol_type = other DNA
gcagaaattcaacactgcgctggaaaaagtgaagaaagatggcacttacgaaaccatctacaacaaatggttcca

SEQ ID NO: 85098 - DNA, 75 bp, synthetic construct
  source 1..75: mol_type = other DNA
atgcaggcgttacttttagaacagcaggacggcaaaactctcgcatcggtacagactctggacgaaagtcgcctg

SEQ ID NO: 85099 - DNA, 75 bp, synthetic construct
  source 1..75: mol_type = other DNA
cactcactgcggagtatcctgaggtttcgtccgcgcggggggagcagcgccgaactcgcgttactgacacggcag

SEQ ID NO: 85100 - DNA, 75 bp, synthetic construct
  source 1..75: mol_type = other DNA
gcatatttacaactatgtgaaaaatcagctttatttaaaagcatatccagtcgattaatagaaaaatcagcttac

SEQ ID NO: 85101 - DNA, 75 bp, synthetic construct
  source 1..75: mol_type = other DNA
agcaactggtacgcgagatgatggcgctgggcgacaaaatcgaactgcatacctttggtaagttctcgccgttca

SEQ ID NO: 85102 - DNA, 75 bp, synthetic construct
  source 1..75: mol_type = other DNA
ttactttgaaagagatcaaccggatcaagattatacaggacgtcattgaacgtcgcatcacaacgcgccgtgcgg

SEQ ID NO: 85103 - DNA, 75 bp, synthetic construct
  source 1..75: mol_type = other DNA
tcggtctgtcggaagaaacccggaaagacggtaagaaaattgattatccggcgcgtcctctgctcggctttaccg

SEQ ID NO: 85104 - DNA, 75 bp, synthetic construct
  source 1..75: mol_type = other DNA
tacgttttcaacaagaggcgctcaatctgcgcgcccagcgtcaggaagtgctggcagcaaacatcgccaatgccg

SEQ ID NO: 85105 - DNA, 75 bp, synthetic construct
  source 1..75: mol_type = other DNA
tacagctgcgcgataacacactgatactcagtgataacggcggcagaagcctgtattttgagcacctgtttcccg

SEQ ID NO: 85106 - DNA, 75 bp, synthetic construct
  source 1..75: mol_type = other DNA
ttccgggcttttaatcctgactttaaaatttttacagcacgtgacttacgtcggacctgtaaaacgttaatggga

SEQ ID NO: 85107 - DNA, 75 bp, synthetic construct
  source 1..75: mol_type = other DNA
actggttactgcgccatgttaaatcctgccagtggccacacggcgattatcaccacagtgaaaccgtcattcacc

SEQ ID NO: 85108 - DNA, 75 bp, synthetic construct
  source 1..75: mol_type = other DNA
cgcgcaaagaagccatcgttaaacagcgtggcggcagcgcctggcaaatcgtcagcgtagacagcacctatcagt

SEQ ID NO: 85109 - DNA, 75 bp, synthetic construct
  source 1..75: mol_type = other DNA
tggtgtctgacgggctgtctgtgacgctggatggtgcgctggataatacgtccggcagactgctttcacagaaaa

SEQ ID NO: 85110 - DNA, 75 bp, synthetic construct
  source 1..75: mol_type = other DNA
tggataaccggggcgggaccgtgggggcgaaaacgacagctgacctgagcaccacctcgctggataaccgtgagg

SEQ ID NO: 85111 - DNA, 75 bp, synthetic construct
  source 1..75: mol_type = other DNA
tgacttcaaccgaataatgagtgtccttcataatctgggatactttgtatgcgcaccggaagttaataaaataat

SEQ ID NO: 85112 - DNA, 75 bp, synthetic construct
  source 1..75: mol_type = other DNA
tggatgcggataaaaagcagatacagtgcgtggtaagaccgctgcaaatcctgcgtgctgacgggacatgggaaa

SEQ ID NO: 85113 - DNA, 75 bp, synthetic construct
  source 1..75: mol_type = other DNA
gttgatgttgtgccgcaaaaaagccgactgcgattgtcgcttaatatgcagtttcatgaactggtcgatccgaaa

SEQ ID NO: 85114 - DNA, 75 bp, synthetic construct
  source 1..75: mol_type = other DNA
ttggaagtcagcgctggtaatgggaaagtcatagggcggcaatccagcgacggaaaagttggttggcgtgttgat

SEQ ID NO: 85115 - DNA, 75 bp, synthetic construct
  source 1..75: mol_type = other DNA
aagggaattcccagcctaaaattgaacaaatcctcaagccagagaaaaactgggaaactgctcgaaacaaggcat

SEQ ID NO: 85116 - DNA, 75 bp, synthetic construct
  source 1..75: mol_type = other DNA
aaaaaaggcattcgtgggtggagtcgtcgcgcggataaccgcagagcgttttctgctgttattgatgtcgctgta

SEQ ID NO: 85117 - DNA, 75 bp, synthetic construct
  source 1..75: mol_type = other DNA
tttatgcgttaagcacagccacattcgcattatggtggggcgtgcagggcagccgcaaggctggccgggttccgt

SEQ ID NO: 85118 - DNA, 75 bp, synthetic construct
  source 1..75: mol_type = other DNA
gcgcggtctgccgtccggagtcgttcctgccgttcgccagccgctggcagaggataaaacattactgccattttt

SEQ ID NO: 85119 - DNA, 75 bp, synthetic construct
  source 1..75: mol_type = other DNA
gcgcacaaaaaatattgcgctgccacttcacgtccaccagcaacaaaatccaccacagaaaaaaacggttgtcag

SEQ ID NO: 85120 - DNA, 75 bp, synthetic construct
  source 1..75: mol_type = other DNA
aacggggccagctttgagccgcagtcaggcaccctgaacagcgttatccctccggcagtgcagcacctcacggtg

SEQ ID NO: 85121 - DNA, 75 bp, synthetic construct
  source 1..75: mol_type = other DNA
gccagtggacgggcgagcaatgatgctgcgggctatctggaacttttccgggaaaagataggaaaaacgcatctg

SEQ ID NO: 85122 - DNA, 75 bp, synthetic construct
  source 1..75: mol_type = other DNA
tgttacatcctctttagctgttgccgagtatttccggaaaccacacaaagatgtactggcaaaaatttcacgtct

SEQ ID NO: 85123 - DNA, 75 bp, synthetic construct
  source 1..75: mol_type = other DNA
tgcgccagcacatccacaatgacgcgcattacgacagcctgatggcggttattcgtgaaaaggaagaaacactga

SEQ ID NO: 85124 - DNA, 75 bp, synthetic construct
  source 1..75: mol_type = other DNA
ggatgccattctggatgagctgctgggcgtaccagcggttcctgagccggaaggtatcgcgggtgacgggagtgc

SEQ ID NO: 85125 - DNA, 75 bp, synthetic construct
  source 1..75: mol_type = other DNA
caccccggaaggcctcgaccggaaattctacgaaatctgcgccctgtccgagctgaagaacgccctgcgctccgg

SEQ ID NO: 85126 - DNA, 75 bp, synthetic construct
  source 1..75: mol_type = other DNA
tagtaatcaaaaaattctccgcgctttatctttgtattattcgggtaacgaatcaacaggatttattaaagaaaa

SEQ ID NO: 85127 - DNA, 75 bp, synthetic construct
  source 1..75: mol_type = other DNA
gtcacaggggctgcgtcacacacccggtgacatcattgaaatctgtgataacgactatgccgggaccatgaccgg

SEQ ID NO: 85128 - DNA, 75 bp, synthetic construct
  source 1..75: mol_type = other DNA
aacggcggggcatttatggcacctgaaccggatgacgataatgacgagacatgggtactgttcaatgccatgaac

SEQ ID NO: 85129 - DNA, 75 bp, synthetic construct
  source 1..75: mol_type = other DNA
gagcgccaccattcagcagatacagcgcgtgcagaaggacacaaatgatgaccttgctgcactttacatgctgaa

SEQ ID NO: 85130 - DNA, 75 bp, synthetic construct
  source 1..75: mol_type = other DNA
cacccgaatggcaatatcggcaggacttgatcgtgaaggtgcgaaagaagcttacagcaatatttgtcgctttat

SEQ ID NO: 85131 - DNA, 75 bp, synthetic construct
  source 1..75: mol_type = other DNA
tggtgacgctgatgcgtcgctacgccgctggaattattcacctggatgcctgtggcgaaatgctgcctggctttg

SEQ ID NO: 85132 - DNA, 75 bp, synthetic construct
  source 1..75: mol_type = other DNA
gtgcagggattgaggatactgatggccagccactgagcaacatactgctgctggctgaccgtatcgcgatgataa

SEQ ID NO: 85133 - DNA, 75 bp, synthetic construct
  source 1..75: mol_type = other DNA
aagactcgtggccaactgacggacgcagcaccaatagggccggtcaccgtgcaagcgctgggatgcgacgcccgc

SEQ ID NO: 85134 - DNA, 75 bp, synthetic construct
  source 1..75: mol_type = other DNA
cgctgactaatttgagtggaaaggatgtagctggtcttctcacataccttggtttgggagaagccagattctctg

SEQ ID NO: 85135 - DNA, 75 bp, synthetic construct
  source 1..75: mol_type = other DNA
gcatcacaaccaggagcctctgttgcccgtattgcccgggaacacgatatcaatgataacctcctgttcaaatgg

SEQ ID NO: 85136 - DNA, 75 bp, synthetic construct
  source 1..75: mol_type = other DNA
tggtcttggtggatatatccaggacggcaaaacagccacaggtgcattacgttcctggtcagtagctttaagtaa

SEQ ID NO: 85137 - DNA, 75 bp, synthetic construct
  source 1..75: mol_type = other DNA
aacgtgattatcctctatcctttaaaatagccgttgttgagaaggttgaaaaaggcgagatgacttataaacagg

SEQ ID NO: 85138 - DNA, 75 bp, synthetic construct
  source 1..75: mol_type = other DNA
gtgcctgctgccgctgctgaccggttgcggaagttcgcggacagtttacgtacaagttccggcgataccactacc

SEQ ID NO: 85139 - DNA, 75 bp, synthetic construct
  source 1..75: mol_type = other DNA
cagtcagtggactgtccatgggagccggattaagccggggacggatttctggttttacgtgcgaagcgtcaacct

SEQ ID NO: 85140 - DNA, 75 bp, synthetic construct
  source 1..75: mol_type = other DNA
acaatatcaccctgaaaatcgaccctgccgtcgtgctggcaacccgcaagtatgtggatgataaggtactggagc

SEQ ID NO: 85141 - DNA, 75 bp, synthetic construct
  source 1..75: mol_type = other DNA
cggcgagctgttgattcgccagtatgaatttattcagtcttttttaggcggcgaaacagattttctgtaccagga

SEQ ID NO: 85142 - DNA, 75 bp, synthetic construct
  source 1..75: mol_type = other DNA
catcatgcctgtcgtacagagaattatgccatgacggtccattattatcggttgcgggattacgccctgcagcat

SEQ ID NO: 85143 - DNA, 75 bp, synthetic construct
  source 1..75: mol_type = other DNA
atggacggcgagctgaaaaatatgaagttcaatattaatcaactggcatccctttcaggcctgcaccgacagact

SEQ ID NO: 85144 - DNA, 75 bp, synthetic construct
  source 1..75: mol_type = other DNA
agatgttccggaatgcagaagaggccgctaaggcggtggtaaaggtgctgggtgatcgtaccatgcgcacctgta

SEQ ID NO: 85145 - DNA, 75 bp, synthetic construct
  source 1..75: mol_type = other DNA
tcacactcatccggcgttatggcgtcagtctcattcatctggatgccagcgctgaatgtctgccggacctgccca

SEQ ID NO: 85146 - DNA, 75 bp, synthetic construct
  source 1..75: mol_type = other DNA
tttatttttctcttattggtcaattgcatggtgctgatgtgaaaataaaagaaaacgaaagtgtgatgggatcta

SEQ ID NO: 85147 - DNA, 75 bp, synthetic construct
  source 1..75: mol_type = other DNA
attttcgtgaaacgctgaatacccgccgtgaaaagtcgtggcacaagaccactgtcggggaagtggtgaaggaaa

SEQ ID NO: 85148 - DNA, 75 bp, synthetic construct
  source 1..75: mol_type = other DNA
gatgacctcgggcaacccggtgaacccgctgctcggtgcaaaagtacagcccggcgagacggaccttgcgctgcc

SEQ ID NO: 85149 - DNA, 75 bp, synthetic construct
  source 1..75: mol_type = other DNA
ctggttgccactcccgtccctgatgagcagcgcatcagcttctggccgcaacattttggcctcattccacagtgg

SEQ ID NO: 85150 - DNA, 75 bp, synthetic construct
  source 1..75: mol_type = other DNA
accattaacgagaactgtgtcatcagagggaaactgtctgcaaaccagattgaaggcgatctcgttaaaacagtg

SEQ ID NO: 85151 - DNA, 75 bp, synthetic construct
  source 1..75: mol_type = other DNA
gcatcagcttctggccgcagcattttggcctcattccacagtgggtaaccctggacccccgtgtcttcggctgga

SEQ ID NO: 85152 - DNA, 75 bp, synthetic construct
  source 1..75: mol_type = other DNA
gttaatatgggtgataatattactccggatgaagcaaaatcaggtgtggagaaaaaggttaatttttctcttact

SEQ ID NO: 85153 - DNA, 75 bp, synthetic construct
  source 1..75: mol_type = other DNA
atgctatttagcgcagttactgttaatctcaataaaatcggttttaatttcactaccgatcaactctttttatta

SEQ ID NO: 85154 - DNA, 75 bp, synthetic construct
  source 1..75: mol_type = other DNA
atgatgcatcaggctatctggattttttcaaaggcgagatagggaaaacccatctggctcaggagctgtggacgc

SEQ ID NO: 85155 - DNA, 75 bp, synthetic construct
  source 1..75: mol_type = other DNA
tttatagcttcggtcttgtgtgcttttggcatggcatcagacatcagtccgattagcagagcttttaagtatgcg

SEQ ID NO: 85156 - DNA, 75 bp, synthetic construct
  source 1..75: mol_type = other DNA
gttgcgtcattctcgctacaactggcagaaggtcgggcagatctctacacggaaataccagtgaaagtcagtggc

SEQ ID NO: 85157 - DNA, 75 bp, synthetic construct
  source 1..75: mol_type = other DNA
catcttcctgaaacgaaaaatggtttaccacgcgatgtcccactctcccggaaagctcgcaactacctgcaaatt

SEQ ID NO: 85158 - DNA, 75 bp, synthetic construct
  source 1..75: mol_type = other DNA
gcaacgccgaacgggcagcgaaaatgcagtgggaacgtctgcaacgcggcgttgcatcattctcgctacaactgg

SEQ ID NO: 85159 - DNA, 75 bp, synthetic construct
  source 1..75: mol_type = other DNA
ggtgggaaaatctgcttttgtggaagccagcgggcagcccagcaatgatggtgaagggtatctggaaattttccg

SEQ ID NO: 85160 - DNA, 75 bp, synthetic construct
  source 1..75: mol_type = other DNA
tggtttttgttgacggacaaatcagtgagagtgctggcgttctggcacttacgcaacaacgtctttctccaccta

SEQ ID NO: 85161 - DNA, 75 bp, synthetic construct
  source 1..75: mol_type = other DNA
cgttatgagtacagcgccgcaggcgacctgacagcaacggtatcaccggacggtaaacgcagcaccatcgaatat

SEQ ID NO: 85162 - DNA, 75 bp, synthetic construct
  source 1..75: mol_type = other DNA
actggtatcccacagcaagtatcagcgatttgctggttgtggtgatgaagaaagccactgcaggcatcacgatta

SEQ ID NO: 85163 - DNA, 75 bp, synthetic construct
  source 1..75: mol_type = other DNA
cggaaatatttgtcttgcaggtgctgtggtggaagttattggcactcgcggcgcaatgaccatacgcgttactac

SEQ ID NO: 85164 - DNA, 75 bp, synthetic construct
  source 1..75: mol_type = other DNA
ctggcgcatcttgccggcgggcaggtgtacccgtatgtggtccccctgctggatggcaggccgtcggtggcgctt

SEQ ID NO: 85165 - DNA, 75 bp, synthetic construct
  source 1..75: mol_type = other DNA
ctgtaccaggcaggagaactggacttggtggagaccaaaaagattggtcagaagctggcggcggcaggcgtacag

SEQ ID NO: 85166 - DNA, 75 bp, synthetic construct
  source 1..75: mol_type = other DNA
tacactggatgtggcttacgaaggttccggctctggcgactggcgcacgagtggcgttactgctggcattggcct

SEQ ID NO: 85167 - DNA, 75 bp, synthetic construct
  source 1..75: mol_type = other DNA
acccaccgggtaaaaagggcgacataattttcagcgtgctggtaaaactggcggcgctgattgtgctattgatgt

SEQ ID NO: 85168 - DNA, 75 bp, synthetic construct
  source 1..75: mol_type = other DNA
ggctttcagcggtgccagacatgaacgggagaatagcgatacttattcgtcatgccgcctgatagtgaagaaaaa

SEQ ID NO: 85169 - DNA, 75 bp, synthetic construct
  source 1..75: mol_type = other DNA
caccttcgccgatactgctgcgggtggattagcccccgtagaactgactgcccagaccactgcgattgaaagcat

SEQ ID NO: 85170 - DNA, 75 bp, synthetic construct
  source 1..75: mol_type = other DNA
cgcgctttcgactatatgtgacggagcaatgatgaggatgaaagtcctccatgaagcatacggaaaaagtcacga

SEQ ID NO: 85171 - DNA, 75 bp, synthetic construct
  source 1..75: mol_type = other DNA
cacagtgggctgcgattggtgtgctgggaagtctgcttctggggcttctgacttatctgacgaatctgtatttca

SEQ ID NO: 85172 - DNA, 75 bp, synthetic construct
  source 1..75: mol_type = other DNA
gggaatacaccctgacggtcagggcgataaacagctacggccagcagggcgaacctgccaccaccacattccgga

SEQ ID NO: 85173 - DNA, 75 bp, synthetic construct
  source 1..75: mol_type = other DNA
gatgggcaggctgaatccagaattaccgtgcagatcgatgtctgggcgacagtacctgatgacgcagataatatt

SEQ ID NO: 85174 - DNA, 75 bp, synthetic construct
  source 1..75: mol_type = other DNA
aagccacgtcgaacagtattcaatcgacgagctttttgttgactgcaaagggataacggccgccatgagccttga

SEQ ID NO: 85175 - DNA, 75 bp, synthetic construct
  source 1..75: mol_type = other DNA
gaaccggccaccaccacgttccggattaacgcaccggcagcgcctgccggtgttgaactgacgccggggtatttt

SEQ ID NO: 85176 - DNA, 75 bp, synthetic construct
  source 1..75: mol_type = other DNA
ggaactgcaccgggttttatgaccacagggatacagatcacaacgatgaaggcgtcagcttcaggatttgtggaa

SEQ ID NO: 85177 - DNA, 75 bp, synthetic construct
  source 1..75: mol_type = other DNA
atcgacagctggtccagtatggtgtttttgaagttcaacggcgcgaaattctctgccactgattaccctgtgctg

SEQ ID NO: 85178 - DNA, 75 bp, synthetic construct
  source 1..75: mol_type = other DNA
ctcagactctggcaaaacgaagggcgtatatcacggcgtcttccggtgacaaccacttctgacgcaggccttgaa

SEQ ID NO: 85179 - DNA, 75 bp, synthetic construct
  source 1..75: mol_type = other DNA
acgctggatacactgaaagaaattgccgcagccattaacaatgacccgaaattcagcaccaccattaacaatgcg

SEQ ID NO: 85180 - DNA, 75 bp, synthetic construct
  source 1..75: mol_type = other DNA
cgcacctacagcagctaccggacgaagacgcctgcaccggtggggatttttggccccggctggaaagcgccttct

SEQ ID NO: 85181 - DNA, 75 bp, synthetic construct
  source 1..75: mol_type = other DNA
agtgcaggatattcccggtgtgctggctgtatttgcagaacgccgtaaggacagttttggcccgtatgtccgcct

SEQ ID NO: 85182 - DNA, 75 bp, synthetic construct
  source 1..75: mol_type = other DNA
acaagaaatcttatcttcaacacctggcgtattctggaaacctagaaaaagaaaagagtatatcgttgatagctc

SEQ ID NO: 85183 - DNA, 75 bp, synthetic construct
  source 1..75: mol_type = other DNA
cggcagcgttttcccggcttaactggacaacgatgctcatcgtcgcttcagcgtatgcggtgattgctttcctct

SEQ ID NO: 85184 - DNA, 75 bp, synthetic construct
  source 1..75: mol_type = other DNA
tggaagccttgtgttgggttttctcacttatctgacaaacctttatttcaagattaaagaagataagcgtaaggc

SEQ ID NO: 85185 - DNA, 75 bp, synthetic construct
  source 1..75: mol_type = other DNA
atccgggaaaacacggacggcacctttgccatcacggcagtgcagcacgtaccggaaaaagaagccatcgtggat

SEQ ID NO: 85186 - DNA, 75 bp, synthetic construct
  source 1..75: mol_type = other DNA
acatccgcttaagactttctatctggcgattaccgccggtgttttcatctcaatcgcattcgtcttctatatcac

SEQ ID NO: 85187 - DNA, 75 bp, synthetic construct
  source 1..75: mol_type = other DNA
tggttttgaagttcgcaaaaacggcgtattaatcgcatccagagaaactaaaggggccattcccggtagttacag

SEQ ID NO: 85188 - DNA, 75 bp, synthetic construct
  source 1..75: mol_type = other DNA
gcctgctgaacggtaacgcctatgcggttattgagtgggggcgggacgggcagccaaaatcacttcatccttatg

SEQ ID NO: 85189 - DNA, 75 bp, synthetic construct
  source 1..75: mol_type = other DNA
cgtggtgtggggaataaggatcgtatggttgcgtacaccaacgataaaaaatatgtccgctacccgctggttccg

SEQ ID NO: 85190 - DNA, 75 bp, synthetic construct
  source 1..75: mol_type = other DNA
tcaaaaaactgaccgaacagtataacgtgacctatatcggcatcgactcgaccggcgtcggtcacggggtttacg

SEQ ID NO: 85191 - DNA, 75 bp, synthetic construct
  source 1..75: mol_type = other DNA
ggccagccaggattcggcgcgctggggtgtgggtaaaccgttatatcaggacctgattgcgcgcactaaagctgc

SEQ ID NO: 85192 - DNA, 75 bp, synthetic construct
  source 1..75: mol_type = other DNA
gcatccgcaacctgctgaagtcacgccagatcggcgcgaccttttactttgcccgtgaagccctgattgacgctc

SEQ ID NO: 85193 - DNA, 75 bp, synthetic construct
  source 1..75: mol_type = other DNA
gctcccggaatgctggctgaaacggacgagtacatggccggaggtaaacgaccggcccgtgtttacagggtggtg

SEQ ID NO: 85194 - DNA, 75 bp, synthetic construct
  source 1..75: mol_type = other DNA
cggtgtatgacccgacggtacagtttgagttctggttttcggaggcaaaaatcgcagacacatctcaggtggaaa

SEQ ID NO: 85195 - DNA, 75 bp, synthetic construct
  source 1..75: mol_type = other DNA
gacttccgcgcccaggctgatgcaatcaaaaaactgaccgagcagtacaacgtgacctatatcggcatcgactcg

SEQ ID NO: 85196 - DNA, 75 bp, synthetic construct
  source 1..75: mol_type = other DNA
tgcgccattttaaatcctgccagtggccacacggcgattatcaccacagtgaaaccgtcattcaccgttatggta

SEQ ID NO: 85197 - DNA, 75 bp, synthetic construct
  source 1..75: mol_type = other DNA
cggtgccggaactcgggctggtggtccttaagccgggccgtgaatccatgcaggtatttcataaccctcgagtgc

SEQ ID NO: 85198 - DNA, 75 bp, synthetic construct
  source 1..75: mol_type = other DNA
tgaaaagtttgaatgatttagtgcgactggcgaaggcgctggacgtcgattttcctttttctgcttacgccgcca

SEQ ID NO: 85199 - DNA, 75 bp, synthetic construct
  source 1..75: mol_type = other DNA
ctgccagtggcctcatggtgactatcatcacagtgaaaccgtcattcaccgttacggtaccggcgcgatggtgtt

SEQ ID NO: 85200 - DNA, 75 bp, synthetic construct
  source 1..75: mol_type = other DNA
caagttcgccgtctggaggaacaaaatacgatattaaaaaaggctgttgtagattcaatcgtaagcgtacagcga

SEQ ID NO: 85201 - DNA, 75 bp, synthetic construct
  source 1..75: mol_type = other DNA
ttattgcgatattggtggatcaaataggcgtgttaacgaaaacgcatcgttgaaaaaaatggttatggggatgcg

SEQ ID NO: 85202 - DNA, 75 bp, synthetic construct
  source 1..75: mol_type = other DNA
cggtactacgatccgttgcaggggcggtatatcactcaggacccgatagggctggagggggggatggagtctgta

SEQ ID NO: 85203 - DNA, 75 bp, synthetic construct
  source 1..75: mol_type = other DNA
ccggaatatctcagcgcccttaactctgcctggctgaatgagtcagccacgctgttccgccgcaagtattacgaa

SEQ ID NO: 85204 - DNA, 75 bp, synthetic construct
  source 1..75: mol_type = other DNA
aggcgagatagggaaaacccatctggctcaggagctgtggacgcagattgataacggtcagcttgcgcctgacct

SEQ ID NO: 85205 - DNA, 75 bp, synthetic construct
  source 1..75: mol_type = other DNA
tatgtctcgcatgtcagccgattcaaaaatgatgcgtagttggctgactgctgtggatgaaataacaattgagcg

SEQ ID NO: 85206 - DNA, 75 bp, synthetic construct
  source 1..75: mol_type = other DNA
atgggaaagagtaaaaaaaaccgcgtagcggcgatgaatcagatccagcataaaagccagagttcagccgaagca

SEQ ID NO: 85207 - DNA, 75 bp, synthetic construct
  source 1..75: mol_type = other DNA
acgccaccagaaactgaaggagatgagtgaaggcattgtgtcgatgtttcgtgtggacccggatctggctggtcc

SEQ ID NO: 85208 - DNA, 75 bp, synthetic construct
  source 1..75: mol_type = other DNA
actgttgatattgaaaaacttcactgtcctggtgaggtgcttcaatgtccaattacactggagcagcctgaaaaa

SEQ ID NO: 85209 - DNA, 75 bp, synthetic construct
  source 1..75: mol_type = other DNA
cagcttactggacaatgtgacgctttatgacagttttgtgccggttgaatttggtcgcttcaatggcggggtaat

SEQ ID NO: 85210 - DNA, 75 bp, synthetic construct
  source 1..75: mol_type = other DNA
gaatgtagagctggacgcagaagacgcagggcttaggctaaggaaggcggaggcgcttgcccggacgttactggg

SEQ ID NO: 85211 - DNA, 75 bp, synthetic construct
  source 1..75: mol_type = other DNA
gaatggcattatcccggagcaggacagggtaatcacgcaggtggtgatactggatgcggataaaaagcagataca

SEQ ID NO: 85212 - DNA, 75 bp, synthetic construct
  source 1..75: mol_type = other DNA
atatggtgtcttcgctgttattaggcgctgcgctaatttctgcgccgctccaggcagcggaaaaagtcgtggtga

SEQ ID NO: 85213 - DNA, 75 bp, synthetic construct
  source 1..75: mol_type = other DNA
gttcaacgttatgctcctgaaatagaaaaacgtttacgctggtattggcgtaatcctacagatctgagctcgtgg

SEQ ID NO: 85214 - DNA, 75 bp, synthetic construct
  source 1..75: mol_type = other DNA
gtttatgtactcacctaacggcaaaaaggacgggcttcagattatcccgttatcagaagtcgcagcgaaggatga

SEQ ID NO: 85215 - DNA, 75 bp, synthetic construct
  source 1..75: mol_type = other DNA
gggaattatctctggctgaattatcctggtgggcggtccgcaatcaggtggcggacgcgctaccggaagcggtat

SEQ ID NO: 85216 - DNA, 75 bp, synthetic construct
  source 1..75: mol_type = other DNA
actgtcgggttctgggaaaattgtccgcgaaccagattgaaggcgatctcgttaaaacagtgggcaaagctttcc

SEQ ID NO: 85217 - DNA, 75 bp, synthetic construct
  source 1..75: mol_type = other DNA
gtgagtgataaccatttgttcgcacttcctgaattacctgcgtcactagaatatattaatgtaagtgacaatcac

SEQ ID NO: 85218 - DNA, 75 bp, synthetic construct
  source 1..75: mol_type = other DNA
actgtacgattaagggcatgctggaggcgacccaggtcagaggagatttcgttaaagctgtatcaaaagccttcc

SEQ ID NO: 85219 - DNA, 75 bp, synthetic construct
  source 1..75: mol_type = other DNA
ctggcacttgggatttatcctgaaatcacactagcggatgccagagtacgtcgcgacgaagcacgtaagctgctt

SEQ ID NO: 85220 - DNA, 75 bp, synthetic construct
  source 1..75: mol_type = other DNA
tatgcctaataatgttggagggtttggggatgtggagaaggcgagtaatgtttttgtaagaaatgaactaacatc

SEQ ID NO: 85221 - DNA, 75 bp, synthetic construct
  source 1..75: mol_type = other DNA
acagaacatacagtccttcagatgttggagtcggtgaaagcaggagtatttctgagctttcactaatcaaaggga

SEQ ID NO: 85222 - DNA, 75 bp, synthetic construct
  source 1..75: mol_type = other DNA
aaaacgccgccctgctgatggggatgaaatccgcctttcagctttcaaacgataaggtcgctcatatcggggatg

SEQ ID NO: 85223 - DNA, 75 bp, synthetic construct
  source 1..75: mol_type = other DNA
aaaacatatggggagcaattgactgaaaaaacctttgagccagtagcaacaacaagaaaactaagttatgaagaa

SEQ ID NO: 85224 - DNA, 75 bp, synthetic construct
  source 1..75: mol_type = other DNA
gcaacgtatccgcgaactggaaaagcaggttcgccgcctggaggaacacaatacgatattaaaaaaggctaccgc

SEQ ID NO: 85225 - DNA, 75 bp, synthetic construct
  source 1..75: mol_type = other DNA
tgtaaggataatagtggcagatatttctcaacagcacctaaccgaggagaaagaaaaggatcatatccattcaat

SEQ ID NO: 85226 - DNA, 75 bp, synthetic construct
  source 1..75: mol_type = other DNA
cctgctgcgtcagctcgaaatccctgagcgctttgtgacgtgcacgctggaaaactatcagccggttggcaagga

SEQ ID NO: 85227 - DNA, 75 bp, synthetic construct
  source 1..75: mol_type = other DNA
cccgctatcttgaaagtggcgcaattgactgtgaggttttatttgaagggatggaggctcccattccctatacag

SEQ ID NO: 85228 - DNA, 75 bp, synthetic construct
  source 1..75: mol_type = other DNA
cgtaatgagttaagcacaatggcagaaatcagaaaggaaattgatcctgaacgttttctttctgcgactgctcgt

SEQ ID NO: 85229 - DNA, 75 bp, synthetic construct
  source 1..75: mol_type = other DNA
atctgaaagaaatctgggattatctgacccatgatgaacaggaactgtttgaagtcattaataaaaagttactgg

SEQ ID NO: 85230 - DNA, 75 bp, synthetic construct
  source 1..75: mol_type = other DNA
gcttggcggtacgggtaaatctggtggtgaccgtcacccgaaaattcgtgaaggtgtgatgattggcgcgggcgc

SEQ ID NO: 85231 - DNA, 75 bp, synthetic construct
  source 1..75: mol_type = other DNA
gccgtgctaaaaaaatcagtctgacatctgaaggtatgttttttattcagaggctcactcttgcacaaagcatgt

SEQ ID NO: 85232 - DNA, 75 bp, synthetic construct
  source 1..75: mol_type = other DNA
accagacggtgccggatggtttcgggggcacagagccgcggatgacctttaatgcgtacctgtcacaacagcgta

SEQ ID NO: 85233 - DNA, 75 bp, synthetic construct
  source 1..75: mol_type = other DNA
agcagcctaatcaagctgccgtcgccgccgactcgttgtccgggctgccttcgcgatgagctgagcttcctgtat

SEQ ID NO: 85234 - DNA, 75 bp, synthetic construct
  source 1..75: mol_type = other DNA
ctcttgaacgactggatgatatgtatgctgcgggacgtagttttatcaaccagtatcataaagactggaatgagg

SEQ ID NO: 85235 - DNA, 75 bp, synthetic construct
  source 1..75: mol_type = other DNA
cgaactgctgctgtttaagcagatgggcaaatccacggtggatggcatccagttgcgctttaccggctctatcca

SEQ ID NO: 85236 - DNA, 75 bp, synthetic construct
  source 1..75: mol_type = other DNA
ggcaaagccactgtggatggcatccagttgcgctttaccggctctatccagcgtgacgataccggagaagtgcag

SEQ ID NO: 85237 - DNA, 75 bp, synthetic construct
  source 1..75: mol_type = other DNA
gggcatgttgagcattgccgccccggctcgcgacctcaagctcgccaccattgagcttgaacatagtcatcctct

SEQ ID NO: 85238 - DNA, 75 bp, synthetic construct
  source 1..75: mol_type = other DNA
aaaagccgggatatcagtcggacagtataaggctgccatgcgcacactgcccgcacagttcacggatattgtcac

SEQ ID NO: 85239 - DNA, 75 bp, synthetic construct
  source 1..75: mol_type = other DNA
gggtaaacgaaaacgcatcgcttgaaaaaatggttatggggatgcgtgtaaagtcagatcagtctacgtgctcag

SEQ ID NO: 85240 - DNA, 75 bp, synthetic construct
  source 1..75: mol_type = other DNA
tcaggtaaacgttaaagcgggctatgctcgtaacttcctggtaccgcagggtaaagctgttccagctaccaagaa

SEQ ID NO: 85241 - DNA, 75 bp, synthetic construct
  source 1..75: mol_type = other DNA
attttacagcgagagcaagtcgggatagcttcttgaaatcattaacattaaccagcttatcaggacaatccaacg

SEQ ID NO: 85242 - DNA, 75 bp, synthetic construct
  source 1..75: mol_type = other DNA
ccttttacggttctttgtgaggtacataagaactggtataaaacgccaaatgcagcgccacgtgtttttgatacc

SEQ ID NO: 85243 - DNA, 75 bp, synthetic construct
  source 1..75: mol_type = other DNA
gaatctttcatgaaacgacctaaacgtcgccgctgggttaacgagaaatacacacgctgggtgaagacacagccg

SEQ ID NO: 85244 - DNA, 75 bp, synthetic construct
  source 1..75: mol_type = other DNA
gctggtggtgctggtgcactgtctgactggctgttacgccacattaaatcctgccagtggcctcatggtgactac

SEQ ID NO: 85245 - DNA, 75 bp, synthetic construct
  source 1..75: mol_type = other DNA
ccagaaatcgattatagtgaaaggcgaagttactggagagggtggtttggttttgatcggaaggagaatcctaaa

SEQ ID NO: 85246 - DNA, 75 bp, synthetic construct
  source 1..75: mol_type = other DNA
tccaaatcctccaaaggcgtgttacgtggtctgcactaccagctggcgccgcatgcgcagggcaaactggtgcgt

SEQ ID NO: 85247 - DNA, 75 bp, synthetic construct
  source 1..75: mol_type = other DNA
tgcgtggtggtggcgccgccagccgtgccgggcggtaagttccgcattcttgagcgtcaccagtggcgcggaatg

SEQ ID NO: 85248 - DNA, 75 bp, synthetic construct
  source 1..75: mol_type = other DNA
ggcagcagtcgcgacaaacaaattttcagcgggcataaaacagaaaatcaggtgttgatttacgatcgtaaaaca

SEQ ID NO: 85249 - DNA, 75 bp, synthetic construct
  source 1..75: mol_type = other DNA
ccggcagcatcacaaccgctggcggatgatcctgccgttcgggccgtgttccgccatgaggcggtgatccgtcgt

SEQ ID NO: 85250 - DNA, 75 bp, synthetic construct
  source 1..75: mol_type = other DNA
caggttcgccgcctggaggaacacaatacgatattaaaaaaggctacaaccgcgctcttgatgtccgactcgctg

SEQ ID NO: 85251 - DNA, 75 bp, synthetic construct
  source 1..75: mol_type = other DNA
atgaacaagaaaaccaaacgaaccttcacccctgagttcaggctggaatgtgcacagctgattgttgataagggc

SEQ ID NO: 85252 - DNA, 75 bp, synthetic construct
  source 1..75: mol_type = other DNA
gggaattccgccactatgggcgctctgttatttggaggcgctacggctgctgctggcgtgatggctgttagtaaa

SEQ ID NO: 85253 - DNA, 75 bp, synthetic construct
  source 1..75: mol_type = other DNA
gtttatcggcgcgatggcgggactggtactctcctcgacgctgctcggtcagttgttgttttttgaaattacggg

SEQ ID NO: 85254 - DNA, 75 bp, synthetic construct
  source 1..75: mol_type = other DNA
cctggtcattgatcgcgtgagtacgctgattctgtttgtggtggtgtttctcggtttgctggtcacgatctactc

SEQ ID NO: 85255 - DNA, 75 bp, synthetic construct
  source 1..75: mol_type = other DNA
gcgtttcacggcggtaatcagggcggtggtgctggcgaccaacaataacccgatgatattcaccgaacgggccgg

SEQ ID NO: 85256 - DNA, 75 bp, synthetic construct
  source 1..75: mol_type = other DNA
gaagggaaaagtgaggtggaagacggtgtttacgatcagttaagcgcccgtctcacgcagtggcaacgctgtttt

SEQ ID NO: 85257 - DNA, 75 bp, synthetic construct
  source 1..75: mol_type = other DNA
tttggctcgtgtcgctgactttcttgagagagaaatgcatataaccaattctgttggttataatgtttatgtgaa

SEQ ID NO: 85258 - DNA, 75 bp, synthetic construct
  source 1..75: mol_type = other DNA
gtgatcgatgccatcagtgaagggccggttgaaggtccggtggatggattaaaaagcgtgctgctgaacagtacg

SEQ ID NO: 85259 - DNA, 75 bp, synthetic construct
  source 1..75: mol_type = other DNA
gaagaccttgttcaggcctgtctcgaagaaaatcagccactcgacctggcaagtatctatcttgagcaccggcta

SEQ ID NO: 85260 - DNA, 75 bp, synthetic construct
  source 1..75: mol_type = other DNA
gcatggtggttatcgcggtgcgggtgctgggcctacggcaggtaggtatcagtgaagaaacacaaaatgacagct

SEQ ID NO: 85261 - DNA, 75 bp, synthetic construct
  source 1..75: mol_type = other DNA
catggtgaaagagttcggcttgatggtgtttatggcaggcgttggtctgagcgccggtagcggtattaataacgg

SEQ ID NO: 85262 - DNA, 75 bp, synthetic construct
  source 1..75: mol_type = other DNA
ctgaatgcgctgacgctgacggatattaccaaaaatgcagcgtatggcgttgagatagaaagtctggtgctggag

SEQ ID NO: 85263 - DNA, 75 bp, synthetic construct
  source 1..75: mol_type = other DNA
gtgaaatcacgctgccagcctccggcaccacgctgataagcctggttgacgggcaggggagtccggtcagcgtgg

SEQ ID NO: 85264 - DNA, 75 bp, synthetic construct
  source 1..75: mol_type = other DNA
tgcgcttcagtctgcgcctgaccagcggaagcggagaagacagccgtctggtgaccaccgccatcactgcggata

SEQ ID NO: 85265 - DNA, 75 bp, synthetic construct
  source 1..75: mol_type = other DNA
agcgataacccagcgcactatgcggatgccattcgttataatgctcgaacgcctctgcaaggttctttgctgccg

SEQ ID NO: 85266 - DNA, 75 bp, synthetic construct
  source 1..75: mol_type = other DNA
atgaatgaagtgttcctgaaatatctgacggctcccaccattaccagcggcggtaatcctccggcattttccctg

SEQ ID NO: 85267 - DNA, 75 bp, synthetic construct
  source 1..75: mol_type = other DNA
caacattttcttttacttctgttcctttccgaaatggtagtggtgtactgaatagtggggaatttcaggcgacag

SEQ ID NO: 85268 - DNA, 75 bp, synthetic construct
  source 1..75: mol_type = other DNA
gctggcggcgattggtggcggggatatccgtctcaatcagatggtgaacttcctgcaatcgcaatttaataagcc

SEQ ID NO: 85269 - DNA, 75 bp, synthetic construct
  source 1..75: mol_type = other DNA
ttgaaaccacagcccgctatcttggcacggcgctgtactggatagctgccagtatcaatatcaggccgggccatg

SEQ ID NO: 85270 - DNA, 75 bp, synthetic construct
  source 1..75: mol_type = other DNA
gaaagcgacatcgtaccgggagagcagaccgccaccagcatactgaaacagcgcacaaaaaatcttgcaccgttg

SEQ ID NO: 85271 - DNA, 75 bp, synthetic construct
  source 1..75: mol_type = other DNA
caacccttttgatcttttacttcctgcagcaatggccaaagtggccgaagaggcaggtgtctataaagcaacgaa

SEQ ID NO: 85272 - DNA, 75 bp, synthetic construct
  source 1..75: mol_type = other DNA
cagaggaaggtgagtttgaaaccgtgatgctgtctccccgttcagagcagacagtaaaatcggcaaattataata

SEQ ID NO: 85273 - DNA, 75 bp, synthetic construct
  source 1..75: mol_type = other DNA
gtccctggcgtgaccatgtcctgaatgtcgtcggcgtcccggtgccggatacgaccggcgggcgtctggaaattc

SEQ ID NO: 85274 - DNA, 75 bp, synthetic construct
  source 1..75: mol_type = other DNA
cagccgcgcggaaaaccaccgcgaaagctttgagacttgcccggaatgtaagcgccagaaatgcctggtgccgtc

SEQ ID NO: 85275 - DNA, 75 bp, synthetic construct
  source 1..75: mol_type = other DNA
tggtgcctgaactcgggctggtggtacttaagccaggccgtgaatccatgccggtatttcacaatacccgtgtgc

SEQ ID NO: 85276 - DNA, 75 bp, synthetic construct
  source 1..75: mol_type = other DNA
ggaccacagactgaccgggttgccgactaggaaaggatgcagcatctcttcagtggcaaccccattcccgacaac

SEQ ID NO: 85277 - DNA, 75 bp, synthetic construct
  source 1..75: mol_type = other DNA
gaaaatatgtagtgctgtctgtaagcactaatattcagtcgccagccgtcattgtcactgtaaagctgagcgata

SEQ ID NO: 85278 - DNA, 75 bp, synthetic construct
  source 1..75: mol_type = other DNA
tcgttggtcagagatcgatttcgaagcgtctatatggactatcccaccggagcgggagcctattcctggagtgaa

SEQ ID NO: 85279 - DNA, 75 bp, synthetic construct
  source 1..75: mol_type = other DNA
attgactatttgatggttatgtctggtgctacacgtaatacagttattgattcacttaagagacttgagtcacac

SEQ ID NO: 85280 - DNA, 75 bp, synthetic construct
  source 1..75: mol_type = other DNA
gaaagcgacatcataccgggagagcagacagccaccagcatactgaagcagcgcacaaaaaatattgtgctaccg

SEQ ID NO: 85281 - DNA, 75 bp, synthetic construct
  source 1..75: mol_type = other DNA
ttttgaagttcgcaaaaacggcgtattaatcgcatccagagaaactaaaggggccattcccggtagttacagtgc

SEQ ID NO: 85282 - DNA, 75 bp, synthetic construct
  source 1..75: mol_type = other DNA
acacaaaaccgatgtttgttggtcagggcgatcagatattcatgaacgacgtgttcctgaaacgcctgacggccc

SEQ ID NO: 85283 - DNA, 75 bp, synthetic construct
  source 1..75: mol_type = other DNA
aataacagttggggcagttcacgaatcagtaaccttcaggcgatagtggtgaagaaaaacagcgcggggatcagc

SEQ ID NO: 85284 - DNA, 75 bp, synthetic construct
  source 1..75: mol_type = other DNA
gaaaagcatggttctcaggttgatttaatttttcgttttcttgatcacgcctttgcaactggcgtgcttgggtaa

SEQ ID NO: 85285 - DNA, 75 bp, synthetic construct
  source 1..75: mol_type = other DNA
cagggggcaggcaatatcaccgactgtacggtgattgtgaccaaaaaagccgcttccggcatcagtattcgttga

SEQ ID NO: 85286 - DNA, 75 bp, synthetic construct
  source 1..75: mol_type = other DNA
ttcgcttgccagaagttatgaacagaaccggctatggcaaggcctggatttatcgtctaatcaacgaaggtttat

SEQ ID NO: 85287 - DNA, 75 bp, synthetic construct
  source 1..75: mol_type = other DNA
gttaagacacagccgtgtgcatgttgtggaaagcctgctgatgatccccaccacctgataggtcacggtcagggt

SEQ ID NO: 85288 - DNA, 75 bp, synthetic construct
  source 1..75: mol_type = other DNA
aggaaaatcattaccccgtttctggcctggggatttttttccgacattctatgcctgccatctggctgtgctggg

SEQ ID NO: 85289 - DNA, 75 bp, synthetic construct
  source 1..75: mol_type = other DNA
tcgcgcgctgctgccagccgattcctggagatgagattgtcggcttcattacccagggacgcggtatttcagtac

SEQ ID NO: 85290 - DNA, 75 bp, synthetic construct
  source 1..75: mol_type = other DNA
gtgtgcagggaaatccttaccccgtttctggtccggagatttcttcccgacgttctatgcctgtcatctggctgt

SEQ ID NO: 85291 - DNA, 75 bp, synthetic construct
  source 1..75: mol_type = other DNA
tgtcactattgaactgataccagggtattttcagataacagcggtcccgaaactggctgtatatgacccgacggt

SEQ ID NO: 85292 - DNA, 75 bp, synthetic construct
  source 1..75: mol_type = other DNA
cttgcctgctggccgtgattccggcgcttaaccttgccaccagtgatgcggcggctgtagccggccttgtgatga

SEQ ID NO: 85293 - DNA, 75 bp, synthetic construct
  source 1..75: mol_type = other DNA
ggcaataatgcatatgaactgaccagcacatacactcacgcaggccggttacagaatcagcacctgaacagcctg

SEQ ID NO: 85294 - DNA, 75 bp, synthetic construct
  source 1..75: mol_type = other DNA
caactgaaattgcaggccggacgtaaactgacgcaggcagaaaccacccgacttaacgctgtgctggattacatt

SEQ ID NO: 85295 - DNA, 75 bp, synthetic construct
  source 1..75: mol_type = other DNA
gccgaagtcaccgcagacagcggggagtatcaggtactggcccgctgggatacgccgaaggtggtgaagggcgtg

SEQ ID NO: 85296 - DNA, 75 bp, synthetic construct
  source 1..75: mol_type = other DNA
cctgccgttcgccagccgctggcggaagataaatcattactgccatttttcagcgatgagcgggtgatccgtgct

SEQ ID NO: 85297 - DNA, 75 bp, synthetic construct
  source 1..75: mol_type = other DNA
atgaaatccgcagcatggcggatgccctcgcaaaaatccggggctgatgacgttggcggggtaaatccccgcctt

SEQ ID NO: 85298 - DNA, 75 bp, synthetic construct
  source 1..75: mol_type = other DNA
gaagcgtcactctggagtttaagattttccagaaaggcaatcagggggcaggcaatatcaccgactgtacggtga

SEQ ID NO: 85299 - DNA, 75 bp, synthetic construct
  source 1..75: mol_type = other DNA
tggaattcttcattcgccatcagggagaggttcttccccgctccctgattgcctctcaggtctgggacatgaatt

SEQ ID NO: 85300 - DNA, 75 bp, synthetic construct
  source 1..75: mol_type = other DNA
ccgacagttcctggatccgatgcggctaactttgaagcaaggctagatacctttaaagctcaaactttcctccct

SEQ ID NO: 85301 - DNA, 75 bp, synthetic construct
  source 1..75: mol_type = other DNA
agaccgccaccagcatactgaagcagcgcacaaaaaatattgcgctaccgcctcacacccaccagcaacagaacc

SEQ ID NO: 85302 - DNA, 75 bp, synthetic construct
  source 1..75: mol_type = other DNA
gtcatgaagttgagtcagcaggtgcagcacttgagcgagcggacagaacgcttgagccagttatacagcgagaac

SEQ ID NO: 85303 - DNA, 75 bp, synthetic construct
  source 1..75: mol_type = other DNA
gcaggcatttaagcaggctgccgcagagctgaatacccccatcgaatggggcggtgagtggcggtcattaaagga

SEQ ID NO: 85304 - DNA, 75 bp, synthetic construct
  source 1..75: mol_type = other DNA
tcacaaattctgcaacgctggctggaaaaatatcatgcagttgcagaactacctgaaccgccccgctttgtggaa

SEQ ID NO: 85305 - DNA, 75 bp, synthetic construct
  source 1..75: mol_type = other DNA
tgaaagtatttctgttatctgcggtaatccaggtgtgggaaaaactgaagcggcccgcgaatttcgtcgcaccaa

SEQ ID NO: 85306 - DNA, 75 bp, synthetic construct
  source 1..75: mol_type = other DNA
atgaaaaaaacgctactcactttcacactggcgctgcttatctctggatgtgctcaacagacgtttacagttgaa

SEQ ID NO: 85307 - DNA, 75 bp, synthetic construct
  source 1..75: mol_type = other DNA
ccacagcccgctatctcggtacggcgatgtactggacagctgccagtattaatatcaggccgggccatgattatt

SEQ ID NO: 85308 - DNA, 75 bp, synthetic construct
  source 1..75: mol_type = other DNA
cgttacctgacgtcgtggcgatgaccgggactggtaacccgttcctgatgtcgttcttcacccagaccacaggcg

SEQ ID NO: 85309 - DNA, 75 bp, synthetic construct
  source 1..75: mol_type = other DNA
ccagaaagtgtggataattctcatggtgagataacaaaaaccataaacatactctgtccatataaaagtggctct

SEQ ID NO: 85310 - DNA, 75 bp, synthetic construct
  source 1..75: mol_type = other DNA
ggatgaggcgctggcatggcttcgtcagagcggcgttgcatcggatgttgtgtgtcgtgctgaacgaacggcgca

SEQ ID NO: 85311 - DNA, 75 bp, synthetic construct
  source 1..75: mol_type = other DNA
tcaaagggtgaccgtaacccggcaaccgtccgcctgctgattcagttacagcgtaacggtaactgggtgacagaa

SEQ ID NO: 85312 - DNA, 75 bp, synthetic construct
  source 1..75: mol_type = other DNA
gtgttgtgaccatgaaaccccgggagtggctggagcgccttcttgtctggtcccccggacagcgggatatcatca

SEQ ID NO: 85313 - DNA, 75 bp, synthetic construct
  source 1..75: mol_type = other DNA
tggcagatcccgcgattcatcaacacggataaagcgcccgcctatggtcgcgcgcttgctctgctcaaacgcgaa

SEQ ID NO: 85314 - DNA, 75 bp, synthetic construct
  source 1..75: mol_type = other DNA
gagtggcagtatttacaggtaagggatggagccatgaggaagaccatcgcaatgagactgtttactcaatcgaaa

SEQ ID NO: 85315 - DNA, 75 bp, synthetic construct
  source 1..75: mol_type = other DNA
gtgccatggtggcagtgctgcagatgtgccgtggatttgtggtgacacgacgtattactggaaaaatacctacgg

SEQ ID NO: 85316 - DNA, 75 bp, synthetic construct
  source 1..75: mol_type = other DNA
atggcgccatgaagaagaccatcgcaatgagactgtttacttaatcgaaaatggcgcagctgttacagtggatta

SEQ ID NO: 85317 - DNA, 75 bp, synthetic construct
  source 1..75: mol_type = other DNA
tcatctttaccactgtgaccaccgtgggctgccgctggcgcttatcagcccggaaggggaaacggcgtggcaggg

SEQ ID NO: 85318 - DNA, 75 bp, synthetic construct
  source 1..75: mol_type = other DNA
ctgctgcgcagggctggagcattaagaatggcggaattcagttgtcagagggtgtatttaagatcaccaagcaga

SEQ ID NO: 85319 - DNA, 75 bp, synthetic construct
  source 1..75: mol_type = other DNA
ttcatcttttgccagtggtgccgttccggcagcatcacaaccgctggcggatgatcctgccgttcgggccgtgtt

SEQ ID NO: 85320 - DNA, 75 bp, synthetic construct
  source 1..75: mol_type = other DNA
gccggcattgctgcctgtctgatgacgtacagtcatcatgcctgtcgtacggagtgttatgccatgacggtccat

SEQ ID NO: 85321 - DNA, 75 bp, synthetic construct
  source 1..75: mol_type = other DNA
tctggaagcattcagggcaattgaggccgcgttagtaaagcacgataagaatacgaaggattattccctggtggt

SEQ ID NO: 85322 - DNA, 75 bp, synthetic construct
  source 1..75: mol_type = other DNA
tcatttatttggtcatgtcaggaatttcagaatatggcacaaggcattgactgatgctcaggtgggggagtcaat

SEQ ID NO: 85323 - DNA, 75 bp, synthetic construct
  source 1..75: mol_type = other DNA
ttgtggttggtctgtttgtttacaccattgtggtggcgcagatggagcacttctccggctgggcgggcgtgattg

SEQ ID NO: 85324 - DNA, 75 bp, synthetic construct
  source 1..75: mol_type = other DNA
atgggcaactcaatgcactctcttaagacacttctacagttaccttgcggatggcgatgcagtcgacaaattatt

SEQ ID NO: 85325 - DNA, 75 bp, synthetic construct
  source 1..75: mol_type = other DNA
cccttcagtatcactgacaacctgatgctggagccacaactgcagtatacctggcagggactttccctggatgac

SEQ ID NO: 85326 - DNA, 75 bp, synthetic construct
  source 1..75: mol_type = other DNA
tagcaatgatgtttcactgccgattctggtattaaccgcccgtgaaagctggcaggacaaagtcgaagtattaag

SEQ ID NO: 85327 - DNA, 75 bp, synthetic construct
  source 1..75: mol_type = other DNA
gccgtcaaatccggcgcagtggcaaccgacacggttgtgaataccggcgcggaaggggggccggatgcagaaaat

SEQ ID NO: 85328 - DNA, 75 bp, synthetic construct
  source 1..75: mol_type = other DNA
atgtccttaaaaggtcttcgctttacgctggaggttgacggccaggagccggatacctttgcggtggtgagcttc

SEQ ID NO: 85329 - DNA, 75 bp, synthetic construct
  source 1..75: mol_type = other DNA
gctgtacatgctgaaggtgcagaaaacgaaaaacggcattccgtatgttgccggtattggtgcggggattgagga

SEQ ID NO: 85330 - DNA, 75 bp, synthetic construct
  source 1..75: mol_type = other DNA
gtatgcgaaggggctggcctgtgaagccgacaccctcggctcctgtggttacgtttatatggctgtttatccgac

SEQ ID NO: 85331 - DNA, 75 bp, synthetic construct
  source 1..75: mol_type = other DNA
ggctggctgggctcactggaaaccggtctgcccttcagtatcactgacaacctgatgctggagccacaactgcag

SEQ ID NO: 85332 - DNA, 75 bp, synthetic construct
  source 1..75: mol_type = other DNA
gatgacctcagccatgccggacagattcatttcacctccacccgcacagggaagttcgtaccggcaaccctgaaa

SEQ ID NO: 85333 - DNA, 75 bp, synthetic construct
  source 1..75: mol_type = other DNA
cccttcagtatcactgacaacctgatgctggagccacaactgcagtacacctggcagggactctccctggatgac

SEQ ID NO: 85334 - DNA, 75 bp, synthetic construct
  source 1..75: mol_type = other DNA
gccggaaaagagtaacgcccgcgagtgtgcagctccgggcgtcgtggcgtcgattgcttctggttgtggagaaac

SEQ ID NO: 85335 - DNA, 75 bp, synthetic construct
  source 1..75: mol_type = other DNA
gttatgtgaagttcgggcatggcagtgcacaacatgtgcgtgccggcttccgtctgggcagccacaacgatatga

SEQ ID NO: 85336 - DNA, 75 bp, synthetic construct
  source 1..75: mol_type = other DNA
gaagaaagcgccaaagaaacggggatgggaaataaagaagataagtacctaaaaaacaaagcggcactcgataac

SEQ ID NO: 85337 - DNA, 75 bp, synthetic construct
  source 1..75: mol_type = other DNA
ggttatgcccacagtgtcagcggcaacagcgctgaaggctataacggtcaggccacgctgaatgtgaccttctga

SEQ ID NO: 85338 - DNA, 75 bp, synthetic construct
  source 1..75: mol_type = other DNA
tgccgcctgtctgatggcgtacagccatcacgcctgtcgtacagagaattatgccatgacggtccattattaccg

SEQ ID NO: 85339 - DNA, 75 bp, synthetic construct
  source 1..75: mol_type = other DNA
ttagcagtatacacaggcattcgtcacggtgagctaatatctctcgcctgggaggatattgatttaaaagctaaa

SEQ ID NO: 85340 - DNA, 75 bp, synthetic construct
  source 1..75: mol_type = other DNA
gaggaaatggaaggcgctgaacatccgcacaatgagaatgctggcagcgatccgcatcgcgattgcagtgatgaa

SEQ ID NO: 85341 - DNA, 75 bp, synthetic construct
  source 1..75: mol_type = other DNA
tcgcctccatgcggctgtttgcccgcttatccctggatagcgccctgccggaacgcaccaccatcatgaatttcc

SEQ ID NO: 85342 - DNA, 75 bp, synthetic construct
  source 1..75: mol_type = other DNA
gtacacgttgtgttacgccgctggaatgggtagcttcttcgtctttttctccattgcgcccggactaatgatggg

SEQ ID NO: 85343 - DNA, 75 bp, synthetic construct
  source 1..75: mol_type = other DNA
ttgccggtgatgaacacgccgcacggctttccctcgttcgcgattacgtcctctcgttcgctggccgcctgccgg

SEQ ID NO: 85344 - DNA, 75 bp, synthetic construct
  source 1..75: mol_type = other DNA
cggcgaatatgacctttttgatttaatggcgaaggttactgaagagatcctgcatgcccctgtggattctgggcc

SEQ ID NO: 85345 - DNA, 75 bp, synthetic construct
  source 1..75: mol_type = other DNA
aataaaaaaagcattccccttattaaaggataaagtaaaaattttaccagatgcgcaattagcccttgttatttc

SEQ ID NO: 85346 - DNA, 75 bp, synthetic construct
  source 1..75: mol_type = other DNA
ggaacaactcttgattgtggcgctatagctggcagatataaaaatgtaacacaagtatccggagaacctggtctt

SEQ ID NO: 85347 - DNA, 75 bp, synthetic construct
  source 1..75: mol_type = other DNA
ttttaatttattcaaagcacggcgagtatatggcaggacaggtacaaggggaatacgtggagttgagcgacggca

SEQ ID NO: 85348 - DNA, 75 bp, synthetic construct
  source 1..75: mol_type = other DNA
ggggctggctgggctcactggaaaccggtctgcccttcagtatcactgacaacctgatgctggagccacaactgc

SEQ ID NO: 85349 - DNA, 75 bp, synthetic construct
  source 1..75: mol_type = other DNA
ggcggttatgcccacagcgtcagcggcagcagcgctgaaggttataacggtcaggccacgctgaatgtgactttc

SEQ ID NO: 85350 - DNA, 75 bp, synthetic construct
  source 1..75: mol_type = other DNA
tattgcgctgaaagatatcgtcaaaggcggtattaaagagcgcttcgcccagctgcgtaaaatgggcattaaaac

SEQ ID NO: 85351 - DNA, 75 bp, synthetic construct
  source 1..75: mol_type = other DNA
gtttcactgggacaggtataacccggcaacggaggcgagttcgtgctgggtgcgggtgtctcaggcgtgggcggg

SEQ ID NO: 85352 - DNA, 75 bp, synthetic construct
  source 1..75: mol_type = other DNA
tgccgcccgcggtcagagcggtggcggcaactgccctgattgtggcgcggtgatgggcgacaccacatatcagga

SEQ ID NO: 85353 - DNA, 75 bp, synthetic construct
  source 1..75: mol_type = other DNA
ggatggccctgaacaactgcaggcgcgtttttttggtgcactgcccgcggatgccgctgaggcagaagcaagggt

SEQ ID NO: 85354 - DNA, 75 bp, synthetic construct
  source 1..75: mol_type = other DNA
ctgtcagcaccgggctggagctggggccggattctgatgacaacactggcggtcagcagataacctggggaggta

SEQ ID NO: 85355 - DNA, 75 bp, synthetic construct
  source 1..75: mol_type = other DNA
actcccgtaaggaggtctgcgagaaataccagatgaataatgggtatttcagtacaacactggggagacttatac

SEQ ID NO: 85356 - DNA, 75 bp, synthetic construct
  source 1..75: mol_type = other DNA
acaaccggcgtatcatggcacaacgacatgttcaccacggcactggatgtggatctgaccccggccagcggcttc

SEQ ID NO: 85357 - DNA, 75 bp, synthetic construct
  source 1..75: mol_type = other DNA
tgcccgtaaacgcagaagatgcagatgctgcggcagaggctgaactggctcgtcagtttgcgcaaactcaacaac

SEQ ID NO: 85358 - DNA, 75 bp, synthetic construct
  source 1..75: mol_type = other DNA
gtttcactgggacaggtataacccggcaacggaggcgagttcgtgctgggtgtgggtgtcccaggcgtgggcggg

SEQ ID NO: 85359 - DNA, 75 bp, synthetic construct
  source 1..75: mol_type = other DNA
gtgacgggggccaataattattttcttgttgataatgaaacagttaaattatataaattagaacgttttgctcac

SEQ ID NO: 85360 - DNA, 75 bp, synthetic construct
  source 1..75: mol_type = other DNA
agattcgcggtgaaacggacaaggacgggtatacagaagttttctctagaaccaatgatgcaaatgtagaaatta

SEQ ID NO: 85361 - DNA, 75 bp, synthetic construct
  source 1..75: mol_type = other DNA
cccctggtgggggctcccctgcaccgtgacgccctgtttcggggcacgtctggtgcaggagggcaatcaattaca

SEQ ID NO: 85362 - DNA, 75 bp, synthetic construct
  source 1..75: mol_type = other DNA
gtggcgggctttggcatgcaggagaacaacggctggcagatgcgttatcacctgcgtattgagccgccgttatgg

SEQ ID NO: 85363 - DNA, 75 bp, synthetic construct
  source 1..75: mol_type = other DNA
acaggcctcaactggaggtcgtggagcatcgcgtggcagaactcgaagatggctacactcggactgcaaacacac

SEQ ID NO: 85364 - DNA, 75 bp, synthetic construct
  source 1..75: mol_type = other DNA
ggaacgccggtgccgacgctgcaaccgacggtgctgaagacaccggggggtgagaagagtggtgatggcagtgac

SEQ ID NO: 85365 - DNA, 75 bp, synthetic construct
  source 1..75: mol_type = other DNA
cgttaccggcacaccttccccgtgaaatacaccgcctggagccagaagaaagctgttgcccggagtgtggcggtg

SEQ ID NO: 85366 - DNA, 75 bp, synthetic construct
  source 1..75: mol_type = other DNA
atgacgagttcgcagcccgccggatggacggcggccgagttggcgcaggcggcggcgcgcggacagcttgacctg

SEQ ID NO: 85367 - DNA, 75 bp, synthetic construct
  source 1..75: mol_type = other DNA
tcagtatttcctggatgatcgtaaggcagcattaaagctcatggatacactgaacctctcatgcagaattaaaag

SEQ ID NO: 85368 - DNA, 75 bp, synthetic construct
  source 1..75: mol_type = other DNA
tacggaatttcgaatgagaattaccacgcgggtcccggtgtcagtaagtctcagctcgatgacattgctgatact

SEQ ID NO: 85369 - DNA, 75 bp, synthetic construct
  source 1..75: mol_type = other DNA
ggaaaaactggctcttcgcgggttccgacagcggtggcgaacatgcggcggtgttgtactcgctgaccggcacat

SEQ ID NO: 85370 - DNA, 75 bp, synthetic construct
  source 1..75: mol_type = other DNA
ataacttactggaatcaaaaaagaataaaactcagtcttgggggactcagcccggtagaataccggactgagtat

SEQ ID NO: 85371 - DNA, 75 bp, synthetic construct
  source 1..75: mol_type = other DNA
atccatccacagcaacatttggcggactacagcggtatcctgcaggctgatgcctacgcgggttacaacgctctt

SEQ ID NO: 85372 - DNA, 75 bp, synthetic construct
  source 1..75: mol_type = other DNA
gcagtatgaatacaacgccgcaggcgacctgaccgccgtcattaccccggacggcaaccggagtgagacactgta

SEQ ID NO: 85373 - DNA, 75 bp, synthetic construct
  source 1..75: mol_type = other DNA
aaattgctggagatgcccagctttctactccatgcactgacagcatcataaacagcattgcagcaggcattttca

SEQ ID NO: 85374 - DNA, 75 bp, synthetic construct
  source 1..75: mol_type = other DNA
cgatcccgggagacgggattggcaaagaagtccttcctgaagggattcgcgtgttacaggctgccgctgagcgct

SEQ ID NO: 85375 - DNA, 75 bp, synthetic construct
  source 1..75: mol_type = other DNA
ccattataacggtgggttgactccggaagagtccgagaacaggtaccatttttactgtaaaaccgtggccagtat

SEQ ID NO: 85376 - DNA, 75 bp, synthetic construct
  source 1..75: mol_type = other DNA
tggtttctatgctctgttttgtctatgtcggtgtctacttctggcgtgaaagcaaagtacgtaccgcactggctg

SEQ ID NO: 85377 - DNA, 75 bp, synthetic construct
  source 1..75: mol_type = other DNA
acccgcaagcttcacactgacgacacaccggtaaaggtactggcaccgggcctgaaaaagacgaaaacagggcgc

SEQ ID NO: 85378 - DNA, 75 bp, synthetic construct
  source 1..75: mol_type = other DNA
tgatgccgcacaccgcacagccggtactgccagcgcaaaaccaggccttaccgccggaagttcgcgcgttcctca

SEQ ID NO: 85379 - DNA, 75 bp, synthetic construct
  source 1..75: mol_type = other DNA
gtcagaggcggtattgcagaaaagcctggatataactgaaggtgcagattcggcactgagaaacgcgatggcccg

SEQ ID NO: 85380 - DNA, 75 bp, synthetic construct
  source 1..75: mol_type = other DNA
tcagattacagtgagttaagttatgagttgttagtagctgaacttcagactgtaaaaaatgagattgtgaacctt

SEQ ID NO: 85381 - DNA, 75 bp, synthetic construct
  source 1..75: mol_type = other DNA
tgcgatgccgacaccctcggctcctgtggttacgtttatctggctgtttatccgacccccgaaacgaaaaagtaa

SEQ ID NO: 85382 - DNA, 75 bp, synthetic construct
  source 1..75: mol_type = other DNA
taaattgcactaatagcatcatcatttctgacgtcaagattcatatggattcagaggggcgttactcgcttaatg

SEQ ID NO: 85383 - DNA, 75 bp, synthetic construct
  source 1..75: mol_type = other DNA
tttctccgaaagacaaagtaagaattgagggtgaaattgataaagacctgagcagtgttgaagttgatgtaaagg

SEQ ID NO: 85384 - DNA, 75 bp, synthetic construct
  source 1..75: mol_type = other DNA
tgcaccagctaccgctggtctgcaaaatcggtgcgcctgatgacgtcacgctgcttatcaacgtggcgctgaatg

SEQ ID NO: 85385 - DNA, 75 bp, synthetic construct
  source 1..75: mol_type = other DNA
aagcggcagaagcatggcgacgggctgccggtgttgcgccccggacagactggcagcagtttgcccgaaaaaggg

SEQ ID NO: 85386 - DNA, 75 bp, synthetic construct
  source 1..75: mol_type = other DNA
tctttttttacgtcgttgctcaggcacacccatttttcgggctgtggtgtttacaccttagcccctgtcagataa

SEQ ID NO: 85387 - DNA, 75 bp, synthetic construct
  source 1..75: mol_type = other DNA
ggtcgccgttcactggacgaggcgcagacaaaagcactttcagaccgctttaacgcgtcactggaggccagcctc

SEQ ID NO: 85388 - DNA, 75 bp, synthetic construct
  source 1..75: mol_type = other DNA
atttgacttttgtgccattgccagaatgggaaatgctgaggattctcattactgccaggtagtcgagagtccatc

SEQ ID NO: 85389 - DNA, 75 bp, synthetic construct
  source 1..75: mol_type = other DNA
ccatcagtaccgggctggagtatgggccggataacgaggccaataccggcggacaatggatacaaaatggcggta

SEQ ID NO: 85390 - DNA, 75 bp, synthetic construct
  source 1..75: mol_type = other DNA
cccctatcggctcaagcggtagatttactcaatgaactcaagataatgacagggaaatatcgttatgtttttccg

SEQ ID NO: 85391 - DNA, 75 bp, synthetic construct
  source 1..75: mol_type = other DNA
atgacttcactctggaatggagtggcccgaaagagaacaacatcttcgtggtcaacgccagtatgcaaacccatg

SEQ ID NO: 85392 - DNA, 75 bp, synthetic construct
  source 1..75: mol_type = other DNA
ggctgcacacccgcaccgcctgcgccagtgccggtaattgtggtcagcggatgcccgagggtgagcctttgtccg

SEQ ID NO: 85393 - DNA, 75 bp, synthetic construct
  source 1..75: mol_type = other DNA
atgaaaacacccttaccgcccgtcttacgcgctgccctttaccgtcgcgctgtcgcctgtgcctggctgaccgtg

SEQ ID NO: 85394 - DNA, 75 bp, synthetic construct
  source 1..75: mol_type = other DNA
ggggtggatgtcgctgtcgcgtaaaccggaggagacctggtacgggtgggacggtgacaggctgaccactgtaca

SEQ ID NO: 85395 - DNA, 75 bp, synthetic construct
  source 1..75: mol_type = other DNA
tcggggtggcaacctccggacagggtatccgggttgtggatgcacagaatggtgccaccacagaagaaggtgcgt

SEQ ID NO: 85396 - DNA, 75 bp, synthetic construct
  source 1..75: mol_type = other DNA
ccagtctgtcggcagagctggaaaccgcaaaaggcacaccggctggcggcagtattgatctgacgaaatacgtgc

SEQ ID NO: 85397 - DNA, 75 bp, synthetic construct
  source 1..75: mol_type = other DNA
gaaaccgtgccggagctgctttcccgtctggttttccgggtgcagaatccaccgtccggcggcacgcagtatgat

SEQ ID NO: 85398 - DNA, 75 bp, synthetic construct
  source 1..75: mol_type = other DNA
atatatccgcgctggcgagcctactggcgcgcctttcgggaagtgtcgctagtttcctgattgaggaagaaagta

SEQ ID NO: 85399 - DNA, 75 bp, synthetic construct
  source 1..75: mol_type = other DNA
cagcaccgtctggtgttctacacgcggatacagcacggtgagccgcaggtggagagccgctacctctatgacccg

SEQ ID NO: 85400 - DNA, 75 bp, synthetic construct
  source 1..75: mol_type = other DNA
tttacagttagttatttattgtttatctttttctatattacttaatcaatataacaaaaatgaaattgttgctat

SEQ ID NO: 85401 - DNA, 75 bp, synthetic construct
  source 1..75: mol_type = other DNA
ttatccaattcatgaccttatctctttcatttaatgaatttgtgtattttatatttatcataattctactcttta

SEQ ID NO: 85402 - DNA, 75 bp, synthetic construct
  source 1..75: mol_type = other DNA
ggcggggcagccttcgggctggccggtttccaataaggccggtactgcaaaccccgtccgggccatcacccatga

SEQ ID NO: 85403 - DNA, 75 bp, synthetic construct
  source 1..75: mol_type = other DNA
gaagggaaagggccttcccgagagtggtaaaggagaggccctggaaataccccacagccccgaaaaagagccagt

SEQ ID NO: 85404 - DNA, 75 bp, synthetic construct
  source 1..75: mol_type = other DNA
aattgctggatggggttgaagttaagtggttgccattggggaacgtcgctgaaatttatggtggcctaacaggaa

SEQ ID NO: 85405 - DNA, 75 bp, synthetic construct
  source 1..75: mol_type = other DNA
tgggccagatactatcgtcatgttgtttcaaaaaagatctttcacaaagtcagtcatgaaatatggaaagcacta

SEQ ID NO: 85406 - DNA, 75 bp, synthetic construct
  source 1..75: mol_type = other DNA
tgcttgccgggatgacatccaccgaatatgccgactggcgacgtttttaccgcacgcattattttcatgataccc

SEQ ID NO: 85407 - DNA, 75 bp, synthetic construct
  source 1..75: mol_type = other DNA
tacagtatcccgtgaagagttttctgactacctccgctgggctgctgaagatatgaataacctgtatttcagtca

SEQ ID NO: 85408 - DNA, 75 bp, synthetic construct
  source 1..75: mol_type = other DNA
ttttgcgatccggatatgcatccctctgatttcagtctgcttgtcccccggcatgaggaagcgcaggtggagagg

SEQ ID NO: 85409 - DNA, 75 bp, synthetic construct
  source 1..75: mol_type = other DNA
actgattcagtggcgcagcggcagccggaaaaaaccgcagccggaggctgcttctttaactcactatacagcaaa

SEQ ID NO: 85410 - DNA, 75 bp, synthetic construct
  source 1..75: mol_type = other DNA
atgcacattggacaggctcttgatctggtatcccgttacgattctctgcgtaacccactgacttctctgggggat

SEQ ID NO: 85411 - DNA, 75 bp, synthetic construct
  source 1..75: mol_type = other DNA
tggtttatgccggcggcgaccagacggtacatggtcacgcactggataccacgctgaatggggggtaccagtatg

SEQ ID NO: 85412 - DNA, 75 bp, synthetic construct
  source 1..75: mol_type = other DNA
gttaccgcacaaactcaggtggaactgcacgacaatgatcgcgtttttggcgactacaccgaaggcgtgatggcc

SEQ ID NO: 85413 - DNA, 75 bp, synthetic construct
  source 1..75: mol_type = other DNA
tttcttcggcgacattgatgttgccgtcattgaagcatcggcactggcaccggatggtcgagtctggttaaccag

SEQ ID NO: 85414 - DNA, 75 bp, synthetic construct
  source 1..75: mol_type = other DNA
accgggaaacgtgtatcagtgagggtgacaaacgttactgatttagctgaatgggcggaaaattatgtgatgctg

SEQ ID NO: 85415 - DNA, 75 bp, synthetic construct
  source 1..75: mol_type = other DNA
caccattaaccggtgggacgttatggtgcgttactattgcattgtcattagcgacgtttatgcaaatgttggatt

SEQ ID NO: 85416 - DNA, 75 bp, synthetic construct
  source 1..75: mol_type = other DNA
tacctcacgccccatgtcggtaaacaggcggtgatctttgatatcgacggcacactctgcgctcccgctgatgcg

SEQ ID NO: 85417 - DNA, 75 bp, synthetic construct
  source 1..75: mol_type = other DNA
aactggatatgcatttttccgggttgacgtacaccgtactcagcctgtttttttgcgatccggatatgtatccct

SEQ ID NO: 85418 - DNA, 75 bp, synthetic construct
  source 1..75: mol_type = other DNA
ctatattgaaatacattgagagaaacattgaggtttcctcaattaatataaatactctggttgaatattcaggct

SEQ ID NO: 85419 - DNA, 75 bp, synthetic construct
  source 1..75: mol_type = other DNA
cacagaaaaaattccgtggaacatctatcaaatataaagaaaaaattccatatacggtcaccagttcaaaaataa

SEQ ID NO: 85420 - DNA, 75 bp, synthetic construct
  source 1..75: mol_type = other DNA
tcaccggttttttaggcgcaggcaaaaccaccctgctgcgccatattcttaatgaacaacacggctacaagattg

SEQ ID NO: 85421 - DNA, 75 bp, synthetic construct
  source 1..75: mol_type = other DNA
caggtgagctggttggtgaaatctcgaaggtgttcgactgtgagatacggcactggtacagcgaacctgtccggg

SEQ ID NO: 85422 - DNA, 75 bp, synthetic construct
  source 1..75: mol_type = other DNA
tcatcagagttgaaaccgccaccggtgagctggcgaaaacgcagcgccgcagcctggcggatacccttcagcagt

SEQ ID NO: 85423 - DNA, 75 bp, synthetic construct
  source 1..75: mol_type = other DNA
cgccacgatgaatacggcaggctggcggagaagacggaccgcatcccggaaggggtgatacggatgcacgacgag

SEQ ID NO: 85424 - DNA, 75 bp, synthetic construct
  source 1..75: mol_type = other DNA
ggcaccaccacgctgaataacggtgccacgcttaccctttccgggaaaacggtgaataacgataccctgaccatc

SEQ ID NO: 85425 - DNA, 75 bp, synthetic construct
  source 1..75: mol_type = other DNA
tggaactgtggtgccacacaacctgtaccggatgcgcctgtgccgaaagatttaccccccggaatgccggatatg

SEQ ID NO: 85426 - DNA, 75 bp, synthetic construct
  source 1..75: mol_type = other DNA
atcccgacaatgaaagacagagccatgcaggcactctatctgatggcgctggaacctgttgcagaaacaacggct

SEQ ID NO: 85427 - DNA, 75 bp, synthetic construct
  source 1..75: mol_type = other DNA
tggagggtaaagctgataatgtcgtactggaaaatggcggacgtctggatgtgctgagcggacacacagccacta

SEQ ID NO: 85428 - DNA, 75 bp, synthetic construct
  source 1..75: mol_type = other DNA
agaaggaggaccggatgcggaaaatgctgataccggacagtttgttcgcggagatgccgtacgtaccaccatcaa

SEQ ID NO: 85429 - DNA, 75 bp, synthetic construct
  source 1..75: mol_type = other DNA
ggtacagccttctgttatccgcaccttcagctcccggggtgacatgagcatgggtacagccgcagccggcagtaa

SEQ ID NO: 85430 - DNA, 75 bp, synthetic construct
  source 1..75: mol_type = other DNA
gggtaaggccggacatcaaccacgcccttcaggaggtagaggatgcctggcgaaaaccaaagaacatacaagtca

SEQ ID NO: 85431 - DNA, 75 bp, synthetic construct
  source 1..75: mol_type = other DNA
cgctgccaacggagggagtatccgtgattttgaaggtattgataaatcaatcaacaacatgatcccactgatggc

SEQ ID NO: 85432 - DNA, 75 bp, synthetic construct
  source 1..75: mol_type = other DNA
gtataatttatcaaacgaaagaaacgcaaaccggaactgccacgatccttgttaatgaaggtactggcgataatg

SEQ ID NO: 85433 - DNA, 75 bp, synthetic construct
  source 1..75: mol_type = other DNA
tggtgtagttagtaataaaggcatacctttcataccgtggaaattaacagcagagcaattttgtttctatataga

SEQ ID NO: 85434 - DNA, 75 bp, synthetic construct
  source 1..75: mol_type = other DNA
catcgtcgtagagctatggataaactcggggtaaaacgtttacatcaatttataaatattccgcgttcccttatt

SEQ ID NO: 85435 - DNA, 75 bp, synthetic construct
  source 1..75: mol_type = other DNA
tggctgggctcactggaaaccggtctgcccttcagtatcactgacaacctgatgctggagccacaactgcagtat

SEQ ID NO: 85436 - DNA, 75 bp, synthetic construct
  source 1..75: mol_type = other DNA
caccgaccggagagggtacaacgtcagcacggacttttgcccgctcacgacgctgcgtgttaaccagcggctttt

SEQ ID NO: 85437 - DNA, 75 bp, synthetic construct
  source 1..75: mol_type = other DNA
ttatattgccaatctggcataatatcaatgctcaagaggtatctaaatacagccattatttggcggataaaatgg

SEQ ID NO: 85438 - DNA, 75 bp, synthetic construct
  source 1..75: mol_type = other DNA
tgcgtggtttcacctttgatcaaaaacgccagacgcttcacctccagctacgggctgcgaactttgccagcttcg

SEQ ID NO: 85439 - DNA, 75 bp, synthetic construct
  source 1..75: mol_type = other DNA
agcagggcggcgcactggtcaccagtactgcagcaactgttcttggcagcaaccgtctggggaatttcacggtgg

SEQ ID NO: 85440 - DNA, 75 bp, synthetic construct
  source 1..75: mol_type = other DNA
cattagtgctctggagaatcagttcaacaggctgaatgaactggatttacagatagatgatattgaaaaacagct

SEQ ID NO: 85441 - DNA, 75 bp, synthetic construct
  source 1..75: mol_type = other DNA
tgccgcatcgatgaatgccggggatggagcgccgggcgggcgctggctccggtcatgttccgcgcacagctcaat

SEQ ID NO: 85442 - DNA, 75 bp, synthetic construct
  source 1..75: mol_type = other DNA
gcgcctgagctggtcacgacgaagtgaagaatacgaagacatgtcttcctttaatccgtcggaagtgtacagcca

SEQ ID NO: 85443 - DNA, 75 bp, synthetic construct
  source 1..75: mol_type = other DNA
gggctatcgccatcgagcgtgagaactccggcgatagcgtcatttacgctgttatcggaggttgccttatggcta

SEQ ID NO: 85444 - DNA, 75 bp, synthetic construct
  source 1..75: mol_type = other DNA
aaatggtggtcgacagtatgttgaacagagcacagtagaaacaaccaccattaaaaatggcggtgagcaaagagt

SEQ ID NO: 85445 - DNA, 75 bp, synthetic construct
  source 1..75: mol_type = other DNA
aggtggattttgatgtttccacccagagtctggcgctgtccattccccagaagggactggtgaagatgccggaga

SEQ ID NO: 85446 - DNA, 75 bp, synthetic construct
  source 1..75: mol_type = other DNA
tgcgtgaactgccggtgaactggtgggtacagccttctgttatccgcaccttcagctcccggggggacatgagca

SEQ ID NO: 85447 - DNA, 75 bp, synthetic construct
  source 1..75: mol_type = other DNA
tttcaccgcgcttgagtccaacaagtacgagtgcaaccagattaactttgacttccacctgacctataaacgcct

SEQ ID NO: 85448 - DNA, 75 bp, synthetic construct
  source 1..75: mol_type = other DNA
tcaatgcctatctgacccagctcgccaaactgaacggcatcagcgttgatgatgtcagcaagaaattcaccgttg

SEQ ID NO: 85449 - DNA, 75 bp, synthetic construct
  source 1..75: mol_type = other DNA
cagtttgatgcgtggctgatggagaatgcgctgccgccgggttttgaggcggggtttgatgggatggagattggg

SEQ ID NO: 85450 - DNA, 75 bp, synthetic construct
  source 1..75: mol_type = other DNA
cttccgatctggcgaatatgctgttgcaggatgcaggctggaatgacaaacgtatttctgatgcgctgaagcagg

SEQ ID NO: 85451 - DNA, 75 bp, synthetic construct
  source 1..75: mol_type = other DNA
atggtcgatacagaaatttggctgcgtttaatgagtatcagcagcttgtacggcgatgatatggtccgtatagct

SEQ ID NO: 85452 - DNA, 75 bp, synthetic construct
  source 1..75: mol_type = other DNA
caactaattgaattagaagataaagttgaaaactttaatcgtttatttgaagagttactggttaccagaaagaaa

SEQ ID NO: 85453 - DNA, 75 bp, synthetic construct
  source 1..75: mol_type = other DNA
ggacaagtatttccccatcgttaacaaggagcaggacaacagcgaaatgctggccgctgacgtcatcatcagcca

SEQ ID NO: 85454 - DNA, 75 bp, synthetic construct
  source 1..75: mol_type = other DNA
gtgggtggctgattttacttacgtcagcacatggcagggcttcgtctatgtggcgtttatcattgatgtgtttgc

SEQ ID NO: 85455 - DNA, 75 bp, synthetic construct
  source 1..75: mol_type = other DNA
acgctatctgaaggtgacaccctcgtggtctggaagcttgatcgcctcggacgcagcatgcgtcatctggttgga

SEQ ID NO: 85456 - DNA, 75 bp, synthetic construct
  source 1..75: mol_type = other DNA
aacggtggcgcatttatggcccctgaaccggatgacgataatgacgaaacatgggtactgttcaatgtcatgaac

SEQ ID NO: 85457 - DNA, 75 bp, synthetic construct
  source 1..75: mol_type = other DNA
acactatcggcaggagacactctggttgtctggaagctggacaggttagggcgcagtatgcggcatcttgttacg

SEQ ID NO: 85458 - DNA, 75 bp, synthetic construct
  source 1..75: mol_type = other DNA
attgatatgccgcagaccgacgcgctgagactgcaaattatgtgcgcctgttatatggcgctgctgaagtgggag

SEQ ID NO: 85459 - DNA, 75 bp, synthetic construct
  source 1..75: mol_type = other DNA
gacagaactcagggtggaagcctttggttgcaaactgctgatcagtaacctgctgaatatcgacagcaagggcgg

SEQ ID NO: 85460 - DNA, 75 bp, synthetic construct
  source 1..75: mol_type = other DNA
ggatggctggtggtgtcctgacgggggccagcgtctatggatttctgtccggaaccgattacggcgtggtgtttg

SEQ ID NO: 85461 - DNA, 75 bp, synthetic construct
  source 1..75: mol_type = other DNA
gcggcgggagcgtgacctgacggggtggatgtcgctgtcgcgtaaaccggaggtgacatggtacgggtgggacgg

SEQ ID NO: 85462 - DNA, 75 bp, synthetic construct
  source 1..75: mol_type = other DNA
gtcgtataggtgggcgtcgacctaaataccaagaagaaacatggcagcaaatgcggcgattgctggagaagggca

SEQ ID NO: 85463 - DNA, 75 bp, synthetic construct
  source 1..75: mol_type = other DNA
ggctaatgctgccgaatacttgcctgctgcctcatcatacaaaatgagcggtgttgcaacgtgggcgggtattgc

SEQ ID NO: 85464 - DNA, 75 bp, synthetic construct
  source 1..75: mol_type = other DNA
tatgagcatccaaccaagggacttcggctcccgcgctgaggtaggggatcgggtactgtcgtatcacgaactggc

SEQ ID NO: 85465 - DNA, 75 bp, synthetic construct
  source 1..75: mol_type = other DNA
atggatataatagaaaaaagaatcacaaaacgacacctcagtgaaagtgaattatcaggtgtaaattattacaat

SEQ ID NO: 85466 - DNA, 75 bp, synthetic construct
  source 1..75: mol_type = other DNA
accgtaacgccggttcacagatgcccccggcggtctggttcgcgtacagtccggaccggaaaggtatccatccac

SEQ ID NO: 85467 - DNA, 75 bp, synthetic construct
  source 1..75: mol_type = other DNA
tgccagaacattgccgcgcggcgatttggatcgaagccaacgtgaaaggggaagttgacgccctgcgtgcggcca

SEQ ID NO: 85468 - DNA, 75 bp, synthetic construct
  source 1..75: mol_type = other DNA
acagggagaccgggcgcgccatcactgacgccgatcacatccgtcagagctgtggcgatattttgcgaacgccgg

SEQ ID NO: 85469 - DNA, 75 bp, synthetic construct
  source 1..75: mol_type = other DNA
aaaaccgtgatgcactttcgcgcaagttggagattgaacaacaagaagcgtttatgacgcttgagcaggagcagc

SEQ ID NO: 85470 - DNA, 75 bp, synthetic construct
  source 1..75: mol_type = other DNA
tgcaaacacgggtaatgtgggggggcggaaacctggcggaacaagcattatcagccgctctctcttaccgcacac

SEQ ID NO: 85471 - DNA, 75 bp, synthetic construct
  source 1..75: mol_type = other DNA
aaagttgtcaacagtaatggagatgtatcctttactgaacagaattataagtttacttatccttcctcattttat

SEQ ID NO: 85472 - DNA, 75 bp, synthetic construct
  source 1..75: mol_type = other DNA
cgcctggagccagaagaaagctgttgcccggagtgtggcggtgagctggattatctgggggaagtcagcgcagaa

SEQ ID NO: 85473 - DNA, 75 bp, synthetic construct
  source 1..75: mol_type = other DNA
atgcttattggttatgtacgcgtgtcaacaaatgaccagaacaccgatttgcaacgtaatgcactgaattgcgcg

SEQ ID NO: 85474 - DNA, 75 bp, synthetic construct
  source 1..75: mol_type = other DNA
tctgaactggtttctgctgaacccgattttgaggcgctgaacaatgggaagaccaagaaaaaacaaaaaagataa

SEQ ID NO: 85475 - DNA, 75 bp, synthetic construct
  source 1..75: mol_type = other DNA
ataactggtatgaccttgcatacccaccatcagaacaggagaaagcaaaaaaagaagcaattgagaagttaataa

SEQ ID NO: 85476 - DNA, 75 bp, synthetic construct
  source 1..75: mol_type = other DNA
gggctctggctgaaatggaacgtgaactgatagttgaacgtaccagagcagggctggctgcagctcgtgccaaag

SEQ ID NO: 85477 - DNA, 75 bp, synthetic construct
  source 1..75: mol_type = other DNA
agagggaaaaataagacgtacacctcttcgtcgtggtgccagtactttatgggaggtggtcagagaaacagaaaa

SEQ ID NO: 85478 - DNA, 75 bp, synthetic construct
  source 1..75: mol_type = other DNA
aaatgagcccggaagccgccggcattgccgcctgtctgatgacgtacagtcatcacgcctgccgtacggagtgtt

SEQ ID NO: 85479 - DNA, 75 bp, synthetic construct
  source 1..75: mol_type = other DNA
gccttaaaaaaactgcgccgcagccgtccgctggacggcatcatctggccgctgacagaagaacagagccgccag

SEQ ID NO: 85480 - DNA, 75 bp, synthetic construct
  source 1..75: mol_type = other DNA
tcccccgtaagcaggttgcaatcatctatgatgttgctgtttccacgctttataaaaagtttcctgcgtcatcat

SEQ ID NO: 85481 - DNA, 75 bp, synthetic construct
  source 1..75: mol_type = other DNA
cccatcgggtaccgatggcgataacggttccccaagtgcgtttatcggcggcggccgcgaagtgcgtgcatccgt

SEQ ID NO: 85482 - DNA, 75 bp, synthetic construct
  source 1..75: mol_type = other DNA
acgcgaactgatagttgaacgtaccatggcagggctggctgcagctcgtgccaaaggcagagtaggtggacgccg

SEQ ID NO: 85483 - DNA, 75 bp, synthetic construct
  source 1..75: mol_type = other DNA
ttgctagaattgctgaggatatgatatctataatctcacgcttattaaaaacatcagagcatattattatagttg

SEQ ID NO: 85484 - DNA, 75 bp, synthetic construct
  source 1..75: mol_type = other DNA
gcacgtcgacggcgcagatctggtcgccatttgtggccgtggcgtcctgcacgacaaatacttcccgatcctcaa

SEQ ID NO: 85485 - DNA, 75 bp, synthetic construct
  source 1..75: mol_type = other DNA
aaagaaaacgtatttatcagttgggtgatgcgattgctgattgtcgtaagtctcgcctggacggggtgggctatt

SEQ ID NO: 85486 - DNA, 75 bp, synthetic construct
  source 1..75: mol_type = other DNA
cctgagcgtactgccggaatggccttccaaccgagttgacgaactcctgccatggaacgtagtactcaccaataa

SEQ ID NO: 85487 - DNA, 75 bp, synthetic construct
  source 1..75: mol_type = other DNA
tgaaagcaactaacgttaaatcagaaaaaattcatgcaccttcagttcaggaatcggagctggtggttgttcaga

SEQ ID NO: 85488 - DNA, 75 bp, synthetic construct
  source 1..75: mol_type = other DNA
cgtccagtgggcaaacaatgtcatcgttggtcacggtagtattggtgcgggtgtcgactggcagaaacagactac

SEQ ID NO: 85489 - DNA, 75 bp, synthetic construct
  source 1..75: mol_type = other DNA
gccggacgattaattgcatcaggagttccgcgccagaaagttgcgattatctatgatgttggcgtatcgactttg

SEQ ID NO: 85490 - DNA, 75 bp, synthetic construct
  source 1..75: mol_type = other DNA
attcagcccagtctgttgtttaagtggaagaaacaataccaggaaggaagcctcactgctgtggctgccggtgaa

SEQ ID NO: 85491 - DNA, 75 bp, synthetic construct
  source 1..75: mol_type = other DNA
gggcgatcacacgtttgcaggatatgggcgtggagcctttcctgctctcttccagtctgacgggcgtgatggcgc

SEQ ID NO: 85492 - DNA, 75 bp, synthetic construct
  source 1..75: mol_type = other DNA
cgcagggtagccggaggcgatctgacggtcacgacagttcccgcggaagagtttgaaaaacagttagtgagcagt

SEQ ID NO: 85493 - DNA, 75 bp, synthetic construct
  source 1..75: mol_type = other DNA
gttgacggcacattacatgaaatgttgcgccccggtcgtaaactggcctcgctactggtatcgcgtatcaaggtg

SEQ ID NO: 85494 - DNA, 75 bp, synthetic construct
  source 1..75: mol_type = other DNA
ccgtgcagatcgatgtctgggcgacagtacctgatgacgcagataatattcgtgagcaggcgcttgatgcggtaa

SEQ ID NO: 85495 - DNA, 75 bp, synthetic construct
  source 1..75: mol_type = other DNA
gttctgaaacggcggtgggatgtgacaccggcaatcatccgtgccgtggaatacctttcccgggtcccggtatta

SEQ ID NO: 85496 - DNA, 75 bp, synthetic construct
  source 1..75: mol_type = other DNA
tgcgccatatcctgggtgtactgccggaatggccttccaaccgtgttgacgagctcctgccatggaacgtagcac

SEQ ID NO: 85497 - DNA, 75 bp, synthetic construct
  source 1..75: mol_type = other DNA
ctggcggtcaggcaaatgcagagtaaaccgctgctgacttccctgtataagctgatgcaggagaaagaacacacg

SEQ ID NO: 85498 - DNA, 75 bp, synthetic construct
  source 1..75: mol_type = other DNA
atgaagttgcgaaaacggcggttgacttccgagcagtgaaggcacctcgtccttacgtgacagggccgcgagtta

SEQ ID NO: 85499 - DNA, 75 bp, synthetic construct
  source 1..75: mol_type = other DNA
acctgaacagcatgtgggccgtgaaactgcagcagatgaaggacggacgcctttatattgcgggtatcggagccg

SEQ ID NO: 85500 - DNA, 75 bp, synthetic construct
  source 1..75: mol_type = other DNA
tgtgtttttatgcttttggtataggagtgtcttttgttattatatggtttctctcacatgagaaaactaacatcc

SEQ ID NO: 85501 - DNA, 75 bp, synthetic construct
  source 1..75: mol_type = other DNA
cggcaatcccccgacgttctccctgacgccggagggcaggctgacggcccgcaatgcggacatcagcggacatat

SEQ ID NO: 85502 - DNA, 75 bp, synthetic construct
  source 1..75: mol_type = other DNA
cattacaggtagtctgtgtcccgtctctgaatatacaggatctggggctaaccagttttcatagctggctcttat

SEQ ID NO: 85503 - DNA, 75 bp, synthetic construct
  source 1..75: mol_type = other DNA
attgaagattttgatgtgaacttcaagcagagcaaggggccagactgttctataaccctcagcgcagaccgtgcg

SEQ ID NO: 85504 - DNA, 75 bp, synthetic construct
  source 1..75: mol_type = other DNA
gcaaaacaggtcagggatgaagtcagaaatgaggtgcagaagctggacgtggcaggactgataggtgagcgcatc

SEQ ID NO: 85505 - DNA, 75 bp, synthetic construct
  source 1..75: mol_type = other DNA
gccttgtttggctcgcgcagcggcttgttcgaagacttcctcggcagcgacttcttccgcatcggtgacgattcg

SEQ ID NO: 85506 - DNA, 75 bp, synthetic construct
  source 1..75: mol_type = other DNA
cgctggattaactggttcacgctgtcgagtgttgaaggtctgaaatcattacccgcaggacgttcccgccgctgg

SEQ ID NO: 85507 - DNA, 75 bp, synthetic construct
  source 1..75: mol_type = other DNA
tatcaggctgaacagcgcggtaacaccgttgttctgcaacagatggagctgaccgactacgctaacatggcgctg

SEQ ID NO: 85508 - DNA, 75 bp, synthetic construct
  source 1..75: mol_type = other DNA
tcgctgagctggaaaggctgctctctgagcaggctgaagccctccgtcagaaagaccagcaactgagtctggttg

SEQ ID NO: 85509 - DNA, 75 bp, synthetic construct
  source 1..75: mol_type = other DNA
acaacagtggcgcacataacacaggtggtaacattaatggcggccctacggggcttggtggaaatggtggggctt

SEQ ID NO: 85510 - DNA, 75 bp, synthetic construct
  source 1..75: mol_type = other DNA
atgtttagcataagatccctactacctattagcgccagcgtatcagttccagcaaaacaatctcaccccatccca

SEQ ID NO: 85511 - DNA, 75 bp, synthetic construct
  source 1..75: mol_type = other DNA
cggaagtgtttcgctcgccggtcagtcattaccggatgcgtgcggagttccgcatctggcacgatggcgatgacc

SEQ ID NO: 85512 - DNA, 75 bp, synthetic construct
  source 1..75: mol_type = other DNA
tggatacagcaacagatgaaaacactgtcgcgtcactcagatacggcaaaagcgttcgcatacctgctgaaacag

SEQ ID NO: 85513 - DNA, 75 bp, synthetic construct
  source 1..75: mol_type = other DNA
aaatttactgctctggaaaatacgctgaatgctgcccggccacatctgggtgaattatatgaggcgtataaaacg

SEQ ID NO: 85514 - DNA, 75 bp, synthetic construct
  source 1..75: mol_type = other DNA
atgaaaattatcacccgtggtgaagccatgcgcattcaccgtcagcatcctgcatcccgtctttttccgttctgt

SEQ ID NO: 85515 - DNA, 75 bp, synthetic construct
  source 1..75: mol_type = other DNA
atgcttaaaaccttccgcgtcttttcccgtgctgttaataagcgcggctataccgttggcatcacgcagaacgtg

SEQ ID NO: 85516 - DNA, 75 bp, synthetic construct
  source 1..75: mol_type = other DNA
ctaaaaaggtgaaaaccggcagttcatccagtaagtcagtattgacctggcttgctgatatgtgcggtgccgatt

SEQ ID NO: 85517 - DNA, 75 bp, synthetic construct
  source 1..75: mol_type = other DNA
agagaataatccgcctcagttggttgccagcctcgtccctgatgaacagcgcatcagcttttggccgcagcattt

SEQ ID NO: 85518 - DNA, 75 bp, synthetic construct
  source 1..75: mol_type = other DNA
aaatgagcccggaagccgccggtattgccgcctgtctgatgacgtacagccatcatgcctgtcgtacggagtgtt

SEQ ID NO: 85519 - DNA, 75 bp, synthetic construct
  source 1..75: mol_type = other DNA
cgtcgtagtgatagcactggtaacgaggaaagacttctgcgaggtacgaatccgaaccggccagacggaggtcgc

SEQ ID NO: 85520 - DNA, 75 bp, synthetic construct
  source 1..75: mol_type = other DNA
cagagtgaaatctttgcccgacagggtgccgaactgagccgtgcattactctccaactgggttgacgcgtgctgc

SEQ ID NO: 85521 - DNA, 75 bp, synthetic construct
  source 1..75: mol_type = other DNA
gtaaaaccagatattcaccccacaaccgggaattattttttacagttattccccctacatgatgaggtgggaata

SEQ ID NO: 85522 - DNA, 75 bp, synthetic construct
  source 1..75: mol_type = other DNA
tttgatctacaaatggtcatacggcgaaccgttgatccgcttgatcatcgccgggccgatcctgatgggctgcat

SEQ ID NO: 85523 - DNA, 75 bp, synthetic construct
  source 1..75: mol_type = other DNA
atgcttattggctatgtacgcgtgtcaacaaatgaccagaacaccgatttgcaacgtaatgcgctgaactgcgcg

SEQ ID NO: 85524 - DNA, 75 bp, synthetic construct
  source 1..75: mol_type = other DNA
tacagtgggcgtgaggatgacccgctggttccccgccagttgcgacagtcacgccatcgtcgtccgttaccggca

SEQ ID NO: 85525 - DNA, 75 bp, synthetic construct
  source 1..75: mol_type = other DNA
tgacagcgatgacctgtgggaacctaacaaattggaattacaatatattcatttgaacgcaggtatggacattgt

SEQ ID NO: 85526 - DNA, 75 bp, synthetic construct
  source 1..75: mol_type = other DNA
tcgtggggtggcgggtctcatcgtccatggaaacgacattcgtgctggatgctctggagcaggcgttatgggccc

SEQ ID NO: 85527 - DNA, 75 bp, synthetic construct
  source 1..75: mol_type = other DNA
gctgactaccctgtgatggtatttatcaggaccacaaataccgcccagcccacgccagtaatatcttaccggaac

SEQ ID NO: 85528 - DNA, 75 bp, synthetic construct
  source 1..75: mol_type = other DNA
cgcggcactgagcggcaaaccgctggataaacctctcgcacactcgctgacccgtcactttattactcagcattt

SEQ ID NO: 85529 - DNA, 75 bp, synthetic construct
  source 1..75: mol_type = other DNA
tagcaaacatatcatcaacaataagaacccacctcccgacactacaaaaaaatataagaccacatccatcaccaa

SEQ ID NO: 85530 - DNA, 75 bp, synthetic construct
  source 1..75: mol_type = other DNA
cctgtcgtacggagtgttatgccatgacggtccattattaccggctgcgggattacgccctgcagcatccggaat

SEQ ID NO: 85531 - DNA, 75 bp, synthetic construct
  source 1..75: mol_type = other DNA
gccctctgattaacataattcgcggaacccaaacactggcacaaaaacgggtgcctaaaggggagttaactggaa

SEQ ID NO: 85532 - DNA, 75 bp, synthetic construct
  source 1..75: mol_type = other DNA
ccatcagtttccagccattgcttggggtcatatcagatcgcctgggactgaaaaaaaacctgatctggagtatca

SEQ ID NO: 85533 - DNA, 75 bp, synthetic construct
  source 1..75: mol_type = other DNA
aacgtagccgagtccggaacccatcaggaattgctggctcgccctgacggcatttaccactaccttcatcagttg

SEQ ID NO: 85534 - DNA, 75 bp, synthetic construct
  source 1..75: mol_type = other DNA
agggacaaaaatggtctgctggaagcaaccatgcgcgatatcaccagtcagctgcgtgacgcggttttgaatcga

SEQ ID NO: 85535 - DNA, 75 bp, synthetic construct
  source 1..75: mol_type = other DNA
gtcactgacagtgattttccttgctgctgacaggcgttttttttcatgggactgttttgttgtttgcaccctgtc

SEQ ID NO: 85536 - DNA, 75 bp, synthetic construct
  source 1..75: mol_type = other DNA
cctatctggttctgggcggtattgtccttgcggtcaccgtgttatcggctttcaccctgagcagtacccgtaaaa

SEQ ID NO: 85537 - DNA, 75 bp, synthetic construct
  source 1..75: mol_type = other DNA
ctgaccaagcgcccaagtgaagaagggcttgcctggattaagtttgattcaactggtgtagaagaagagctaaat

SEQ ID NO: 85538 - DNA, 75 bp, synthetic construct
  source 1..75: mol_type = other DNA
ctgttgcaattgctttctgttcagcagcaaatgcggcggatcagggacaaggtaaagtaaattttaaaggaaccg

SEQ ID NO: 85539 - DNA, 75 bp, synthetic construct
  source 1..75: mol_type = other DNA
agttcgctcagggaaagaactggagcgcaatgtgcggcaggctgacggattttgtgaacagcggcggacgctatt

SEQ ID NO: 85540 - DNA, 75 bp, synthetic construct
  source 1..75: mol_type = other DNA
cgtgcagaagtggaactggccacactcacgtgggtggactggtataacaatcgacgattgctgggaaggctgggc

SEQ ID NO: 85541 - DNA, 75 bp, synthetic construct
  source 1..75: mol_type = other DNA
acgctgggatttaaatccatgaagacggcttacgccaccatcaaaggtattgaggtgatgcgtgcactacgcaaa

SEQ ID NO: 85542 - DNA, 75 bp, synthetic construct
  source 1..75: mol_type = other DNA
tcagtgaactttctgaatatttgcgtaaaattaatcaaagtgaaaaagaaacaatcacagatcaattgcttctta

SEQ ID NO: 85543 - DNA, 75 bp, synthetic construct
  source 1..75: mol_type = other DNA
gggtggacaggtataacaatcgacgattgctggaaaggctgggccatatcccaccggcagaagcagaaaaagctt

SEQ ID NO: 85544 - DNA, 75 bp, synthetic construct
  source 1..75: mol_type = other DNA
actgacctgcgaggctgactcactcggatcgcatggctatatctatatagcgatttatccgacaccatcagtaac

SEQ ID NO: 85545 - DNA, 75 bp, synthetic construct
  source 1..75: mol_type = other DNA
gatattgtttttagtaacgatcctggccctttaaatataaaaagaggtactaaaatagttgctcaggaaaataca

SEQ ID NO: 85546 - DNA, 75 bp, synthetic construct
  source 1..75: mol_type = other DNA
atcaccccgacggcaataacaacagcccctggtgggggctgccctgtaccgtgacaccttgttttggcgcccgtc

SEQ ID NO: 85547 - DNA, 75 bp, synthetic construct
  source 1..75: mol_type = other DNA
gcaccgggtcagaaaaaggcgaaaacagggcgtatctgtcaacgacggatgaaaagtgatccacttatatctcca

SEQ ID NO: 85548 - DNA, 75 bp, synthetic construct
  source 1..75: mol_type = other DNA
cgggaaggaatcagggtggccagatgtacagtggcgcgcctcatggcggttatgagacttgccggtgttctccgg

SEQ ID NO: 85549 - DNA, 75 bp, synthetic construct
  source 1..75: mol_type = other DNA
ggtaaccgcgctgaaatgagtccggaagccgccggcattgcggcctgtctgatgacgtacagtcatcacgcctgt

SEQ ID NO: 85550 - DNA, 75 bp, synthetic construct
  source 1..75: mol_type = other DNA
ttgcggatgttggtcgggtgattctgattatgtcctcagatgcaaaaacacacgttgatggtggaatggctgttt

SEQ ID NO: 85551 - DNA, 75 bp, synthetic construct
  source 1..75: mol_type = other DNA
cccgctgcgttatgtcacaggcgtggtggcagggtttggtatgcaggagaacaacggctggcagatgcgttatca

SEQ ID NO: 85552 - DNA, 75 bp, synthetic construct
  source 1..75: mol_type = other DNA
ataatccgtacacaaatacgacggattacttcatcctgaagcagagcacctatggttatttccccacggaccaga

SEQ ID NO: 85553 - DNA, 75 bp, synthetic construct
  source 1..75: mol_type = other DNA
atgacaacctcttcgcataattccaccacaccttctgtttccgtaacaactgcatcagggaataaccagtctcaa

SEQ ID NO: 85554 - DNA, 75 bp, synthetic construct
  source 1..75: mol_type = other DNA
ggtggacagtgtgaatacccgctggggaaaattccgcccgtttttactcttcggtactgcgccgttaatgatctt

SEQ ID NO: 85555 - DNA, 75 bp, synthetic construct
  source 1..75: mol_type = other DNA
gccctctgattaacataattcgcggaacccaatgtctagccgacaagcgagttcctcaaggcttacttaccggca

SEQ ID NO: 85556 - DNA, 75 bp, synthetic construct
  source 1..75: mol_type = other DNA
gctaccctgaacgccgccgcgatatggaactccagctgctgcgcgaattgcgagaaaaagaggaaaagggtttta

SEQ ID NO: 85557 - DNA, 75 bp, synthetic construct
  source 1..75: mol_type = other DNA
cccagcgcgtccgccgctgtccacagtgtcatggtgacatgctacagattgtggcagacgacggtttacagattc

SEQ ID NO: 85558 - DNA, 75 bp, synthetic construct
  source 1..75: mol_type = other DNA
aagcacaggaactgcatgacagcattgtggctgagcttcagtccggtggtctgaaactgaaagacggcctgccgt

SEQ ID NO: 85559 - DNA, 75 bp, synthetic construct
  source 1..75: mol_type = other DNA
gtttgccgcggcagcgtggcggaaggttgtaaactgcacctcgaagaacaagaggccgaatgctggtgtgaaaca

SEQ ID NO: 85560 - DNA, 75 bp, synthetic construct
  source 1..75: mol_type = other DNA
aacatcaccgcacacacctgaattcctcagcaacgctaaaggcacttattaaaagcgagatcggtgatttcttcg

SEQ ID NO: 85561 - DNA, 75 bp, synthetic construct
  source 1..75: mol_type = other DNA
atgaacccggttgatcgtccactattagatattggcttaacgcgattagaattcttgcgtatatcaggaaaaggc

SEQ ID NO: 85562 - DNA, 75 bp, synthetic construct
  source 1..75: mol_type = other DNA
aagccggatgatcggttcgaatcacctgccggaatgtctgcgcgagcgaatgactcaggcggcgattgcggtggt

SEQ ID NO: 85563 - DNA, 75 bp, synthetic construct
  source 1..75: mol_type = other DNA
tgataggtatttttgttgatggcgatttttcagtcaaccaaaagactgctttttcaaaattggaacgagattttg

SEQ ID NO: 85564 - DNA, 75 bp, synthetic construct
  source 1..75: mol_type = other DNA
aacccgcactgctttaatgctgggcatcagtcgccgtgcattgatgtataaactccaggaatacggtatcgatcc

SEQ ID NO: 85565 - DNA, 75 bp, synthetic construct
  source 1..75: mol_type = other DNA
agataccatttatcacgccaaagacgcggtacaagcaaccaagcctgatatgcgtaagccacgcctagtggtgtt

SEQ ID NO: 85566 - DNA, 75 bp, synthetic construct
  source 1..75: mol_type = other DNA
tcggggatattatcgggcggctgttcttcagactgattgaaggaacatcaggcctcatcacctggtggcaatcgc

SEQ ID NO: 85567 - DNA, 75 bp, synthetic construct
  source 1..75: mol_type = other DNA
aaaccattggtatgggaatgagtggccagcagtataccagcgccttttttaacggtaatgcccgtcctgccggta

SEQ ID NO: 85568 - DNA, 75 bp, synthetic construct
  source 1..75: mol_type = other DNA
ttgctgaactgctggagccactgtatgacgtcctgcgccagtatgtgctgatgcccggtaaagtccatgccgatg

SEQ ID NO: 85569 - DNA, 75 bp, synthetic construct
  source 1..75: mol_type = other DNA
agtagttgatgaaactattaattttttatttaatgtccggaaaaagaaaaactttccagaagcatcttataaacc

SEQ ID NO: 85570 - DNA, 75 bp, synthetic construct
  source 1..75: mol_type = other DNA
actcaccggaccatcagggtaaacatccggagcaacaccttcgtcccttccgggtatcctgcaggcagatgcgtt

SEQ ID NO: 85571 - DNA, 75 bp, synthetic construct
  source 1..75: mol_type = other DNA
cctcccgctcacaatgcaaaggcgctttcccgatataaggccgtatatgctggatgaactaaaaagggaaatagc

SEQ ID NO: 85572 - DNA, 75 bp, synthetic construct
  source 1..75: mol_type = other DNA
ttctgtcatgatagaaggattcttgtattaaataatgaggaaaatatgggagtggcacactctcgtaacagagga

SEQ ID NO: 85573 - DNA, 75 bp, synthetic construct
  source 1..75: mol_type = other DNA
gaattggtaaaaaaacaacctgcttattgcattaaaaataaactagccgcataccgaatttcaaataaatctctt

SEQ ID NO: 85574 - DNA, 75 bp, synthetic construct
  source 1..75: mol_type = other DNA
tcttacgccactgtctatccgttagtgatgttcctgcgcattatcaccccccaattactggcggtgctcttctgg

SEQ ID NO: 85575 - DNA, 75 bp, synthetic construct
  source 1..75: mol_type = other DNA
ggtaaaaaggtccgtacgaccatcagccggaaagccgttgccgcaggcgaccgcgtaaaccgtcagtttgtggca

SEQ ID NO: 85576 - DNA, 75 bp, synthetic construct
  source 1..75: mol_type = other DNA
atctgtacaccctgaacaacggcggggcatttatggcacccgaaccggatgacgatgatgacgaaacatgggtac

SEQ ID NO: 85577 - DNA, 75 bp, synthetic construct
  source 1..75: mol_type = other DNA
ggttcgcctactcaccggaccatcagggtaaacatccggagcaacaccttcgtcccttccggggtatcctgcagg

SEQ ID NO: 85578 - DNA, 75 bp, synthetic construct
  source 1..75: mol_type = other DNA
atttctcgattaatgacattaccgcctggaacaaaagcatcattgggcatatggcctatgactccacctcatggc

SEQ ID NO: 85579 - DNA, 75 bp, synthetic construct
  source 1..75: mol_type = other DNA
ggtggccgcgatgaacgttcacggcttccggacatatgcgtcctgtcagggacatggctttcctgttacaaagct

SEQ ID NO: 85580 - DNA, 75 bp, synthetic construct
  source 1..75: mol_type = other DNA
aatgatgactctgatactacagccccatcgtcaccagcactgaaggcagaggatgacggttctgtttctgttgag

SEQ ID NO: 85581 - DNA, 75 bp, synthetic construct
  source 1..75: mol_type = other DNA
catatcaattcattccacaagctattgtagcagttggttcccgtacttctccaaatgtattatatcgtggggatt

SEQ ID NO: 85582 - DNA, 75 bp, synthetic construct
  source 1..75: mol_type = other DNA
agcagcgactgcggcaggatgctgaatcagcaataccacgtctgacatggggatggtcggtgaagggggctttta

SEQ ID NO: 85583 - DNA, 75 bp, synthetic construct
  source 1..75: mol_type = other DNA
atgggaaaaatcattacagttgcagggcataaaggcggcataggcaaaagcaccgtgctttgttccttatgtgtc

SEQ ID NO: 85584 - DNA, 75 bp, synthetic construct
  source 1..75: mol_type = other DNA
tacgccagaacgagggggtaagcatggcgaattacgcgataatgcgctgcaaaaagctgacgggaatgggcagtg

SEQ ID NO: 85585 - DNA, 75 bp, synthetic construct
  source 1..75: mol_type = other DNA
tggtatcaccggtactgtcgtcgttcactgcgtgcagacttcaggacgctgatattgttactgaagtcgttatct

SEQ ID NO: 85586 - DNA, 75 bp, synthetic construct
  source 1..75: mol_type = other DNA
gcagtggctggcgcatataaggataaggaacgctatcctgttttttatcgtctggggtctggtacccagtatatc

SEQ ID NO: 85587 - DNA, 75 bp, synthetic construct
  source 1..75: mol_type = other DNA
ctgcattcggaggatgccattgaagggccgctggcgtttgccgagaagcgcgatccggtgtggaaaggacgttaa

SEQ ID NO: 85588 - DNA, 75 bp, synthetic construct
  source 1..75: mol_type = other DNA
caaaatcggctctaatcttgcgggtgggcttgcgggttcgctggacactctgcgccgccatatcctggacaactt

SEQ ID NO: 85589 - DNA, 75 bp, synthetic construct
  source 1..75: mol_type = other DNA
atcaggaagcactgggttgcgttgtgcaacttctgtgatgacggtctggcggaggcggacaataacacagcggaa

SEQ ID NO: 85590 - DNA, 75 bp, synthetic construct
  source 1..75: mol_type = other DNA
agtgcaggatattcccggcgtgctggctgtgtttgccgaacgccgtaaggacagttttggcctgtatgtccggct

SEQ ID NO: 85591 - DNA, 75 bp, synthetic construct
  source 1..75: mol_type = other DNA
gggcttgcgggttcgctggacactctgcgccgccatatcctggacaacttcccgcgtatcgagcagaccctgacg

SEQ ID NO: 85592 - DNA, 75 bp, synthetic construct
  source 1..75: mol_type = other DNA
tcccctcaacctgcgctgatgaataacggaggttcattgctgaccagcggcgatctgacaatcaccgcaggcagt

SEQ ID NO: 85593 - DNA, 75 bp, synthetic construct
  source 1..75: mol_type = other DNA
ggtatgaacttggtcttctgcattttcttaatggggaacaggtaaaagctgcaactgcatttcgtcgcggatttg

SEQ ID NO: 85594 - DNA, 75 bp, synthetic construct
  source 1..75: mol_type = other DNA
tacatggtgggggatcatcgttgcgcgatccttatgctcctcgacaaggctggaaaccaactatgggatgtaccc

SEQ ID NO: 85595 - DNA, 75 bp, synthetic construct
  source 1..75: mol_type = other DNA
cggcgagcctcctgccgtgaccgcgccgctggagcaggtgcagatagaccatacggtcatcgacctgatcgtggt

SEQ ID NO: 85596 - DNA, 75 bp, synthetic construct
  source 1..75: mol_type = other DNA
accgggactgaaaaaactgctcaggacattatcggcaggtgacactttggttgtctggaagctggacaggttggg

SEQ ID NO: 85597 - DNA, 75 bp, synthetic construct
  source 1..75: mol_type = other DNA
aacagggctggttcgttatggaacaacatttgtgcctgaggaaagggggggagtatctgaggcaacagaagtttg

SEQ ID NO: 85598 - DNA, 75 bp, synthetic construct
  source 1..75: mol_type = other DNA
cttgccttggggcaaaatgcgcaagcatcaaacacaaacaccattgcattaggccagaacagcagcgcatcaacc

SEQ ID NO: 85599 - DNA, 75 bp, synthetic construct
  source 1..75: mol_type = other DNA
taaggcaataccataaagaatcaatagttgagttatcttcatctttaggtattccaaaagacaaaatagtatcgc

SEQ ID NO: 85600 - DNA, 75 bp, synthetic construct
  source 1..75: mol_type = other DNA
acaacgcaatgcgctgaactgtgcagggtgtgagctgatttttgaagacaagataagcggtacaaagtccgagac

SEQ ID NO: 85601 - DNA, 75 bp, synthetic construct
  source 1..75: mol_type = other DNA
gttcccttcatcatttccggtactccctgtagccgcgcctgcaggctggaaccttccagcgctggtgtcactgat

SEQ ID NO: 85602 - DNA, 75 bp, synthetic construct
  source 1..75: mol_type = other DNA
ccatgcgtattcaccaacaacatcctgcatcccgtctttttccgttctgcacaggtaagtaccgctggcacggtg

SEQ ID NO: 85603 - DNA, 75 bp, synthetic construct
  source 1..75: mol_type = other DNA
tgttaaaaatgctgatggaacgattgccagtaccgtagcagaaaacaaaatcatcaatgtaaaagatggcgatat

SEQ ID NO: 85604 - DNA, 75 bp, synthetic construct
  source 1..75: mol_type = other DNA
attgttccagaagctgaaaaaagagatcccggacgaagttcacgttgatccatacctgtgcacttactattacga

SEQ ID NO: 85605 - DNA, 75 bp, synthetic construct
  source 1..75: mol_type = other DNA
tgttttaaagggctgcgctttatggatgacaaatatccttttcatcgcgacttatggcgaaaaccgactgcgtcg

SEQ ID NO: 85606 - DNA, 75 bp, synthetic construct
  source 1..75: mol_type = other DNA
cagcattgatacgtcaacacccatgggacgtttcttttttcacgtcatgggggctttagcggaaatggagcgtga

SEQ ID NO: 85607 - DNA, 75 bp, synthetic construct
  source 1..75: mol_type = other DNA
tcgcgctgggtgcatcgtcagtagcaaatggcgatcgttcgatggcttttggtcgttacgcaaagacgaatggtt

SEQ ID NO: 85608 - DNA, 75 bp, synthetic construct
  source 1..75: mol_type = other DNA
agctttaggatatgacgcgatagccgaaggtgagtacagttctgccatcgggtcaaaaacccttgcaactggtgg

SEQ ID NO: 85609 - DNA, 75 bp, synthetic construct
  source 1..75: mol_type = other DNA
taaggcaataccataaagaatcaatagttgacttatcatcatctttaggtattccaaaaagcagaatagtagaga

SEQ ID NO: 85610 - DNA, 75 bp, synthetic construct
  source 1..75: mol_type = other DNA
gacatcccgtctttttccgttctgtaccggtaagtaccgctggcacggcagtgctgaagcgtataccggtcgtga

SEQ ID NO: 85611 - DNA, 75 bp, synthetic construct
  source 1..75: mol_type = other DNA
ttgtctggaagctggatcggctggggcgtagtatgcggcatctggtcattctggttgaggagttgcgcgaacgtg

SEQ ID NO: 85612 - DNA, 75 bp, synthetic construct
  source 1..75: mol_type = other DNA
atgatatttgttagttttggtgttatagctgattgcgaaatacaagctaaagatcatgattgttttactattttc

SEQ ID NO: 85613 - DNA, 75 bp, synthetic construct
  source 1..75: mol_type = other DNA
accggttcacaaaattattatcgcgctttcagactggtaccagatacgggacccgcagcaacattgaatcctcaa

SEQ ID NO: 85614 - DNA, 75 bp, synthetic construct
  source 1..75: mol_type = other DNA
tatctgcgccatattctgagcgtactgccggaatggccctccaaccgtgttgacgaactcctgccatggaacgtg

SEQ ID NO: 85615 - DNA, 75 bp, synthetic construct
  source 1..75: mol_type = other DNA
tttgtgatgaagccgaccgacttttgcaactgaacatcaatctgctccggcaaatggttgatgagccggatgtgt

SEQ ID NO: 85616 - DNA, 75 bp, synthetic construct
  source 1..75: mol_type = other DNA
accaaaagcagcggctacttgatcgtcgatatttataatgaaatcctgcgcatgctgtccaaccgcattgccgga

SEQ ID NO: 85617 - DNA, 75 bp, synthetic construct
  source 1..75: mol_type = other DNA
atgcttatcccgctggcaaatgtccttggttgcgacccgatgtggctgttaaccggtaaaccaacagcaggagat

SEQ ID NO: 85618 - DNA, 75 bp, synthetic construct
  source 1..75: mol_type = other DNA
aatcgtcagggggattgaaacaggttttcgtggtacggccctgtatgccacagaaaagatcgccggacgcatcaa

SEQ ID NO: 85619 - DNA, 75 bp, synthetic construct
  source 1..75: mol_type = other DNA
gcgttaattttcgcagcctgacggatgctattgataccagcacgccgatggggcgttttttctttcatgtgatgg

SEQ ID NO: 85620 - DNA, 75 bp, synthetic construct
  source 1..75: mol_type = other DNA
atgttcttcggcaacgatcatggaggcgagcgtggagctctgctgtacggactaatcgggagctgtcggttgaac

SEQ ID NO: 85621 - DNA, 75 bp, synthetic construct
  source 1..75: mol_type = other DNA
taccttcgccatatcctgagcgtattgccggagtggcccatcaacaaagtggccgaactgctgccatggaacgta

SEQ ID NO: 85622 - DNA, 75 bp, synthetic construct
  source 1..75: mol_type = other DNA
cgcgtacagggacgaattggtggacgtcgtcccaaacttacaccagaacaatgggcacacaggccggacgattaa

SEQ ID NO: 85623 - DNA, 75 bp, synthetic construct
  source 1..75: mol_type = other DNA
gctcatcgtcttacctttcagcccggtgaacgaagaatgacgctggtcgatctgcccggcactggcgaaacacca

SEQ ID NO: 85624 - DNA, 75 bp, synthetic construct
  source 1..75: mol_type = other DNA
agccttttcagggaacaattctgttccgtattttgcagcgtggtcgtgttcttgttgaaggttcgttcagtggta

SEQ ID NO: 85625 - DNA, 75 bp, synthetic construct
  source 1..75: mol_type = other DNA
aaagcctgtacaaaatgtgactgcatcgttgaagcaccggcaccgtcccgtccgatagcgcgtggtgtcgcgggc

SEQ ID NO: 85626 - DNA, 75 bp, synthetic construct
  source 1..75: mol_type = other DNA
ccagggccgggaggattacaggaaacgagattttgccccggacagccccgaaataaaattcagtgatcgcaggga

SEQ ID NO: 85627 - DNA, 75 bp, synthetic construct
  source 1..75: mol_type = other DNA
atgatggcggggaaaatccccgctttttttctgccggtccccggaaagagcaaaaggatgtcgccgcaggctccg

SEQ ID NO: 85628 - DNA, 75 bp, synthetic construct
  source 1..75: mol_type = other DNA
tttcgcctaataggttttcatcgtaatgccggatatatattggggttaccacctcaggatgaaccaccgcgactt

SEQ ID NO: 85629 - DNA, 75 bp, synthetic construct
  source 1..75: mol_type = other DNA
tgggagtacattcgtcctgataattcatcaggtgccggaaatcaatcaaaccaattcttctcttccttcctcgaa

SEQ ID NO: 85630 - DNA, 75 bp, synthetic construct
  source 1..75: mol_type = other DNA
ttcaaggaaaaggcggtgtaggaaaatcatttacaacagcaatactagcacaatactttattgatgaaaaaaaca

SEQ ID NO: 85631 - DNA, 75 bp, synthetic construct
  source 1..75: mol_type = other DNA
gctggacgattaattgcagcaggaactcctcgccagaaggtggcgatcatctatgatgtgggcgtatcgactttg

SEQ ID NO: 85632 - DNA, 75 bp, synthetic construct
  source 1..75: mol_type = other DNA
tggtgggtgaaggatatgacatagctatcaaatatgggccactgcaatcctctgatcttgttgcaagattactgt

SEQ ID NO: 85633 - DNA, 75 bp, synthetic construct
  source 1..75: mol_type = other DNA
tacacaagaaggaaatcaaggaaaccttacagaggtcaactttgaagaggttgcagaacggcttgtgcgtaatgc

SEQ ID NO: 85634 - DNA, 75 bp, synthetic construct
  source 1..75: mol_type = other DNA
aaggtggtgaagggcgtgagctttatgcttcgcctgaccgtggcagcggatgacggcagtgagcggctggtcagc

SEQ ID NO: 85635 - DNA, 75 bp, synthetic construct
  source 1..75: mol_type = other DNA
ttcgtttcacctccagagggcgtgaatacgaagttgacgaacggctgattaaaacgctcgaccgtcaccgttcgc

SEQ ID NO: 85636 - DNA, 75 bp, synthetic construct
  source 1..75: mol_type = other DNA
catccgacatcccgtctttttccgttctgtaccggtaaataccgctggcacggcagtgctgaagcgtataccggt

SEQ ID NO: 85637 - DNA, 75 bp, synthetic construct
  source 1..75: mol_type = other DNA
cttccagccgtgttgatgaactcctgctgcatattagcatggaggtgttcggtgagtgccggacgacgtattctc

SEQ ID NO: 85638 - DNA, 75 bp, synthetic construct
  source 1..75: mol_type = other DNA
tggcctgcaacaactggttgccaccatagtccctgatgaacagcgcatcagtttctggccgcagcactttggcct

SEQ ID NO: 85639 - DNA, 75 bp, synthetic construct
  source 1..75: mol_type = other DNA
ggaaaaaatcccgatgccccgattatctcaataggtgcaatatttttcgatccgcaaaccggagatatgggaccg

SEQ ID NO: 85640 - DNA, 75 bp, synthetic construct
  source 1..75: mol_type = other DNA
tctgggacggcagtctgaaaccggcatacagcaacaacccggcctggtgtctgtgggacatgctgactcacccgc

SEQ ID NO: 85641 - DNA, 75 bp, synthetic construct
  source 1..75: mol_type = other DNA
ggatgaggggctggtcacccactggcactatgacgaagcagaccgcctcacgcaccgcaccgtgaagggtgaaac

SEQ ID NO: 85642 - DNA, 75 bp, synthetic construct
  source 1..75: mol_type = other DNA
attcagcttacgctgacaacgtacttggtcatgattggtgccggtcagctcttgtttggaccgctatcggaccga

SEQ ID NO: 85643 - DNA, 75 bp, synthetic construct
  source 1..75: mol_type = other DNA
ggtcacggcagtctacttctgcttgggcggtgtactgctaggaagcatcggaacgttgatcatttcgctgttgcc

SEQ ID NO: 85644 - DNA, 75 bp, synthetic construct
  source 1..75: mol_type = other DNA
ataaaacgccgcgatcaggagaacgaggaaattgcgctaacggtagggaagctgcgtgttgagctggaagccgca

SEQ ID NO: 85645 - DNA, 75 bp, synthetic construct
  source 1..75: mol_type = other DNA
gaaaactcagcaggaaaaatcaacccagtcactgccgccatttgtcgcgaatacaagcagacatggaaaacgctg

SEQ ID NO: 85646 - DNA, 75 bp, synthetic construct
  source 1..75: mol_type = other DNA
agtcagggtcaatagcccgattatggttaagcagttagccctcgatgactttgggattgcaatgctatcaaactc

SEQ ID NO: 85647 - DNA, 75 bp, synthetic construct
  source 1..75: mol_type = other DNA
accgctggtggagtacacccgcgaccgcctgcaccgggaaacgctgcgcagcttcggccgttatgaactcaccac

SEQ ID NO: 85648 - DNA, 75 bp, synthetic construct
  source 1..75: mol_type = other DNA
tacagattgtggttgatgagatccgcgacacactggaaaaggcagtcattgactgctgtgatgaggccgatatgt

SEQ ID NO: 85649 - DNA, 75 bp, synthetic construct
  source 1..75: mol_type = other DNA
ccgtggcgttactacaacgatcgcgatgtacgcacaatcgttgagctggggaaagccatagacttcgatgccaga

SEQ ID NO: 85650 - DNA, 75 bp, synthetic construct
  source 1..75: mol_type = other DNA
ccggcaccttccggcttgatattggtgtactggaaagcggtatcacagaggcaatgtatcaggaaatggaacggc

SEQ ID NO: 85651 - DNA, 75 bp, synthetic construct
  source 1..75: mol_type = other DNA
aagcgttcagctatgtactgaatcagtgggacgccctctgttattacagtgatgacggtctggcggaggcggaca

SEQ ID NO: 85652 - DNA, 75 bp, synthetic construct
  source 1..75: mol_type = other DNA
gcgttagtcgaaatgcataaagcaggccaggtcagctttaagcacgttgtcaccttcaacatggacgaatatgtc

SEQ ID NO: 85653 - DNA, 75 bp, synthetic construct
  source 1..75: mol_type = other DNA
atggacggcgagctgaaaaatatgaagttaaatattaatcaactggcagccctttcaggcctgcaccggcagacc

SEQ ID NO: 85654 - DNA, 75 bp, synthetic construct
  source 1..75: mol_type = other DNA
cttccggggtatcctgcaggcggatgcgttcacaggttacgacaggttgttcagtgcagaacgtgaaggtggtgc

SEQ ID NO: 85655 - DNA, 75 bp, synthetic construct
  source 1..75: mol_type = other DNA
ctgacgccgatgaactgcttgcagtatcacgtggtgaatttgttgaagggattagcgacccgaatgatccgaaat

SEQ ID NO: 85656 - DNA, 75 bp, synthetic construct
  source 1..75: mol_type = other DNA
ggtgccgtactgcgtgtccggccgaaagccatgaccgtggcggtgatcattgcgggtctgctgccaatactctgg

SEQ ID NO: 85657 - DNA, 75 bp, synthetic construct
  source 1..75: mol_type = other DNA
cggttgaaggcgtggcccggtaccctattaacattcgctatccgcaggattaccgtaacagtccgcaggcgttga

SEQ ID NO: 85658 - DNA, 75 bp, synthetic construct
  source 1..75: mol_type = other DNA
attctggtgctgaataaagccgggcaaattcagtgggcaaaggacggcagcctgacgccggaagaggtagatcat

SEQ ID NO: 85659 - DNA, 75 bp, synthetic construct
  source 1..75: mol_type = other DNA
ccggggtggcagcagagtttggcgtggtcatgctgatgtatctgcgtcatgccattgaagcgcacccggaattgt

SEQ ID NO: 85660 - DNA, 75 bp, synthetic construct
  source 1..75: mol_type = other DNA
atgcaaattggctatgttcgtgtgtcaacaaatgaccagaacacggatttacaacgcaatgcactgaactgcgca

SEQ ID NO: 85661 - DNA, 75 bp, synthetic construct
  source 1..75: mol_type = other DNA
gctgggcggcacgccgtttcgcgtagcttcaacgctggcgatgcaaaaaccgggctgtgaagtgatcaccggcac

SEQ ID NO: 85662 - DNA, 75 bp, synthetic construct
  source 1..75: mol_type = other DNA
gcggttatcttcagagcattgatgattttaataacatcgtcctgaaaacaggcgagaacggcgtgccggtttatc

SEQ ID NO: 85663 - DNA, 75 bp, synthetic construct
  source 1..75: mol_type = other DNA
tgtcctttattcctatctttaccctggaaggtcaggaaggacgtctgtttggcccgctggcattcacgaaaacgt

SEQ ID NO: 85664 - DNA, 75 bp, synthetic construct
  source 1..75: mol_type = other DNA
gaatggcagtcacgggcgatagccatgaacaaggccctggtctttggcacaaaattctggtgcgtccgggaaggt

SEQ ID NO: 85665 - DNA, 75 bp, synthetic construct
  source 1..75: mol_type = other DNA
cccggcctgaactggtggaagatatcttcgcactgcccgttgaacggcatatgctttattttattcagactgata

SEQ ID NO: 85666 - DNA, 75 bp, synthetic construct
  source 1..75: mol_type = other DNA
tcagacacatcgcgtccggtgttcggggtgatcacctacatcatcaacgatgctcgctctggcgagttcgacgac

SEQ ID NO: 85667 - DNA, 75 bp, synthetic construct
  source 1..75: mol_type = other DNA
cgggggcatctggaatctgtacaccctgaacaacggtggcgcatttatggcccccgaaccggatgacgatgatga

SEQ ID NO: 85668 - DNA, 75 bp, synthetic construct
  source 1..75: mol_type = other DNA
gagtatggtacctgccatgtttctgcacatgatgtcaaagttaatcttccggattatcccggagggccggttgct

SEQ ID NO: 85669 - DNA, 75 bp, synthetic construct
  source 1..75: mol_type = other DNA
tgggccgtgaaggacataacgtgacgaaagttagtcgtcgtgatttaccttttgtcgttgctgcagggaaaaatg

SEQ ID NO: 85670 - DNA, 75 bp, synthetic construct
  source 1..75: mol_type = other DNA
ttcgatgggcggcatgaaacagaccatcagccgtgaagagttgatagcgctcggcaagcgtttcggcgttacgcc

SEQ ID NO: 85671 - DNA, 75 bp, synthetic construct
  source 1..75: mol_type = other DNA
gaggttgcctgacaagaatgaagcatcagacacatcgcgtccggtgttcggggtgatcacctacatcatcaacga

SEQ ID NO: 85672 - DNA, 75 bp, synthetic construct
  source 1..75: mol_type = other DNA
atgtctaacactagttctaattttgagatggctggcgttttgttaggaaaagaggtgcgtaaacgtaaaacacct

SEQ ID NO: 85673 - DNA, 75 bp, synthetic construct
  source 1..75: mol_type = other DNA
tgccactgtaccgtcagagtgaaatctttgcccgacagggtgtcgaactgagccgtgcattactctccaactggg

SEQ ID NO: 85674 - DNA, 75 bp, synthetic construct
  source 1..75: mol_type = other DNA
gtgggacgccctctgttattacagtgatgacggtctggcggaggcggacaataacacagcagaaagagcgcttcg

SEQ ID NO: 85675 - DNA, 75 bp, synthetic construct
  source 1..75: mol_type = other DNA
atgaaaacatggttaatggggttcagcgagttcctgttgcgctataaacttgtctggagtgaaacatggaaaatc

SEQ ID NO: 85676 - DNA, 75 bp, synthetic construct
  source 1..75: mol_type = other DNA
ggaaagctgacacgacaattatatcctccgggagccggcaggttgttgagaaagatggtacggcaactggcagca

SEQ ID NO: 85677 - DNA, 75 bp, synthetic construct
  source 1..75: mol_type = other DNA
cacaaactgctccagtggagacggcagaatccgatactcaaaaaaatgaaatcctggtggaagctgaaccatctg

SEQ ID NO: 85678 - DNA, 75 bp, synthetic construct
  source 1..75: mol_type = other DNA
gtaaataaatatcgcattgagataaaatttgatcctgttaccacaaatttaaagaaaaaggccatcagatatcgt

SEQ ID NO: 85679 - DNA, 75 bp, synthetic construct
  source 1..75: mol_type = other DNA
gacggagggaatagaaactatattctaattcagctccctgaaatgatttcgccagataataaagaacaaaaaaca

SEQ ID NO: 85680 - DNA, 75 bp, synthetic construct
  source 1..75: mol_type = other DNA
gttctggacgggatcaacaactcagggctgggtaaagtatggtttgccggtagaggaattgcgccatcctggcaa

SEQ ID NO: 85681 - DNA, 75 bp, synthetic construct
  source 1..75: mol_type = other DNA
cgacagcggtggtgaacatgcggcggtgttgtactcgctgatcggcacatgtcgtctgaacaatgtggagccaga

SEQ ID NO: 85682 - DNA, 75 bp, synthetic construct
  source 1..75: mol_type = other DNA
atgaagccaattcccccagcgttaagggaaaatgaggtcaacatggatactatcgatcttagcaacaacgaatcc

SEQ ID NO: 85683 - DNA, 75 bp, synthetic construct
  source 1..75: mol_type = other DNA
cagaccatctgccgttataccgccagtcagaaatataccgtcgtcagggaatggagctgagccgtgccacactgg

SEQ ID NO: 85684 - DNA, 75 bp, synthetic construct
  source 1..75: mol_type = other DNA
tcgtatgacaacgcgatggctgagagcatcaatggtctttacaaagcggaggtaatacaccgtaagagctggaaa

SEQ ID NO: 85685 - DNA, 75 bp, synthetic construct
  source 1..75: mol_type = other DNA
ggctggtatcccacagcaagtatcagcgatttgctggttgttgtgatgaagaaagccactgcaggcatcacgatt

SEQ ID NO: 85686 - DNA, 75 bp, synthetic construct
  source 1..75: mol_type = other DNA
caggacttgggaaagtatggtttgcaggacgcgggattgcgccagaatggcagatgaagagagaaatgctttcac

SEQ ID NO: 85687 - DNA, 75 bp, synthetic construct
  source 1..75: mol_type = other DNA
attgggctgaaggggggatggaatttttatcagtatccgctgaatccggttcagtatatagattcaatgggactg

SEQ ID NO: 85688 - DNA, 75 bp, synthetic construct
  source 1..75: mol_type = other DNA
gtggttcaatacttcatgatacgagtcaaattcggatcccggacccggttctgttttacctgaaatcctatacag

SEQ ID NO: 85689 - DNA, 75 bp, synthetic construct
  source 1..75: mol_type = other DNA
atgcaaaaaatcgacctcggcaataacgaatccctggtgtgcggcgtgttccccaaccaggatggaacgttcact

SEQ ID NO: 85690 - DNA, 75 bp, synthetic construct
  source 1..75: mol_type = other DNA
tatgggacttgccggtgttctccgggggaaaaaggtccgtacgaccatcagccggaaagccgttgccgcaggcga

SEQ ID NO: 85691 - DNA, 75 bp, synthetic construct
  source 1..75: mol_type = other DNA
atgccatgacggtccattattatcggttgcgggattacgccctgcaacatccggaatgcagcgccattatgcgca

SEQ ID NO: 85692 - DNA, 75 bp, synthetic construct
  source 1..75: mol_type = other DNA
gacgaaaaagaagagcgctatggcctgaactggcatggtaaacgtcaggctcgccagcttgctctaaccccatct

SEQ ID NO: 85693 - DNA, 75 bp, synthetic construct
  source 1..75: mol_type = other DNA
ttgggtgccaaacttcgacggcacgttgcaagagccgaagatgctccccgctcgcttgccgaatattttacttaa

SEQ ID NO: 85694 - DNA, 75 bp, synthetic construct
  source 1..75: mol_type = other DNA
tatgttgtgcaacaggacgcgttacagaaagagggtgatgcggtttccggcggcgtaacgttgcggaggaaataa

SEQ ID NO: 85695 - DNA, 75 bp, synthetic construct
  source 1..75: mol_type = other DNA
tcgtgcaggggccggattatccgactgaagcggaaattatcacttcgcgcgccgagatccgtaaaatctacgaga

SEQ ID NO: 85696 - DNA, 75 bp, synthetic construct
  source 1..75: mol_type = other DNA
acggcgatgacgtataccaaaagcaaaacgtttaaaaccgaagctggcgcgcgtcgctggttagccagaaatact

SEQ ID NO: 85697 - DNA, 75 bp, synthetic construct
  source 1..75: mol_type = other DNA
gagggaaaaacacaatggcaggatcaatgcgttctgtgttgtctgatatgtttcgcgaggccattgttgaaggac

SEQ ID NO: 85698 - DNA, 75 bp, synthetic construct
  source 1..75: mol_type = other DNA
ctggcacccacacggaccgccgccatcgccgcgccataacaagcacaatgatcatcgtggcgatcatcgtccggg

SEQ ID NO: 85699 - DNA, 75 bp, synthetic construct
  source 1..75: mol_type = other DNA
gggtggtgaaaaaggaacacgcggacggcagcgtcacgcagagtcagtttgatgcggtgggcaggcttaaggcac

SEQ ID NO: 85700 - DNA, 75 bp, synthetic construct
  source 1..75: mol_type = other DNA
ggtaaaacgccacggtattcaggtgacggcagacagaaaagaatatcctgagaaatgcttcagtgcactggaaga

SEQ ID NO: 85701 - DNA, 75 bp, synthetic construct
  source 1..75: mol_type = other DNA
aaaaacacaggctcaggtctataagacaggtgtcttaaatgttgatgctctgaactggcctgagtctgtaaaaga

SEQ ID NO: 85702 - DNA, 75 bp, synthetic construct
  source 1..75: mol_type = other DNA
atgacaggaaacaactggcgatcatttacgacatcggcatatcgacgatttatcgttatcaccctgtaggcgata

SEQ ID NO: 85703 - DNA, 75 bp, synthetic construct
  source 1..75: mol_type = other DNA
gagggcgatggctggtttattggttccattcatgatacggaagatggcccggtttgtgtctggttgcgaaataag

SEQ ID NO: 85704 - DNA, 75 bp, synthetic construct
  source 1..75: mol_type = other DNA
ggttacttgtgggatatgatgagttggtgctcaaagcctttcaggcgtttcattatggtcttatcgcccgggcgc

SEQ ID NO: 85705 - DNA, 75 bp, synthetic construct
  source 1..75: mol_type = other DNA
cgttcacgaaccggtgtggcaaatgaaagttcgaacatacagacaatcatcacaagtactcaggggctgctaaaa

SEQ ID NO: 85706 - DNA, 75 bp, synthetic construct
  source 1..75: mol_type = other DNA
cagcatagatacgtcttcaccaatgggacgctttttcttccatgtcatgggcgcacttgcagaaatggaaaggga

SEQ ID NO: 85707 - DNA, 75 bp, synthetic construct
  source 1..75: mol_type = other DNA
gcagaagtccggggatgttcagcagaacagcgtctggcagcaagaaaagccagagcggctccactgatgcagtca

SEQ ID NO: 85708 - DNA, 75 bp, synthetic construct
  source 1..75: mol_type = other DNA
caacaaatgaacaaaacactgctttacaacgaaatgcccttgaaagcgcaggatgtgagctaatttttgaggata

SEQ ID NO: 85709 - DNA, 75 bp, synthetic construct
  source 1..75: mol_type = other DNA
aataacacagaccgtcaataagaaactggaagaccagagtgcagcgatccagcagatacagaaggttcaggttga

SEQ ID NO: 85710 - DNA, 75 bp, synthetic construct
  source 1..75: mol_type = other DNA
tatatcagcagcaagtcgcactgatttatgatctgggtatttcaacggtgtataaaaaattccctgtagcaagta

SEQ ID NO: 85711 - DNA, 75 bp, synthetic construct
  source 1..75: mol_type = other DNA
gtgccacgcgtttaattgagtcgtatatcttccggcgcgcagtctgtgccattcccaccaactcatttactaaaa

SEQ ID NO: 85712 - DNA, 75 bp, synthetic construct
  source 1..75: mol_type = other DNA
tgatgactgccttgtctggtacgatatcccggtgggacggaaaaaccggcatccggattttgtcattattgaccc

SEQ ID NO: 85713 - DNA, 75 bp, synthetic construct
  source 1..75: mol_type = other DNA
gtgagcgacctgacgggccgtccgctgatgctctttaacagtgaaggtaaaaccgtctggcgaccggggcagacc

SEQ ID NO: 85714 - DNA, 75 bp, synthetic construct
  source 1..75: mol_type = other DNA
agaacggcacgctgtacagtgctgcagacctgacgctggatataccggacatccgcaacagcgggcttatcaccg

SEQ ID NO: 85715 - DNA, 75 bp, synthetic construct
  source 1..75: mol_type = other DNA
ccccgaaacttatccggttgccggaagtaataagaaaaactggatttggcaggacatggatttatgagcttataa

SEQ ID NO: 85716 - DNA, 75 bp, synthetic construct
  source 1..75: mol_type = other DNA
ataacgaatcatcgcaggatatacattatcaggtgataccagagggcattaaactgtcgccacggataagaatat

SEQ ID NO: 85717 - DNA, 75 bp, synthetic construct
  source 1..75: mol_type = other DNA
cagtcgcagaaatatctgacgatgtggcgggctgaatcgctggatctgaatatggcaaaactcatcagcagtcat

SEQ ID NO: 85718 - DNA, 75 bp, synthetic construct
  source 1..75: mol_type = other DNA
ctttattaattgccggagtggcgacgttcagcacatcttctctggcggcacaatcattacgtttcggttatgaaa

SEQ ID NO: 85719 - DNA, 75 bp, synthetic construct
  source 1..75: mol_type = other DNA
actggcggagaggtaaactaccagccgcacgaatcactttctctgctgacgttctgcgtcctggtgctgcgcaac

SEQ ID NO: 85720 - DNA, 75 bp, synthetic construct
  source 1..75: mol_type = other DNA
gtccgccggtagtcaactatccgggggaaggtttccgggaaatgacaaaggcacagtgggccgccctgccccggg

SEQ ID NO: 85721 - DNA, 75 bp, synthetic construct
  source 1..75: mol_type = other DNA
cagcggcgctaaacatgagcgggagaataacgatatttattcgtcatgccgcctgatagtacggaaaaacggtgc

SEQ ID NO: 85722 - DNA, 75 bp, synthetic construct
  source 1..75: mol_type = other DNA
catcacgggcagttcaggaaatccgggctgcacgcgaacagtgggaacgtgaaaacggatttatcagcaacggaa

SEQ ID NO: 85723 - DNA, 75 bp, synthetic construct
  source 1..75: mol_type = other DNA
taccatgaaagcactggaaatggcatgggaaacccgtggtaagcccgtcggggtgatgttccaggcgatcaaggc

SEQ ID NO: 85724 - DNA, 75 bp, synthetic construct
  source 1..75: mol_type = other DNA
accacacaggacgggctgacgcgcagtatggagtatgacgcggcaggacgtgtcatcagcctgaccaacgagaac

SEQ ID NO: 85725 - DNA, 75 bp, synthetic construct
  source 1..75: mol_type = other DNA
ccgggtgtgcagctttgcattacctgccaggaaatcgcagagctgaaaggcaaacattacaacggaggtgctgta

SEQ ID NO: 85726 - DNA, 75 bp, synthetic construct
  source 1..75: mol_type = other DNA
cctgaagtgactgacggttatgccaatgctgatgagctgaaagacggtttgcaggcagaggtcacgttgccggca

SEQ ID NO: 85727 - DNA, 75 bp, synthetic construct
  source 1..75: mol_type = other DNA
aaatcctgcgttgtgcttctgaacgtgatgaagccagacaggttgcagactggctggagaagcgccatgccctgt

SEQ ID NO: 85728 - DNA, 75 bp, synthetic construct
  source 1..75: mol_type = other DNA
tcaccacccggccccgccggcgggagccgttatggccggtcacggatgagacaatgcgcaactggctgaaacagg

SEQ ID NO: 85729 - DNA, 75 bp, synthetic construct
  source 1..75: mol_type = other DNA
attgccgtgaaagacacgcagggccatgaaacgcggtatgaatacaacgccgccggtgacctgaccaccgtcatt

SEQ ID NO: 85730 - DNA, 75 bp, synthetic construct
  source 1..75: mol_type = other DNA
cggttgaaatgcgcctgcgtaagcatttctcacttgcaaatgacgatgtatggcagcgctgcgccgacaaactga

SEQ ID NO: 85731 - DNA, 75 bp, synthetic construct
  source 1..75: mol_type = other DNA
ctacttcacaactgatgatggttacaggatcatctcggcacgttttggtgtcccccgaacccaggtcaggacatg

SEQ ID NO: 85732 - DNA, 75 bp, synthetic construct
  source 1..75: mol_type = other DNA
atcaaaaccaccgagcgcaaactggctgagggagtgctggtgcatggtggtcagccactgatggcctggtgcgtt

SEQ ID NO: 85733 - DNA, 75 bp, synthetic construct
  source 1..75: mol_type = other DNA
cgcaggaaactgctggaaagcatcccgggtatcggagagaaaacatctgcggtattgctggcttatatcggtctg

SEQ ID NO: 85734 - DNA, 75 bp, synthetic construct
  source 1..75: mol_type = other DNA
gctggctgttttacgcgtatgacaggatacggaggacggttgtggcgcacgtcttcggtgaacgcactctggcca

SEQ ID NO: 85735 - DNA, 75 bp, synthetic construct
  source 1..75: mol_type = other DNA
acctgaacagcatgtgggccgtgaaactgcagcagatgcaggacggacgcctttatattgcgggtatcggtgccg

SEQ ID NO: 85736 - DNA, 75 bp, synthetic construct
  source 1..75: mol_type = other DNA
tatcgctcgccacgggaatatctacggcagcgggccagtaatgggttaagtgataacaggtgtctggaaatatag

SEQ ID NO: 85737 - DNA, 75 bp, synthetic construct
  source 1..75: mol_type = other DNA
ctggattcattggtagtgcaatgtgtaattatctaaaaaataataataagaatgtctttattccagagcgtgatt

SEQ ID NO: 85738 - DNA, 75 bp, synthetic construct
  source 1..75: mol_type = other DNA
cggcggataagggatcaggttctgaccatgtatcagaacgaccgcattgagaaatcagaagcagcgctcttcatc

SEQ ID NO: 85739 - DNA, 75 bp, synthetic construct
  source 1..75: mol_type = other DNA
ctaaaaatgcagatatcagtggcagtgtgaatgcgaacgccgggacgctcaacaatgtcacaattaatgagaact

SEQ ID NO: 85740 - DNA, 75 bp, synthetic construct
  source 1..75: mol_type = other DNA
ttgaatatgttgatgtaggtgcaacctattacttcaacaaaaatatgtccacttttgttgactacaaaatcaacc

SEQ ID NO: 85741 - DNA, 75 bp, synthetic construct
  source 1..75: mol_type = other DNA
tgaccctctgaaagcccttgacgacgcaatcagccagatcgacaaattccgctcctccctcggtgccgttcaaaa

SEQ ID NO: 85742 - DNA, 75 bp, synthetic construct
  source 1..75: mol_type = other DNA
aggcgtacactgttgccaatggtgctgagtcttatgacgttgctgcagttacgggggctgtaacaactacagcag

SEQ ID NO: 85743 - DNA, 75 bp, synthetic construct
  source 1..75: mol_type = other DNA
atgctgggagcggtggaacgccgcttcggcaacgatcttccgtcgtctccactggagtggctgacggataatggt

SEQ ID NO: 85744 - DNA, 75 bp, synthetic construct
  source 1..75: mol_type = other DNA
ccgtttttcagcatatccagagcctgccccacgggcagcagaaagaagccttactggcgtcagcagcactgcccc

SEQ ID NO: 85745 - DNA, 75 bp, synthetic construct
  source 1..75: mol_type = other DNA
cgttttacggtagctatgcaacaggctctctggataaactgcccctgctgtcaccggaatttgaaaacaatacca

SEQ ID NO: 85746 - DNA, 75 bp, synthetic construct
  source 1..75: mol_type = other DNA
gtccggtgactgaatctctcacctcaccacgtactgatacagaccgcatcgaatgcatgcccgtacccgatgaac

SEQ ID NO: 85747 - DNA, 75 bp, synthetic construct
  source 1..75: mol_type = other DNA
acctgaaaaaaatcgactcttctacactgaagctgaccagcttcaacgtcaacggtaaaggcgctgttgataatg

SEQ ID NO: 85748 - DNA, 75 bp, synthetic construct
  source 1..75: mol_type = other DNA
tgtttagctctgaaccgttggcgcaatttagcccactgctacatgccaaaaatatcattacaacgccgcatattg

SEQ ID NO: 85749 - DNA, 75 bp, synthetic construct
  source 1..75: mol_type = other DNA
aatatcaggtgctggcgcgctgggacacgccgaaggtggtgaagggcgtgagcttcctgctccgtctgaccgtaa

SEQ ID NO: 85750 - DNA, 75 bp, synthetic construct
  source 1..75: mol_type = other DNA
ccagcttttcagcacgctgtgtttccgccagcaagttgctaagagagaataattttaatcttattattaagaata

SEQ ID NO: 85751 - DNA, 75 bp, synthetic construct
  source 1..75: mol_type = other DNA
gtcaccaacctgaacaacaccactaccaacctgtccgaagcgcagtcccgtattcaggacgccgactatgcgacc

SEQ ID NO: 85752 - DNA, 75 bp, synthetic construct
  source 1..75: mol_type = other DNA
aatggcaaaggggctgtggctaacgcaaaagcgaccgaagcagatttaacgggggctggtttctctcaaggagcg

SEQ ID NO: 85753 - DNA, 75 bp, synthetic construct
  source 1..75: mol_type = other DNA
tgctgatatgggggcagagtgtggccgccgccgatcttggtacctggggcgatctgtggccggtaaaggagccgg

SEQ ID NO: 85754 - DNA, 75 bp, synthetic construct
  source 1..75: mol_type = other DNA
gctcaacaacgtcacgattaacgagaactgtcgggttctgggaaaactgtccgcgaaccagattgaaggcgatct

SEQ ID NO: 85755 - DNA, 75 bp, synthetic construct
  source 1..75: mol_type = other DNA
gtgtcgcatctgagtgacggttctttatgggatcgccgggcttttccggacaccacaatccttgaaatccgtccc

SEQ ID NO: 85756 - DNA, 75 bp, synthetic construct
  source 1..75: mol_type = other DNA
gatcatccgctggcgaacgttgaagagccgctaacagaagcgcagttgcggcgctttccggcggtcaatattgaa

SEQ ID NO: 85757 - DNA, 75 bp, synthetic construct
  source 1..75: mol_type = other DNA
ccagtgctggacagtgaggggaataccaatatctccggtgtcacggtggttttccgggcaggtgagcaggagcag

SEQ ID NO: 85758 - DNA, 75 bp, synthetic construct
  source 1..75: mol_type = other DNA
tgggaaaggttgcatggttatgggcctgttctccgctgcatagaaaatggcctctgtctgtttttgctattaatg

SEQ ID NO: 85759 - DNA, 75 bp, synthetic construct
  source 1..75: mol_type = other DNA
agtatctggcacaggcgaaatgggacacgccgcgggtggtgaagggtgtgcgcttcagtctgcgcctgaccagcg

SEQ ID NO: 85760 - DNA, 75 bp, synthetic construct
  source 1..75: mol_type = other DNA
cgtgagtggcgcgttgtcgcaagccagaaaaaatggctttatcagcactgacttactgagtcaaatgttgatcaa

SEQ ID NO: 85761 - DNA, 75 bp, synthetic construct
  source 1..75: mol_type = other DNA
acagtctgtgccatgcggattaccgtcttccggaagagaagggtcctgcggggatatttctgacccgtacggtgt

SEQ ID NO: 85762 - DNA, 75 bp, synthetic construct
  source 1..75: mol_type = other DNA
cagtatgatgaggagtccggcctgtattacaaccgccaccgctattatgacccgctgcaggggcggtatatcact

SEQ ID NO: 85763 - DNA, 75 bp, synthetic construct
  source 1..75: mol_type = other DNA
gcatggcgatgaatgcgtgggcatatcctgacggtgagaaggtgccagctgctgctattgccagagcgtattttg

SEQ ID NO: 85764 - DNA, 75 bp, synthetic construct
  source 1..75: mol_type = other DNA
tgtcgcagcggcgatcgcctggggcaccctgactaacagtggtggtcagcctggtaatgctgttgtcgtgcattg

SEQ ID NO: 85765 - DNA, 75 bp, synthetic construct
  source 1..75: mol_type = other DNA
ggcaatgcactacggtcacggctggataatgggtaaggatggtaaacgctggcatccgtgccgttcacaagatga

SEQ ID NO: 85766 - DNA, 75 bp, synthetic construct
  source 1..75: mol_type = other DNA
agcaccaggtgtacggggggcttctgttggaggctggccgggcgtttcgactgattctcgtggatatgcattagt

SEQ ID NO: 85767 - DNA, 75 bp, synthetic construct
  source 1..75: mol_type = other DNA
ggggcacgccgttcttgcctgtggagagatggtgcagtcaggccgcccgttgaagcaggaacccaccgaaatgat

SEQ ID NO: 85768 - DNA, 75 bp, synthetic construct
  source 1..75: mol_type = other DNA
gtacgacgacagccatccggaagccctggcccgtaatacccagaaaattttccgttggctggataaagacacccc

SEQ ID NO: 85769 - DNA, 75 bp, synthetic construct
  source 1..75: mol_type = other DNA
ccgcagtcggtaacctcgcgcatacaaccgggcagtgatgtgattgtctgcgctgaaatggacgaacagtggggc

SEQ ID NO: 85770 - DNA, 75 bp, synthetic construct
  source 1..75: mol_type = other DNA
ggttttacgtgcgaagcgtcaacctggtgggaaaatctgcttttgtggaagccagcgggcagcccagcaatgatg

SEQ ID NO: 85771 - DNA, 75 bp, synthetic construct
  source 1..75: mol_type = other DNA
ttgccgaagctgaagccagattgcagcgtctgaaggcaaagagccggagcctggacacagcgcagaaggtcgttg

SEQ ID NO: 85772 - DNA, 75 bp, synthetic construct
  source 1..75: mol_type = other DNA
ctgtggctgcatctgcagttgtatccggctctgccatggctgctggctgggaacaaaacggcactggtggttctg

SEQ ID NO: 85773 - DNA, 75 bp, synthetic construct
  source 1..75: mol_type = other DNA
ggaaagctgcacgttatcagcaagcgttacactcagcgcattgagcgacataatctgaatctgagacaacatctg

SEQ ID NO: 85774 - DNA, 75 bp, synthetic construct
  source 1..75: mol_type = other DNA
aacgtaaatccgcccctcaaagaagcaaacttccccgctatgtcgtgaagcttcacgaagatgatttttttgacg

SEQ ID NO: 85775 - DNA, 75 bp, synthetic construct
  source 1..75: mol_type = other DNA
gggaaagctgcacgttatcagcaagcgttacactcagcgcattgagcgacataatctgaatctgagacaacatct

SEQ ID NO: 85776 - DNA, 75 bp, synthetic construct
  source 1..75: mol_type = other DNA
ccgtccgcctgctgattcagttgcagcgtaacggtaactgggtgacggaaaaggatgtcaccattaacggcaaga

SEQ ID NO: 85777 - DNA, 75 bp, synthetic construct
  source 1..75: mol_type = other DNA
cgctgtatgaatcacgcctgaagggaaagctgcacgttatcagcaagcgatatacgcagcgcattgagcgacata

SEQ ID NO: 85778 - DNA, 75 bp, synthetic construct
  source 1..75: mol_type = other DNA
cttcacgacgatgacttctttgacgaagaagacgcagaagctctgcgctttgataattttgacgatgccgttgag

SEQ ID NO: 85779 - DNA, 75 bp, synthetic construct
  source 1..75: mol_type = other DNA
caaacttccccgctatgtcgtgaagcttcacgacgatgacttctttgacgaagaagacacagaagttctgcgctt

SEQ ID NO: 85780 - DNA, 75 bp, synthetic construct
  source 1..75: mol_type = other DNA
tgacggtggagcaactggccagacaggtggagccggaatacacaccggcgcgaaaagttcatttttaccactgcg

SEQ ID NO: 85781 - DNA, 75 bp, synthetic construct
  source 1..75: mol_type = other DNA
ccaacagtaaatctcaatggtagtgcatgttttttgcaatctccttctgacgctattttttgtcgccatctgtca

SEQ ID NO: 85782 - DNA, 75 bp, synthetic construct
  source 1..75: mol_type = other DNA
ttatcggagagctgcccacgtatggttatcgtcgggtatgggcgctgcttcgcagacaggccgaacttgatggta

SEQ ID NO: 85783 - DNA, 75 bp, synthetic construct
  source 1..75: mol_type = other DNA
acggtatatccgcagagcgcgtgagacaacttgaaaataacgcgatgaaaaaacttcgcagtgcgattgctcttt

SEQ ID NO: 85784 - DNA, 75 bp, synthetic construct
  source 1..75: mol_type = other DNA
gaggattacatccggggacaaacggttatcgaggccaagctggacgcgctgtataacaaaatcgaactgtcgcaa

SEQ ID NO: 85785 - DNA, 75 bp, synthetic construct
  source 1..75: mol_type = other DNA
gcggcagaagcctgtattttgagcacctgtttcccggtgaggacggttacagccgcagcgagtcactctggctgg

SEQ ID NO: 85786 - DNA, 75 bp, synthetic construct
  source 1..75: mol_type = other DNA
attttgcgcgccagctcatcaccctgcttgatacctctgacttaagttcgatgctgtcatactgtttttctcaag

SEQ ID NO: 85787 - DNA, 75 bp, synthetic construct
  source 1..75: mol_type = other DNA
atttagcccactgctacatgccaaaaatatcattacaacgccgcatattgcggccgccaccgttgagtcatacca

SEQ ID NO: 85788 - DNA, 75 bp, synthetic construct
  source 1..75: mol_type = other DNA
ctactgcgggggcatctggaatctgtacaccctgaacaacggtggcgcatttatggcacccgaaccggatgacga

SEQ ID NO: 85789 - DNA, 75 bp, synthetic construct
  source 1..75: mol_type = other DNA
ccaaagaaaagaagcaactggcggtctgtcagcgcctgattaccgaaaaaagttatctttcacaggaggaaatcc

SEQ ID NO: 85790 - DNA, 75 bp, synthetic construct
  source 1..75: mol_type = other DNA
gtgaatttgttgaagggattagtgacccgaatgatccgaaatggattaaggggatccagacccgcgattctgtga

SEQ ID NO: 85791 - DNA, 75 bp, synthetic construct
  source 1..75: mol_type = other DNA
tacatcctgccgggagcatttttgctgcgattcaaaaaaaatgagagtctcctaaagtttccttcgataatatca

SEQ ID NO: 85792 - DNA, 75 bp, synthetic construct
  source 1..75: mol_type = other DNA
atcactcaggatccgattgggctgaaggggggatggaatttttatcagtatccgctgaatccggttcagtatata

SEQ ID NO: 85793 - DNA, 75 bp, synthetic construct
  source 1..75: mol_type = other DNA
ccggcagaataacggaagccgcgtgtatggctcatgcccggagaaaaatccacgatgtgcatgcaagagcgccca

SEQ ID NO: 85794 - DNA, 75 bp, synthetic construct
  source 1..75: mol_type = other DNA
aaaagcgccttgaagtcgtgaatcacaacttcactactgatgatggttacaggatcatctcggcacgttttggtg

SEQ ID NO: 85795 - DNA, 75 bp, synthetic construct
  source 1..75: mol_type = other DNA
aacggctggacacttctcgcatcacttgcacggcgattattaaatgccttcgtccggtctaccgccgcgccggaa

SEQ ID NO: 85796 - DNA, 75 bp, synthetic construct
  source 1..75: mol_type = other DNA
aacagcgcatcagcttctggccgcagcattttggcctcattccacagtgggtgaccctagagccccgtatcttcg

SEQ ID NO: 85797 - DNA, 75 bp, synthetic construct
  source 1..75: mol_type = other DNA
ggcagcagacacgccagccaggacagacaagacagaaaagccggctccccgctggttccgcctcagcaacggcag

SEQ ID NO: 85798 - DNA, 75 bp, synthetic construct
  source 1..75: mol_type = other DNA
gtgtgttgatatcagttcaccggactgcgaagaacgagagttaagccgcttaaataacttttttgcttcccttat

SEQ ID NO: 85799 - DNA, 75 bp, synthetic construct
  source 1..75: mol_type = other DNA
gccgcgggtggtgaagggtgtgcgcttcagtctgcgtctgaccagcggaagcggagaagacagccgtctggtgac

SEQ ID NO: 85800 - DNA, 75 bp, synthetic construct
  source 1..75: mol_type = other DNA
ttgccgcttttacagggggcaacggatgctgccggttttatggcgcggatggataccgttctgcagatgtatgca

SEQ ID NO: 85801 - DNA, 75 bp, synthetic construct
  source 1..75: mol_type = other DNA
actggaaacaggcgcatttgaacaggataaaaccgtagagtgcgattgctgtgaacaacagacgtcagtttatta

SEQ ID NO: 85802 - DNA, 75 bp, synthetic construct
  source 1..75: mol_type = other DNA
ctgcagtatgaccgcgattacacctggaacgacaacggcgaactcatccgcatcagcagcccgcgccagacccgg

SEQ ID NO: 85803 - DNA, 75 bp, synthetic construct
  source 1..75: mol_type = other DNA
ccaaaaagcggaacaaaacagcccaaatgcgttacaaaacgagccagaaacgaaacagcctgaaccagtggcgca

SEQ ID NO: 85804 - DNA, 75 bp, synthetic construct
  source 1..75: mol_type = other DNA
aggaaagacctctgcgaggtacgaatccgaaccggccagacggaggtcgctgtcttcacagcttacgaatctgag

SEQ ID NO: 85805 - DNA, 75 bp, synthetic construct
  source 1..75: mol_type = other DNA
atcaactgtacggaaaatccggaccagaacggtatttaccagcactcggtttttctgaccctcgcaggggataaa

SEQ ID NO: 85806 - DNA, 75 bp, synthetic construct
  source 1..75: mol_type = other DNA
ccacaccttctgtttccgtaactactgcatcagggaataacccgcctcagctggttgccacccccgtccctgatg

SEQ ID NO: 85807 - DNA, 75 bp, synthetic construct
  source 1..75: mol_type = other DNA
caagagtccaggcagtgtgaattgctgcgaagtgtatttggtgaagatttccctgagtgtgcagcagcgtcatct

SEQ ID NO: 85808 - DNA, 75 bp, synthetic construct
  source 1..75: mol_type = other DNA
ccctttaacatccggatggtcagggagacggcggacagcaccacggaccagctgcagaataagacgctctggtcg

SEQ ID NO: 85809 - DNA, 75 bp, synthetic construct
  source 1..75: mol_type = other DNA
gcgcacaggaattgttgcaggaagacatggcaacattcgacggccatatcgttgaagcgttgatgaaaatgccag

SEQ ID NO: 85810 - DNA, 75 bp, synthetic construct
  source 1..75: mol_type = other DNA
cgcggcctgccgctggcccttatcagcacggaagggacaacagcgtggtacgcagaatacgatgaatggggtaac

SEQ ID NO: 85811 - DNA, 75 bp, synthetic construct
  source 1..75: mol_type = other DNA
acaccattggttttgccttttctcccccagccaatgcagatggtatagagattgccgctgttgattttgatcggg

SEQ ID NO: 85812 - DNA, 75 bp, synthetic construct
  source 1..75: mol_type = other DNA
caacaaatgaccagaacaccggtttacaaagaaatgcgctggaatgtgcaggatgtgagcagatttttgaagaca

SEQ ID NO: 85813 - DNA, 75 bp, synthetic construct
  source 1..75: mol_type = other DNA
tgaatttctgctgggtaaagtgctggacctgcccgctgagccatttatgacgaaactttttgccgataagtccat

SEQ ID NO: 85814 - DNA, 75 bp, synthetic construct
  source 1..75: mol_type = other DNA
aaagatcgaagaagatgaacgggaaatagaacatctgcgggctcagatagaaaaactgcaccggatgctgttcgg

SEQ ID NO: 85815 - DNA, 75 bp, synthetic construct
  source 1..75: mol_type = other DNA
gttgcgtcagacccgcacccgtaagccgttccctgaatcactaccccgtgacgaaaagcggctgttgcctgcggc

SEQ ID NO: 85816 - DNA, 75 bp, synthetic construct
  source 1..75: mol_type = other DNA
atactgctggcggagtcattgatcgtggcaccattaaatggtggcttaagcaatcacgggaggcgcaatctgcca

SEQ ID NO: 85817 - DNA, 75 bp, synthetic construct
  source 1..75: mol_type = other DNA
cacgccagactttcaacggcgggatcaccggggcgctgacagggaacgccgacaccgcgacgaaattaaaaacag

SEQ ID NO: 85818 - DNA, 75 bp, synthetic construct
  source 1..75: mol_type = other DNA
tatttcgtatgaccagacttccggtaaagctcaggtagcagcagccacagagaagcagggccggaagttctccag

SEQ ID NO: 85819 - DNA, 75 bp, synthetic construct
  source 1..75: mol_type = other DNA
agtggtgcttattgtgcacaggatggcggagcatcaaaaatggtgctgcatttttacacgggtgagggaagttgt

SEQ ID NO: 85820 - DNA, 75 bp, synthetic construct
  source 1..75: mol_type = other DNA
tcaaagggtgaccgtaacccggcatccgtccgcctgctgattcagttacagcgtaacggtaactgggtgacagaa

SEQ ID NO: 85821 - DNA, 75 bp, synthetic construct
  source 1..75: mol_type = other DNA
gcaatacatcaaaagccgcgatcaggagaacgaggatattgcgctaacggtagggaagctgcgcgttgagcttga

SEQ ID NO: 85822 - DNA, 75 bp, synthetic construct
  source 1..75: mol_type = other DNA
gtatggaacggtcagacgctgacgttcgttcaggaccgcccgtcggatgtggtgtggccgtacaccaacagcgat

SEQ ID NO: 85823 - DNA, 75 bp, synthetic construct
  source 1..75: mol_type = other DNA
gaaaatggaaggcgctgaacatccacacaaggagaacactggcggcaatcagcatcacgatagcgataatgaaac

SEQ ID NO: 85824 - DNA, 75 bp, synthetic construct
  source 1..75: mol_type = other DNA
cgaagcgctgagcatgagcgatcgcgtggtggtgatgtcggcgggacatgtgcgccagatagacacgccggatga

SEQ ID NO: 85825 - DNA, 75 bp, synthetic construct
  source 1..75: mol_type = other DNA
caacactaacgccgtgcgcgggctggcaaatatttaccgccagcaatcgccagaaaaagctgaagcgtttatcgc

SEQ ID NO: 85826 - DNA, 75 bp, synthetic construct
  source 1..75: mol_type = other DNA
cagggcgatccggcatcggtatcgttccggattgcggcaccggcagcgcctgtcactattgaactgataccaggg

SEQ ID NO: 85827 - DNA, 75 bp, synthetic construct
  source 1..75: mol_type = other DNA
tctggccgcagcattttggcctcattccacagtgggtcaccctggaaccccgtgtcttcggctggatggaccgtc

SEQ ID NO: 85828 - DNA, 75 bp, synthetic construct
  source 1..75: mol_type = other DNA
aatggttggccagacagccaatggtggctggagtatcacgataatcaactcacttccttaattaacaatgcacta

SEQ ID NO: 85829 - DNA, 75 bp, synthetic construct
  source 1..75: mol_type = other DNA
catccgcatagtgcactgggttatcgctcgccacgggaatatctgcggcagcaggccagtaatgggttaagtgat

SEQ ID NO: 85830 - DNA, 75 bp, synthetic construct
  source 1..75: mol_type = other DNA
taatccggtcagcgtggaggtccagtccgtcaccgacggcgtgaaggtgaaagtgagccgtgttcctgacggcgt

SEQ ID NO: 85831 - DNA, 75 bp, synthetic construct
  source 1..75: mol_type = other DNA
gccatgactgaacactattaccgcctgcgggactacgccctgcagcatccagaggcccacgccattctgcgtatt

SEQ ID NO: 85832 - DNA, 75 bp, synthetic construct
  source 1..75: mol_type = other DNA
gatccggaggaaatggaaggcgctgaacatccacacaaggagaatgctggcagctatcaggaccacgccagcgat

SEQ ID NO: 85833 - DNA, 75 bp, synthetic construct
  source 1..75: mol_type = other DNA
gaaggtgaaagtgagccgtgttcctgacggcgttgctgaatacagcgtgtgggggctgaagctgccgacgctgcg

SEQ ID NO: 85834 - DNA, 75 bp, synthetic construct
  source 1..75: mol_type = other DNA
tgaaccgaagaacacggcagtgcggagtccggagagtaacggaatagcagagagcttcgtgaaaacgataaagcg

SEQ ID NO: 85835 - DNA, 75 bp, synthetic construct
  source 1..75: mol_type = other DNA
catactcaggttcacaacaaaatactggtgcatctgacacgaccgcacaaccagagccggtaaaagttaccgctg

SEQ ID NO: 85836 - DNA, 75 bp, synthetic construct
  source 1..75: mol_type = other DNA
tatgacgatcagccgtttgaccggcagattgttattccggcggtggcattcagcggcgctaaacatgagaaagag

SEQ ID NO: 85837 - DNA, 75 bp, synthetic construct
  source 1..75: mol_type = other DNA
catcaatacccatcagtggcctggcaaagcggcgattggtcgtctgaaaagtgaggaactggcgcaatataattt

SEQ ID NO: 85838 - DNA, 75 bp, synthetic construct
  source 1..75: mol_type = other DNA
catccaggtgccgtcaaactatgacccggaaaaacgcacctacagcggtatctgggacgggagtctgaaaccggc

SEQ ID NO: 85839 - DNA, 75 bp, synthetic construct
  source 1..75: mol_type = other DNA
gttcatacgaacggcaggggatcccctgcccgtggcgttactacaacgatcgcgatgtacgcacaatcgttgagc

SEQ ID NO: 85840 - DNA, 75 bp, synthetic construct
  source 1..75: mol_type = other DNA
cgaatatcccggtggccacaccgaccaccttcctggttaacgtcaatacgcttgaagcgctgccgcttttacagg

SEQ ID NO: 85841 - DNA, 75 bp, synthetic construct
  source 1..75: mol_type = other DNA
actggtgatcaagttcttcccgcaggcggttaaatacaactattcaccggttcttaagcggtcgatggtgctcaa

SEQ ID NO: 85842 - DNA, 75 bp, synthetic construct
  source 1..75: mol_type = other DNA
cccggggatggggagtaagcttagtcagccgttgtctccgggtgtcgcgtgcgcagttgtacgtcattctcagac

SEQ ID NO: 85843 - DNA, 75 bp, synthetic construct
  source 1..75: mol_type = other DNA
cttttttccgtaatgctttagcttccacgcatcagtatcgacaaaatgccattattgattctgctgctgctttag

SEQ ID NO: 85844 - DNA, 75 bp, synthetic construct
  source 1..75: mol_type = other DNA
acttggtttgcacgtgcgcgcagcacaacgaatgatgaaagcatctttgaaatacctttcaccaaaactagagcc

SEQ ID NO: 85845 - DNA, 75 bp, synthetic construct
  source 1..75: mol_type = other DNA
tttctgggtcagtaactttgtgaacctcaggaaggttgccggggcaatggcgaccctggaagggcttacgcgcac

SEQ ID NO: 85846 - DNA, 75 bp, synthetic construct
  source 1..75: mol_type = other DNA
gtgagcgccataatgcacttgatgacgcccgttaccaggcaaaatacgtttcagctatctggcaaaaactgatcc

SEQ ID NO: 85847 - DNA, 75 bp, synthetic construct
  source 1..75: mol_type = other DNA
aatatgtggcgctgcaattcctgcgcaactccgacatcgcggcgaaaggcgttctgccaacctgtcaggataccg

SEQ ID NO: 85848 - DNA, 75 bp, synthetic construct
  source 1..75: mol_type = other DNA
agcgaacacgttagcgtatctgaatttgaagggcaggagattttgaaagtcgcacccgaagcgttaactctgttg

SEQ ID NO: 85849 - DNA, 75 bp, synthetic construct
  source 1..75: mol_type = other DNA
atatttcacctggcattgatggaatttgcccggggccttttcctccgaacggatttaccgtacttacagatgcag

SEQ ID NO: 85850 - DNA, 75 bp, synthetic construct
  source 1..75: mol_type = other DNA
ttcattaataataataacttaactccaggtgtatatcttacctctgtcatgtgggggcaagattctcttgataag

SEQ ID NO: 85851 - DNA, 75 bp, synthetic construct
  source 1..75: mol_type = other DNA
cagccgccgcgccgtgaccgcactgttagctgacggtgacggtattgctttcgacgtgcagagtcttactgaaga

SEQ ID NO: 85852 - DNA, 75 bp, synthetic construct
  source 1..75: mol_type = other DNA
ggatgcggaaacgctgatgaaacagttagggcaaatcaatgatgaactgggggcgctgttggacagcgtggaaaa

SEQ ID NO: 85853 - DNA, 75 bp, synthetic construct
  source 1..75: mol_type = other DNA
gggtttatgacgatcagccgtttgaccggcagattgttattccggcggtggcattcagtggcgctaagcatgaga

SEQ ID NO: 85854 - DNA, 75 bp, synthetic construct
  source 1..75: mol_type = other DNA
atccgggaaaacacggacggcacctttgccatcacggcagtgcagcatgtgccggaaaaagaagccatcgtggat

SEQ ID NO: 85855 - DNA, 75 bp, synthetic construct
  source 1..75: mol_type = other DNA
gattgatgacaatgcagaagcaggtggaaggggcacaggactatatccgcactcagtgtactaagcaggcttttt

SEQ ID NO: 85856 - DNA, 75 bp, synthetic construct
  source 1..75: mol_type = other DNA
ttggcacctaccccaacgaccccgatacatcagcgtgatgttgacgaagtgtgcgctcgcttcccgaatgtgcat

SEQ ID NO: 85857 - DNA, 75 bp, synthetic construct
  source 1..75: mol_type = other DNA
agacggacaggcgggccaggcgctattagtaggcaatggggcatcgagctattggggtggcggcggccgcgctgg

SEQ ID NO: 85858 - DNA, 75 bp, synthetic construct
  source 1..75: mol_type = other DNA
ccggaattaccacacaaaacaatcaacatcatcacacagaacaaacgcccccaacacaaataccgcaatccgaat

SEQ ID NO: 85859 - DNA, 75 bp, synthetic construct
  source 1..75: mol_type = other DNA
cggtagacacacttttttattcagagatatacaatcaagccgacgctaagtttacctattacaagttctgcatga

SEQ ID NO: 85860 - DNA, 75 bp, synthetic construct
  source 1..75: mol_type = other DNA
aggtgctcagactcagccggaagaggcacaacagttcagcggtcagcctcagccggaaccacagccggaaccgaa

SEQ ID NO: 85861 - DNA, 75 bp, synthetic construct
  source 1..75: mol_type = other DNA
ggtgacaaaagatgtggggcactgttgcaaagttagcgatgaggcagccttttgtcttattcaaaggccttacat

SEQ ID NO: 85862 - DNA, 75 bp, synthetic construct
  source 1..75: mol_type = other DNA
tactgatgattacgggcgtgagaaccatcgaattacgcgcggcattatggcaagaatttgatctggataacgcta

SEQ ID NO: 85863 - DNA, 75 bp, synthetic construct
  source 1..75: mol_type = other DNA
tcaaatcggacggcacggtgaaaacggctcttcaaaaccttggtttgggagatacaagcggatacgtgggacgct

SEQ ID NO: 85864 - DNA, 75 bp, synthetic construct
  source 1..75: mol_type = other DNA
gcagttttacgtgacgcagaatcatgggacagagccgccatttacgggtcgtttactgcataacaagcgtgacgg

SEQ ID NO: 85865 - DNA, 75 bp, synthetic construct
  source 1..75: mol_type = other DNA
catcatcgctgacatgcagaagcgtcaacgtgacgtagcagaactcgacgccagatatacaaaggagcttgctga

SEQ ID NO: 85866 - DNA, 75 bp, synthetic construct
  source 1..75: mol_type = other DNA
ccacgaagataacgacccggtggatatcctcatcaccatggcggcggtcgatgccaacactcaccaggaagtggg

SEQ ID NO: 85867 - DNA, 75 bp, synthetic construct
  source 1..75: mol_type = other DNA
ttcaccctcagagagcggttgatgacaatgcagaagcaactggaaggggcgcaggaatatatccgcactcagtgc

SEQ ID NO: 85868 - DNA, 75 bp, synthetic construct
  source 1..75: mol_type = other DNA
cagtcatattcggcgtgatattttctcacagtgttctagctcaggacgttactatttattatacgaatgacattc

SEQ ID NO: 85869 - DNA, 75 bp, synthetic construct
  source 1..75: mol_type = other DNA
ttaagattttccagaaaggcaatcagggggcaggcaatatcaccgactgtacggtgattgtgaccaaaaaagccg

SEQ ID NO: 85870 - DNA, 75 bp, synthetic construct
  source 1..75: mol_type = other DNA
atgagaattgattatagtattagcaatgaacacgcagagaaatttatcagtcttttagtgttgggtgttttatat

SEQ ID NO: 85871 - DNA, 75 bp, synthetic construct
  source 1..75: mol_type = other DNA
acgcccggaaaagacactgcaaggagaacaacaaaacagacaataatcagggcagcagtaatcagagtcagaaca

SEQ ID NO: 85872 - DNA, 75 bp, synthetic construct
  source 1..75: mol_type = other DNA
gtgaggggatggcatcagggaactgcggggtttaatgatgtatcggccagtcgccggaaactgaaccgggaaaaa

SEQ ID NO: 85873 - DNA, 75 bp, synthetic construct
  source 1..75: mol_type = other DNA
gtcatcctgtaccacaacggtttcacctgtgaagccgacacccttggcagttgcggctacgtatacatcgccatt

SEQ ID NO: 85874 - DNA, 75 bp, synthetic construct
  source 1..75: mol_type = other DNA
tggcgttatgccgcacttcttatggcccgtatgccagagcaatggtgaaaatctgcaaagaagagagttttcacc

SEQ ID NO: 85875 - DNA, 75 bp, synthetic construct
  source 1..75: mol_type = other DNA
gtaaatactctaaagttatatctacaggaaaaaaacaaaaatatatgtcggtatatttacatatatcgttgtcag

SEQ ID NO: 85876 - DNA, 75 bp, synthetic construct
  source 1..75: mol_type = other DNA
gcgcggaatatgatgaatggggcaaccagcttaatgaggagaacccgcatcatgtgtatcagccgtaccgtctgc

SEQ ID NO: 85877 - DNA, 75 bp, synthetic construct
  source 1..75: mol_type = other DNA
tactacgatccgttgcaggggcggtatattactcaggacccgatggggttgaaagggggatggaatttatatcag

SEQ ID NO: 85878 - DNA, 75 bp, synthetic construct
  source 1..75: mol_type = other DNA
aagcgcagcgcgataaaaaagtcagtgagctgaaactggcgaatgccactattactgacatgcagcagcgccagc

SEQ ID NO: 85879 - DNA, 75 bp, synthetic construct
  source 1..75: mol_type = other DNA
accggagcgagacacagtacgatgcgtggggaaaggcggtcagcaccacgcagggcgggctgacgcgcagtatgg

SEQ ID NO: 85880 - DNA, 75 bp, synthetic construct
  source 1..75: mol_type = other DNA
tttcgccggacaacaatttttaattctttatgccccgacacgttctggtaaaggggtggggattgttatccccaa

SEQ ID NO: 85881 - DNA, 75 bp, synthetic construct
  source 1..75: mol_type = other DNA
attagcgataaaacaaaatcattcttctttgagttcatgtcagcaccagatcgcacaaggggaagtataaaaacg

SEQ ID NO: 85882 - DNA, 75 bp, synthetic construct
  source 1..75: mol_type = other DNA
tttacggcgcctggatggccgacagcagcagcgatcagattgctatgttgaaccagaaattatcggactttgccc

SEQ ID NO: 85883 - DNA, 75 bp, synthetic construct
  source 1..75: mol_type = other DNA
agcctctcccggtttattcgtaataatcccggtgcagagggatttctgaatcgcctgggggtacagacacgggat

SEQ ID NO: 85884 - DNA, 75 bp, synthetic construct
  source 1..75: mol_type = other DNA
ttaaggcactttcggaaaaatggttggaccttaagaaaattgagatttgtgcgaatgcacttaaccgttaccagt

SEQ ID NO: 85885 - DNA, 75 bp, synthetic construct
  source 1..75: mol_type = other DNA
acaacgtcacgattaacgagaactgtcgggttctgggaaaactgtccgcgaaccagattgaaggcgatctcgtta

SEQ ID NO: 85886 - DNA, 75 bp, synthetic construct
  source 1..75: mol_type = other DNA
tgaataactggtatcccacagcaagtatcagcgatttgctggttgtggtgatgaagaaagccaccgcaggcatca

SEQ ID NO: 85887 - DNA, 75 bp, synthetic construct
  source 1..75: mol_type = other DNA
ttaaggcactttcggaaaaatggctggaccttaagaaaattgagataggaagtaatgcattcagtcggtatcaat

SEQ ID NO: 85888 - DNA, 75 bp, synthetic construct
  source 1..75: mol_type = other DNA
gggctggaaacacgtttcgatgaagtggggaatttatacggtcgcctgagtggcaccgaatatccacaggaagtg

SEQ ID NO: 85889 - DNA, 75 bp, synthetic construct
  source 1..75: mol_type = other DNA
agcatgatgaggagtcggggctgtactataaccgtcaccggcactacgatccgttgcaggggcggtatatcaccc

SEQ ID NO: 85890 - DNA, 75 bp, synthetic construct
  source 1..75: mol_type = other DNA
aaagataacaatatcgggcagatagaactgctcaataaggagttaactgaaagtgtcccatacatgccccacaga

SEQ ID NO: 85891 - DNA, 75 bp, synthetic construct
  source 1..75: mol_type = other DNA
ggacctggctgaaatcaggacgtccattacgaatgtcagcaatgaaatcacgcagaccgtcaataaaaaactgga

SEQ ID NO: 85892 - DNA, 75 bp, synthetic construct
  source 1..75: mol_type = other DNA
taccagtcgaaccggagcaacctgaaaagcagcagagaacgctcaatcgctatggctccgcgtcaaagctgtcag

SEQ ID NO: 85893 - DNA, 75 bp, synthetic construct
  source 1..75: mol_type = other DNA
taaatactcacagttcaacgttatgggctgatgaaggtaattaccagcttccatatgatcagaaccatcttgaac

SEQ ID NO: 85894 - DNA, 75 bp, synthetic construct
  source 1..75: mol_type = other DNA
caaccgcgcggcgtctggaaaacggacagtaaaaccaccgccacggcgacgcagcagcgtaacgtggttgccagc

SEQ ID NO: 85895 - DNA, 75 bp, synthetic construct
  source 1..75: mol_type = other DNA
tcctgaaactccggccaccgatgctttcctggctgaagtacgggcgcagggcgtggatacagctatcgagcacct

SEQ ID NO: 85896 - DNA, 75 bp, synthetic construct
  source 1..75: mol_type = other DNA
catcatcgctgacatgcagaagcgtcaacgtgatgtagcagaactcgacgccagatacacaaaggagcttgctga

SEQ ID NO: 85897 - DNA, 75 bp, synthetic construct
  source 1..75: mol_type = other DNA
gatccagcgggtggagcagatcaaggttcgccatatcgaatgctacattgaggaacggctggagcaggatattgg

SEQ ID NO: 85898 - DNA, 75 bp, synthetic construct
  source 1..75: mol_type = other DNA
tccttggaagcctgcgcggcaacggcagagggcgatttgtcttacaggacggcagccaggtgacaggggagaagg

SEQ ID NO: 85899 - DNA, 75 bp, synthetic construct
  source 1..75: mol_type = other DNA
ggcgacatctacctgggcaaaatcaagaagtgggatgatgaagccatcgccaaactgaatccgggtctgaaactg

SEQ ID NO: 85900 - DNA, 75 bp, synthetic construct
  source 1..75: mol_type = other DNA
tggaattatttcaccctcagagacaagttgaaaacgatgcaggcgcaactggaaggggcgcaggcatatatccgt

SEQ ID NO: 85901 - DNA, 75 bp, synthetic construct
  source 1..75: mol_type = other DNA
ggttctgatgagtttaactctatccgcggccatgagttcgcaggttgtattgcgcaggttggtgaaaaagtcaaa

SEQ ID NO: 85902 - DNA, 75 bp, synthetic construct
  source 1..75: mol_type = other DNA
tcaggtgctggatatgctggaggcgcatagcgacaattccattgttccgttaagcaaaagcacgccggatgtcga

SEQ ID NO: 85903 - DNA, 75 bp, synthetic construct
  source 1..75: mol_type = other DNA
ccgctctggttatctgcatcatcgtttgcttgtcatgggctgttaatcattaccgcgataacgccattacctaca

SEQ ID NO: 85904 - DNA, 75 bp, synthetic construct
  source 1..75: mol_type = other DNA
taaagccagcacctggctgaatcattttgacgctgacagcctgcgttactactacactgcgaaactctcttcgcg

SEQ ID NO: 85905 - DNA, 75 bp, synthetic construct
  source 1..75: mol_type = other DNA
cagtgccggtatggtggtggggcttggctggctgggggctgtgtcagttgatggggcatatgcatcagcgaaata

SEQ ID NO: 85906 - DNA, 75 bp, synthetic construct
  source 1..75: mol_type = other DNA
gacggcgttgctgaatacagcgtatgggggctgaagctgccgacgttgcgccagcgcctgttccgctgcgtgagt

SEQ ID NO: 85907 - DNA, 75 bp, synthetic construct
  source 1..75: mol_type = other DNA
gccagaataaggttaaacctgtcgttaaattccggcgtaaagcagattttattcgctacgaacgccctgttcccg

SEQ ID NO: 85908 - DNA, 75 bp, synthetic construct
  source 1..75: mol_type = other DNA
ggctggctgggggctgtgtcagttgatggggcatatgcatcagcgaaatatcgcgatggcagccacagcggtaac

SEQ ID NO: 85909 - DNA, 75 bp, synthetic construct
  source 1..75: mol_type = other DNA
tttccggcaagcctcgcgaaccgcgaccagaacgagctgaacgaaatccgccgtcagtgggttatggctttccgt

SEQ ID NO: 85910 - DNA, 75 bp, synthetic construct
  source 1..75: mol_type = other DNA
catcacctacaaagcgcagcgcgataaaaaagccagagagctggagctagcaaacgcaaccattactgacatgca

SEQ ID NO: 85911 - DNA, 75 bp, synthetic construct
  source 1..75: mol_type = other DNA
atggtctggattgattacgccataatcgcggtgattgctttttcctctctggttagcctgatccgcggctttgtt

SEQ ID NO: 85912 - DNA, 75 bp, synthetic construct
  source 1..75: mol_type = other DNA
gattattttaccctcagagaacgagtgatggtgatgcagaaacaactggaaggagcgcaagaatatatccgtact

SEQ ID NO: 85913 - DNA, 75 bp, synthetic construct
  source 1..75: mol_type = other DNA
tactgcgtgatgccgctgctgctcatcttgagcagcagctcaggacatttattcgtcttcctccggacagcccgc

SEQ ID NO: 85914 - DNA, 75 bp, synthetic construct
  source 1..75: mol_type = other DNA
atgaaaatcagagcggtaaaaggcatcagaaacgcgcattaccttgaaaatggtgcggttgactgcgaggtgtta

SEQ ID NO: 85915 - DNA, 75 bp, synthetic construct
  source 1..75: mol_type = other DNA
cggtcagtaaaacgctggaggaccagagcgccaccatacagcagatacagcgcgtgcagaaggacacaaatgatg

SEQ ID NO: 85916 - DNA, 75 bp, synthetic construct
  source 1..75: mol_type = other DNA
gtgagctgatttttacaggatttaatgtgattttctgtggtgatacagagaagctgctttttttatatacagctg

SEQ ID NO: 85917 - DNA, 75 bp, synthetic construct
  source 1..75: mol_type = other DNA
acctgttttatccttctgagtcatccgatgaaaaagggtctgtcgttactccggcgagccttttacgctggaatt

SEQ ID NO: 85918 - DNA, 75 bp, synthetic construct
  source 1..75: mol_type = other DNA
tgtggcgcaggggaatcagctgttcatgaacgacgtgttcctgaaacgactgtttgcggtgagtatcacgtcatc

SEQ ID NO: 85919 - DNA, 75 bp, synthetic construct
  source 1..75: mol_type = other DNA
tggtcacagtggaagcatgacgtccattcacgcggcctcggcaaaagatgccatcattcagatggtgacaaaatg

SEQ ID NO: 85920 - DNA, 75 bp, synthetic construct
  source 1..75: mol_type = other DNA
gacctgtttgaccagcaggaaggcgcactgcgtaagctcacgcagacggccacaaagtatgtgttaaaactcgac

SEQ ID NO: 85921 - DNA, 75 bp, synthetic construct
  source 1..75: mol_type = other DNA
ttgcaccggtgggggacatgtttaccccgctcgcgccggtgtttgacgccatcgctgaaaagctgggtgtcgtct

SEQ ID NO: 85922 - DNA, 75 bp, synthetic construct
  source 1..75: mol_type = other DNA
tataagttcgcaaaagtggttattttttcttttaaagattcattttcgcttaaaaatagcaaaagatttcgacca

SEQ ID NO: 85923 - DNA, 75 bp, synthetic construct
  source 1..75: mol_type = other DNA
tgagtattatgagcaagagcattcagtaaaaatggttgataaggaggtggtattgataacactgcgtgttaatca

SEQ ID NO: 85924 - DNA, 75 bp, synthetic construct
  source 1..75: mol_type = other DNA
ttaggttaaaaccatttctgctggttctggggtatcttgtgtttttaatctttagatttaagtttaatcaagttc

SEQ ID NO: 85925 - DNA, 75 bp, synthetic construct
  source 1..75: mol_type = other DNA
catttaatcgctgtgcgcttttgaaaaaagttttgcattcgttgctttctcaatcaattgcattaaataaaataa

SEQ ID NO: 85926 - DNA, 75 bp, synthetic construct
  source 1..75: mol_type = other DNA
tagtggaagtatggagatctacaaaacggtactaggggaattgagcattacgaaacctcatacattcagtatcag

SEQ ID NO: 85927 - DNA, 75 bp, synthetic construct
  source 1..75: mol_type = other DNA
aattgatagacctgtgaagaatcgactttgtgataagatagctaacaatctccgcatctctaatcgcgagacagc

SEQ ID NO: 85928 - DNA, 75 bp, synthetic construct
  source 1..75: mol_type = other DNA
agggcttactatcctgagagagttcatccgtaaacagaccctgccagcacaggcagaaccggtcgttcgcttcga

SEQ ID NO: 85929 - DNA, 75 bp, synthetic construct
  source 1..75: mol_type = other DNA
ggctatcaggcttatcagccggtcacggcaccggctggccgctcttatgtggaccagagtaaaaacgaatatcac

SEQ ID NO: 85930 - DNA, 75 bp, synthetic construct
  source 1..75: mol_type = other DNA
tccccataacgacccggatgccagagggatgttctggggactgacccattccagccagcgagcactgatgggcta

SEQ ID NO: 85931 - DNA, 75 bp, synthetic construct
  source 1..75: mol_type = other DNA
cgcacacgcattgtgtttaacgccaatgacaaagccaccagcctgcgtatcgaaaaccaaagtgacaaactgcct

SEQ ID NO: 85932 - DNA, 75 bp, synthetic construct
  source 1..75: mol_type = other DNA
ccaccgaattaaaaccgctggtggatgttcctgtcatcttcccgcgcggcggcggctgcacgctgacctttccgg

SEQ ID NO: 85933 - DNA, 75 bp, synthetic construct
  source 1..75: mol_type = other DNA
cgctggcgcgtgtcagtgcgcaacaggcaaaacttaacgcagtaaaacagcgttatcaggccggaaaggaactgg

SEQ ID NO: 85934 - DNA, 75 bp, synthetic construct
  source 1..75: mol_type = other DNA
tggcgcaggccggtattcagcttcccgtactggatccggaaagcgccatgctgattgcccttgaacgtttggcat

SEQ ID NO: 85935 - DNA, 75 bp, synthetic construct
  source 1..75: mol_type = other DNA
gcgacggaatatttaatgtcgaccctgcgggaaaaatgcggtcaccactggcaggcgatcaaagccattggcctt

SEQ ID NO: 85936 - DNA, 75 bp, synthetic construct
  source 1..75: mol_type = other DNA
gcgcaggggcgcgatatcaaaatctaccgcgaactgcgcagcgatcccttagtcggcggttgtatccggcgacgt

SEQ ID NO: 85937 - DNA, 75 bp, synthetic construct
  source 1..75: mol_type = other DNA
gcgggttcagtcagacacgcgcaatgagctgaatgccatgtatatgctgaaggtgcagaaaacaaaaaacggtat

SEQ ID NO: 85938 - DNA, 75 bp, synthetic construct
  source 1..75: mol_type = other DNA
agggattgatcgatcacaaccctgctcgcttgcttaaacccgcaatgtttggtgcctcaatgggaaaaccgcgtg

SEQ ID NO: 85939 - DNA, 75 bp, synthetic construct
  source 1..75: mol_type = other DNA
agcgagttgctgacggctaaccggcagttacaatccgctctggtcgagaccgcgcagaacaatcaggacgcggtg

SEQ ID NO: 85940 - DNA, 75 bp, synthetic construct
  source 1..75: mol_type = other DNA
gtaatgatcaggtagcgactgacctgaaactgtggtgcaaagataccgttagcgagttactgacggctaaccggc

SEQ ID NO: 85941 - DNA, 75 bp, synthetic construct
  source 1..75: mol_type = other DNA
agtcgcaggcgaagaaaatcggcggcatcagcactacgggagcgcagctgcgtaccgatgatggttcggctttca

SEQ ID NO: 85942 - DNA, 75 bp, synthetic construct
  source 1..75: mol_type = other DNA
gtgaacagttagcaggctggctgggctttgcttcggcgacccgtaacagtctcgacagcgtttctgaccgtgacc

SEQ ID NO: 85943 - DNA, 75 bp, synthetic construct
  source 1..75: mol_type = other DNA
gaagcggggttcggcggcggatctgtcgcaaccggagggcgaggcatcgcgtccagcgttattctttcacaagcg

SEQ ID NO: 85944 - DNA, 75 bp, synthetic construct
  source 1..75: mol_type = other DNA
cgtcgaccgtccggcacggtccatcacagtgataaaggttctcagtatgtatcgctggcctacacacagcggctt

SEQ ID NO: 85945 - DNA, 75 bp, synthetic construct
  source 1..75: mol_type = other DNA
ttctccgtatttgtttttctcgccggactctaaagattgcctgcttactgttacttgtggcaggagcgaccattt

SEQ ID NO: 85946 - DNA, 75 bp, synthetic construct
  source 1..75: mol_type = other DNA
cccccaactggcagacaccgttacacgggattatttcaccctcagagagcggctgatgacgatgcagaagcaact

SEQ ID NO: 85947 - DNA, 75 bp, synthetic construct
  source 1..75: mol_type = other DNA
tgttgttttactggatatctcggacgtaccgggattcacgagctgctactgatcaatgagcgtgtaagggacgct

SEQ ID NO: 85948 - DNA, 75 bp, synthetic construct
  source 1..75: mol_type = other DNA
cgcagaccgtggacttcagcgtgggtgcggaagggcttcgccatgtaccgggggatgtcattgaaatctgcgatg

SEQ ID NO: 85949 - DNA, 75 bp, synthetic construct
  source 1..75: mol_type = other DNA
catcatatgcaaatcgagtcgctcaagggcggctttttttgtgtctgaaattacccatatccgtgcagtatatcg

SEQ ID NO: 85950 - DNA, 75 bp, synthetic construct
  source 1..75: mol_type = other DNA
aggctgccaggctaattatattcgcgatgttcagggagggaccgtcgcaccatcctcctcttctgaactgacggg

SEQ ID NO: 85951 - DNA, 75 bp, synthetic construct
  source 1..75: mol_type = other DNA
attaagcgtcaccgaaccggcgaccgtcggggagattgcgcagaatacttacctttcacgcgaacgctgccagtt

SEQ ID NO: 85952 - DNA, 75 bp, synthetic construct
  source 1..75: mol_type = other DNA
agacagcatccaatatgaatgtaatgggtaatgtaagtgtggggacagggaacaaatcagatatatctgttgcta

SEQ ID NO: 85953 - DNA, 75 bp, synthetic construct
  source 1..75: mol_type = other DNA
aataatatcaacggtagtaataaggcagtggcaggagacctggttttaggtaaaacaggaaatggaattatcgaa

SEQ ID NO: 85954 - DNA, 75 bp, synthetic construct
  source 1..75: mol_type = other DNA
tggcagagctggaagaggagcttgatgacacggatgacgcagccggtcaggacacgtctgtcagcccggaaaatg

SEQ ID NO: 85955 - DNA, 75 bp, synthetic construct
  source 1..75: mol_type = other DNA
gtcatggcaaagttagatattgccgaaaagcgaatcccccaggatggtcgcatggtattgcgtatcggcggcaga

SEQ ID NO: 85956 - DNA, 75 bp, synthetic construct
  source 1..75: mol_type = other DNA
cagccttcaaagcctggaaagcccgtatcagggagggaataaaaccggagaccatgcttgatggcgtgaagcggt

SEQ ID NO: 85957 - DNA, 75 bp, synthetic construct
  source 1..75: mol_type = other DNA
gtatgtggatgcgtcatgtcggagggcacgaacgttcaagggccggtgacggtcagctaaatactcaggctaacc

SEQ ID NO: 85958 - DNA, 75 bp, synthetic construct
  source 1..75: mol_type = other DNA
aggtgaccctgccggagacaggtgccgccacggtgaacctgattaacggcagcggtaagccggtgagcgtggcca

SEQ ID NO: 85959 - DNA, 75 bp, synthetic construct
  source 1..75: mol_type = other DNA
ctgcgttcgtcggggccgggcggtcaacatgtcaataaaaccgactcggcggtacgcgccacgcatctggctacc

SEQ ID NO: 85960 - DNA, 75 bp, synthetic construct
  source 1..75: mol_type = other DNA
gatggcctgatcctgctgcaaactgcaaccgttggagaaatctctgagggtgtgctggacactaccgttggtgct

SEQ ID NO: 85961 - DNA, 75 bp, synthetic construct
  source 1..75: mol_type = other DNA
agcctggagttgaatgtgagtctgttgtcggcgttggaacagtgtaattttgataaagcgacaataaaaagtatt

SEQ ID NO: 85962 - DNA, 75 bp, synthetic construct
  source 1..75: mol_type = other DNA
cattgaagaacagaacggccaggtgcaggaatatgacatcagcaccgcctcgatgccatacctcactcgcccagg

SEQ ID NO: 85963 - DNA, 75 bp, synthetic construct
  source 1..75: mol_type = other DNA
cattaagaaagctggtacaaacgacgacagggtatgtattgaggctcgatagctggatccaaaagaacaaatctc

SEQ ID NO: 85964 - DNA, 75 bp, synthetic construct
  source 1..75: mol_type = other DNA
gtataaacccggatgtttttgaacaatttcttacccttcttaatacacactgccagtcctcagaagagtcgctcg

SEQ ID NO: 85965 - DNA, 75 bp, synthetic construct
  source 1..75: mol_type = other DNA
gcattgccactggctgatatccggggcgtcacacttcatcccgacatttttacccccgacaccaccgtgcgcgac

SEQ ID NO: 85966 - DNA, 75 bp, synthetic construct
  source 1..75: mol_type = other DNA
ctccaacgggcaaagcgtatgacgccattaaagagctcggcgtcaaaacggctgatggtaaggggaacacacgtc

SEQ ID NO: 85967 - DNA, 75 bp, synthetic construct
  source 1..75: mol_type = other DNA
tcattcggccgttgaacactcccattgaaaaatttctcagtatcgaatataccaatgttgaggactaccctctta

SEQ ID NO: 85968 - DNA, 75 bp, synthetic construct
  source 1..75: mol_type = other DNA
gaatattgctgtgggcattgggcgtgaatcaaatattactgtaagcgcgtctagagaaagctctatattttcaga

SEQ ID NO: 85969 - DNA, 75 bp, synthetic construct
  source 1..75: mol_type = other DNA
ctgtcagacgatgagctggaaaccgtcatgcagcggctggacgatgcttttgtatatggcgcatgtgacagagtt

SEQ ID NO: 85970 - DNA, 75 bp, synthetic construct
  source 1..75: mol_type = other DNA
aatctgcccgttatctggggagcggcagtcagtggactgtccagggaagccggattaagccggggacggatttct

SEQ ID NO: 85971 - DNA, 75 bp, synthetic construct
  source 1..75: mol_type = other DNA
cattgaactgacgccggggtattttcagataacggcggtaccggtgctggcggtgtatgacccgacggtgcagtt

SEQ ID NO: 85972 - DNA, 75 bp, synthetic construct
  source 1..75: mol_type = other DNA
tctctgacgtttttgccgccttcgcggaatttcctgccgctgttgccgaggaagctgcgctactggcgctcgagg

SEQ ID NO: 85973 - DNA, 75 bp, synthetic construct
  source 1..75: mol_type = other DNA
gtgcggtggccgcgggggtagcctgggaaaatgctcctgcaaacagcgccactgtggcggtaaaaatcaatgtct

SEQ ID NO: 85974 - DNA, 75 bp, synthetic construct
  source 1..75: mol_type = other DNA
atgctgaaacagcaggatatgaccgaaaccgccagagtggtgtttaatgaattaagtgccaccgcaccggcgaca

SEQ ID NO: 85975 - DNA, 75 bp, synthetic construct
  source 1..75: mol_type = other DNA
cagttaaaccggcatcttttgcttcaattacaacaaggttgtttacctctctcaggaataaataatgcaagcgct

SEQ ID NO: 85976 - DNA, 75 bp, synthetic construct
  source 1..75: mol_type = other DNA
gtggcgttcatcattgatgtgtttgccggatacatcgtggggtggcgggtctcatcgtctatggaaacgacattc

SEQ ID NO: 85977 - DNA, 75 bp, synthetic construct
  source 1..75: mol_type = other DNA
cggcggcaaaaacaaacgggtcatgcgtaacctgaccatcgataacctgaccgttagccacgctaattacgccat

SEQ ID NO: 85978 - DNA, 75 bp, synthetic construct
  source 1..75: mol_type = other DNA
aaacaggcgcttaaattttgtagggtaagaaaatacgcgattagtcatgaaattgatgatcttgaggtctgtgat

SEQ ID NO: 85979 - DNA, 75 bp, synthetic construct
  source 1..75: mol_type = other DNA
tttctgaaatcgaccagggtgccattgtggacaacaaacgtctggggcgggcactggaaatggcgcaactggtcc

SEQ ID NO: 85980 - DNA, 75 bp, synthetic construct
  source 1..75: mol_type = other DNA
gagaggctacaaggttttcccgatggatatacagatattccatggaaaaattcatctccagctcatcgttataag

SEQ ID NO: 85981 - DNA, 75 bp, synthetic construct
  source 1..75: mol_type = other DNA
gttacggtaccggcgcgatggtgttgtgctggcactgcgacaaccagctgcgcgaccagacatcagaatcactcg

SEQ ID NO: 85982 - DNA, 75 bp, synthetic construct
  source 1..75: mol_type = other DNA
gctgctgatccagtgctgcaagatcgcctcgtcaaactggcttcacctctcactgacgatcttattgtcggggct

SEQ ID NO: 85983 - DNA, 75 bp, synthetic construct
  source 1..75: mol_type = other DNA
cgctcaaaactggaactattatccgaagaactaatgccccgttgtggtcttgtttatgagctatatcagcgacgt

SEQ ID NO: 85984 - DNA, 75 bp, synthetic construct
  source 1..75: mol_type = other DNA
atgcgcactatgtctaccgctacgatgaatacggcaggctggcggagaagacggaccgcatcccggaaggggtga

SEQ ID NO: 85985 - DNA, 75 bp, synthetic construct
  source 1..75: mol_type = other DNA
tgcgattaatacgggtaaagtcctgcgcggtgccccctggcagattgtcatcttctcgctcggcatgtatctggt

SEQ ID NO: 85986 - DNA, 75 bp, synthetic construct
  source 1..75: mol_type = other DNA
gataaagccgtgtttaaaccgctggatacagaagaagtctgctacgataattccattcattataccgacagtttg

SEQ ID NO: 85987 - DNA, 75 bp, synthetic construct
  source 1..75: mol_type = other DNA
acgatgacatcagttactacagcaaagtcaatgagtaaaaaaatgtttcaatacagaagtacggaatttgcatta

SEQ ID NO: 85988 - DNA, 75 bp, synthetic construct
  source 1..75: mol_type = other DNA
ctgatgcgacccgaatagataacggcggggccatggatgttgccgggaacgcgactaataccataattaatggcg

SEQ ID NO: 85989 - DNA, 75 bp, synthetic construct
  source 1..75: mol_type = other DNA
aagagctggaaaaaccgtgcagaagtggaactggccacactcacgtgggtggactggtataacaatcgacgattg

SEQ ID NO: 85990 - DNA, 75 bp, synthetic construct
  source 1..75: mol_type = other DNA
ccatatcaacattgcggaagccgatcacttcaaacagttcctgcgtcagattaagcgtaccggcctcgatatccg

SEQ ID NO: 85991 - DNA, 75 bp, synthetic construct
  source 1..75: mol_type = other DNA
atgatccgcatcacatcattggtcatggactgggagggatgggaacaaaggctgatgatttgtttgttattccgc

SEQ ID NO: 85992 - DNA, 75 bp, synthetic construct
  source 1..75: mol_type = other DNA
aacagacgatgcaactgagcaggctgacgctgagaagtaaaagccggagcttgtggagcaagagctgtggggtgt

SEQ ID NO: 85993 - DNA, 75 bp, synthetic construct
  source 1..75: mol_type = other DNA
cgggtatttcatggcggcagggtgctggtggagtctgaaccgaaaagcatgcgtaatctgccgtccggggtcgtt

SEQ ID NO: 85994 - DNA, 75 bp, synthetic construct
  source 1..75: mol_type = other DNA
tggaatcaaaaaagaataaaactcagtcttgggggactcagtccggtagaataccggactgagcatcaaaaagcc

SEQ ID NO: 85995 - DNA, 75 bp, synthetic construct
  source 1..75: mol_type = other DNA
gaaagcgacatcgtaccgggagagcagaccgccaccagcatattgaaacaacgcacaaaaaatcttgcaccgttg

SEQ ID NO: 85996 - DNA, 75 bp, synthetic construct
  source 1..75: mol_type = other DNA
gccatctgctgacggctgcagccttcggcacgatgaagaacagcgaaaatgagcttgctgagcaacttatagaac

SEQ ID NO: 85997 - DNA, 75 bp, synthetic construct
  source 1..75: mol_type = other DNA
agcaagcaatatcattagttggtagagatatatatgagaggttcattaaaggttatacagaaaaacagtgggggc

SEQ ID NO: 85998 - DNA, 75 bp, synthetic construct
  source 1..75: mol_type = other DNA
ggtattaatcttgatatgaacgccgataaatcgcgccaggcgctggatgagttaggcgtctgtttcctctttgca

SEQ ID NO: 85999 - DNA, 75 bp, synthetic construct
  source 1..75: mol_type = other DNA
atagcctgttacatgcgcccgatatgtatatgaaaaagctggttgttaatcgactggctgccggggcgattgatc

SEQ ID NO: 86000 - DNA, 75 bp, synthetic construct
  source 1..75: mol_type = other DNA
tggcggaggctggcagctctggcagtcggaaaccggcgaaggtctgcgggcagattaccgcaccgccaaaggcac

SEQ ID NO: 86001 - DNA, 75 bp, synthetic construct
  source 1..75: mol_type = other DNA
gagtgggtaaccattcaggctggattttacaccgaacatttttatccggacggtagccgcgggcgtcgggcaaaa

SEQ ID NO: 86002 - DNA, 75 bp, synthetic construct
  source 1..75: mol_type = other DNA
aacactccccatatctgcgggcagtcgatattctgcgggcgcgacaagcaactggtttattgaaaataaatcgta

SEQ ID NO: 86003 - DNA, 75 bp, synthetic construct
  source 1..75: mol_type = other DNA
gggttatatcaatgactttggtggattaagtttttatgaaataaactgccctgtagtaaataacatttgtaatat

SEQ ID NO: 86004 - DNA, 75 bp, synthetic construct
  source 1..75: mol_type = other DNA
gagcgccaccatacagcagatacagcgcgtgcagaaggacacaaatgatgacctggctgcgctgtacatgctgaa

SEQ ID NO: 86005 - DNA, 75 bp, synthetic construct
  source 1..75: mol_type = other DNA
cctgactttccgtaatatgaacgatttcacgccggagcaggttgcccgacaaattccccgtcttaaagccatgct

SEQ ID NO: 86006 - DNA, 75 bp, synthetic construct
  source 1..75: mol_type = other DNA
ggttttaattatttcaataaaggcgtaactttttttgaacctacagcaagtaatattgaacgtacggggatgata

SEQ ID NO: 86007 - DNA, 75 bp, synthetic construct
  source 1..75: mol_type = other DNA
tcggtaaacaggcggagtcgcttattggtaaggctggcagtatggcgaccagattcacaggtatgacgggggcgg

SEQ ID NO: 86008 - DNA, 75 bp, synthetic construct
  source 1..75: mol_type = other DNA
actaaaacggagtttttccgcgatggtatgccgcgccggattgagtttaccctgtcgctcaaacgggtggatgaa

SEQ ID NO: 86009 - DNA, 75 bp, synthetic construct
  source 1..75: mol_type = other DNA
ttctttgacgatacccaaatctttatctatccgggcttccagtacaaagtggtcgatgcgctggtgacgaacttc

SEQ ID NO: 86010 - DNA, 75 bp, synthetic construct
  source 1..75: mol_type = other DNA
atgaaaaatgacatcgacaatgttatcacccttgtgcaaccaaaatcagaggaagaagggcttctcaacgttgtg

SEQ ID NO: 86011 - DNA, 75 bp, synthetic construct
  source 1..75: mol_type = other DNA
gcctgttcctgggttttctgacttatctgacgaatctgtacttcaagataaaagaggaccgtcgcaaggcggcgc

SEQ ID NO: 86012 - DNA, 75 bp, synthetic construct
  source 1..75: mol_type = other DNA
gaaagcgcagtgccgcagcctggcggagaagatacagcaggaagggagcgaagacggtcacggtgtggtgttccc

SEQ ID NO: 86013 - DNA, 75 bp, synthetic construct
  source 1..75: mol_type = other DNA
gtgatgtcaggagcgatagaaaaaggctttggcgataaagtgccggaagagcccatccagtggctgacagataac

SEQ ID NO: 86014 - DNA, 75 bp, synthetic construct
  source 1..75: mol_type = other DNA
caacaaccgcgctatatcccgctcagccagcccatgcctttactggcaaatacaccgtttattgtcaccggctcc

SEQ ID NO: 86015 - DNA, 75 bp, synthetic construct
  source 1..75: mol_type = other DNA
cgggaaggaatcagggtggccagatgtactgtggcacgtctcatggcagctatgggacttgccggtgttctccgg

SEQ ID NO: 86016 - DNA, 75 bp, synthetic construct
  source 1..75: mol_type = other DNA
ttcttggtcaacggcctgttgcggacattaagccattagagcttcttaatgtgcttaaaaaaatcgaagccagag

SEQ ID NO: 86017 - DNA, 75 bp, synthetic construct
  source 1..75: mol_type = other DNA
cagctgctggacaaagtctctccgtcccagtgggtggcaataggtgtgctggggagtctgctgtttggcctgctg

SEQ ID NO: 86018 - DNA, 75 bp, synthetic construct
  source 1..75: mol_type = other DNA
gggacgaggcattgctcctgagtggcaaatgaaacgagaaatgctttcccctgcgtacaccaccagatggacaga

SEQ ID NO: 86019 - DNA, 75 bp, synthetic construct
  source 1..75: mol_type = other DNA
gcctgccggggcagcagtatgatgaggagtccggcctgtattacaaccgccaccgctattatgacccgctgcagg

SEQ ID NO: 86020 - DNA, 75 bp, synthetic construct
  source 1..75: mol_type = other DNA
atgggcaaaggcggcggcagggcgcacacaccgcgcgaggcgaaggataatctcaaatccacgcagatgatgagc

SEQ ID NO: 86021 - DNA, 75 bp, synthetic construct
  source 1..75: mol_type = other DNA
tcccaatcaggacggcacattcaccgccatgacgtataccaaaagcaaaacgtttaaaaccgaagctggcgcacg

SEQ ID NO: 86022 - DNA, 75 bp, synthetic construct
  source 1..75: mol_type = other DNA
cgaaatcgctggctggatcatctggtgcgaataatggccattaccggaatctccacacctgcgttctggcttggg

SEQ ID NO: 86023 - DNA, 75 bp, synthetic construct
  source 1..75: mol_type = other DNA
gctcagtagcgacaccaacagcacttctgaaacattagctgcaactccaaaagcggttaaagctgcatacgatct

SEQ ID NO: 86024 - DNA, 75 bp, synthetic construct
  source 1..75: mol_type = other DNA
ggcatcccgtctttttccgttctgtaccggtaaataccgctggcacggcagtgctgaagcgtataccggtcgtga

SEQ ID NO: 86025 - DNA, 75 bp, synthetic construct
  source 1..75: mol_type = other DNA
gcaaaacaacgccaaggaactgactcgcgtcggtgttgaccctaataacgttgctcagatgtatcagcagaatcc

SEQ ID NO: 86026 - DNA, 75 bp, synthetic construct
  source 1..75: mol_type = other DNA
agtgcaggatattcccggcgtgctggctgtatttgcagaacgccgtaaggacagttttggcccgtatgtccggct

SEQ ID NO: 86027 - DNA, 75 bp, synthetic construct
  source 1..75: mol_type = other DNA
gcagggctataacaccgcgtggatagagacacagcttgcgcacgtcgataaaaactcaattcgtggcacatacaa

SEQ ID NO: 86028 - DNA, 75 bp, synthetic construct
  source 1..75: mol_type = other DNA
aaggcactgcgccagaccgcgattcaggcgaccattgaactggcacaaaaaccgatagtgctgattggcggttgt

SEQ ID NO: 86029 - DNA, 75 bp, synthetic construct
  source 1..75: mol_type = other DNA
gactggtataacaatcgacgattgctggaaaggctgggccatatcccaccggcagaagcagaaaaagcttattat

SEQ ID NO: 86030 - DNA, 75 bp, synthetic construct
  source 1..75: mol_type = other DNA
cggttatcagaatacatacaaccacctgcaactcggtgcagacaaaggcataagaattgaatcagcaatgctata

SEQ ID NO: 86031 - DNA, 75 bp, synthetic construct
  source 1..75: mol_type = other DNA
aaccgtatagtatgccgacacattgctgcacaatatattaatgatatttatcagaatgttgattacaaaccccat

SEQ ID NO: 86032 - DNA, 75 bp, synthetic construct
  source 1..75: mol_type = other DNA
gcagaacgtcctgaccagttgtgggtggctgattttacttacggtgtgcccggagttcagggcgggcatggatgc

SEQ ID NO: 86033 - DNA, 75 bp, synthetic construct
  source 1..75: mol_type = other DNA
ctcatcgtctatggaaacgacattcgtgttggatgctctggagcaggcgttatgggtccgtcgaccgtccggcac

SEQ ID NO: 86034 - DNA, 75 bp, synthetic construct
  source 1..75: mol_type = other DNA
gtggtgcatttacagttagtcaaacaaacttcttctggtttacttctcccggcgacgccggagagttgcgatttt

SEQ ID NO: 86035 - DNA, 75 bp, synthetic construct
  source 1..75: mol_type = other DNA
tttttcaaactcctgcaactggggttcgattactggactccggtcggaggggcgatcacgcctagcgaacaaaaa

SEQ ID NO: 86036 - DNA, 75 bp, synthetic construct
  source 1..75: mol_type = other DNA
tcaacgtattaccactgtcagcaacagcgacatcatcctgataaacgcagttcccgtgcgcagcgcgatgactgg

SEQ ID NO: 86037 - DNA, 75 bp, synthetic construct
  source 1..75: mol_type = other DNA
ctggatttttgcggtattggttattctgaatggtcttttccagggaatgggcgttggtccttctttcatcactat

SEQ ID NO: 86038 - DNA, 75 bp, synthetic construct
  source 1..75: mol_type = other DNA
atatctctcataacgtcggtggtggtattgttgcacccattgttggtgccgcttttgccctactcggcagcgagc

SEQ ID NO: 86039 - DNA, 75 bp, synthetic construct
  source 1..75: mol_type = other DNA
gaaaattcaggtgacatatcgtcgctatcgtatgcaggcgttacttagtgtatttctggggtatcttgcatacta

SEQ ID NO: 86040 - DNA, 75 bp, synthetic construct
  source 1..75: mol_type = other DNA
tgtttggcctgctgacgtatctgacaaatctttatttcaagattaaagaagataagcgtaaggctgcgagaggtg

SEQ ID NO: 86041 - DNA, 75 bp, synthetic construct
  source 1..75: mol_type = other DNA
gctacaaacacttacatcgcggaaatgctgtgcggaaatttgcatccatttccacttgctgtgcggcataacttc

SEQ ID NO: 86042 - DNA, 75 bp, synthetic construct
  source 1..75: mol_type = other DNA
ggggagtctgctgtttggtctgctgacgtacctgaccaacctgtattttaaaatcagagaggaccggcgcaaggc

SEQ ID NO: 86043 - DNA, 75 bp, synthetic construct
  source 1..75: mol_type = other DNA
caggtctgtcggggcgggatatgtatcagatggaaaaaatatcaacaggcattgcctacggcacctccgcaggca

SEQ ID NO: 86044 - DNA, 75 bp, synthetic construct
  source 1..75: mol_type = other DNA
acctcgatgcgctggtcatggatgcgaccaccaacctgattgatgagatttatcaggatgacccggagctcgtcg

SEQ ID NO: 86045 - DNA, 75 bp, synthetic construct
  source 1..75: mol_type = other DNA
gagatcgccggggcagcaaccgcgctactggaaaacgccgcgccgttcccgcgcccggattatctgtttgccgat

SEQ ID NO: 86046 - DNA, 75 bp, synthetic construct
  source 1..75: mol_type = other DNA
gggatcaatgcaaaattatgtagcccaggggttctctcaatatgaagcctccctgatgattgccaaccggtttat

SEQ ID NO: 86047 - DNA, 75 bp, synthetic construct
  source 1..75: mol_type = other DNA
cttgactgtattgtcctgaaagtacggcaggacagccgggttatcaacaaagcggtgttcctggctctgggtatt

SEQ ID NO: 86048 - DNA, 75 bp, synthetic construct
  source 1..75: mol_type = other DNA
gcgctgggtgaaggcggcaaacttcgctggctggtgaccggcttcagcgccgtcgccagaggagccagaacactg

SEQ ID NO: 86049 - DNA, 75 bp, synthetic construct
  source 1..75: mol_type = other DNA
gaggcgatcaggaaggccagcagaggctgatggagtccttcggactggcggaagtctttaccgatatccagaccg

SEQ ID NO: 86050 - DNA, 75 bp, synthetic construct
  source 1..75: mol_type = other DNA
tggtgccgtacgttatctttcagcccgaataagccacgacactatgaacgttatctgcagcgaatgaaagaaagg

SEQ ID NO: 86051 - DNA, 75 bp, synthetic construct
  source 1..75: mol_type = other DNA
tccgtcgtctccagtggagtggctgacggataatggttcatgctaccgggctaatgaaacacgccagttcgcccg

SEQ ID NO: 86052 - DNA, 75 bp, synthetic construct
  source 1..75: mol_type = other DNA
tatctacaccactaacgcaatcgaatcgctgaatagcgtcatcagacatgcgataaagaaacggaaagtgttcca

SEQ ID NO: 86053 - DNA, 75 bp, synthetic construct
  source 1..75: mol_type = other DNA
gctgaaaaatcgtggccttcaggacatcctgattgcctgcgtggacggcctgaaaggcttcccggaagcgataaa

SEQ ID NO: 86054 - DNA, 75 bp, synthetic construct
  source 1..75: mol_type = other DNA
aggtggatgtgaactggctgatcgccgagcgtcccggcagggtaaaaaccttgaagcagcatccgcgcaagaaca

SEQ ID NO: 86055 - DNA, 75 bp, synthetic construct
  source 1..75: mol_type = other DNA
ctgccagtggcctcatggtgattaccaccatagtgaaaccgttattcaccgttacggtaccggcgcgatggtatt

SEQ ID NO: 86056 - DNA, 75 bp, synthetic construct
  source 1..75: mol_type = other DNA
tgcgccatattaaatcctgccagtggccacacggcgattatcaccacagtgaaaccgtcattcaccgttatggta

SEQ ID NO: 86057 - DNA, 75 bp, synthetic construct
  source 1..75: mol_type = other DNA
ggaaaaaatccgctcggtgtaccgcgaaagcgacatcataccgggagagcagacagccaccagcatcctgaaaca

SEQ ID NO: 86058 - DNA, 75 bp, synthetic construct
  source 1..75: mol_type = other DNA
aattaacaagcaatttcagagagatgatgaataactcattaattcaaaacgaatatctcaccaacctccgaggca

SEQ ID NO: 86059 - DNA, 75 bp, synthetic construct
  source 1..75: mol_type = other DNA
gcggtgcaatttgcgctatcgcggtgatgattaccatcgtgatgggtaatggcaatgtgcgaaccaaccaggcgg

SEQ ID NO: 86060 - DNA, 75 bp, synthetic construct
  source 1..75: mol_type = other DNA
catcggcggcgttgtgcgtgcccgcgctatcgctaagctgctgaacgataccgatatggcaatcatcgacaaacg

SEQ ID NO: 86061 - DNA, 75 bp, synthetic construct
  source 1..75: mol_type = other DNA
acagcttgatagtgccggtgttgttactcaaggtgcgggcaatagagtaagaattgacgtacgtgcaaaggatac

SEQ ID NO: 86062 - DNA, 75 bp, synthetic construct
  source 1..75: mol_type = other DNA
tcggtggtcatcttatcgacgggctgataaatggcatcagaaacaaatgggagtcactgaaaaccagcataaccg

SEQ ID NO: 86063 - DNA, 75 bp, synthetic construct
  source 1..75: mol_type = other DNA
actaaaaaaccgcggcctgaacgatattctcatagcctgtgtcgacgggctgaaaggcttcccggacgctatcaa

SEQ ID NO: 86064 - DNA, 75 bp, synthetic construct
  source 1..75: mol_type = other DNA
gtgtggagtggcagtgctgaccggtgtccgagcagatgaatccctaaaccgctttatgggactggtgtcccagcg

SEQ ID NO: 86065 - DNA, 75 bp, synthetic construct
  source 1..75: mol_type = other DNA
atctggcgctggcgaaatgggacacgccgcgggtggtgaagggcgtgcgcttcagtctgcgcctgaccagtggaa

SEQ ID NO: 86066 - DNA, 75 bp, synthetic construct
  source 1..75: mol_type = other DNA
ggttaatgaaaagtacacgcgctgggttaagacacagccgtgtgcatgttgtggaaagcccgctgatgatcccca

SEQ ID NO: 86067 - DNA, 75 bp, synthetic construct
  source 1..75: mol_type = other DNA
ttatcggtgccggtattgctggcaccgcttgcgcgttacgctgcgcgcgagcgggtttatccgttttgttactgg

SEQ ID NO: 86068 - DNA, 75 bp, synthetic construct
  source 1..75: mol_type = other DNA
cgctgaccaacggctgcatctgctgttcgcgctccaacgagctggaggacgcgctactcgacctgctggataatc

SEQ ID NO: 86069 - DNA, 75 bp, synthetic construct
  source 1..75: mol_type = other DNA
ttcttcgactgggcgtacaaaaccggggctaaacaggcgaacgacctggattacgccagcctgccggatagcgta

SEQ ID NO: 86070 - DNA, 75 bp, synthetic construct
  source 1..75: mol_type = other DNA
cgatgataagccttggaccacggcatcgcctgaagggttttactacactatgtatccgctgtatgactggaaaac

SEQ ID NO: 86071 - DNA, 75 bp, synthetic construct
  source 1..75: mol_type = other DNA
cgctttccggtcaggctatggcggtgctggaggccatgaaaccaatcagccaccaccgcaattacgttttcccaa

SEQ ID NO: 86072 - DNA, 75 bp, synthetic construct
  source 1..75: mol_type = other DNA
gttacatgtgccattttattgcttccacgatgtggatgtttcccctgagggcgcgtcgttaaaagagtacatcaa

SEQ ID NO: 86073 - DNA, 75 bp, synthetic construct
  source 1..75: mol_type = other DNA
gagagcgatattgtaccgggagagcagacagccaccagcatactgaagcagcgcacaaaaaatattgcgctgcca

SEQ ID NO: 86074 - DNA, 75 bp, synthetic construct
  source 1..75: mol_type = other DNA
ggatcagcacacccgaggcgctcgatgcgaccatcgcggcgcgggcggactatgccgggttggtgttctatccag

SEQ ID NO: 86075 - DNA, 75 bp, synthetic construct
  source 1..75: mol_type = other DNA
cggcgctgatatcgaaagtcaccgatgccgtaatcgaccaggtggttgaatggcaaaaccgtcctctggatgcga

SEQ ID NO: 86076 - DNA, 75 bp, synthetic construct
  source 1..75: mol_type = other DNA
actgaaaaatcgcggcctgaacgatatccttatcgcctgcgtggacggcctgaaaggcttcccggaagcgattaa

SEQ ID NO: 86077 - DNA, 75 bp, synthetic construct
  source 1..75: mol_type = other DNA
cagcgaactgacccgtacagaactcttcgccctgcgcagacaaatcaaaactctcagggatcaccttattccatc

SEQ ID NO: 86078 - DNA, 75 bp, synthetic construct
  source 1..75: mol_type = other DNA
tcttgccacgttcttcgcttatccaacggacatccgcaaagtgatctatacgacgaatgccatcgagtcgctaaa

SEQ ID NO: 86079 - DNA, 75 bp, synthetic construct
  source 1..75: mol_type = other DNA
tcgcctccatgcggctgtttgcccgcttatccctggatagcgccctgccggatcgcaccaccatcatgaatttcc

SEQ ID NO: 86080 - DNA, 75 bp, synthetic construct
  source 1..75: mol_type = other DNA
caatgtccgggcaaaatcaggtttaaaccgttcgatactggatcagggctggtatgaaatgcgccgccagcttga

SEQ ID NO: 86081 - DNA, 75 bp, synthetic construct
  source 1..75: mol_type = other DNA
tttttgtgttgcctttgtgcagaaagcatcacgacgagctgcatgcggataccgtggcatttgaagagaagtatg

SEQ ID NO: 86082 - DNA, 75 bp, synthetic construct
  source 1..75: mol_type = other DNA
tcttggctatacttcaccggatggtggaattaacgaaaacaacaactggtgtcacatcccgcaggcaaaagaggc

SEQ ID NO: 86083 - DNA, 75 bp, synthetic construct
  source 1..75: mol_type = other DNA
atgatgagtgatatgtcgcatcaggaacgtctgatcaggcgggtcaggaaactgctggagctgagccgtaataac

SEQ ID NO: 86084 - DNA, 75 bp, synthetic construct
  source 1..75: mol_type = other DNA
aaaatattattagagggacttataatcatgcacaatatattgataagcgtcgagatatgatgcagtggtattcag

SEQ ID NO: 86085 - DNA, 75 bp, synthetic construct
  source 1..75: mol_type = other DNA
ccggtaaccggtgtggagtggcagtgctgactggtgtccgtgcggatgaatcgctcaatcgctttatgggactgg

SEQ ID NO: 86086 - DNA, 75 bp, synthetic construct
  source 1..75: mol_type = other DNA
tggtaccggaactcggactggttatcgttaagcctggccgtgaatccatgcaggtattccataacggcagagtac

SEQ ID NO: 86087 - DNA, 75 bp, synthetic construct
  source 1..75: mol_type = other DNA
actgtgacgcgtaatgtcggcgaaaatgcattagctatcagccgtgtgccgcagactcagaaagaaggctggcgt

SEQ ID NO: 86088 - DNA, 75 bp, synthetic construct
  source 1..75: mol_type = other DNA
cctaaagaatattctaaaggagatgaaccatactatcctgtaaatgatagttataataatagattgttttcttat

SEQ ID NO: 86089 - DNA, 75 bp, synthetic construct
  source 1..75: mol_type = other DNA
tcatgcagacccgcaggagtttgagaaaaagtacggctctcagattgagttaatttttcgttttcttgatcacgc

SEQ ID NO: 86090 - DNA, 75 bp, synthetic construct
  source 1..75: mol_type = other DNA
tttgctgtattactctgttatctgcgtggacctggatttattccggacaaaagcagtgctcctcacaatggcgtt

SEQ ID NO: 86091 - DNA, 75 bp, synthetic construct
  source 1..75: mol_type = other DNA
gagaaattagtaaccgacattaatgccgaacgtaaagcgagttaccaacaactggcaaagcaaaataatgtgtct

SEQ ID NO: 86092 - DNA, 75 bp, synthetic construct
  source 1..75: mol_type = other DNA
ccgtcaataagaaactggaagaccagagtgcagcgatccagcagatacagaaggttcaggttgatacaaataata

SEQ ID NO: 86093 - DNA, 75 bp, synthetic construct
  source 1..75: mol_type = other DNA
tgactcgcgcaggcgatctggttgccccaaaccagttctctaatgcggctaactccattctggttaacatggtgt

SEQ ID NO: 86094 - DNA, 75 bp, synthetic construct
  source 1..75: mol_type = other DNA
ccggatgaacaggagaatgacctggggagccgggatattccgtcctggcgacgtatctgtaagactctcataaag

SEQ ID NO: 86095 - DNA, 75 bp, synthetic construct
  source 1..75: mol_type = other DNA
actgaagaacaactcgatacagcactgcgtaatcgcgtcgaaggtctacgcctgggcggttcaatgctgatgcag

SEQ ID NO: 86096 - DNA, 75 bp, synthetic construct
  source 1..75: mol_type = other DNA
cgcattgattaccgggtcaaaatgtacaacccggaaaccggtgggcaaattgatgtgcgcaataatgaaaatatg

SEQ ID NO: 86097 - DNA, 75 bp, synthetic construct
  source 1..75: mol_type = other DNA
cgcgtcgttcgctgggattaccagcggaaaaaatccgctccgtataccgtgagagtgacatcgtaccgggagaac

SEQ ID NO: 86098 - DNA, 75 bp, synthetic construct
  source 1..75: mol_type = other DNA
aaattacttcgcaacaagaagcattaattcctgtgatttaaagcatcccgccacagacgggagtgttacagttag

SEQ ID NO: 86099 - DNA, 75 bp, synthetic construct
  source 1..75: mol_type = other DNA
aacaatatcctgaccgatgcccatatcgaacagattatgcaggtatttgccagcaaggaagatgttgctcatctg

SEQ ID NO: 86100 - DNA, 75 bp, synthetic construct
  source 1..75: mol_type = other DNA
cactacgcaaaggccaggcctcagcattttattatggtgatcccctgggcgaaatgcgcctggtaagcagagttt

SEQ ID NO: 86101 - DNA, 75 bp, synthetic construct
  source 1..75: mol_type = other DNA
gaagagaagcagctctctgataaccaggatttacatgaaaaatacctcctggaattaatggatatcattgataag

SEQ ID NO: 86102 - DNA, 75 bp, synthetic construct
  source 1..75: mol_type = other DNA
tcatgatgacccaaggcactttggtggatgccaccatcattgaggcacccaactctaccaagaacaaagagcagc

SEQ ID NO: 86103 - DNA, 75 bp, synthetic construct
  source 1..75: mol_type = other DNA
gataacgtgctggtggtcggtctggggccggtcggcatgatggcgatgatgctggcgaaaggtcgcggtgcaaaa

SEQ ID NO: 86104 - DNA, 75 bp, synthetic construct
  source 1..75: mol_type = other DNA
ggcacttcaggctctggcgaaaaactttggtctgggcgatatgttcgcggatatgcaggtcatggcatttatccg

SEQ ID NO: 86105 - DNA, 75 bp, synthetic construct
  source 1..75: mol_type = other DNA
ttcattaaaagtgcaaggattgctgggacgtcgctgcccaacgccaatgttatcaggctactggaagaacgatcc

SEQ ID NO: 86106 - DNA, 75 bp, synthetic construct
  source 1..75: mol_type = other DNA
taacgccaatggtgctgcgcgttttacggctacagacctgacaatcgatgttcagggctacagcgccatggggat

SEQ ID NO: 86107 - DNA, 75 bp, synthetic construct
  source 1..75: mol_type = other DNA
tggctctgcagagttcagctgcgggtagcgcaacaaacgttggtgtgcagatcctggacagaacgggtgctgcgc

SEQ ID NO: 86108 - DNA, 75 bp, synthetic construct
  source 1..75: mol_type = other DNA
aaaaaccagcctaaaccgggtgccaactcccgcaatggctattccacaaagaccgttatcatcggtgatggcccc

SEQ ID NO: 86109 - DNA, 75 bp, synthetic construct
  source 1..75: mol_type = other DNA
cctgtaagcgggtatcgtgatgaagaagagaggctggcctcattaatctcggaacgagtaaaagaagttgcggct

SEQ ID NO: 86110 - DNA, 75 bp, synthetic construct
  source 1..75: mol_type = other DNA
tcgcggtgtgacggcctctgttgagggtgggtatacctttgaagcgggaacatttagcggcagcgaagggacgct

SEQ ID NO: 86111 - DNA, 75 bp, synthetic construct
  source 1..75: mol_type = other DNA
gatctcggttttgatgacagtcacgttgtgacaatgccggaactgtgctggtggctggttcgtaatgacctggcg

SEQ ID NO: 86112 - DNA, 75 bp, synthetic construct
  source 1..75: mol_type = other DNA
ggaaggagcaaccagttctgctgtcggttttaacattcagctgaatgattgcgataccaatgttgcatctaaagc

SEQ ID NO: 86113 - DNA, 75 bp, synthetic construct
  source 1..75: mol_type = other DNA
tagcgcgtgaaaacgtccgcaacctgacgccgtatcagtcggcgcgtcgtctgggcggtaacggcgacgtctggc

SEQ ID NO: 86114 - DNA, 75 bp, synthetic construct
  source 1..75: mol_type = other DNA
gcgctctggagtttgccgctgccgtggattgcgattgaagccgggtggtttatgaccgagtttggtcgtcagccg

SEQ ID NO: 86115 - DNA, 75 bp, synthetic construct
  source 1..75: mol_type = other DNA
tcaaagtaatgaactgaataaggcgttctcgtcggataccggactcttctggctgggcagtgttgactatggttt

SEQ ID NO: 86116 - DNA, 75 bp, synthetic construct
  source 1..75: mol_type = other DNA
gccggttatgcccacagtgtcagcggcagcagcgctgaaggttataacggtcaggccacactgaacgtgactttc

SEQ ID NO: 86117 - DNA, 75 bp, synthetic construct
  source 1..75: mol_type = other DNA
gctggagaacaattaaaacgtattaaatatgaagttggtgaaaataacttaaaggtattcaacgtacactttaat

SEQ ID NO: 86118 - DNA, 75 bp, synthetic construct
  source 1..75: mol_type = other DNA
gcacggggtgacggactgttacacgctgttccgggatgcttaccatctggcgggaattgagatgcctgattttca

SEQ ID NO: 86119 - DNA, 75 bp, synthetic construct
  source 1..75: mol_type = other DNA
taaccctcacgatcctgaaggcgatcttttttctaatccccccgtgctaggctggcaaaaccagacgcctcctgc

SEQ ID NO: 86120 - DNA, 75 bp, synthetic construct
  source 1..75: mol_type = other DNA
gttgcgtctgtgcgcaatgaccttgatcctcccggtgctggttgctgttttcggcattcttagcgtctatggtcg

SEQ ID NO: 86121 - DNA, 75 bp, synthetic construct
  source 1..75: mol_type = other DNA
aataacgactggacggtgataaaggctcaaccgacgttgaaggcgatctggcaagtagctggaaagcgtctgacg

SEQ ID NO: 86122 - DNA, 75 bp, synthetic construct
  source 1..75: mol_type = other DNA
aataacgactggacggtgacctacccgtattatcagcggctggttcagtacaaaacggacggtgataaaggctca

SEQ ID NO: 86123 - DNA, 75 bp, synthetic construct
  source 1..75: mol_type = other DNA
aaaagtatacaacgtacactttgataataatcaagagttagttgctgatggtgagcctgacgtagtatttttaaa

SEQ ID NO: 86124 - DNA, 75 bp, synthetic construct
  source 1..75: mol_type = other DNA
actgcacctgggaattgatgggaacgccgttcgactgcgagtctgacgagtcgctccagttcgggacgaaccagt

SEQ ID NO: 86125 - DNA, 75 bp, synthetic construct
  source 1..75: mol_type = other DNA
aaaagcaattcgcgatgcactaggaaacgaagagttccagcgtttgtcgagggctgggattgtggcatcgctaag

SEQ ID NO: 86126 - DNA, 75 bp, synthetic construct
  source 1..75: mol_type = other DNA
ataatgtcagtgctggctgacggtgtgctggtggcgggtgtggtggttgttgctttcccgttgctgaaaaagaaa

SEQ ID NO: 86127 - DNA, 75 bp, synthetic construct
  source 1..75: mol_type = other DNA
cgcaactgccaggcaactacaacctgaggccacgtaaaggggagctgagtagccagaactttgtggagctggccg

SEQ ID NO: 86128 - DNA, 75 bp, synthetic construct
  source 1..75: mol_type = other DNA
ctgcgccgactggccagcgagtatggttatgccgtgaaagtggtcagcgaccagctggttttttctcatcttgcc

SEQ ID NO: 86129 - DNA, 75 bp, synthetic construct
  source 1..75: mol_type = other DNA
ctgccattagcaagcactcgccagaaatgggtaagattgctagggcatacagcgaccttgccagagcagcaacca

SEQ ID NO: 86130 - DNA, 75 bp, synthetic construct
  source 1..75: mol_type = other DNA
tcgagaggttacaacactcttgtaaaaactttcttgaagggaaaataacggtacaaagtattcaatcagaaattt

SEQ ID NO: 86131 - DNA, 75 bp, synthetic construct
  source 1..75: mol_type = other DNA
gcaagccggtgaaacaattggtgggtatctcctgccaattggcacagcggcaaaagctgctggagcgccagcaaa

SEQ ID NO: 86132 - DNA, 75 bp, synthetic construct
  source 1..75: mol_type = other DNA
agttcgggcatggcagtgcacaacatgtgcgtgccggtttccgtctgggcagccacaacgatatgacctttggcg

SEQ ID NO: 86133 - DNA, 75 bp, synthetic construct
  source 1..75: mol_type = other DNA
ggtgacaactcaggctatgcaatcggggcaaactatcactgataatgttcagagagcacctaagaccatctctat

SEQ ID NO: 86134 - DNA, 75 bp, synthetic construct
  source 1..75: mol_type = other DNA
ttaatacgttaaatctggaaaacaattgtctaacttgtcttgactttactgacaatgccagtctcgttaatatca

SEQ ID NO: 86135 - DNA, 75 bp, synthetic construct
  source 1..75: mol_type = other DNA
gtggataactggcagaagagtgtaaggagtcgtgcgctcccggaagaggcgatgacgggctggaacgaaggcatg

SEQ ID NO: 86136 - DNA, 75 bp, synthetic construct
  source 1..75: mol_type = other DNA
agaaaacgaaatggcttgatccggcaacaaaaagcaagcgtgccgcaggtggatttcgtgaagaggaagaacggg

SEQ ID NO: 86137 - DNA, 75 bp, synthetic construct
  source 1..75: mol_type = other DNA
ggatgactggtggcgcaatggtcagaacctgtacctggacaatatggaggcgactggtttttacaggatttccct

SEQ ID NO: 86138 - DNA, 75 bp, synthetic construct
  source 1..75: mol_type = other DNA
gctaagtggcgcggtcagggcgcagacatggaacattggcgttttggcgatgcgcggggaggtttctacacgtaa

SEQ ID NO: 86139 - DNA, 75 bp, synthetic construct
  source 1..75: mol_type = other DNA
ttgcctgatttacgtggtgagtttattcgtggctgggatgacgggcgcggtattgatgcaggacgtgttttattg

SEQ ID NO: 86140 - DNA, 75 bp, synthetic construct
  source 1..75: mol_type = other DNA
cagtaaagttgatgcttcaaacgattttatagcattcagacccctgcaaaaattagtcggaggtacatggattac

SEQ ID NO: 86141 - DNA, 75 bp, synthetic construct
  source 1..75: mol_type = other DNA
accgggaattttttatgaatttacgaaagctgcaggtatcccggcagataaaaaagatgatattcaggcatcatt

SEQ ID NO: 86142 - DNA, 75 bp, synthetic construct
  source 1..75: mol_type = other DNA
atggtggaacgatacagcatcacaaagaatatttgactctctaatattgaataatccgggactagcattagatat

SEQ ID NO: 86143 - DNA, 75 bp, synthetic construct
  source 1..75: mol_type = other DNA
aacaaactgggcgaagagctggatgcagcaaaagccgagctggatgctttacaggctgaaattcgcgatatcgcg

SEQ ID NO: 86144 - DNA, 75 bp, synthetic construct
  source 1..75: mol_type = other DNA
ttttaccgatatccttgctggtggcgctgaaaaatcagtgcttgcaggctgggagcacagcggcgaaacattccg

SEQ ID NO: 86145 - DNA, 75 bp, synthetic construct
  source 1..75: mol_type = other DNA
ttcgctgttcaagtgtcagcgaaatattgaaatacattagggcaataacatctcaccgagcgccgattaaatacg

SEQ ID NO: 86146 - DNA, 75 bp, synthetic construct
  source 1..75: mol_type = other DNA
gagaaaacctgaaaaccagaacattaaccgggatgctctccccctggtcaatatctcacgcactatggatatcaa

SEQ ID NO: 86147 - DNA, 75 bp, synthetic construct
  source 1..75: mol_type = other DNA
gcgccggaagaaaaacgctttgcgtcattcctgaatcgtccaccagcagagcgtgtctatgtggcccgtttcgac

SEQ ID NO: 86148 - DNA, 75 bp, synthetic construct
  source 1..75: mol_type = other DNA
aaacaaaaaggtttagcgatgatattgatcaggttttgaatttggaaagggtcaaaagacctgttgaattcgaga

SEQ ID NO: 86149 - DNA, 75 bp, synthetic construct
  source 1..75: mol_type = other DNA
gtgacctctggactggaacgtttgtcaaacctactctcgaagaaagactctgtttttgtctctgatttactacgc

SEQ ID NO: 86150 - DNA, 75 bp, synthetic construct
  source 1..75: mol_type = other DNA
ggatgtgcttgataatggtgatctgcccggttttgttgaattgctgggatcggggtttgctgttgaatacctgag

SEQ ID NO: 86151 - DNA, 75 bp, synthetic construct
  source 1..75: mol_type = other DNA
gcacggggtgacggactgttacacgctgttccgggatgcttaccatctggcgggaattgagatgccggattttca

SEQ ID NO: 86152 - DNA, 75 bp, synthetic construct
  source 1..75: mol_type = other DNA
gcttcgtctgccatgtgaatatgaccgtaccttcagcagcagaaagatctggttcggtatggactttatcgaaac

SEQ ID NO: 86153 - DNA, 75 bp, synthetic construct
  source 1..75: mol_type = other DNA
cgttgatgtgatgcctgaatcattgccagctgtgttttctcgtctggtcatggataaagttggtcagttcgaaaa

SEQ ID NO: 86154 - DNA, 75 bp, synthetic construct
  source 1..75: mol_type = other DNA
actgacaaatcatgacaaccagattgtcttcggtacggccaacggaatgaccatcagtaccgggctggagtatgg

SEQ ID NO: 86155 - DNA, 75 bp, synthetic construct
  source 1..75: mol_type = other DNA
gggtatcagccttgatgatcttcttacatcgggtaatgcgccaacggggacactcgattcgctttataaccggtt

SEQ ID NO: 86156 - DNA, 75 bp, synthetic construct
  source 1..75: mol_type = other DNA
gatcgacgtggaccaaagcagccctcttcacccgggagggggacgcgttaacgttggttaaccacgtactgaccc

SEQ ID NO: 86157 - DNA, 75 bp, synthetic construct
  source 1..75: mol_type = other DNA
aagacagaagacgaatacgttgatttcttcctgtcagggctacgcgggcgattactgaaaaatccccgcctgtac

SEQ ID NO: 86158 - DNA, 75 bp, synthetic construct
  source 1..75: mol_type = other DNA
tcggtgagcggcggcacctggaaaggctgtatttatgacaccgataaaattatcgaggtaattaacgccggtaaa

SEQ ID NO: 86159 - DNA, 75 bp, synthetic construct
  source 1..75: mol_type = other DNA
cctgccatgaatgggatatggccggtattcagccttctcccgcacaggcacagaacattcgcgaaaaaacggagg

SEQ ID NO: 86160 - DNA, 75 bp, synthetic construct
  source 1..75: mol_type = other DNA
gaaaaaaactatccttgagatcgcattaaaatatcaatttgattcccaacaatcttttacacgtcgatttaagta

SEQ ID NO: 86161 - DNA, 75 bp, synthetic construct
  source 1..75: mol_type = other DNA
agggaacggtcatccacattgtgccgcgactggccggggccggaaagggtggactgcagattgtgctgggggcgg

SEQ ID NO: 86162 - DNA, 75 bp, synthetic construct
  source 1..75: mol_type = other DNA
tgattctcgttcttgctgttttgtgtctgactgcttgccaagctaactatgtaagggatgttcagggtggaacaa

SEQ ID NO: 86163 - DNA, 75 bp, synthetic construct
  source 1..75: mol_type = other DNA
gccgcccccacgctggcggcatggaaccagttaatgctcagccggtcgcctgagaacgcggaagaagaaacgccg

SEQ ID NO: 86164 - DNA, 75 bp, synthetic construct
  source 1..75: mol_type = other DNA
ttttctgccaccacgatgctgttttcactgggggccagcatgattctgggtggtgtggcccagatgctggccccg

SEQ ID NO: 86165 - DNA, 75 bp, synthetic construct
  source 1..75: mol_type = other DNA
ctcccggcgaatctcccaggacatcagtacccgtgatgaaggcggtgacgggaaggtggtggttatcgggcggca

SEQ ID NO: 86166 - DNA, 75 bp, synthetic construct
  source 1..75: mol_type = other DNA
gtgacattctgcccgaactggacctggtgctgtggctgattaaagccgatgaccgcgccctgtctgtggatgagt

SEQ ID NO: 86167 - DNA, 75 bp, synthetic construct
  source 1..75: mol_type = other DNA
gaaacgtctgtactggcacatatccggctggctggattgtgcggtaccggtaccaaaccgccagacctgattgcc

SEQ ID NO: 86168 - DNA, 75 bp, synthetic construct
  source 1..75: mol_type = other DNA
tctgcttgccagggatgaaacactcggcaattgccttaatttgacggaaattatccctcaggcttctgttcgtta

SEQ ID NO: 86169 - DNA, 75 bp, synthetic construct
  source 1..75: mol_type = other DNA
cgcggtgggctggctgcaaaagtaccgcaatgaagctgcagcgcgcgtgatgtcaaaaatcaccgacgaagacgg

SEQ ID NO: 86170 - DNA, 75 bp, synthetic construct
  source 1..75: mol_type = other DNA
gatttccgtccgtcagtaaccactcgtctgacgccagccttccaggcggtgtcgctgacgctcgggagcctgtcg

SEQ ID NO: 86171 - DNA, 75 bp, synthetic construct
  source 1..75: mol_type = other DNA
gcgcgataaagccccctggggggatgcgatggctttactgcgcaccccgtcaggcgatggctactatatcaacct

SEQ ID NO: 86172 - DNA, 75 bp, synthetic construct
  source 1..75: mol_type = other DNA
agccagaactttgtggagctggccgcgctccataatttctatccgggcaagcgcgataaagccccctggggggat

SEQ ID NO: 86173 - DNA, 75 bp, synthetic construct
  source 1..75: mol_type = other DNA
ggtggatattgaatcttatctggcaaaccgtattgcccagcgtattggtcgtggagaggcaaaatatctggttca

SEQ ID NO: 86174 - DNA, 75 bp, synthetic construct
  source 1..75: mol_type = other DNA
tacgagtgcgaccagattaactttgacttccatctgaaatataaaaccctcgacctgtgggcgcgttttcaggac

SEQ ID NO: 86175 - DNA, 75 bp, synthetic construct
  source 1..75: mol_type = other DNA
gcggcagtatgcataacatcaccctggatgtgcgtggttctgactgcaccatcaaagggctggcgatgagcggct

SEQ ID NO: 86176 - DNA, 75 bp, synthetic construct
  source 1..75: mol_type = other DNA
aaacgcctggccatgaaataccacccggaccgtaaccagggtgacaaagaggccgaggcgaaatttaaagagatc

SEQ ID NO: 86177 - DNA, 75 bp, synthetic construct
  source 1..75: mol_type = other DNA
tgtcagcagaactccgtaagtacagcgaaagttatgaagcagaacgcaacgccataatgctggagtatatgaaag

SEQ ID NO: 86178 - DNA, 75 bp, synthetic construct
  source 1..75: mol_type = other DNA
tcaaaacatgaacaaatagaaagatcaataaccccaccgcttaaaaattataatgagcggttacacaatactaac

SEQ ID NO: 86179 - DNA, 75 bp, synthetic construct
  source 1..75: mol_type = other DNA
caaggtcccgtttctggcgtttacgctgataaaaatcggtatcctgtattttatcgtatggggtccggtacccaa

SEQ ID NO: 86180 - DNA, 75 bp, synthetic construct
  source 1..75: mol_type = other DNA
actcttcagagggtatcccgtggcatgctctgcctgcttcacacaggggaaacagtcagatgagtttgcccttac

SEQ ID NO: 86181 - DNA, 75 bp, synthetic construct
  source 1..75: mol_type = other DNA
tcacccaggcggaggcagagcaccaggcctctgacaggatccgggcggcggtcctccgtaaacagaatgaaatgc

SEQ ID NO: 86182 - DNA, 75 bp, synthetic construct
  source 1..75: mol_type = other DNA
atcaccatctggctgggccaggcatccatgcttatccagcccggacgcgaaatcaccctgatggttgccggtgac

SEQ ID NO: 86183 - DNA, 75 bp, synthetic construct
  source 1..75: mol_type = other DNA
acagactcagctaattcaggtgctgcaaaggtactcaagtcgggtaatgctttacggaagttttctgtgaatccg

SEQ ID NO: 86184 - DNA, 75 bp, synthetic construct
  source 1..75: mol_type = other DNA
ctggcttcaggggggagccggaacgtcaaccaatatgaactgcaatgaagtgatttgtaatcttgctgcagaaaa

SEQ ID NO: 86185 - DNA, 75 bp, synthetic construct
  source 1..75: mol_type = other DNA
ctcgttttccttatcctgtcatcggtggagatagactcaggatttataagatatgtgaatacctttctaagtatt

SEQ ID NO: 86186 - DNA, 75 bp, synthetic construct
  source 1..75: mol_type = other DNA
aaaatgcgaacaaaagataatatgacaggacaatcatctgcacttagtctgcatacatgcagtgcatcccggggg

SEQ ID NO: 86187 - DNA, 75 bp, synthetic construct
  source 1..75: mol_type = other DNA
ctattcggccatttgagaaatcttcgtctctggcataaagaattaactgatgcgcaaatgggggagagtattaaa

SEQ ID NO: 86188 - DNA, 75 bp, synthetic construct
  source 1..75: mol_type = other DNA
acaccatcaccgttaacgctacgggtaacgaagaaaacaccgtaaaaaacatcgcatttaactatattgtgaggc

SEQ ID NO: 86189 - DNA, 75 bp, synthetic construct
  source 1..75: mol_type = other DNA
gtacatccagcggtgaaggcatccctaatgctcaatttacttatattaatcatggtgatgcttatgctcctggct

SEQ ID NO: 86190 - DNA, 75 bp, synthetic construct
  source 1..75: mol_type = other DNA
atggtgacgaaaaccatcactgaacagcgtgcggaagtacgtatttttgccggtaatgatccggctcacaccgcc

SEQ ID NO: 86191 - DNA, 75 bp, synthetic construct
  source 1..75: mol_type = other DNA
ctgacgtattacaagtcgggaacctttgcgacggaggcaatccactggcctgaaagtgtggatgaacacaaaaag

SEQ ID NO: 86192 - DNA, 75 bp, synthetic construct
  source 1..75: mol_type = other DNA
tcgtggttcacagatgccaacgcaacccatttaccggaaaccgcatttttgctctgagcaacggcgacaatcagt

SEQ ID NO: 86193 - DNA, 75 bp, synthetic construct
  source 1..75: mol_type = other DNA
tgcgtgttattgccattgtaggatgtgatggttcaggtaaatcgaccctcacggcaagcctggtaaatgaactgg

SEQ ID NO: 86194 - DNA, 75 bp, synthetic construct
  source 1..75: mol_type = other DNA
cctggtgagtgatccgctggggttgctggggggtgagcagacttaccggtatgtgccgaatccgtgtgggtatgt

SEQ ID NO: 86195 - DNA, 75 bp, synthetic construct
  source 1..75: mol_type = other DNA
tgcaggctgcccgacaggcatacgcccggaaatacgacgaggaaacaacagaaaccgctgattttggctcttacg

SEQ ID NO: 86196 - DNA, 75 bp, synthetic construct
  source 1..75: mol_type = other DNA
atgaaagcgagtccacacaacaataatgtctggggggcgacgtataacacccgtaataatgtcaccaccgatgcg

SEQ ID NO: 86197 - DNA, 75 bp, synthetic construct
  source 1..75: mol_type = other DNA
aaactggaagttgatatgggtgatatcggtgccgaaaaactgaaaaataacggcaccaccacgccgaaaagtttc

SEQ ID NO: 86198 - DNA, 75 bp, synthetic construct
  source 1..75: mol_type = other DNA
ggtcgccacaagtattgtatcgctggcgggcatttttattacgtttattcggcgcaaaaataggaaaaaacgtag

SEQ ID NO: 86199 - DNA, 75 bp, synthetic construct
  source 1..75: mol_type = other DNA
accgacatagcgcagtcctttatggcaatccgtcgcgccaccactgccagcggcaaccgcccgacctatgaagcc

SEQ ID NO: 86200 - DNA, 75 bp, synthetic construct
  source 1..75: mol_type = other DNA
tcgtggggtggcgggtctcatcgtccatggaaacgacattcgtgctggatgcactggagcaggcgttgtgggccc

SEQ ID NO: 86201 - DNA, 75 bp, synthetic construct
  source 1..75: mol_type = other DNA
gtggcgcttgaggatgcgagcacgacgaaaaaggggatagtacagctcagcagtgcgaccaacagtacgtctgaa

SEQ ID NO: 86202 - DNA, 75 bp, synthetic construct
  source 1..75: mol_type = other DNA
acatcaatgactggcttggcgaagaggtgatccgctttaacccttatgcactgctggacacccagcccacatcct

SEQ ID NO: 86203 - DNA, 75 bp, synthetic construct
  source 1..75: mol_type = other DNA
cagtgggtgacgcggacgaatcatgcggtgagcgacctgacgggccgtccgctgatgctctttaacagtgaaggt

SEQ ID NO: 86204 - DNA, 75 bp, synthetic construct
  source 1..75: mol_type = other DNA
acgcttgcatcaatgctccactttatcctggcaggctcgacgcaccgaaaatgcgctcaatgttaacggaacttg

SEQ ID NO: 86205 - DNA, 75 bp, synthetic construct
  source 1..75: mol_type = other DNA
tcctcggcgcggtggtgctggaacctcaactcaaaaacagcttgttaggtgtagataccatacatattattgacg

SEQ ID NO: 86206 - DNA, 75 bp, synthetic construct
  source 1..75: mol_type = other DNA
ctgaaatgccaatgagtcaggagcccttcttcatcattgccttcggttatgtgaaaaaagcagctgcgatggcta

SEQ ID NO: 86207 - DNA, 75 bp, synthetic construct
  source 1..75: mol_type = other DNA
tcctatggaggctatcaagacgaatattcttggtactgaaaatgtgcttaatgctgctattgcaaacaatgtcaa

SEQ ID NO: 86208 - DNA, 75 bp, synthetic construct
  source 1..75: mol_type = other DNA
ttatctctggcacggaagccgggctgccggtcgcccgtggtggtatcgccacttcacggaagcgccccgtcgctg

SEQ ID NO: 86209 - DNA, 75 bp, synthetic construct
  source 1..75: mol_type = other DNA
atttacaagtcttgctgactggatcactgagtttggtaaggctgtccggacagagaactggcgtcctctttttgt

SEQ ID NO: 86210 - DNA, 75 bp, synthetic construct
  source 1..75: mol_type = other DNA
ggccgcggctcgcccaccacatcgcggagcgccttgcgttcggggcggtcacctacgcactcttcgccctcgact

SEQ ID NO: 86211 - DNA, 75 bp, synthetic construct
  source 1..75: mol_type = other DNA
ctactgtgtgcctgcggaactgtatgaaaggatgcttgatgcgctggatgaccaggaactggtgaaactggttac

SEQ ID NO: 86212 - DNA, 75 bp, synthetic construct
  source 1..75: mol_type = other DNA
ctgagattgatcgctcttaaagagtccggatttaatcaaaaggaaattgctgaactggaggggttatctcaagct

SEQ ID NO: 86213 - DNA, 75 bp, synthetic construct
  source 1..75: mol_type = other DNA
gtgcctgcccaatgggcctggctcacacttttatggccgctcaggcgctggaagaagcggcggtagaagccggtt

SEQ ID NO: 86214 - DNA, 75 bp, synthetic construct
  source 1..75: mol_type = other DNA
acttcggacaggacttcacattttttgaagccttaagaacggcagacagattaatcagcggcctgcgttttcaat

SEQ ID NO: 86215 - DNA, 75 bp, synthetic construct
  source 1..75: mol_type = other DNA
cgggaaactggtggtctgggacggacagaaagccggtagtgcagttggcatactggtactgccgcttgaaggcac

SEQ ID NO: 86216 - DNA, 75 bp, synthetic construct
  source 1..75: mol_type = other DNA
aatatggaaacagaaagttcaggccgccatcaggaaaggtaaagaaccgcctgtttatgaaccaaagccagtatc

SEQ ID NO: 86217 - DNA, 75 bp, synthetic construct
  source 1..75: mol_type = other DNA
aggctgttttgtatgagcgtcatgtattgcagcattaccacgacaaagattgggttgataagccaacagaacggc

SEQ ID NO: 86218 - DNA, 75 bp, synthetic construct
  source 1..75: mol_type = other DNA
cgaatccattagccagttaatcgaccacgctaatacccatcctgcgccgattgtggcggttgatatcccttccgg

SEQ ID NO: 86219 - DNA, 75 bp, synthetic construct
  source 1..75: mol_type = other DNA
caacccgccttccggttgtgttttccgtacccgttgcccgattgccggtccggagtgcgccaaaacacgtcctgt

SEQ ID NO: 86220 - DNA, 75 bp, synthetic construct
  source 1..75: mol_type = other DNA
agataaatgagaaaacacctttacttgctaagtatagtattgatgattcaggaaaatttctgttctcaataattg

SEQ ID NO: 86221 - DNA, 75 bp, synthetic construct
  source 1..75: mol_type = other DNA
attcgcttgccccaaaattatcgcactggcgacgtgattttcatcactatgcagagtctggctgggtggaattcc

SEQ ID NO: 86222 - DNA, 75 bp, synthetic construct
  source 1..75: mol_type = other DNA
gtgacactctggtgtttgtgggagtggtatcaacatccgggacaaagccgtttcacccgcagaccagtagatatt

SEQ ID NO: 86223 - DNA, 75 bp, synthetic construct
  source 1..75: mol_type = other DNA
ccttcgggaatggctacaaaaagcccgcagtctgtagtggcggtcctgaaccgcaattatcagtaacttttccag

SEQ ID NO: 86224 - DNA, 75 bp, synthetic construct
  source 1..75: mol_type = other DNA
agctgatgtcacgtctggagtggacctggcgactggtcatgaccgggttatgttttgccctgtttggtctcggcg

SEQ ID NO: 86225 - DNA, 75 bp, synthetic construct
  source 1..75: mol_type = other DNA
aaaacgatttttctctggctgaaagaatgctggctgcagatgatcgttaccggaccgggccgcggtttacatttt

SEQ ID NO: 86226 - DNA, 75 bp, synthetic construct
  source 1..75: mol_type = other DNA
gagatggctgtactcggtgactctactttcaaagtaaaggtggctgactatcagcaaatttttcaggtaagccgt

SEQ ID NO: 86227 - DNA, 75 bp, synthetic construct
  source 1..75: mol_type = other DNA
gcgaactcatcaccacaaaggcgggagacattaccgtttacaattatgatggtgagacacgggaatatatttcca

SEQ ID NO: 86228 - DNA, 75 bp, synthetic construct
  source 1..75: mol_type = other DNA
ttccgagctgtctgcgctgcagcgtatcgagcatcttgccctgctgaaacgacgggcagaacaggctgaagccag

SEQ ID NO: 86229 - DNA, 75 bp, synthetic construct
  source 1..75: mol_type = other DNA
gtatccgttggatccggtcataaatgtagatccgcaaggtttggttgatataaatttataccccgaaagtgatct

SEQ ID NO: 86230 - DNA, 75 bp, synthetic construct
  source 1..75: mol_type = other DNA
tggcgcatgcccggcggtgtgcgccagcggagtcgtgcggcttcgtggtgagaacgccggagggggagcggtata

SEQ ID NO: 86231 - DNA, 75 bp, synthetic construct
  source 1..75: mol_type = other DNA
caggctttacgcaacgggtcagtaagcggaccggctatctggaggatgagtatatcctgtcctgcaaatgcactc

SEQ ID NO: 86232 - DNA, 75 bp, synthetic construct
  source 1..75: mol_type = other DNA
tttcttctatggtccttcctgcacatgccggtattgttatctacgggacgcgtattatttacccggcagaaaata

SEQ ID NO: 86233 - DNA, 75 bp, synthetic construct
  source 1..75: mol_type = other DNA
tactgatattactgaagtggcgaaaaataacacgctgactgatgatttttctgcgggaaagtcttcgacggcgag

SEQ ID NO: 86234 - DNA, 75 bp, synthetic construct
  source 1..75: mol_type = other DNA
taataatacgggggacggagtttctatttgaggctaccggtcctgtagatattaaaggaaaagatattcatctga

SEQ ID NO: 86235 - DNA, 75 bp, synthetic construct
  source 1..75: mol_type = other DNA
tactctgtgcgaggagcatctattaggacaaaacaaacacgcgatattgcgtgagaatattattgataagctgaa

SEQ ID NO: 86236 - DNA, 75 bp, synthetic construct
  source 1..75: mol_type = other DNA
gctggcaaatggtgaagtttggcgatatcgctaaacatatctctaaacgagtggaaccgagcgagacagaccttg

SEQ ID NO: 86237 - DNA, 75 bp, synthetic construct
  source 1..75: mol_type = other DNA
taatattaataattcctcagttacttatattgatattggctccaatgatacagaccatattactattggtatcga

SEQ ID NO: 86238 - DNA, 75 bp, synthetic construct
  source 1..75: mol_type = other DNA
taccactgtctggggacagcgtgcacctctgtactacagcccgggttacggccctgcttcactgtacgactacaa

SEQ ID NO: 86239 - DNA, 75 bp, synthetic construct
  source 1..75: mol_type = other DNA
gcctgccgatgatatcgacggtgaaagcgtgcgctgtttccactatttccgcgccgtttgcgccatgaccagtgc

SEQ ID NO: 86240 - DNA, 75 bp, synthetic construct
  source 1..75: mol_type = other DNA
cgcatgcataacgagttataccaggcggtcgttcttgataattatccctggacgaatcactttctgcttcgtagc

SEQ ID NO: 86241 - DNA, 75 bp, synthetic construct
  source 1..75: mol_type = other DNA
aaaccgcgccattggtgtggcgctgaacgataccgcctgtaaagtgttgcgtgatcaaataggcaagcatcacaa

SEQ ID NO: 86242 - DNA, 75 bp, synthetic construct
  source 1..75: mol_type = other DNA
aaacacgggtggatgacggcggtaccctggcagtgtctgccggtggtaaggcaacagatgtcaccatgacatccg

SEQ ID NO: 86243 - DNA, 75 bp, synthetic construct
  source 1..75: mol_type = other DNA
accgcctggttcttctgcttctcactgctggaaaaacacatttatgactggtacgccatcgtcggcgttgtcgcg

SEQ ID NO: 86244 - DNA, 75 bp, synthetic construct
  source 1..75: mol_type = other DNA
gtcagcgacagtaagctggaaggcgtgaaagtcgattcttatgaactgggctggcgctttaccggtgacaacctg

SEQ ID NO: 86245 - DNA, 75 bp, synthetic construct
  source 1..75: mol_type = other DNA
gtagcttactcggtaaacttttccgcactgagatttcgcttattcgtagttaccgtgcatttttaatgttattgc

SEQ ID NO: 86246 - DNA, 75 bp, synthetic construct
  source 1..75: mol_type = other DNA
tattgtggttaaggttcgtcacggcgggagtgtcattaacaaagcggtgttcctcgcgctgggcatcaataccga

SEQ ID NO: 86247 - DNA, 75 bp, synthetic construct
  source 1..75: mol_type = other DNA
ttaaaatataatgaaggaaatcaattatgctttcatatttttactgattatttcggtgatgacgatcgcaaatat

SEQ ID NO: 86248 - DNA, 75 bp, synthetic construct
  source 1..75: mol_type = other DNA
cagattttaatgcaatccagaatgagcaaagcagcattgttgttgcttgaaaattcataccagatatcccagatt

SEQ ID NO: 86249 - DNA, 75 bp, synthetic construct
  source 1..75: mol_type = other DNA
cgatgagtcgttgcgattctacccgttcccgacggtaaatgcgaacaaacaggtgacggctttctcttcgtcaca

SEQ ID NO: 86250 - DNA, 75 bp, synthetic construct
  source 1..75: mol_type = other DNA
gctggcaaatcacctgggggctggatgctgagcatgagcgctttacctccaaccagatgttcttcgatctggctc

SEQ ID NO: 86251 - DNA, 75 bp, synthetic construct
  source 1..75: mol_type = other DNA
agtcggcttacaacacgctcgcgtcactcgatctgccgaaaccgaagcaagggccggaaaccattaataaggtta

SEQ ID NO: 86252 - DNA, 75 bp, synthetic construct
  source 1..75: mol_type = other DNA
acagtcttatattgaaggtgcgctttctccttatggtaaagttcgctctaacctttccatcggtcagggtggcga

SEQ ID NO: 86253 - DNA, 75 bp, synthetic construct
  source 1..75: mol_type = other DNA
gaactgcctgcgtactggacgtgctgtcgcagccacaaccgttgaccacatcaaggcgaaggcccacggcggtac

SEQ ID NO: 86254 - DNA, 75 bp, synthetic construct
  source 1..75: mol_type = other DNA
atttttatcatcaggtgattggggaggcattccggcataaggtgctgtttgttatcagccagtcggacaagactg

SEQ ID NO: 86255 - DNA, 75 bp, synthetic construct
  source 1..75: mol_type = other DNA
taatggctgggaaatatttaatagtaattttgaacggatgattaaagaaaataaggccatgctgctttgtaagtg

SEQ ID NO: 86256 - DNA, 75 bp, synthetic construct
  source 1..75: mol_type = other DNA
tatgcgtgtcgatgtagtagtcgctttctttgtacgggtaaaaccgtctgtagaaggcatcgccactgcggcgca

SEQ ID NO: 86257 - DNA, 75 bp, synthetic construct
  source 1..75: mol_type = other DNA
tcatggcgatccagaaaaggcaaaagaactgaccaatgaagcttccgctttgctgtcagatgacagtaccgaatg

SEQ ID NO: 86258 - DNA, 75 bp, synthetic construct
  source 1..75: mol_type = other DNA
cataagttccgctgtgtgccgcatcttaccgggcggcgctttgagcacggggtgacggactgttacacgctgttc

SEQ ID NO: 86259 - DNA, 75 bp, synthetic construct
  source 1..75: mol_type = other DNA
agttcagtcgtgatttttccctgatgcaggccgtgccacgtggtaagccagcaatacaaaagcagaggcgaacat

SEQ ID NO: 86260 - DNA, 75 bp, synthetic construct
  source 1..75: mol_type = other DNA
cctgacgggctggatgtcgctgtcacggaaaccgcaagtgacctggtacggctgggacggcgaccggctgaccac

SEQ ID NO: 86261 - DNA, 75 bp, synthetic construct
  source 1..75: mol_type = other DNA
gtggtatggatgacggatggctggccgctttatgaatcccgcctgaagggagaactgcacgttatcagcaagcga

SEQ ID NO: 86262 - DNA, 75 bp, synthetic construct
  source 1..75: mol_type = other DNA
tagcgcaacaaacgttggtgtgcagatcctggacagaacgggtgctgcgctggcgctggacggtgcgacatttag

SEQ ID NO: 86263 - DNA, 75 bp, synthetic construct
  source 1..75: mol_type = other DNA
tggcctgttcggtgtgccccggcggagtgacgtccggccatccggtcaatccgctgctcggtgcaaaggtccttc

SEQ ID NO: 86264 - DNA, 75 bp, synthetic construct
  source 1..75: mol_type = other DNA
atggtgagtcactacgaaaacggcgtcgaggtatcccgcgaacggctgcgtgatgattgctgtttcggcacactg

SEQ ID NO: 86265 - DNA, 75 bp, synthetic construct
  source 1..75: mol_type = other DNA
gaagcaggctggagcaaccagctctgctgtcggttttaacattcagctgaatgattgcgataccactgttgccac

SEQ ID NO: 86266 - DNA, 75 bp, synthetic construct
  source 1..75: mol_type = other DNA
tggcgctggatggtgcgtcatttagtgcacaaacaaccctgaataacggaaccaacaccattccgttccaggcgc

SEQ ID NO: 86267 - DNA, 75 bp, synthetic construct
  source 1..75: mol_type = other DNA
cctggctgaaagcgctaaaaaacgacaagcgttatattttcaaagcggccagcgcagcctctaaagcacatcgtt

SEQ ID NO: 86268 - DNA, 75 bp, synthetic construct
  source 1..75: mol_type = other DNA
aatgaaagggaagtttggcagtgcagattatgcagaggaagaattggtggcggagctgggaagtgcttttctgat

SEQ ID NO: 86269 - DNA, 75 bp, synthetic construct
  source 1..75: mol_type = other DNA
cctggctgaaagcgctgaaaaacgacaagcgttatatttttaaagcggccagcgccgcctccaaagcgcatcgtt

SEQ ID NO: 86270 - DNA, 75 bp, synthetic construct
  source 1..75: mol_type = other DNA
gcacaacacggtgccgcagtagacgcggcagaagcacagcgccagtcactgattgatgcagcaatggcttccatc

SEQ ID NO: 86271 - DNA, 75 bp, synthetic construct
  source 1..75: mol_type = other DNA
acgccgtaatctgggtggtcgttcagtaggttggctgctttccgaggttatggaatgggttaaaagccgggatcg

SEQ ID NO: 86272 - DNA, 75 bp, synthetic construct
  source 1..75: mol_type = other DNA
ggtgcgctgcaaggtcaggcaaacgccgggcagacatacgccaacaacatgagcagcattgcacagcaaagcgca

SEQ ID NO: 86273 - DNA, 75 bp, synthetic construct
  source 1..75: mol_type = other DNA
aattgattgctactgcggcagggaatattactgtttataactatgatggtgagacgcgagagtatactactacat

SEQ ID NO: 86274 - DNA, 75 bp, synthetic construct
  source 1..75: mol_type = other DNA
atggataaagctatattaaataaggaactcatcgccacaaaggcgggagatattaccgtttataattatgatggt

SEQ ID NO: 86275 - DNA, 75 bp, synthetic construct
  source 1..75: mol_type = other DNA
gagctagaattagctcagcggtatttgtcagatggcggttatctttggaatagtggaatgtttatgttcagagca

SEQ ID NO: 86276 - DNA, 75 bp, synthetic construct
  source 1..75: mol_type = other DNA
tagtggtgctgcatccggtgcgcttttgggtggtggcatagccagtgctctcgagctatcaactccgtggggtgc

SEQ ID NO: 86277 - DNA, 75 bp, synthetic construct
  source 1..75: mol_type = other DNA
cacccttacacttttaccgcacagaaagcggtgattgctattcccatcacgccacaggtgacggggatcgtgact

SEQ ID NO: 86278 - DNA, 75 bp, synthetic construct
  source 1..75: mol_type = other DNA
acgtcagccaattgtatcaacagcaggcggcagcatctgcggctaatgcgaataaaccatcaggatttcagagcg

SEQ ID NO: 86279 - DNA, 75 bp, synthetic construct
  source 1..75: mol_type = other DNA
gcgcagcaaaccttattcgtcgcgaccgcccgttaacccgcgaagagctgtttcgcgtggtgcccagtgtattca

SEQ ID NO: 86280 - DNA, 75 bp, synthetic construct
  source 1..75: mol_type = other DNA
attaagaaaaaagacgtttgggcgtttatcgaaacgctgggttatttccgcgacttttatctggaatttgtcgag

SEQ ID NO: 86281 - DNA, 75 bp, synthetic construct
  source 1..75: mol_type = other DNA
gccggaggcgtatttccggatggctccggaggactggctgcaggcagagatgcagggtgagattgtggcgctggt

SEQ ID NO: 86282 - DNA, 75 bp, synthetic construct
  source 1..75: mol_type = other DNA
catcgcccaggttgggcatgagtctgctggctttacctcgctggtggaaagcttcaactactcggtagaggggct

SEQ ID NO: 86283 - DNA, 75 bp, synthetic construct
  source 1..75: mol_type = other DNA
atggcaacgacgaacgcattcagcctggcgtcaccgccactggcacgtatctgccttcacggggatttgcaacga

SEQ ID NO: 86284 - DNA, 75 bp, synthetic construct
  source 1..75: mol_type = other DNA
aatgaaaaagatactgattattcagtaccaatgagaccctttgcattatatgacccgtggaaacatcaccatgac

SEQ ID NO: 86285 - DNA, 75 bp, synthetic construct
  source 1..75: mol_type = other DNA
tggggagtgactccgcatgaattgcgccctgataaataccctaacccgaccgacggtttacctgttggatgtaag

SEQ ID NO: 86286 - DNA, 75 bp, synthetic construct
  source 1..75: mol_type = other DNA
caacaccgtcatcggggatgattgagatcaccgccacaagtgaagatgccccagcggtaatccccaaaaacatgc

SEQ ID NO: 86287 - DNA, 75 bp, synthetic construct
  source 1..75: mol_type = other DNA
aattacccactgaatccgataataaggatggatcctttgggtttgtataatttatatcaattattatatgatgtt

SEQ ID NO: 86288 - DNA, 75 bp, synthetic construct
  source 1..75: mol_type = other DNA
tttttttagaaaagggaacatcaaattatgatattttaactgataagattgaatcaagttttgaattattaaaaa

SEQ ID NO: 86289 - DNA, 75 bp, synthetic construct
  source 1..75: mol_type = other DNA
acaccactgtcggacatcgtggaacactgatgctggctgccgggggaagtctgagtggcagaacacagctcagta

SEQ ID NO: 86290 - DNA, 75 bp, synthetic construct
  source 1..75: mol_type = other DNA
aatttaaacgcaccgggatgatgccgccgaaagacgcccctcatgatcttggccgctttaatccatttcgaaaga

SEQ ID NO: 86291 - DNA, 75 bp, synthetic construct
  source 1..75: mol_type = other DNA
tgccgttctggaactggaagagcatcagaaggcgtggttactgtggtgctacagtggaaatgtttgctgggaaga

SEQ ID NO: 86292 - DNA, 75 bp, synthetic construct
  source 1..75: mol_type = other DNA
aatgatgaatagctccagtgatctcatggggttgagaaggcagccccagaacttctggcggctatatcgcggaaa

SEQ ID NO: 86293 - DNA, 75 bp, synthetic construct
  source 1..75: mol_type = other DNA
cgtacggttctgcgtgccgtccgtgacacggtggtctctgttgcccgcgcggtatggaactggattttcttctga

SEQ ID NO: 86294 - DNA, 75 bp, synthetic construct
  source 1..75: mol_type = other DNA
aggtcgaacttgttaaaaaaacaattgccgaaaatgcacttgagaactgtacatacttacctgcaattagtcagt

SEQ ID NO: 86295 - DNA, 75 bp, synthetic construct
  source 1..75: mol_type = other DNA
gctcggttgagtactcgtttgacgatgctcgtcacatgttcgatggtaggaaggcggaaaatatccgcatcatta

SEQ ID NO: 86296 - DNA, 75 bp, synthetic construct
  source 1..75: mol_type = other DNA
gtgccctgtcgatgcagatgccgggattccgccgtcagatgaacgaaggctggtaccagatacgtattgccggtt

SEQ ID NO: 86297 - DNA, 75 bp, synthetic construct
  source 1..75: mol_type = other DNA
ccggcaccgccgccaccgacaagtggacaggcatccggggcatcccgacctttaccgcccattgcacaggcatta

SEQ ID NO: 86298 - DNA, 75 bp, synthetic construct
  source 1..75: mol_type = other DNA
actggaaaatggcggacgcctggatgtgctgaccggacacacagccactaatacccgcgtggatgatggcggaac

SEQ ID NO: 86299 - DNA, 75 bp, synthetic construct
  source 1..75: mol_type = other DNA
caactggtgaagttccggaccgcacaaattaatgccctgcacgggacgttactggagtttggtgaaaccatccac

SEQ ID NO: 86300 - DNA, 75 bp, synthetic construct
  source 1..75: mol_type = other DNA
taaaagccccagttcagaaattaatccctgttgcagaatcctgtgtcaatgctctggatgcctacagtcgctatc

SEQ ID NO: 86301 - DNA, 75 bp, synthetic construct
  source 1..75: mol_type = other DNA
gaaacgtaaacgggtggagctgaccacggttctgctgggtgcaggcctgcagccggtgcgaccggagtttgatgt

SEQ ID NO: 86302 - DNA, 75 bp, synthetic construct
  source 1..75: mol_type = other DNA
tcgccggaagagacgctgaataatatctgcgaacgccttaccgccgggctaaaagcggcgggtatcagcgctatc

SEQ ID NO: 86303 - DNA, 75 bp, synthetic construct
  source 1..75: mol_type = other DNA
aaatccgcctgctgggaataagcaaacgtggtgataaatatctgcgaaccctgtttattcatggtgcaagggcgg

SEQ ID NO: 86304 - DNA, 75 bp, synthetic construct
  source 1..75: mol_type = other DNA
tcggcagcgacagcgaagttaaaaagcagtttgccggagtcgttactgttgatcgctctctggaaaaccgtcgta

SEQ ID NO: 86305 - DNA, 75 bp, synthetic construct
  source 1..75: mol_type = other DNA
acatacttcggggtgttttcctttaaaagaaaaggaaaagtaaataatggcaaaaagaaaaaacaacgttgttaa

SEQ ID NO: 86306 - DNA, 75 bp, synthetic construct
  source 1..75: mol_type = other DNA
cgcgccgatactcggcattaacaccattgccgtcgacgatatcatcaacgccaccgagaaaggcgcggatctggc

SEQ ID NO: 86307 - DNA, 75 bp, synthetic construct
  source 1..75: mol_type = other DNA
tttgcatggatggaccgcttctgtgaggcctacagcggcggtatctggtctttttacaccctcagcaatggcggc

SEQ ID NO: 86308 - DNA, 75 bp, synthetic construct
  source 1..75: mol_type = other DNA
ggttattgcgcgttgccccctggtttttaccggtgggcatcgtggcggtgtggcaactggcctcctcggttggct

SEQ ID NO: 86309 - DNA, 75 bp, synthetic construct
  source 1..75: mol_type = other DNA
ctagcggtaagttgactctacgttaccgaggtcttcccacgtctattctattgtcgatgctcaatttggataaag

SEQ ID NO: 86310 - DNA, 75 bp, synthetic construct
  source 1..75: mol_type = other DNA
atacatccagttacgcaaatattcctgattcaccgaggatcttgaggctaaaagatgtcatgaaaaaaatgggaa

SEQ ID NO: 86311 - DNA, 75 bp, synthetic construct
  source 1..75: mol_type = other DNA
tgacgctgaacgggcaaaattacaccgctactaccgatagcaacggcaactggagcgccacggtgccagcctcgg

SEQ ID NO: 86312 - DNA, 75 bp, synthetic construct
  source 1..75: mol_type = other DNA
atgctgacacaggcaatggactatgaccggattctggcaggctcccgcagccatcagaccggtgtaaacggtgaa

SEQ ID NO: 86313 - DNA, 75 bp, synthetic construct
  source 1..75: mol_type = other DNA
ccagcgcgagcaaagcatcgctttactggcaaaaacgatgggcttaccggcaccggtgattgcctcgtatctgga

SEQ ID NO: 86314 - DNA, 75 bp, synthetic construct
  source 1..75: mol_type = other DNA
gcacggttcactggccggacggagtcccccgcccttctgatgcttccccgttttgccgacatttttcagcaggga

SEQ ID NO: 86315 - DNA, 75 bp, synthetic construct
  source 1..75: mol_type = other DNA
gaccattcttgccggtatcagcgccggcggcatgtactgcccggagtgtggcacagttcactggccggacggagt

SEQ ID NO: 86316 - DNA, 75 bp, synthetic construct
  source 1..75: mol_type = other DNA
gctggtcttctggtttgttcgtgtcgatgacgaagggtatccggaaatagcccgctgtacggagcgggagtttgc

SEQ ID NO: 86317 - DNA, 75 bp, synthetic construct
  source 1..75: mol_type = other DNA
cagggtacgctggagccgaccaacgagccttacgccattgccaaaatcgccgggatcaaactgtgcgaatcttac

SEQ ID NO: 86318 - DNA, 75 bp, synthetic construct
  source 1..75: mol_type = other DNA
atgtaaatcagatccgccgggagcgcccgctgacacgcgaagaactgatgtaccacgtcccgagtatttttgcgg

SEQ ID NO: 86319 - DNA, 75 bp, synthetic construct
  source 1..75: mol_type = other DNA
gtcgctgttcaacacgatgaacggcaacggcggtgaactcagtgccgaagcagccggaattgccgtctgtctgat

SEQ ID NO: 86320 - DNA, 75 bp, synthetic construct
  source 1..75: mol_type = other DNA
gaaaatacaaccactatcgccccgttaacgccatatgataaatgggatggtgagaaatgggtgacggatactgag

SEQ ID NO: 86321 - DNA, 75 bp, synthetic construct
  source 1..75: mol_type = other DNA
tggtagttccattaaatgcccactggagcgatgttggttcttggtctgcattatgggaaattagcagaaaagata

SEQ ID NO: 86322 - DNA, 75 bp, synthetic construct
  source 1..75: mol_type = other DNA
ctcccggcgaatctcccaggacatcagcacccgtgatgaaggcggtggcggaaaggtcgtggttatcgggcggca

SEQ ID NO: 86323 - DNA, 75 bp, synthetic construct
  source 1..75: mol_type = other DNA
gggacatcagcgggtgctgtttgtggtgacgcaggccgacaaaacggagccctgccatgaatgggatatggccgg

SEQ ID NO: 86324 - DNA, 75 bp, synthetic construct
  source 1..75: mol_type = other DNA
tagaaaaggtgattatagtttcctctacaagtttcgcttcagctcacagcagtcgcgtaatttgtcggcctgccg

SEQ ID NO: 86325 - DNA, 75 bp, synthetic construct
  source 1..75: mol_type = other DNA
aggcccgtgaacagtttaccggtgcggtggaccggatatttgacacggcggagagcgtctgtgttgcctctgttg

SEQ ID NO: 86326 - DNA, 75 bp, synthetic construct
  source 1..75: mol_type = other DNA
aagtcaccatttccaaaacacagcgccgtcttaaagtcggctatgtcggtatctcccacaccaaccgtaaaacca

SEQ ID NO: 86327 - DNA, 75 bp, synthetic construct
  source 1..75: mol_type = other DNA
aattgctggatggggttgaggttgagtggttgccattgggggaaataaccaaatatgaacagccaacaaagtatt

SEQ ID NO: 86328 - DNA, 75 bp, synthetic construct
  source 1..75: mol_type = other DNA
catgtcaaagtcagcagcgggtacggtcagccagccggggcgcaatgtccgggcaaaatcaggtttaaaccgttc

SEQ ID NO: 86329 - DNA, 75 bp, synthetic construct
  source 1..75: mol_type = other DNA
ggctgatatctccccgtctgtgcgtctgaatgtggagaacacgcttgccggtgcgcgtgctttcagacgttctgc

SEQ ID NO: 86330 - DNA, 75 bp, synthetic construct
  source 1..75: mol_type = other DNA
aagagtcatccgtttaaaccttatggggcttttgttaaaaatccgccacagagatttaattattggttattcatc

SEQ ID NO: 86331 - DNA, 75 bp, synthetic construct
  source 1..75: mol_type = other DNA
gtcagcggcgcagccgggcgatgtgctgctgtgctgctttggttcatcggtgccgaatcatgccgccatttactg

SEQ ID NO: 86332 - DNA, 75 bp, synthetic construct
  source 1..75: mol_type = other DNA
tgccttacggtgaaatgctggttggttcacgacggatatcccaggacatcagcacccgtgatgaaggcggagacg

SEQ ID NO: 86333 - DNA, 75 bp, synthetic construct
  source 1..75: mol_type = other DNA
acaatatcaccctgaaaattgaccctgccgtagtgctgtcaacccgcaagtatgtggatgacaaaatatcagagc

SEQ ID NO: 86334 - DNA, 75 bp, synthetic construct
  source 1..75: mol_type = other DNA
tgatgtggtcagtaccggcgatattgttaacgcaggggagatttactttgacaatcagacaacaccggatgccgt

SEQ ID NO: 86335 - DNA, 75 bp, synthetic construct
  source 1..75: mol_type = other DNA
cgcccgtcttcacgaacagctgggtgagggaacggtcatccacattgtgccgcgactggccggtgcagggaaagg

SEQ ID NO: 86336 - DNA, 75 bp, synthetic construct
  source 1..75: mol_type = other DNA
cattgaagacagcgaattcagtcgtcgggcgattggtaaatacatcgatgtctggcattaccctgatggacataa

SEQ ID NO: 86337 - DNA, 75 bp, synthetic construct
  source 1..75: mol_type = other DNA
tttcctggagagtgttttatctgtgaactcaggctgccagatcatcgtttccgatggaagcataataagcttttt

SEQ ID NO: 86338 - DNA, 75 bp, synthetic construct
  source 1..75: mol_type = other DNA
cggccggggcatcaatggcgttatggggttcagccctggcagccggtggtttttctgccaccacgatgctgtttt

SEQ ID NO: 86339 - DNA, 75 bp, synthetic construct
  source 1..75: mol_type = other DNA
tttcttgttatcactggcatcgcttattaatgcaggtatccctgtaccggaagccttacgaataataatgaaaac

SEQ ID NO: 86340 - DNA, 75 bp, synthetic construct
  source 1..75: mol_type = other DNA
atgtcggaaccacctatcgtctgaccgagcacttccactactggaccaaacacgcgctgttgaacgcgattttgc

SEQ ID NO: 86341 - DNA, 75 bp, synthetic construct
  source 1..75: mol_type = other DNA
ctgtattttcagctctgaccctgggtgttgcgacaaatgcgtctgctgccaccacggttaatggtggtacagttc

SEQ ID NO: 86342 - DNA, 75 bp, synthetic construct
  source 1..75: mol_type = other DNA
tattcacgtcgaaaacgagaatgcgtgtttttagcaaattatccaggtatctaagtaatggtgttccagtaacgt

SEQ ID NO: 86343 - DNA, 75 bp, synthetic construct
  source 1..75: mol_type = other DNA
agtggaatcagtggcgctctgtttcggaagaaatatccgctggtctgcgtgacgtgattggtaacactcctgtcg

SEQ ID NO: 86344 - DNA, 75 bp, synthetic construct
  source 1..75: mol_type = other DNA
gacgtgattagtaacactcctgtcggcatggtggcacaagacaccgtttaccggcagattcgctatatgaaatct

SEQ ID NO: 86345 - DNA, 75 bp, synthetic construct
  source 1..75: mol_type = other DNA
gggtaaaagatctcaatcttgatgccaccatcaacgcgccggggctggataacgcgctgccggggcttggcggta

SEQ ID NO: 86346 - DNA, 75 bp, synthetic construct
  source 1..75: mol_type = other DNA
catcgacttcattcgcgaatgagatggcggaaatgcgtcagcaggtaatggaagggcagattggaggatttctcc

SEQ ID NO: 86347 - DNA, 75 bp, synthetic construct
  source 1..75: mol_type = other DNA
cgtaccttcagcagcagaaagatctggttcggtatggactttatcgaaaccgtcagtgcgctgatgaatgtaacc

SEQ ID NO: 86348 - DNA, 75 bp, synthetic construct
  source 1..75: mol_type = other DNA
gcttcgtctgccgtgggaacatgacaacgccttcaacagcagacagacctggtttggtatggattttatcgaaac

SEQ ID NO: 86349 - DNA, 75 bp, synthetic construct
  source 1..75: mol_type = other DNA
atgttcgctttgattcaacgcgggcagatatacaccgatagtgctggctacccgataaaaattgttcgctgcata

SEQ ID NO: 86350 - DNA, 75 bp, synthetic construct
  source 1..75: mol_type = other DNA
tggtcatacagcgaaagaaaatcgcctgtcacaaagtcaattcagatgccaggtatgtggatatacagcgaacgc

SEQ ID NO: 86351 - DNA, 75 bp, synthetic construct
  source 1..75: mol_type = other DNA
atagcctggcccccttctggccatcttatcagaacaaaatcatcggcgttctcaaccgtgtgttgcgcgagcagt

SEQ ID NO: 86352 - DNA, 75 bp, synthetic construct
  source 1..75: mol_type = other DNA
tgcgttgactgacgcggaattacggcgcaaggctgccgatgaactgtcctgtatgaccgcacgaattaaccgtgg

SEQ ID NO: 86353 - DNA, 75 bp, synthetic construct
  source 1..75: mol_type = other DNA
acccattgcgccgggggtggattttgcaacagcgctctccctgagaagaatggccacttccacgggggccacacc

SEQ ID NO: 86354 - DNA, 75 bp, synthetic construct
  source 1..75: mol_type = other DNA
gcatctggaaaaattaccaaaacggcaattaaagaagcgctacgccggatgaaaaaagcgggtatcagcaaacca

SEQ ID NO: 86355 - DNA, 75 bp, synthetic construct
  source 1..75: mol_type = other DNA
gcagcgaaaatccgtcagcgatgccgatggtaacagacagcgccaacggtaccgccgactggattaaagagcact

SEQ ID NO: 86356 - DNA, 75 bp, synthetic construct
  source 1..75: mol_type = other DNA
agatagctaaaacacaaatgcctgttactgcgcataaaacatctgacagtaacaggggggtaatgcatttgaata

SEQ ID NO: 86357 - DNA, 75 bp, synthetic construct
  source 1..75: mol_type = other DNA
tgcttaactcatcaatatcacttatattagcatctggtctgatgatgagtactgcaaatgcagcagatgatgtta

SEQ ID NO: 86358 - DNA, 75 bp, synthetic construct
  source 1..75: mol_type = other DNA
tacatacaaaataggtattgataaagcaattgaagctgcaaaaaaatccactccaacattagcatccctgatgga

SEQ ID NO: 86359 - DNA, 75 bp, synthetic construct
  source 1..75: mol_type = other DNA
acgccctgcgctcgctggagtcgatcccgctggcccgcgtcgccgggcggctggtgcgccttaacggcatcctgc

SEQ ID NO: 86360 - DNA, 75 bp, synthetic construct
  source 1..75: mol_type = other DNA
ccggaagactggctgcgggcggatatgcagggggagattgtggcgctggtccacagtcatcccggcggtctgccc

SEQ ID NO: 86361 - DNA, 75 bp, synthetic construct
  source 1..75: mol_type = other DNA
ggattagaatggcattttattggcccgttgcagtctaataaaagccgcctggtggcagagcatttcgactggtgt

SEQ ID NO: 86362 - DNA, 75 bp, synthetic construct
  source 1..75: mol_type = other DNA
tgttaaccagcttcagaacctttccagtttagaaggtcaggggcaggcacttaatcagtattacaactctcagca

SEQ ID NO: 86363 - DNA, 75 bp, synthetic construct
  source 1..75: mol_type = other DNA
tatcatggtgatgtcattggtcataacaccagcaacagctatatctattctgaatcgggtcttgtgaccaccgtc

SEQ ID NO: 86364 - DNA, 75 bp, synthetic construct
  source 1..75: mol_type = other DNA
ttcgattccggtcacaccacacaccttccggcacagctatatcatgcacatgctctatcaccgccagccccggaa

SEQ ID NO: 86365 - DNA, 75 bp, synthetic construct
  source 1..75: mol_type = other DNA
acggcatccacgaaggcgacagaggcagctggcagtgcgacggcggcagctcagagcaaaagtacggcggaatcc

SEQ ID NO: 86366 - DNA, 75 bp, synthetic construct
  source 1..75: mol_type = other DNA
ccgatggaagcataataagctttttctgcttctgccggaggaatatggcccagcctttccagcaatcgtcgattg

SEQ ID NO: 86367 - DNA, 75 bp, synthetic construct
  source 1..75: mol_type = other DNA
aatcacagtgccgggagattaccctgaaaagacaaccactattgctccgttaacaccatacgataagtgggatgg

SEQ ID NO: 86368 - DNA, 75 bp, synthetic construct
  source 1..75: mol_type = other DNA
tgaagaatgtggcggcaagagatttagctcctctactacggcagctcaatgatagcgctggcgctggtagtgtta

SEQ ID NO: 86369 - DNA, 75 bp, synthetic construct
  source 1..75: mol_type = other DNA
ggtaagtaccacgtacctgcagtacgcgtcaccctggtctgtccgtactgcagtcagcatttttcggcagacgtg

SEQ ID NO: 86370 - DNA, 75 bp, synthetic construct
  source 1..75: mol_type = other DNA
gctgaccaagatggccgagtcgagccccggcctgacctacgccaagctgtcctggctgcaagcctggcacatccg

SEQ ID NO: 86371 - DNA, 75 bp, synthetic construct
  source 1..75: mol_type = other DNA
ccgtatccatgggaaatggcggtgtactgctggccgattccggtgccgctgtcagtggtacccggagcgacggaa

SEQ ID NO: 86372 - DNA, 75 bp, synthetic construct
  source 1..75: mol_type = other DNA
cctattcagaaaggccagacgctgtttaaggctggtgatgaacttaaatcgctttatgccatccgctccggtacg

SEQ ID NO: 86373 - DNA, 75 bp, synthetic construct
  source 1..75: mol_type = other DNA
gtgaacacggcggcggaagccatccgcgccctgtcgctgcaggtgccgggattccgccgtcagatgaacgaaggc

SEQ ID NO: 86374 - DNA, 75 bp, synthetic construct
  source 1..75: mol_type = other DNA
agcggcggggcacgccgttcttgcctgtggagagatggtgcagtcaggccgcccgttgaagcaggaacccaccga

SEQ ID NO: 86375 - DNA, 75 bp, synthetic construct
  source 1..75: mol_type = other DNA
gcagcgcctgccacaactaacggtatctacaatacgctgaccaccagtgaactttccggcagcggtaatttctac

SEQ ID NO: 86376 - DNA, 75 bp, synthetic construct
  source 1..75: mol_type = other DNA
ctgctgatggacgtggacgactggacgggcttcagccgccacttcacccacttgaaggacggggccgaggccaaa

SEQ ID NO: 86377 - DNA, 75 bp, synthetic construct
  source 1..75: mol_type = other DNA
ttttctgccaccacgatgctgttttcactgggtgccagcatgatactgggtggtgtggctcagatgcttgccccg

SEQ ID NO: 86378 - DNA, 75 bp, synthetic construct
  source 1..75: mol_type = other DNA
gtgctgtttggcggcggtgcgctggcgctggcagggatgccgcccttcaacatttttcttagcgaatttatgacc

SEQ ID NO: 86379 - DNA, 75 bp, synthetic construct
  source 1..75: mol_type = other DNA
atgaagaaaaaatacgaactggttgttaaagggataaataattacccggataagattactgttactgtggcgctg

SEQ ID NO: 86380 - DNA, 75 bp, synthetic construct
  source 1..75: mol_type = other DNA
ggttacggtatcgctgaaaacgaacagatgccggatattgccgctgatgcgaaagccattgcatttggtaacttc

SEQ ID NO: 86381 - DNA, 75 bp, synthetic construct
  source 1..75: mol_type = other DNA
cactgggggccagcatgatactgggtggtgtggctcagatgctggccccgaaggctaaagtaccggagtacaaaa

SEQ ID NO: 86382 - DNA, 75 bp, synthetic construct
  source 1..75: mol_type = other DNA
tacggcggcaaccgtcaccggcagcaaccgtctgggcaatttcacggtggaaaacggtaatgctgacggtgttgt

SEQ ID NO: 86383 - DNA, 75 bp, synthetic construct
  source 1..75: mol_type = other DNA
ggactgcagattgtgctgggggcggcagccatcgtgggctctttcttcaccgccggcgcaacgatggcgttatgg

SEQ ID NO: 86384 - DNA, 75 bp, synthetic construct
  source 1..75: mol_type = other DNA
aaaacggcttttgccgggtgtctccgtcctctgcacaggcaggcgatgtgctgctgtgctgctttggttcatcgg

SEQ ID NO: 86385 - DNA, 75 bp, synthetic construct
  source 1..75: mol_type = other DNA
taaaccggcttgagcgcgaagcatgggacgcagtgggctcattaacggaggtggcttcccgcgtcatgctgtcgt

SEQ ID NO: 86386 - DNA, 75 bp, synthetic construct
  source 1..75: mol_type = other DNA
caggtaataatgcagatagaactatatcacttcatgccaaacttggatataaagggaatatgcagagtctgaagg

SEQ ID NO: 86387 - DNA, 75 bp, synthetic construct
  source 1..75: mol_type = other DNA
cagcaatgcaaccggcatccgaacaggacgatattgtaaattcacctaattacgaggacattgcagtagttgaat

SEQ ID NO: 86388 - DNA, 75 bp, synthetic construct
  source 1..75: mol_type = other DNA
tgctgaaaccgctggtcgacggcccgcagagcgctgtcgtgacaggaccggcaggcgaggaaatcttctgcgacg

SEQ ID NO: 86389 - DNA, 75 bp, synthetic construct
  source 1..75: mol_type = other DNA
aggatgaagtcctgagactgaaacaaatcagtggtcttactgagttatttcaggaggaggacttcagtcaggcat

SEQ ID NO: 86390 - DNA, 75 bp, synthetic construct
  source 1..75: mol_type = other DNA
ataaagcttataggtgtctcaatatctttgctacttctttctggatggtatggtgaggttttattgtctttttgt

SEQ ID NO: 86391 - DNA, 75 bp, synthetic construct
  source 1..75: mol_type = other DNA
aaagtgccgacgaaaatgaaccatcgttcgggtataccctgcgacgtaaggggatgccggtggcagataaatacg

SEQ ID NO: 86392 - DNA, 75 bp, synthetic construct
  source 1..75: mol_type = other DNA
atattgtcacaggcaacaggcatccgcgccaaatacccgccagagaaaatcagttgatcgccagtatcaaaaatg

SEQ ID NO: 86393 - DNA, 75 bp, synthetic construct
  source 1..75: mol_type = other DNA
ccccttgtatgctgttaggcgtccatacaggattacacgatcagatttctgttcaggatattggtatcgacaacc

SEQ ID NO: 86394 - DNA, 75 bp, synthetic construct
  source 1..75: mol_type = other DNA
gcgagaggaagcgcagacggagatgccggatgaggaagacatgctgatgcagaaagcggcaggacttgccggagg

SEQ ID NO: 86395 - DNA, 75 bp, synthetic construct
  source 1..75: mol_type = other DNA
attggtaacacaacgacagaccgtagcaagaatacgcctatgctggcttgtaaggagctttataaccgttcttca

SEQ ID NO: 86396 - DNA, 75 bp, synthetic construct
  source 1..75: mol_type = other DNA
aatcgctgccagcaaatgttgtttgtcggggaaatcccgcagtagtcacgcgcgaacgcgtcgagaaagttactc

SEQ ID NO: 86397 - DNA, 75 bp, synthetic construct
  source 1..75: mol_type = other DNA
atgttcaaggagaggatgacgccagatgaacttgccagactgaccggctatagccgccagaccattaataaatgg

SEQ ID NO: 86398 - DNA, 75 bp, synthetic construct
  source 1..75: mol_type = other DNA
ttcatcaccagaagctcttgataccctgaatgagcttgccgcagcacttggtaatgacccgaactttgcgacaac

SEQ ID NO: 86399 - DNA, 75 bp, synthetic construct
  source 1..75: mol_type = other DNA
cagtcgtcggtattctcgcggcctttgccgttgccgggtttcgtcatgcgatgctgctactggagtggttgttcc

SEQ ID NO: 86400 - DNA, 75 bp, synthetic construct
  source 1..75: mol_type = other DNA
tggtattcgaacgaattaagtcaggtgtaagtataagtgccattgcccgggaattcaaaacctcgcggcaaacca

SEQ ID NO: 86401 - DNA, 75 bp, synthetic construct
  source 1..75: mol_type = other DNA
cgtcagcgttttcttagcgaaaaacgccgtaaaccctcgcccaatgcgggcggggatataaggcgaaaagcccgc

SEQ ID NO: 86402 - DNA, 75 bp, synthetic construct
  source 1..75: mol_type = other DNA
gcgttgttgacccggtgctgaccagcatcgctcgcggttataaaaatgccgcatttatcggcgaacgcatcttcc

SEQ ID NO: 86403 - DNA, 75 bp, synthetic construct
  source 1..75: mol_type = other DNA
aacgccggacgcaaagcagacagcactggtaaatgagaaacgccgggctgcgctgaatatgctctatatcgaccc

SEQ ID NO: 86404 - DNA, 75 bp, synthetic construct
  source 1..75: mol_type = other DNA
gctgcggattgtcagtcttgatgtgcccacctcatggcaggcgctgtcagataaagatccttcgcaggcggaccc

SEQ ID NO: 86405 - DNA, 75 bp, synthetic construct
  source 1..75: mol_type = other DNA
tcattcgccatttaccttcccgtctggttcatcgcgatccattgcctggcgcgcagcagacagtgaatacggcgg

SEQ ID NO: 86406 - DNA, 75 bp, synthetic construct
  source 1..75: mol_type = other DNA
atacttacgggtaaaaaaggacgctattctgctgagttaaaactaacagtagtaaaagaagtcggtaatggtgcc

SEQ ID NO: 86407 - DNA, 75 bp, synthetic construct
  source 1..75: mol_type = other DNA
cgggtggtcgccgattcgctgggaaattttttgcctacaccccttaccagcacgacgcagagcctgcaacagggc

SEQ ID NO: 86408 - DNA, 75 bp, synthetic construct
  source 1..75: mol_type = other DNA
gcgggtggcggctggtctgacacgccttcaaattacgggctgaactgcgcgaccgggcatattgcaatggcactt

SEQ ID NO: 86409 - DNA, 75 bp, synthetic construct
  source 1..75: mol_type = other DNA
aacaacattctgaaatacgtcaaattagttcagagcagaataaaaaagctgctaacagctatgcagtagttgagt

SEQ ID NO: 86410 - DNA, 75 bp, synthetic construct
  source 1..75: mol_type = other DNA
gtcgctcgcaactgattgcacttcctgtaccgggtggaaaagcgaaggtggagtattgctatgcagtgaatgtac

SEQ ID NO: 86411 - DNA, 75 bp, synthetic construct
  source 1..75: mol_type = other DNA
atgtttaaagaaatttttacccggctcattcgccatttaccttcccgtctggttcatcgtgatccattgcctggc

SEQ ID NO: 86412 - DNA, 75 bp, synthetic construct
  source 1..75: mol_type = other DNA
agttctggcgcgacggcgagcacgttatcagcgacatcctcgactactcagccggagacggattcagcgacatct

SEQ ID NO: 86413 - DNA, 75 bp, synthetic construct
  source 1..75: mol_type = other DNA
ttttttcaaaaatcctttagagaaatcaaaaaaagtaaaatggatgaatgcagatgacattgactggtcatctgt

SEQ ID NO: 86414 - DNA, 75 bp, synthetic construct
  source 1..75: mol_type = other DNA
aattgccgcggggcagggaaaagaagtcataaaaaccttatttaatgagctaagtgtgattttgccgcaaagtaa

SEQ ID NO: 86415 - DNA, 75 bp, synthetic construct
  source 1..75: mol_type = other DNA
tccactccttcacaaagcacagtcagtgccagttcctgtaaagttgagttccgccacggtaacatgacgctggaa

SEQ ID NO: 86416 - DNA, 75 bp, synthetic construct
  source 1..75: mol_type = other DNA
atgagcagtccaaatattctcttaacccgtattgataaccgtctggttcacggtcaggttggcgtgacctggaca

SEQ ID NO: 86417 - DNA, 75 bp, synthetic construct
  source 1..75: mol_type = other DNA
gttttattaaacaacgtggcgtgaatgttttcattcaggacgtccctggcgatcaaaaagaacaaatccctgact

SEQ ID NO: 86418 - DNA, 75 bp, synthetic construct
  source 1..75: mol_type = other DNA
tagctgaattcctgacagacagcacgtctatgcaggatattcaacgaattatcagtagtacgctaccacaacagg

SEQ ID NO: 86419 - DNA, 75 bp, synthetic construct
  source 1..75: mol_type = other DNA
acctgatcctcgaaggatatattgctttccttgatccgccaaaagagacaaccgctccggcactgaaggcattaa

SEQ ID NO: 86420 - DNA, 75 bp, synthetic construct
  source 1..75: mol_type = other DNA
aatccgtcagacagtgaagcgtcagaactgcgccgacaactcaatgatgatcctgactggcttccggttccccgc

SEQ ID NO: 86421 - DNA, 75 bp, synthetic construct
  source 1..75: mol_type = other DNA
gagaagcagatgcctgcgctggcaggttttgctgagcaaaatatttcgttcacgcgccatatgagctccggcaac

SEQ ID NO: 86422 - DNA, 75 bp, synthetic construct
  source 1..75: mol_type = other DNA
tctcgatcacaaaattattcaaatagtaattgtgttagagttataaaatctataaacaaaatagccaaccccaaa

SEQ ID NO: 86423 - DNA, 75 bp, synthetic construct
  source 1..75: mol_type = other DNA
agatgtggtaaacccgtcggcgtaacgctttatcagttaactcggcaacaatataaggaattcagcgaatgttaa

SEQ ID NO: 86424 - DNA, 75 bp, synthetic construct
  source 1..75: mol_type = other DNA
tgtctttagtccgacgctggtacgtcgccattcagtgtcaactccgtcgctggaggcaagtcatcatgcaaccag

SEQ ID NO: 86425 - DNA, 75 bp, synthetic construct
  source 1..75: mol_type = other DNA
catacccgcattggttatctgtgctctaaccactctatttctgacgccgaagatcgtctgcaagggtattacgat

SEQ ID NO: 86426 - DNA, 75 bp, synthetic construct
  source 1..75: mol_type = other DNA
tgggataaggcgatttcggtgacggaaaagcttctcaccaacagtcagcagcagaaaaaagccctgatgcagcaa

SEQ ID NO: 86427 - DNA, 75 bp, synthetic construct
  source 1..75: mol_type = other DNA
aagagttatatgactatttactatcgaaatatatagaagataaatgcaaagaagaagctgatgaaatcaataaga

SEQ ID NO: 86428 - DNA, 75 bp, synthetic construct
  source 1..75: mol_type = other DNA
atgccatacatatgttctatcattttggtgttgaactcgtttgatgtccgaattggtaaagaagatattttgttt

SEQ ID NO: 86429 - DNA, 75 bp, synthetic construct
  source 1..75: mol_type = other DNA
agcacaacagcaatgatgatttcagccttcttctgccgtctgttggggcacaagttgctgatcctgatgatgtat

SEQ ID NO: 86430 - DNA, 75 bp, synthetic construct
  source 1..75: mol_type = other DNA
ctgggatttgtttgacagtgctgtagataaccagcatggcgtacaacaggcagcggcaaatcttaaacatcgtct

SEQ ID NO: 86431 - DNA, 75 bp, synthetic construct
  source 1..75: mol_type = other DNA
aactttcaggatccgcccgcaggtgactgccggtgtctcctggcacaacgacatgttcactacagcactggatgt

SEQ ID NO: 86432 - DNA, 75 bp, synthetic construct
  source 1..75: mol_type = other DNA
ccctgacctcacgcgcattcgggcgtgcagctgtaattaccgacgtcggaatttcatttgccaaagaactggaaa

SEQ ID NO: 86433 - DNA, 75 bp, synthetic construct
  source 1..75: mol_type = other DNA
atccctgaccaccggtgaggtgcaagtcgccgcagccggcgcgaccgtggccggttttatcgagaccgcattcta

SEQ ID NO: 86434 - DNA, 75 bp, synthetic construct
  source 1..75: mol_type = other DNA
atgagccggaaaatatttgtactttttgccctgaccgcaggactgtttatttctgcccacgcttcggaaaacgtg

SEQ ID NO: 86435 - DNA, 75 bp, synthetic construct
  source 1..75: mol_type = other DNA
accagtatccggcccccggcgtcgaaggggcctttgctggcaccaaccctcacgcgacctatcaggccggcgagg

SEQ ID NO: 86436 - DNA, 75 bp, synthetic construct
  source 1..75: mol_type = other DNA
cgccgtaacttatggatttacggtctgggtgggctgctggtgccgtttattggtatcaaagtcattgatttactg

SEQ ID NO: 86437 - DNA, 75 bp, synthetic construct
  source 1..75: mol_type = other DNA
taaacattttgttattcgtaatatcaaagcccgcaatatcacgccggatttcagtaagaaagcaggcattgataa

SEQ ID NO: 86438 - DNA, 75 bp, synthetic construct
  source 1..75: mol_type = other DNA
gggggagatcgccgtcagttacgacaactgcaaacacggatgccttcggcttcctgtacggtaagttcgtgatcg

SEQ ID NO: 86439 - DNA, 75 bp, synthetic construct
  source 1..75: mol_type = other DNA
gactacacctacgatcctgaaaaagcgaaagccttgctgaaagaagcgggtctggaaaaaggtttctccatcgac

SEQ ID NO: 86440 - DNA, 75 bp, synthetic construct
  source 1..75: mol_type = other DNA
tcaattcctctcgtcagtccggttgagttttcgacatcatcgtggcggcgggctgttctgtctcttgaagaacat

SEQ ID NO: 86441 - DNA, 75 bp, synthetic construct
  source 1..75: mol_type = other DNA
gccatattcaagagaatacaggtctaatctggatcgaaacgcccactaacccactgttggaattagttgatattg

SEQ ID NO: 86442 - DNA, 75 bp, synthetic construct
  source 1..75: mol_type = other DNA
ggtgttttctgctgcgttaatccgccgtgcactgattgttgcagcggtctgtctggctgttgcgatggggcttta

SEQ ID NO: 86443 - DNA, 75 bp, synthetic construct
  source 1..75: mol_type = other DNA
gtggactgtgtgttgtgggtgaaagcggatgaggtggtggccaacgattacaatcccaatgtcatgtcttccagt

SEQ ID NO: 86444 - DNA, 75 bp, synthetic construct
  source 1..75: mol_type = other DNA
acgctgacgccagcgtccggctagtgctcatttgtcagcacgacgccagcgccgggtcagacgatattcccgccc

SEQ ID NO: 86445 - DNA, 75 bp, synthetic construct
  source 1..75: mol_type = other DNA
tcccggtcagtacctgaagcatgatgacaggctgatggctgatggtcgcttccctgtccagactggccttcacct

SEQ ID NO: 86446 - DNA, 75 bp, synthetic construct
  source 1..75: mol_type = other DNA
atgaacagattcatgatttctgtgttttttatttctgctttccttatttctggttgttcaacatcaggcaaccag

SEQ ID NO: 86447 - DNA, 75 bp, synthetic construct
  source 1..75: mol_type = other DNA
tcaatatggagaatagcgcaggtatgctcattggttacggcgtaatcaaagggcgttatttatccattccacaaa

SEQ ID NO: 86448 - DNA, 75 bp, synthetic construct
  source 1..75: mol_type = other DNA
attgacaccaacaacaaaagaattgtcgatggtaagttgtatgctattggacaagatgatggttgtggcggacaa

SEQ ID NO: 86449 - DNA, 75 bp, synthetic construct
  source 1..75: mol_type = other DNA
caccgcttgagggtgatatcagtctcaaaacgctgggaagactggccgaacggctggataacatcgacctgagcg

SEQ ID NO: 86450 - DNA, 75 bp, synthetic construct
  source 1..75: mol_type = other DNA
gtcagggtgctattcgagcaaatattgggcaaaaggatttggctagggtttgtatcttggtccccccattggcgg

SEQ ID NO: 86451 - DNA, 75 bp, synthetic construct
  source 1..75: mol_type = other DNA
tacagctacagcaccaccggcaggctgaccggcgttcacaccaccgcagcgaatctggatatccgcatcccgtat

SEQ ID NO: 86452 - DNA, 75 bp, synthetic construct
  source 1..75: mol_type = other DNA
atgaacagattcatgatttctgtgttttttatttcttctttacttatttctggctgttcaacatcaggcaaccag

SEQ ID NO: 86453 - DNA, 75 bp, synthetic construct
  source 1..75: mol_type = other DNA
aaactccacgatgatgcggagcatcttttccgtacactgtcctcgagactggatgcattacaggatggtaactga

SEQ ID NO: 86454 - DNA, 75 bp, synthetic construct
  source 1..75: mol_type = other DNA
gtgaagcgggtattccggtgatttgctacaacacctgtattaatcaaaagggtgtcgataaatatgtctcggcgt

SEQ ID NO: 86455 - DNA, 75 bp, synthetic construct
  source 1..75: mol_type = other DNA
cctttacagcagacgacaggaagcaaacctgtaagcagttcggcgaccgtctggatgatgttgaaaagatggaac

SEQ ID NO: 86456 - DNA, 75 bp, synthetic construct
  source 1..75: mol_type = other DNA
atacggaagcgattatccaacaaaggatggtactggagtccgtgactttatacatgtaatggatcttgctgaagg

SEQ ID NO: 86457 - DNA, 75 bp, synthetic construct
  source 1..75: mol_type = other DNA
tcgaaaagctcgaagagattttcttcgatcagtcctttgagtatcagctcaactggcacaaggccggtatcgcgc

SEQ ID NO: 86458 - DNA, 75 bp, synthetic construct
  source 1..75: mol_type = other DNA
tgacgttgacgttttttgcgctgataagttttctggcattgaaagaatattgtacgcttatatccgtacattttc

SEQ ID NO: 86459 - DNA, 75 bp, synthetic construct
  source 1..75: mol_type = other DNA
agctacgcgtggacacgacatctcgacagcccatagattctacctgccgattcacttacatactgaatatgtatt

SEQ ID NO: 86460 - DNA, 75 bp, synthetic construct
  source 1..75: mol_type = other DNA
agccagaattgccgaaatgtgaaagaggccaactttcgttatcaacagttacacgcaactcccccatcttttaaa

SEQ ID NO: 86461 - DNA, 75 bp, synthetic construct
  source 1..75: mol_type = other DNA
ttcctgaacgtccagcttctgcagaacagcatggatgcaccgaaaatcatcggatctttcccgtgtaaaaaagtg

SEQ ID NO: 86462 - DNA, 75 bp, synthetic construct
  source 1..75: mol_type = other DNA
accgtattcgtgacattctcaaatcccgccagattggcgcgacgttctatttctcccgcgaggcactgctgcgcg

SEQ ID NO: 86463 - DNA, 75 bp, synthetic construct
  source 1..75: mol_type = other DNA
acgaacaaaaaacaggtcgttacctgcagcagggactggttgaggaaggctatcaggccgatctctttaataatg

SEQ ID NO: 86464 - DNA, 75 bp, synthetic construct
  source 1..75: mol_type = other DNA
ctggctatataggttcgcatacagtggtgagactgcttgaaaagggtaaagaaattgttattcttgatgatttta

SEQ ID NO: 86465 - DNA, 75 bp, synthetic construct
  source 1..75: mol_type = other DNA
tcagggctactgctctgatatgacgcgcaccttgctggtgaatggcgaaggggtgagcgccgaatctcacccgct

SEQ ID NO: 86466 - DNA, 75 bp, synthetic construct
  source 1..75: mol_type = other DNA
ggagatattgccaggcgcaaaaataagtatttttcggtactgtttattgactgggaagcacagtatgcatccact

SEQ ID NO: 86467 - DNA, 75 bp, synthetic construct
  source 1..75: mol_type = other DNA
aggcctacgacattattagccaccgccgcctggagtttgacgccgggcacaccgacatagcgcagtcctttatgg

SEQ ID NO: 86468 - DNA, 75 bp, synthetic construct
  source 1..75: mol_type = other DNA
cgtgacatacatcggcatcgactcaactggcgtcggccacggggtttacgagaacgtgaaagcgttctttcctgc

SEQ ID NO: 86469 - DNA, 75 bp, synthetic construct
  source 1..75: mol_type = other DNA
gagattttttccctttttatagctatgcgatgacctttgaggaatttgttccggctttttcgtcctggttgagca

SEQ ID NO: 86470 - DNA, 75 bp, synthetic construct
  source 1..75: mol_type = other DNA
gaagaagaactgctgccagggctggaaaagcaggctccactacgggctgcaaaagttgcgccgatgcagagtttt

SEQ ID NO: 86471 - DNA, 75 bp, synthetic construct
  source 1..75: mol_type = other DNA
atggagcattgagtttcgacttattccagcagacggttgaaaagatacgcgttcaggatggcgagtgcttcatta

SEQ ID NO: 86472 - DNA, 75 bp, synthetic construct
  source 1..75: mol_type = other DNA
tttcatatcgtcgcccgtcttgtttacagcaaaccctggatggctttttttctggcggagttgattgcggccatc

SEQ ID NO: 86473 - DNA, 75 bp, synthetic construct
  source 1..75: mol_type = other DNA
tcaggggataaaagatgatttgcaaaaaagagttctgcctattgatgtttattctgatgaaacagatgaaccaag

SEQ ID NO: 86474 - DNA, 75 bp, synthetic construct
  source 1..75: mol_type = other DNA
cacttatgatattgccgaaggttcagttgtcagcctggcggccggagggatcagttttgccctgacggcatcagt

SEQ ID NO: 86475 - DNA, 75 bp, synthetic construct
  source 1..75: mol_type = other DNA
aagaggcggtaattgctttcggtaagttcaaacttaacctcggtacgcgcgaaatgttccgcgaagatgagccga

SEQ ID NO: 86476 - DNA, 75 bp, synthetic construct
  source 1..75: mol_type = other DNA
gcgaatggcgaaacgggtatggcggcgggagcgtgacctgacggggtggatgtcgctgtcgcgtaaaccggagat

SEQ ID NO: 86477 - DNA, 75 bp, synthetic construct
  source 1..75: mol_type = other DNA
aatactgggatgctgcaactggcgcattcagaacggttcaggtatacgacaatagtgcattttctcagcgtgcag

SEQ ID NO: 86478 - DNA, 75 bp, synthetic construct
  source 1..75: mol_type = other DNA
gcagacggaaactggctactggacaatgcctggtatgaaagaaacatggcgggtttcaacgaaaagctgagagag

SEQ ID NO: 86479 - DNA, 75 bp, synthetic construct
  source 1..75: mol_type = other DNA
gtgaacctaccacaagatggcatcaaactgcatcgcggtaacttcatcgctatcggccagcagatccagccttat

SEQ ID NO: 86480 - DNA, 75 bp, synthetic construct
  source 1..75: mol_type = other DNA
agcgaggacgggcacggcgtggtatttccggctgaactggtgcggctgctggacaggctggaggaagaaatccgg

SEQ ID NO: 86481 - DNA, 75 bp, synthetic construct
  source 1..75: mol_type = other DNA
tcatcagagttgaaactgccaccggtgagctggcgaaaacgcagcgccgcagcctggcggatgcgcttcagcagt

SEQ ID NO: 86482 - DNA, 75 bp, synthetic construct
  source 1..75: mol_type = other DNA
tgggcgcggcactgatggaggagctggcggtggatgaccgtttgggctacttcgttaatcacgatatggcggggt

SEQ ID NO: 86483 - DNA, 75 bp, synthetic construct
  source 1..75: mol_type = other DNA
ggcggatatctacttcatgcagctgataacggttggacaaaaatcaacggtgagcaggtaacatcacagaagatt

SEQ ID NO: 86484 - DNA, 75 bp, synthetic construct
  source 1..75: mol_type = other DNA
cttcctgtagctttttgtagctgggccagtttagatctggaatgtgaggtaaaatatataaatgatgtaacatct

SEQ ID NO: 86485 - DNA, 75 bp, synthetic construct
  source 1..75: mol_type = other DNA
gaatattttattgggagtatgatttgtatcaataaagggcaaaatcagtatgaagttgtagatggacaacaacgt

SEQ ID NO: 86486 - DNA, 75 bp, synthetic construct
  source 1..75: mol_type = other DNA
cggaagtggtcaacgggcatacggacgttatctgttccacctcaatctgccacatgctgaccgtacgaaagagca

SEQ ID NO: 86487 - DNA, 75 bp, synthetic construct
  source 1..75: mol_type = other DNA
tcggggtggggtatagccatggtgccggtgtggagtccccgtggaacgcggtggctggtgtgaactggtcgttct

SEQ ID NO: 86488 - DNA, 75 bp, synthetic construct
  source 1..75: mol_type = other DNA
atgcaactctgtattcgcgcaaataaaaggatgcaggataatatatctgaatttctgggggcgtatggaataaat

SEQ ID NO: 86489 - DNA, 75 bp, synthetic construct
  source 1..75: mol_type = other DNA
ttcttgggcatgtatcctggctctgggccagttccccactacacagaaactggccagtctctttgtttgcaataa

SEQ ID NO: 86490 - DNA, 75 bp, synthetic construct
  source 1..75: mol_type = other DNA
aacctgtcattcacacctgatgaactgaaaacgctcttccggaaccgcctgaatttatcaccggaagcgaatgac

SEQ ID NO: 86491 - DNA, 75 bp, synthetic construct
  source 1..75: mol_type = other DNA
aataccagaacctgctgatgtgtgaattcgtggacgatctcgcgtccgtatttccgctcagcgagctgcaggcat

SEQ ID NO: 86492 - DNA, 75 bp, synthetic construct
  source 1..75: mol_type = other DNA
atgactgatgtgaaaaaaacagatgacctggttgatgatgcgaatcagtcaaagctggaaagtaaacccgttcat

SEQ ID NO: 86493 - DNA, 75 bp, synthetic construct
  source 1..75: mol_type = other DNA
atgccagttcaagacgttattcccccctatgagcagatgtatctgctaaatcagcagttgatctgcaacgctgac

SEQ ID NO: 86494 - DNA, 75 bp, synthetic construct
  source 1..75: mol_type = other DNA
tctttgccgataccggagaaaacggggtgatgatgccggtgaaaaatccgatgtccggcaccggtctgcgctgga

SEQ ID NO: 86495 - DNA, 75 bp, synthetic construct
  source 1..75: mol_type = other DNA
gagctagatgtggccaaaaaatatcttgaagatggagattatctttggaatagtggaatattcatgtttagggct

SEQ ID NO: 86496 - DNA, 75 bp, synthetic construct
  source 1..75: mol_type = other DNA
cagcgtttaaaagatacaggacaatctgttcccccctgggcacagtattgggtggcttccgcttatctgcacgat

SEQ ID NO: 86497 - DNA, 75 bp, synthetic construct
  source 1..75: mol_type = other DNA
ttgcactgcgcgccaccgctggtcatctgtaatgaaaaacaccgttttatcgtggctgaccagttagctgagata

SEQ ID NO: 86498 - DNA, 75 bp, synthetic construct
  source 1..75: mol_type = other DNA
cccggaatatctggcagaacgagtgattctcatgcagtggtggagtgattatgtcattgctcaaaaatttaaagc

SEQ ID NO: 86499 - DNA, 75 bp, synthetic construct
  source 1..75: mol_type = other DNA
taccggacgatccggcactgatccgacaactggcctatgtgaaccagcgtctggatgacatgcctgcgacgcagc

SEQ ID NO: 86500 - DNA, 75 bp, synthetic construct
  source 1..75: mol_type = other DNA
acttcgctacatttcatcgccaaatatcgtgctaccgggcgtcgggttactggcggcatcgccaatgcccaggcc

SEQ ID NO: 86501 - DNA, 75 bp, synthetic construct
  source 1..75: mol_type = other DNA
gctggggtcgggagtgtgataactgcaggtactggaactcaggttattaacggattttcatttgacggtggagcc

SEQ ID NO: 86502 - DNA, 75 bp, synthetic construct
  source 1..75: mol_type = other DNA
ctgtatgagtcacggcttaaggagaggctgcacgttatcagcaagcgttacacgcagcgcattgagcggcataac

SEQ ID NO: 86503 - DNA, 75 bp, synthetic construct
  source 1..75: mol_type = other DNA
gctataaaccgcaactggctgaaggcagcgggcgcacccagaccgtgcgcatggtgctgataaccagcagcacgg

SEQ ID NO: 86504 - DNA, 75 bp, synthetic construct
  source 1..75: mol_type = other DNA
caaagataaagacaatcgctctaaaaacgtaagccagaatcatgcagatgattatggttacagccagaacgatta

SEQ ID NO: 86505 - DNA, 75 bp, synthetic construct
  source 1..75: mol_type = other DNA
ggcagccacttctgcatccacagcgaccacgaaggcgtcagaagctgccacctcggcacggggtgcggcggcctc

SEQ ID NO: 86506 - DNA, 75 bp, synthetic construct
  source 1..75: mol_type = other DNA
cgtcctcgatattacaggaggcaaccacacttttgctgtcagcaccataatagcaaaagatgcaactgtccgaat

SEQ ID NO: 86507 - DNA, 75 bp, synthetic construct
  source 1..75: mol_type = other DNA
ggcgatgctgcaaatcgcccacgcccacgcgacggaagtcacacgcgctcaggacaggctgaatgaaatgaatca

SEQ ID NO: 86508 - DNA, 75 bp, synthetic construct
  source 1..75: mol_type = other DNA
tcaaaaaacttaccgaacagtacaacgtgacctatatcggtatcgactcaaccggcgttggtcacggggtttacg

SEQ ID NO: 86509 - DNA, 75 bp, synthetic construct
  source 1..75: mol_type = other DNA
aaaatcgcgatgcgctatcgcgcaagctggagattgaacagcaagaagcgtttatgacgcttgagcaggagcagc

SEQ ID NO: 86510 - DNA, 75 bp, synthetic construct
  source 1..75: mol_type = other DNA
ctggttatattggttcacataccgttttacagttaattgagggcggatatgatgtggttgtgcttgataacctga

SEQ ID NO: 86511 - DNA, 75 bp, synthetic construct
  source 1..75: mol_type = other DNA
gctatattcgtcgcggtgaagtgtctgcgggtgagcaggatacggtggcctttgaagtggcgcagtttgtcgaaa

SEQ ID NO: 86512 - DNA, 75 bp, synthetic construct
  source 1..75: mol_type = other DNA
tcgaaccggcagggcgtaacactgcacctgccattgcgctggcggcgctggcggcaaaacgtcatagcccggaga

SEQ ID NO: 86513 - DNA, 75 bp, synthetic construct
  source 1..75: mol_type = other DNA
aaatgggagaaggacagccccgaaagcgttttctacctctgtgaacatcatggctgcgtgatccatcagtctgag

SEQ ID NO: 86514 - DNA, 75 bp, synthetic construct
  source 1..75: mol_type = other DNA
attttgccaaagaagtcgaggtggagctgaaaggtgatccgatggtgcttcctaacggggccacgctttacttcc

SEQ ID NO: 86515 - DNA, 75 bp, synthetic construct
  source 1..75: mol_type = other DNA
ttcccaacctggaggaatatcctattggaaatgcttcctgcccctatggtactactaaagtcatgctggagcagg

SEQ ID NO: 86516 - DNA, 75 bp, synthetic construct
  source 1..75: mol_type = other DNA
ccagaggagctcatagtggactgcctttttatcgggtggatggaccgttgcagacgatgaaaataacgggtacgc

SEQ ID NO: 86517 - DNA, 75 bp, synthetic construct
  source 1..75: mol_type = other DNA
gcggcagagaatgtcaggtacgtatttacggcgtatgcaatggcaatcctgaaactacagttctggcacattacc

SEQ ID NO: 86518 - DNA, 75 bp, synthetic construct
  source 1..75: mol_type = other DNA
atcggtggaacgacccttgatattgcacatgtccgcagcaaaatgtccggtttcacaaaaacttattgtgacccc

SEQ ID NO: 86519 - DNA, 75 bp, synthetic construct
  source 1..75: mol_type = other DNA
ttcgtttaccagaggttctgcatcgaactggatacggtaaagcttggatctatcacctcatcaaccaaaatcgtt

SEQ ID NO: 86520 - DNA, 75 bp, synthetic construct
  source 1..75: mol_type = other DNA
caaccgcaacaaaggcccgcgccgtcagccggaaaagaatgtcttcaccgatgaacagattgagaagctggaaga

SEQ ID NO: 86521 - DNA, 75 bp, synthetic construct
  source 1..75: mol_type = other DNA
cctttccgccagtaaagcacaggcccacgtctttaagcagtacatcatcgacttcgccaaagaagtcgaggtgga

SEQ ID NO: 86522 - DNA, 75 bp, synthetic construct
  source 1..75: mol_type = other DNA
catgaaaaagagatcaccgccgcgcaactggatggcgtgaatttcgtcagtaccgatccggcgtattccggttcg

SEQ ID NO: 86523 - DNA, 75 bp, synthetic construct
  source 1..75: mol_type = other DNA
gcaaaatggctgaattgctaaatgatgcacacccagagtggtgttttagcacatgcgaaaaacggattgctaatt

SEQ ID NO: 86524 - DNA, 75 bp, synthetic construct
  source 1..75: mol_type = other DNA
ctacattagagagtcaaattcataagtttgtttttccattccgggctgggttaaaggggatgattcggccattgc

SEQ ID NO: 86525 - DNA, 75 bp, synthetic construct
  source 1..75: mol_type = other DNA
gcgtgcaattgcatttgtcgaaagcgaagttgatgaatggatcgcatctgcaattgaacgttcacgtaaaaatgc

SEQ ID NO: 86526 - DNA, 75 bp, synthetic construct
  source 1..75: mol_type = other DNA
atgcctgccgggcaggaggcagagcaccgttttgcgatgggcgaactgcctgatgaagtgctggagatctgccag

SEQ ID NO: 86527 - DNA, 75 bp, synthetic construct
  source 1..75: mol_type = other DNA
atgaaaatcagtgaatttttacacctggcgttaccagaggaacaatggctgccgacgatttctggcgttttacgc

SEQ ID NO: 86528 - DNA, 75 bp, synthetic construct
  source 1..75: mol_type = other DNA
gttaagcgggcatctcggggtggggtatagccatggtgccggtgtggaatccccgtggaacgcggtggctggtgc

SEQ ID NO: 86529 - DNA, 75 bp, synthetic construct
  source 1..75: mol_type = other DNA
tcttcgccttttgttcagagcattaaccagcacagcgtctgcgctggcagggttcatattgctgtgtctgttcgg

SEQ ID NO: 86530 - DNA, 75 bp, synthetic construct
  source 1..75: mol_type = other DNA
agccagtgctgggcgctgaaagagctggcaaaggatatctggaacaggccatggagcgaggaaagacggagtgac

SEQ ID NO: 86531 - DNA, 75 bp, synthetic construct
  source 1..75: mol_type = other DNA
aggctgctgaggataaaagccaggggataccgaaaccgggagcgctttaaactgggggtgatgttccactacgga

SEQ ID NO: 86532 - DNA, 75 bp, synthetic construct
  source 1..75: mol_type = other DNA
tcgcttttcttctgattgccgcctggggagcatccatgcgtctgtcgtggtcactgggccgggagaacgccagaa

SEQ ID NO: 86533 - DNA, 75 bp, synthetic construct
  source 1..75: mol_type = other DNA
tgggtaacacaggcacaacaggaaagcgttattaaattccgtgaactgaataatgcacttagtgggctttctgac

SEQ ID NO: 86534 - DNA, 75 bp, synthetic construct
  source 1..75: mol_type = other DNA
actctcgccagcgactcgcctctcttgcttatcatcagcagtcttggttttggcggtacctttatgggcacgaca

SEQ ID NO: 86535 - DNA, 75 bp, synthetic construct
  source 1..75: mol_type = other DNA
tggggaattaataccacttatgttgagaaagtcccctgtaccagcagtggtgttgcaccgatctttgttaatgcc

SEQ ID NO: 86536 - DNA, 75 bp, synthetic construct
  source 1..75: mol_type = other DNA
atcactctgcgattactgcctggcgctgacgcagatactgaacggccacgcgctgctgccggaaaccgaaaccac

SEQ ID NO: 86537 - DNA, 75 bp, synthetic construct
  source 1..75: mol_type = other DNA
acgctgaaaccggtaaatatcatgtgaatcaatataccggcgatgaaagccgcacccgcgtcactcagtgggaaa

SEQ ID NO: 86538 - DNA, 75 bp, synthetic construct
  source 1..75: mol_type = other DNA
tccaggcaggaaaaaccttcacccgcacactggctgtctacgtcacaacccagcaactccaccggctcagtgttg

SEQ ID NO: 86539 - DNA, 75 bp, synthetic construct
  source 1..75: mol_type = other DNA
acgccatcgccaccggggcaatactggtaacgaataatgtgagggagtttgagcgggtgcctggactggtactgg

SEQ ID NO: 86540 - DNA, 75 bp, synthetic construct
  source 1..75: mol_type = other DNA
atgaaacagcatctttctaatctcgttcctgaccaatataaaggcgctggcactgcaacaactacacctgataat

SEQ ID NO: 86541 - DNA, 75 bp, synthetic construct
  source 1..75: mol_type = other DNA
tagctgattgcgaaatacaagctaaagatcatgattgttttactattttcgctaagggtactattttttccgcgt

SEQ ID NO: 86542 - DNA, 75 bp, synthetic construct
  source 1..75: mol_type = other DNA
gttatcgatcagaatgctctggagatcattttcgccgccggtatacaacaacgggccgcgaccaatatgttaatc

SEQ ID NO: 86543 - DNA, 75 bp, synthetic construct
  source 1..75: mol_type = other DNA
aaattatcgatttttccgaagtcgatattatgggctggttatcttctgaaattggcgacactttcgttgataccg

SEQ ID NO: 86544 - DNA, 75 bp, synthetic construct
  source 1..75: mol_type = other DNA
tccctgcttatccgtttgtgcagtacagagatgatccgaatgttgttgcgttctttgatgcatacaatgaaattg

SEQ ID NO: 86545 - DNA, 75 bp, synthetic construct
  source 1..75: mol_type = other DNA
ttgctggcggtgtgctggatgcagggagagtttgacatgagcgccgccacctacgcacagcaacctgcgctgttt

SEQ ID NO: 86546 - DNA, 75 bp, synthetic construct
  source 1..75: mol_type = other DNA
gctcaatgttctgactgaacaagtacagttgcaaaaggatgagctacacgcgaacgagttttaccaggtctatgc

SEQ ID NO: 86547 - DNA, 75 bp, synthetic construct
  source 1..75: mol_type = other DNA
gcagcattaaagctcatggatacactgaacctctcatgcagaattaaaagcaaacgggacagtgggaaattctgt

SEQ ID NO: 86548 - DNA, 75 bp, synthetic construct
  source 1..75: mol_type = other DNA
tggctctgcagagttctgctgcaggtagtgcaacaaacgttggcgtgcagatcctggacagaacaggcaatgctc

SEQ ID NO: 86549 - DNA, 75 bp, synthetic construct
  source 1..75: mol_type = other DNA
aatgtggaagaaagcagctactggcttcgccgtatagcggcgggtgatgtggtacgtgttaaacaggataaggct

SEQ ID NO: 86550 - DNA, 75 bp, synthetic construct
  source 1..75: mol_type = other DNA
accaacaccattccgttccaggcgcgttattatgcaattggtgccgcaacccctggcgcagctaatgcggatgcg

SEQ ID NO: 86551 - DNA, 75 bp, synthetic construct
  source 1..75: mol_type = other DNA
ggttttaacattcaactgaacgattgtgacactactgttgcagacaaagcagctattgccttccttggtaccgca

SEQ ID NO: 86552 - DNA, 75 bp, synthetic construct
  source 1..75: mol_type = other DNA
gaagatgtggcgtagtaattatgcccctcccttgctacgcctcgcatggaaagctggattcaagataccaccgct

SEQ ID NO: 86553 - DNA, 75 bp, synthetic construct
  source 1..75: mol_type = other DNA
cccgtggtttcctcgcgcaaaataccgctggctccggaccgtttatgctgaaaagctggcaaaaaggtcagcaat

SEQ ID NO: 86554 - DNA, 75 bp, synthetic construct
  source 1..75: mol_type = other DNA
caaatagataacgattttggcatgcatatcatctatttcctgcaacatggtcactggagggtaaatgatcgtagt

SEQ ID NO: 86555 - DNA, 75 bp, synthetic construct
  source 1..75: mol_type = other DNA
accgggtaagaagataattattctgggagcgggttgtattggtttgatgacgttgcaagcgtgcaaatgcctggg

SEQ ID NO: 86556 - DNA, 75 bp, synthetic construct
  source 1..75: mol_type = other DNA
atgataaagccattacagttctggatttaaatcaactggtgttatgtcagaatgaagatgcctctggtcagaact

SEQ ID NO: 86557 - DNA, 75 bp, synthetic construct
  source 1..75: mol_type = other DNA
tgccgggagtggagcgtcacggataacgcccggtacagtgatttcagttgtacgattgagcaggtggtgaactga

SEQ ID NO: 86558 - DNA, 75 bp, synthetic construct
  source 1..75: mol_type = other DNA
gtgctcatcctcacctgctgtcagaagatttacgtattctgctccttgatttagatccccagtcatcagccacta

SEQ ID NO: 86559 - DNA, 75 bp, synthetic construct
  source 1..75: mol_type = other DNA
agcaatatctgtcttttttaaccagacactgccggatatagcggactcactgacatcccgaattaacgatcactt

SEQ ID NO: 86560 - DNA, 75 bp, synthetic construct
  source 1..75: mol_type = other DNA
tggtcccgcgtgaagggatgcaggtgagtgagaaaccgtcggtggtgagggtgcggtttggtgacggttatgaac

SEQ ID NO: 86561 - DNA, 75 bp, synthetic construct
  source 1..75: mol_type = other DNA
atggctgagataaacagccctgcacaagccgcatcagcgttaaccggcgtcagcgatgttctgagtccggtgttc

SEQ ID NO: 86562 - DNA, 75 bp, synthetic construct
  source 1..75: mol_type = other DNA
ggggcgatagtgaccatcgcagaaggttgcctgattatggccgcctgcgccaccggcccttatgcgctggttctg

SEQ ID NO: 86563 - DNA, 75 bp, synthetic construct
  source 1..75: mol_type = other DNA
agttaactgtgctgttgatgctggtggcgaagctgtctcgcctgaaaggtctggatgcctccattgaacatgaca

SEQ ID NO: 86564 - DNA, 75 bp, synthetic construct
  source 1..75: mol_type = other DNA
cagaagatttctctgacaaacatcacgcgctgttcctgggccgtggcgatcagtacccaatcgcgctggaaggcg

SEQ ID NO: 86565 - DNA, 75 bp, synthetic construct
  source 1..75: mol_type = other DNA
gccagccgactttatcgaaaccaatatcgtaggcacctatacattgctggaagcggctcgcgcctattggagcag

SEQ ID NO: 86566 - DNA, 75 bp, synthetic construct
  source 1..75: mol_type = other DNA
acaggttgcccgggagacaaaggtacgccggaaactggttaaggaacggtccagactgaaacgggccacggtcag

SEQ ID NO: 86567 - DNA, 75 bp, synthetic construct
  source 1..75: mol_type = other DNA
gggaatattccgccaggatgaacggcgtctgggcatagagtacgaccaccacaaccggccggaaacactcaccga

SEQ ID NO: 86568 - DNA, 75 bp, synthetic construct
  source 1..75: mol_type = other DNA
ctggttgggcaaacttcggctattaatatggcatcaattgctgcaacaaagtcagttgatgtctcaggcgataac

SEQ ID NO: 86569 - DNA, 75 bp, synthetic construct
  source 1..75: mol_type = other DNA
cgggctgcctaccttaacgcagacccgatttgcctttggttatcatgggaataagatccccactttatttgccta

SEQ ID NO: 86570 - DNA, 75 bp, synthetic construct
  source 1..75: mol_type = other DNA
cgctcgcaaaaatgaagtggaccgtcttgaccaatggaatagcgaaacatggttatataaccatgataaatccat

SEQ ID NO: 86571 - DNA, 75 bp, synthetic construct
  source 1..75: mol_type = other DNA
agataaataacccgtgggttaattttttaaatgggggtttatcggcattatgggcgttatttttatcgccgtcgg

SEQ ID NO: 86572 - DNA, 75 bp, synthetic construct
  source 1..75: mol_type = other DNA
tgggtatgtcaaaagctatggctgaaaaggtactgatcgccaaatcacggatgattgatgctgataaggggccag

SEQ ID NO: 86573 - DNA, 75 bp, synthetic construct
  source 1..75: mol_type = other DNA
ctgacaaacagcaatacaacgacattgtgattaatagcggcttgctggatgccaattggtcaaccgtgtttattg

SEQ ID NO: 86574 - DNA, 75 bp, synthetic construct
  source 1..75: mol_type = other DNA
tggctcccggcgaatctcccaggacatcagtacccgtgatgaaggcggtggcggaaaggtcgtggttatcgggcg

SEQ ID NO: 86575 - DNA, 75 bp, synthetic construct
  source 1..75: mol_type = other DNA
caggccagatatgaggagggcaatgacgacaagggaaggaaaaagcgtaatcgccttcccattcaggtggtgaaa

SEQ ID NO: 86576 - DNA, 75 bp, synthetic construct
  source 1..75: mol_type = other DNA
ataacttaggtacgggtagaggatattctgtattagaagtaataaaaacatttcaatcaattattgggaaaaata

SEQ ID NO: 86577 - DNA, 75 bp, synthetic construct
  source 1..75: mol_type = other DNA
ggcctggcgtatgcgccatatgctgacctggtatggtgtgaaacctccacgccggatctggaactggcgcgtcgc

SEQ ID NO: 86578 - DNA, 75 bp, synthetic construct
  source 1..75: mol_type = other DNA
tatcactttccggaaaaattgattccgctggtaattcttaatgctctggaaggtaaggcattacctatttatggc

SEQ ID NO: 86579 - DNA, 75 bp, synthetic construct
  source 1..75: mol_type = other DNA
cactacgccaggtgtgcaaactgtcggcgcgtaaacaaaagcaggtgcgggaatttattggggtgattgcgggta

SEQ ID NO: 86580 - DNA, 75 bp, synthetic construct
  source 1..75: mol_type = other DNA
atgaagctgatcctgcctttcccgcccagcgtgaacacgtactggcgacaccccaacaaaggggcgtttgctggt

SEQ ID NO: 86581 - DNA, 75 bp, synthetic construct
  source 1..75: mol_type = other DNA
aaccgttcgaagcagaagtctccccggcaaataaccgtcaattaaccgtgagttatgcgagtcgctacccggatt

SEQ ID NO: 86582 - DNA, 75 bp, synthetic construct
  source 1..75: mol_type = other DNA
tttgtcgcgaaacagaaacactgtgtcaggacatttatgaacgttcttacaccggttttatttccgatgcaacgg

SEQ ID NO: 86583 - DNA, 75 bp, synthetic construct
  source 1..75: mol_type = other DNA
taaccgtaaaagatgtggtatcggtgctggaagattacaaggcaaaaggacataacagaatgggacaaattttca

SEQ ID NO: 86584 - DNA, 75 bp, synthetic construct
  source 1..75: mol_type = other DNA
atgagcaatttattaggcccccgtgacgccaacggcattccggtcccgatgacggtggatgaatccatcgccagt

SEQ ID NO: 86585 - DNA, 75 bp, synthetic construct
  source 1..75: mol_type = other DNA
atgctgaagtttatgctcgataccaacatctgcatttttacgataaagaacaaacccgcccgtgtcagggaccgt

SEQ ID NO: 86586 - DNA, 75 bp, synthetic construct
  source 1..75: mol_type = other DNA
atgctgttagcacacatttccgatacccattttcgcagccgcggcgagaagctgtatggctttatcgacgtcaat

SEQ ID NO: 86587 - DNA, 75 bp, synthetic construct
  source 1..75: mol_type = other DNA
tgctcggactcgaccccagcagccgccagcgtctgattggcctggcggggaagaagaaagccactaacccgtttc

SEQ ID NO: 86588 - DNA, 75 bp, synthetic construct
  source 1..75: mol_type = other DNA
tattgtgtgccggttgcggtcgtgagctgcggcctgatgtgctgagacagcagccgatggcgaactactgccact

SEQ ID NO: 86589 - DNA, 75 bp, synthetic construct
  source 1..75: mol_type = other DNA
gtattcgcgctcgcagaaaagaacttaagattaggcaggctgcccttggcaagatggttggcgtgtctaatgttg

SEQ ID NO: 86590 - DNA, 75 bp, synthetic construct
  source 1..75: mol_type = other DNA
tatcggccagcagatccagccttatctggaggaaggcaaatgctttcgcatggtgcttaaaccgtggcgtgagaa

SEQ ID NO: 86591 - DNA, 75 bp, synthetic construct
  source 1..75: mol_type = other DNA
accgggggatccctggcagatacatcgctgccggaccactggcttcacgctggctacaacaggtttttgcgaccg

SEQ ID NO: 86592 - DNA, 75 bp, synthetic construct
  source 1..75: mol_type = other DNA
aattatgaactggaaaaagcaaaactccacaacataatgaccgtagctaaattgtggcacatgtttatggactcc

SEQ ID NO: 86593 - DNA, 75 bp, synthetic construct
  source 1..75: mol_type = other DNA
tcaatgacgttatcggtgtgcttaaagcgtgtcaggatagactcaaaggcgatacctctggcctgttgtcttacc

SEQ ID NO: 86594 - DNA, 75 bp, synthetic construct
  source 1..75: mol_type = other DNA
cggggcggcgacctcgcggtttttcactatttatgaaaatttttcagggaaaatcgtgtcggtacttctcgaata

SEQ ID NO: 86595 - DNA, 75 bp, synthetic construct
  source 1..75: mol_type = other DNA
gttactcaacgattgttacccacaccattagctgcggtaagagcccgaagagttgcatttgaaaatccatataga

SEQ ID NO: 86596 - DNA, 75 bp, synthetic construct
  source 1..75: mol_type = other DNA
ataatttcaccggtaacagaggtaatggtaacgatagctatttttttagtgagctcagcgggattaatattggcc

SEQ ID NO: 86597 - DNA, 75 bp, synthetic construct
  source 1..75: mol_type = other DNA
cacaaccgcgcccggaccgctctttctgcgcgcagaatctggcagggcgttctttggtggcgtggccgcgaatca

SEQ ID NO: 86598 - DNA, 75 bp, synthetic construct
  source 1..75: mol_type = other DNA
tttcgcagggagattccattcacatggggaatgcagaagaactgaatttcacgctgcagtctgacgacgagcagg

SEQ ID NO: 86599 - DNA, 75 bp, synthetic construct
  source 1..75: mol_type = other DNA
tggtttgtcgtaaatggtcggcaagcgtaggggcgctgtgggtaaccataacggcagattttgaacaggtcgtgg

SEQ ID NO: 86600 - DNA, 75 bp, synthetic construct
  source 1..75: mol_type = other DNA
gcattcacgttgctggcggcgtgggttgcttatatccggctgcattcggcaagagaactgatgacaagcgcaatt

SEQ ID NO: 86601 - DNA, 75 bp, synthetic construct
  source 1..75: mol_type = other DNA
gatgtgcgtatcggtggcgatggtgctcactgtacggtaatccggtacgggctggtagaaaatcacaccaaccag

SEQ ID NO: 86602 - DNA, 75 bp, synthetic construct
  source 1..75: mol_type = other DNA
tctacgggggattgcacttctgcgccgtcagattgccgctgtcggtgagattcagggaccgttatccctccgcca

SEQ ID NO: 86603 - DNA, 75 bp, synthetic construct
  source 1..75: mol_type = other DNA
ggcctgacaccctaccaccaggagcaactggcaggcggaacaccggaagaaaaccgtgacattttaacacgcttg

SEQ ID NO: 86604 - DNA, 75 bp, synthetic construct
  source 1..75: mol_type = other DNA
agaagggcttgaaatccttctggatgaaattattaacgaaatgaatactcatggcatgcaatccgaaacagatat

SEQ ID NO: 86605 - DNA, 75 bp, synthetic construct
  source 1..75: mol_type = other DNA
caatcgtcttatccctgaaagtttcagtggcagaatcatctggatacatcctgacaaccgaccttttcttcgtgc

SEQ ID NO: 86606 - DNA, 75 bp, synthetic construct
  source 1..75: mol_type = other DNA
atcctcgctgtcctgccgattgaataccgcaatcgtctgctaccagaagacaacgtaatggctcgtctggcaagg

SEQ ID NO: 86607 - DNA, 75 bp, synthetic construct
  source 1..75: mol_type = other DNA
cgccatgttaatgcgcctgcatggccatgaagatctgcaagccaatgcgcaaaccgttcttgaggtactgcgcag

SEQ ID NO: 86608 - DNA, 75 bp, synthetic construct
  source 1..75: mol_type = other DNA
aagggggagacgagatcactttccctgatgacctcagccgacagcgtcagaagcttttccgctttctggataacc

SEQ ID NO: 86609 - DNA, 75 bp, synthetic construct
  source 1..75: mol_type = other DNA
attcgggattacaggcgttcaggtgacacgtattctggacagcattgcgctgtttcgaggctatcctgcaacgat

SEQ ID NO: 86610 - DNA, 75 bp, synthetic construct
  source 1..75: mol_type = other DNA
gtttcattctttcagatatgggtcgagaagggcttgaaatccttctggatgaaattattaacgaaatgaatactc

SEQ ID NO: 86611 - DNA, 75 bp, synthetic construct
  source 1..75: mol_type = other DNA
ggtgatggctattcccagcgagcgcctgccgggctgaacgctgacctgaaaacgtacagcgtgacgctgtctgtc

SEQ ID NO: 86612 - DNA, 75 bp, synthetic construct
  source 1..75: mol_type = other DNA
cagcatgcgaggatctacaacgcggtgttgcagcggctgccgcacgtcgcccagcgcgcagcacgcgatcatgtg

SEQ ID NO: 86613 - DNA, 75 bp, synthetic construct
  source 1..75: mol_type = other DNA
gagctggtctctacggcgctgtcctggcctgtgaacttcataaggctggaaaaaaagttatggttattgagagac

SEQ ID NO: 86614 - DNA, 75 bp, synthetic construct
  source 1..75: mol_type = other DNA
gaacatattgaccaccaggagtaccgcaaaattctggcagaaacagagcaggaagctcatctgaaaaaattacgg

SEQ ID NO: 86615 - DNA, 75 bp, synthetic construct
  source 1..75: mol_type = other DNA
cggaactggtcaacagacatacggacgttatctgctcaaccagtatccgccacattttggctgtacgaaagagtg

SEQ ID NO: 86616 - DNA, 75 bp, synthetic construct
  source 1..75: mol_type = other DNA
ctcctctcactatggtgtggccccactggcaaacccggcactgctgacaaaatccggtgcaaaagatgacttcag

SEQ ID NO: 86617 - DNA, 75 bp, synthetic construct
  source 1..75: mol_type = other DNA
ttcaaaagatgaggcgaccagacaggcgtcagcagcgaagggcagcgccacgacggcatccacgaaagcaacaga

SEQ ID NO: 86618 - DNA, 75 bp, synthetic construct
  source 1..75: mol_type = other DNA
gaacggattgatcaccaggaataccgacaaattctggcagaaacagagcaggaagctcatctgaaaaaattacga

SEQ ID NO: 86619 - DNA, 75 bp, synthetic construct
  source 1..75: mol_type = other DNA
gtagtgaactggtatcccgactttctactcatcgccgcgtggtggcgttgggagatactgattttacggacgtcg

SEQ ID NO: 86620 - DNA, 75 bp, synthetic construct
  source 1..75: mol_type = other DNA
tacatcgacacccatgtacacggtggtgcgggcgttgatgtaatggatgacgcgccggatgtactcgacaagctg

SEQ ID NO: 86621 - DNA, 75 bp, synthetic construct
  source 1..75: mol_type = other DNA
ctgccattggtgctgaatttaatgcctggaaatgggcacagttacgtgcaggctaccgccagaatctggccagca

SEQ ID NO: 86622 - DNA, 75 bp, synthetic construct
  source 1..75: mol_type = other DNA
cggaatttcaccgtttgatgtggttcacctggacatcgccggtctggtcggtactgaccatgactacggtgcgat

SEQ ID NO: 86623 - DNA, 75 bp, synthetic construct
  source 1..75: mol_type = other DNA
attaactcagtcgcatcttgggacccacttgttaccgcactttcgttcacccgtaattttggcaaggagccagca

SEQ ID NO: 86624 - DNA, 75 bp, synthetic construct
  source 1..75: mol_type = other DNA
gaaggcacaaattgactggataccattatctgaaggtgctgttcgtccttctcagggaaaaactctggcagttat

SEQ ID NO: 86625 - DNA, 75 bp, synthetic construct
  source 1..75: mol_type = other DNA
gccgatagcttctccctgctggcgattccgttctttgtgctggcgggtgaaatcatgaatgcgggcggcttgtca

SEQ ID NO: 86626 - DNA, 75 bp, synthetic construct
  source 1..75: mol_type = other DNA
tgagcggctgcgcgatcggcgtccgaaatcgctgatctttgaccctgaggaaatcgggttcgtggtgaaagaaac

SEQ ID NO: 86627 - DNA, 75 bp, synthetic construct
  source 1..75: mol_type = other DNA
gggattgctaatggttactttaactccggttttttactgattaatactaatcaatggacgaatgagcgggtttct

SEQ ID NO: 86628 - DNA, 75 bp, synthetic construct
  source 1..75: mol_type = other DNA
tgaagccaagaaaaaggatatcgaatcaaatgtatgggctgctttgaactcagtcacaacagttaagcgacttat

SEQ ID NO: 86629 - DNA, 75 bp, synthetic construct
  source 1..75: mol_type = other DNA
tatccgccgcggagaacgcgaggcggcagatgcgctggggctcacactctatgagctgatgcttcgcgctggcga

SEQ ID NO: 86630 - DNA, 75 bp, synthetic construct
  source 1..75: mol_type = other DNA
atgaccgataatttttatgcgccgccccatagcatcgaggcagagcaggcggtgattggtggattgcttctggat

SEQ ID NO: 86631 - DNA, 75 bp, synthetic construct
  source 1..75: mol_type = other DNA
tagaggtgatgggttccgaagggtatttgatcaacgaatttctgacgctgcgcaccaatcagcgtagtgaccagt

SEQ ID NO: 86632 - DNA, 75 bp, synthetic construct
  source 1..75: mol_type = other DNA
acgtttgataacaattatttttccgatcgctatcaaggtattccggtgggaggctacactaagcttattgaaaaa

SEQ ID NO: 86633 - DNA, 75 bp, synthetic construct
  source 1..75: mol_type = other DNA
attttccgggcaacacccaattcacggactgccgccactggcggaggccaaccctgaaatgacgttcctggaaaa

SEQ ID NO: 86634 - DNA, 75 bp, synthetic construct
  source 1..75: mol_type = other DNA
atttctgaggaactggagaaaaaagttaaagaggaggccagcgccaaattattcaaagttgattatgagaaattt

SEQ ID NO: 86635 - DNA, 75 bp, synthetic construct
  source 1..75: mol_type = other DNA
cgcagtgcacatgcacagcgcgatgactggctgaagagagagatacagcgcgtatacgatgtacggtgtgcgtaa

SEQ ID NO: 86636 - DNA, 75 bp, synthetic construct
  source 1..75: mol_type = other DNA
ctctgcggtcgatcatcgactagcagaactaaccatgaacaaactttacgatcgcgttccggcttctgtctggaa

SEQ ID NO: 86637 - DNA, 75 bp, synthetic construct
  source 1..75: mol_type = other DNA
agaaaagagcttcattccatcaacagaagcagaatggttttttgactcatggtatgcaaaatcagcagcaattgt

SEQ ID NO: 86638 - DNA, 75 bp, synthetic construct
  source 1..75: mol_type = other DNA
aactgcaactctgctcgatattgcagctaacagcctgtggccttcatcaactgtcggtgttgataacatcaatac

SEQ ID NO: 86639 - DNA, 75 bp, synthetic construct
  source 1..75: mol_type = other DNA
tgtttttgtctctgatttactacgcgaagctaaagtcaatgaactggatgaaactctttcaacaacgaggttgaa

SEQ ID NO: 86640 - DNA, 75 bp, synthetic construct
  source 1..75: mol_type = other DNA
gaagatgttaatgtgtcaaaagacaatgatgattttatcaaaaccacaatgtatttgacagggaaacaaagaact

SEQ ID NO: 86641 - DNA, 75 bp, synthetic construct
  source 1..75: mol_type = other DNA
gcgcagctcgagaaagccgatccggactttatggcggagcgcgaggatgttgtcagcgacgaagggcgatttaac

SEQ ID NO: 86642 - DNA, 75 bp, synthetic construct
  source 1..75: mol_type = other DNA
cgctgtctaagctgtctccggaaatggtgagcgccagcaccctggcaggcgacccgatcaccgcgcgcctgacgg

SEQ ID NO: 86643 - DNA, 75 bp, synthetic construct
  source 1..75: mol_type = other DNA
aagcttacttttgaaatgagaagcttgaaggaacagtttgaaaactacattgctctttgtaaaggtcgaacagtt

SEQ ID NO: 86644 - DNA, 75 bp, synthetic construct
  source 1..75: mol_type = other DNA
aacaacgtcgtgcggcgtatcgtcagcaagggctatggggcgatgcttcgctggccgattactggcagcagaccg

SEQ ID NO: 86645 - DNA, 75 bp, synthetic construct
  source 1..75: mol_type = other DNA
tgagcgatgaagtatttcgtcgtctgcgtttgcgctcgctgcaagccgccagagaagcgacgcgtcccgttgcag

SEQ ID NO: 86646 - DNA, 75 bp, synthetic construct
  source 1..75: mol_type = other DNA
gtgcatgtttatggggcacatatttttcatactaatgataaaaaaatatgggattatgtaaatgaattagtagaa

SEQ ID NO: 86647 - DNA, 75 bp, synthetic construct
  source 1..75: mol_type = other DNA
gaacgaggcaacccttacgcgatgatgagcctttttgaaatggcccaggcatcactggttgatcgtggtatcact

SEQ ID NO: 86648 - DNA, 75 bp, synthetic construct
  source 1..75: mol_type = other DNA
cggcggtattgcccgtggagccacgccggaaagcagcggcagctatggcttcgtccgtctggagggtgacctgct

SEQ ID NO: 86649 - DNA, 75 bp, synthetic construct
  source 1..75: mol_type = other DNA
aaccaataattttcgggaaatcccggaagcgtcaaccagctctccggtaactccggctcttctgcctggtggttt

SEQ ID NO: 86650 - DNA, 75 bp, synthetic construct
  source 1..75: mol_type = other DNA
ttttacatgggattattatatttctaatccctggtttttaaaaattgtgcatagtgaaaatcaaagtaaaggtgt

SEQ ID NO: 86651 - DNA, 75 bp, synthetic construct
  source 1..75: mol_type = other DNA
gtcacaaggatccgcgctcgatggaggtgtatacgcgggtgttcgcgctggacatggccgccacactggctgtgc

SEQ ID NO: 86652 - DNA, 75 bp, synthetic construct
  source 1..75: mol_type = other DNA
acgggcatacagacgcctgatccccgtatatatttttttagctatagtattatggattttacctattctcctgat

SEQ ID NO: 86653 - DNA, 75 bp, synthetic construct
  source 1..75: mol_type = other DNA
gacagtaacggcatgttgagcgaaaccggctgggaaaaattgctcccggtgtgcgacggcgcaatgctcgatctc

SEQ ID NO: 86654 - DNA, 75 bp, synthetic construct
  source 1..75: mol_type = other DNA
caaaacggacggtgataaaggctcacccacgttgaaggcgatctggcaagtagctggaaagcgtctgacgatcaa

SEQ ID NO: 86655 - DNA, 75 bp, synthetic construct
  source 1..75: mol_type = other DNA
gttgctgatttatcgcgctttgagagaggtaatcatcaacctgcgcgcgtgtatcgggtggatctctggcgtaat

SEQ ID NO: 86656 - DNA, 75 bp, synthetic construct
  source 1..75: mol_type = other DNA
atgaatacaacatttgcactcgttctgacagtttatcttgtttccggcgaatctcttgagctggtgactggctta

SEQ ID NO: 86657 - DNA, 75 bp, synthetic construct
  source 1..75: mol_type = other DNA
tttgcaccttcgaaaggcaaacagtatgaagttggtgtgaaatatgtgccggaagatcgcccaattgtgctgacg

SEQ ID NO: 86658 - DNA, 75 bp, synthetic construct
  source 1..75: mol_type = other DNA
atgttgcagaataaaaccacaccggacgcagcagccgccgcgctcactacgctgatgcacgcacttattgatatt

SEQ ID NO: 86659 - DNA, 75 bp, synthetic construct
  source 1..75: mol_type = other DNA
caattccagcaggcttttacgctgacaaatttccaggctggcctgatccaatcggccttttactttggttatttc

SEQ ID NO: 86660 - DNA, 75 bp, synthetic construct
  source 1..75: mol_type = other DNA
agcgtgctggagcagtccacgccgaatcagtggccggagtgggatgtgcccggcgggcagctcaccacgaaaggc

SEQ ID NO: 86661 - DNA, 75 bp, synthetic construct
  source 1..75: mol_type = other DNA
aatattgctgaatatcggcgtagcgtggcaattgatcttatcaacacgctaaatcccacggaggaacagctgttg

SEQ ID NO: 86662 - DNA, 75 bp, synthetic construct
  source 1..75: mol_type = other DNA
tgaagcagcaggaaaatttaagcagacaactgcgagagaaacctgaccatcagctgaaagcctgggcggagaaac

SEQ ID NO: 86663 - DNA, 75 bp, synthetic construct
  source 1..75: mol_type = other DNA
acgttatcgataatgagaaattagaaaacttctctgttgatactcagttgcaaagtaaattcgcaaccggctcgg

SEQ ID NO: 86664 - DNA, 75 bp, synthetic construct
  source 1..75: mol_type = other DNA
cagctgaaagcctgggcggagaaacaggtgctggaaaacccccttcagcgttcagataaccattttctggatgag

SEQ ID NO: 86665 - DNA, 75 bp, synthetic construct
  source 1..75: mol_type = other DNA
cagtaaacagacggtttatcaccactttggtaataaagaaaatttatttatcgaagtactggaatatacctggaa

SEQ ID NO: 86666 - DNA, 75 bp, synthetic construct
  source 1..75: mol_type = other DNA
acggatgcgacgggcagcacccggcagatgacctggagccgctacgggcagttgctggcgttcaccgactgctcg

SEQ ID NO: 86667 - DNA, 75 bp, synthetic construct
  source 1..75: mol_type = other DNA
tgtctgaggttgcagcaaaggatgaatttctgaacattaagaacgtgagccgcgatgacatgatggcagcacacc

SEQ ID NO: 86668 - DNA, 75 bp, synthetic construct
  source 1..75: mol_type = other DNA
atgcagacacttaattcccagcgtaaagctttccttgatatggtggcatggtcagaaggaacagataacggacgg

SEQ ID NO: 86669 - DNA, 75 bp, synthetic construct
  source 1..75: mol_type = other DNA
gcgtgggtggtgatttttacgagatgagtaaccgtgcacaggagagcactgcatcaggcttattgctgacggcac

SEQ ID NO: 86670 - DNA, 75 bp, synthetic construct
  source 1..75: mol_type = other DNA
gctacccggcgttttccccgatgctggttgagtggcttaaagagggctggctgctggcgtcggctgagatgcagc

SEQ ID NO: 86671 - DNA, 75 bp, synthetic construct
  source 1..75: mol_type = other DNA
caacgtgaaagcgcagtttgttcttcgcgccagcgatctccacaacgccaaagccaatatgaaagtgctgcatcc

SEQ ID NO: 86672 - DNA, 75 bp, synthetic construct
  source 1..75: mol_type = other DNA
aaacttgtcacgctacaccccaaactcaaatcaacagccgccggacgttatcagcttctttcacgctggtgggat

SEQ ID NO: 86673 - DNA, 75 bp, synthetic construct
  source 1..75: mol_type = other DNA
tcaaatcaacagccgccggacgttatcagcttctttcacgctggtgggatgcttaccgtaaacagcttggtttga

SEQ ID NO: 86674 - DNA, 75 bp, synthetic construct
  source 1..75: mol_type = other DNA
aagctttcctcgatatgttggcgtggtcagaaggaacggataacgggcgacagccaacccgcaatcacggctacg

SEQ ID NO: 86675 - DNA, 75 bp, synthetic construct
  source 1..75: mol_type = other DNA
ccgatggattacaacggcatgaagctggtgcgcgaaggggctcgcccgatcagcggtgataccggactgcgcgac

SEQ ID NO: 86676 - DNA, 75 bp, synthetic construct
  source 1..75: mol_type = other DNA
atgccagcgcctctgtatggtgcggatgacccgcgcaattgctccggtagctccaaggcggaggtgctggaaaat

SEQ ID NO: 86677 - DNA, 75 bp, synthetic construct
  source 1..75: mol_type = other DNA
cctaacggggccacgctttacttcctaggcaccaatgcccgcacggcccagagttatcacggcaacctgtatctg

SEQ ID NO: 86678 - DNA, 75 bp, synthetic construct
  source 1..75: mol_type = other DNA
cataatcaggtggtggatgcgcaggtaacccactgcaagttcagcgatctccagggcgactcaatagaatggaat

SEQ ID NO: 86679 - DNA, 75 bp, synthetic construct
  source 1..75: mol_type = other DNA
attaaacgtaagatcaaaacgcataataaacaggttatctaccatgtcgtccgactgacggataatgtgactaat

SEQ ID NO: 86680 - DNA, 75 bp, synthetic construct
  source 1..75: mol_type = other DNA
cctatgatattcgcgggaaattaggcgaagaactgaatgaagatatcgcctggcgcattggtcgcgcctatggcg

SEQ ID NO: 86681 - DNA, 75 bp, synthetic construct
  source 1..75: mol_type = other DNA
cagcggcatgatcccgtggctgctggtcgccgaactggtgtgcctgaaaggaaaaacgctgggcgaactggtgcg

SEQ ID NO: 86682 - DNA, 75 bp, synthetic construct
  source 1..75: mol_type = other DNA
atgtgttatttaatttgggttcagcagccgcattcacaacgccatcaggcagacctgagactgacaggacagatt

SEQ ID NO: 86683 - DNA, 75 bp, synthetic construct
  source 1..75: mol_type = other DNA
atatcatttccataaacgaccttagtcgcgatgaccttaatctggtgctggcgacagcggcgaaactgaaagcga

SEQ ID NO: 86684 - DNA, 75 bp, synthetic construct
  source 1..75: mol_type = other DNA
gtgaaaaaaaagaaagtcccggcattattgataaagagttcttcaataaaatcagtgaagatttcgaccctaaga

SEQ ID NO: 86685 - DNA, 75 bp, synthetic construct
  source 1..75: mol_type = other DNA
atgaacgacaaaatcagtcaggacacgatcaacaaagccctgtgggccgcgtgtgatacgttccgtggcaccatc

SEQ ID NO: 86686 - DNA, 75 bp, synthetic construct
  source 1..75: mol_type = other DNA
acacacctcgtgaggcgaaggacaatctcaaatccacgcagatgatgagcgtgattgatgccattggtgaagggc

SEQ ID NO: 86687 - DNA, 75 bp, synthetic construct
  source 1..75: mol_type = other DNA
atgggcaaaggtggcggcaaggggcacacgccggttgaggcaaaggataatctcaaatccacgcagatgatgagc

SEQ ID NO: 86688 - DNA, 75 bp, synthetic construct
  source 1..75: mol_type = other DNA
atgcaggcactaaattcccagcgtaaagctttcctcgatatggtggcatggtcagaaggaacggataacggacgg

SEQ ID NO: 86689 - DNA, 75 bp, synthetic construct
  source 1..75: mol_type = other DNA
aaacatcaatgtcgcgtaaaggtaactgttacgacaacgctccgatggaaagcttctggggaacgctgaaaaatg

SEQ ID NO: 86690 - DNA, 75 bp, synthetic construct
  source 1..75: mol_type = other DNA
tatgggcgtggtggtgccacacggtgtgctgttccgtggctccagcgaaggcaaaattaggcagaaactgattga

SEQ ID NO: 86691 - DNA, 75 bp, synthetic construct
  source 1..75: mol_type = other DNA
ctgtcaggaagaatggttggaaagccagttgatacaagtggcgccataagagctatcgacggagcagtaaacgaa

SEQ ID NO: 86692 - DNA, 75 bp, synthetic construct
  source 1..75: mol_type = other DNA
acccggtcaaccgcggtgcactttgtccgaaaggcgctggcctggtggatttcatccactccgaaagccgtctga

SEQ ID NO: 86693 - DNA, 75 bp, synthetic construct
  source 1..75: mol_type = other DNA
aaactggcctgagccttacattaagattaacggtaattgctctataattggtacagtaattttctcaggaaaacc

SEQ ID NO: 86694 - DNA, 75 bp, synthetic construct
  source 1..75: mol_type = other DNA
agtatgaacataaaattggtgacctgattgccaggtttaaagaggctggtggagtgataaatgaagttgagctat

SEQ ID NO: 86695 - DNA, 75 bp, synthetic construct
  source 1..75: mol_type = other DNA
aacttatccctgccctgtaccctgtggcgaaatgacttatatcttgcgggtgattggtgattcaatgattgatga

SEQ ID NO: 86696 - DNA, 75 bp, synthetic construct
  source 1..75: mol_type = other DNA
tacactcaacaattcacaattgggttattcgttgcgtggcatccagatctcttcaggcaatgcaatatcctttgt

SEQ ID NO: 86697 - DNA, 75 bp, synthetic construct
  source 1..75: mol_type = other DNA
tgaaaaactcacagaaccgccttgctacatgggttccatccattggcgacctgatggctgaagactggcaaatca

SEQ ID NO: 86698 - DNA, 75 bp, synthetic construct
  source 1..75: mol_type = other DNA
tatgcccggattaaattaaaagtttttacgggttatacctcacagatagggcagcagatccagcaggctatttcc

SEQ ID NO: 86699 - DNA, 75 bp, synthetic construct
  source 1..75: mol_type = other DNA
ggacctgattttgcgcacgaaggccgcattgcagaaaaacccaaaaaacatgctgctggccgtatgctggatgca

SEQ ID NO: 86700 - DNA, 75 bp, synthetic construct
  source 1..75: mol_type = other DNA
aatatacccgtcgtggcgttgatgatgacgtgtactggtatatccagtcctacacgcaaccgcaccagttttcgc

SEQ ID NO: 86701 - DNA, 75 bp, synthetic construct
  source 1..75: mol_type = other DNA
catgcagggggattacggcacgctgcagtccagaacgccaagggcggcgtttccgtggaataacgcccgtgacag

SEQ ID NO: 86702 - DNA, 75 bp, synthetic construct
  source 1..75: mol_type = other DNA
tcataacgcccttgccggtgggcttctctgtgcggacggccagtggcggcagattgtcaccattgaggacgccct

SEQ ID NO: 86703 - DNA, 75 bp, synthetic construct
  source 1..75: mol_type = other DNA
ccagtacctatatccctcatcctctgctcagccagcaagctttttcgcgttttgtgcaggactatctggtatttg

SEQ ID NO: 86704 - DNA, 75 bp, synthetic construct
  source 1..75: mol_type = other DNA
tccgtatatcccgaataacgcggggatcctgctggtaccatgctgtcgtggtggttcggcattcacccagggcgc

SEQ ID NO: 86705 - DNA, 75 bp, synthetic construct
  source 1..75: mol_type = other DNA
ctaacaccactaaagggcacgatgagctggtgagctggctgaaaggtcacaagattgaccatgcgcatatctgca

SEQ ID NO: 86706 - DNA, 75 bp, synthetic construct
  source 1..75: mol_type = other DNA
acagaccgcgccgcataacgtgcccacctgcagggagaaagcacgcgccaatattcagaagatgaaaaacatgat

SEQ ID NO: 86707 - DNA, 75 bp, synthetic construct
  source 1..75: mol_type = other DNA
ttcagggcgaaatcattctttgggctgtgcgctggtattgtaaatatggcattagctatcgtgaactgcaggaaa

SEQ ID NO: 86708 - DNA, 75 bp, synthetic construct
  source 1..75: mol_type = other DNA
ctgataacgcagaccggcacggttggttcaatcggtgtcctgatggctcaccgctgcgtcgaaaaggcgctggag

SEQ ID NO: 86709 - DNA, 75 bp, synthetic construct
  source 1..75: mol_type = other DNA
tttacaaaaaagactagaagagctgaacgaatggataaatgaagaagttattaatttcgtgagttattcaattac

SEQ ID NO: 86710 - DNA, 75 bp, synthetic construct
  source 1..75: mol_type = other DNA
agcattcgtgcgatagctactgcgctgaatcgcagtccttcgacgatctcacgtgaagttcagcgtaatcgtaag

SEQ ID NO: 86711 - DNA, 75 bp, synthetic construct
  source 1..75: mol_type = other DNA
aaacgcgaaggccggtgcccgtctgacgttgaacaccgacagattaagtaccggaacaacgtgattgaatgcgat

SEQ ID NO: 86712 - DNA, 75 bp, synthetic construct
  source 1..75: mol_type = other DNA
tggctcttttaagccgaacagataagaaatatgagaataaagaagaggcaagggttattacaataattgaatcgc

SEQ ID NO: 86713 - DNA, 75 bp, synthetic construct
  source 1..75: mol_type = other DNA
ggatattaccaaaaatgcaacgtatggcgttgagatagaaagtctggtgctggaaataaatagtcctgcagcgta

SEQ ID NO: 86714 - DNA, 75 bp, synthetic construct
  source 1..75: mol_type = other DNA
tccgcaatgagcttatcccgttacaggacaggattcgggaaataaacggctggctcggtcaggaggtcatccgct

SEQ ID NO: 86715 - DNA, 75 bp, synthetic construct
  source 1..75: mol_type = other DNA
caggtatcatcaaaccgcccgacacatttcagttcatgggcgcgcaggagcattattccggatcgtatggcaacc

SEQ ID NO: 86716 - DNA, 75 bp, synthetic construct
  source 1..75: mol_type = other DNA
ggataatgatgacatgctcgaagcactcaaacagcttcagtcacgttcagaggacatttttggtaaaagagcccg

SEQ ID NO: 86717 - DNA, 75 bp, synthetic construct
  source 1..75: mol_type = other DNA
acttcgccaaagaagtgggggtggagttgaaaggcgatccgatggtgcttcctaacggggccacgctttacttcc

SEQ ID NO: 86718 - DNA, 75 bp, synthetic construct
  source 1..75: mol_type = other DNA
gctattctgaacgcagttggtcgaaccagcgccttcatcagcggtaaagccccggagatcaaaccctctcccggc

SEQ ID NO: 86719 - DNA, 75 bp, synthetic construct
  source 1..75: mol_type = other DNA
ctgatttctggtctggtgctacatgaccttttaaatggcggtgctgatagttttgcggcgttgggtgagcaggtc

SEQ ID NO: 86720 - DNA, 75 bp, synthetic construct
  source 1..75: mol_type = other DNA
ggaagaatgggaggactttgcgccgttctctgaccgtccgtttaactggcgcccggtctggattggctatgaccc

SEQ ID NO: 86721 - DNA, 75 bp, synthetic construct
  source 1..75: mol_type = other DNA
cgtgagttccagccttacattgaagcgaactggatcaacaatagcaaagtctacgccgtgaagatgaatggtcaa

SEQ ID NO: 86722 - DNA, 75 bp, synthetic construct
  source 1..75: mol_type = other DNA
tgcggagcttttcgctcatctcattgcgcaggtctgccgtatgtacaacaacgcgtttgtggggccggagcgtaa

SEQ ID NO: 86723 - DNA, 75 bp, synthetic construct
  source 1..75: mol_type = other DNA
ggatgttattgaagtttattccggtggcgtgcttgatgttagtggtggtacggcaacaaatgttacccagcacga

SEQ ID NO: 86724 - DNA, 75 bp, synthetic construct
  source 1..75: mol_type = other DNA
gccagagtgcctgaaagcgggctgaagctgtcacgggaaaaaatgacgtatttttctgcggttgagaaggcaatg

SEQ ID NO: 86725 - DNA, 75 bp, synthetic construct
  source 1..75: mol_type = other DNA
aataccagaacctgctgatgtgcgagtttgtggacgatctcgcgtccgtatttccgctcagcgagctgcaggcgt

SEQ ID NO: 86726 - DNA, 75 bp, synthetic construct
  source 1..75: mol_type = other DNA
cctacgatattcgcggaaggctgggcgaagagctgaatgaagatatcgcgtggcgtattggccgcgcttacggcg

SEQ ID NO: 86727 - DNA, 75 bp, synthetic construct
  source 1..75: mol_type = other DNA
tttccgctggcatttgcccttcctgttcctggtcctgttaaccttccgtgccgccgcagcggacacgttattgat

SEQ ID NO: 86728 - DNA, 75 bp, synthetic construct
  source 1..75: mol_type = other DNA
atgaaaaataaaaattctggctttaccgccagcggccccgctcgtcctgaatttatgaacggcgatatttaccgc

SEQ ID NO: 86729 - DNA, 75 bp, synthetic construct
  source 1..75: mol_type = other DNA
tcggcggcggacgtctgcaactgatgttttctcgtaatcgcctgaccactcaggcaaaacaaattcttgctcatt

SEQ ID NO: 86730 - DNA, 75 bp, synthetic construct
  source 1..75: mol_type = other DNA
gcgcaatgcggcgcggtgaccctgatccagcgcttcggcagcgcgctgaacctgaatgttcacttccacatgctg

SEQ ID NO: 86731 - DNA, 75 bp, synthetic construct
  source 1..75: mol_type = other DNA
ttttacccattccgttattaagctatcaggtataagtgacttcaaaatacatagctacattattaaaacaagtga

SEQ ID NO: 86732 - DNA, 75 bp, synthetic construct
  source 1..75: mol_type = other DNA
ttattttccttgcctcgcatatggatgcggtggcctacaccatggcggcaaccagtacgcgtaatctccaggaag

SEQ ID NO: 86733 - DNA, 75 bp, synthetic construct
  source 1..75: mol_type = other DNA
ccgtaacgggactatgtatattcgcggcctgacagctaaatgggatgcagaaaatccacagtgggaagactggat

SEQ ID NO: 86734 - DNA, 75 bp, synthetic construct
  source 1..75: mol_type = other DNA
gacaatcaagggcaaacccgccagtggtcgggacgtattgtctctggaacaggatggcattaaatcgcacaccca

SEQ ID NO: 86735 - DNA, 75 bp, synthetic construct
  source 1..75: mol_type = other DNA
cttgttgttaccgcagcaacctttacccgtgggctttccgcgctgaccggtttacccgataacttcaccgtgcag

SEQ ID NO: 86736 - DNA, 75 bp, synthetic construct
  source 1..75: mol_type = other DNA
ggtgcgacaaaaacgctctctggtgtgctgaacagtgttgccggtaatattgataatgtggcgtcagcagccggt

SEQ ID NO: 86737 - DNA, 75 bp, synthetic construct
  source 1..75: mol_type = other DNA
ttcatcggtgtcagcggacgtgatgggcgggcaggcggagtcctcagtgtcggtgcagatagacgtttatgccgg

SEQ ID NO: 86738 - DNA, 75 bp, synthetic construct
  source 1..75: mol_type = other DNA
gaaaaaaacgcattgctgacgatatgatggaactaattgaaaaatcttttaatctcccacgcggatggatggaca

SEQ ID NO: 86739 - DNA, 75 bp, synthetic construct
  source 1..75: mol_type = other DNA
atggaagaacaggcaaataagattctcatagaactattgcaaaaagccagtaatggaatagacgcggctgtctca

SEQ ID NO: 86740 - DNA, 75 bp, synthetic construct
  source 1..75: mol_type = other DNA
ctgacgccgataagttgcttgctgcctctcgcggagaatttgttgcagggattagcgacccgaatgatccgaaat

SEQ ID NO: 86741 - DNA, 75 bp, synthetic construct
  source 1..75: mol_type = other DNA
accgaaggctggatgctggaaaatacgccggttgtaatggcgggaatggtaggaagtaacgcgggctgggtaaac

SEQ ID NO: 86742 - DNA, 75 bp, synthetic construct
  source 1..75: mol_type = other DNA
atgacagcgcgttatctcggaatgaatcgcagtgatggcctgacggtcactgaccttgagcatatcagccagagt

SEQ ID NO: 86743 - DNA, 75 bp, synthetic construct
  source 1..75: mol_type = other DNA
gaagtggggaaacgtcaattagacgaaatcaatcggatccgctacgaactggaattaatggcagttgctctggct

SEQ ID NO: 86744 - DNA, 75 bp, synthetic construct
  source 1..75: mol_type = other DNA
cgccatttcccaagcctgtcgatcattgttctgactatgaacaacaacccggcgattcttagtgcggtattggat

SEQ ID NO: 86745 - DNA, 75 bp, synthetic construct
  source 1..75: mol_type = other DNA
cgacgaaaactccggtgaattttttgttcaggtctggggaaatggagccaacttcgacaacacgattttgcgccg

SEQ ID NO: 86746 - DNA, 75 bp, synthetic construct
  source 1..75: mol_type = other DNA
gatcctgtttgtgattaccttcatcgtcctcgccgcatcgaagtttatgattatgcgcctggctaagaatgaggg

SEQ ID NO: 86747 - DNA, 75 bp, synthetic construct
  source 1..75: mol_type = other DNA
ccggcacgcagattaacggtgacgaggccacgacgaataacaacggcaaaaccaccgttgacggcaaggattcca

SEQ ID NO: 86748 - DNA, 75 bp, synthetic construct
  source 1..75: mol_type = other DNA
aactcttgctgaaggtcagcgcgtagagttcgaaatcactaacggtgccaaaggcccttctgctgcaaacgtaat

SEQ ID NO: 86749 - DNA, 75 bp, synthetic construct
  source 1..75: mol_type = other DNA
atggatttcagcggtaaaaatgtctgggtaaccggcgcaggtaaaggtatcggctacgccacggcgctggcgttt

SEQ ID NO: 86750 - DNA, 75 bp, synthetic construct
  source 1..75: mol_type = other DNA
ccgtcgcaaaacgtcgggccatgattgtggccaatgctgcactggtgcagtcgaatcatgcagtggcggcctcgg

SEQ ID NO: 86751 - DNA, 75 bp, synthetic construct
  source 1..75: mol_type = other DNA
aggaaagttagaacttttaagtaatgaaatcgaaagccaaaaaatcctcctttcaagaggtattaatttagcttc

SEQ ID NO: 86752 - DNA, 75 bp, synthetic construct
  source 1..75: mol_type = other DNA
tggccacctgaacagaggtgatatgctcacctcagaacaacacaggtgccataatgaaaaaaagaaatttcagcg

SEQ ID NO: 86753 - DNA, 75 bp, synthetic construct
  source 1..75: mol_type = other DNA
actggactgttgctaatattccagcaactgtaacatatttgcccgctgatgcaggaagacgtgatggtacaaaac

SEQ ID NO: 86754 - DNA, 75 bp, synthetic construct
  source 1..75: mol_type = other DNA
ccgtgatggtgcggggatctggaccatctgccgtggagccacccgggtggatggtaagcctgttattcctggcat

SEQ ID NO: 86755 - DNA, 75 bp, synthetic construct
  source 1..75: mol_type = other DNA
agtatgggctctaaaaactgataagattcctgtagattctaattccagcggagcgttagttggttatatgcttaa

SEQ ID NO: 86756 - DNA, 75 bp, synthetic construct
  source 1..75: mol_type = other DNA
tagatgccatcggtaaagatgtgcgtgaacgtgcaaccaaatcttatgacgaggctgaatatgtagtcgataaga

SEQ ID NO: 86757 - DNA, 75 bp, synthetic construct
  source 1..75: mol_type = other DNA
atgaataaactccccgatcatcttcctcggcggtatatcatcaaagctattcatttatgggatgcgggagaaact

SEQ ID NO: 86758 - DNA, 75 bp, synthetic construct
  source 1..75: mol_type = other DNA
gatgaccaaaaacgttaagttcctcgccggttttgccattatctccgtgtttattaccgtgggtatggcagtcgt

SEQ ID NO: 86759 - DNA, 75 bp, synthetic construct
  source 1..75: mol_type = other DNA
aacacagaccgtcaataagaaactggaagaccagagtgcagcgatccagcagatacagaaggttcaggttgatac

SEQ ID NO: 86760 - DNA, 75 bp, synthetic construct
  source 1..75: mol_type = other DNA
tggaaggtgtcagctacataccatacgaagatatcgttggcgtatggactgtatgtcacggacacaccggaaaag

SEQ ID NO: 86761 - DNA, 75 bp, synthetic construct
  source 1..75: mol_type = other DNA
gacgatgccgttgatgtgcttgatatgctaattctggacattatccgcgaagcaaagaaaactgggaaaaaaaaa

SEQ ID NO: 86762 - DNA, 75 bp, synthetic construct
  source 1..75: mol_type = other DNA
cgtattgataatggtgagcacgagtttttttattcttaccagaatattccttttcgtgcctccattgtagaaaca

SEQ ID NO: 86763 - DNA, 75 bp, synthetic construct
  source 1..75: mol_type = other DNA
tttctgctgatgtgttctgggatctgcaggacacggcaacagatgcaggtctgcttaaccagaacgacgttacca

SEQ ID NO: 86764 - DNA, 75 bp, synthetic construct
  source 1..75: mol_type = other DNA
tgcaaaaccagatggacccggtgtacacgccggcgcgaaaaatccacctgtaccactgcgaccatcgcggcctgc

SEQ ID NO: 86765 - DNA, 75 bp, synthetic construct
  source 1..75: mol_type = other DNA
ctttcaccggaagagttgtgggcgttcatcagcccccgcattgccgacaggatcacagacgggggacgcaactgg

SEQ ID NO: 86766 - DNA, 75 bp, synthetic construct
  source 1..75: mol_type = other DNA
gcgaggctctggatgcctgggtatgcagaccaggaatgacacaggagcaggcgacgatattaatcaccgaagcat

SEQ ID NO: 86767 - DNA, 75 bp, synthetic construct
  source 1..75: mol_type = other DNA
tgcagtcagttctattacaccctctatgcgttacgaaaacttgatcgtagtggattcttcgaaagtaaggatgac

SEQ ID NO: 86768 - DNA, 75 bp, synthetic construct
  source 1..75: mol_type = other DNA
gctccggcatacgatcagtcggaaatcaccgctctggcagcagcgacgctggcgctggagatgctgtatattcag

SEQ ID NO: 86769 - DNA, 75 bp, synthetic construct
  source 1..75: mol_type = other DNA
tcactgtcacagcagaagccttacgcttcaggcagatacagagagaatttcgtcaggcactgtctgaaactgctc

SEQ ID NO: 86770 - DNA, 75 bp, synthetic construct
  source 1..75: mol_type = other DNA
cccgcagagcagcaactgaaattaaaaagtttgagaaacgcgatctggcacaggcggttattaatgctgcctacc

SEQ ID NO: 86771 - DNA, 75 bp, synthetic construct
  source 1..75: mol_type = other DNA
atgtttggtattttcaaaaagaaaacccgcagagcagcagcggaaattaaaaagtttgagaaacgtgatctggca

SEQ ID NO: 86772 - DNA, 75 bp, synthetic construct
  source 1..75: mol_type = other DNA
agccattgcatggcacctgcgggaagtgattgggggtgatgatgcgcgctatagccgagtggtgtttaacgaaat

SEQ ID NO: 86773 - DNA, 75 bp, synthetic construct
  source 1..75: mol_type = other DNA
tgtatacgctggatgaactttcctgcccttctgcacgggaaaaagcccgcgactggtaccgtgtgcaccattctg

SEQ ID NO: 86774 - DNA, 75 bp, synthetic construct
  source 1..75: mol_type = other DNA
gcatggatagtctgtggtatcggcatgtttttcatctccagaacttttatcgtgctgtcaaacattagacctgat

SEQ ID NO: 86775 - DNA, 75 bp, synthetic construct
  source 1..75: mol_type = other DNA
acaagtggtaacgtatattggaaagtaataacggattatggtggcaacagtaaacaatttgaggcaaaacctaag

SEQ ID NO: 86776 - DNA, 75 bp, synthetic construct
  source 1..75: mol_type = other DNA
gtgagtgagtcggctaccattctcgacatgtgctgtggcagtcgcatgttctggtttgataagaatgacgaacgg

SEQ ID NO: 86777 - DNA, 75 bp, synthetic construct
  source 1..75: mol_type = other DNA
ccgataccctcaacgtactggccctgaatgcgggccggatcgccgtggatattgatggcattgaactggctgcgc

SEQ ID NO: 86778 - DNA, 75 bp, synthetic construct
  source 1..75: mol_type = other DNA
tttaacagcagtaccggagctggtgcgctgacacagggaagcaccacatatgccatgcacgggcagcagggaaat

SEQ ID NO: 86779 - DNA, 75 bp, synthetic construct
  source 1..75: mol_type = other DNA
aatatcaatattactttgcagataaacaaatgtctgccaggggttcgtatgagtatcgatgcactacgatgggct

SEQ ID NO: 86780 - DNA, 75 bp, synthetic construct
  source 1..75: mol_type = other DNA
ggctggcgatctccgctgcaaccctgcttagtggcgtggtgtgggcgatggtcattatttacggtagtgcactgg

SEQ ID NO: 86781 - DNA, 75 bp, synthetic construct
  source 1..75: mol_type = other DNA
gaaatgaaaaccgcaatggtgctcaaggcgaaagacaccattcgccgcggctgcctggagtacgacgccggggcg

SEQ ID NO: 86782 - DNA, 75 bp, synthetic construct
  source 1..75: mol_type = other DNA
ttgcttgtggcgatttttctgccaaatgtagcgatgcatgtattgaaaaatataacactgggcaactcttcgggt

SEQ ID NO: 86783 - DNA, 75 bp, synthetic construct
  source 1..75: mol_type = other DNA
cgtctaatggtgtcgttgtccattctcacaaacatagcggcgtccagtccggtggtagtaatacaggtggcccgg

SEQ ID NO: 86784 - DNA, 75 bp, synthetic construct
  source 1..75: mol_type = other DNA
cacactgattaccgcaggcatcatgatgtggggcttgggcgagcctgtaggggcgttgaccaacagcctgactca

SEQ ID NO: 86785 - DNA, 75 bp, synthetic construct
  source 1..75: mol_type = other DNA
atgagtttaaacttcaaatggttaaactggctttacaaccaagggtttctgttgcctgcccgggagcatgatatc

SEQ ID NO: 86786 - DNA, 75 bp, synthetic construct
  source 1..75: mol_type = other DNA
aaaatacccgtcagcatttaatgacgggcgtttcacacatgattcccttcgtggtatcgggcggtattttgctgg

SEQ ID NO: 86787 - DNA, 75 bp, synthetic construct
  source 1..75: mol_type = other DNA
tctccggaaatgttccggacaccaccatctggcagcacggcgatgatctgctcgtgcgatcgcgggccatgctgc

SEQ ID NO: 86788 - DNA, 75 bp, synthetic construct
  source 1..75: mol_type = other DNA
ggttaccggtacagacaacgccgcagatgcagccgccgcacgcaaggcgaaggcgctgccgttcggcgggcggct

SEQ ID NO: 86789 - DNA, 75 bp, synthetic construct
  source 1..75: mol_type = other DNA
ggcgatttatctgaagaggaacttgcaattctagatgagattaatggattagtgcttactggcgaaatagctctt

SEQ ID NO: 86790 - DNA, 75 bp, synthetic construct
  source 1..75: mol_type = other DNA
atggttacactggctttacaaccaaggggttctgttgcccgtattgcccgggagcatgatatcaatgataatctt

SEQ ID NO: 86791 - DNA, 75 bp, synthetic construct
  source 1..75: mol_type = other DNA
attaatccgcagacgttcagtgtggaagcggagattgcattgtcggcaaaaggattcggcgtggcgctggacgat

SEQ ID NO: 86792 - DNA, 75 bp, synthetic construct
  source 1..75: mol_type = other DNA
ggtcagtccctgacgctcaggatcaacgggcagaccgtggtcagtggctggctggatcaggtcagtcagcgtatc

SEQ ID NO: 86793 - DNA, 75 bp, synthetic construct
  source 1..75: mol_type = other DNA
ggcaggtcagcccgccatccggccggtgcatgatctgacagcggccgggtttaacatgatgaacagtctgcccgt

SEQ ID NO: 86794 - DNA, 75 bp, synthetic construct
  source 1..75: mol_type = other DNA
atcgtcgtattgcctctctggacagggagatcatcgccctgaaaagtgagatggagctgaaacgggatctggcgc

SEQ ID NO: 86795 - DNA, 75 bp, synthetic construct
  source 1..75: mol_type = other DNA
tgagcagcaggaaatcataaaagagctaagaaacaaaaaagaggcaatggaagatcttgttgcacgttggttggc

SEQ ID NO: 86796 - DNA, 75 bp, synthetic construct
  source 1..75: mol_type = other DNA
acaggtatgcgagttatgatcttagaaggaaaatcgaaatgcagcatgaagagtttcagaaaatgacagagcgcg

SEQ ID NO: 86797 - DNA, 75 bp, synthetic construct
  source 1..75: mol_type = other DNA
aattcaaagccgcactggctgcgaaacaggtacaaattggttgctggtcagcactctctaacccgattagcactg

SEQ ID NO: 86798 - DNA, 60 bp, synthetic construct
  source 1..60: mol_type = other DNA
atgacaaaaacagtatcaaccagtaaaaaaccccgtaaacagcattcgcctgaatttcgc

SEQ ID NO: 86799 - DNA, 75 bp, synthetic construct
  source 1..75: mol_type = other DNA
cagaaattcaagagatcacgagatacgaacggtatacaaaacagcaacaacagttaaggttgcacggtatcccat

SEQ ID NO: 86800 - DNA, 75 bp, synthetic construct
  source 1..75: mol_type = other DNA
ggaacgggaaggcgactggagtgccatgtccggttttcaacaaaccatgcaaatgctgaatgagggcatcgttcc

SEQ ID NO: 86801 - DNA, 75 bp, synthetic construct
  source 1..75: mol_type = other DNA
cgggcgattggtgttgagctggagaccggacgttttgagcagacagtcagggaagttcaggattttatcagtcag

SEQ ID NO: 86802 - DNA, 75 bp, synthetic construct
  source 1..75: mol_type = other DNA
cgcattgagcgacataatctgaatctgagacaacatctggcaaggccgggacggaagtcactgtcgttctcaaaa

SEQ ID NO: 86803 - DNA, 75 bp, synthetic construct
  source 1..75: mol_type = other DNA
attacgccacgagacagatttatgccagtacgcaaaacaacaaagaatactattaaaaattatctggctaacttt

SEQ ID NO: 86804 - DNA, 75 bp, synthetic construct
  source 1..75: mol_type = other DNA
ggctggccgctgtatgaatcacgcctgaagggaaagctgcacgttatcagcaagcgttacactcagcgcattgag

SEQ ID NO: 86805 - DNA, 75 bp, synthetic construct
  source 1..75: mol_type = other DNA
ttctattcccgaaaatactgtcattgcgggagtaccagcaaaaatcataaagaaatacaatcatgagaccaaatt

SEQ ID NO: 86806 - DNA, 75 bp, synthetic construct
  source 1..75: mol_type = other DNA
atggtctctgtggttttattcggcttgttagagatgtcttattgactcgtgtattttaccggaactgtagaatta

SEQ ID NO: 86807 - DNA, 75 bp, synthetic construct
  source 1..75: mol_type = other DNA
agaaagtctgcgcgcatattttcctgccacagagcgcgttctgtttgctgaacattaccaggggccatatcgcgg

SEQ ID NO: 86808 - DNA, 75 bp, synthetic construct
  source 1..75: mol_type = other DNA
acctcaaaacaaatagccgatgcgactggaaagaagaacatggtgtctcactggttcagcggtagccagtggcaa

SEQ ID NO: 86809 - DNA, 75 bp, synthetic construct
  source 1..75: mol_type = other DNA
tccagtcaatgatgacaccgtgtttatacactatgtgggacctacaaaaccctggcatgagtgggctgactatcc

SEQ ID NO: 86810 - DNA, 75 bp, synthetic construct
  source 1..75: mol_type = other DNA
tcttcatggggtcggggtcgacagtgaaagcagcgatggcgctgggacgtcgtgcaactggcgttgaactggaga

SEQ ID NO: 86811 - DNA, 75 bp, synthetic construct
  source 1..75: mol_type = other DNA
gggtacagtgaatatcattgtaagcggcactaacactgcagaaacgactacgactatcacccatccagtcaccgt

SEQ ID NO: 86812 - DNA, 75 bp, synthetic construct
  source 1..75: mol_type = other DNA
gacccgctgcaggggaggtatatcactcaggatccgattgggctgaaggggggatggaatttttatcagtatccg

SEQ ID NO: 86813 - DNA, 75 bp, synthetic construct
  source 1..75: mol_type = other DNA
ccgaaacctcaggaggtttttgttggtcgttgggtgaaaacgaagggagacagcgaacaggccacgcctgagacg

SEQ ID NO: 86814 - DNA, 75 bp, synthetic construct
  source 1..75: mol_type = other DNA
aggccaaagtcttcagttatatcgaccgtgtcgtgttctggaagctggctcactggctggcccgcaaataccgta

SEQ ID NO: 86815 - DNA, 75 bp, synthetic construct
  source 1..75: mol_type = other DNA
tcatccctaaagcgcatggcggcactgatgcagactgcaatctgcagagcctgtgctggccgtgtcataaggcga

SEQ ID NO: 86816 - DNA, 75 bp, synthetic construct
  source 1..75: mol_type = other DNA
ccgacagtatgcggagctgcagagtgaatataagcatctgcggcggtattttggtgtgacggcgcaggtgccgta

SEQ ID NO: 86817 - DNA, 75 bp, synthetic construct
  source 1..75: mol_type = other DNA
agcggtgtgtacgcaaaagtaaaaggtgcgtggcatcgggtgaagagtggtatctgccaggcaattacgtggggg

SEQ ID NO: 86818 - DNA, 75 bp, synthetic construct
  source 1..75: mol_type = other DNA
agccatcgaaaagcaccagaacggcgaactggcaacaccacaccaccagctggtggctatgtggcattcgttaaa

SEQ ID NO: 86819 - DNA, 75 bp, synthetic construct
  source 1..75: mol_type = other DNA
cgggacgaatcagtcgatgccgccgaacgtgcccgcctttatcataatgccgcatcatcagctgcaaccagcgcg

SEQ ID NO: 86820 - DNA, 75 bp, synthetic construct
  source 1..75: mol_type = other DNA
ttcctacccggttatgtttattctataaaagaatgtccactgtcatatgacatcgggatcgaaattcagaaaatc

SEQ ID NO: 86821 - DNA, 75 bp, synthetic construct
  source 1..75: mol_type = other DNA
atggaactccgtggctggtttcctaaaggtagtagtacttatctgctgatgcgagaaacacattacaatgcgggt

SEQ ID NO: 86822 - DNA, 75 bp, synthetic construct
  source 1..75: mol_type = other DNA
attgaggctgagccggggtattacgaggttgcgcttaaccgtaacggctggcagccaacccgtgtcggggatatt

SEQ ID NO: 86823 - DNA, 75 bp, synthetic construct
  source 1..75: mol_type = other DNA
gatgtgcatgtggcagcgaccgccatgctgacaccatccccccgttatatctggactgaaccacaggaggagcag

SEQ ID NO: 86824 - DNA, 75 bp, synthetic construct
  source 1..75: mol_type = other DNA
accgaaagcggtcaaggatgcatacgatctggcaaacggaaaacaaccggcagatgccacgctcactgctctggc

SEQ ID NO: 86825 - DNA, 75 bp, synthetic construct
  source 1..75: mol_type = other DNA
tgcgcaaggtggatttgctccccgacagcatccgtaagccgctgctggaaatgctgcgtgaaaaacgtctgacgc

SEQ ID NO: 86826 - DNA, 75 bp, synthetic construct
  source 1..75: mol_type = other DNA
atgaaactgactctgacgccggaagctgacagcgttaacgtgcaggcgctgaacatgggacgaattgtcgttgac

SEQ ID NO: 86827 - DNA, 75 bp, synthetic construct
  source 1..75: mol_type = other DNA
gaagcatataactcagagaatcaatattttaccagagaggactatacgtataattacgaccttttaaatgcaata

SEQ ID NO: 86828 - DNA, 75 bp, synthetic construct
  source 1..75: mol_type = other DNA
gaaacactaaaatgcattaagccactgcattcaatgggcggaactggtgaaagaagcggtccagatatatggggg

SEQ ID NO: 86829 - DNA, 75 bp, synthetic construct
  source 1..75: mol_type = other DNA
gccgtaagcgaggctgtgcaggcacaacgacggacagttcgggctactgcgataagcatcgcggcgaaggttgga

SEQ ID NO: 86830 - DNA, 75 bp, synthetic construct
  source 1..75: mol_type = other DNA
acataatctgaatctgagacaacatctggcaaggctgggacggaagtcactgtcgttctcaaaatcggtggagct

SEQ ID NO: 86831 - DNA, 75 bp, synthetic construct
  source 1..75: mol_type = other DNA
atgaaactggccctgacgttggaagccgacagcattaatgtgcaggcactgaacatggggcgaattgtcgctgac

SEQ ID NO: 86832 - DNA, 75 bp, synthetic construct
  source 1..75: mol_type = other DNA
ctactcccttcgtgttgttgatgaatctgaccggaccgcaactgacagcatgcccccctccgctgccctgagcgg

SEQ ID NO: 86833 - DNA, 75 bp, synthetic construct
  source 1..75: mol_type = other DNA
cataactacgaagaagcctcaccacaaccctgtgccatgactttacggccttttgaggctgtctggtggttacag

SEQ ID NO: 86834 - DNA, 75 bp, synthetic construct
  source 1..75: mol_type = other DNA
acagcgtggtggaaaaaagcgtcaccacgcgggactacaactaccgcaccgccacggcggagatgatgacagagc

SEQ ID NO: 86835 - DNA, 75 bp, synthetic construct
  source 1..75: mol_type = other DNA
ctggacatcatgctgccgggcaatcgccccttcgttgccccccagtgccgttattcaggcccgccagcgcctggg

SEQ ID NO: 86836 - DNA, 75 bp, synthetic construct
  source 1..75: mol_type = other DNA
gttgttcatcggactgctcagtcagcgtctggttcagctgatatgtccccactgtcgtcatccatggaatgacgt

SEQ ID NO: 86837 - DNA, 75 bp, synthetic construct
  source 1..75: mol_type = other DNA
gaccatcgcggcctgccgctggcgctcatcagcacggaaggggcaacagcgtggtgcgcagaatatgatgaatgg

SEQ ID NO: 86838 - DNA, 75 bp, synthetic construct
  source 1..75: mol_type = other DNA
acttctctcctcgtcacgcgacgaagcccgttacgaagtgcgtcttgaaccccgtatggcgctgcttacccgcag

SEQ ID NO: 86839 - DNA, 75 bp, synthetic construct
  source 1..75: mol_type = other DNA
ctcactctgggcatatctgagtgagggttttggctatacagtcgaagagccaaccttctcagacttcgtgttgaa

SEQ ID NO: 86840 - DNA, 75 bp, synthetic construct
  source 1..75: mol_type = other DNA
tgccacaaattgcaactcctgatacagataagtttgaagttccaatcccctgcccggataatccggaaaaatccc

SEQ ID NO: 86841 - DNA, 75 bp, synthetic construct
  source 1..75: mol_type = other DNA
aaaaacatctgcgtgccgtccaggaatatctgacccgcctgcgcgcacgtcatcaggggcgtgtgggagactttg

SEQ ID NO: 86842 - DNA, 75 bp, synthetic construct
  source 1..75: mol_type = other DNA
atgactaatcttccccactggtggcaaaacggcgttatctaccagatttatccaaagagttttcaggacaccacg

SEQ ID NO: 86843 - DNA, 75 bp, synthetic construct
  source 1..75: mol_type = other DNA
atggcggatctgtacagtcatcgctgggaaatcgaactgggatacagggagataaaacagacgatgcaactgagc

SEQ ID NO: 86844 - DNA, 75 bp, synthetic construct
  source 1..75: mol_type = other DNA
gaggatgatgtcgcattaatgatggcttcagcggggattccgggaggtgtgagatatgtcccagccggttggtga

SEQ ID NO: 86845 - DNA, 75 bp, synthetic construct
  source 1..75: mol_type = other DNA
aggggaagggccttcccgagagtggtaaaggagaggccctggaaataccccacagccccgaaaaagagccagtca

SEQ ID NO: 86846 - DNA, 75 bp, synthetic construct
  source 1..75: mol_type = other DNA
ccggggatgggctacctatcaccgacacgtcgtggcgaaagaaacatttaattatgtcgacacccaaatctggcg

SEQ ID NO: 86847 - DNA, 75 bp, synthetic construct
  source 1..75: mol_type = other DNA
gtgtgttctggcgcacaccggatacaccagagaacgatgcagccttccctcgccagacacatgccgggaccccgg

SEQ ID NO: 86848 - DNA, 75 bp, synthetic construct
  source 1..75: mol_type = other DNA
tcaacaacaccggtggtattcttttgccccgtcgtcgtctcttcaccattgaatcaccgccggaaggacgtattc

SEQ ID NO: 86849 - DNA, 75 bp, synthetic construct
  source 1..75: mol_type = other DNA
atctgaatctgagacaacatctggcaaggctgggacggaagttactgccgttctcaaaatcggtggagctgcatg

SEQ ID NO: 86850 - DNA, 75 bp, synthetic construct
  source 1..75: mol_type = other DNA
ataatacgacgcacagaacgtattcccggaagctgtagtgaatggaaagaggtggcattaccccttaaagccagg

SEQ ID NO: 86851 - DNA, 75 bp, synthetic construct
  source 1..75: mol_type = other DNA
tgtactcgctgtcacaccagaccagtgacttcggtgaatcagaatggattcattttaccggtaccggttatctgt

SEQ ID NO: 86852 - DNA, 75 bp, synthetic construct
  source 1..75: mol_type = other DNA
cccttttccagctcgatccagagcgcgctcatgagtttacttttcagcaattacgccgtattacaggaacgccgt

SEQ ID NO: 86853 - DNA, 75 bp, synthetic construct
  source 1..75: mol_type = other DNA
gatatcgttttctacaaagtgctgattgcactggagatgttgttacctgttggtctgtatgtgtcagttggcgtg

SEQ ID NO: 86854 - DNA, 75 bp, synthetic construct
  source 1..75: mol_type = other DNA
tgcgacttcagcagctggatcagcaactgctgcggctaacagccagaaagctgcgaagacgagtgaaactaacgc

SEQ ID NO: 86855 - DNA, 75 bp, synthetic construct
  source 1..75: mol_type = other DNA
tgagacaggcatgagtggttataaatcatatttgataaaatattctgaacctgagttggttagcttttttgaaaa

SEQ ID NO: 86856 - DNA, 75 bp, synthetic construct
  source 1..75: mol_type = other DNA
ggagcagaccatccgccgtattctgcaacgaccggaaggtatcatcaccctgtcagggccgaccggctccggaaa

SEQ ID NO: 86857 - DNA, 75 bp, synthetic construct
  source 1..75: mol_type = other DNA
atgacgagatttatcgccgtaggagggagatgaaggaagaactgagcagtctgggggatttgaagtcgattagga

SEQ ID NO: 86858 - DNA, 75 bp, synthetic construct
  source 1..75: mol_type = other DNA
gttcactggttttgttggcagccgtgagcctgccgctgcacgcggcttcccccgttaaagtcggttcaaaaatcg

SEQ ID NO: 86859 - DNA, 75 bp, synthetic construct
  source 1..75: mol_type = other DNA
cagagagcgcaagaagctttttcttgaagcacaagagctattgtagttttgcacttcctgcttattttgactttg

SEQ ID NO: 86860 - DNA, 75 bp, synthetic construct
  source 1..75: mol_type = other DNA
aagatgagggagtggagcttctgggggccacctactccgggatgactgacgtcatcaagggaacacaatttgatc

SEQ ID NO: 86861 - DNA, 75 bp, synthetic construct
  source 1..75: mol_type = other DNA
acaggctgatgcacaggaactgaaaaatgcccgcgaagaagggctggtactggaaacggaattgtttaccttcat

SEQ ID NO: 86862 - DNA, 75 bp, synthetic construct
  source 1..75: mol_type = other DNA
cgtagtgcagtgacctgtcaccattgtgaagatgcgccctgcgcccgtagctgccctaatggcgcaatcagccac

SEQ ID NO: 86863 - DNA, 75 bp, synthetic construct
  source 1..75: mol_type = other DNA
cgtgatggaccgcatgaccatgaacggtggtcgctgggtgaattttaactgggagagctggcgcacgaatgtcat

SEQ ID NO: 86864 - DNA, 75 bp, synthetic construct
  source 1..75: mol_type = other DNA
agtatccgttgaatcccatacaagtgatagacccaatggggttagatgcgattgagaatatgacatcaggtggac

SEQ ID NO: 86865 - DNA, 75 bp, synthetic construct
  source 1..75: mol_type = other DNA
cacaaacggctggtaaaaaaccaacgccggaacaattatcacagggtgaattggctattaaccttgctgatcacg

SEQ ID NO: 86866 - DNA, 75 bp, synthetic construct
  source 1..75: mol_type = other DNA
ggacaggatccgcgagataaacggctggctcggtcaggaggtcatccgctttaaagattacagtctagaatctaa

SEQ ID NO: 86867 - DNA, 75 bp, synthetic construct
  source 1..75: mol_type = other DNA
caatccgtcgcgccaccaccgccagcggcaaccgcccgacctatgaagccagccgtagcgaagaagccagccacg

SEQ ID NO: 86868 - DNA, 75 bp, synthetic construct
  source 1..75: mol_type = other DNA
acaggcgcaaccgtaaccagcataaatcaggctgcggctaaaatggcgcgggcaggaatcctggtcgttgatggt

SEQ ID NO: 86869 - DNA, 75 bp, synthetic construct
  source 1..75: mol_type = other DNA
aggaaaggtgagcacgaacctgattttcaaggagtgtcgccagagtgccgtgatgaaacgggtattgatgttttg

SEQ ID NO: 86870 - DNA, 75 bp, synthetic construct
  source 1..75: mol_type = other DNA
aaccacagacagttctggttactgcgataaacatcgtggcgaaggatgggtacagcatcaacgcggactgagccg

SEQ ID NO: 86871 - DNA, 75 bp, synthetic construct
  source 1..75: mol_type = other DNA
atatgaaataaaaatgtatgtcgataagaataagaatggtctgatagcattatatggtggagagtattattcact

SEQ ID NO: 86872 - DNA, 75 bp, synthetic construct
  source 1..75: mol_type = other DNA
acgactggcacgggtcaaccgttacagccagaccggcaacgaggcagaccttaatccgaacgtcgctaaccgcaa

SEQ ID NO: 86873 - DNA, 75 bp, synthetic construct
  source 1..75: mol_type = other DNA
gccggtgcggtactggaacgcagtaagcgctatccgcaacgttttgcactgaaaaccacgccgccggtaggcaac

SEQ ID NO: 86874 - DNA, 75 bp, synthetic construct
  source 1..75: mol_type = other DNA
tccccccctcagctgccctgagcggcatacgctgcagcaccgcacatatcacggaaacagacaacgcctggctgt

SEQ ID NO: 86875 - DNA, 75 bp, synthetic construct
  source 1..75: mol_type = other DNA
atgatcccgttaccttccgggacaaaaatttggctggttgccggtatcaccgatatgagaaatggcttcaacggc

SEQ ID NO: 86876 - DNA, 75 bp, synthetic construct
  source 1..75: mol_type = other DNA
atctcactaaaggaaataaaactgtagtgggaacaggcacagcctggggagtgacggcgaacggcgtccttccag

SEQ ID NO: 86877 - DNA, 75 bp, synthetic construct
  source 1..75: mol_type = other DNA
gcaaagtgttcctgacgccagcgcagctggcgatgctgatggaaggtatcgactggagacagccgaagcggttgc

SEQ ID NO: 86878 - DNA, 75 bp, synthetic construct
  source 1..75: mol_type = other DNA
acattgataatgggagtcagcctattttcgttatgcgtccgactaacaacgacggacagactgctatctatacgc

SEQ ID NO: 86879 - DNA, 75 bp, synthetic construct
  source 1..75: mol_type = other DNA
ggcagtcagatcaaactgctctggtctaccggcgacgggttgtgcctgctgaccaaacggctggagcgtggtcgc

SEQ ID NO: 86880 - DNA, 75 bp, synthetic construct
  source 1..75: mol_type = other DNA
atgccgccacgaatcccaaaagcctgccgtgttcgcggttgccgccataccaccacagatccgtcaggctattgt

SEQ ID NO: 86881 - DNA, 75 bp, synthetic construct
  source 1..75: mol_type = other DNA
attgcagaaacgactaaaggaactaaatcactggcttggtgagaaagtagttaactttaaaacttatgccttaaa

SEQ ID NO: 86882 - DNA, 75 bp, synthetic construct
  source 1..75: mol_type = other DNA
ttgtagcccggcaacacggtgtggcagccagccagctatttctctggcgcaagcaataccaggagggaagtctta

SEQ ID NO: 86883 - DNA, 75 bp, synthetic construct
  source 1..75: mol_type = other DNA
cggaagaggcggcagcgaaagcggcggcagatgctaaagcgaaggccgaagcggatgataaagctgcggaagaag

SEQ ID NO: 86884 - DNA, 75 bp, synthetic construct
  source 1..75: mol_type = other DNA
ggatcggttatgacccggcaaaaggtacacagaacggcgacagtgccggatgcgtggtggtggctccgccagccg

SEQ ID NO: 86885 - DNA, 75 bp, synthetic construct
  source 1..75: mol_type = other DNA
ctgtgtctgctgaccaaacggctggagcgtggccgcttcgcctggccgtcggcccgcgatgacaaaggcgactga

SEQ ID NO: 86886 - DNA, 75 bp, synthetic construct
  source 1..75: mol_type = other DNA
gaagggaaagatttcaaagagattgacctgctggcgcgccagtctgagcgccacgcgcggatcggcaagtttaac

SEQ ID NO: 86887 - DNA, 75 bp, synthetic construct
  source 1..75: mol_type = other DNA
ccgtctggagtttgacgccggacacaccgacatagcgcagtcctttatggcaatccgtcgcgccaccaccgccag

SEQ ID NO: 86888 - DNA, 75 bp, synthetic construct
  source 1..75: mol_type = other DNA
tgccaggtagttgagagcccagcaggttcacgtaaatggtacaaatacgagcgtaagacaggttgtattgcgtcg

SEQ ID NO: 86889 - DNA, 75 bp, synthetic construct
  source 1..75: mol_type = other DNA
ggtccttctgtgggaacgcctgtatgatgaagggggattagaagccctcactgacagccgacgcgggagaaaaac

SEQ ID NO: 86890 - DNA, 75 bp, synthetic construct
  source 1..75: mol_type = other DNA
gttcgaatggaacgaccacacctggaatgctggccctgattcgctggcccgtctttatccggtggtaatggctgc

SEQ ID NO: 86891 - DNA, 75 bp, synthetic construct
  source 1..75: mol_type = other DNA
gaaagccacaaaagcgaaggctggaaacaatacaagccaggacaatcccgtcaccagcgcggctacggttcgaag

SEQ ID NO: 86892 - DNA, 75 bp, synthetic construct
  source 1..75: mol_type = other DNA
ctatgtggaatgcgtacagacagatcgttggtatgagccgccagtgagtttcgacgggctggcgcgcacctttcg

SEQ ID NO: 86893 - DNA, 75 bp, synthetic construct
  source 1..75: mol_type = other DNA
cggtatggctattcacaagaaatggcgacagacctatttttccacgccatccagtctgacacacagtgcttatcc

SEQ ID NO: 86894 - DNA, 75 bp, synthetic construct
  source 1..75: mol_type = other DNA
gaagaaaaaagcagaagcagaagccgccaaagccgcagccgaagcgcagaaaaaagccgaggcagcagctgcggc

SEQ ID NO: 86895 - DNA, 75 bp, synthetic construct
  source 1..75: mol_type = other DNA
agatgcagacagtaacctgcagagtctgtgctggccctgtcataaagcaaaaacagcgcgcgaacgcatcaattg

SEQ ID NO: 86896 - DNA, 75 bp, synthetic construct
  source 1..75: mol_type = other DNA
atgaagctgggcgggacgccgctggtcgagtatacgcgggacaggctgcaccgtgagacggtgcgcagcttcggc

SEQ ID NO: 86897 - DNA, 75 bp, synthetic construct
  source 1..75: mol_type = other DNA
gagctggtgttcaccgccggcagtgccacggttactccgaaactgaatggagtggctggcccggcattccaggtt

SEQ ID NO: 86898 - DNA, 75 bp, synthetic construct
  source 1..75: mol_type = other DNA
ggcatcgatctttcattgggctccgtggtggctttttctggtgtcgccgtaggtatttgcgccacgctgggcctg

SEQ ID NO: 86899 - DNA, 75 bp, synthetic construct
  source 1..75: mol_type = other DNA
cagcgtgatggcagacaacagcgcaacggtgtctccgacggtcactacagagccggacggcacggtggagatcag

SEQ ID NO: 86900 - DNA, 75 bp, synthetic construct
  source 1..75: mol_type = other DNA
gatggcctatgacagtcgccctaaagaaattcgtgatggttggttgatgtggttgggattaggtgaaccagcata

SEQ ID NO: 86901 - DNA, 75 bp, synthetic construct
  source 1..75: mol_type = other DNA
ggtaactttcgtcattattaccgctggcatcgatctttcattgggctccgtggtggctttttctggtgtcgccgt

SEQ ID NO: 86902 - DNA, 75 bp, synthetic construct
  source 1..75: mol_type = other DNA
gaacatcctgacggtggctggtttgaatacgaacccgccaccgggcgctggtatgtcaggggcatcaaatcaatg

SEQ ID NO: 86903 - DNA, 75 bp, synthetic construct
  source 1..75: mol_type = other DNA
atgcaaactgcaaccatgaacgcacaactcacagaaattatgcgccttatcaccaatctgatccgcaccggcatt

SEQ ID NO: 86904 - DNA, 75 bp, synthetic construct
  source 1..75: mol_type = other DNA
atgaaactttccctgatgcccgaagccgacagccttaacgtacaggcactgaacatgggacgtattgtcgttgac

SEQ ID NO: 86905 - DNA, 75 bp, synthetic construct
  source 1..75: mol_type = other DNA
tgcgccttatcaccaacctgatccgcactggggtagtcaccgaagtggaccgggagaactggctttgccgggtga

SEQ ID NO: 86906 - DNA, 75 bp, synthetic construct
  source 1..75: mol_type = other DNA
gatttaccggggcatattatcagttgaataatgacaactttgcaccaggaaaaacggcggcagattatacgtttt

SEQ ID NO: 86907 - DNA, 75 bp, synthetic construct
  source 1..75: mol_type = other DNA
gcaacagcagatgagcgtctgaaggaagttcttgcagaagacacttccctgccgggaaaaatcagggaatgccat

SEQ ID NO: 86908 - DNA, 75 bp, synthetic construct
  source 1..75: mol_type = other DNA
gatggctctgtttgttttatggaaggacaacaccacgccggggaaattactggttaaggagattaacttcgtaag

SEQ ID NO: 86909 - DNA, 75 bp, synthetic construct
  source 1..75: mol_type = other DNA
aggtgacatggtacgggtgggacggtgacaggctgacgacgatacagaccggcaccacgcgtatccagacggtgt

SEQ ID NO: 86910 - DNA, 75 bp, synthetic construct
  source 1..75: mol_type = other DNA
agagctactccgccggatattcgctggtggtccgcgtggtggctaatgatcgtagtgggttgttacgtgatatca

SEQ ID NO: 86911 - DNA, 75 bp, synthetic construct
  source 1..75: mol_type = other DNA
tcagcaaggaagggacaacagaatggtgcgcagaatacgatgaatggggcaacctgctgaatgaagagaacccgc

SEQ ID NO: 86912 - DNA, 75 bp, synthetic construct
  source 1..75: mol_type = other DNA
catgagagaactgacgaagatagttggtctgtcccggtcaactatctatgaaaagctaaatcccgaatccaggta

SEQ ID NO: 86913 - DNA, 75 bp, synthetic construct
  source 1..75: mol_type = other DNA
aaaatcgacaacgactttgagccgaagctgattcaaaccgtgcgcggcgtgggttacatgcttgaggtgccggat

SEQ ID NO: 86914 - DNA, 75 bp, synthetic construct
  source 1..75: mol_type = other DNA
cttctggaagaattacaaaaaactatctcaggaggatgtcttttcgttgtccctgtggcagacatattgtccgaa

SEQ ID NO: 86915 - DNA, 75 bp, synthetic construct
  source 1..75: mol_type = other DNA
aggcgtggggccgttaatcgccaccgctgccgttgccacgatgggagacgcctccgcctttaagtcgggacggga

SEQ ID NO: 86916 - DNA, 75 bp, synthetic construct
  source 1..75: mol_type = other DNA
gaacatggggcgcattgtcgttgacgtcggtggtgttactctcgctgaactgattaacgtggtctgcgataacgg

SEQ ID NO: 86917 - DNA, 75 bp, synthetic construct
  source 1..75: mol_type = other DNA
aaggcgtgaaggtggtgaaggacagcgccagtcttgggccgcagataattacagctgtatcgaccatcgcatctg

SEQ ID NO: 86918 - DNA, 75 bp, synthetic construct
  source 1..75: mol_type = other DNA
gaacatggggcgcattgtcgttgacgtcgatggtgttactctcgctgaactgattaacgtagtctgcgataacgg

SEQ ID NO: 86919 - DNA, 75 bp, synthetic construct
  source 1..75: mol_type = other DNA
catggattccgtggtaataatttctctgatgccggttctccttttatttctatgggagggtgtaataaatatgtg

SEQ ID NO: 86920 - DNA, 75 bp, synthetic construct
  source 1..75: mol_type = other DNA
gtactgaactggatctgtctgccctgaacagctggacagccagaaaaaccttcggtcttaagcgtgccgagttct

SEQ ID NO: 86921 - DNA, 75 bp, synthetic construct
  source 1..75: mol_type = other DNA
gcaaagtgttccttacgcaggcgcaactggcgatgctgctggagggtatagtctggatgcaaccgggaaggtcga

SEQ ID NO: 86922 - DNA, 75 bp, synthetic construct
  source 1..75: mol_type = other DNA
tccgtgccgcagattgccgccatgttgcagatgaaacgcccgacagtgcagagctggaaacagcgcgacggctgg

SEQ ID NO: 86923 - DNA, 75 bp, synthetic construct
  source 1..75: mol_type = other DNA
ccttcgcaacatcgggcttttcattagtcttcttcctgctattaggcgggattttatggtttattcccgtgggac

SEQ ID NO: 86924 - DNA, 75 bp, synthetic construct
  source 1..75: mol_type = other DNA
cgacaaacgcttcattgtttcaccgaaattcgatcgtcggacaaaacaaggtaaagctgacgaagaagcatttct

SEQ ID NO: 86925 - DNA, 75 bp, synthetic construct
  source 1..75: mol_type = other DNA
atgaagtcgatatatttaaaatctgttctggcttttatatttgttggcgttatggctatgttgatatgtggtctt

SEQ ID NO: 86926 - DNA, 75 bp, synthetic construct
  source 1..75: mol_type = other DNA
caacctataccgcctataccaaaggcagtgggcttactgcgaagctgttaatgcaaaactggaatgaagatttgc

SEQ ID NO: 86927 - DNA, 75 bp, synthetic construct
  source 1..75: mol_type = other DNA
tgcgccttatcaccaacctgatccgcactggggtagtcaccgaagtggacaggacaaactggctttgccgggtga

SEQ ID NO: 86928 - DNA, 75 bp, synthetic construct
  source 1..75: mol_type = other DNA
aggccagacaggcgctgtccatttatctgaacctgcccacactggatgaggccgtgaataccctgaaaccctggt

SEQ ID NO: 86929 - DNA, 75 bp, synthetic construct
  source 1..75: mol_type = other DNA
ttaatgaagtttattgtgaatataatggcgtgaccgctgataaaaatatccgatttggagggcagacgaatactg

SEQ ID NO: 86930 - DNA, 75 bp, synthetic construct
  source 1..75: mol_type = other DNA
tcatttatttggtcatgtcaggaatttcagaatatggcacaaggcattgactgatgctcaggtgggggagttaat

SEQ ID NO: 86931 - DNA, 75 bp, synthetic construct
  source 1..75: mol_type = other DNA
aacagagatgattactcacaaggcttatttctgggatatagccacgatatctcagactcgagccaattatctctc

SEQ ID NO: 86932 - DNA, 75 bp, synthetic construct
  source 1..75: mol_type = other DNA
atgaagtcgatatatttaaaatctgttctggcttttatatttgttggcgttatggctatgattgtatgtattcct

SEQ ID NO: 86933 - DNA, 75 bp, synthetic construct
  source 1..75: mol_type = other DNA
gccttgtattatccctccagtgcagagaaaatcggccagttttctctgcctgcagtccgcatgccgtatcgggcc

SEQ ID NO: 86934 - DNA, 75 bp, synthetic construct
  source 1..75: mol_type = other DNA
gcaagtcataatacaaggtgggacaaaactgagacacataaggcctcacaatggcttgcaaggctttacatgttt

SEQ ID NO: 86935 - DNA, 75 bp, synthetic construct
  source 1..75: mol_type = other DNA
atgaacacaaaaatcaaatacggcctgtcggctgccgttctggcgttgattgccgcaggggcttctgcgcctgaa

SEQ ID NO: 86936 - DNA, 75 bp, synthetic construct
  source 1..75: mol_type = other DNA
atggtaagcccgtcataccgggaatgaagctgtcgaaggaagaatgcgaccaggttaacgctattgaacgtgata

SEQ ID NO: 86937 - DNA, 75 bp, synthetic construct
  source 1..75: mol_type = other DNA
gatatatgacggcggcagggactgtcggaaccgctcaaataactgttacgggcaggtatcgcggcgtgaccagga

SEQ ID NO: 86938 - DNA, 75 bp, synthetic construct
  source 1..75: mol_type = other DNA
atggaaaacccgtttttcccggtatgaaactgtcgaaggaaaaatgcgaccaggttaacgccattgaacgtgata

SEQ ID NO: 86939 - DNA, 75 bp, synthetic construct
  source 1..75: mol_type = other DNA
tccgcgaagtgctgaatacagacgtgccggacagtgaatgtgtttttgccgtggtgctgacccgcggggatgtgc

SEQ ID NO: 86940 - DNA, 75 bp, synthetic construct
  source 1..75: mol_type = other DNA
accggtcgggtgacggagcaggtcaacccggaggggctggactaccgctttgagtacggagagagccgggtaatc

SEQ ID NO: 86941 - DNA, 75 bp, synthetic construct
  source 1..75: mol_type = other DNA
gccagcccatgcctttactggcaaatacaccgtttattgtcaccggctccggcaaattcttccgtaacgtccagc

SEQ ID NO: 86942 - DNA, 75 bp, synthetic construct
  source 1..75: mol_type = other DNA
ataattgtgtacaggcatcggtgaacggacaggaggttatcatttctgggcctggcgttggttacaataaaaaat

SEQ ID NO: 86943 - DNA, 75 bp, synthetic construct
  source 1..75: mol_type = other DNA
actcgctgtcacaccagaccagtgacttcggtgaatcagaatggattcattttaccggcagcggctatctgttac

SEQ ID NO: 86944 - DNA, 75 bp, synthetic construct
  source 1..75: mol_type = other DNA
catcaaagtgccattgaccgaaccccagaaagcggggatcgcgtcattctgtccgtacaacattggtcccggtaa

SEQ ID NO: 86945 - DNA, 75 bp, synthetic construct
  source 1..75: mol_type = other DNA
gaaaccgctgattttggctcttacgaagtaaaaggcaataaggttgagtttgaagtgttcaatcctgaagaccgt

SEQ ID NO: 86946 - DNA, 75 bp, synthetic construct
  source 1..75: mol_type = other DNA
tgtcagctgcggttctggcgctgattgctgcaggtgcgtctgctcctcaaatacttgaccagtttctggatgaaa

SEQ ID NO: 86947 - DNA, 75 bp, synthetic construct
  source 1..75: mol_type = other DNA
gaaatattgcaaaagaaaaaacaatgcgtggatggtctgatgattatgtgtgctgcgattgcggatacaacgact

SEQ ID NO: 86948 - DNA, 75 bp, synthetic construct
  source 1..75: mol_type = other DNA
gcccgtgaatttaccatgacgcagtccgcaccgctgatggtgctgccggatccggatgagtttgtggtggtgcag

SEQ ID NO: 86949 - DNA, 75 bp, synthetic construct
  source 1..75: mol_type = other DNA
atagaagataaagggcaggagcgatacctgcatatcacattgtcatttgcagaaaatgaaatttcagaagaaact

SEQ ID NO: 86950 - DNA, 75 bp, synthetic construct
  source 1..75: mol_type = other DNA
acctggcagggactttccctggatgacggccaggataacgccggttatgtgaagttcgggcatggcagtgcacaa

SEQ ID NO: 86951 - DNA, 75 bp, synthetic construct
  source 1..75: mol_type = other DNA
gccgcattcgttcaaataactgttacggtcaggttattcgtcgtgaccaggagagcgcattaacctgctggggga

SEQ ID NO: 86952 - DNA, 75 bp, synthetic construct
  source 1..75: mol_type = other DNA
tcgttctgcctcctgctcgttatgtgcgttcctatgcacctgcacagcaaagtgttgcggcagggagcgaatgga

SEQ ID NO: 86953 - DNA, 75 bp, synthetic construct
  source 1..75: mol_type = other DNA
ccagaagccgatccccgagacaatgcgcggggctctgtactcgttcgcgtataacgttggcgctggcaacttcca

SEQ ID NO: 86954 - DNA, 75 bp, synthetic construct
  source 1..75: mol_type = other DNA
atcaccgtcctggaaaatctgcagcgggaaggctttcagccgttcttcgcctgccagacccgtgtgcgcgacccg

SEQ ID NO: 86955 - DNA, 75 bp, synthetic construct
  source 1..75: mol_type = other DNA
cagacgttgatgatctggtgaaagttccgcaattttccctgaactggggggaatcgccacaggaaatacttgatc

SEQ ID NO: 86956 - DNA, 75 bp, synthetic construct
  source 1..75: mol_type = other DNA
tgatttgtggatggcatgtcgtggaattaacctgcatcaggctatgcaggaagcgaaagcatttctcggtatcaa

SEQ ID NO: 86957 - DNA, 75 bp, synthetic construct
  source 1..75: mol_type = other DNA
gtgtcgcctgccgtggtacagggggctccggatatcacccgggaaatccagcaggatatcgcccggcgaatgagg

SEQ ID NO: 86958 - DNA, 75 bp, synthetic construct
  source 1..75: mol_type = other DNA
aatagcagctaccgccttttctctacagaaatgaataacctcaataaacgtatgggggacattcgcgacagtgga

SEQ ID NO: 86959 - DNA, 75 bp, synthetic construct
  source 1..75: mol_type = other DNA
ggaaaacgtatccatacccgtgccattcacagcattgacactgacattaagctcaaccgcgcattgtgggtgatg

SEQ ID NO: 86960 - DNA, 75 bp, synthetic construct
  source 1..75: mol_type = other DNA
agcaacgattcgctgtttgtcctgatctacgagctggacgacgaaagcgaggttgagcagcctgaaatgtggatc

SEQ ID NO: 86961 - DNA, 75 bp, synthetic construct
  source 1..75: mol_type = other DNA
atggtaaacctgttattccgggcatgaaactgacgaaggaaaaatgcgctcaggttaatgccattgaacgcgata

SEQ ID NO: 86962 - DNA, 75 bp, synthetic construct
  source 1..75: mol_type = other DNA
gacgccgttgcaaatgctgcggcgttttttttgagcctaaatatcacaatcaaacgtggtgcagcgatgaatgtc

SEQ ID NO: 86963 - DNA, 75 bp, synthetic construct
  source 1..75: mol_type = other DNA
gttggcgtgcgtatggctgttcacccggacgatccgccgcgcccgatcctcggcctgccgcgcattgtttccacc

SEQ ID NO: 86964 - DNA, 75 bp, synthetic construct
  source 1..75: mol_type = other DNA
gccgacattctgacgccacgacgccgggaggattacggtaaggacctgtggagtacttatcagaccatccaggag

SEQ ID NO: 86965 - DNA, 75 bp, synthetic construct
  source 1..75: mol_type = other DNA
caccaccgccgacattctgacgccgcgacgccgggaggattacggtaaggacctgtggagcgcatatcagaccat

SEQ ID NO: 86966 - DNA, 75 bp, synthetic construct
  source 1..75: mol_type = other DNA
ttgaaggtacaaacccgagtcttgccattgtggatgaatatcacctgcaccctgacaacggggtttattccgcgc

SEQ ID NO: 86967 - DNA, 75 bp, synthetic construct
  source 1..75: mol_type = other DNA
agaaccccgccaataaaaaccgcgccatctatcgccagtgggtaaaggcgggctggatacgcacaacaccgggtg

SEQ ID NO: 86968 - DNA, 75 bp, synthetic construct
  source 1..75: mol_type = other DNA
aaaaggatttctctctggttgagagaatgctggccgatagtgaacgctaccggactggcccgcggtttacgtttt

SEQ ID NO: 86969 - DNA, 75 bp, synthetic construct
  source 1..75: mol_type = other DNA
cgtaccctctggaccaggcctttccgctgctgatgaaacaactgaaattaatgctcaccagtggtgaactgaatc

SEQ ID NO: 86970 - DNA, 75 bp, synthetic construct
  source 1..75: mol_type = other DNA
tcgattgttttgcgctgtaattcgtaagatcgttaataagcatggacatgttatacacccaacgaaaacaaaatt

SEQ ID NO: 86971 - DNA, 75 bp, synthetic construct
  source 1..75: mol_type = other DNA
tggtgcgaatctttctgattcatgctcgagcgccatattttcgtgctctctgttcgttttttgcgatggtgtatc

SEQ ID NO: 86972 - DNA, 75 bp, synthetic construct
  source 1..75: mol_type = other DNA
attatcccgacgacaacaacgaccgctcctggtgggggctaccctgcaccgtgacgccctgtttcagggcacgtc

SEQ ID NO: 86973 - DNA, 75 bp, synthetic construct
  source 1..75: mol_type = other DNA
gttacatcaccgaagaagacgcccgcgggcaaatcaatgagttgaaagccaacggcaccgaagcggtggtcggcg

SEQ ID NO: 86974 - DNA, 75 bp, synthetic construct
  source 1..75: mol_type = other DNA
gagttccagcttcctgcaggcaaagtctggctatcaccggtggtggactgcttcgatggaaaagttgtgagctgg

SEQ ID NO: 86975 - DNA, 75 bp, synthetic construct
  source 1..75: mol_type = other DNA
gatgagcggaaattacgaggtgaatcacctgaaactgtaatagcaatttttaatcgtgaactacagaatatattc

SEQ ID NO: 86976 - DNA, 75 bp, synthetic construct
  source 1..75: mol_type = other DNA
tctctcaacctgtggatgagagacttacgcgtgcagccatattcctggttgtgactattaatcccggtaaagcgg

SEQ ID NO: 86977 - DNA, 75 bp, synthetic construct
  source 1..75: mol_type = other DNA
cataccacctggaccaggcctttccgctgctgatgaaacaactgaaattaatgctcaccagcggtgaactgaatc

SEQ ID NO: 86978 - DNA, 75 bp, synthetic construct
  source 1..75: mol_type = other DNA
ttccgaattgtctgcgctgcagcgtattgagcatcttgccctcctgaaacggcgtgcagaacaggcagaatccag

SEQ ID NO: 86979 - DNA, 75 bp, synthetic construct
  source 1..75: mol_type = other DNA
gaaacaactggcgcatggcgatttcggtccatcgtttaaatataaagattattcggtcaatgacctggttgcatc

SEQ ID NO: 86980 - DNA, 75 bp, synthetic construct
  source 1..75: mol_type = other DNA
gcgtaaagacgagccgacacagtcttctgatcctggcagccagccaaacagcgaagaacaagctggtggggagga

SEQ ID NO: 86981 - DNA, 75 bp, synthetic construct
  source 1..75: mol_type = other DNA
tcgccatcttcctttaaattttctacagcatcagctattgcgtgtggtactcgagcctcaagctttttggatttt

SEQ ID NO: 86982 - DNA, 75 bp, synthetic construct
  source 1..75: mol_type = other DNA
agttcaattctatacatatagacgaaggtggggtttttaatagtttacgctttgaaaaatgtctttttcaaagct

SEQ ID NO: 86983 - DNA, 75 bp, synthetic construct
  source 1..75: mol_type = other DNA
gtgtcagacaaactccatgagacaaattatcccgacgaccataacgaccgcatctggtggggactcccctgctcc

SEQ ID NO: 86984 - DNA, 75 bp, synthetic construct
  source 1..75: mol_type = other DNA
gtatgttaaagggctgacctgccatgcggacaccctcggcagctgtggttacgtttatctggctgtttatccgac

SEQ ID NO: 86985 - DNA, 75 bp, synthetic construct
  source 1..75: mol_type = other DNA
tattctgtatgcgtcattcccggtcaccttactggcgatcgccaactttgtcggcacaccgtttgatgtcaccgg

SEQ ID NO: 86986 - DNA, 75 bp, synthetic construct
  source 1..75: mol_type = other DNA
gccgcgttattctgtattgcctgatatattcacacctataaatttagggctatttaaaaactgccaagactggtc

SEQ ID NO: 86987 - DNA, 75 bp, synthetic construct
  source 1..75: mol_type = other DNA
ggactacaccagagcgtatttcagttgaagaaattgatgaaataaaatttatccagaatccttccgaacagagat

SEQ ID NO: 86988 - DNA, 75 bp, synthetic construct
  source 1..75: mol_type = other DNA
ccttcttatagtgatgacagaggggtattctgtgaagtattgaaaacgaaaaacgcgggccagttttcgtttttt

SEQ ID NO: 86989 - DNA, 75 bp, synthetic construct
  source 1..75: mol_type = other DNA
ttacattcaaacgaaagtctctattagaagatgttatcaaaggtcttgctgaacagtcttaccctttgagtgaaa

SEQ ID NO: 86990 - DNA, 75 bp, synthetic construct
  source 1..75: mol_type = other DNA
ccgtgatggtgcaggtatctggaccatctgccgtggtgccatcatggtggatggcaaacctgtcgttccgggcat

SEQ ID NO: 86991 - DNA, 75 bp, synthetic construct
  source 1..75: mol_type = other DNA
ttgtgctggatctgtttgaaggtctggtatggatggacggtgaaggccaggtgcagcccgctcaggctgaacgct

SEQ ID NO: 86992 - DNA, 75 bp, synthetic construct
  source 1..75: mol_type = other DNA
taacatttaaacgtaagcacctgctgtgtaaggttatagagtctatattaaatcaaacagtcaagccaatggaga

SEQ ID NO: 86993 - DNA, 75 bp, synthetic construct
  source 1..75: mol_type = other DNA
gggccattaatatctagagatgtaattcaatgtattggttatcccaatcctaatttctttattttttatgacgat

SEQ ID NO: 86994 - DNA, 75 bp, synthetic construct
  source 1..75: mol_type = other DNA
gttaatggatgatgaccttttgcctgagtctgattgtttggaaaatcttttggctactggatgtgatggaattat

SEQ ID NO: 86995 - DNA, 75 bp, synthetic construct
  source 1..75: mol_type = other DNA
tcaattatgtagatctctctaatgcgaaagatggcagaatatactcaattgaaaaattatcatttaatgatgctc

SEQ ID NO: 86996 - DNA, 75 bp, synthetic construct
  source 1..75: mol_type = other DNA
ccttgctcccgaaactcatctccggcgagctatccctggaagatcttccggatctcaccaccgatacagaagccg

SEQ ID NO: 86997 - DNA, 75 bp, synthetic construct
  source 1..75: mol_type = other DNA
gcggcaatcatttcgctgaactgcaacaagttgatcaaatcatcaacgctgaactgtttgcactggcaggtctgg

SEQ ID NO: 86998 - DNA, 75 bp, synthetic construct
  source 1..75: mol_type = other DNA
ctgcagtaattacagggttgacctggccgcttagcctcattccatccatcataagtctcatgattcgtaaatccg

SEQ ID NO: 86999 - DNA, 75 bp, synthetic construct
  source 1..75: mol_type = other DNA
tctctgggacggttgaaagtggatataaagttgttgcaccaatttattcaacaacagttggtgaagttgcagaat

SEQ ID NO: 87000 - DNA, 75 bp, synthetic construct
  source 1..75: mol_type = other DNA
tagaatatgatcttgactctgtattcataattaaccctaagaaaaaaaccgttaaagatattattgagttaaaaa

SEQ ID NO: 87001 - DNA, 75 bp, synthetic construct
  source 1..75: mol_type = other DNA
tgataaaaatatagaagaactagcgagaattgctgatggtggagcatatcctgctataaaacctgatgatatttg

SEQ ID NO: 87002 - DNA, 75 bp, synthetic construct
  source 1..75: mol_type = other DNA
gagcggggcgggctttccattcgtgcctggctgcctgttccggtaacgcgggcgcagggcacgataaaagaaggg

SEQ ID NO: 87003 - DNA, 75 bp, synthetic construct
  source 1..75: mol_type = other DNA
gccgcttgaaggcacagagacggtgctgacctattacaagtcggggacctttgcgacggaggcaatccgctggcc

SEQ ID NO: 87004 - DNA, 75 bp, synthetic construct
  source 1..75: mol_type = other DNA
ttctttaaagagtttgaatcaataaatagtattactttaccattaattatttttgaaatgaatgaacgtaagcct

SEQ ID NO: 87005 - DNA, 75 bp, synthetic construct
  source 1..75: mol_type = other DNA
taaaacctgtgatatctattttatgaatggcattgtttttaaacactatcctttaatgaaagtaatatccgccca

SEQ ID NO: 87006 - DNA, 75 bp, synthetic construct
  source 1..75: mol_type = other DNA
caggcagcgatccacaagagctggcaggcgacggcgtgttccttgatcatagcgagcgctacgaagcctcggcgg

SEQ ID NO: 87007 - DNA, 75 bp, synthetic construct
  source 1..75: mol_type = other DNA
ccggttgatcacggttatctgcaacaaattgcgcaagcggcggatcgtcttggctataccggtgtgctgatccca

SEQ ID NO: 87008 - DNA, 75 bp, synthetic construct
  source 1..75: mol_type = other DNA
accttttttctggcttgcatccagtcgccatttccaggtatagtttttccgctgtcgcaaaatcggcagccggaa

SEQ ID NO: 87009 - DNA, 75 bp, synthetic construct
  source 1..75: mol_type = other DNA
acctgtccaatacaaaatgggttgataatgtgaaaagtggtgcctatcaatcgtggattgaacagaactatgagg

SEQ ID NO: 87010 - DNA, 75 bp, synthetic construct
  source 1..75: mol_type = other DNA
gtgcggtgtctggcgatgtaaaaacctgtgccggtcgtcgtgatgctatcagcagcattaactctgtaacacgac

SEQ ID NO: 87011 - DNA, 75 bp, synthetic construct
  source 1..75: mol_type = other DNA
atccgtaaacgtcaggaagatacaaaaacggaaacgcaggcgcttaatgatgaatggcgaaacctgtttcgtgag

SEQ ID NO: 87012 - DNA, 75 bp, synthetic construct
  source 1..75: mol_type = other DNA
acagcacatggaacccctgctttatacatcgccatgagcaagggtaataaagacgtcgtgttatcttatatatca

SEQ ID NO: 87013 - DNA, 75 bp, synthetic construct
  source 1..75: mol_type = other DNA
gaacctaaattcagtgacatcattcagatagctaaaattacgggtgcagacttaaacaccttagcttatggctat

SEQ ID NO: 87014 - DNA, 75 bp, synthetic construct
  source 1..75: mol_type = other DNA
ccttttgcggcgtgaagtttcccaacccgttctgcctctcttcttcgccggtaggcaactgctatgagatgtgtg

SEQ ID NO: 87015 - DNA, 75 bp, synthetic construct
  source 1..75: mol_type = other DNA
gaaatggtgccggagttcatcgagaagatggacgaagcgctggcggaaatcggcttcacgttcggggagcagtgg

SEQ ID NO: 87016 - DNA, 75 bp, synthetic construct
  source 1..75: mol_type = other DNA
atgatgcctgaacgcattaatccccttttttctggcttgcatcctgcagtcatttccaggtatagttttcccgct

SEQ ID NO: 87017 - DNA, 75 bp, synthetic construct
  source 1..75: mol_type = other DNA
aacgggtgcgtctgtggccagtctctgggggaagtacgtgttccgcaccggggaaatgtggtggacagagtcatt

SEQ ID NO: 87018 - DNA, 75 bp, synthetic construct
  source 1..75: mol_type = other DNA
ttacttcagattcgtctgccagaacggctgcgtctgcggtcagtctctgggagaagtgcgtgttccgcaccgggg

SEQ ID NO: 87019 - DNA, 75 bp, synthetic construct
  source 1..75: mol_type = other DNA
tgtggagttaagcctgataactggagccataattatgcgaactactggcgtgagatgtgcgatatttttaagagt

SEQ ID NO: 87020 - DNA, 75 bp, synthetic construct
  source 1..75: mol_type = other DNA
ttattacattattcaaacagttgcccatactccctgaaaaagaaatcattgaaataataactgcgcagaatagcg

SEQ ID NO: 87021 - DNA, 75 bp, synthetic construct
  source 1..75: mol_type = other DNA
tggagcgctggaaatcggcccaaagcgttgccgaacgtttcggtatttcggtggctgagttacgcaaactcaacc

SEQ ID NO: 87022 - DNA, 75 bp, synthetic construct
  source 1..75: mol_type = other DNA
gtacaaaatgaacaatcaagacctctgcctgatgtggctcagcgtctgatgcagcatcttgcagagcatggcatt

SEQ ID NO: 87023 - DNA, 75 bp, synthetic construct
  source 1..75: mol_type = other DNA
aagatggcaggcaaaatagtgcgttacaaatgcaggatcaccacagttttgcatatcggatcaatcatccgctgg

SEQ ID NO: 87024 - DNA, 75 bp, synthetic construct
  source 1..75: mol_type = other DNA
tactggctgttctgcaccaaattcagttgcaaggtcagaacatcagtgaaagtttcccattatatcccggaagtg

SEQ ID NO: 87025 - DNA, 75 bp, synthetic construct
  source 1..75: mol_type = other DNA
ggcatcgacggcgatgtcagactcaaccgcgccctgtgggtgatggctgaaaacatgttgcaactggcctcataa

SEQ ID NO: 87026 - DNA, 75 bp, synthetic construct
  source 1..75: mol_type = other DNA
taaaaaacagtggtacacgcgtctgatgtgggtacagcatctggcagggctcctgccggtgacgggaagggaaac

SEQ ID NO: 87027 - DNA, 75 bp, synthetic construct
  source 1..75: mol_type = other DNA
cagtatttaatgttgtgggtgaaaatggccaggtaactgaagctgtcctgacccaggatggccctgtactggaga

SEQ ID NO: 87028 - DNA, 75 bp, synthetic construct
  source 1..75: mol_type = other DNA
tgctttcattttttatactatttgcctgtaatgagacagctgtttacggttctgatgaaaacattatttttatga

SEQ ID NO: 87029 - DNA, 75 bp, synthetic construct
  source 1..75: mol_type = other DNA
gacaatatggcggtcaccggcttttaccgggtgcccctgtcctctgcacaggcgggcgatatcctgctgtgctgc

SEQ ID NO: 87030 - DNA, 75 bp, synthetic construct
  source 1..75: mol_type = other DNA
gatggggtatttatgaggaattcaatgaattcaaatgtttgtatgttgtatgataaaatggcattaatacatctt

SEQ ID NO: 87031 - DNA, 75 bp, synthetic construct
  source 1..75: mol_type = other DNA
atggataagccgacgcgtggccgtgtacgcaaggtggatttgctccccgacagcatccgtaagccgctgctggaa

SEQ ID NO: 87032 - DNA, 75 bp, synthetic construct
  source 1..75: mol_type = other DNA
attactgggggaaatcctcaaaaagcctgacgaaaggaaatgatattcatctgttgatttatcattgcctggatg

SEQ ID NO: 87033 - DNA, 75 bp, synthetic construct
  source 1..75: mol_type = other DNA
gttacgaaatggatccccagctcctgacacactttaaccagcatctggattcattattcggggtctattcgaagc

SEQ ID NO: 87034 - DNA, 75 bp, synthetic construct
  source 1..75: mol_type = other DNA
ctcacgccgtcagaaatctggttgcttaccgatctgactgaagattcaacgctggtcgatggctttctggctcag

SEQ ID NO: 87035 - DNA, 75 bp, synthetic construct
  source 1..75: mol_type = other DNA
aatctctggctgccggcgttggctttaaccttaactcattgggttcattatcttttgatgtcacacgatctgatg

SEQ ID NO: 87036 - DNA, 75 bp, synthetic construct
  source 1..75: mol_type = other DNA
gtgacgggtgccgcggcgggcgacacagttaccgttacactgggtggcaacacctacaccgctacggtgcaggct

SEQ ID NO: 87037 - DNA, 75 bp, synthetic construct
  source 1..75: mol_type = other DNA
caggccgagttaaagcagaagcaagctgaagaggcggcagcgaaagcggcggcagatgctaaagcgaaggccgaa

SEQ ID NO: 87038 - DNA, 75 bp, synthetic construct
  source 1..75: mol_type = other DNA
gcacactggaaactaccggcggcacattcggcgagatgtttctgacttccagagggatgatcagtattcccataa

SEQ ID NO: 87039 - DNA, 75 bp, synthetic construct
  source 1..75: mol_type = other DNA
cctgaaagtgtggatgaacacaaaaaggccaacgcctttgctggcagtgccctgagtcacgcggcgctgccgtaa

SEQ ID NO: 87040 - DNA, 75 bp, synthetic construct
  source 1..75: mol_type = other DNA
caggtcgtccccagcgtattcggggaagagaaacacacatccagaagcgagaactatacctggatccccaccatc

SEQ ID NO: 87041 - DNA, 75 bp, synthetic construct
  source 1..75: mol_type = other DNA
tgccagtaagggagcgggttgcagaaagctgccagctggcgatgtggtggttgccaactcaaacgttcgaggcga

SEQ ID NO: 87042 - DNA, 75 bp, synthetic construct
  source 1..75: mol_type = other DNA
tttttcgctaatgagcgtattgacgaagtgtatttagctgctgcaaaagttggcggaatagttgcgaataatact

SEQ ID NO: 87043 - DNA, 75 bp, synthetic construct
  source 1..75: mol_type = other DNA
ccgcgtcagcgccactgatgccctgcgagcctgtatgcgtctgacaccgggccgtatcatcatgactgagcttag

SEQ ID NO: 87044 - DNA, 75 bp, synthetic construct
  source 1..75: mol_type = other DNA
agcgtgaaattgatctgtctcgcctttacaatgagtatcgtgattatgtaagtaaggacttgccttcacaacgag

SEQ ID NO: 87045 - DNA, 75 bp, synthetic construct
  source 1..75: mol_type = other DNA
gggccattctgggtatagaaggtccaccaataccggatgcacgcgccacccggcttgagatactctgttctcaga

SEQ ID NO: 87046 - DNA, 75 bp, synthetic construct
  source 1..75: mol_type = other DNA
gcgcgtgaccgatatcactagcggtgcgacatatccggtgctgattgaaagtataacagtggaagtgaataaccc

SEQ ID NO: 87047 - DNA, 75 bp, synthetic construct
  source 1..75: mol_type = other DNA
atcatgtacctgcttgcaggtcagatcgccggtggtgacttcaccctgccacaatacagggatgaagtgttaaag

SEQ ID NO: 87048 - DNA, 75 bp, synthetic construct
  source 1..75: mol_type = other DNA
cctgaaagtgtggatgaacacaaaaaggcaaatgcctttgccggcacagccctgagtcacgcggctctgccgtaa

SEQ ID NO: 87049 - DNA, 75 bp, synthetic construct
  source 1..75: mol_type = other DNA
gtgagcaattcctttgcgcctaacatcactttttcggtgctgtatacccgtaacggtcagtacagttttcagaac

SEQ ID NO: 87050 - DNA, 75 bp, synthetic construct
  source 1..75: mol_type = other DNA
cattatgtacccggtatttttggggaagaccggcatacctcccgcagtgaacgctatacgtatatccccaccatc

SEQ ID NO: 87051 - DNA, 75 bp, synthetic construct
  source 1..75: mol_type = other DNA
ggattagtatccgccagaacgggtatgaaatttaccagagtacgctacctccaggcccgttcgagataaacgata

SEQ ID NO: 87052 - DNA, 75 bp, synthetic construct
  source 1..75: mol_type = other DNA
tgaaatcggccattgaaggctggggcgtatgtggcaccacgacaacatttggcgatccccgacgcgcctgggtga

SEQ ID NO: 87053 - DNA, 75 bp, synthetic construct
  source 1..75: mol_type = other DNA
acgaaacagtgcgtcgctatgggcatgagagtggcgagatttggcaccggatgcagaaaaatctgccgggtgatt

SEQ ID NO: 87054 - DNA, 75 bp, synthetic construct
  source 1..75: mol_type = other DNA
cggcgttccgcgagtcggtattgcgcagttccaaggggttccagtaccttcacacccgcgacttcgttaccgcgc

SEQ ID NO: 87055 - DNA, 75 bp, synthetic construct
  source 1..75: mol_type = other DNA
tcaggtgaccacacagggcaacctggttcaggcgggcggactctggcacggaatggtatcgattactttacctcc

SEQ ID NO: 87056 - DNA, 75 bp, synthetic construct
  source 1..75: mol_type = other DNA
ggcattaaaaacgtatgaaaagtaccgggctgacattaacaaaaaaattaatgcaaaagatcgtgcagcgattgc

SEQ ID NO: 87057 - DNA, 75 bp, synthetic construct
  source 1..75: mol_type = other DNA
gccgggtgctgaggacgtactgccagcgccgctgccgccgtaccgggtgcttaccgggatggcggaccgcttcgg

SEQ ID NO: 87058 - DNA, 75 bp, synthetic construct
  source 1..75: mol_type = other DNA
catcaacggaagatcagtttgccgatcgggcaaaagagatgctggggcagtttgttcaggagcggggacataaaa

SEQ ID NO: 87059 - DNA, 75 bp, synthetic construct
  source 1..75: mol_type = other DNA
gtacccggattcagctgtgattcaccggtgacaccggccatggcctatttcctcagtaccctggacagcatcgtc

SEQ ID NO: 87060 - DNA, 75 bp, synthetic construct
  source 1..75: mol_type = other DNA
agttcgggcatggcagtgcacaacatgtgcgtgccggtttccgtctgggcagccacaacgatatgagctctggta

SEQ ID NO: 87061 - DNA, 75 bp, synthetic construct
  source 1..75: mol_type = other DNA
cctatggtttaccgaccattgtgactaattgctctaacaattatggtccttatcatttcccggaaaaattgattc

SEQ ID NO: 87062 - DNA, 75 bp, synthetic construct
  source 1..75: mol_type = other DNA
accactactatggggactcgtcaaggacatacagccattatatttccacaatctgattttttgagttttcgttat

SEQ ID NO: 87063 - DNA, 75 bp, synthetic construct
  source 1..75: mol_type = other DNA
acagcgggagtatttgttgggaatatcagatcgcgataacacagtgggcgtggaatgaatttaatactcaatccg

SEQ ID NO: 87064 - DNA, 75 bp, synthetic construct
  source 1..75: mol_type = other DNA
acaacgaatacacaggtaacggcgttacgacatcatttccgtataccttccgtattttcaaaaaatccgacctgg

SEQ ID NO: 87065 - DNA, 75 bp, synthetic construct
  source 1..75: mol_type = other DNA
gcgcagcaaaccttatccgtcgcgaccgcccgttaacccgtgaggagctgtttcgcgtggtgcccagtgtgttca

SEQ ID NO: 87066 - DNA, 75 bp, synthetic construct
  source 1..75: mol_type = other DNA
gatgcattaccggtatttccgatagagcaaccggaagtccctgaaggtatagttaaaaagaaagaaaaaacgaaa

SEQ ID NO: 87067 - DNA, 75 bp, synthetic construct
  source 1..75: mol_type = other DNA
atatattctggcatccattcgattatcattgcgtgctacaggcctttctgaactggaagggttagtattgacttg

SEQ ID NO: 87068 - DNA, 75 bp, synthetic construct
  source 1..75: mol_type = other DNA
acacgatcgacctgctttgctggcgctattacggcagaacagcaggcgttaccgaggcggtgatcgatgccaata

SEQ ID NO: 87069 - DNA, 75 bp, synthetic construct
  source 1..75: mol_type = other DNA
gctcaaccagctgcctgcaacggttgaccgcgcttcaattgaactgaagttcgatgccgctaaaggcaagctgac

SEQ ID NO: 87070 - DNA, 75 bp, synthetic construct
  source 1..75: mol_type = other DNA
cacctgtatttactgaacagacggcagaatcagcccccgccggaataaattcatctgccgtcgaaacacatatcc

SEQ ID NO: 87071 - DNA, 75 bp, synthetic construct
  source 1..75: mol_type = other DNA
gctattagccgctacggtatgcctgatcctgatgtccttagtggaaagaaacgttcctctttttctgctcctctt

SEQ ID NO: 87072 - DNA, 75 bp, synthetic construct
  source 1..75: mol_type = other DNA
gttaaggataaatgggatgaggatgaaatcctggagcggggtaaaaagttgggggaaattgcattgaaagtatgg

SEQ ID NO: 87073 - DNA, 75 bp, synthetic construct
  source 1..75: mol_type = other DNA
tcaaactgtggccaacttttcgggatcaaactcattttattcaaagttttaatgttgaaaatattgacgatctcc

SEQ ID NO: 87074 - DNA, 75 bp, synthetic construct
  source 1..75: mol_type = other DNA
ttgaaacagtggccgccgggctgttatttgtctctgtacagtcggtggcagtggatataccgatcaaaattacag

SEQ ID NO: 87075 - DNA, 75 bp, synthetic construct
  source 1..75: mol_type = other DNA
accacgctggctgagttcagccaacgcagccgcgccgcctacagtggacaacagatgctggaggagtatgtcaac

SEQ ID NO: 87076 - DNA, 75 bp, synthetic construct
  source 1..75: mol_type = other DNA
gaagaaagagagtctttatctttttctgagagcagatttcagataaatttattttatatacaaaaaaaatttgaa

SEQ ID NO: 87077 - DNA, 75 bp, synthetic construct
  source 1..75: mol_type = other DNA
gctgtgggttgagcaccaggataaggggcggctggagctgaacttcctgatcccgaacacggagctgctgaccgg

SEQ ID NO: 87078 - DNA, 75 bp, synthetic construct
  source 1..75: mol_type = other DNA
ctggtaacatggatgaagaacatagaacctggttttgcgcacgttatgcctggtattgccaacagatgatgcagg

SEQ ID NO: 87079 - DNA, 75 bp, synthetic construct
  source 1..75: mol_type = other DNA
ccatctgcatgatggcaggaggcctgggggtgcagtctgtatacgccgaaccattggtcattcaggagcaaggaa

SEQ ID NO: 87080 - DNA, 75 bp, synthetic construct
  source 1..75: mol_type = other DNA
agctctcaattatttgaggtattagatcatctgcttaggactcagcaagacatggcccttaaaaagggacaggca

SEQ ID NO: 87081 - DNA, 75 bp, synthetic construct
  source 1..75: mol_type = other DNA
tcttcgtccggtaccacaggttcgacagcttcactcatgtcaatcaacaactggagcaatggatagccgatgtgg

SEQ ID NO: 87082 - DNA, 75 bp, synthetic construct
  source 1..75: mol_type = other DNA
gtggttgcgatggcatttgccggtttcctctatatccaccacggtgctgaggttgccagtctgtttgtcacgggt

SEQ ID NO: 87083 - DNA, 75 bp, synthetic construct
  source 1..75: mol_type = other DNA
gcgaccatcaaattacgtaactgggattacgattccttagatgccattactcgtggtgaagtggatattggtttt

SEQ ID NO: 87084 - DNA, 75 bp, synthetic construct
  source 1..75: mol_type = other DNA
ctcccgtttgatgaaagccagcaaaaaaagctggaagtcccttttacccttctgtggcataaacggaacagccgt

SEQ ID NO: 87085 - DNA, 75 bp, synthetic construct
  source 1..75: mol_type = other DNA
tcagccggggagcttcgcgccgctcatccgcatcgaaacagacaacggcgagcgggagaaagcgcagcgccgcag

SEQ ID NO: 87086 - DNA, 75 bp, synthetic construct
  source 1..75: mol_type = other DNA
gctgggaacagagcgatacctgggcgctggacaatgtgttacaggagctggggcgcgaacgcacgattgctatga

SEQ ID NO: 87087 - DNA, 75 bp, synthetic construct
  source 1..75: mol_type = other DNA
tgaaatcattcgctatcggttacacggtacgcgatgtcgccaaaggcagctggatcgacgaatccacggtcacgc

SEQ ID NO: 87088 - DNA, 75 bp, synthetic construct
  source 1..75: mol_type = other DNA
ctggcccgccgtctgcagcttgaccactggccggtgctgataacggacagtggtatcagcagtgtggtgatgccg

SEQ ID NO: 87089 - DNA, 75 bp, synthetic construct
  source 1..75: mol_type = other DNA
ttacgacccaatcatgatggaaagtcagttttccccgcaattagttgccgaacatttgggggtgctgaaacggcg

SEQ ID NO: 87090 - DNA, 75 bp, synthetic construct
  source 1..75: mol_type = other DNA
cctccgctatgtccttgacgtcatagccgactggccgataaaccgggtcggcgaactgctcccctggcgcgtagc

SEQ ID NO: 87091 - DNA, 75 bp, synthetic construct
  source 1..75: mol_type = other DNA
gcgcggttgggaaacgcatctcaccattgtgaccgaggcgctggtaccgacacctgcctttttcccgttaatcga

SEQ ID NO: 87092 - DNA, 75 bp, synthetic construct
  source 1..75: mol_type = other DNA
ctgccgtcgccctgctggtctgggggactcatattgttcgaaccggcgtaatgcgcgtcttcggcgcgcgtttgc

SEQ ID NO: 87093 - DNA, 75 bp, synthetic construct
  source 1..75: mol_type = other DNA
agcttaaaaacgagcgcgaacgcggcgacgttattgatacagcgttttgtatatacgtgctttcaaaattggcga

SEQ ID NO: 87094 - DNA, 75 bp, synthetic construct
  source 1..75: mol_type = other DNA
gcctccgggctggccggtattcttcgaggccggtattctcacccccgtctgggctatcgccatcgagcgtgagaa

SEQ ID NO: 87095 - DNA, 75 bp, synthetic construct
  source 1..75: mol_type = other DNA
tatgggcattggtcatgtgcgttaccctacggctggcagctccagcgcctctgaagcgcagccgttttacgttaa

SEQ ID NO: 87096 - DNA, 75 bp, synthetic construct
  source 1..75: mol_type = other DNA
aacttcagatatcaaaccaacataaatacattatttaatctgttcaatagcctggtcagggggtctgacgctcag

SEQ ID NO: 87097 - DNA, 75 bp, synthetic construct
  source 1..75: mol_type = other DNA
actggctgcaactgattgtggtgtcggtaatcggcgtgctggcgttcttcgttaaccactaccgcgacaacgcca

SEQ ID NO: 87098 - DNA, 75 bp, synthetic construct
  source 1..75: mol_type = other DNA
agttcatttatcacacaaaatcacctctgacaatatataagcagatgcataaaggtaatgtcagattaaatattg

SEQ ID NO: 87099 - DNA, 75 bp, synthetic construct
  source 1..75: mol_type = other DNA
tgaagctgggcgacacgccgctgctggagtacgcgcgcgaccgcctgcacagagaaacggtgcgcagctttggca

SEQ ID NO: 87100 - DNA, 75 bp, synthetic construct
  source 1..75: mol_type = other DNA
gtgagaacccgagcaattcacaggcgacatatgacgcgccacgcgtctttttttgtgtcgcaatcaatgccacag

SEQ ID NO: 87101 - DNA, 75 bp, synthetic construct
  source 1..75: mol_type = other DNA
tataaaaaataaggacttaatatttacaggcggtggagacatcctcctgaaatcctcttttgataatggtgctgg

SEQ ID NO: 87102 - DNA, 75 bp, synthetic construct
  source 1..75: mol_type = other DNA
ctcaattttgtcgaaagagggatataataaaagatgggaacattacactacgaataatgtttttgatttaataga

SEQ ID NO: 87103 - DNA, 75 bp, synthetic construct
  source 1..75: mol_type = other DNA
tacagtaacagcattgtcgatacaccaacgtatttcgcttttgcgaaagggatcggcctgatgggcgaggccggg

SEQ ID NO: 87104 - DNA, 75 bp, synthetic construct
  source 1..75: mol_type = other DNA
taactcagggtgacagtggctctgcgctttttgtatatgataaccaaaagaaaaagtgggttgtcgttggtactg

SEQ ID NO: 87105 - DNA, 75 bp, synthetic construct
  source 1..75: mol_type = other DNA
gaagctgtcgaaggaaaaatgcgaccgggttaacgccattgagcgtgataaggcgctggcatgggtggagaaaaa

SEQ ID NO: 87106 - DNA, 75 bp, synthetic construct
  source 1..75: mol_type = other DNA
atgcacaggctatctggatggcgattcagcaacccggtaaggaaagtgtggttaaaacggaagagcagcaatcgg

SEQ ID NO: 87107 - DNA, 75 bp, synthetic construct
  source 1..75: mol_type = other DNA
gcgaggacgggcacggcgtggtatttccggctgaactggtgcggctgctggacaggctggaggaagaaatccggg

SEQ ID NO: 87108 - DNA, 75 bp, synthetic construct
  source 1..75: mol_type = other DNA
atccgcatcagcagcccgcgccagacccggagttacagctacagcaccaccggcaggctgaccggcgttcacacc

SEQ ID NO: 87109 - DNA, 75 bp, synthetic construct
  source 1..75: mol_type = other DNA
tgttaacggcgagcgtaactcccagaagtcactggcagaatggattgaagactgggccgactaccttgtgggctt

SEQ ID NO: 87110 - DNA, 75 bp, synthetic construct
  source 1..75: mol_type = other DNA
aggcgctggcatgggtggagcgcaatattaaagtaccactgaccgaaccacaaaaagcgggtatagcgtcattct

SEQ ID NO: 87111 - DNA, 75 bp, synthetic construct
  source 1..75: mol_type = other DNA
aaggcattgcggatgacagtgctgtttcagatggcgtcgggtctcagcctgacggtagtgaagggcctcagcctg

SEQ ID NO: 87112 - DNA, 75 bp, synthetic construct
  source 1..75: mol_type = other DNA
tcagtgggagcagaaatttgcccgccacgtgcagcacgtcagggcacaggtaaaaccagtcagcaagggggtaag

SEQ ID NO: 87113 - DNA, 75 bp, synthetic construct
  source 1..75: mol_type = other DNA
tagagataattaatcttccatcgtatgttaccacgttagttccgcttagcaaggaaggtcttaatgaaatataca

SEQ ID NO: 87114 - DNA, 75 bp, synthetic construct
  source 1..75: mol_type = other DNA
gcgtcgttgccgtggacgatcgcggcgaggtcacgctgatcaacgatgccgcacaagaattgctgaattaccgta

SEQ ID NO: 87115 - DNA, 75 bp, synthetic construct
  source 1..75: mol_type = other DNA
gcagtgcgcatgactctgcattcgccgcaatggggcgagattgaacgcatctggttgttacgcgggccgcaatta

SEQ ID NO: 87116 - DNA, 75 bp, synthetic construct
  source 1..75: mol_type = other DNA
ttgcaattttgcggcgtaacccgctgatccagcagaatgaaattgctgatatgctgcaaatcagccgttcgcgcg

SEQ ID NO: 87117 - DNA, 75 bp, synthetic construct
  source 1..75: mol_type = other DNA
gaccgtgagcagtgtgatcctatatatttagaagctatggggaacaggcgcatagatggatttagatctctagtc

SEQ ID NO: 87118 - DNA, 75 bp, synthetic construct
  source 1..75: mol_type = other DNA
tttgtcataactttgagaagtttactacacaagaaggaaatcaaggacaccttacagaggtcaactttgaagagg

SEQ ID NO: 87119 - DNA, 75 bp, synthetic construct
  source 1..75: mol_type = other DNA
tccatctggcgtaaatccctgctggacgggcataccgccctgagcagcagtgagtccatcagcaaaggaaacgtc

SEQ ID NO: 87120 - DNA, 75 bp, synthetic construct
  source 1..75: mol_type = other DNA
agacatccgaaacgaacgcgaaagcgtcggaaaccagcgcagaatcctcaaaaacggctgccgcatcgtcagcca

SEQ ID NO: 87121 - DNA, 75 bp, synthetic construct
  source 1..75: mol_type = other DNA
atgggcaaatatattcgtcccttatccgatgcggtatttaccatcgcatctgatgacctgtggatcgagagttta

SEQ ID NO: 87122 - DNA, 75 bp, synthetic construct
  source 1..75: mol_type = other DNA
tttatacggctcactattaatcatatttgtcataactttgagaagtttactacacaagaaggaaatcaaggacac

SEQ ID NO: 87123 - DNA, 75 bp, synthetic construct
  source 1..75: mol_type = other DNA
aacagcgagaaacatcaatggtgttaagtttgatggctcaggcgatatcaacattaatacattggtatctcgtgg

SEQ ID NO: 87124 - DNA, 75 bp, synthetic construct
  source 1..75: mol_type = other DNA
aagaaatggctaacgaatttcgtgatctgcttgttgagaaattcaaagacagcaaagtagaaacctttattggta

SEQ ID NO: 87125 - DNA, 75 bp, synthetic construct
  source 1..75: mol_type = other DNA
ctgaaacagaaacttcgccataacctggaagcgcgtcttgatgcagaagtggatgccattctggatgaactgctg

SEQ ID NO: 87126 - DNA, 75 bp, synthetic construct
  source 1..75: mol_type = other DNA
catcatctgtttcattccgtacgttatccgttcggccgaccaacgattgtccgtgaggttgcggtaattaaagaa

SEQ ID NO: 87127 - DNA, 75 bp, synthetic construct
  source 1..75: mol_type = other DNA
cgtagatgaggctctgtatatgttctacgcacagaaaactaccagcaatacctacgaattaacggttaacggcgc

SEQ ID NO: 87128 - DNA, 75 bp, synthetic construct
  source 1..75: mol_type = other DNA
gcgcgaaaagctcatctttatcactgcgaccaccggggactgccgctggcgcttatcagcgaagacggcaatacg

SEQ ID NO: 87129 - DNA, 75 bp, synthetic construct
  source 1..75: mol_type = other DNA
cggcaggagcattcactttgagccgctgtttcccggcgagataagctacagccgcagcgagtcgttctggctggc

SEQ ID NO: 87130 - DNA, 75 bp, synthetic construct
  source 1..75: mol_type = other DNA
tccttgaattaccctcagaaattcaattttctgaggcggctaacgctgccattctgacgcaggataaatggggcg

SEQ ID NO: 87131 - DNA, 75 bp, synthetic construct
  source 1..75: mol_type = other DNA
aaaacaacgataaaaaaacatgggaaagaaactacacttatctagaaaaaagtttttatgataaaaagctaaact

SEQ ID NO: 87132 - DNA, 75 bp, synthetic construct
  source 1..75: mol_type = other DNA
ccgtgatggtgcgggtatctggaccatctgccgtggagccacccgggtggatggtaagcctgtgattcctggcat

SEQ ID NO: 87133 - DNA, 75 bp, synthetic construct
  source 1..75: mol_type = other DNA
gcagtggtaaccgaatggctgaaagataacccgaaactggcggcagtgggcgataaagtgaccgataaagattac

SEQ ID NO: 87134 - DNA, 75 bp, synthetic construct
  source 1..75: mol_type = other DNA
tgatcgtgtcaatgacataataaatgacagattctggagtgatgggaaaaaacccgacagatgtgacgtacttca

SEQ ID NO: 87135 - DNA, 75 bp, synthetic construct
  source 1..75: mol_type = other DNA
gccatatcctgagcgtactgccgaaatggctttccaaccgtgttgacgaactgctgccatggaaagtagttttca

SEQ ID NO: 87136 - DNA, 75 bp, synthetic construct
  source 1..75: mol_type = other DNA
actcagtgtggcagatggagcagctatccagactctagatgatgttgttattaccttggctgatgctatcgaccc

SEQ ID NO: 87137 - DNA, 75 bp, synthetic construct
  source 1..75: mol_type = other DNA
gtatctgcctcattgccggggtagctgatatgcgtaaatccttcaacggactgggaaaacagggtcaacatgtgc

SEQ ID NO: 87138 - DNA, 75 bp, synthetic construct
  source 1..75: mol_type = other DNA
cactggcagaatggatcgaagactgggccgactaccttgtgggctttgatgctaatggtgacgccattcaagcaa

SEQ ID NO: 87139 - DNA, 75 bp, synthetic construct
  source 1..75: mol_type = other DNA
agtccgccctgaaatccgcgacaaggtaatccagtatcaggaagagtgtgacgatgtgctctacgaatactggac

SEQ ID NO: 87140 - DNA, 75 bp, synthetic construct
  source 1..75: mol_type = other DNA
atctgccgtggtgccatcatggtggatggtaaacctgttgttccaggcatgaagttgtcgaaggcaaaatgcgct

SEQ ID NO: 87141 - DNA, 75 bp, synthetic construct
  source 1..75: mol_type = other DNA
cgcaagtgacctggtacggctgggacggcgaccggctgaccacgatacagaacgacaggagccgcatccagacga

SEQ ID NO: 87142 - DNA, 75 bp, synthetic construct
  source 1..75: mol_type = other DNA
gtatggttacagttctgaggaggtactgaaagtcaccgaggcgatctccacgggcctgaaattatccggtgccag

SEQ ID NO: 87143 - DNA, 75 bp, synthetic construct
  source 1..75: mol_type = other DNA
gtcaggaatatcttgcgaaactgcgtgacacgcaggcttacaggaatgaaatggcgaagtatggcactggtagtg

SEQ ID NO: 87144 - DNA, 75 bp, synthetic construct
  source 1..75: mol_type = other DNA
tcatcaccccccacgttactatagaaagatatagtgaactcactggcttatctatcgacacaattaacgacatgc

SEQ ID NO: 87145 - DNA, 75 bp, synthetic construct
  source 1..75: mol_type = other DNA
tgtcggctgccgttctggcgctgattgccgcaggggcgcctgcgcctgatattctcgaccagtttcttgacgaaa

SEQ ID NO: 87146 - DNA, 75 bp, synthetic construct
  source 1..75: mol_type = other DNA
ggcctgaaggtgactgccgggagtgttattcagcgcgatgacctggttcagtacacggcaactgccgatgcaacc

SEQ ID NO: 87147 - DNA, 75 bp, synthetic construct
  source 1..75: mol_type = other DNA
agaggccggttcagagatgcggatgcgtaccctctggaccaggcctttccgctgctgatgaaacaactggaatta

SEQ ID NO: 87148 - DNA, 75 bp, synthetic construct
  source 1..75: mol_type = other DNA
gtatgcaaaagggctgacctgcgaagccgacaccctcggatcctgtggttacgtttatctggctgtttatccggc

SEQ ID NO: 87149 - DNA, 75 bp, synthetic construct
  source 1..75: mol_type = other DNA
gggggaacgcacctttacctttatggtacgccccagcgctgacctgttcctggctgaagaagacctgccacagtt

SEQ ID NO: 87150 - DNA, 75 bp, synthetic construct
  source 1..75: mol_type = other DNA
ccagccgcagtgctaccttcgcggctatggagaacatcaaacgtgccggtggccgggtgagctttgaccctaata

SEQ ID NO: 87151 - DNA, 75 bp, synthetic construct
  source 1..75: mol_type = other DNA
agccatcagttgcttgcaccggtggacaatatctccattgcgaaaaacgaactggcggtactggggacgatttca

SEQ ID NO: 87152 - DNA, 75 bp, synthetic construct
  source 1..75: mol_type = other DNA
agccatcagttgcttgctccggcggacaatatctccattgcaaaaaatgaactggcggttctggggacgatttca

SEQ ID NO: 87153 - DNA, 75 bp, synthetic construct
  source 1..75: mol_type = other DNA
cgatataccggaaacaacgcgcggcgctctttactcgttcgtctacaacgtgggtgctggcaatttcagaacatc

SEQ ID NO: 87154 - DNA, 75 bp, synthetic construct
  source 1..75: mol_type = other DNA
cggcgagcgggaaatcgacgggcgacagttttatctgcgtctggcgcaacgcattatgcatctgttcagtacgcg

SEQ ID NO: 87155 - DNA, 75 bp, synthetic construct
  source 1..75: mol_type = other DNA
aaataccccttacacaggattcagttttgatgcatccagggttgtaccaacagcatcagagaatcgccctcgaaa

SEQ ID NO: 87156 - DNA, 75 bp, synthetic construct
  source 1..75: mol_type = other DNA
gcgcttaaacatttgatttctctgtgtgctgcatcgccgatgattgccagccagctagcgcgttatccattattg

SEQ ID NO: 87157 - DNA, 75 bp, synthetic construct
  source 1..75: mol_type = other DNA
tgcctaccgtgatgaactgcgccagtatttgctgcgcgtgccggaagatgacgaagaacaacagcttgaggcgct

SEQ ID NO: 87158 - DNA, 75 bp, synthetic construct
  source 1..75: mol_type = other DNA
acgttgtggctcgacgtggaaaaacgcgactggtcagattcgttgctggaaaaatgtggcctgacacgggcgaat

SEQ ID NO: 87159 - DNA, 75 bp, synthetic construct
  source 1..75: mol_type = other DNA
agccttgggatggtgattttgcaaggtggcgtctggttacaactgaaaactgttggtgtgattcatctgcgttca

SEQ ID NO: 87160 - DNA, 75 bp, synthetic construct
  source 1..75: mol_type = other DNA
gctgatgctcttagctactatttacaggatagcacagcaaccaatggtaacggtagtgtatcattatctactctg

SEQ ID NO: 87161 - DNA, 75 bp, synthetic construct
  source 1..75: mol_type = other DNA
tatgttggtgaatgggtatgtagcaattccattaattatttctggcgttcggagaccacttattatccagtgggg

SEQ ID NO: 87162 - DNA, 75 bp, synthetic construct
  source 1..75: mol_type = other DNA
ctaaattgtccgaagaagagttgctattcatcagtggcgaaagccaggttcagcaaggcgcatattcattagtac

SEQ ID NO: 87163 - DNA, 75 bp, synthetic construct
  source 1..75: mol_type = other DNA
tgattgtttatgacattgaacctgttacaggagcgaagactaaagctcagtctctgcgtgaaggaaataaaaacg

SEQ ID NO: 87164 - DNA, 75 bp, synthetic construct
  source 1..75: mol_type = other DNA
gctggattatctggacgcactggagctggtcgatacttccagtgcaccagatattgaatggcctactcctccggc

SEQ ID NO: 87165 - DNA, 75 bp, synthetic construct
  source 1..75: mol_type = other DNA
gtgcctgcgaggcgattcgctggtggattaaggacagggggcgcgattgccgccttcgttcaaataactgttacg

SEQ ID NO: 87166 - DNA, 75 bp, synthetic construct
  source 1..75: mol_type = other DNA
tgctgtaccgtttgatcatcttcctgactggctgagagcctcattcaccatcgttgaacgtcgtagcggagccag

SEQ ID NO: 87167 - DNA, 75 bp, synthetic construct
  source 1..75: mol_type = other DNA
atgtttctgaaaacagaacaatttgaatataacggtgtgtccgtcacgctttctgagctgtctgcgctgcagcgt

SEQ ID NO: 87168 - DNA, 75 bp, synthetic construct
  source 1..75: mol_type = other DNA
cgtatgggagcagcacgccgttcctttgtcctatgaggattgctacaactttgcccggtgcctggcaaagcacca

SEQ ID NO: 87169 - DNA, 75 bp, synthetic construct
  source 1..75: mol_type = other DNA
gaagcaatcgacggttttattacccgctgtactgaaaacccacagtgtgcgcaattaccatattcattcttgcta

SEQ ID NO: 87170 - DNA, 75 bp, synthetic construct
  source 1..75: mol_type = other DNA
ttgtcctatgaggattgctacaactttgcccggtgcctggcaaagcaccacggcgacaatatcgaagatattaag

SEQ ID NO: 87171 - DNA, 75 bp, synthetic construct
  source 1..75: mol_type = other DNA
ctgatagaagcagcagtcagcaccaaagcaacgctggcagaaatgttggcaagaatggaaaatcgtggcttagtc

SEQ ID NO: 87172 - DNA, 75 bp, synthetic construct
  source 1..75: mol_type = other DNA
tgcgagaaataccagatgaataatgggtatttcagtacaacactggggagacttatacggctgaatgctcttgca

SEQ ID NO: 87173 - DNA, 75 bp, synthetic construct
  source 1..75: mol_type = other DNA
ccgctggggtgaactggcgtatttccggatatcgtaacgatgtcagtgacttgatcgattatgatgatcacaccc

SEQ ID NO: 87174 - DNA, 75 bp, synthetic construct
  source 1..75: mol_type = other DNA
cgtatccgcatcattcccatgcgaataaacggatgcttgaacaggcaaggacgctggaaggcgtcgaaattcgct

SEQ ID NO: 87175 - DNA, 75 bp, synthetic construct
  source 1..75: mol_type = other DNA
tgttgcccggctctatgtctgaaatgcatttttttttactgataggtatttcttctattcacagtgacagggtca

SEQ ID NO: 87176 - DNA, 75 bp, synthetic construct
  source 1..75: mol_type = other DNA
gaaaaggatttttttaatattctgaaaaagaaaaaaggaagcattcgctggagtaaaacttttgatgcccgtaaa

SEQ ID NO: 87177 - DNA, 75 bp, synthetic construct
  source 1..75: mol_type = other DNA
atcaggtggtggataaattcatcgtcgagttgcaggttcagctggatcagaaaggtgtttctctggaagtgagcc

SEQ ID NO: 87178 - DNA, 75 bp, synthetic construct
  source 1..75: mol_type = other DNA
atgagccgaattatcgccaccatcgaactattcttaactgatttcagtgaggactttatcgtgtcagacacactg

SEQ ID NO: 87179 - DNA, 75 bp, synthetic construct
  source 1..75: mol_type = other DNA
atgagcagcattatcgccaccaccggaccattcttaactgatttctgtgaggattttatcgtgtcagacgcactc

SEQ ID NO: 87180 - DNA, 75 bp, synthetic construct
  source 1..75: mol_type = other DNA
tatgggatgtacccgtgcacagaatgaagatgtagatgagttgtgtaagaaagtgacaagttggatgtattcgca

SEQ ID NO: 87181 - DNA, 75 bp, synthetic construct
  source 1..75: mol_type = other DNA
gtgctggttgctgtcggggtggcccggtactttggtaatctggcttccggagcgatgtctgccacggcaggactt

SEQ ID NO: 87182 - DNA, 75 bp, synthetic construct
  source 1..75: mol_type = other DNA
gtaacgccattcttatcaccaaacaggccagtggacggggaaaaattgacccgctgatggcgctgttcaatgcgg

SEQ ID NO: 87183 - DNA, 75 bp, synthetic construct
  source 1..75: mol_type = other DNA
tgtaaaacggtttggtgaaattagtggaaatgtaggtacagaaactcgccctcgcaacgttgcattcaattacat

SEQ ID NO: 87184 - DNA, 75 bp, synthetic construct
  source 1..75: mol_type = other DNA
gccctggaaaaatgaaccgttaatgcggccagttaactcaaattatgctcgttattgcgctaagcataattttaa

SEQ ID NO: 87185 - DNA, 75 bp, synthetic construct
  source 1..75: mol_type = other DNA
cgccaagggcaagcagtggaaaggcctggtaactcgccgcgagattgagcgtgaagtttgtttgtgggggcagaa

SEQ ID NO: 87186 - DNA, 75 bp, synthetic construct
  source 1..75: mol_type = other DNA
tggggcggtgtcactatttgcaaaccgaatggacagccaacagaagcagcccttgagtgggctttagctgaaacg

SEQ ID NO: 87187 - DNA, 75 bp, synthetic construct
  source 1..75: mol_type = other DNA
atcagaaatggcagacaaactccgtcctctgtatatagcgctgaatgactatgttctggaggcaggaaaggtgca

SEQ ID NO: 87188 - DNA, 75 bp, synthetic construct
  source 1..75: mol_type = other DNA
tactgaaaaccatgatcccccaggaatttgaagactggcgcgaagcgggtgaagatttgcgccgcgaactgaccc

SEQ ID NO: 87189 - DNA, 75 bp, synthetic construct
  source 1..75: mol_type = other DNA
cgctgcagcaccgcacatatcacggaaacagacaacgcctggttgtactcgctgtcacaccagaccagtgacttc

SEQ ID NO: 87190 - DNA, 75 bp, synthetic construct
  source 1..75: mol_type = other DNA
taacggggatgcatccgggcgctatggtcttaaacgcggagaacgcatccggttacgctctcacctcattcaggg

SEQ ID NO: 87191 - DNA, 75 bp, synthetic construct
  source 1..75: mol_type = other DNA
taagtactatgtaaatgacactaaaagtagtaagtactacgatgccgaagtagatactagtaagggtgaaattaa

SEQ ID NO: 87192 - DNA, 75 bp, synthetic construct
  source 1..75: mol_type = other DNA
tcagaggggctttttacgatgcaggaacacgatcagcgagaatgccgaataacacaactactatagacaaaaccg

SEQ ID NO: 87193 - DNA, 75 bp, synthetic construct
  source 1..75: mol_type = other DNA
gctggcttcgaacagctttccggcggggctatctctatctttggtaaacccgccagcaatctgccaccgtgggag

SEQ ID NO: 87194 - DNA, 75 bp, synthetic construct
  source 1..75: mol_type = other DNA
accggctaactggatgatgaatggcgagtatggcagtgagttcgggggctttttccccgtccaggttcgtttcac

SEQ ID NO: 87195 - DNA, 75 bp, synthetic construct
  source 1..75: mol_type = other DNA
ctgctggcagcaagaaaatgcggatgcggcgatggaaaaatccgtcgagctggtaaaggcatatgttcgtgctgg

SEQ ID NO: 87196 - DNA, 75 bp, synthetic construct
  source 1..75: mol_type = other DNA
tggaaggcgctctggctgttattgctgttgtgggtgtttactgcctggttgtgtttttgatggatcgcctgggga

SEQ ID NO: 87197 - DNA, 75 bp, synthetic construct
  source 1..75: mol_type = other DNA
tgttatgttccatagcgacagtaataatgccggtatcagtttttatcatcactctgtttgctgtttaaccagact

SEQ ID NO: 87198 - DNA, 75 bp, synthetic construct
  source 1..75: mol_type = other DNA
tttgccgctcaattgggttctgacatcgttctgcagtgcgatgttgccgaagatgccagcatcgacaccatgttc

SEQ ID NO: 87199 - DNA, 75 bp, synthetic construct
  source 1..75: mol_type = other DNA
atcaccgttaagaccaatggcctgcgccgccgtgtaaaagccacccgcatcagcggctgcacggtttactgggaa

SEQ ID NO: 87200 - DNA, 75 bp, synthetic construct
  source 1..75: mol_type = other DNA
caaagcagaatgcaaagcactcttgaataaagaccttgccactgtcgccagacaaattaacccgtacatcaaagt

SEQ ID NO: 87201 - DNA, 75 bp, synthetic construct
  source 1..75: mol_type = other DNA
cggtgaagcttgcagaattcctcaacaacccggcaaacacgggaaatatcgtagacagtggagataaatactaca

SEQ ID NO: 87202 - DNA, 75 bp, synthetic construct
  source 1..75: mol_type = other DNA
acgcccgtcgcctgaccgagcttgccggtgcggtactggagcgcagtaaacgctacccgcaacgctttgcactga

SEQ ID NO: 87203 - DNA, 75 bp, synthetic construct
  source 1..75: mol_type = other DNA
accgacgcggatttgcgccatctcgaccaagcgtttccggtactgctgaagcaaatggaactgatgctggtttcc

SEQ ID NO: 87204 - DNA, 75 bp, synthetic construct
  source 1..75: mol_type = other DNA
gacgcttcttcgcaaaataaaccagggcgatatcaaaagcgcatgtgatcagctacggcgctggacatacgctgg

SEQ ID NO: 87205 - DNA, 75 bp, synthetic construct
  source 1..75: mol_type = other DNA
gtgtttcccgtcgacgttttataaacgaattaatgcaggagatcgaaaaggtgcctgcgaagcgattcgctggtg

SEQ ID NO: 87206 - DNA, 75 bp, synthetic construct
  source 1..75: mol_type = other DNA
gcttaatttacgaatttgtcacgaaagttgataataaagccgaggtgttcgataagattaaatctctggcaaaaa

SEQ ID NO: 87207 - DNA, 75 bp, synthetic construct
  source 1..75: mol_type = other DNA
tgctgtccgcctgcgtacttctgaccggctgtcaggggcagcaaaaactgctgcagcgggatgcggctgttccgg

SEQ ID NO: 87208 - DNA, 75 bp, synthetic construct
  source 1..75: mol_type = other DNA
attttgtttaccggactgattatttttaacttatttgcagaatgtattaacaggtcaaccagccttataacctca

SEQ ID NO: 87209 - DNA, 75 bp, synthetic construct
  source 1..75: mol_type = other DNA
atatgtataaaaaagtccaagcagaagccgcaaccactgacctcaaaacacttgaacagcttttaaaaaagttca

SEQ ID NO: 87210 - DNA, 75 bp, synthetic construct
  source 1..75: mol_type = other DNA
agctacgtcgctggacatacgctggcggtaagcaatggaaagggctgatgactcgccgtgagattgagcgtgaag

SEQ ID NO: 87211 - DNA, 75 bp, synthetic construct
  source 1..75: mol_type = other DNA
tttttgttcaatttggtaaaattgaagattcagatactgaatgggcgaatgctcaggcgttgtctactacttatt

SEQ ID NO: 87212 - DNA, 75 bp, synthetic construct
  source 1..75: mol_type = other DNA
ttgttatgccggtaagcgtaaaagaatggataaacctgcataatccagaaatccttcctcattactggatgtatt

SEQ ID NO: 87213 - DNA, 75 bp, synthetic construct
  source 1..75: mol_type = other DNA
ccaggtggccagaaccgttaaagcccggcgggaaatgacatccagcctcattgccgtctgcctctacccccttct

SEQ ID NO: 87214 - DNA, 75 bp, synthetic construct
  source 1..75: mol_type = other DNA
caggtgttggtgcctcctggcaaaaacattatggcacggatgtcgtcacccaactcggctacgggcaacgcatta

SEQ ID NO: 87215 - DNA, 75 bp, synthetic construct
  source 1..75: mol_type = other DNA
ttcttcatgcctgtcatttgtctgttactgatgttgttgttcctgctactgctactgctactgctactgctactg

SEQ ID NO: 87216 - DNA, 75 bp, synthetic construct
  source 1..75: mol_type = other DNA
tggtcggaaaaactgcacgatgtctctgaagaagtgcatcgcgccctgcagaaactgcagcagattgaagaagaa

SEQ ID NO: 87217 - DNA, 75 bp, synthetic construct
  source 1..75: mol_type = other DNA
tggtatgcggccattttccggaatgacaggctatgacggcattgtcgcctgtcttcagcaggcaatggcggatag

SEQ ID NO: 87218 - DNA, 75 bp, synthetic construct
  source 1..75: mol_type = other DNA
cgctgaacgggattatttcaccctccgggaacgactggtaatgatgcaggcccaacttgaaggtgctcagcaata

SEQ ID NO: 87219 - DNA, 75 bp, synthetic construct
  source 1..75: mol_type = other DNA
cactggtaattttaaaatctttgttcaggataccggcgtcagcccacagtctgacgacgcgatgacgctggtgaa

SEQ ID NO: 87220 - DNA, 75 bp, synthetic construct
  source 1..75: mol_type = other DNA
tgaaatacttcttacgtaaagaaattgccaggcttgaagatgcagagtcacaatcatcagaaattccgttcggaa

SEQ ID NO: 87221 - DNA, 75 bp, synthetic construct
  source 1..75: mol_type = other DNA
tgctgacagggtatgtcattaagcgcattggctttaaccgcagctattatctggcctccttcatttttgccgctg

SEQ ID NO: 87222 - DNA, 75 bp, synthetic construct
  source 1..75: mol_type = other DNA
atgaaaatccgttcacaagtcggcatggtgcttaacctcgacaaatgtatcggctgccatacctgttcggtgacc

SEQ ID NO: 87223 - DNA, 75 bp, synthetic construct
  source 1..75: mol_type = other DNA
caaacctgaagggatatgccggaatggtcgcggataactatcaccgccgtctggtgctggaaatcatggatgaaa

SEQ ID NO: 87224 - DNA, 75 bp, synthetic construct
  source 1..75: mol_type = other DNA
tggaaatcatgctggtgattttccttatcggccttgccagtgcgggcgtggtacagacgtttgcgaccgattctg

SEQ ID NO: 87225 - DNA, 75 bp, synthetic construct
  source 1..75: mol_type = other DNA
gtcggcggcagacggcgcgttcacggcagacgtggaagatgctctggacgacgagtctgtcacagaggatgaaac

SEQ ID NO: 87226 - DNA, 75 bp, synthetic construct
  source 1..75: mol_type = other DNA
tcccacaagagttgctggattactacgactattacgctcacgggaaaatctcgaaacgtgagttcctcaaccttg

SEQ ID NO: 87227 - DNA, 75 bp, synthetic construct
  source 1..75: mol_type = other DNA
accatggaagatctaatgaacagtgcagacccgtatacgctgattttctcaaagccgagtccgctgaggggggta

SEQ ID NO: 87228 - DNA, 75 bp, synthetic construct
  source 1..75: mol_type = other DNA
atgacaccaattgaattattagaaagcgttaaagagcgatttaatccgctgcttgtgcgtgaagaagaaacgttg

SEQ ID NO: 87229 - DNA, 75 bp, synthetic construct
  source 1..75: mol_type = other DNA
accggttatacggtaactggggcgggcacttatagtggcggttctgtggttcttccgtcgccgcttgctactgga

SEQ ID NO: 87230 - DNA, 75 bp, synthetic construct
  source 1..75: mol_type = other DNA
tgcgacccgaaacaagccgttgcggtcgccaacaaaatcgttaacgacggcattaaatacgttattggtcatctg

SEQ ID NO: 87231 - DNA, 75 bp, synthetic construct
  source 1..75: mol_type = other DNA
acctgaactcgaaaactatgagcgcaggctgcaacaacttcttgatacctccccggtacagccgctggaaaccgg

SEQ ID NO: 87232 - DNA, 75 bp, synthetic construct
  source 1..75: mol_type = other DNA
cccgaacgcagaagaagatctggcacctaccgccactcacgtcggttctgagctttcccaggaagatctggacga

SEQ ID NO: 87233 - DNA, 75 bp, synthetic construct
  source 1..75: mol_type = other DNA
caatgaaacatttaaatactatacgacagcgacatttatcgcttcagtcatcgctctggcgggcacattcctgct

SEQ ID NO: 87234 - DNA, 75 bp, synthetic construct
  source 1..75: mol_type = other DNA
cccactaactacctatgctaaaaattatccttgttctgggaaaaagggaggtgtctctcactgtacctccgatgg

SEQ ID NO: 87235 - DNA, 75 bp, synthetic construct
  source 1..75: mol_type = other DNA
cgttggtgtaccggagttcaaagcagaaacggtcatacccacgatgcttaatttgctgaatgacaggcacaaata

SEQ ID NO: 87236 - DNA, 75 bp, synthetic construct
  source 1..75: mol_type = other DNA
ccagaaatggggcattcactcaacctacagtgaaaacctgctaatgctgacgctctctcgcggtggaccgattgt

SEQ ID NO: 87237 - DNA, 75 bp, synthetic construct
  source 1..75: mol_type = other DNA
aacaaacagccgcatctggggatctccaccggatcaggctatgtggttattagccgtgaaagtgcgcacattctg

SEQ ID NO: 87238 - DNA, 75 bp, synthetic construct
  source 1..75: mol_type = other DNA
cgatgggagcttgaggcgctggcgcgtggcgcgaccgtaaattatgacgggaaaaaattcacgtatccggtcgct

SEQ ID NO: 87239 - DNA, 75 bp, synthetic construct
  source 1..75: mol_type = other DNA
taccagcgcacgcagtatgaagtgtatgactaccccggacgtttcaagggtgcccacgggcagaactttgcccgc

SEQ ID NO: 87240 - DNA, 75 bp, synthetic construct
  source 1..75: mol_type = other DNA
gagcaaaaatttaacgaggacaatgatgctccggttacgttcagttcatctgaggggggagtactggagtggagc

SEQ ID NO: 87241 - DNA, 75 bp, synthetic construct
  source 1..75: mol_type = other DNA
tttatggatcgcattggtcgcaagatcaatatgatggagcaagtgctcgatatcccttcccaggaagttatctcg

SEQ ID NO: 87242 - DNA, 75 bp, synthetic construct
  source 1..75: mol_type = other DNA
ttctatggcgtgtcgggagtgacagcaaatgacctccgcactgccgaagccatggtcagaagccgtgaagagaat

SEQ ID NO: 87243 - DNA, 75 bp, synthetic construct
  source 1..75: mol_type = other DNA
aaacagtatgaagcgcagggctttgaagtggtgattccgaaaaccaacattctggcggaattcccggtggcgtgg

SEQ ID NO: 87244 - DNA, 75 bp, synthetic construct
  source 1..75: mol_type = other DNA
atcgctgacatgcggaagcgtcaacgtgatgtagcagaactcgacgcaagatacacaaaggagcttgctgatgct

SEQ ID NO: 87245 - DNA, 75 bp, synthetic construct
  source 1..75: mol_type = other DNA
aagacaaatttggctcctggccggaagtgatgaaaacccacttcaccagcggcggcgagttagacaagctgttag

SEQ ID NO: 87246 - DNA, 75 bp, synthetic construct
  source 1..75: mol_type = other DNA
tttatgccagagggaagtcgtttaccaacgagtttgaagacacagggatcacagtcagcgtatacgttttcaaac

SEQ ID NO: 87247 - DNA, 75 bp, synthetic construct
  source 1..75: mol_type = other DNA
ctgacgccggatggcattcagctacaggtcggggaatcgacggtaatcaggctgtcgaaggatggcatcaccatc

SEQ ID NO: 87248 - DNA, 75 bp, synthetic construct
  source 1..75: mol_type = other DNA
ggcctgacctgcaacgagcagaatttcattactaaatcggggatgcagcgttacgcggctgagcacaacattatt

SEQ ID NO: 87249 - DNA, 75 bp, synthetic construct
  source 1..75: mol_type = other DNA
ctgtggtgcgctgtggatggcaacagaccattaccgtgataacgcgattacctacaaagcgcagcgcgataacaa

SEQ ID NO: 87250 - DNA, 75 bp, synthetic construct
  source 1..75: mol_type = other DNA
gatggtgctggacacgctgcgccggttccacatcgaggaagaaaacgccagcggccccatggcccaggtcatcgg

SEQ ID NO: 87251 - DNA, 75 bp, synthetic construct
  source 1..75: mol_type = other DNA
tacgcagaacgatccgcgcgtgacccgcgtggggaattttctgcgccgcacctcgctggacgagctgccgcagtt

SEQ ID NO: 87252 - DNA, 75 bp, synthetic construct
  source 1..75: mol_type = other DNA
aatacctgagccatcaggagaggctgtgaaagaaatgattgatggtaaaaaggaacgactgaaggggccattatg

SEQ ID NO: 87253 - DNA, 75 bp, synthetic construct
  source 1..75: mol_type = other DNA
cgggattatttcaccctcagagagcggttgatgacaatgcagaagcaactggaaggggcacaggactatatccgc

SEQ ID NO: 87254 - DNA, 75 bp, synthetic construct
  source 1..75: mol_type = other DNA
gtggatcaattccgtagctccttgggggcagtgcaaaaccgcttcgattctgctatcactaacttaggtaatact

SEQ ID NO: 87255 - DNA, 75 bp, synthetic construct
  source 1..75: mol_type = other DNA
ccatgatgctcgccatgatatcgatgctaaagccagtaaggactttaaagaggccagcgattactttaccagtcg

SEQ ID NO: 87256 - DNA, 75 bp, synthetic construct
  source 1..75: mol_type = other DNA
aacagcgacatgaaccagttctttaacaagctgggctttgccaccaataccacccaggccggagtctggcagggg

SEQ ID NO: 87257 - DNA, 75 bp, synthetic construct
  source 1..75: mol_type = other DNA
gtttactgatactcctgcctctggtagcaaccagtaaaccattgattccaataatgaagacactttttacggatg

SEQ ID NO: 87258 - DNA, 75 bp, synthetic construct
  source 1..75: mol_type = other DNA
cccggccgaatccgtggccgttgatgtcgcttatgaaggttccggcagtggcgactggcgcactgacggcttcat

SEQ ID NO: 87259 - DNA, 75 bp, synthetic construct
  source 1..75: mol_type = other DNA
taactgacaacaaggggaaaacgcacgacgtgctgaccggaagtgatgacgctcgccacagtaacacctctctgg

SEQ ID NO: 87260 - DNA, 75 bp, synthetic construct
  source 1..75: mol_type = other DNA
ccagctataactatgctgatccgaccaaagtcaccccggctgatatcatcggtaccgttaacgctgcaggcaacc

SEQ ID NO: 87261 - DNA, 75 bp, synthetic construct
  source 1..75: mol_type = other DNA
aagtacaaatgcaaggtatgcggtaaagggcttattcgccgtccgtccaaaaaagccggtcacttctggtcctgc

SEQ ID NO: 87262 - DNA, 75 bp, synthetic construct
  source 1..75: mol_type = other DNA
gtaatgattttagacgtttctttaatcccgttatattaattttaatgtcaatcgttttaaacactttttttcaat

SEQ ID NO: 87263 - DNA, 75 bp, synthetic construct
  source 1..75: mol_type = other DNA
caggtacagcctggtgttgataatgcctggcgtgaatcccgtggggacatcggtaaaggaatggagagcgtacct

SEQ ID NO: 87264 - DNA, 75 bp, synthetic construct
  source 1..75: mol_type = other DNA
gctgaacagtaatgtcagaggaggcactatgccgcaattaactgcaacggaagccgccgcgcaggagaaccagcg

SEQ ID NO: 87265 - DNA, 75 bp, synthetic construct
  source 1..75: mol_type = other DNA
ttgttacgcttaataccaccaatgttactttcactgatcctgcgaacggtgttaccacagcaacacagacaggtc

SEQ ID NO: 87266 - DNA, 75 bp, synthetic construct
  source 1..75: mol_type = other DNA
aagtattgatgcaacagaactagcgaaacttgcaataaaattagctgacaaaggctccattgaatacaagggcat

SEQ ID NO: 87267 - DNA, 75 bp, synthetic construct
  source 1..75: mol_type = other DNA
ccgatggtccagactatcctgacggggattgccattggtatattcccgctcctgatactggcggctgtctttaac

SEQ ID NO: 87268 - DNA, 75 bp, synthetic construct
  source 1..75: mol_type = other DNA
aaaaaagcttctttgattacgagtgagacagtttacaaaaatagcgctggcctttatacgacaaccaaagttgat

SEQ ID NO: 87269 - DNA, 75 bp, synthetic construct
  source 1..75: mol_type = other DNA
ggcggtaaaacttataccgtgaatgtggagagcggcgcggttaagaatgatgctaataaagatgtttttgtaagc

SEQ ID NO: 87270 - DNA, 75 bp, synthetic construct
  source 1..75: mol_type = other DNA
caaaagattggggacaaactaaaaggaattaatccaacaccattttatataaacttgtcagagttaaaatttggg

SEQ ID NO: 87271 - DNA, 75 bp, synthetic construct
  source 1..75: mol_type = other DNA
ggattttctgactcgctttgcgcagtttaaggacagggcagtgatcgaagggcaaacactcggtgtgctaatcga

SEQ ID NO: 87272 - DNA, 75 bp, synthetic construct
  source 1..75: mol_type = other DNA
cgctgatgtaacggcttccactgaattcacaggtgcttcaaccaacgatccactgactctgctggacaaagctat

SEQ ID NO: 87273 - DNA, 75 bp, synthetic construct
  source 1..75: mol_type = other DNA
gatttttttgatgaattatcacgcgatatggggattcccatatcggagttaattcaatcatttaaaggcggaaga

SEQ ID NO: 87274 - DNA, 75 bp, synthetic construct
  source 1..75: mol_type = other DNA
ttatcaggggcaggctaataatacagtcattaacggtggcagccagacaattagtgagggaggaatttctacagg

SEQ ID NO: 87275 - DNA, 75 bp, synthetic construct
  source 1..75: mol_type = other DNA
caaaaatatccagctgatttccatgacgctgccggatatcaatgccggatgtggcggcatcgacgcctatctcgg

SEQ ID NO: 87276 - DNA, 75 bp, synthetic construct
  source 1..75: mol_type = other DNA
tatcggccacgttgaccaaggtaaaactacgctgaccgctgcaatcactaccgtactggctaaaacctacggcgg

SEQ ID NO: 87277 - DNA, 75 bp, synthetic construct
  source 1..75: mol_type = other DNA
atgctcggtgtttccaacagtatgatttaccagctgacggactatatcggttacgacatcctgctgcagtacatt

SEQ ID NO: 87278 - DNA, 75 bp, synthetic construct
  source 1..75: mol_type = other DNA
acggttattttgtcaacattcgcattcttgatgacttgtttgatgtttctgtattctctgattatgtcgtggagc

SEQ ID NO: 87279 - DNA, 75 bp, synthetic construct
  source 1..75: mol_type = other DNA
gaaagacaagctgaatctggacacacagagtggcggaaaaacctggcattattatgcccagcagttatttggtgg

SEQ ID NO: 87280 - DNA, 75 bp, synthetic construct
  source 1..75: mol_type = other DNA
cctggtactggcggctgtcttcaacagactgacgctgtctgttctgagaggctatgtgtttgctctgatgtggtt

SEQ ID NO: 87281 - DNA, 75 bp, synthetic construct
  source 1..75: mol_type = other DNA
ttgatgaataccgtttcgatctggtgatcctgctggagaacaacacgccgtgggtggcggatggtttacgcagcc

SEQ ID NO: 87282 - DNA, 75 bp, synthetic construct
  source 1..75: mol_type = other DNA
gtgataaagcagatttcagggcatttctcaggaaacttaactgggaagaggacgaagagctgcagaatgccattc

SEQ ID NO: 87283 - DNA, 75 bp, synthetic construct
  source 1..75: mol_type = other DNA
tcaggctgagcgtattcgcgatctcaccagtgttcagggggtaaggcaaaactcactgattggctatggcctggt

SEQ ID NO: 87284 - DNA, 75 bp, synthetic construct
  source 1..75: mol_type = other DNA
gtttggtcgctataccggtgccaaaggaatattcctgaccggtaataccggtgtgtcacattctcaggcagtatt

SEQ ID NO: 87285 - DNA, 75 bp, synthetic construct
  source 1..75: mol_type = other DNA
gtattcgcacgctcgaatacgacgacggcacaaaagagatcaacacagtagatatttccgtgattgggattgttg

SEQ ID NO: 87286 - DNA, 75 bp, synthetic construct
  source 1..75: mol_type = other DNA
ttcgttaaaactgattaccacaatcgaagacatcgcgtttcgctgtagtggcattcataacctgatcgttaccgt

SEQ ID NO: 87287 - DNA, 75 bp, synthetic construct
  source 1..75: mol_type = other DNA
ggcagacaccgttacacgggattatttcaccctcagagagcggctgatgacgatgcacaagcaactggaaggggc

SEQ ID NO: 87288 - DNA, 75 bp, synthetic construct
  source 1..75: mol_type = other DNA
tctgcagtacaatctttcagttgaacattttaatctgaatagttcacttatttactacataaacaattggaattt

SEQ ID NO: 87289 - DNA, 75 bp, synthetic construct
  source 1..75: mol_type = other DNA
gaaacggaagcccgttaaaaccacatgaaatagcaccgtcggccagactgacccggtcggaacgattgcaaatta

SEQ ID NO: 87290 - DNA, 75 bp, synthetic construct
  source 1..75: mol_type = other DNA
tcactctcagagaacggttgatgctgatgcagaagcagctggaaggggcgcaggactatatccgcactcagtgcc

SEQ ID NO: 87291 - DNA, 75 bp, synthetic construct
  source 1..75: mol_type = other DNA
atcgcgataaacgccttactggtgaaatctacttcagtgaaaaatggaagaaaggagcaagcccagttactgtta

SEQ ID NO: 87292 - DNA, 75 bp, synthetic construct
  source 1..75: mol_type = other DNA
taaggcaataccataaagagtcattggttgatttatcaacatctttaggtattccaaaagaaaaaatagtagaac

SEQ ID NO: 87293 - DNA, 75 bp, synthetic construct
  source 1..75: mol_type = other DNA
gttgctgagctacaaatacacgccaccaccaccgctggagcgactgacgtttgagaccgagatcacctcggaata

SEQ ID NO: 87294 - DNA, 75 bp, synthetic construct
  source 1..75: mol_type = other DNA
tcccatttcgacatgccagtatcctctttggtctttttttcagaatcattagggacacaaggacgattatccaaa

SEQ ID NO: 87295 - DNA, 75 bp, synthetic construct
  source 1..75: mol_type = other DNA
agatccttgaactctacaaacctgagtatcgcgattgggtgcgggtggaggctggagatccaccttttgatgttc

SEQ ID NO: 87296 - DNA, 75 bp, synthetic construct
  source 1..75: mol_type = other DNA
gaaccattttactgagtgcggcattaatcccagcgatttaaaccatcccgccacagatgggagtgttacagttag

SEQ ID NO: 87297 - DNA, 75 bp, synthetic construct
  source 1..75: mol_type = other DNA
cacgctctacggaacatcgcaaccgtctttagtctatgcaggtactacggatgcgcagggttttgctactgtgga

SEQ ID NO: 87298 - DNA, 75 bp, synthetic construct
  source 1..75: mol_type = other DNA
catttttacgctggtgtttttgctgatactgcgcaaagacttctcccacagtagcgccgcagccgggacaatttt

SEQ ID NO: 87299 - DNA, 75 bp, synthetic construct
  source 1..75: mol_type = other DNA
atgtttttatcaaaatttttgaaagttggagaaaaaaaattaccggcaatatcaggtcctgtaaatctctatata

SEQ ID NO: 87300 - DNA, 75 bp, synthetic construct
  source 1..75: mol_type = other DNA
attctggatggtcacatccagatggtcattaacagtcatgagaaaggctgggctgcaatcgtcccctgcacaatt

SEQ ID NO: 87301 - DNA, 75 bp, synthetic construct
  source 1..75: mol_type = other DNA
cggcattaatgggtattagcgggatggcagcgcaggctaacgaattgccggatggaccgcatattgtcacctccg

SEQ ID NO: 87302 - DNA, 75 bp, synthetic construct
  source 1..75: mol_type = other DNA
aagtggtcggcggcgcagccggactgattgaggaagtggcagccagcaaaatcagcggtgaagaagatcgctaca

SEQ ID NO: 87303 - DNA, 75 bp, synthetic construct
  source 1..75: mol_type = other DNA
cgaccgtaaattatgatgggaaaaaattcacgtatccggttgttgatgagtggcggtggtatatagttgatggta

SEQ ID NO: 87304 - DNA, 75 bp, synthetic construct
  source 1..75: mol_type = other DNA
accgtcggggaagtggtgaaggaaatagccgcgcggcacaagctgaagatggcactgggtaaagacctgtcggat

SEQ ID NO: 87305 - DNA, 75 bp, synthetic construct
  source 1..75: mol_type = other DNA
aattgctggatggggttgaagttgagtggttgccattgggggaagtctcagccttaagaagaggcagagttatgt

SEQ ID NO: 87306 - DNA, 75 bp, synthetic construct
  source 1..75: mol_type = other DNA
aaagcagcagccgtgaaggtgattatatggaaggcgcggaaggcaatgtgtttgtgttacgcaagacttatcaga

SEQ ID NO: 87307 - DNA, 75 bp, synthetic construct
  source 1..75: mol_type = other DNA
ccctcgaaatggatcgccaaacctataaccgtcaatcgcgaacaacaatacctagaagcagtgtttaatgagctc

SEQ ID NO: 87308 - DNA, 75 bp, synthetic construct
  source 1..75: mol_type = other DNA
gcgtaaagccagctggcactgcagacaatgtcaccacgattattatggggagcagtactgcacacactgtcatac

SEQ ID NO: 87309 - DNA, 75 bp, synthetic construct
  source 1..75: mol_type = other DNA
cgcagaaaaagagatggcatggcttactcatgagcagattgttgaattgctggctgattgcaaacgtcaggaccc

SEQ ID NO: 87310 - DNA, 75 bp, synthetic construct
  source 1..75: mol_type = other DNA
ttgacgggaatggtcgtctgaccggtgcccgtaccgcacagactgcgccatacgatcgctacacctgccacctct

SEQ ID NO: 87311 - DNA, 75 bp, synthetic construct
  source 1..75: mol_type = other DNA
ctttgaggatgcgccatattatccgaaagccctcgctgagctggaagcggtggctgcggaaatactgaagcgtgc

SEQ ID NO: 87312 - DNA, 75 bp, synthetic construct
  source 1..75: mol_type = other DNA
acgggattatttcgttctcagagagcgcatcgaaaccataactaaccaattgaatggcctgcaagagtatgtgag

SEQ ID NO: 87313 - DNA, 75 bp, synthetic construct
  source 1..75: mol_type = other DNA
cacggcctgaccagttgcgcgagcatgaacgtctgcgaaagctgggctttaccgtggtagtactggatagcaaaa

SEQ ID NO: 87314 - DNA, 75 bp, synthetic construct
  source 1..75: mol_type = other DNA
acatctggcaccggatcacctggaaactgcattacggtttaatccgctggcaacactaccaacatcaatagcaag

SEQ ID NO: 87315 - DNA, 75 bp, synthetic construct
  source 1..75: mol_type = other DNA
atgtacgcaaaatcctttattgcatttgatggcaacggacgtctgaccggtgcccgtaccgcacagactgcgcca

SEQ ID NO: 87316 - DNA, 75 bp, synthetic construct
  source 1..75: mol_type = other DNA
ctggcaaacggaaaacaaccggcagatgccacgctcactgctctggcaggacttgccactgcagcagatcggttg

SEQ ID NO: 87317 - DNA, 75 bp, synthetic construct
  source 1..75: mol_type = other DNA
caaagttggcgaagaagttgaaatcgttggtatcaaagagactcagaagtctacctgtactggcgttgaaatgtt

SEQ ID NO: 87318 - DNA, 75 bp, synthetic construct
  source 1..75: mol_type = other DNA
tctgctatttacctatattgttctgctcggcgcggcggtggcggcattgtttgccaacgatggcgcggcgttaat

SEQ ID NO: 87319 - DNA, 75 bp, synthetic construct
  source 1..75: mol_type = other DNA
tcctgaccatcgttttggttatctggcaaccgaagggattagggatcggctggagtgcgacgctgggcgcggtac

SEQ ID NO: 87320 - DNA, 75 bp, synthetic construct
  source 1..75: mol_type = other DNA
ccatgataagggaccacttgatactctcaataagcaaattggagcctctgcatttcgtattgaacagcagtcaga

SEQ ID NO: 87321 - DNA, 75 bp, synthetic construct
  source 1..75: mol_type = other DNA
aatcgccgcagcactgaataccccaaccacagccattaatgcggagttacgccgactctggcgcagcggttcagt

SEQ ID NO: 87322 - DNA, 75 bp, synthetic construct
  source 1..75: mol_type = other DNA
atgagtctgttaaatgacgttcagaaattcattgaagcccatccggggtgtacttccggtgacattgcggatgct

SEQ ID NO: 87323 - DNA, 75 bp, synthetic construct
  source 1..75: mol_type = other DNA
aaagtttggtacaacagcagagaaaatgtttgatccatgcgaaaatcttaaggtatcagaaaaaatactggttga

SEQ ID NO: 87324 - DNA, 75 bp, synthetic construct
  source 1..75: mol_type = other DNA
tgcttacggaaaagcagcaagcgcgctgcatcgggtgaagagtggtatctgtcagggaattacgtgggggcttaa

SEQ ID NO: 87325 - DNA, 75 bp, synthetic construct
  source 1..75: mol_type = other DNA
atgaataatttcttaactttccatgcagaagcaacgcctgacggcgtaaacatcatgcaccgcagcaacgatggc

SEQ ID NO: 87326 - DNA, 75 bp, synthetic construct
  source 1..75: mol_type = other DNA
ccgaactgcaatcaatgaatatcactgccgataacatcaccaagcttaaatcattgtttcctgaagcctttaatg

SEQ ID NO: 87327 - DNA, 75 bp, synthetic construct
  source 1..75: mol_type = other DNA
gcaacatgttcgatgtcgaacagggaacactcacttcgtttgggcgagaagtgcttgccgatcttcacaacagct

SEQ ID NO: 87328 - DNA, 75 bp, synthetic construct
  source 1..75: mol_type = other DNA
ggattaaccgtttcttgtgttgacggtggcaaattgtttacctgctttgctaaacaaatccctgcatcttcagta

SEQ ID NO: 87329 - DNA, 75 bp, synthetic construct
  source 1..75: mol_type = other DNA
tactatttccgcaccgggatcgtcatgactctgcctgtgctgtttgtaacgctggccgcgctggcgctacgtctc

SEQ ID NO: 87330 - DNA, 75 bp, synthetic construct
  source 1..75: mol_type = other DNA
aaaccggagcatggaaagacgctgttgactgggtactcaaggaggcctgccaggctgtaaacattggcaacaaag

SEQ ID NO: 87331 - DNA, 75 bp, synthetic construct
  source 1..75: mol_type = other DNA
aataccggtaaagattttgtttattctgataacttccaagataacatgaaaaattatcttgaaatgacaggacaa

SEQ ID NO: 87332 - DNA, 75 bp, synthetic construct
  source 1..75: mol_type = other DNA
gatgcgaaaaagcacgccgtcgtcaatggcgtccttatggttcatcgcggatggggtaaagatactgatgcgtga

SEQ ID NO: 87333 - DNA, 75 bp, synthetic construct
  source 1..75: mol_type = other DNA
acaataccgattcagcagcgctgttgccctggattgaacgtgcgcgtaaggacgttcgcgatcttcagcgtctgc

SEQ ID NO: 87334 - DNA, 75 bp, synthetic construct
  source 1..75: mol_type = other DNA
tctctgttggtacgcgtggcgcatccaacacctatgaccacctgatcattcgcggctttgcggcagaaggccaaa

SEQ ID NO: 87335 - DNA, 75 bp, synthetic construct
  source 1..75: mol_type = other DNA
gaccagctcaccatcacgctggatgatgccgatggccagttgcagctaccgccacggggcgcgcgtctgacggtt

SEQ ID NO: 87336 - DNA, 75 bp, synthetic construct
  source 1..75: mol_type = other DNA
gcgccattgagctttatttcaaatatggtaagaagcaggctcccgttgtacgcgaactgggctatccttcgaaaa

SEQ ID NO: 87337 - DNA, 75 bp, synthetic construct
  source 1..75: mol_type = other DNA
catagtgctactcaggcggttaatacgccgttattgtttccagggagattatttgtgtctcagctttgtccctgt

SEQ ID NO: 87338 - DNA, 75 bp, synthetic construct
  source 1..75: mol_type = other DNA
cagtgctggatgcactcgagcagcatgaacacggggcgacgctgtttgacggtcgccccgctgtttttgatgagg

SEQ ID NO: 87339 - DNA, 75 bp, synthetic construct
  source 1..75: mol_type = other DNA
atgaggatgacagcagcctgcccggtaagagcatcaagaacgcccacagtgatcgctgtgtccctctggttgatg

SEQ ID NO: 87340 - DNA, 75 bp, synthetic construct
  source 1..75: mol_type = other DNA
ggtacttcaagaacgggttttacagcccgtatgtcaggtagcggtgggtttaatctttgctatatagcgaaaggg

SEQ ID NO: 87341 - DNA, 75 bp, synthetic construct
  source 1..75: mol_type = other DNA
caggatatttcgataatggataagcaagctcgtctggcgcttgctgagcatgttgtttattgtcgccgttcagat

SEQ ID NO: 87342 - DNA, 75 bp, synthetic construct
  source 1..75: mol_type = other DNA
gtgttcctggcgtgggtggttaaagaaagcgtcgcaggtaatcgtaccgtgcgcatctggggaaaatttgctctt

SEQ ID NO: 87343 - DNA, 75 bp, synthetic construct
  source 1..75: mol_type = other DNA
aggcaaagtgctggatctcattaacacgccagagatgcttaacggggttaagcagcgtcacgactggtttgttga

SEQ ID NO: 87344 - DNA, 75 bp, synthetic construct
  source 1..75: mol_type = other DNA
ggtcggttctcttaccaggtaaacccgatgccgttcgggtgtggtaacccactaacccacatgtttaaccagcta

SEQ ID NO: 87345 - DNA, 75 bp, synthetic construct
  source 1..75: mol_type = other DNA
cagtcaggtattactacaaaggcgttttgtggagtcctggctattttgccaatagctgcggaggtgcgccaatat

SEQ ID NO: 87346 - DNA, 75 bp, synthetic construct
  source 1..75: mol_type = other DNA
tagaactgacaccacaggcactgacggcgttaagcaatgccggttttgttaagcgcagccttaaggaactggaaa

SEQ ID NO: 87347 - DNA, 75 bp, synthetic construct
  source 1..75: mol_type = other DNA
tgactgcttccgttgctttatctgtgagtctttcagccttacccgcagaggcatcaacggtcagcgctgaaatac

SEQ ID NO: 87348 - DNA, 75 bp, synthetic construct
  source 1..75: mol_type = other DNA
cggagatgccctcaatcgtcagcgcgaagcctttatggcccgctggattggatgggcgatgcagcaaaacaatgg

SEQ ID NO: 87349 - DNA, 75 bp, synthetic construct
  source 1..75: mol_type = other DNA
ggtgttctgctgcgtggtatcaaacgtgaagaaatcgaacgtggtcaggtactggctaagccgggcaccatcaag

SEQ ID NO: 87350 - DNA, 75 bp, synthetic construct
  source 1..75: mol_type = other DNA
gccgaagtgctggtttattccggtccggcagcatccgtccggcagatagaaaaaatactgccgcgtattgacgtt

SEQ ID NO: 87351 - DNA, 75 bp, synthetic construct
  source 1..75: mol_type = other DNA
cagaaatgctttggaagtaataccagattttccagaaagagatgatcatattataagaatattctggcttaatca

SEQ ID NO: 87352 - DNA, 75 bp, synthetic construct
  source 1..75: mol_type = other DNA
atagccattctggcggatagcggaattcgtaacgggcttgatgtcgtgcgtatgattgcgctcggtgccgacacc

SEQ ID NO: 87353 - DNA, 75 bp, synthetic construct
  source 1..75: mol_type = other DNA
tgtggcgttagatctccaccagcgtgcgctgcaacaggggctggcgtcacattttgtctacggctacggcaaagg

SEQ ID NO: 87354 - DNA, 75 bp, synthetic construct
  source 1..75: mol_type = other DNA
cattgccctgtttcgtctgtttaatcgcgatctgttcggcaatttcaatgagttatatcgcaccattactcgcac

SEQ ID NO: 87355 - DNA, 75 bp, synthetic construct
  source 1..75: mol_type = other DNA
ccatggtggcggaagggcaggtggcgcgtatcgttgagttcattgaaaaaccggacgaaccacagaccctggact

SEQ ID NO: 87356 - DNA, 75 bp, synthetic construct
  source 1..75: mol_type = other DNA
cggcaaagagagcgtcagccatcaaaactatccgcaggtcatcaaacatacgccgcggatgaccgcaatggcgaa

SEQ ID NO: 87357 - DNA, 75 bp, synthetic construct
  source 1..75: mol_type = other DNA
cggcaaagagagcgtcagccatcagaactatccgcaggtcatcaaacatacgccgcggatgaccgcgatggcgaa

SEQ ID NO: 87358 - DNA, 75 bp, synthetic construct
  source 1..75: mol_type = other DNA
agctggaatatgttcatggaagtcaatggtgatggggatgccaatgcttatctggatgatccagagtttatgagt

SEQ ID NO: 87359 - DNA, 75 bp, synthetic construct
  source 1..75: mol_type = other DNA
aaccaagccgatgaagtttgaagagtttcaggcggagatcgactggtggggtaacgaggccgatggttttgccag

SEQ ID NO: 87360 - DNA, 75 bp, synthetic construct
  source 1..75: mol_type = other DNA
attcgaatcagttcgcgccaccgtcgacgtcggcggacgcctgcgtgatagaacatcctgacggtggctggtttg

SEQ ID NO: 87361 - DNA, 75 bp, synthetic construct
  source 1..75: mol_type = other DNA
gcgcaatacttgcagaggtcattggtacaaccttaatgaagttttcagaggggtttacacggttatggccctctg

SEQ ID NO: 87362 - DNA, 75 bp, synthetic construct
  source 1..75: mol_type = other DNA
gtcagaagtggcgctgcgccagcgtattctgaaaaacatgtccgacttaagcctggaaacgacgctgtttaatga

SEQ ID NO: 87363 - DNA, 75 bp, synthetic construct
  source 1..75: mol_type = other DNA
gtcgttttcgcacgttcaatgtcgtcgatgactttaaccgtgaggtgttgtcgattgaaatcgatctgaatctgt

SEQ ID NO: 87364 - DNA, 75 bp, synthetic construct
  source 1..75: mol_type = other DNA
ataaatcaactgaactgttctatgatcttgcctgcaggtcatttaccgcaagctggaatatgttcatggaagtca

SEQ ID NO: 87365 - DNA, 75 bp, synthetic construct
  source 1..75: mol_type = other DNA
aagacctgatattattgaaactattgtaagccgtttccatgagacaaaagcggatgttgtatacggtgatttggt

SEQ ID NO: 87366 - DNA, 75 bp, synthetic construct
  source 1..75: mol_type = other DNA
ctttgattcaaaatgatggtgcttatttgctgtgtaaaatggccgacgatcgcggcgttttccccggtcaatggg

SEQ ID NO: 87367 - DNA, 75 bp, synthetic construct
  source 1..75: mol_type = other DNA
gcgaaatcgctgcaggcgatggatttcaacattatcactgataaaacctcatataacgccattgaatggcccgtc

SEQ ID NO: 87368 - DNA, 75 bp, synthetic construct
  source 1..75: mol_type = other DNA
agcatcggatggcaaaaccgctgagctggtgaaggtcatgcaggataacctcggcggcgattttaaagagtttca

SEQ ID NO: 87369 - DNA, 75 bp, synthetic construct
  source 1..75: mol_type = other DNA
actgagtctgggcggcaatctggaaacagcctttgcgctgcccgccatctattcgaatcagttcgcgccaccgtc

SEQ ID NO: 87370 - DNA, 75 bp, synthetic construct
  source 1..75: mol_type = other DNA
gtaaagactgccgtgggcgtggtgttgccattcatcgtgaagagtcggaaaaacggggtatgcctgtaatcagga

SEQ ID NO: 87371 - DNA, 75 bp, synthetic construct
  source 1..75: mol_type = other DNA
cggtatcaggccggtaaatcactggccggaaacgcggcggcggctggcgcagccggtgttggtattgcgacggcg

SEQ ID NO: 87372 - DNA, 75 bp, synthetic construct
  source 1..75: mol_type = other DNA
tgcgcaggttggtgaaaaagtcaaagactggaaagtggggcaacgcgtcgtatcggataacagcggtcacgtttg

SEQ ID NO: 87373 - DNA, 75 bp, synthetic construct
  source 1..75: mol_type = other DNA
atgacggtaagtattgtttcaccttcctcagcggctgtaaagccccgtcatacccgtttcagacgcgaagacatc

SEQ ID NO: 87374 - DNA, 75 bp, synthetic construct
  source 1..75: mol_type = other DNA
atgaagcctactggtgcacgccggaacgcctgcagcaactggccatcagggagctgcgtcagcttgaactgacgc

SEQ ID NO: 87375 - DNA, 75 bp, synthetic construct
  source 1..75: mol_type = other DNA
ggtgaaggcactggtcgatgccgacagtcgggagtttccgtcagtcacaccgcgcgtccctgccgcggtctgggg

SEQ ID NO: 87376 - DNA, 75 bp, synthetic construct
  source 1..75: mol_type = other DNA
tttgatgaccagaaaaatgcagagaacaacgcagaatttattgcagctttcaaccctgaagtagtacaggcactg

SEQ ID NO: 87377 - DNA, 75 bp, synthetic construct
  source 1..75: mol_type = other DNA
aattacgcaaggaaatggctgtcagtaaggatgctgttgtcacccataagccaacaccggaacttaaccggaata

SEQ ID NO: 87378 - DNA, 75 bp, synthetic construct
  source 1..75: mol_type = other DNA
atgatcacctcaccaccaaaacgcggaatggcactggtcgtggtgctggtattgctggcggttatgatgctggta

SEQ ID NO: 87379 - DNA, 75 bp, synthetic construct
  source 1..75: mol_type = other DNA
atgactattgctgaacggctgcggcaggaaggacatcaaattggctggcaggaaggtaaattagaaggtttgcat

SEQ ID NO: 87380 - DNA, 75 bp, synthetic construct
  source 1..75: mol_type = other DNA
tggcacactgaatttggccacctgaacagaggtgatatgctcacctcagaacaacacaggtgctccaatgaaaaa

SEQ ID NO: 87381 - DNA, 75 bp, synthetic construct
  source 1..75: mol_type = other DNA
tgctgaagcattgcagcattatcaactggcgtatacggaaaaaaataagccttcttatgaagaagctattgcacg

SEQ ID NO: 87382 - DNA, 75 bp, synthetic construct
  source 1..75: mol_type = other DNA
ggaagacaaggatgaggctgttgaaaacctcggattaaaacccacggtggacaaggcaaaaaatgccgttcagcg

SEQ ID NO: 87383 - DNA, 75 bp, synthetic construct
  source 1..75: mol_type = other DNA
gtcacgccactgaaaataacggcaaagatgagcggcacgctgataacgttcaggcgcaaacggaaagctctgtag

SEQ ID NO: 87384 - DNA, 75 bp, synthetic construct
  source 1..75: mol_type = other DNA
ccgaccgaatccgtgaccattgaccttgcttatgaaggttccggtagtggcgactggcgaacggatgcatttatt

SEQ ID NO: 87385 - DNA, 75 bp, synthetic construct
  source 1..75: mol_type = other DNA
ctgctccattacgtcccggatctgcgccgcaagatgctgctggccacactgtggaacaccggtgcacgcattaat

SEQ ID NO: 87386 - DNA, 75 bp, synthetic construct
  source 1..75: mol_type = other DNA
cgacagatgacgatgagctgccggaagtcaccggacctgcgtggatagtcgacaatgtgacgcattatggcggat

SEQ ID NO: 87387 - DNA, 75 bp, synthetic construct
  source 1..75: mol_type = other DNA
ggccggacatatatcgcctcggcaaacaatattaaaaaacgaaaactttatattcgtaacctgaccacaaaaaca

SEQ ID NO: 87388 - DNA, 75 bp, synthetic construct
  source 1..75: mol_type = other DNA
atgaaatacctcgtcagtgtgtgactcctggtgattatgttcttcataacggccggacatatattgcctcggcaa

SEQ ID NO: 87389 - DNA, 75 bp, synthetic construct
  source 1..75: mol_type = other DNA
tgggcgttattctgccgcacggcacggcaatcgaactgcccgaaactgacagcgctccgaaaaccgagacggtga

SEQ ID NO: 87390 - DNA, 75 bp, synthetic construct
  source 1..75: mol_type = other DNA
gggatcagtgaatccggtgaagtggtggatatggccgcttatgaggcatggcaacaggaaaatcatccggacatc

SEQ ID NO: 87391 - DNA, 75 bp, synthetic construct
  source 1..75: mol_type = other DNA
aggcttacgaagaatacttcgaaggccttgccgaaggcgaagaagctcacagcttcaacgaatttaaacaggcgc

SEQ ID NO: 87392 - DNA, 75 bp, synthetic construct
  source 1..75: mol_type = other DNA
gcagcagatgcagcgtcgtgaagaggtgaacattaatgtgcaccgggagcgcggggaggatgttgagccgggaga

SEQ ID NO: 87393 - DNA, 75 bp, synthetic construct
  source 1..75: mol_type = other DNA
atgcgtaaacaacgaatctttatcgctggccatcgtgggatggttggttccgccatcaggcgtcagctcgaacag

SEQ ID NO: 87394 - DNA, 75 bp, synthetic construct
  source 1..75: mol_type = other DNA
ctgctgatatggcctgcggccatgctgctgggggtggccatcactgtgaccatggcgtccttcaagaagtattta

SEQ ID NO: 87395 - DNA, 75 bp, synthetic construct
  source 1..75: mol_type = other DNA
cgttcattccaaacgcatttctggaaaagcttctcaaagaagacatatccgtaagtcagtttaacgatgttctta

SEQ ID NO: 87396 - DNA, 75 bp, synthetic construct
  source 1..75: mol_type = other DNA
gcgctgcgcgcttcgcccttcgggtcgttgcctgcggccacgctctctcgctggcgctcgagtcgaaccttggtc

SEQ ID NO: 87397 - DNA, 75 bp, synthetic construct
  source 1..75: mol_type = other DNA
catcgcggaagaaatgatgaccggatgcacaaatttcgtgttcagcggtaagccgggtaccggaaagaatcatct

SEQ ID NO: 87398 - DNA, 75 bp, synthetic construct
  source 1..75: mol_type = other DNA
tattcgtaacctgaccacaaaaacatgcattactgactgcatgattaaagttttcctcggtcgtgatggcttacc

SEQ ID NO: 87399 - DNA, 75 bp, synthetic construct
  source 1..75: mol_type = other DNA
ggtggagaacccggagacgggggaactgctgtggcagcatgagacgaaacacgcctacaacgaacaggggctggc

SEQ ID NO: 87400 - DNA, 75 bp, synthetic construct
  source 1..75: mol_type = other DNA
ggtgccggcgtggatttccgccgcgtatcagtggctgtttgtggacagtggcatgcagacatggctgcatgcaca

SEQ ID NO: 87401 - DNA, 75 bp, synthetic construct
  source 1..75: mol_type = other DNA
cgtaaaaatgcgtctgagttacaggcgaaatataacagcctgagattgtcggtacagcgccagcgtcaggaattg

SEQ ID NO: 87402 - DNA, 75 bp, synthetic construct
  source 1..75: mol_type = other DNA
gtcggtgataacctgcataaaattggtgcaggtacattgaatgttaatgtttctcaaggtaataatcttaaaacg

SEQ ID NO: 87403 - DNA, 75 bp, synthetic construct
  source 1..75: mol_type = other DNA
ccggagaatatcgcgttcacccgctggctgacacacctgcagaacggtgtactgctggatgagcaaaactgcctg

SEQ ID NO: 87404 - DNA, 75 bp, synthetic construct
  source 1..75: mol_type = other DNA
tgtttgcgctggatgtggctgcacggcaccgggtgcagttttcgattcctgagtccgatgctgtcacaatgctga

SEQ ID NO: 87405 - DNA, 75 bp, synthetic construct
  source 1..75: mol_type = other DNA
gacgagcggacccaccactaccactacgacagccagcaccgcctggtgttctacacgcggatacagcatggcgag

SEQ ID NO: 87406 - DNA, 75 bp, synthetic construct
  source 1..75: mol_type = other DNA
gcgttgtcaatcttagagaaaatcaactatctcccagaataatgcaaactttgttacaacaaaccgcccaaccgg

SEQ ID NO: 87407 - DNA, 75 bp, synthetic construct
  source 1..75: mol_type = other DNA
gccacgctgccgcactatgacgctggcggtaagctgatgctgcccaccacccgcgacatgcatattcatctcgac

SEQ ID NO: 87408 - DNA, 75 bp, synthetic construct
  source 1..75: mol_type = other DNA
atgaacccttatatttatcttggtggtgcaatacttgcagaggtcattggtacaaccttaatgaagttttcagag

SEQ ID NO: 87409 - DNA, 75 bp, synthetic construct
  source 1..75: mol_type = other DNA
gaatctttgccctcatattctgaaacggtatttatcgcaactccgccactgtttgttttgaagcctgacaaaaat

SEQ ID NO: 87410 - DNA, 75 bp, synthetic construct
  source 1..75: mol_type = other DNA
tcggtattcgatatgcagatgttgaggtcatgaaaattgctggagatgcccagctttctaccccatgcactgaca

SEQ ID NO: 87411 - DNA, 75 bp, synthetic construct
  source 1..75: mol_type = other DNA
tcgtcgtattcagacagtgaccctggttttattatttatggcggggatcgttaattttctcgaccgttcgtcatt

SEQ ID NO: 87412 - DNA, 75 bp, synthetic construct
  source 1..75: mol_type = other DNA
atgactgccgcctcaaccggaaagctggacaaactgaccgctgcgtttaaagcctcagacgggaagaccgcagag

SEQ ID NO: 87413 - DNA, 75 bp, synthetic construct
  source 1..75: mol_type = other DNA
gctgcagacgatggtggcaacactgaaaatacccatggagcggcgtaaccgtcgcacaggaaggacagagaaagc

SEQ ID NO: 87414 - DNA, 75 bp, synthetic construct
  source 1..75: mol_type = other DNA
ccggtgcgcgcattaatgaagcactggcgctgacgcggggggatttttcgcttgcgcctccgtatccgtttgtgc

SEQ ID NO: 87415 - DNA, 75 bp, synthetic construct
  source 1..75: mol_type = other DNA
ctatgcgatgcacatgctgtatgccggtataccgctgaaagttctgcaaagcctgatgggacataagtccatcag

SEQ ID NO: 87416 - DNA, 75 bp, synthetic construct
  source 1..75: mol_type = other DNA
attcccggataagggtgactttcgatggcgtccggggtgaaacgccggataagtttaatttatccggtcaggcaa

SEQ ID NO: 87417 - DNA, 75 bp, synthetic construct
  source 1..75: mol_type = other DNA
atctggcaaacgatgagcgggggcttaaaacacgcatcagcgagacgacggcgcagctcaaccggcagcgtgaag

SEQ ID NO: 87418 - DNA, 75 bp, synthetic construct
  source 1..75: mol_type = other DNA
caccatgacgcctggaagatacggttcgtatactgtgaaagcatccctggcgaatggatcctcttatgagaagga

SEQ ID NO: 87419 - DNA, 75 bp, synthetic construct
  source 1..75: mol_type = other DNA
ccagtacagatggtaatcatagccactcactgtccggcacagcagcatctgcaggtgcacacgcgcatactgtcg

SEQ ID NO: 87420 - DNA, 75 bp, synthetic construct
  source 1..75: mol_type = other DNA
gcgcgtagtgttatcaaatccgccagcattaccgccgcgcacccatcgtttgctgttggtggaactggaagggga

SEQ ID NO: 87421 - DNA, 75 bp, synthetic construct
  source 1..75: mol_type = other DNA
ctgcatgggttcagcagcagtattgccagtgcctggaacacgctcagtcagtttggttctaaccgggggagcagt

SEQ ID NO: 87422 - DNA, 75 bp, synthetic construct
  source 1..75: mol_type = other DNA
tttaccttcaatgcgctggtgtccattatgcagtttgtcgccgatgaagatactttgcagggcctggtgttctgg

SEQ ID NO: 87423 - DNA, 75 bp, synthetic construct
  source 1..75: mol_type = other DNA
atgcgtaaactttatgccgccattttgtccgcagccatttgtctggccgtatccggtgcacctgcatgggcgtct

SEQ ID NO: 87424 - DNA, 75 bp, synthetic construct
  source 1..75: mol_type = other DNA
ggttatcgtttgggacatccgtttgccctatgcgctgatggcgctcctggtaggaatggcgctgggtttggccgg

SEQ ID NO: 87425 - DNA, 75 bp, synthetic construct
  source 1..75: mol_type = other DNA
atatgcgcgtcggaatggatgcgatgaaagaagttgtcagaaataaaattaatgtctgtggttcagcgaatcgaa

SEQ ID NO: 87426 - DNA, 75 bp, synthetic construct
  source 1..75: mol_type = other DNA
gacccggctgggcagggcgttttgatcaggaaggccagtaccaggattaccagcgcacacagtatgaagtgtatg

SEQ ID NO: 87427 - DNA, 75 bp, synthetic construct
  source 1..75: mol_type = other DNA
gtgttttttttctcactgggggcggggtttctcacgctgcggttcagaaaaccatattcagtgctgacgtggtgg

SEQ ID NO: 87428 - DNA, 75 bp, synthetic construct
  source 1..75: mol_type = other DNA
gaacatcagtccacgctgagcgcggagtaccttcatgcctcgacgaacgttcccggcagcgatgatctgaacggg

SEQ ID NO: 87429 - DNA, 75 bp, synthetic construct
  source 1..75: mol_type = other DNA
gatgcgcgcgctgaaaaaagagggcgactccatcggcgcgaaagtcaccgttgttgccagtggcgtccccgccgg

SEQ ID NO: 87430 - DNA, 75 bp, synthetic construct
  source 1..75: mol_type = other DNA
gggccgtctgtgcgcgtgaatgaatggttcagcgcgtatgcgatggcgggtgtggcttacagccgtgtgtcgact

SEQ ID NO: 87431 - DNA, 75 bp, synthetic construct
  source 1..75: mol_type = other DNA
cactccgatcgttcgtggttctgctctgaaagcgctggaaggcgacgcagagtgggaagcgaaaaatcctggaac

SEQ ID NO: 87432 - DNA, 75 bp, synthetic construct
  source 1..75: mol_type = other DNA
gtgaaaaaaggcgttacggactttcaggagaagatgtgggttggtgactggaaatatgtaccgacaaaagaggat

SEQ ID NO: 87433 - DNA, 75 bp, synthetic construct
  source 1..75: mol_type = other DNA
aactggtgagtgacagttacagttatttctacggctccagccagtctgccagccagattatgcgccagaacgtca

SEQ ID NO: 87434 - DNA, 75 bp, synthetic construct
  source 1..75: mol_type = other DNA
gcattatctcagaataataaatataatgaagaaaaatcgggtcaggaaagaatgcccggggctgacagtccacag

SEQ ID NO: 87435 - DNA, 75 bp, synthetic construct
  source 1..75: mol_type = other DNA
aatccgttcttctgcccggacccggacaaaatcgacgcgttagatgaactgatgcgcgcgctgaaaaaagagggc

SEQ ID NO: 87436 - DNA, 75 bp, synthetic construct
  source 1..75: mol_type = other DNA
gaatgttcgcgcactgggttaaagaacgcattgctgaatatggattcgttgaaagccaggactatattttgattt

SEQ ID NO: 87437 - DNA, 75 bp, synthetic construct
  source 1..75: mol_type = other DNA
taaccctggtacaaaccaccctcgcatgctgacttcgttgcgcgctttagtgaaacggggagcgaaaatgatcgc

SEQ ID NO: 87438 - DNA, 75 bp, synthetic construct
  source 1..75: mol_type = other DNA
ggctaccaaactggtaatgcgctttgggtggaatgggaaatggtttgcgatggggcgaccatcaacctgaaagtc

SEQ ID NO: 87439 - DNA, 75 bp, synthetic construct
  source 1..75: mol_type = other DNA
ccagcagtttctctcccttgaattccagcagatcctcgacaaaatggcctacctgacgatatggcagggcgatga

SEQ ID NO: 87440 - DNA, 69 bp, synthetic construct
  source 1..69: mol_type = other DNA
ctgcgtttcgcaatccgtgaaggcggccgtaccgttggcgcgggcgttgtagcaaaagttctgagctaa

SEQ ID NO: 87441 - DNA, 75 bp, synthetic construct
  source 1..75: mol_type = other DNA
tctccgaagtcactgatgtacacgacgccattcatctgttaacgccgcgcgccatcaatgaagaagtgggcaggt

SEQ ID NO: 87442 - DNA, 75 bp, synthetic construct
  source 1..75: mol_type = other DNA
acgatgtgctgaccggaagtgatgacggtcgccacagcaacacgtctctggcgtggggggctggcgtgcagttta

SEQ ID NO: 87443 - DNA, 75 bp, synthetic construct
  source 1..75: mol_type = other DNA
aattcctgggtttgtttatgattattggggaggggttgcttcagagttttcatctggatttattaaagaactcaa

SEQ ID NO: 87444 - DNA, 75 bp, synthetic construct
  source 1..75: mol_type = other DNA
cttctctggcaatagatctaggacaaaaaggacaaggccacgaagaaattaacaatgcgatagatgcttctcata

SEQ ID NO: 87445 - DNA, 75 bp, synthetic construct
  source 1..75: mol_type = other DNA
cgccgctggcaggcggaagcgggtgatatcgactactacctgtttaccggcgaacgcgtacttgatatcaccaaa

SEQ ID NO: 87446 - DNA, 75 bp, synthetic construct
  source 1..75: mol_type = other DNA
acaggtgtgacattaaccagcataaataaggctgcggcaaaaatgacgcgggcaggaatcctggtcattgatggt

SEQ ID NO: 87447 - DNA, 75 bp, synthetic construct
  source 1..75: mol_type = other DNA
ttacggacacactggggatggtgacgtcattcagctatgcaggagacaagaatcgccagcttacccgttacagcg

SEQ ID NO: 87448 - DNA, 75 bp, synthetic construct
  source 1..75: mol_type = other DNA
caaaagctccccgttacttattaacgctattaacaataacgagcagttgttcatggagtttgacttctatcggat

SEQ ID NO: 87449 - DNA, 75 bp, synthetic construct
  source 1..75: mol_type = other DNA
tatcggccacgttgaccaaggtaaaacaactctgaccgctgcaatcactaccgtactggctaaaacctacggcgg

SEQ ID NO: 87450 - DNA, 75 bp, synthetic construct
  source 1..75: mol_type = other DNA
ctacgacatcatgctccagtacgttcaggaactgcttcagcaggcccgggccatgattgccaccgggaactatcc

SEQ ID NO: 87451 - DNA, 75 bp, synthetic construct
  source 1..75: mol_type = other DNA
aatccgccagctgaaaccggagcatggaaagacgctgttgattgggtgctcaaagaggcttgccaggctgtaaac

SEQ ID NO: 87452 - DNA, 75 bp, synthetic construct
  source 1..75: mol_type = other DNA
tgagaacggcgacagacgaatctggtaagttcaggactggtgtcttagaagcggcccttgcccactcgaagaaag

SEQ ID NO: 87453 - DNA, 75 bp, synthetic construct
  source 1..75: mol_type = other DNA
cggatatgtttggtgaccgggtcgatcacggcggcagtatcaatattctgacctctcaccgcccttcaccgctgg

SEQ ID NO: 87454 - DNA, 75 bp, synthetic construct
  source 1..75: mol_type = other DNA
tgaagaaacggatcgagttcatcaggaagctcggaaaacagaccgcacgacagagacagatcattgacctgctcg

SEQ ID NO: 87455 - DNA, 75 bp, synthetic construct
  source 1..75: mol_type = other DNA
aagagatgatcgaggcaattgaacagcacactgcctgtatcagtaccagggatataccgggcgttattgccaact

SEQ ID NO: 87456 - DNA, 75 bp, synthetic construct
  source 1..75: mol_type = other DNA
gggctggcaatgggcgtcagtacgctgactctgacattatggtatcgcgtacctgttctcaccgcatggtcaacg

SEQ ID NO: 87457 - DNA, 75 bp, synthetic construct
  source 1..75: mol_type = other DNA
cattaacagtatgaacctcagttcctgtcaggtggcacaggggcttgtgggggggctgttccctcagacgcagga

SEQ ID NO: 87458 - DNA, 75 bp, synthetic construct
  source 1..75: mol_type = other DNA
caagccttatcactattacgttacggcgctggcggctatcactggtgcgcgactcaatgaagtagctcaacttca

SEQ ID NO: 87459 - DNA, 75 bp, synthetic construct
  source 1..75: mol_type = other DNA
tgaatgtggcgttatgcacggttatcgtgctgacgctctttttttatcgtcgccgtgattccagacataaaccgc

SEQ ID NO: 87460 - DNA, 75 bp, synthetic construct
  source 1..75: mol_type = other DNA
gggggatgattattcaatgggggagtttttctgtctcaccaaccggaggaagtgttggaacagttgatataacat

SEQ ID NO: 87461 - DNA, 75 bp, synthetic construct
  source 1..75: mol_type = other DNA
atgagagtagaaaataataatgtttctgggcaaaaccatgacccggaacagattgatttgattgatttactggtc

SEQ ID NO: 87462 - DNA, 75 bp, synthetic construct
  source 1..75: mol_type = other DNA
aaacgatgtgggaccgtgaaacccgccagcgtctgccgcgctatgtctggataacaccggcagggtggcagatgc

SEQ ID NO: 87463 - DNA, 75 bp, synthetic construct
  source 1..75: mol_type = other DNA
gaaacgctgattgcggcggcaggagtatttatgacgcaagaaggtatggctgaaagtgagaatggagtaagtttt

SEQ ID NO: 87464 - DNA, 75 bp, synthetic construct
  source 1..75: mol_type = other DNA
ctgtccatgctggaccgctggctgccccgaccgcaggaagtctccatgaacggcagtgatccggtcaccgagttt

SEQ ID NO: 87465 - DNA, 75 bp, synthetic construct
  source 1..75: mol_type = other DNA
gatctggaaactgctggcggagtcattgatcgggacaccattaaatggtggcttaagcaatcacgcgaagcgcaa

SEQ ID NO: 87466 - DNA, 75 bp, synthetic construct
  source 1..75: mol_type = other DNA
tgcagcagtgggaccagcagcaacaggcaaaaaaaacacagcaggcggagatggcagcacagcacaaccccgcgc

SEQ ID NO: 87467 - DNA, 75 bp, synthetic construct
  source 1..75: mol_type = other DNA
ttatacaaaagccgaatctgatgcgcgctatcaacttaaaaacgcagcaggaaaggctgcaaacggatggtttaa

SEQ ID NO: 87468 - DNA, 75 bp, synthetic construct
  source 1..75: mol_type = other DNA
cggcacagaaggggattgtccagctcagtagcgccaccgacagcgtatcagaggtgcttgctgcgaccccgaaag

SEQ ID NO: 87469 - DNA, 75 bp, synthetic construct
  source 1..75: mol_type = other DNA
atggaaaccgtatttgatgcactgaaagcactgaaaagagcctcgtctcacgagattgcagcccgtgttgaaatc

SEQ ID NO: 87470 - DNA, 75 bp, synthetic construct
  source 1..75: mol_type = other DNA
gaatacattggtgataataaatttgtcatcagtgatgaacgtgactacgccatttatgtgatttcacttaacgct

SEQ ID NO: 87471 - DNA, 75 bp, synthetic construct
  source 1..75: mol_type = other DNA
gggcgtggcttacagccgtgtgtcgactttttccggggattatctccgcgtaactgacaacaaggggaaaacgca

SEQ ID NO: 87472 - DNA, 75 bp, synthetic construct
  source 1..75: mol_type = other DNA
gcatgggcggtgagagtgccggtagttttaattagcggatttacattaccaaatagtgagttttatacaccatgg

SEQ ID NO: 87473 - DNA, 75 bp, synthetic construct
  source 1..75: mol_type = other DNA
gtgggaccaaaatcgccgccgttgtcatggatgcgcatggctgggagattcgccgttaccgctgcccgacgcaaa

SEQ ID NO: 87474 - DNA, 75 bp, synthetic construct
  source 1..75: mol_type = other DNA
aagtaatgaatctcgataatgtgcaaaatgcagaagtgtttgccaatattgagaaacaattgcgcatgattcaat

SEQ ID NO: 87475 - DNA, 75 bp, synthetic construct
  source 1..75: mol_type = other DNA
gaccagctgcaggccatcgcgcccggtcagcctttccgtctccagcagacgcgcagtgctgccgatgtggccatc

SEQ ID NO: 87476 - DNA, 75 bp, synthetic construct
  source 1..75: mol_type = other DNA
gtggtgagtggttgcggaataacctgaacgccattgccgcctttatgggaaccaggacgtgggattccattgaaa

SEQ ID NO: 87477 - DNA, 75 bp, synthetic construct
  source 1..75: mol_type = other DNA
gacaacaaggggaaaacgcacgacgtgctgaccggaagtgatgacggtcgccacagcaacacgtctctggcgtgg

SEQ ID NO: 87478 - DNA, 75 bp, synthetic construct
  source 1..75: mol_type = other DNA
cctctcgccattcgcctgacgctccgtcatgaaatcgaggatttctgcgcgacgttggaggcgccaggcgaaccg

SEQ ID NO: 87479 - DNA, 75 bp, synthetic construct
  source 1..75: mol_type = other DNA
ctggagtgatatggctgttctgtgtccggcagagttttcagtgaaacaactgaaagaggttatgacacaacgcgg

SEQ ID NO: 87480 - DNA, 75 bp, synthetic construct
  source 1..75: mol_type = other DNA
caaaaccgcacgttaacgtgggtactatcggccacgttgaccaaggtaaaacaacactgaccgctgcaatcacga

SEQ ID NO: 87481 - DNA, 75 bp, synthetic construct
  source 1..75: mol_type = other DNA
aagtcgattttgccgaccgggtatcagtggccaatggaatcctgatcgggaactttgcaaaggtcgttggactta

SEQ ID NO: 87482 - DNA, 75 bp, synthetic construct
  source 1..75: mol_type = other DNA
atccgtggccattgatattgcttatgaaggttccggcagtggtgactggcgcactgacggtttcatcgtgggtgt

SEQ ID NO: 87483 - DNA, 75 bp, synthetic construct
  source 1..75: mol_type = other DNA
ctgaaatcttttatgttgtgtccttgcatatctatgcggagctttttaactcaaaggataaaacgaccagcaata

SEQ ID NO: 87484 - DNA, 75 bp, synthetic construct
  source 1..75: mol_type = other DNA
agagcggacaactggtggtgaactttactgcggatacgctcactgcgcaggttaatcttaacgttaccgaggaca

SEQ ID NO: 87485 - DNA, 75 bp, synthetic construct
  source 1..75: mol_type = other DNA
atgacgaatattaccgacagacatacacttcgccgtatgtcctggtcggaactcaccacggcagcacaggacgca

SEQ ID NO: 87486 - DNA, 75 bp, synthetic construct
  source 1..75: mol_type = other DNA
ttcttctaactggtttaaaattaagagaatttaagaacagagtaaccggaagttactctgttggtaagaacgcca

SEQ ID NO: 87487 - DNA, 75 bp, synthetic construct
  source 1..75: mol_type = other DNA
ccgtctgccgggacagcagtatgatgaggagtcggggctgtactacaaccgcaaccggtactatgatccgttgca

SEQ ID NO: 87488 - DNA, 75 bp, synthetic construct
  source 1..75: mol_type = other DNA
ccgtactggctaaaacctacggcggtgctgctcgtgcattcgaccagatcgataacgctccggaagaaaaagctc

SEQ ID NO: 87489 - DNA, 75 bp, synthetic construct
  source 1..75: mol_type = other DNA
cgaagataaagttgaaaaaagacttcaaaatcgccagatgaaatatcaaagtgaaattaaacaactctctgcgtt

SEQ ID NO: 87490 - DNA, 75 bp, synthetic construct
  source 1..75: mol_type = other DNA
cgacaatggtagtccaaaggctcctcgtccggttgatgaaccgcgtacgccgaacccgggtaacaccatgtcaga

SEQ ID NO: 87491 - DNA, 75 bp, synthetic construct
  source 1..75: mol_type = other DNA
catgtaaaaagcctcggaatggcgctgcgcagccggattcaggaaggttataccctgtcggacagcctgcgcgaa

SEQ ID NO: 87492 - DNA, 75 bp, synthetic construct
  source 1..75: mol_type = other DNA
aaagggttgcggaggtagctgctcgcttttctcttgacggtatgccggggaaacaaatgagcattgatgcggatt

SEQ ID NO: 87493 - DNA, 75 bp, synthetic construct
  source 1..75: mol_type = other DNA
gctgcgactgctggacaaaaaccaggcccgcctgacgctggagcgtctggggctgagtcatgaactgaccgcgca

SEQ ID NO: 87494 - DNA, 75 bp, synthetic construct
  source 1..75: mol_type = other DNA
tgaagcccggatgaatgcatcggcagggggaatgttgcagcgtcggcggcacgcacatcgtcgcgtggcggcggc

SEQ ID NO: 87495 - DNA, 75 bp, synthetic construct
  source 1..75: mol_type = other DNA
atgctgggtaatatgaatgtttttatggccgtactgggaataattttattttctggttttctggccgcgtatttc

SEQ ID NO: 87496 - DNA, 75 bp, synthetic construct
  source 1..75: mol_type = other DNA
tgtctgcttcgctatctcgtcaacttacggttgaatacgattacgtgtggtttgtcccttctggcgctgtaaaag

SEQ ID NO: 87497 - DNA, 75 bp, synthetic construct
  source 1..75: mol_type = other DNA
aacgctaagccgggtgctggaatggccggtcgttgtatcaccagaaggcactgcgccacgccagcattcagatgc

SEQ ID NO: 87498 - DNA, 75 bp, synthetic construct
  source 1..75: mol_type = other DNA
ctacgactactatcagccggaagcctatgtaccgagttccgacaccttcattgagaaagatgcctcggttaacga

SEQ ID NO: 87499 - DNA, 75 bp, synthetic construct
  source 1..75: mol_type = other DNA
ccgcttttaaaccttctggcgatcagccagaggcgattcgacgtctcgaagaggggctggaagatggcctggcgc

SEQ ID NO: 87500 - DNA, 75 bp, synthetic construct
  source 1..75: mol_type = other DNA
ccgccgacgttgacaccaccacattgcctggcggcaaagccagcgatgctgcacaagattttctcgcgttgttga

SEQ ID NO: 87501 - DNA, 75 bp, synthetic construct
  source 1..75: mol_type = other DNA
gccggaggcggatgaggtgctgcctgcgccgctgccgccgtaccgggtactgaccgggctggtggaccgcttcgg

SEQ ID NO: 87502 - DNA, 75 bp, synthetic construct
  source 1..75: mol_type = other DNA
aactgctcgcatggtagttcgtcagccgctggagctggtcgacatggttgagaaactggacctgtacatcaccgt

SEQ ID NO: 87503 - DNA, 75 bp, synthetic construct
  source 1..75: mol_type = other DNA
accgcttaatgacgtcttaacggcaatcagcgcactgacgcaacgggcagataatcttctgtacttcaatacaga

SEQ ID NO: 87504 - DNA, 75 bp, synthetic construct
  source 1..75: mol_type = other DNA
tccacacatgggggcgtgaccagcagtggcatccgcatatccatttatcgacaactgccggtggtgtgacgtcgg

SEQ ID NO: 87505 - DNA, 75 bp, synthetic construct
  source 1..75: mol_type = other DNA
ctgattgcggtatccaacatggcagaaagctataagccagaactggctgaaggctccggacgtgcgcagacctgc

SEQ ID NO: 87506 - DNA, 75 bp, synthetic construct
  source 1..75: mol_type = other DNA
cttctttgttcgtttttaatttatcgtctggttttgcggcggaaaacattcctttttcacctcagcctccagaga

SEQ ID NO: 87507 - DNA, 75 bp, synthetic construct
  source 1..75: mol_type = other DNA
tcatgtgagcgttacgatcatgatttcggtggctgggtagaaagcgaatgtcttgggttatatctgattgatgat

SEQ ID NO: 87508 - DNA, 75 bp, synthetic construct
  source 1..75: mol_type = other DNA
gctttggcccggtggcacaaatctatatcggtggcaaagaaaaaaggacgatgcgcaatctcaccattacgcgga

SEQ ID NO: 87509 - DNA, 75 bp, synthetic construct
  source 1..75: mol_type = other DNA
gcggcgccaagtggtcagcgatggcgactatagtcatcattggcctggggctggtgcagatgaccgtgctggcgc

SEQ ID NO: 87510 - DNA, 75 bp, synthetic construct
  source 1..75: mol_type = other DNA
cagtgaaattacgcaagattcgctggtgcaggggctgggtaaagagttgcctacggcactggctccgatggcgaa

SEQ ID NO: 87511 - DNA, 75 bp, synthetic construct
  source 1..75: mol_type = other DNA
ctatgaactctttgctaaacaacaaaaagaacgctttagtttacttagtaaatatgatgagtatcttaatctcat

SEQ ID NO: 87512 - DNA, 75 bp, synthetic construct
  source 1..75: mol_type = other DNA
catcgccgtggaatcggaacccgggattttcacacaattttttgtccagataccctgggacggggagaggtcgaa

SEQ ID NO: 87513 - DNA, 75 bp, synthetic construct
  source 1..75: mol_type = other DNA
ccgccacccgctggtggtggagatgaagcgccagctgtgccgtaacgagaagatgaaaacactgcttcgcgcagg

SEQ ID NO: 87514 - DNA, 75 bp, synthetic construct
  source 1..75: mol_type = other DNA
atctcggtgagcgggccagcctttcagtgaaaaatatgggctatctgagttcaaatattatagcagaggactctg

SEQ ID NO: 87515 - DNA, 75 bp, synthetic construct
  source 1..75: mol_type = other DNA
tcttcaatgaagaagatgcgataccaattttctataaaacggtacgtgaattcgaagagttgaagccttatgacg

SEQ ID NO: 87516 - DNA, 75 bp, synthetic construct
  source 1..75: mol_type = other DNA
aacaccaaataacacctatctaaaatataatcccaaagctaaagggaatggagttacaattatcaggcaagggag

SEQ ID NO: 87517 - DNA, 75 bp, synthetic construct
  source 1..75: mol_type = other DNA
gattacgtcgatgacaaaatcgcagagcatgagcaatcccgccgccatcctgacgccacgctgacagaaaaaggt

SEQ ID NO: 87518 - DNA, 75 bp, synthetic construct
  source 1..75: mol_type = other DNA
tgccacacaacctgtaccggatgcgcctgtgccgaaagatttaccccccggaatgccggatatgcggcaattttg

SEQ ID NO: 87519 - DNA, 75 bp, synthetic construct
  source 1..75: mol_type = other DNA
cctgtggctgccgttttatctctccttgcccacgctcacggtgagctacggcctgggctgggcgctgaacggtca

SEQ ID NO: 87520 - DNA, 75 bp, synthetic construct
  source 1..75: mol_type = other DNA
ttaattgggattggagtgctcggtgagtatattggtagaatttacattgaagttaagcagcgtccaaagtatgta

SEQ ID NO: 87521 - DNA, 75 bp, synthetic construct
  source 1..75: mol_type = other DNA
tgttggcagcaatagttaccggatgttcatcgccaccgcctcccgttcctgtagattgggataaagccgccgccc

SEQ ID NO: 87522 - DNA, 75 bp, synthetic construct
  source 1..75: mol_type = other DNA
accgtaacggaagcgcgcctggctattgctctggctcaggaaggcggtatcggctttatccacaaaaacatgtcc

SEQ ID NO: 87523 - DNA, 75 bp, synthetic construct
  source 1..75: mol_type = other DNA
ttgattttggcaaagagaaccagagcatcgattaccgtattacggtgactgacaatgccaatctggtaatcaata

SEQ ID NO: 87524 - DNA, 75 bp, synthetic construct
  source 1..75: mol_type = other DNA
tgtggacaacaaacgtctggggcgggcactggaaatggcgcaactggtccaggccgagcgggataataaccggtc

SEQ ID NO: 87525 - DNA, 75 bp, synthetic construct
  source 1..75: mol_type = other DNA
agtgggataagtatgcggcacaactagtcgaagaggctccgaccgagtggcatgactggaaaaatcgcattagtt

SEQ ID NO: 87526 - DNA, 75 bp, synthetic construct
  source 1..75: mol_type = other DNA
gaatacgccggactggtgaagttcgacttccttggtttgcgtacgctcaccatcatcaactgggcgctggagatg

SEQ ID NO: 87527 - DNA, 75 bp, synthetic construct
  source 1..75: mol_type = other DNA
aactcgttgatggaactgtatggcatgtcgacgcttatagatgaacataccttcggcgaagttaaagcgttcaga

SEQ ID NO: 87528 - DNA, 75 bp, synthetic construct
  source 1..75: mol_type = other DNA
taatcatcacgacgatccgtctccggtgccggacgatggcggtaatacgccagtaccaccggatgatggcggaga

SEQ ID NO: 87529 - DNA, 75 bp, synthetic construct
  source 1..75: mol_type = other DNA
ctggaacgtgaaaatcgtgaactgcgccgcagcaacaatatccttcgccaggcttccgcttattttgcgaaggcg

SEQ ID NO: 87530 - DNA, 75 bp, synthetic construct
  source 1..75: mol_type = other DNA
gcttgatggaacagatcaccacttccgatgagttaattgatttcctgaccctgccaggctaccgcctgttagcgt

SEQ ID NO: 87531 - DNA, 75 bp, synthetic construct
  source 1..75: mol_type = other DNA
aaatcggtcagaaatggtcgggtaccgttaccgtcgataccaccattcaggaacatcgcgatcgcggtgatacct

SEQ ID NO: 87532 - DNA, 75 bp, synthetic construct
  source 1..75: mol_type = other DNA
ggctgcgaccaccactggtttgaaaatcggggacctaagtgtacggcactggtttacgttgatgacgcaaccagt

SEQ ID NO: 87533 - DNA, 75 bp, synthetic construct
  source 1..75: mol_type = other DNA
cggatgaagctgatcttgcgggagcgttcgaagatgatgcactgaatgcgcgtgacgcatatgaaagtgcttttg

SEQ ID NO: 87534 - DNA, 75 bp, synthetic construct
  source 1..75: mol_type = other DNA
ctccaccggagacaggcatttatttggacatgtcagaaatctgcgaatctggcacagggaattgaatgacaggca

SEQ ID NO: 87535 - DNA, 75 bp, synthetic construct
  source 1..75: mol_type = other DNA
gaaattgatgaagagaaggttcatgaactgagtaaacatttccaggattggcgtaacccgttgtggcgtcacgca

SEQ ID NO: 87536 - DNA, 75 bp, synthetic construct
  source 1..75: mol_type = other DNA
gctgatgaaacccggcctgggtgtggaaattgatgaagagaaggttcatgaactgagtaaacatttccaggattg

SEQ ID NO: 87537 - DNA, 75 bp, synthetic construct
  source 1..75: mol_type = other DNA
attcaggcgtgtatgttgacgtaatcggtaaatatgtccatcacagcaacgactatttactgcaaacgatgggat

SEQ ID NO: 87538 - DNA, 75 bp, synthetic construct
  source 1..75: mol_type = other DNA
atgatacagaaaccaccgccagtgcgaatattgtccgttatgtactgatagttgcagtgcggtcgcagattgatc

SEQ ID NO: 87539 - DNA, 75 bp, synthetic construct
  source 1..75: mol_type = other DNA
agcgggatgaactcatcagtgcccttgaagagcggatgaagcaaaaaacggatatcaccgagcttttttccatcc

SEQ ID NO: 87540 - DNA, 75 bp, synthetic construct
  source 1..75: mol_type = other DNA
ctttcccggggcgttatatggcgctatccggggtcagggactctaaaggaataaccggtcgtatctgcctgtttg

SEQ ID NO: 87541 - DNA, 75 bp, synthetic construct
  source 1..75: mol_type = other DNA
cgatgctgaccgagcaggaggtcgccgcactggaactgcctgaccttgtggcgctggccggtaaggtggtcggtt

SEQ ID NO: 87542 - DNA, 75 bp, synthetic construct
  source 1..75: mol_type = other DNA
atgcgtgatatttaccacgaaacaacagatcgcgtatttcttgcactttctcacagtgaaaacatgctggaaata

SEQ ID NO: 87543 - DNA, 75 bp, synthetic construct
  source 1..75: mol_type = other DNA
aagcacgacacgccgggtaacgttcacagccaccataaacactatctacggacaaaccacccttaccagcgaggc

SEQ ID NO: 87544 - DNA, 75 bp, synthetic construct
  source 1..75: mol_type = other DNA
aactcaagcgcggcgatgtgcttccccatgacatggtcgaatcttctgctgctgcatggcgggatgaaatgagca

SEQ ID NO: 87545 - DNA, 75 bp, synthetic construct
  source 1..75: mol_type = other DNA
aaattgccgggcttaaatcctctctaacgatgttgatgtctgcattcaatctgatgtcttctcaggcgggttata

SEQ ID NO: 87546 - DNA, 75 bp, synthetic construct
  source 1..75: mol_type = other DNA
gacaacgagcagttgctggtggagattgaagaactgttcaacaccaaagcgcaaagcggctcgcacgaggcgcgt

SEQ ID NO: 87547 - DNA, 75 bp, synthetic construct
  source 1..75: mol_type = other DNA
aactcgagcacggcgatgtgcttccccatgacatggtcgaatcatctgctgcagcatggagggatgaaatgagca

SEQ ID NO: 87548 - DNA, 75 bp, synthetic construct
  source 1..75: mol_type = other DNA
tacgtgttttggataaattcacaccagatttacccggttatcacctgtactatccacaccgtcgacatgctggct

SEQ ID NO: 87549 - DNA, 75 bp, synthetic construct
  source 1..75: mol_type = other DNA
aaaaatgaccttgccctgcacctgcttgcggagctggatgaacgtgcaacccggctgaccctgtcacaatgggaa

SEQ ID NO: 87550 - DNA, 75 bp, synthetic construct
  source 1..75: mol_type = other DNA
atgaatgaacatcacactgtggcagcaacagatgattcaggccttcaggtcagtggtgacagtcctgtcacggtt

SEQ ID NO: 87551 - DNA, 75 bp, synthetic construct
  source 1..75: mol_type = other DNA
aaggaaaatcgaaatgcagcatgaagagtttcagaaaatgacagagcgtgagcaagtacctttattgaaatcgcc

SEQ ID NO: 87552 - DNA, 75 bp, synthetic construct
  source 1..75: mol_type = other DNA
gttccattgccccaaagattggctgtacgccggagaccctgcgtgtctgggtacgccagcatgagcgggataccg

SEQ ID NO: 87553 - DNA, 75 bp, synthetic construct
  source 1..75: mol_type = other DNA
cttacagcacagctgcgactgggaccggcagacattctggagtccgatgagaatggcattatcccggagcaggac

SEQ ID NO: 87554 - DNA, 75 bp, synthetic construct
  source 1..75: mol_type = other DNA
atgcgtgatatttatcttgaaacaatagaccgcgcatcacttgcactttctcacagtgaaaacatgatggaaata

SEQ ID NO: 87555 - DNA, 75 bp, synthetic construct
  source 1..75: mol_type = other DNA
ccccagaccggcacacctgccaccgatctggatgatgactactttgatatgttgcaggaagaactctgcagcgtg

SEQ ID NO: 87556 - DNA, 75 bp, synthetic construct
  source 1..75: mol_type = other DNA
accccaccaataaattaccggatttacgcggtgaatttatccgtggctgggatgatgggcgcgggattgatgcgg

SEQ ID NO: 87557 - DNA, 75 bp, synthetic construct
  source 1..75: mol_type = other DNA
cgccgtgactcagaacgtggctattgttgtcacggctttgatcgcgattgctgccctctcggttgcggtgattta

SEQ ID NO: 87558 - DNA, 75 bp, synthetic construct
  source 1..75: mol_type = other DNA
tgataaattccgtgcagacctggcggatatggcaggccagtgcgtcagtggctctgctggcagtgttccctggat

SEQ ID NO: 87559 - DNA, 75 bp, synthetic construct
  source 1..75: mol_type = other DNA
ggccccgttcggtttcagggcctgccatcgtcatgaccgtggctgttgtggttgcgctttgcacgtttattcacc

SEQ ID NO: 87560 - DNA, 75 bp, synthetic construct
  source 1..75: mol_type = other DNA
gtccactattctttcaggaatttcaggatctgccagacggtgctgagacgacgcttacgaatcagcacggggctg

SEQ ID NO: 87561 - DNA, 75 bp, synthetic construct
  source 1..75: mol_type = other DNA
gtggactcgccagcagaatataaaattttcctcaacatcatcctcgcaccagtcgacgacggtttacgctttacg

SEQ ID NO: 87562 - DNA, 75 bp, synthetic construct
  source 1..75: mol_type = other DNA
gtacatgatgaccaaaaacgtcaagttcctggccggttttgccatcatctctgtatttattgctgtgggtatggc

SEQ ID NO: 87563 - DNA, 75 bp, synthetic construct
  source 1..75: mol_type = other DNA
tatggaggggatcaacagcgacccggatatcagacgactgggggaggtgaaatttattcttgattttgatgaacc

SEQ ID NO: 87564 - DNA, 75 bp, synthetic construct
  source 1..75: mol_type = other DNA
cggcggcgaacggtatcgagcgcgagtggttaaacgccgaggaactgcgcgagcgcgaaccgaatatcaccgggc

SEQ ID NO: 87565 - DNA, 75 bp, synthetic construct
  source 1..75: mol_type = other DNA
ccgtttaaagcaaaatacctgaaactgacagataactcagtgcaatcaggtgatgtgttatcttctctggttatg

SEQ ID NO: 87566 - DNA, 75 bp, synthetic construct
  source 1..75: mol_type = other DNA
catccattacagctctgttatttctgttctgttgtgcactgtatgcacctgtcggtatgacgtacggaaaaatca

SEQ ID NO: 87567 - DNA, 75 bp, synthetic construct
  source 1..75: mol_type = other DNA
tcacctgatacaccatcaaaaccgtccacgccacccgcagacaccacgacgatgagtacgctatttgcttaccgg

SEQ ID NO: 87568 - DNA, 75 bp, synthetic construct
  source 1..75: mol_type = other DNA
taaataccagacacgcttcctgtatggggtcgaataaaggctgtatgaatgcggtcattgtcactaccgatggtg

SEQ ID NO: 87569 - DNA, 75 bp, synthetic construct
  source 1..75: mol_type = other DNA
aaattctgcgtaattacaaagctgtgattaatgcacgacgtcgtgagatggggcagaaaccgctcaccaccgcgc

SEQ ID NO: 87570 - DNA, 75 bp, synthetic construct
  source 1..75: mol_type = other DNA
cgcaacggtcgtgtggaaggtacccgggaactggttattcacccgcattttgttctggtttatgaggtcgacagc

SEQ ID NO: 87571 - DNA, 75 bp, synthetic construct
  source 1..75: mol_type = other DNA
tatcaatccggttaaccgatgaagaataccagccgttcaaggagctgctggagcatacagacattggcaaatccg

SEQ ID NO: 87572 - DNA, 75 bp, synthetic construct
  source 1..75: mol_type = other DNA
agattattgatgaaatctgcgattttgtggcgaatcagcaggcggttttcctgggcggtcactacatcttacagg

SEQ ID NO: 87573 - DNA, 75 bp, synthetic construct
  source 1..75: mol_type = other DNA
tgcgtttgacgattattgccggaaagtgatgagcagaaatctcgcagagtgtttccgtattcaaaaaaacagaga

SEQ ID NO: 87574 - DNA, 75 bp, synthetic construct
  source 1..75: mol_type = other DNA
gggttacccggttccgctcctgtacggccgccggagaatcggcggggcaattatttctgccggaatttatgtcga

SEQ ID NO: 87575 - DNA, 75 bp, synthetic construct
  source 1..75: mol_type = other DNA
gggaaccaatcgggtcattcatcttattaagccagcaatcgacgctctccggagtcagatgacattaacgagact

SEQ ID NO: 87576 - DNA, 75 bp, synthetic construct
  source 1..75: mol_type = other DNA
agcggtgcaggaagatatggctaacgaatttcgtgatctgcttgttgagaaattcaaagacagcaaagtagaaac

SEQ ID NO: 87577 - DNA, 75 bp, synthetic construct
  source 1..75: mol_type = other DNA
acgttcgcgtggtgtatctgaacggcgatccgtggtttgttgcaaaggatgtctgcgctgcgctggaactgacca

SEQ ID NO: 87578 - DNA, 75 bp, synthetic construct
  source 1..75: mol_type = other DNA
cgtgagggtatgccgccgcgtgaggggggtgacgagttcagccaggcatggaagcagactgtggaaattaaaggt

SEQ ID NO: 87579 - DNA, 75 bp, synthetic construct
  source 1..75: mol_type = other DNA
tggtcattttataagtataatggttaataattacaggacgcactgtggagtggttgatataaatcttaatttttt

SEQ ID NO: 87580 - DNA, 75 bp, synthetic construct
  source 1..75: mol_type = other DNA
tgagagccggcggctagaccccgccggcgctgtcaccgcggcgatcgaaatgctgcgagtcggatcagacgtcgt

SEQ ID NO: 87581 - DNA, 75 bp, synthetic construct
  source 1..75: mol_type = other DNA
ctggcagccagcggcaccccggaaaatcagggaatatgccccgcaggaccgtgagcttcatcgtatcgcggatgc

SEQ ID NO: 87582 - DNA, 75 bp, synthetic construct
  source 1..75: mol_type = other DNA
aagtttgttgccggcgttctgctggtttttatcgatcgcgtcatcgatgcctctctggcgagtcttggtctcgcc

SEQ ID NO: 87583 - DNA, 75 bp, synthetic construct
  source 1..75: mol_type = other DNA
ctggcagccagcgacagtcaggagaatccggaagtatgccccacaggggcatgaactccatcgtatcgcggatgc

SEQ ID NO: 87584 - DNA, 75 bp, synthetic construct
  source 1..75: mol_type = other DNA
atttgtctgttactgatgatgttgttgttcctgctactgctactgctactgctactgctactgttcttctttttt

SEQ ID NO: 87585 - DNA, 75 bp, synthetic construct
  source 1..75: mol_type = other DNA
aagccaaaggtcataatgcaccggacgtccttgtttccatcagcgccatactgaaaacgtcgattcccgataatg

SEQ ID NO: 87586 - DNA, 75 bp, synthetic construct
  source 1..75: mol_type = other DNA
tctgtagaggtaaagcagagggaatatgggagaactgctgtgcataaatgcacttttgtttttagtcctcaggta

SEQ ID NO: 87587 - DNA, 75 bp, synthetic construct
  source 1..75: mol_type = other DNA
gttattcatcttgttcaaccagctgttgatgccctgaaaagccaggctgaaatgacaagacttggccctcagtat

SEQ ID NO: 87588 - DNA, 75 bp, synthetic construct
  source 1..75: mol_type = other DNA
aaccagagtttaaacgccgcgtggatatcgcccgtaacaatcatgttgacattccaaacctgtttacacaagaag

SEQ ID NO: 87589 - DNA, 75 bp, synthetic construct
  source 1..75: mol_type = other DNA
atcaaaccgtgctggcgatacccgttgataaggctgtcgctcttgtcagggatcgcagtaaattcgcggaaattt

SEQ ID NO: 87590 - DNA, 75 bp, synthetic construct
  source 1..75: mol_type = other DNA
ggttattgagtgggggcgggacgggcagccaaaatcacttcatccttatgcgccggggtgtgttgtaccggaacg

SEQ ID NO: 87591 - DNA, 75 bp, synthetic construct
  source 1..75: mol_type = other DNA
gcaaaaaattcaacaagggattaccagttgggcgggtgatgatccggataagcaggcatttgccagagaagtggc

SEQ ID NO: 87592 - DNA, 75 bp, synthetic construct
  source 1..75: mol_type = other DNA
actccacggatgacggttttatggggcgctcacctgtaaccatctgccgcgaatcgctggggcttgggctggccc

SEQ ID NO: 87593 - DNA, 75 bp, synthetic construct
  source 1..75: mol_type = other DNA
tatgattgcgctcggtgccgacaccgtactgctgggtcgtgctttcttgtatgcgctggcaacagcgggccaggc

SEQ ID NO: 87594 - DNA, 75 bp, synthetic construct
  source 1..75: mol_type = other DNA
ggcgcagcactgtaagtaaagccaactaccgcttttttatggtgcgtatttcaggaaatccgggaagccgcacga

SEQ ID NO: 87595 - DNA, 75 bp, synthetic construct
  source 1..75: mol_type = other DNA
ccagcaacagcagggatagatgatttgggtgaaattttagctaaaatgaaacagagaacatcgagaggaataaga

SEQ ID NO: 87596 - DNA, 75 bp, synthetic construct
  source 1..75: mol_type = other DNA
aaaggcacagaaccctcttttaaaatggcttgccttatatcaaataaagagcatgtgagtttaaattggttagct

SEQ ID NO: 87597 - DNA, 75 bp, synthetic construct
  source 1..75: mol_type = other DNA
gtggttgcgatggcatttgccggtttcctctacatccaccacggtgctgaggttgccagcctgtttgtaacgggt

SEQ ID NO: 87598 - DNA, 75 bp, synthetic construct
  source 1..75: mol_type = other DNA
ggccggattaacacagcaccagcttctggtctttctggctgtcatgcgcaaaacatatggctttaataaaaaact

SEQ ID NO: 87599 - DNA, 75 bp, synthetic construct
  source 1..75: mol_type = other DNA
tctcactgaggacgatattctgccaggcttgccaattcaggtggcaaccacaggacactcaaaagtgatgatccc

SEQ ID NO: 87600 - DNA, 75 bp, synthetic construct
  source 1..75: mol_type = other DNA
gtaaaggtggtcttgtcagttgtcgttttaaactcgatggcgcgcttacggctaatcagtacgcactggcgctgt

SEQ ID NO: 87601 - DNA, 75 bp, synthetic construct
  source 1..75: mol_type = other DNA
catcaacaccgtgctgagctacttcatcatgatcaagccagtgctgggctccagctaccgtcagtacatcctgag

SEQ ID NO: 87602 - DNA, 75 bp, synthetic construct
  source 1..75: mol_type = other DNA
ttccagttatatgtgctgcgcgatcgcggctttatgcgtaacgcgctggagcgtgcaaaagcggcaggctgttca

SEQ ID NO: 87603 - DNA, 75 bp, synthetic construct
  source 1..75: mol_type = other DNA
tccccggtagcggcaataccagcagtgctgagacaaccgccccggaagccgtacgtcagccagaacacctgccgg

SEQ ID NO: 87604 - DNA, 75 bp, synthetic construct
  source 1..75: mol_type = other DNA
gcaaaacagatgtttccaaccgtgttaatgtaccggatgacatcattataaacccatactcacaagagagcagaa

SEQ ID NO: 87605 - DNA, 75 bp, synthetic construct
  source 1..75: mol_type = other DNA
tgttacaggaaaggcaacaaacggtccgatgctggacaccgttggcgcgacactacttgggatactggaagtaat

SEQ ID NO: 87606 - DNA, 75 bp, synthetic construct
  source 1..75: mol_type = other DNA
ggatttacgctgcagccctctgtttcaggaagtggtgaggccgaagcagtagtcccggatacgttgcagtctgca

SEQ ID NO: 87607 - DNA, 75 bp, synthetic construct
  source 1..75: mol_type = other DNA
gcccggctaatggcgacacaggtgcctgtcactgcagggcatatcaatgccacggctaccttcactcttgaatat

SEQ ID NO: 87608 - DNA, 75 bp, synthetic construct
  source 1..75: mol_type = other DNA
attgacgctgatggcaaaatcgaacatgtctttgacgatttcaaaaccagcaatcaccacgacgttgtgctgaac

SEQ ID NO: 87609 - DNA, 75 bp, synthetic construct
  source 1..75: mol_type = other DNA
tccgctgaacattatgatgacggatgcgttatccatgtcggcagtggcattctgccgtcagtccctgttgtgccg

SEQ ID NO: 87610 - DNA, 75 bp, synthetic construct
  source 1..75: mol_type = other DNA
gactaagagagataataaaaaaggtatataacgatactcgatttacagatcttacaaaatctcagatgaaaatct

SEQ ID NO: 87611 - DNA, 75 bp, synthetic construct
  source 1..75: mol_type = other DNA
ccggcgaatgcgggcattctgctggttccgtgctgtcgtggtggttcagcgttcaccaccggagccgatggcaca

SEQ ID NO: 87612 - DNA, 75 bp, synthetic construct
  source 1..75: mol_type = other DNA
aaatcaaccgtaacaagcaacaggctggcgtgacagccggaaaaccaaaactcgacctgacgaacactgactgga

SEQ ID NO: 87613 - DNA, 75 bp, synthetic construct
  source 1..75: mol_type = other DNA
ttgcacgccattgggtgggttaagcataaatgtattcctggtgctaaatggcccgaaattcaggcagagatgcgc

SEQ ID NO: 87614 - DNA, 75 bp, synthetic construct
  source 1..75: mol_type = other DNA
atgagccgcacatccctgattaaattaattcatgttgcccgtcgggagttgcaactcgacgatgacacttaccga

SEQ ID NO: 87615 - DNA, 75 bp, synthetic construct
  source 1..75: mol_type = other DNA
gacatcaccgcacacacctgaattcctcagcaacgctaaaggcacttattcaaagcgagatcggtgatttcttcg

SEQ ID NO: 87616 - DNA, 75 bp, synthetic construct
  source 1..75: mol_type = other DNA
ccggcgaatgcgggtattcttctggttccgtgctgccgtggtggttcagctttcaccaccggggcagatggaaca

SEQ ID NO: 87617 - DNA, 75 bp, synthetic construct
  source 1..75: mol_type = other DNA
gatgcaccggcagagctggaagtcccggtcagttaccggggaaatctgcagatagcgctgcaggtggaagactga

SEQ ID NO: 87618 - DNA, 75 bp, synthetic construct
  source 1..75: mol_type = other DNA
aacctatgcctgcctgacgcctgaactggtcgcgcagtttggcttaaaagaggatgtggcaaaaaacctgcaatg

SEQ ID NO: 87619 - DNA, 75 bp, synthetic construct
  source 1..75: mol_type = other DNA
tcagtgcgtccggtggtgactgagtcagtgacaaaaatcatggcatgcgggaccacgctgatgggctacacgcaa

SEQ ID NO: 87620 - DNA, 75 bp, synthetic construct
  source 1..75: mol_type = other DNA
gggtttatcagaacactggcgggtctatgggcatgttcaaacaaacaatgctcacataaagcacatgaattaaat

SEQ ID NO: 87621 - DNA, 75 bp, synthetic construct
  source 1..75: mol_type = other DNA
gtcccgtgaacaaaaccccggagcgtgacctgtatcagctggtgacggacagggtgattgaggccatcgaaaagg

SEQ ID NO: 87622 - DNA, 75 bp, synthetic construct
  source 1..75: mol_type = other DNA
cggaaaccacgacgaccacaccgacacctgacagtattgtctacgccccggaacgtcctgatgcaccgatatcgc

SEQ ID NO: 87623 - DNA, 75 bp, synthetic construct
  source 1..75: mol_type = other DNA
ctggtttgcccgcccgggggcggacctgtccatgctggaccgctggctgccccgaccgcaggaagtctccatgaa

SEQ ID NO: 87624 - DNA, 75 bp, synthetic construct
  source 1..75: mol_type = other DNA
ggcgcaggcacagcagataccccggccgctctcacctgggatcagaaacagattgatgccgcgacggcttatatg

SEQ ID NO: 87625 - DNA, 75 bp, synthetic construct
  source 1..75: mol_type = other DNA
acgctacaacaggatggaactataccaatagaagctggtgagtttaaagccaccagtactttccaggtaacctac

SEQ ID NO: 87626 - DNA, 75 bp, synthetic construct
  source 1..75: mol_type = other DNA
ccggggcgcgcattgctcctgattttatgctcacgctcggtggcgcagatatcacacagaatttcagcgaccggc

SEQ ID NO: 87627 - DNA, 75 bp, synthetic construct
  source 1..75: mol_type = other DNA
aacggctctcaattgtacgacctgcagcaggatgccctgttgtggaacggcacagcattcagtgccgcacacggt

SEQ ID NO: 87628 - DNA, 75 bp, synthetic construct
  source 1..75: mol_type = other DNA
gtggcagtccatgctgcctaacacctggatcaatatcgataaactgattttttctccctggcaggaatggcaggg

SEQ ID NO: 87629 - DNA, 75 bp, synthetic construct
  source 1..75: mol_type = other DNA
cgggtcggcaacttgctttaacaatcaaaacaccgcaaaaacggatgttaatggtctggcgacttttgatctgta

SEQ ID NO: 87630 - DNA, 75 bp, synthetic construct
  source 1..75: mol_type = other DNA
tcttgaacagagaagattgatgttacagtggtgggcagattatcttgatgcaaatcgggatgggatggtcaggcc

SEQ ID NO: 87631 - DNA, 75 bp, synthetic construct
  source 1..75: mol_type = other DNA
ggcgataatctccaggcatggctggagcagaacgcgcatctaccgggaaatgactgtccgcaaggaaaagagtgt

SEQ ID NO: 87632 - DNA, 75 bp, synthetic construct
  source 1..75: mol_type = other DNA
ttttccattggtgtttaccctgcggtttctcttgctgatgccagacaacgacgtgatgaagcaaaaaagctgctt

SEQ ID NO: 87633 - DNA, 75 bp, synthetic construct
  source 1..75: mol_type = other DNA
tgtggcgacctgcccgagcggtgcgatttacaagcgtgaagaagatggcatcgtcctgatcgaccaggataaatg

SEQ ID NO: 87634 - DNA, 75 bp, synthetic construct
  source 1..75: mol_type = other DNA
ggctggcgatcgtgttgttatgccggagaacgccatgatgatgatccataaaccgtggggtatctctggcggaaa

SEQ ID NO: 87635 - DNA, 75 bp, synthetic construct
  source 1..75: mol_type = other DNA
tgtccgtacaaaaaaatctacttcaactggaaaagcggcaagtcagaaaaatgtatcttctgttacccacgaatt

SEQ ID NO: 87636 - DNA, 75 bp, synthetic construct
  source 1..75: mol_type = other DNA
agaacctgcataccgcgccggaaggcagcaaatcacagccgattgcccgtccgcgttcgctgattaccggcgaac

SEQ ID NO: 87637 - DNA, 75 bp, synthetic construct
  source 1..75: mol_type = other DNA
agcaatacaagccaggccagtcccgtcatcagcgcggttatggttcgaagtgggacagtatccgcgcgcgcgtcc

SEQ ID NO: 87638 - DNA, 75 bp, synthetic construct
  source 1..75: mol_type = other DNA
gtgggtgatgctctgtcaggaatcgacaataataccctacaatggaataaaaccgcgggggcgttcagcgccaat

SEQ ID NO: 87639 - DNA, 75 bp, synthetic construct
  source 1..75: mol_type = other DNA
gcaggccaccgacagccagcatgaagaataaatcctggttcaggatgctggcgggtagtcagggtgaggcagata

SEQ ID NO: 87640 - DNA, 75 bp, synthetic construct
  source 1..75: mol_type = other DNA
gagcattcgcttctggttcgggatggttcaggctaccaggtggatatattgttcagtttggcactttttcaggaa

SEQ ID NO: 87641 - DNA, 75 bp, synthetic construct
  source 1..75: mol_type = other DNA
cagagattaatttaggtacaatgagtggcaaaacaaaagaacgggtttatgagcctgaagaaggtggacgtaaag

SEQ ID NO: 87642 - DNA, 75 bp, synthetic construct
  source 1..75: mol_type = other DNA
tccccgtattgaatggtgttcatcaggcgggcctgagtaccacgatagaattcattagcgcggaaaccagaccaa

SEQ ID NO: 87643 - DNA, 75 bp, synthetic construct
  source 1..75: mol_type = other DNA
tgtcggtggtgttgattggccagccggagctaaagctgaaactttctgaacgtaatcaggaggtgcgcgaagtgg

SEQ ID NO: 87644 - DNA, 75 bp, synthetic construct
  source 1..75: mol_type = other DNA
gtaacgctctttctggctttttagagaagggcggttattacatttttaactgtccagaacatgttgaatttcata

SEQ ID NO: 87645 - DNA, 75 bp, synthetic construct
  source 1..75: mol_type = other DNA
tcaacaaaatgccaaaaggttctgttcctgccctgcaacaagaaatgctgcgacgtgtcagtaaacgttatgacg

SEQ ID NO: 87646 - DNA, 75 bp, synthetic construct
  source 1..75: mol_type = other DNA
cggcaggcattttatgaagcctcttttttcttacgttccgctcatttgcaacaggtcgccagcattcttaacgat

SEQ ID NO: 87647 - DNA, 75 bp, synthetic construct
  source 1..75: mol_type = other DNA
gtgatctatacgacgaatgccatcgagtcgctaaacagcgtgatccgccatgcgatcaaaaagcgtaatgtgttc

SEQ ID NO: 87648 - DNA, 75 bp, synthetic construct
  source 1..75: mol_type = other DNA
gcattttgggttgttccgcgacccgttcgccgatgaggttatgcagagtgcggacgacgtgttcaccacgccaga

SEQ ID NO: 87649 - DNA, 75 bp, synthetic construct
  source 1..75: mol_type = other DNA
aaaaccgattgatgtgaagattgggctttcccttgatgggggcatgagccctgccgactggcgtcacgacgtcaa

SEQ ID NO: 87650 - DNA, 75 bp, synthetic construct
  source 1..75: mol_type = other DNA
ctggcggtaagagtgagcagttggtggtgaactttattgcggatacgctcactgcgcaggttaatcttaacgtta

SEQ ID NO: 87651 - DNA, 75 bp, synthetic construct
  source 1..75: mol_type = other DNA
taaatcagacataacttataaagttaatgggctttctatcatacctgaaaatttctttactcttcttagcggtaa

SEQ ID NO: 87652 - DNA, 75 bp, synthetic construct
  source 1..75: mol_type = other DNA
agcggcaacgaggaacgtcggaacggataccgggcaagtaccagatatgagtagttttacaacggggcactctgg

SEQ ID NO: 87653 - DNA, 75 bp, synthetic construct
  source 1..75: mol_type = other DNA
acggcgacaaccaacacttcaggtgaggcacaagtcgttctgaccagcaataaagtcggtacatatgtggtgaca

SEQ ID NO: 87654 - DNA, 75 bp, synthetic construct
  source 1..75: mol_type = other DNA
gtcacggtaagcgcagaaacgagctatggtggggcgcaaacagtagatataacgctggtggcaggcccggcagac

SEQ ID NO: 87655 - DNA, 75 bp, synthetic construct
  source 1..75: mol_type = other DNA
catctgttcagacatggaatggtcccggctggtctgacaggtcaggttatgtcgttacgggttcagttaacggaa

SEQ ID NO: 87656 - DNA, 75 bp, synthetic construct
  source 1..75: mol_type = other DNA
cactgtatttttttggcaatggctctggtgcattttttgggaatgatgagggaatgtatgattccgttgtgataa

SEQ ID NO: 87657 - DNA, 75 bp, synthetic construct
  source 1..75: mol_type = other DNA
tttattaataataacaatctaacgccaggtgtctatcttacctctgtaatgtgggggcaagaatatcttgataag

SEQ ID NO: 87658 - DNA, 75 bp, synthetic construct
  source 1..75: mol_type = other DNA
tagcactaagtacttcaagaccaacaccgatggcgcagatgccaacgcgcagggtaaagacagtgttgcgattgg

SEQ ID NO: 87659 - DNA, 75 bp, synthetic construct
  source 1..75: mol_type = other DNA
acaaaggaaacaaaactcccgcattcagcatcagtattgaggggaaggatatcaccactgtgctggataaccgcc

SEQ ID NO: 87660 - DNA, 75 bp, synthetic construct
  source 1..75: mol_type = other DNA
acagttggggaagtggtgaaggaaatagccgcgcgtcacaagctgaagatggcgctgggtaaagacctgtcggat

SEQ ID NO: 87661 - DNA, 75 bp, synthetic construct
  source 1..75: mol_type = other DNA
tagcctcccgtaacaggctggaagccagagtcgctccgtcactggccggaataaaaattccgcacatcgaccagt

SEQ ID NO: 87662 - DNA, 75 bp, synthetic construct
  source 1..75: mol_type = other DNA
taaaaacggttttacccgtggtaacccccagactggcacgcctgccaccgatctggatgatgactactttgacat

SEQ ID NO: 87663 - DNA, 75 bp, synthetic construct
  source 1..75: mol_type = other DNA
ccattacagggattggtgagccgacatcgacaggcattaaagtggttgatttcgcagctgatcccacgcagtttc

SEQ ID NO: 87664 - DNA, 75 bp, synthetic construct
  source 1..75: mol_type = other DNA
ttgcaacggatcgaaatgccaatgttatatcgcaggaggaatgggaagcgttgcccgcgcttttatccggattta

SEQ ID NO: 87665 - DNA, 75 bp, synthetic construct
  source 1..75: mol_type = other DNA
tcattcaggtagcaccatatccacttgaagcggtgccatatcaactattcgccaagatgatcggccgcaaggaat

SEQ ID NO: 87666 - DNA, 75 bp, synthetic construct
  source 1..75: mol_type = other DNA
atgaagaaaaaaattgaatcctaccagggagctgccggtggttggggtgctgttaaatccgtagcgaatgcagta

SEQ ID NO: 87667 - DNA, 75 bp, synthetic construct
  source 1..75: mol_type = other DNA
cgatcgaaaaagcaaaacagttaccaacatccgcctatgtaatcagcaatcaatacggcaaccgatatatgtaca

SEQ ID NO: 87668 - DNA, 75 bp, synthetic construct
  source 1..75: mol_type = other DNA
cagcatcagcattgaaggcaaggatatcaccactgtgctggaaaaccgcctgatggggcttacgctgacggacaa

SEQ ID NO: 87669 - DNA, 75 bp, synthetic construct
  source 1..75: mol_type = other DNA
gtgatcgttatgcgtataatcctttttctactcactttatggtgccttcctgtgcttgcccagcaaattgctgtg

SEQ ID NO: 87670 - DNA, 75 bp, synthetic construct
  source 1..75: mol_type = other DNA
ctggtggcggagctgctgtgcctgaagaacagctcgctgaaatcgctggtggcggaccgccaggcggcgttcccg

SEQ ID NO: 87671 - DNA, 75 bp, synthetic construct
  source 1..75: mol_type = other DNA
agtttattgagggctattatattgtcggcctgttagcagaagcgtttctggagaagtatcccggggagaaaattg

SEQ ID NO: 87672 - DNA, 75 bp, synthetic construct
  source 1..75: mol_type = other DNA
tcgcctccctgaccggcacgttagcgggcacgcatatgatcacggctcgtctggctaacagcaatgtcagcgata

SEQ ID NO: 87673 - DNA, 75 bp, synthetic construct
  source 1..75: mol_type = other DNA
aatacccggaactggcaaaggcttatccgacaaataaattacctgatttacgcggtgagtttattcgtggctggg

SEQ ID NO: 87674 - DNA, 75 bp, synthetic construct
  source 1..75: mol_type = other DNA
gaccgacaacaacaccggcaaactgaccggtactcgcacccataaaccgttcatttttaccaaagaaatcgatgc

SEQ ID NO: 87675 - DNA, 75 bp, synthetic construct
  source 1..75: mol_type = other DNA
agcttgaggagagcccctttaccgtaccagtgtcggcgcaagcgtggcaggatgaaatgcgctatgcgggcgtat

SEQ ID NO: 87676 - DNA, 75 bp, synthetic construct
  source 1..75: mol_type = other DNA
tcatcagcgcggctacggttcgaagtgggacagtatccgcgcgcgtgtcctgaagcgtgacaaaggcctgtgtca

SEQ ID NO: 87677 - DNA, 75 bp, synthetic construct
  source 1..75: mol_type = other DNA
ttaacttaatcacagtcattctgtctcaggtcctgatacagatatatttgtggcataatattccggtatccggac

SEQ ID NO: 87678 - DNA, 75 bp, synthetic construct
  source 1..75: mol_type = other DNA
gccgtgttcgcggctgccgctctacaaccacggacccttcaggctactgcgaaagccacaaaagcgaaggctgga

SEQ ID NO: 87679 - DNA, 75 bp, synthetic construct
  source 1..75: mol_type = other DNA
gaaagccacaaaagcgaaggctggaagcaatacaagccaggtcagtcccgtcatcagcgcggttatggttcgaag

SEQ ID NO: 87680 - DNA, 75 bp, synthetic construct
  source 1..75: mol_type = other DNA
cggaaacaccggttaaagtgtcaggctttaagcgcgtcatagacgagcaggactggacaatcactaaggtgacac

SEQ ID NO: 87681 - DNA, 75 bp, synthetic construct
  source 1..75: mol_type = other DNA
cgaagtggcgaccatttccggtctgatgaccaagtttgaatactgggctatgccgcacaaagatgaaaaagtaat

SEQ ID NO: 87682 - DNA, 75 bp, synthetic construct
  source 1..75: mol_type = other DNA
cccggtatcctcagcttgcccgtgcttatcctggctgtaaattgcccgatctgcgcggtgtttttatccgtggct

SEQ ID NO: 87683 - DNA, 75 bp, synthetic construct
  source 1..75: mol_type = other DNA
ggccgcagccaacgggcgaacgttattgtgttaactctgcttctttacgcttcactgatggtgaaaacggcgaag

SEQ ID NO: 87684 - DNA, 75 bp, synthetic construct
  source 1..75: mol_type = other DNA
tgctgccacgctgccgggctttcagcagcttcatacgtccgtggaagggctgaaactgattgccgattacgaagg

SEQ ID NO: 87685 - DNA, 75 bp, synthetic construct
  source 1..75: mol_type = other DNA
tgatgccgacagtaatctgcagagtctgtgctggccctgccataaggcgaagacggcccgtgaacggttaaagtg

SEQ ID NO: 87686 - DNA, 75 bp, synthetic construct
  source 1..75: mol_type = other DNA
gccagcaggcttctggataggctttattattggcctgacgtcggcagccattatgatgatgctgcgtatgcggtt

SEQ ID NO: 87687 - DNA, 75 bp, synthetic construct
  source 1..75: mol_type = other DNA
acgtcaaggtcaccttcaatgtcaattcagcagcagcgaaactgagccaaaccgaagtgaatagccacgacggga

SEQ ID NO: 87688 - DNA, 75 bp, synthetic construct
  source 1..75: mol_type = other DNA
acgccgccactttgcagaaaatacgcgccgcagactgctgatcgacacaatcaagcctgtcgaggtgaagcatgt

SEQ ID NO: 87689 - DNA, 75 bp, synthetic construct
  source 1..75: mol_type = other DNA
atgcccccacgaaccccaaaagcctgccgcattcgaggctgccgcaataccaccacggacccgtcaggctactgc

SEQ ID NO: 87690 - DNA, 75 bp, synthetic construct
  source 1..75: mol_type = other DNA
cagaattgtttattatttttataatcgcatttctttctatagtggtgtcattcctatgtattgatgtgttttttt

SEQ ID NO: 87691 - DNA, 75 bp, synthetic construct
  source 1..75: mol_type = other DNA
attcggcatgttttgtttatcggatgtgtgattggctcatttattggtattggatgtgctctcgcaaaatatttc

SEQ ID NO: 87692 - DNA, 75 bp, synthetic construct
  source 1..75: mol_type = other DNA
gacatccaattgccatggtcattctttaatattcatgggctggaattcaacggacaaatctctttcctgaaggcc

SEQ ID NO: 87693 - DNA, 75 bp, synthetic construct
  source 1..75: mol_type = other DNA
ccagaaggcgcgcaatatggggtatatcaatccaggtcagttgcgattttgaatgtgccactagtatcatggact

SEQ ID NO: 87694 - DNA, 75 bp, synthetic construct
  source 1..75: mol_type = other DNA
acataaagcagtagaagaggttattgattcccccctttcggaagtcgcgaatttaattaaaatattacaatcttg

SEQ ID NO: 87695 - DNA, 75 bp, synthetic construct
  source 1..75: mol_type = other DNA
ttggcaccagagactacagctcccactcctggtatgccggtgcggaagtcggttaccgttaccatgtaactgact

SEQ ID NO: 87696 - DNA, 75 bp, synthetic construct
  source 1..75: mol_type = other DNA
aggctgtaacgaacattattgaggcattcgggaaagacttttcgcaaggttcaggtgcgatggccggacgatggt

SEQ ID NO: 87697 - DNA, 75 bp, synthetic construct
  source 1..75: mol_type = other DNA
aaccattggtcccgaaggcttcggtaaaaaagacagaagctggaatgataagaagataatgatccaatggcgtga

SEQ ID NO: 87698 - DNA, 75 bp, synthetic construct
  source 1..75: mol_type = other DNA
aactcagacaaaggcaaagcatcttgccatgataaaggccattctccgtgctgcagaacgcgactggaagtggct

SEQ ID NO: 87699 - DNA, 75 bp, synthetic construct
  source 1..75: mol_type = other DNA
atgccgcttataaccgtgacggcactatcgactgtgagatccagtttgaaggggaggagagctggctgccctata

SEQ ID NO: 87700 - DNA, 75 bp, synthetic construct
  source 1..75: mol_type = other DNA
ctgtagattcaattggtcaacgcaacagttatgtgaaaacatggggttgcggaggttttttgaatgagacgaaca

SEQ ID NO: 87701 - DNA, 75 bp, synthetic construct
  source 1..75: mol_type = other DNA
atgaccaaagagcatgcacaaggtgtatttatccgttttattgattttcgcggtgaactgttattgcgcgcatca

SEQ ID NO: 87702 - DNA, 75 bp, synthetic construct
  source 1..75: mol_type = other DNA
ggtaactcaacttgcgttccctatggctgcggcagcacaaggtgtggtaaacgccgcaacccaacaaccagttcc

SEQ ID NO: 87703 - DNA, 75 bp, synthetic construct
  source 1..75: mol_type = other DNA
tatcccgacttgacaagtttgttgttgagacccgaggtgcgactgaaggcgcagatatttcgttatcaaaacagc

SEQ ID NO: 87704 - DNA, 75 bp, synthetic construct
  source 1..75: mol_type = other DNA
tggaagtggacatcagtgcgtttttcgaccatgtgagacatgatctggtgctcaaagcactggaacaccacggga

SEQ ID NO: 87705 - DNA, 75 bp, synthetic construct
  source 1..75: mol_type = other DNA
ctggaaatccacaccacctatgtgagtctgccgatgattcctcttgagatctccggcatctcagcaaggacgctg

SEQ ID NO: 87706 - DNA, 75 bp, synthetic construct
  source 1..75: mol_type = other DNA
cggattcctgaacgaagttgagattacgcgccagatggtaacgttcaaagggtatgagataaatcatcatggtat

SEQ ID NO: 87707 - DNA, 75 bp, synthetic construct
  source 1..75: mol_type = other DNA
atgcattcgtttctgaagatttcgctgcctcttttgaggccgccgcaccccgtgccgaggtggcagcttctgacg

SEQ ID NO: 87708 - DNA, 75 bp, synthetic construct
  source 1..75: mol_type = other DNA
ggcagtcaggttaaactgctgtggtccaccggcgacggactgtgcctcctgaccaaacggctggagcgtgggcgc

SEQ ID NO: 87709 - DNA, 75 bp, synthetic construct
  source 1..75: mol_type = other DNA
tcgccacgcagtgggccagagcggctctcgaaaaatctgagcctccggttattatcgcgacttcaacgaacaacc

SEQ ID NO: 87710 - DNA, 75 bp, synthetic construct
  source 1..75: mol_type = other DNA
gagcaactgtcattctcaaagagttgttatttcgggatcgacattaaaaacggcaccatgctgtatgtgcgcatt

SEQ ID NO: 87711 - DNA, 75 bp, synthetic construct
  source 1..75: mol_type = other DNA
tcgccacgtttttactggtgttaatggtgctggcgcgtcctttaggcagcgggctggcgcggctgattaatgaca

SEQ ID NO: 87712 - DNA, 75 bp, synthetic construct
  source 1..75: mol_type = other DNA
cgcagctgaggcgctctgtcccgctgccgtctcagaagacctggcgttcgtctcggacgtttttgccgccttcgc

SEQ ID NO: 87713 - DNA, 75 bp, synthetic construct
  source 1..75: mol_type = other DNA
tgggcgctgctgttggtggtctccccggtgcggctattggtgctgtcataggtggtattgctggttctttgtttt

SEQ ID NO: 87714 - DNA, 75 bp, synthetic construct
  source 1..75: mol_type = other DNA
ataaagattcacctgataccgggcctgtgacgctcatttcaacaggaacaggtcgggttatccctgtggaaaatg

SEQ ID NO: 87715 - DNA, 75 bp, synthetic construct
  source 1..75: mol_type = other DNA
gctggatcgacgaatcaatggttgtactaccggaagcgccgccgttacacacgctgccactggcaaccaaagtcc

SEQ ID NO: 87716 - DNA, 75 bp, synthetic construct
  source 1..75: mol_type = other DNA
cgccgcagtaacgatatccttcgccaggcttccgcttattttgcgaaggcggagttcgaccgcctctggaaaaag

SEQ ID NO: 87717 - DNA, 75 bp, synthetic construct
  source 1..75: mol_type = other DNA
ggcacggatgatgtgcaagctattccagtagaaagcgccagcattgtcagtttgcaggatgaaaagcatgtcggt

SEQ ID NO: 87718 - DNA, 75 bp, synthetic construct
  source 1..75: mol_type = other DNA
actcccgcaatgccgtcttccgccacaatgatttcgatctgaactggatcccggtcgattccatcgaacgtattg

SEQ ID NO: 87719 - DNA, 75 bp, synthetic construct
  source 1..75: mol_type = other DNA
atgatgagtatcttcatcatgaccctttccttatttaaggccccttcctcgggaggggctttcccgtttcagcgt

SEQ ID NO: 87720 - DNA, 75 bp, synthetic construct
  source 1..75: mol_type = other DNA
gatatcgcggtttccctttcaaatatctgtcgctttgcaggacatctttcacacttctacagtgtcgcccaacat

SEQ ID NO: 87721 - DNA, 75 bp, synthetic construct
  source 1..75: mol_type = other DNA
agctgaagaaattatgcatggcagtctcctttcgttcaataataacagaacaaaagaaagagccagaaatgacgg

SEQ ID NO: 87722 - DNA, 75 bp, synthetic construct
  source 1..75: mol_type = other DNA
tttccatatcctttctctttatgaacacctgcttgtttgcaagaaggatgtgccgctcttcaatcgcttcgcctc

SEQ ID NO: 87723 - DNA, 75 bp, synthetic construct
  source 1..75: mol_type = other DNA
ctttaaagcggcgctggagaaactgaatgcgctgggtattgctacaaagctggtaaaccgtgttcatagcaaaat

SEQ ID NO: 87724 - DNA, 75 bp, synthetic construct
  source 1..75: mol_type = other DNA
agtgagatcttattaaagatcacaaaaaatttacgttttaaaaaatatgcactttggttaacaactgatgaaacg

SEQ ID NO: 87725 - DNA, 75 bp, synthetic construct
  source 1..75: mol_type = other DNA
aaaaccacgctggtgctttctatcatcgccacgcagtgggccagagcagctctcgaaaaatctgagcctccggtt

SEQ ID NO: 87726 - DNA, 75 bp, synthetic construct
  source 1..75: mol_type = other DNA
tcgatctcttttatacgccgggggaaattctctacggcaagcgtgaaactcagcagatgccggaagtcggtcagc

SEQ ID NO: 87727 - DNA, 75 bp, synthetic construct
  source 1..75: mol_type = other DNA
aaataaagacgacatcgatattaacgatatcgcggtttccctttcaaatatctgtcgctttgccggtcatctttc

SEQ ID NO: 87728 - DNA, 75 bp, synthetic construct
  source 1..75: mol_type = other DNA
taagctcgacccggttcgttaccaggcgcgagttgacagacttcaggctgacctgatgacggcgacgcataatat

SEQ ID NO: 87729 - DNA, 75 bp, synthetic construct
  source 1..75: mol_type = other DNA
gtcgttctgcaaacatcgaaagcggaaatcattgggaatggcgtggatgagacgactctgacagcaacagtgaaa

SEQ ID NO: 87730 - DNA, 75 bp, synthetic construct
  source 1..75: mol_type = other DNA
tttaccgggggcaggaccccatcgacgggcaactggcgcaggtcattaatggcttcagggatacctatggtctga

SEQ ID NO: 87731 - DNA, 75 bp, synthetic construct
  source 1..75: mol_type = other DNA
ctgtcatcctgttgtttctggtagtggtggttgatttcaccggacgactgatgtcggtgctggcagatggtgtgc

SEQ ID NO: 87732 - DNA, 75 bp, synthetic construct
  source 1..75: mol_type = other DNA
gcttaatgttcccttcagtcattggatgcgtacagacagtcagtcggcatttcgtaattcaaacgccagttacag

SEQ ID NO: 87733 - DNA, 75 bp, synthetic construct
  source 1..75: mol_type = other DNA
tgcagccccccgtcaggagccggatattatgcagaaactggccgcgctgcagacggcaacaaagcgggcgctgta

SEQ ID NO: 87734 - DNA, 75 bp, synthetic construct
  source 1..75: mol_type = other DNA
gtgactgataaacgcaaaaaacgcgctgatgccggacgcagcgccctgacccgcgacgaagccgcgctgatatct

SEQ ID NO: 87735 - DNA, 75 bp, synthetic construct
  source 1..75: mol_type = other DNA
agcaaaagattggcaggaagctatcgatttctcgatggtatcattgctggataaaaactatatcagcgagaatta

SEQ ID NO: 87736 - DNA, 75 bp, synthetic construct
  source 1..75: mol_type = other DNA
catctgtaccacgcagggcggtctgacgcgcagtatggaatacgatgctgccggacgggtcatccgcctgaccag

SEQ ID NO: 87737 - DNA, 75 bp, synthetic construct
  source 1..75: mol_type = other DNA
acattaaacaggcaatcagcagcgcaccgcgcaaaggtcagacagtggaaatgcacctccagatgatcaaatacg

SEQ ID NO: 87738 - DNA, 75 bp, synthetic construct
  source 1..75: mol_type = other DNA
ccagaatacccagagcattactaacctgaacactcaggtcactaatctggatactcgcgtgaccaatatcgaaaa

SEQ ID NO: 87739 - DNA, 75 bp, synthetic construct
  source 1..75: mol_type = other DNA
ttgcagagaaaaccacatttggatgtattgcaaaagctgatggtcactttcatgtggtgacaaatggtaaagcgg

SEQ ID NO: 87740 - DNA, 75 bp, synthetic construct
  source 1..75: mol_type = other DNA
gaacgaactacatgctcaattcggaaagtccagccagctgggggaagtcatcaaacatggatgtgcccgaaaccg

SEQ ID NO: 87741 - DNA, 75 bp, synthetic construct
  source 1..75: mol_type = other DNA
gatattttatttatggatgatgactttgatgatagttcctctgaggataattcccctgaggatggttccattaag

SEQ ID NO: 87742 - DNA, 75 bp, synthetic construct
  source 1..75: mol_type = other DNA
agacaaagtgattattgtctgccgtctttccggttcccgctggctgggcgaactgaatccctggccggatgttct

SEQ ID NO: 87743 - DNA, 75 bp, synthetic construct
  source 1..75: mol_type = other DNA
ggcaccgaagagatctatttcgccacgttccatctcggcgtggatggcggcattgaagtcaccgccagccataac

SEQ ID NO: 87744 - DNA, 75 bp, synthetic construct
  source 1..75: mol_type = other DNA
acattagtgagaacaaaaaagaaatagagcacgatccaagtgctacgaatgaaaaattcataaataaatatcttt

SEQ ID NO: 87745 - DNA, 75 bp, synthetic construct
  source 1..75: mol_type = other DNA
tgacgcggggcatggtaaacgcggtgcaatatacgacgctgcctgtgctgaacttggcatgtcccgcgccactct

SEQ ID NO: 87746 - DNA, 75 bp, synthetic construct
  source 1..75: mol_type = other DNA
atggcgaagacctgcatctcaaagaagtaacccactggatgccgctaccagaaccgccgaaggaggtaagccaat

SEQ ID NO: 87747 - DNA, 75 bp, synthetic construct
  source 1..75: mol_type = other DNA
acggcgatctctccacgctcgcccagcttctttctggctttagcggtacggcggttggcgtggtgaaaggcgact

SEQ ID NO: 87748 - DNA, 75 bp, synthetic construct
  source 1..75: mol_type = other DNA
tcggctttgacattgacaacttcacacgcactgtgaccgacgccaagacactagagatttatacaaaatacataa

SEQ ID NO: 87749 - DNA, 75 bp, synthetic construct
  source 1..75: mol_type = other DNA
ggcattacgtttatgcatcagacgatggttttgatcctaacttttccacccagaaggccgacacaacacgaatga

SEQ ID NO: 87750 - DNA, 75 bp, synthetic construct
  source 1..75: mol_type = other DNA
atgcgcccggaaaacatccaactggcgccgcttggcccgcgttcgctgttcagcgctacggtaatcacccatgtc

SEQ ID NO: 87751 - DNA, 75 bp, synthetic construct
  source 1..75: mol_type = other DNA
tcaggaatttttaaactcactccaaggcacaacacaatttgcgggtaccgattaccgcagcaaagacctcacacc

SEQ ID NO: 87752 - DNA, 75 bp, synthetic construct
  source 1..75: mol_type = other DNA
caacatatgaaaacaatgactggaaacgtgttgttgatgacaaggtcttccagagcggtgtatttaacgtagcgt

SEQ ID NO: 87753 - DNA, 75 bp, synthetic construct
  source 1..75: mol_type = other DNA
gagtcgctggcgggaaagtctgctgccgaacatgtcgctactgctggccatcctgatttctaacaggccgggaga

SEQ ID NO: 87754 - DNA, 75 bp, synthetic construct
  source 1..75: mol_type = other DNA
gtgccgatactgactggctgctgttgcagtgcttcctgcgtcgttcccgctattacgcagggattatcaaatcca

SEQ ID NO: 87755 - DNA, 75 bp, synthetic construct
  source 1..75: mol_type = other DNA
atatgtatcttagcgccctgataactgtgtcagcagccctcacagcctgtaccccaaaaaccagcctggaacaac

SEQ ID NO: 87756 - DNA, 75 bp, synthetic construct
  source 1..75: mol_type = other DNA
ggctggacgccagccgcgcgttagccttcttcaacgatgaagcggtcgagcaggatgaagagtcgctgttcctgt

SEQ ID NO: 87757 - DNA, 75 bp, synthetic construct
  source 1..75: mol_type = other DNA
tttatcatctcatggctaataaatgtagccttaaatctatttccatacctgagcttgattttataattgatagtg

SEQ ID NO: 87758 - DNA, 75 bp, synthetic construct
  source 1..75: mol_type = other DNA
acaaccaggaagccttcttcatggtgggccaggacgttccggtattaaccggctctaccgttggctccaataaca

SEQ ID NO: 87759 - DNA, 75 bp, synthetic construct
  source 1..75: mol_type = other DNA
ttgcgggcttacttgcgcttttcgcaggtaatgccgctgcaaccgatggtgaaatagtttttgatggcgagattt

SEQ ID NO: 87760 - DNA, 75 bp, synthetic construct
  source 1..75: mol_type = other DNA
atgcgtaaaacagtggcttttggctttgtcggcaccgtactggattatgccgggcgcggcagtcagcgatggtcg

SEQ ID NO: 87761 - DNA, 75 bp, synthetic construct
  source 1..75: mol_type = other DNA
gtgttgctgaagttacccttaagggcacggttttgggtgttcatacagtcgaagccacgctgcttaacggcaatg

SEQ ID NO: 87762 - DNA, 75 bp, synthetic construct
  source 1..75: mol_type = other DNA
gtttcgccctgatttatggggtaaaccggtggttgtgctatcgaataatgacggttgcgttatcgcccgaaacgc

SEQ ID NO: 87763 - DNA, 75 bp, synthetic construct
  source 1..75: mol_type = other DNA
ggtgctgagaccgaagccgctgaaaatgcaactgctattggcaataatgcgaaggcaaaagggactaatagcatg

SEQ ID NO: 87764 - DNA, 75 bp, synthetic construct
  source 1..75: mol_type = other DNA
tgaagacctggtgaaaaacaggcctcgctcccctgtcagaccacctatacccgcaacctccaaaacgccagacct

SEQ ID NO: 87765 - DNA, 75 bp, synthetic construct
  source 1..75: mol_type = other DNA
atggcgattacacctttggcagcggtgatgacacctggctgattaactcaccggaggccgtggcgcaggcggtaa

SEQ ID NO: 87766 - DNA, 75 bp, synthetic construct
  source 1..75: mol_type = other DNA
tcacgcggtacaagcatcgcagaaacacaagcgaaccagcaacgcactgaagaacgcgcagcagctactgaagcc

SEQ ID NO: 87767 - DNA, 75 bp, synthetic construct
  source 1..75: mol_type = other DNA
actgctcaatggcgtaccagaagctattcaggaagcggacgaattgttgggcaaatatgagttacagaatcattc

SEQ ID NO: 87768 - DNA, 75 bp, synthetic construct
  source 1..75: mol_type = other DNA
tccgccttcacatgccgggaccattaccgtctatgaaggttccagaccaggtacgctgaatgattttctcggcgc

SEQ ID NO: 87769 - DNA, 75 bp, synthetic construct
  source 1..75: mol_type = other DNA
tttatcttttataataatttgtcttctcctgagggggcagtcaggctcgttaccggttcgcagcaggccagcatt

SEQ ID NO: 87770 - DNA, 75 bp, synthetic construct
  source 1..75: mol_type = other DNA
taccggttcgcagcaggccagcattgagatagcactggatcgtgttccggcgaacgtcagtaaaattgcgatcac

SEQ ID NO: 87771 - DNA, 75 bp, synthetic construct
  source 1..75: mol_type = other DNA
aaagttgcttgccgtattcggtaaggtgccggcagattccataaaaccagaacacatccgtcgatacatggacaa

SEQ ID NO: 87772 - DNA, 75 bp, synthetic construct
  source 1..75: mol_type = other DNA
aggatgtcggcaaggtggcggaacacgcagaaatctgcggccgctgtgtcagcaacgtcgccggtgacggtgaaa

SEQ ID NO: 87773 - DNA, 75 bp, synthetic construct
  source 1..75: mol_type = other DNA
cggaaaatggatgtcagaaaataataatgcacaggtaacgctgttaaatacacagctaagcgagtttgccccaac

SEQ ID NO: 87774 - DNA, 75 bp, synthetic construct
  source 1..75: mol_type = other DNA
aggacggcgacagtcaccgctttacccttgtagatcgcggagcctatacgggcgtaattgccagctggttgcata

SEQ ID NO: 87775 - DNA, 75 bp, synthetic construct
  source 1..75: mol_type = other DNA
cgttgccgaagggtccggacgtgcacaaacatttcgcaccattctgaccgtatccagcactgccaccgtggcgct

SEQ ID NO: 87776 - DNA, 75 bp, synthetic construct
  source 1..75: mol_type = other DNA
atcaccactgtgctggacaaccgcctgattgggctgacgctgacggataaccggggatttgaagcggaccagctt

SEQ ID NO: 87777 - DNA, 75 bp, synthetic construct
  source 1..75: mol_type = other DNA
accgtcggggaagtggtgaaggaaatagcctcgcggcataagctgaagatggcactgggtaaagacctgtcggat

SEQ ID NO: 87778 - DNA, 75 bp, synthetic construct
  source 1..75: mol_type = other DNA
tgtggataacaaacgtctggggcgggccctggaaatggcgcagctggtccaggccgagcgggataataaccggtc

SEQ ID NO: 87779 - DNA, 75 bp, synthetic construct
  source 1..75: mol_type = other DNA
gacatacttatgcctgctggtcgctgacagctggtgctaacccggcatttatagcaaaccagatgggccatgcag

SEQ ID NO: 87780 - DNA, 75 bp, synthetic construct
  source 1..75: mol_type = other DNA
ttatacgtgcttaaaaaaaatagaagcatctttcgaattaatcgaagaaaatggagatcctaaaataacgtctga

SEQ ID NO: 87781 - DNA, 75 bp, synthetic construct
  source 1..75: mol_type = other DNA
gcaagggtgacgcacgtcatgtaaaaaaattctgtgattttcgtgatctggtcgttctgcgctttgatggtgtga

SEQ ID NO: 87782 - DNA, 75 bp, synthetic construct
  source 1..75: mol_type = other DNA
gagctgcatctgctgccaggcttttatcacgacacgttgggtgaagagaacagggcgcaggcatttgaaaaaatg

SEQ ID NO: 87783 - DNA, 75 bp, synthetic construct
  source 1..75: mol_type = other DNA
atcgcacttgccgacacgctctctgatttcggtattgccaactcgattatccagcgtaaaccgataagacatctg

SEQ ID NO: 87784 - DNA, 75 bp, synthetic construct
  source 1..75: mol_type = other DNA
ctgacctttcttgaccccaaagatgccacacaggttcaggggctgtttcagcatttgcaggtcaggtttggtgac

SEQ ID NO: 87785 - DNA, 75 bp, synthetic construct
  source 1..75: mol_type = other DNA
attaaaatcccgcacatcgaccagtcgcaggagtctgatgcgaaattcctgacccgtcttgctgaacgcaacggc

SEQ ID NO: 87786 - DNA, 75 bp, synthetic construct
  source 1..75: mol_type = other DNA
caacatggatgctgatttatatgggtataaatgggctcgcgataatgtcgggcaatcaggtgcgacaatctatcg

SEQ ID NO: 87787 - DNA, 75 bp, synthetic construct
  source 1..75: mol_type = other DNA
atttgcaggtcaggtttggtgacgggccgtggcaggatgttaaggggctggatgaagtgggcagtgatacaggca

SEQ ID NO: 87788 - DNA, 75 bp, synthetic construct
  source 1..75: mol_type = other DNA
gaggcggagacgtccgcgaggaatgccggcatatcagccagtcaggcagaagagagcgctgcaaatgctgacact

SEQ ID NO: 87789 - DNA, 75 bp, synthetic construct
  source 1..75: mol_type = other DNA
ggagagcggggagagaccggtctgacgggaaatgcaggtccacagggtccaaagggagataccggtgcggcaggc

SEQ ID NO: 87790 - DNA, 75 bp, synthetic construct
  source 1..75: mol_type = other DNA
cgtgtgttaacgttattatggttactcgtatcagtgtttttgttttcgatttaaaacaaaaatttcttgattatg

SEQ ID NO: 87791 - DNA, 75 bp, synthetic construct
  source 1..75: mol_type = other DNA
gtgccgcggaagcagcgatgatcccggcgggtctgaaagccagctccgaatggttcccggcgaaagagcgttcca

SEQ ID NO: 87792 - DNA, 75 bp, synthetic construct
  source 1..75: mol_type = other DNA
gctttttgtggcgaccagtgtgtatacagatgaaccttataatgttacccgggcactgttattaatggtgatact

SEQ ID NO: 87793 - DNA, 75 bp, synthetic construct
  source 1..75: mol_type = other DNA
acaaaggcaacaaaactcccgcattcagcatcagtattgaggggaaggatatcaccactgtgctggataaccgcc

SEQ ID NO: 87794 - DNA, 75 bp, synthetic construct
  source 1..75: mol_type = other DNA
tgaagctaaaggcgatgaaccgagagggggggtaaaaggttttttttcaaacattagtgagaacaaaaaagaaat

SEQ ID NO: 87795 - DNA, 75 bp, synthetic construct
  source 1..75: mol_type = other DNA
ttgccgaaggggatgaaagccgaaacgaactggacggaggacaacggcaaactgaacgcagtgagactggtacag

SEQ ID NO: 87796 - DNA, 75 bp, synthetic construct
  source 1..75: mol_type = other DNA
ttcagcatttgcaggtcaggtttggtgacgggccgtggcaggatgttaaggggctggatgaagtgggcagtgata

SEQ ID NO: 87797 - DNA, 75 bp, synthetic construct
  source 1..75: mol_type = other DNA
ggttcccggatacagatggcgcactcatcaccggactgacctttcttgaccccaaagatgccacacgggttcagg

SEQ ID NO: 87798 - DNA, 75 bp, synthetic construct
  source 1..75: mol_type = other DNA
cgccgtatcgtcaggtactgacccacggctttaccgtggatggtcagggtcgcaagatgtctaaatccatcggca

SEQ ID NO: 87799 - DNA, 75 bp, synthetic construct
  source 1..75: mol_type = other DNA
gcataacggcgagtggaagacactgagcagtgacaaagtggggaaaaccggattttccgagaacgtgctcgcgaa

SEQ ID NO: 87800 - DNA, 75 bp, synthetic construct
  source 1..75: mol_type = other DNA
tcgcacccgctaaccaatcagaatttgaactgaccgtcacgcaggtacccgacgaacagcgtatcgatttctggc

SEQ ID NO: 87801 - DNA, 75 bp, synthetic construct
  source 1..75: mol_type = other DNA
taaaccttgaacagcgcaatctatcatcggtgttcggtacattaaaaaaactaggacactggtcagcaccaaacc

SEQ ID NO: 87802 - DNA, 75 bp, synthetic construct
  source 1..75: mol_type = other DNA
caatggacgcaatggcaagcgcgtgcgtaagcaatttgccacgaaaggcgaagccattgcgtttgaaagcttcac

SEQ ID NO: 87803 - DNA, 75 bp, synthetic construct
  source 1..75: mol_type = other DNA
atgtatatgaacgtaatcagaaacgtcatttgtacattaatcatactcccgatagggttacaggcagagaccagt

SEQ ID NO: 87804 - DNA, 75 bp, synthetic construct
  source 1..75: mol_type = other DNA
ggattggggaggcggttgccgccgctgctgctgacggtgtgacgttctctgttccggtcacaccacatacgttcc

SEQ ID NO: 87805 - DNA, 75 bp, synthetic construct
  source 1..75: mol_type = other DNA
ctttcaaaccggctggaaatattgtgactcgtaccctgaaggccactaaatcacaggcaaagccaacactgggtg

SEQ ID NO: 87806 - DNA, 75 bp, synthetic construct
  source 1..75: mol_type = other DNA
tttgggaaattcctgctgagagaatgaaaatgcgtaggccgcaccttgtccccttatcgacgcaggcgctaggct

SEQ ID NO: 87807 - DNA, 75 bp, synthetic construct
  source 1..75: mol_type = other DNA
taaacctcgaacaacgcaacctatcatcagtttttgggactctgaaaaaactgggccactggtcagcccctaacc

SEQ ID NO: 87808 - DNA, 75 bp, synthetic construct
  source 1..75: mol_type = other DNA
aattgtccgtaaaatggcagagaacaaacctgacctgccggacggcaaaacagagctggctgtcagggatattgc

SEQ ID NO: 87809 - DNA, 75 bp, synthetic construct
  source 1..75: mol_type = other DNA
accttactttcccggttaaggaaagttatgcacacaacaatgtgttggtgctgaagaaaattcgcttttacaatt

SEQ ID NO: 87810 - DNA, 75 bp, synthetic construct
  source 1..75: mol_type = other DNA
gtacgcttgcgcgcagcgacgagctggcgcaatacggcatcattcacgatccgcacgcctcttcacgactgatga

SEQ ID NO: 87811 - DNA, 75 bp, synthetic construct
  source 1..75: mol_type = other DNA
agatatataaaaggtttggttttactgaagaaaatacaggtaacgaaagtattgctgtatattctattaaaacag

SEQ ID NO: 87812 - DNA, 75 bp, synthetic construct
  source 1..75: mol_type = other DNA
agtaaagcgagcaggcatcgagctaccagagggccaatgcacccacgtgctgcgtcatacattcgccagtcattt

SEQ ID NO: 87813 - DNA, 75 bp, synthetic construct
  source 1..75: mol_type = other DNA
cgtgctaccggtcacggttttagacatacaatgtcgacaattttacatgaacagggatttgatagtgcttggatt

SEQ ID NO: 87814 - DNA, 75 bp, synthetic construct
  source 1..75: mol_type = other DNA
atgtatatgaacgtaatcagaactgtcatttgtacattaatcatacttccggtggggttacaggcagcgacaagt

SEQ ID NO: 87815 - DNA, 75 bp, synthetic construct
  source 1..75: mol_type = other DNA
cgctacgcaatcataactggccgcgctgaatacaatcctgcgcctgatttagccatcgctctggccgttcctaag

SEQ ID NO: 87816 - DNA, 75 bp, synthetic construct
  source 1..75: mol_type = other DNA
tgacattctcctgcatgctggccggcagtatgttcgttacctgtcatgtctgtgcagcgggttctgtggtgaata

SEQ ID NO: 87817 - DNA, 75 bp, synthetic construct
  source 1..75: mol_type = other DNA
gggtgatgatgccggtgaaaaatccgatgtccggcaccggtctgcgctggaagccgctgcgcgatcagatctttt

SEQ ID NO: 87818 - DNA, 75 bp, synthetic construct
  source 1..75: mol_type = other DNA
cacgctacccggtgtggcgttgtatgcatggcttcaggccgaacaacgacaaccgaacgcctggcaacatcgtgc

SEQ ID NO: 87819 - DNA, 75 bp, synthetic construct
  source 1..75: mol_type = other DNA
attgagattgccacgctggtgaccgatgccaacctgaatattctggcagaagggccgaccattgcagtacaccag

SEQ ID NO: 87820 - DNA, 75 bp, synthetic construct
  source 1..75: mol_type = other DNA
atacatgaaagcgagaaacgtgctgattaacgcctcgccgattgtccgcctggtgacccatcttgacgtctcgcg

SEQ ID NO: 87821 - DNA, 75 bp, synthetic construct
  source 1..75: mol_type = other DNA
cggaagggcgggcagatctctacacggaaatgccagtgaaagtcagtggctttaaacagccgatagatgatgcgg

SEQ ID NO: 87822 - DNA, 75 bp, synthetic construct
  source 1..75: mol_type = other DNA
taatcgcttatgcgtgggccagcgggctgattgaatttggtcagacactcccggaaggcgctttacctatcgcga

SEQ ID NO: 87823 - DNA, 75 bp, synthetic construct
  source 1..75: mol_type = other DNA
caacctgaaagaagcctgggtatttcgcacgggtgatgtgaaacagccgaacgatccgggcgaaatcaccaatga

SEQ ID NO: 87824 - DNA, 75 bp, synthetic construct
  source 1..75: mol_type = other DNA
gtgcggaagtcagatgcggtttacgggactgaagaggggctaccgtctgacagctatgatgcataagcccctggc

SEQ ID NO: 87825 - DNA, 75 bp, synthetic construct
  source 1..75: mol_type = other DNA
gatgacgaagggtatcctgaaatagcccgctgcacggagcgggagtttgcgaccattcttgccggtatcagcgcc

SEQ ID NO: 87826 - DNA, 75 bp, synthetic construct
  source 1..75: mol_type = other DNA
ggcagaaatgatcgtagaaaaccgataagcaaagaaagtgtaaaccaagttattgaatcattaggttataaggga

SEQ ID NO: 87827 - DNA, 75 bp, synthetic construct
  source 1..75: mol_type = other DNA
gggcggtttgccgaaaagcgaaggcgtgctgcccgccatcgaaagcctgcgtattccggtgcaatatctcgccaa

SEQ ID NO: 87828 - DNA, 75 bp, synthetic construct
  source 1..75: mol_type = other DNA
agatctagagtcatatactggaagtattattaccaaaaacgcaaccaagatcctaatgatgacaggagtcaggac

SEQ ID NO: 87829 - DNA, 75 bp, synthetic construct
  source 1..75: mol_type = other DNA
tctgggaaatacctgctgaacggatgaaaatgcgtcggccacatatagtacctttatcatctcaggtaattgaac

SEQ ID NO: 87830 - DNA, 75 bp, synthetic construct
  source 1..75: mol_type = other DNA
agcgccgatgccacgccagcagaagctatctcccccgttgccgatcaggactggcctgcctatggccgcaatcag

SEQ ID NO: 87831 - DNA, 75 bp, synthetic construct
  source 1..75: mol_type = other DNA
atggcccgttcagctaaaccccgtaaacgaaaacctgcacctcaaagaagcaaacttccccgctatgtcgtgaag

SEQ ID NO: 87832 - DNA, 75 bp, synthetic construct
  source 1..75: mol_type = other DNA
gagtttgacaagctggcgaaagacaagaacttcgacaacatccagaaggcgatgtatagccagttcgaaaacacc

SEQ ID NO: 87833 - DNA, 75 bp, synthetic construct
  source 1..75: mol_type = other DNA
tcatgcaaaaatgctcgaaaccgatcaggcatgggaagtgttcgaaaaactggaagactgctatttcagccaggg

SEQ ID NO: 87834 - DNA, 75 bp, synthetic construct
  source 1..75: mol_type = other DNA
tccacagggtccaaagggagataccggtgcggcaggcccggcaggcccacagggaccgaaaggagaaacaggtgc

SEQ ID NO: 87835 - DNA, 75 bp, synthetic construct
  source 1..75: mol_type = other DNA
tgatcggcacctgccgtctgaacggtatcgatccggaagcgtatctgcgccatatgctgagcgtactgccggaat

SEQ ID NO: 87836 - DNA, 75 bp, synthetic construct
  source 1..75: mol_type = other DNA
aaggtcaacgattggaatgcaatataatatttttgaagttcctgacggatgcgtacttacagggcttgatgtcgc

SEQ ID NO: 87837 - DNA, 75 bp, synthetic construct
  source 1..75: mol_type = other DNA
tgatcggcacctgccgtctgaacggtatcgatccggaagcgtatctgcgccatattctgagcttactgccggaat

SEQ ID NO: 87838 - DNA, 75 bp, synthetic construct
  source 1..75: mol_type = other DNA
tgatcggcacctgccgtctgaacggtatcgatccggaagcgtatctgcgccatatcctgagcctactgccggaat

SEQ ID NO: 87839 - DNA, 75 bp, synthetic construct
  source 1..75: mol_type = other DNA
gtacgacagagatgccagcgctggctccatcgcagggtactgaagttaagtggtttacggaaggcgacggtaata

SEQ ID NO: 87840 - DNA, 75 bp, synthetic construct
  source 1..75: mol_type = other DNA
gcggggagcgctactgtacagcctgatcgggacgtgcaaactgaatgacgtggatccagaaagctaccttcgcca

SEQ ID NO: 87841 - DNA, 75 bp, synthetic construct
  source 1..75: mol_type = other DNA
gaagacggtgcagtcggtgttcttgaggtattcaatggcggtaatttttccggaatgcagcgttataccaccaga

SEQ ID NO: 87842 - DNA, 75 bp, synthetic construct
  source 1..75: mol_type = other DNA
agcagcgcgttgaagaagaacgccagcgctatatccgtgctgcccgtgccaaaacaccgggcgtgtctcgtgtgc

SEQ ID NO: 87843 - DNA, 75 bp, synthetic construct
  source 1..75: mol_type = other DNA
tgatcggcacctgccgtctgaacggtatcgatccggaagcgtatctgcgccatatactgagcatactgccggaat

SEQ ID NO: 87844 - DNA, 75 bp, synthetic construct
  source 1..75: mol_type = other DNA
aaaacctgaactcattaaaaggcgaatggaagattgatttcacccgcgagccgttcgccagcaacgggctgtttg

SEQ ID NO: 87845 - DNA, 75 bp, synthetic construct
  source 1..75: mol_type = other DNA
cggggctggaggacatcagccgcgatttgcagcttctgagtggtgcagaaaataaccgggtgctgcgtgaggcaa

SEQ ID NO: 87846 - DNA, 75 bp, synthetic construct
  source 1..75: mol_type = other DNA
aaacaggtgaaaatgttctgtctgcagccattcagcgcattgaatggctatttggaacgtttccttctgtctgct

SEQ ID NO: 87847 - DNA, 75 bp, synthetic construct
  source 1..75: mol_type = other DNA
agtgtaatacgcgccgtccatgacagccgtagcaggcttatcgatcagcatacagtcgatatgatcggcaacact

SEQ ID NO: 87848 - DNA, 75 bp, synthetic construct
  source 1..75: mol_type = other DNA
tcagtttatttccatatgttaatgccgcatgagggggcatcggttgaaaatttaacatattatggatttctgatt

SEQ ID NO: 87849 - DNA, 75 bp, synthetic construct
  source 1..75: mol_type = other DNA
cgaaaaattaacgggaaagcactgactgcggatatcacattaacgccgaaagatattggtactttaaattcaata

SEQ ID NO: 87850 - DNA, 75 bp, synthetic construct
  source 1..75: mol_type = other DNA
gtaagggactgtggctttaccatgttctggagccggaaacctgggccaggatgtgtgagcgggtgtcaggggctg

SEQ ID NO: 87851 - DNA, 75 bp, synthetic construct
  source 1..75: mol_type = other DNA
gaggcagatatttcgaatattatttacctgttaaagatgaaggtattaattttaaaccggagataaaacatttag

SEQ ID NO: 87852 - DNA, 75 bp, synthetic construct
  source 1..75: mol_type = other DNA
gttatcgacgggcttaattatcccaatcatgaagcaattgatttttatcatcgctataaaacagatattcagtta

SEQ ID NO: 87853 - DNA, 75 bp, synthetic construct
  source 1..75: mol_type = other DNA
gatgacgagaatcaggttgaagttcgggaaaatgagccggagaaaatggaaggcgctgaacatccacacaaggag

SEQ ID NO: 87854 - DNA, 75 bp, synthetic construct
  source 1..75: mol_type = other DNA
gcagctggaactggtgagtagcgccctgaaagtgatccgcactgttcgggtaaaaaaagcctgtacaaaatgtga

SEQ ID NO: 87855 - DNA, 75 bp, synthetic construct
  source 1..75: mol_type = other DNA
aaccgcccttttctgttttcttcagcaaattcatcaccatgccgggccacaaggatttctcccgtgccatcgtgg

SEQ ID NO: 87856 - DNA, 75 bp, synthetic construct
  source 1..75: mol_type = other DNA
acacgatgatgcatcactggcgcgcgacgtagccactggcgtgctggcccgttcaatggacgtggacatttataa

SEQ ID NO: 87857 - DNA, 75 bp, synthetic construct
  source 1..75: mol_type = other DNA
cttctccggggcggatttctctacccattacatcgtgctgggtttccgcctgcgtgtggatgccagcgacctgac

SEQ ID NO: 87858 - DNA, 75 bp, synthetic construct
  source 1..75: mol_type = other DNA
gtggtggtgacctcagtcctctggggtgtgatgtgtcagagcaactggagcttatcagcagcgcctttaaggtta

SEQ ID NO: 87859 - DNA, 75 bp, synthetic construct
  source 1..75: mol_type = other DNA
atcgcgctggcggatacgctatctgatttcggtatcgcgaactcgattattcaacgtaaagagataagccacctt

SEQ ID NO: 87860 - DNA, 75 bp, synthetic construct
  source 1..75: mol_type = other DNA
accagatagcccggccccagccgttcagcaagcatccgcacgcacgactaccagtaacggtcataaccctttccg

SEQ ID NO: 87861 - DNA, 75 bp, synthetic construct
  source 1..75: mol_type = other DNA
tgcaactgaacatcatccggacacgcagccggtggatgctcagccacaggtgaattctgttgatgcgaaatatca

SEQ ID NO: 87862 - DNA, 75 bp, synthetic construct
  source 1..75: mol_type = other DNA
ccctgcgggatgcgcagggcgaaacgcaggtggtgcgtatttcctccctggacagcagctggtcgctgttccggc

SEQ ID NO: 87863 - DNA, 75 bp, synthetic construct
  source 1..75: mol_type = other DNA
gtgctgtttttgatcgcttcggcggtgatgtttatcggcctgacgtggctgaaaaccaaacgtcggctggattag

SEQ ID NO: 87864 - DNA, 75 bp, synthetic construct
  source 1..75: mol_type = other DNA
agcacccgaaggttgctaaaacatcggcaaaggctaaaaagaagaaggtgcaggaagcgcgggaaggtgagtata

SEQ ID NO: 87865 - DNA, 75 bp, synthetic construct
  source 1..75: mol_type = other DNA
tttgtccacgatgatgcgtcagtggaacgtgacgttgccgctggcgttctggcccgttcaatggacatcgatatt

SEQ ID NO: 87866 - DNA, 75 bp, synthetic construct
  source 1..75: mol_type = other DNA
gccatcgaggcagagataaggggaatgacggcggagcagcgccttgccgaacgtcagttgaaaacgaaaccgctg

SEQ ID NO: 87867 - DNA, 75 bp, synthetic construct
  source 1..75: mol_type = other DNA
gggtaaggccggacatccaccacgttcttcaggaggtagtggatgtccggcgaaaatcaaagaacatacacgtca

SEQ ID NO: 87868 - DNA, 75 bp, synthetic construct
  source 1..75: mol_type = other DNA
ttgatttaattccggatgagaatgcgcggatattcagaaaacagaaatatttgtatatgcgtcgggaaatagcgc

SEQ ID NO: 87869 - DNA, 75 bp, synthetic construct
  source 1..75: mol_type = other DNA
aggctgtaaaacctgcattattctttccgccccggcatcgcaacacgaagatctccgcgcctgcgccctgcgcca

SEQ ID NO: 87870 - DNA, 75 bp, synthetic construct
  source 1..75: mol_type = other DNA
gacggttgaacagtttattaatgatctgtacggtgaactgacaggcatgatttctgatgttgacctgggcgagat

SEQ ID NO: 87871 - DNA, 75 bp, synthetic construct
  source 1..75: mol_type = other DNA
ctggcatccggtccgctggcgatgctgcgcgttgccctgtatgccatatctggtctgttaggtgctctgctcagt

SEQ ID NO: 87872 - DNA, 75 bp, synthetic construct
  source 1..75: mol_type = other DNA
atgagactttttattgcagaaaaacccgcagtagcgaatgatattgttaaggcgcttggtggtaattttacccgc

SEQ ID NO: 87873 - DNA, 75 bp, synthetic construct
  source 1..75: mol_type = other DNA
gaggatatcagggcgttctgtctgtcgggcgcgtccagactcccgttcttggcctcattgtgaatcgtacccgtg

SEQ ID NO: 87874 - DNA, 75 bp, synthetic construct
  source 1..75: mol_type = other DNA
aatccggtgtttcctggttgctggataaactcggcattgtcagtaaagaagctgcaaaggcgaaactgccggaaa

SEQ ID NO: 87875 - DNA, 75 bp, synthetic construct
  source 1..75: mol_type = other DNA
gcgctgcgcgcttcgcccttcgggtcgttgcctgcggcaacgctctctcgctggcgctcaagtcgaaccttggtc

SEQ ID NO: 87876 - DNA, 75 bp, synthetic construct
  source 1..75: mol_type = other DNA
gcatggtacaagctggatacacaggccaaagataaaaaatggacagcgttagctgcattccctggcggaccaaga

SEQ ID NO: 87877 - DNA, 75 bp, synthetic construct
  source 1..75: mol_type = other DNA
ggcggtattggtacgccagctacacgcgctgccattctggaagcgctgaagaagagaaattatatcacgctggaa

SEQ ID NO: 87878 - DNA, 75 bp, synthetic construct
  source 1..75: mol_type = other DNA
gataaagcgtgggcagacggaacggctgcatcccttgcaggaaaaccggctacagttgaagcagcagcaactgat

SEQ ID NO: 87879 - DNA, 75 bp, synthetic construct
  source 1..75: mol_type = other DNA
agtcgctgccctggcacagtaccggaaaggagaaacaccggtattgcatggtggaggaattaccggaagtcggtt

SEQ ID NO: 87880 - DNA, 75 bp, synthetic construct
  source 1..75: mol_type = other DNA
catgacggaggatgatgcccgtccggaggcactgcgtcgctttgaactgatggtggaagaggtggtgcgtaacgc

SEQ ID NO: 87881 - DNA, 75 bp, synthetic construct
  source 1..75: mol_type = other DNA
caattcagcagcaacagcagcagttgctggatgaaaaccagcgccagcgtgatgcgctggagcgcagtgcgccgc

SEQ ID NO: 87882 - DNA, 75 bp, synthetic construct
  source 1..75: mol_type = other DNA
ctgctggagtctgcagataaatacccttcacttgtagataaagtgacagaagggagggttttgaatgcagaaaaa

SEQ ID NO: 87883 - DNA, 75 bp, synthetic construct
  source 1..75: mol_type = other DNA
gtctggattatccggtttacgtgcggttgctgtgatgtttatgaatccactggcagcactacgcggtggactggc

SEQ ID NO: 87884 - DNA, 75 bp, synthetic construct
  source 1..75: mol_type = other DNA
caattcagcagcaacagcagcagttgctggatgaaaaccagcgtcagcgtgatgtgctggagcgcagtgcgccgc

SEQ ID NO: 87885 - DNA, 75 bp, synthetic construct
  source 1..75: mol_type = other DNA
ctggctgcagtgctggggccgctggcagtgatccgtctgggattctctgtgttgggtatcaaaacgttatcttcc

SEQ ID NO: 87886 - DNA, 75 bp, synthetic construct
  source 1..75: mol_type = other DNA
atgagttatccggtacagaaaaaaataaaaacaggtgaaaatgttctccgggctgctgtggaacggattaactgg

SEQ ID NO: 87887 - DNA, 75 bp, synthetic construct
  source 1..75: mol_type = other DNA
tttaaacagctgatagatgatgcggaatggaccattacgactctgacacataccgtcagcccggataacggtttt

SEQ ID NO: 87888 - DNA, 75 bp, synthetic construct
  source 1..75: mol_type = other DNA
aaacgccgtttatcagacttgtgcaactctggcaggcggtgaggcgttggcggcggcaaatgcagacccgacgag

SEQ ID NO: 87889 - DNA, 75 bp, synthetic construct
  source 1..75: mol_type = other DNA
atgcgaatctatcgaaggaaatgtaaatgttgcaatgaatggtttataccaaaatatcaaaatcaatattggtgt

SEQ ID NO: 87890 - DNA, 75 bp, synthetic construct
  source 1..75: mol_type = other DNA
cagaaggtcgggcggatctctacacggaaatgccagtgaaagtcagaggctttaaacagccgatagatgatgcgg

SEQ ID NO: 87891 - DNA, 75 bp, synthetic construct
  source 1..75: mol_type = other DNA
cattggtccggatgaagaagcacagctcaagaaaattgctcaggcgctgcagttgccgctggagcagtacctgtg

SEQ ID NO: 87892 - DNA, 75 bp, synthetic construct
  source 1..75: mol_type = other DNA
tatccaacagacggcgaatggggtgcggacgcagacattactgatcggcggcgcggaccaaacgtgtaatataat

SEQ ID NO: 87893 - DNA, 75 bp, synthetic construct
  source 1..75: mol_type = other DNA
tctggcatagccacccagtaactccgcaacaacgcgaacagcaccacggtcatcgtggtgttgtgctgtggttta

SEQ ID NO: 87894 - DNA, 75 bp, synthetic construct
  source 1..75: mol_type = other DNA
gtggtcagatcaccgaccagaacacggatggaaatatcacgctaagcggcaccacatcgcagcctgccagcatcg

SEQ ID NO: 87895 - DNA, 75 bp, synthetic construct
  source 1..75: mol_type = other DNA
tcaccgggcaggaattttcgaaagtgcgtctgattgccggttacgacggtatcgcgccggaggtgtcagcaagcg

SEQ ID NO: 87896 - DNA, 75 bp, synthetic construct
  source 1..75: mol_type = other DNA
ggattatgcagaaggagttttcgcgtatacaggttattgccggatacaaggggcaaccggatgcagcaggtaatt

SEQ ID NO: 87897 - DNA, 75 bp, synthetic construct
  source 1..75: mol_type = other DNA
taagtaatgcggcttatttctggcttcagcactttgaggagtttatgatttatgttcgtaataagcttatcgacc

SEQ ID NO: 87898 - DNA, 75 bp, synthetic construct
  source 1..75: mol_type = other DNA
tcagcgaagcaccacaggttattgatgcactgaaatcagtattccctcagccactggatattgattctgtacgta

SEQ ID NO: 87899 - DNA, 75 bp, synthetic construct
  source 1..75: mol_type = other DNA
atggcaaccaacaatcgtaaagcaaagatgctaatttcccgtgtatacagactttgctaccccagccagtggttg

SEQ ID NO: 87900 - DNA, 75 bp, synthetic construct
  source 1..75: mol_type = other DNA
tgatgccgttaagtttctacgcagtgaagcgtctggtgtacgtttgttcgccgaccagcttcgcaaaggaggcaa

SEQ ID NO: 87901 - DNA, 75 bp, synthetic construct
  source 1..75: mol_type = other DNA
catcggcaacggcgtaaacgttcgcgcgcttattaatccgaacatccgggttaatgggctcattcaactggatca

SEQ ID NO: 87902 - DNA, 75 bp, synthetic construct
  source 1..75: mol_type = other DNA
aggaaataacggaatcaatgattgtaaaacctgaagaatgtacttatgaccatgtcaggaacaattttgttataa

SEQ ID NO: 87903 - DNA, 75 bp, synthetic construct
  source 1..75: mol_type = other DNA
gataacgcgattactgtcccggaaatacccggagctggtgataccggctgagctggcagcagagggaagcggcag

SEQ ID NO: 87904 - DNA, 75 bp, synthetic construct
  source 1..75: mol_type = other DNA
ccgacgttgagccaacggaatccctggtggaactggtgaaaaaaggccagaaattattcacatctatggaagtca

SEQ ID NO: 87905 - DNA, 75 bp, synthetic construct
  source 1..75: mol_type = other DNA
ggcgttaaatgaagctcgccttgagcgagatatattaaaaaaagcaacagcgtattttgcacaggagtcgctgaa

SEQ ID NO: 87906 - DNA, 75 bp, synthetic construct
  source 1..75: mol_type = other DNA
accaaaccgtggaccgctctatcgttgcaacgaacacaccagaaagtgttcgctccgtgcaatcacgtcagacca

SEQ ID NO: 87907 - DNA, 75 bp, synthetic construct
  source 1..75: mol_type = other DNA
ggcatccggttctgtactggcccgcaggttacagataagtcattacccggtgctgataacggacaacggcctgtc

SEQ ID NO: 87908 - DNA, 75 bp, synthetic construct
  source 1..75: mol_type = other DNA
ccatcgtggtggtggaaaacgtcgaacgtattatgagtgaggaaggactcactcctcgcgaagccacacgtaaat

SEQ ID NO: 87909 - DNA, 75 bp, synthetic construct
  source 1..75: mol_type = other DNA
aaaatggccgcgtttggacaatccattggtggaatttttccatctgatgaaattgtcaaaggttcgatcagtggc

SEQ ID NO: 87910 - DNA, 75 bp, synthetic construct
  source 1..75: mol_type = other DNA
attgcggtggcgaactgcccggaaacgtacaaaccgcagttgcaggaaggcagtggtcgtacccagactatccgc

SEQ ID NO: 87911 - DNA, 75 bp, synthetic construct
  source 1..75: mol_type = other DNA
atgaatgcagagcggctgttcagtacggcacgggaactgcgggacgtggcggcaggccgtgccgttctccgtcag

SEQ ID NO: 87912 - DNA, 75 bp, synthetic construct
  source 1..75: mol_type = other DNA
ctgttaaaactgcttccgtgtctctggttgttgataacaccaaaccgctgaccatgtcttctcgtcagatcgctg

SEQ ID NO: 87913 - DNA, 75 bp, synthetic construct
  source 1..75: mol_type = other DNA
ccgtcagtttgagctggacgatagcgagctattatccctgctgctcgggaaaagcggtgcagatattgagcgcat

SEQ ID NO: 87914 - DNA, 75 bp, synthetic construct
  source 1..75: mol_type = other DNA
tctgcaactgcgtaaggcgttaaatgaagctcgccttgagcgagatatattaaaaaaagcaactgtagattcaat

SEQ ID NO: 87915 - DNA, 75 bp, synthetic construct
  source 1..75: mol_type = other DNA
aatcaaaacagatttcaattcgtatcccacatgatgcttttgatggcatggaatccgtaaaactggacggcgaaa

SEQ ID NO: 87916 - DNA, 75 bp, synthetic construct
  source 1..75: mol_type = other DNA
gatgcagcagaacgtgcacaaccagaatgggaagcgttgcctgctattgaacgcgccagttggttgcgcaaaatc

SEQ ID NO: 87917 - DNA, 75 bp, synthetic construct
  source 1..75: mol_type = other DNA
gcggggccctctgtgcgcgtgaatgaatggttcagtgcgtatgcgatggcgggcgtggcttacagccgtgtgtcg

SEQ ID NO: 87918 - DNA, 75 bp, synthetic construct
  source 1..75: mol_type = other DNA
tgtccgcagccatttgtctggccgtatccggtgcgtctgcatgggcgtctgaacatcagtccacgctgagcgcgg

SEQ ID NO: 87919 - DNA, 75 bp, synthetic construct
  source 1..75: mol_type = other DNA
ctgcgtattcagcaggcgtttgaaggtttaagcgtcgccgggtcggtgggagcctatcagtatcatggtcgcagt

SEQ ID NO: 87920 - DNA, 75 bp, synthetic construct
  source 1..75: mol_type = other DNA
agtatcacagacaaggaaagggaaaatctgaaggcattaatatgtagcaaaccagctaaatcagttaatacaggc

SEQ ID NO: 87921 - DNA, 75 bp, synthetic construct
  source 1..75: mol_type = other DNA
aatagtcaaaggctctattagcggatatgtcttcgagcaatttgaaatcgcctgttatacctcactcttagcagc

SEQ ID NO: 87922 - DNA, 75 bp, synthetic construct
  source 1..75: mol_type = other DNA
gggtggcgttgtgttttttttgccgccacagggtaagcccggggtgacagagataacacagccgcatcttctgcg

SEQ ID NO: 87923 - DNA, 75 bp, synthetic construct
  source 1..75: mol_type = other DNA
attaacgtgaaataccgttatgagtttacggatacgttggggctggtgacgtcgttcagctatgcaggagacaag

SEQ ID NO: 87924 - DNA, 75 bp, synthetic construct
  source 1..75: mol_type = other DNA
caactgtctacccactgataaaaatccggtcatgctttcgtgcggtatacctctggataaaaacatcgcatcaca

SEQ ID NO: 87925 - DNA, 75 bp, synthetic construct
  source 1..75: mol_type = other DNA
atgtcctttttcttctccttgtttctggtgaagaggggggtagtgaagcaaagtggctggaaaggactgtcggaa

SEQ ID NO: 87926 - DNA, 75 bp, synthetic construct
  source 1..75: mol_type = other DNA
ctatcgcctgttattgatgaactggataaggcaatggcaattcacgaaaataataacgcgccccacaccggagaa

SEQ ID NO: 87927 - DNA, 75 bp, synthetic construct
  source 1..75: mol_type = other DNA
gacggtcggcatactgccgccggaagccggtgtgattgagcgggcgcgcgccggtatcgatgaggccatcagccg

SEQ ID NO: 87928 - DNA, 75 bp, synthetic construct
  source 1..75: mol_type = other DNA
atggcacgtcaaacctatttcacttctgcaactaaacgtcctcgttcactacgtcaaattttggccgaattattt

SEQ ID NO: 87929 - DNA, 75 bp, synthetic construct
  source 1..75: mol_type = other DNA
gtgctggatgcgctggagcaggcgttgtgggcccgtcgtccgtctggcaccatccatcacagcgataaaggctct

SEQ ID NO: 87930 - DNA, 75 bp, synthetic construct
  source 1..75: mol_type = other DNA
acagccagaaacgcatggcttgaagcacgtcgtcagcagaaagcggcagcggataatattgcgacaatccgccag

SEQ ID NO: 87931 - DNA, 75 bp, synthetic construct
  source 1..75: mol_type = other DNA
ctggcctcggttgaggctggggctgtgctgggcgatatctgcgcttatgccaacgcgggctttaccgccgagcgt

SEQ ID NO: 87932 - DNA, 75 bp, synthetic construct
  source 1..75: mol_type = other DNA
ccgctgggtgtttgtttataccactgctgccagaaggcctgacgggacaatgacaccaagcatcagaaagatgcg

SEQ ID NO: 87933 - DNA, 75 bp, synthetic construct
  source 1..75: mol_type = other DNA
atggcactgacgaaaaaacaacgtgcagagctgcgcatgaagttcggcggtcgctgtgcttattgcggctgcgaa

SEQ ID NO: 87934 - DNA, 75 bp, synthetic construct
  source 1..75: mol_type = other DNA
caacgtttgccacggcgatgtgattaatcacaaaactgaaaacagctatgtgtacgccgaatctggcctggtcac

SEQ ID NO: 87935 - DNA, 75 bp, synthetic construct
  source 1..75: mol_type = other DNA
gtcagaaccttatcccgtggtgaaacgattttctgtgacggcacctttacaggcaaagccgggcgaggtcgtttc

SEQ ID NO: 87936 - DNA, 75 bp, synthetic construct
  source 1..75: mol_type = other DNA
atgttctggttaataatactggaggtgacttaaacataatttcgtccgactctattctaaatggagcgactaaac

SEQ ID NO: 87937 - DNA, 75 bp, synthetic construct
  source 1..75: mol_type = other DNA
tcctcgacgaaatcccgatgatggtcgaggaaggactgagcagttttaaactctatttaacctatcaatacaaac

SEQ ID NO: 87938 - DNA, 75 bp, synthetic construct
  source 1..75: mol_type = other DNA
ttaaccgcgccgcgctatcatgccttgagtcgccctctggaatgcgaagcggaagccatcgcccgcatgattaac

SEQ ID NO: 87939 - DNA, 75 bp, synthetic construct
  source 1..75: mol_type = other DNA
gtgcgtcttatacgcaaaaatcctggtggcaactgtccaatagcgaagagtcttcaccgtttcgtgaaaccaact

SEQ ID NO: 87940 - DNA, 75 bp, synthetic construct
  source 1..75: mol_type = other DNA
gatctcaacagcagggcttacgactatacgccagcagcagaaagcagaaaaacagatctccactcagggcgtttt

SEQ ID NO: 87941 - DNA, 75 bp, synthetic construct
  source 1..75: mol_type = other DNA
ggtatcttcatgcccgtacgaacgctcccggcagcgatgatctgaacgggattaacgtgaaataccgttatgagt

SEQ ID NO: 87942 - DNA, 75 bp, synthetic construct
  source 1..75: mol_type = other DNA
tactaaggttatttgatgatgttaagttgctatttaatgaagtgcctgtcagcattttagtaaatgatatttttt

SEQ ID NO: 87943 - DNA, 75 bp, synthetic construct
  source 1..75: mol_type = other DNA
atgacagcacagatagcagcttacgggcggctggtggacgacccgcaggtaaaacagaccagcaagggcacaccg

SEQ ID NO: 87944 - DNA, 75 bp, synthetic construct
  source 1..75: mol_type = other DNA
cgctgccatgcagtcaggctcaggacggacaggcgacgttatggctgtcagtcctggcatttggtaagcaggccg

SEQ ID NO: 87945 - DNA, 75 bp, synthetic construct
  source 1..75: mol_type = other DNA
ggcttacagccgtgtgtcgactttctccggggattatctccgcgtaactgacaacaaggggaaaacgcacgacgt

SEQ ID NO: 87946 - DNA, 75 bp, synthetic construct
  source 1..75: mol_type = other DNA
attatcggtggtacgctggaaatgatcgcgctgggctggatgaacatcggtgctgcagttgcgcctgacgccgct

SEQ ID NO: 87947 - DNA, 75 bp, synthetic construct
  source 1..75: mol_type = other DNA
agaaagcctattcccgtcatctcgatgaaaaatatggtttcccatcagggacgatggaaacattagttggcaatg

SEQ ID NO: 87948 - DNA, 75 bp, synthetic construct
  source 1..75: mol_type = other DNA
gagaactgcctgaaagcattgcgcgagggagataccctagtagtttgggcactagatcggctcggcggttcattg

SEQ ID NO: 87949 - DNA, 75 bp, synthetic construct
  source 1..75: mol_type = other DNA
ggtggaactggtgaaaaaaggccagaaattattcacatctatggaagtcagtccgaagtttgctgatacgggcaa

SEQ ID NO: 87950 - DNA, 75 bp, synthetic construct
  source 1..75: mol_type = other DNA
atcccatgcgtattcaggaaatcacgcaatatatcctgaacaacttccgccagaaaacccaccgtactttccctg

SEQ ID NO: 87951 - DNA, 75 bp, synthetic construct
  source 1..75: mol_type = other DNA
aaccactgaacttcactggtggcgtacctctgtggaaggcaaacaggagcattatttcactacccgcctgactga

SEQ ID NO: 87952 - DNA, 75 bp, synthetic construct
  source 1..75: mol_type = other DNA
cgtccacaccacggcggcgaacctggatatcgatatcccgtatgcgacggacccggcaggaaaccggctgccgga

SEQ ID NO: 87953 - DNA, 75 bp, synthetic construct
  source 1..75: mol_type = other DNA
ttatgacgcgactaaaaccttcggtaatatcgtcacgttccgggatctggaacgctcaaccattgatgccataac

SEQ ID NO: 87954 - DNA, 75 bp, synthetic construct
  source 1..75: mol_type = other DNA
attcctcttgatttaattgaagttcgttctggatcttatttagaagaagacgatgttatccgttttcaggaccga

SEQ ID NO: 87955 - DNA, 75 bp, synthetic construct
  source 1..75: mol_type = other DNA
ggaaggctcggcgacacagggtgataaccgggaaacgcatgctgtcggggtgctgtcgaaaattcataccaccct

SEQ ID NO: 87956 - DNA, 75 bp, synthetic construct
  source 1..75: mol_type = other DNA
gtcaacagaagttgatgcacgcctctcttttgataaagaaaagagtattgagaaggcgcgccatctggtggactt

SEQ ID NO: 87957 - DNA, 75 bp, synthetic construct
  source 1..75: mol_type = other DNA
attactcattgcaagcgtggagcggccaggaaggtagcgaaatttaccatgttattttcaatggtaatgtttaca

SEQ ID NO: 87958 - DNA, 75 bp, synthetic construct
  source 1..75: mol_type = other DNA
gctgactggcggcaaagcccgctctttagcgatgaagaacggctggcgctggagtacgccgaagccgcaagcgta

SEQ ID NO: 87959 - DNA, 75 bp, synthetic construct
  source 1..75: mol_type = other DNA
tctgaataaagaagcgattgccagttacgactgggcggaaaatgcgcgtaaggatgaagtaaagtttcagttgag

SEQ ID NO: 87960 - DNA, 75 bp, synthetic construct
  source 1..75: mol_type = other DNA
aaagaggtgcatgacgcgccagcggtgcgtggcagtattatcgccaatatgctgcaggagcatgacaatccgttc

SEQ ID NO: 87961 - DNA, 75 bp, synthetic construct
  source 1..75: mol_type = other DNA
attaacgtgaaataccgttatgagtttacggacacgctggggatggtgacgtcattcagctatgcagaagacaag

SEQ ID NO: 87962 - DNA, 75 bp, synthetic construct
  source 1..75: mol_type = other DNA
cggagatgcgctaccgctacgacgatgcggggcgggtggtggagcaacttaacccggcaggcctgagttaccgct

SEQ ID NO: 87963 - DNA, 75 bp, synthetic construct
  source 1..75: mol_type = other DNA
agtcacaacaaaaaactgctagagtacctctagacgttttaagcgaaatgaatttggtaaaagaagaaaacgaaa

SEQ ID NO: 87964 - DNA, 75 bp, synthetic construct
  source 1..75: mol_type = other DNA
tactgacgcactgaacagggcaaaacaacagacaggccagcacgatgatccgtacggggacgggataccgtttta

SEQ ID NO: 87965 - DNA, 75 bp, synthetic construct
  source 1..75: mol_type = other DNA
acgctgtgccacccgttgcggctgtgatggaaagcgatgaagcgttacgcctgcgtgtgcccgcagcctttgaag

SEQ ID NO: 87966 - DNA, 75 bp, synthetic construct
  source 1..75: mol_type = other DNA
aaccgcctttatacccgcctgatggcagaaaacggtaactggctggtagaggtgaagccgtggtatgtggtgggt

SEQ ID NO: 87967 - DNA, 75 bp, synthetic construct
  source 1..75: mol_type = other DNA
ccaccgcgaggaaggcatcagcctttaccgccgctatgacaaccgtggccggttaacctcggtgaaagacgcaca

SEQ ID NO: 87968 - DNA, 75 bp, synthetic construct
  source 1..75: mol_type = other DNA
ggccggatggtggggcaccgttatgcgggaaggccggagatgcgctaccgctacgacgatgcggggcgggtggtg

SEQ ID NO: 87969 - DNA, 75 bp, synthetic construct
  source 1..75: mol_type = other DNA
tactgacgcactgaacagagcaaaacaacaggcagatcagcaaggaagccagccaccagtgggagataatgagca

SEQ ID NO: 87970 - DNA, 75 bp, synthetic construct
  source 1..75: mol_type = other DNA
gcaggttatcgctgacagcgtaatcagtgcccgttcggcgcgtcctggcgggaagcgggggcaacaggggaaggc

SEQ ID NO: 87971 - DNA, 75 bp, synthetic construct
  source 1..75: mol_type = other DNA
ctgcttaaccgtttgttgtccggtaaaaaactgactggtcgggatgaacaggatatccggcgtctctggcaggag

SEQ ID NO: 87972 - DNA, 75 bp, synthetic construct
  source 1..75: mol_type = other DNA
ggtataaccacgactctaacgggcgttccgacccgacctcccgcagctggaaccgcctttatactcgcctgatgg

SEQ ID NO: 87973 - DNA, 75 bp, synthetic construct
  source 1..75: mol_type = other DNA
gtgagagatttcacgttgcgtttcagtgataaagcagatttcagggcatttctcaggaaacttaactgggaagag

SEQ ID NO: 87974 - DNA, 75 bp, synthetic construct
  source 1..75: mol_type = other DNA
aatactgactcagttagttctggcggggctggcgaaggataacggcgggtacgggaataaattcagacgctgcca

SEQ ID NO: 87975 - DNA, 75 bp, synthetic construct
  source 1..75: mol_type = other DNA
aaggctacaaaactacgtttttcttatcaggtagacaaagaaagtgaagggcaggattatcgaatcccaaaaggg

SEQ ID NO: 87976 - DNA, 75 bp, synthetic construct
  source 1..75: mol_type = other DNA
gctggagcgcaagaagtattgatatcaatgaaacctccggcagttcgctggatgtggatgtctggaacggaggta

SEQ ID NO: 87977 - DNA, 75 bp, synthetic construct
  source 1..75: mol_type = other DNA
gtggcacgttgattgccagtacatccctacagaaagcctgattgagtcagattgcactgcgtatgtggcctacaa

SEQ ID NO: 87978 - DNA, 75 bp, synthetic construct
  source 1..75: mol_type = other DNA
gattgatctcaaccgtacccgcgagcttgcgccgaaactggggcacaacgtgacggtaatcagcgaatccggcat

SEQ ID NO: 87979 - DNA, 75 bp, synthetic construct
  source 1..75: mol_type = other DNA
atgagcaacacatttaaattcagcagccggagcgaaaagaatttgcagggtgtaaatcctgatctggtgaaagtg

SEQ ID NO: 87980 - DNA, 75 bp, synthetic construct
  source 1..75: mol_type = other DNA
tgaagcatggaccgaaaaaaataaacacattcaagcactagaccttgcaactatagcatcacgattgatagatct

SEQ ID NO: 87981 - DNA, 75 bp, synthetic construct
  source 1..75: mol_type = other DNA
tcgcagacaaggcgatttgggtagaaacccgcaaacagcagcaaccgctggccagttttcagaatgagattcagc

SEQ ID NO: 87982 - DNA, 75 bp, synthetic construct
  source 1..75: mol_type = other DNA
tgctggtggtctgtggtgcgcttagtctggggctgaatcattaccgcgataacgtcatcacctacaaagcgcagc

SEQ ID NO: 87983 - DNA, 75 bp, synthetic construct
  source 1..75: mol_type = other DNA
tgatagttgatttgctcggcaatatctcagccaaatcccgccagtggtcacaggagctgggggcattctcacgct

SEQ ID NO: 87984 - DNA, 75 bp, synthetic construct
  source 1..75: mol_type = other DNA
tgctgcttcccgtgatgctgctgccccacaccgcaatggcaaataccctcttcgatatgattaaaaccgttggcg

SEQ ID NO: 87985 - DNA, 75 bp, synthetic construct
  source 1..75: mol_type = other DNA
gctatgtgaatgcccttcaggcctcgaacattctcgacactattaaaaaggagaaatttaacctcacaaccacta

SEQ ID NO: 87986 - DNA, 75 bp, synthetic construct
  source 1..75: mol_type = other DNA
agtctttataatcttgatacttttaaccgttttacaaacagacactacttcaattcaggcgaatatgcagatgct

SEQ ID NO: 87987 - DNA, 75 bp, synthetic construct
  source 1..75: mol_type = other DNA
tgccagagacgctgcgaccggcttttaccgggtcattcagaaagtcagggaaacgcttcaggcactgcgcgacgc

SEQ ID NO: 87988 - DNA, 75 bp, synthetic construct
  source 1..75: mol_type = other DNA
acctggatatccgcatcccgtatgccacagacccggcaggtaaccgcctgcccgacccggagctgcacccggaca

SEQ ID NO: 87989 - DNA, 75 bp, synthetic construct
  source 1..75: mol_type = other DNA
aaacggcgaaagttgtttttaatgaattaaacggcaaaccggcaacagtcggggagatagcacaaaacacatacc

SEQ ID NO: 87990 - DNA, 75 bp, synthetic construct
  source 1..75: mol_type = other DNA
cgcgtctgtgcgctgcatttatttatgttcagttatgcctggtggcctgccgtgaccggctgatacgcctgttac

SEQ ID NO: 87991 - DNA, 75 bp, synthetic construct
  source 1..75: mol_type = other DNA
cggctgccatacctgttcggtgacctgtaaaaacgtctggaccggacgcgaaggcatggagtacgcatggtttaa

SEQ ID NO: 87992 - DNA, 75 bp, synthetic construct
  source 1..75: mol_type = other DNA
tggaaaggttctcctggcatgtggcggataaggggttccgtatggtgaggtactacggtttcctgagtccggtga

SEQ ID NO: 87993 - DNA, 75 bp, synthetic construct
  source 1..75: mol_type = other DNA
ccggatggccaatgcacccacgtgctgcgacatacgtttgctagccactttatgatgaatggcgggaacatactt

SEQ ID NO: 87994 - DNA, 75 bp, synthetic construct
  source 1..75: mol_type = other DNA
gtaccgcaggccgcagcggaagaaacgcgtcatcaggcggagtatcaaaaccgtggaacagaaaacgatatgatt

SEQ ID NO: 87995 - DNA, 75 bp, synthetic construct
  source 1..75: mol_type = other DNA
tcttactcgttcacagctttcaccccacaagttgactttcactaaaacgaagggaaagaagaatcgtacagtacc

SEQ ID NO: 87996 - DNA, 75 bp, synthetic construct
  source 1..75: mol_type = other DNA
cggcatgaatggcaatggtgcggaaatgagcgcggaagccgcaggtatcgctgtctgcctgattgaatatagcca

SEQ ID NO: 87997 - DNA, 75 bp, synthetic construct
  source 1..75: mol_type = other DNA
atgaccgatttagccattatctggacgaacggacgcggcgatattgcacaggatggcattgatatgctgaccgac

SEQ ID NO: 87998 - DNA, 75 bp, synthetic construct
  source 1..75: mol_type = other DNA
tcgtacccgctaacggatccgaatttgagttgagcgtaacgcaggtacccgatgaacagcatatccgcttctggc

SEQ ID NO: 87999 - DNA, 75 bp, synthetic construct
  source 1..75: mol_type = other DNA
gaaatcgctgcaacaacactggcaaaccgagcgccgctatctggggctgctctcgggcgaagacggcgacaaaat

SEQ ID NO: 88000 - DNA, 75 bp, synthetic construct
  source 1..75: mol_type = other DNA
tctgggcaatcctcttgcaaccgatctcacctctaaaatgtttgcccactatcgagataaacgcctgacaggcga

SEQ ID NO: 88001 - DNA, 75 bp, synthetic construct
  source 1..75: mol_type = other DNA
gatgggttcaatttcttcacagactgctattttcaatttttatccgtaatggaaaaaacgtctatcgtgctccct

SEQ ID NO: 88002 - DNA, 75 bp, synthetic construct
  source 1..75: mol_type = other DNA
gcagaacacgtatgcgcgtcctctgacgatgtccgagatggtggtgatgtttggttatgtgtaccgtgagtcaaa

SEQ ID NO: 88003 - DNA, 75 bp, synthetic construct
  source 1..75: mol_type = other DNA
cgtctgaacacactggactggcttggtggtcagagccgggagcaggcagataacgaatggcatgaagcgattaac

SEQ ID NO: 88004 - DNA, 75 bp, synthetic construct
  source 1..75: mol_type = other DNA
ctcacctctaaaatgtttgcccactatagagataaacgcctgacaggagagatctacttcagcgaaaaatggaag

SEQ ID NO: 88005 - DNA, 75 bp, synthetic construct
  source 1..75: mol_type = other DNA
cgtaaacaattcgccaccaaaggcgaagcactggcttttgagcgtcacacgatggaagaaaccgaagcaaagccc

SEQ ID NO: 88006 - DNA, 75 bp, synthetic construct
  source 1..75: mol_type = other DNA
tgcttaagcacaggcgcacgctggcgtgaagccgtaaatcttacccgctcacaggtgaccaaataccgaattacc

SEQ ID NO: 88007 - DNA, 75 bp, synthetic construct
  source 1..75: mol_type = other DNA
tcatctatcacctgatcacttagagacagctcttcgtttcaatccactagcaactttggatgttactaaatcaga

SEQ ID NO: 88008 - DNA, 75 bp, synthetic construct
  source 1..75: mol_type = other DNA
cttgggaaatccccttgcaactgatctcacctcaaaaatgtttgctcactatcgagataaacgcctgacaggcga

SEQ ID NO: 88009 - DNA, 75 bp, synthetic construct
  source 1..75: mol_type = other DNA
gtgcgtaaagtctggcgtcagttgttacgggaaggaatcagggtagccagatgtacagtggcgcgcctcatggcg

SEQ ID NO: 88010 - DNA, 75 bp, synthetic construct
  source 1..75: mol_type = other DNA
gatgttacctgtgacacaaatcagctcaaaaaagtttgaagcacagtctgcaccagtggctaagataaccagcca

SEQ ID NO: 88011 - DNA, 75 bp, synthetic construct
  source 1..75: mol_type = other DNA
ctggacgttattgctggcaaaagatggcgtggcgcagtggtttttacaacatctggggctggaaccactgctgac

SEQ ID NO: 88012 - DNA, 75 bp, synthetic construct
  source 1..75: mol_type = other DNA
gacggtcagacgcgtaaaacgttccaggagatcctcgctgcgctgggtacgggtgatgcactggcgtcgaagtat

SEQ ID NO: 88013 - DNA, 75 bp, synthetic construct
  source 1..75: mol_type = other DNA
gtgcgtctgaaggacccgcgcggtgctggttatacacaactatggctaagccgcggaacaggtgcttacacctat

SEQ ID NO: 88014 - DNA, 75 bp, synthetic construct
  source 1..75: mol_type = other DNA
atgggaaagaggtcaagttcagttctcaattatccacttgtggataaagtgcagatttttccggtggataagtat

SEQ ID NO: 88015 - DNA, 75 bp, synthetic construct
  source 1..75: mol_type = other DNA
cagtgctatccactgaaagatgatcctgattcggtatcgccagtattcacagttcttgttgctgattatcaaaag

SEQ ID NO: 88016 - DNA, 75 bp, synthetic construct
  source 1..75: mol_type = other DNA
agtcagtgttatgtctgatgccgttcagtcagacccgtcgattcctgccccgcaggttttgtctgtaaattttga

SEQ ID NO: 88017 - DNA, 75 bp, synthetic construct
  source 1..75: mol_type = other DNA
cagtgcctgcttccccgtcagagcttggcaacacggcttccgtcggaaccggtgataattttgaacggttacttg

SEQ ID NO: 88018 - DNA, 75 bp, synthetic construct
  source 1..75: mol_type = other DNA
gaaaacaaaaaatcacgctaccgatttcatggggatcggaagggttcgacgcgcagcaaagctacgtgattaagg

SEQ ID NO: 88019 - DNA, 75 bp, synthetic construct
  source 1..75: mol_type = other DNA
tccgatgcttgagcagatggtgaaagaggcggtaagccatattcctgttccgcgtgatggtcgtgactacgatcc

SEQ ID NO: 88020 - DNA, 75 bp, synthetic construct
  source 1..75: mol_type = other DNA
ataacgtcataaaccaggtgattgaagatatggcgcggggaaatattccatccccactcccttcacaaagtggac

SEQ ID NO: 88021 - DNA, 75 bp, synthetic construct
  source 1..75: mol_type = other DNA
tctggttcgggatggttcaggctaccaggtggatatattgttcagtttggcacttttgcaggaaacacgacccgc

SEQ ID NO: 88022 - DNA, 75 bp, synthetic construct
  source 1..75: mol_type = other DNA
gatgcacgcgctgattgatatttcatgcacggcagcaaccgcagaaaaacacattaccagagagccggaatatac

SEQ ID NO: 88023 - DNA, 75 bp, synthetic construct
  source 1..75: mol_type = other DNA
gcgattgaaggtgaggccctggacgatgtcactgtcatcggggtcgtgacgtttactatctgcgatgttcgccaa

SEQ ID NO: 88024 - DNA, 75 bp, synthetic construct
  source 1..75: mol_type = other DNA
aactgacgggttgcctgctggagataaggctaacacaccaaatacaccggagttgattcatgaaaatcaagcatg

SEQ ID NO: 88025 - DNA, 75 bp, synthetic construct
  source 1..75: mol_type = other DNA
caataaatctcgtgactttattgttacggttcctcctatggtgcgtttaaatcccaatgagcaaattcagattag

SEQ ID NO: 88026 - DNA, 75 bp, synthetic construct
  source 1..75: mol_type = other DNA
gagtcagagcgacgtcatgaactttggcagcatgacgctgagcgaagccttcaatctcgattttgtccactaccg

SEQ ID NO: 88027 - DNA, 75 bp, synthetic construct
  source 1..75: mol_type = other DNA
gaaaagaacaccaaagcacggttgcgggcagcaagaactgcaatactgtatgcggaaaatgaccttaaaaatatt

SEQ ID NO: 88028 - DNA, 75 bp, synthetic construct
  source 1..75: mol_type = other DNA
atcctgtgcttgcagtgcggatgtgttgtggacccttttcagtatgttctgcggtgtgcgaacgatggtgaggct

SEQ ID NO: 88029 - DNA, 75 bp, synthetic construct
  source 1..75: mol_type = other DNA
caatggtgccaggcattgattttgccggtacagtgtccgccagctcacatcctgaatatcagaccggggataagg

SEQ ID NO: 88030 - DNA, 75 bp, synthetic construct
  source 1..75: mol_type = other DNA
tagctgcgaactttcaaacctctattcatccgctgttttcagctatctggcggatgatctgcgcgagcttcagca

SEQ ID NO: 88031 - DNA, 75 bp, synthetic construct
  source 1..75: mol_type = other DNA
gcggtgcggaagcggtggtgttgtttccggatggtgaccgttctcatgcggtggttgttacggtgtcggaccggc

SEQ ID NO: 88032 - DNA, 75 bp, synthetic construct
  source 1..75: mol_type = other DNA
gctcaacgtctggatctgggtactgcgctggcatcgctctcgttcagtctgacatttgtggtgatcctgctgatt

SEQ ID NO: 88033 - DNA, 75 bp, synthetic construct
  source 1..75: mol_type = other DNA
agcaatatggtgattttgaaaatggtattcctgttcacgataccattgccagagttgtatcccagggaaagatca

SEQ ID NO: 88034 - DNA, 75 bp, synthetic construct
  source 1..75: mol_type = other DNA
caggggccggcagtcgcattaaatatggcgtcgtgaatgattacggggcggtgcgcgaatatgaaggagtcgtcc

SEQ ID NO: 88035 - DNA, 75 bp, synthetic construct
  source 1..75: mol_type = other DNA
cgatgaactggacgggccgcgcgggcgcatctatctgattaaacaggtgctggaaggcaacgaagtcacgcttaa

SEQ ID NO: 88036 - DNA, 75 bp, synthetic construct
  source 1..75: mol_type = other DNA
gtgcgcagtgaacaggcagctcaggtggcgattgctcggatgaaccgggccattgatgaggtactgagacgatga

SEQ ID NO: 88037 - DNA, 75 bp, synthetic construct
  source 1..75: mol_type = other DNA
cctgtccgatcatgaaatcaggaccgtcctggcgcgcctggaggacatcccggaagaccagcggactgagtccgg

SEQ ID NO: 88038 - DNA, 75 bp, synthetic construct
  source 1..75: mol_type = other DNA
ggcggagatttggctgcccgggcagcaggtaaacttggattaaaggcagttggtaaaggggcgttacgcgcaatt

SEQ ID NO: 88039 - DNA, 75 bp, synthetic construct
  source 1..75: mol_type = other DNA
tgttgcgggtaagaaggcagacctgattatcagctctgctctgctacgtcgggtgatggcggtaaaaatgtctga

SEQ ID NO: 88040 - DNA, 75 bp, synthetic construct
  source 1..75: mol_type = other DNA
aaggataaaccgggcaaaaatatcttaacgacggctatagcctcaaatgttgatatggaatacgactgtgatttt

SEQ ID NO: 88041 - DNA, 75 bp, synthetic construct
  source 1..75: mol_type = other DNA
aagaataaaccgggaaaaaatatcttaacgactgccatagcctcaaatgttgatatggaatacgactgtgatttt

SEQ ID NO: 88042 - DNA, 75 bp, synthetic construct
  source 1..75: mol_type = other DNA
ccaacgcaacgtggagcgaaatcaatttcaccgaagcgctctggacaatccccaaggagcggatgaagcgccgca

SEQ ID NO: 88043 - DNA, 75 bp, synthetic construct
  source 1..75: mol_type = other DNA
cgcgagcagcgggcggcgatgttgcaggattgggccgatatgattgatgagtggacttcgggaggcagtaagggt

SEQ ID NO: 88044 - DNA, 75 bp, synthetic construct
  source 1..75: mol_type = other DNA
atgacgatcacaaaacaacgtgtagaagaaatcatatcccgcattgaaatgtatgggcatggtgcagggtatacc

SEQ ID NO: 88045 - DNA, 75 bp, synthetic construct
  source 1..75: mol_type = other DNA
tggaagaggtcggcttgtcgatggcgatgggcgcgtttctggcgggcgtactgctggcaagctcggaataccgtc

SEQ ID NO: 88046 - DNA, 75 bp, synthetic construct
  source 1..75: mol_type = other DNA
ccttctacgccagttgcgagaaggttttcaggccggatttgcgcggcaaacctgtcgtcgttctcagtaacaacg

SEQ ID NO: 88047 - DNA, 75 bp, synthetic construct
  source 1..75: mol_type = other DNA
gtttcccgtgcgtcgtatgaggcagaaaagagcattcttcgccatattctcgaaggtaaggaggcggtcacgccg

SEQ ID NO: 88048 - DNA, 75 bp, synthetic construct
  source 1..75: mol_type = other DNA
gatgggcgcgtttctggcgggcgtactgctggcaagctcggaataccgtcatgcgctggaaagcgatatcgaacc

SEQ ID NO: 88049 - DNA, 75 bp, synthetic construct
  source 1..75: mol_type = other DNA
aagatttgaaagggggacgcgttgcaactgttgatcctgtctctcgcagtgtgtcggcattaaatcgcacaatcg

SEQ ID NO: 88050 - DNA, 75 bp, synthetic construct
  source 1..75: mol_type = other DNA
agagcaaaacgtgggttttatttggtaaaaccaatcacggcaagctcagcggcgaaatactgtaccggttggtgg

SEQ ID NO: 88051 - DNA, 75 bp, synthetic construct
  source 1..75: mol_type = other DNA
aggccgatatttgtgaatcacttcacgaccacgccgacgagctttaccgcggctgcctcgcacgcttcggtgatg

SEQ ID NO: 88052 - DNA, 75 bp, synthetic construct
  source 1..75: mol_type = other DNA
ttaatgaagaattaagtcctccctgcttatgggattctcgttacgcatgtcagcaaaaaatgcgaattttcaact

SEQ ID NO: 88053 - DNA, 75 bp, synthetic construct
  source 1..75: mol_type = other DNA
taaagctgctactacacttacgttttgttatgtttgtgatagcggaattattattggtcatattggtgattgtcg

SEQ ID NO: 88054 - DNA, 75 bp, synthetic construct
  source 1..75: mol_type = other DNA
agtctcctgccgataagtatgatctcatcaataaaacgtcctgtgtttctcctgacagtggccgtttttatgaac

SEQ ID NO: 88055 - DNA, 75 bp, synthetic construct
  source 1..75: mol_type = other DNA
aataaagagctgaaagataagtcggggagagagggattcataagaaaccaggctgcaagagaactgaaaactatt

SEQ ID NO: 88056 - DNA, 75 bp, synthetic construct
  source 1..75: mol_type = other DNA
gacaccgttgtcgagtgtgtgcttaacaaactctgcccttcgcatacctacgtaatttttaaatatccggagtaa

SEQ ID NO: 88057 - DNA, 75 bp, synthetic construct
  source 1..75: mol_type = other DNA
ctgaaagagattatttgtaaagcacttcccctgcccgtagacgataaatcgttgagcgaagtactgcatcaggtt

SEQ ID NO: 88058 - DNA, 75 bp, synthetic construct
  source 1..75: mol_type = other DNA
gtcaggggcggcaaattccgcacggtggagacgttgcaggtgcaggggctggaatttgaagagcaggcccgtgtg

SEQ ID NO: 88059 - DNA, 75 bp, synthetic construct
  source 1..75: mol_type = other DNA
acatttctacagcgtcgcccaacatgcggtgctttgcagccaactggtaccgcaggaatttgcttttgaagcgtt

SEQ ID NO: 88060 - DNA, 75 bp, synthetic construct
  source 1..75: mol_type = other DNA
atttcagtgaccattcgcttatgccaccgccctctgcacaattgtttgcagagcaccttcccatcgagtggatac

SEQ ID NO: 88061 - DNA, 75 bp, synthetic construct
  source 1..75: mol_type = other DNA
cagagcgccgttaccgcaggcatcaacagcggtgaaagtaaaagtgctgaagaggtattcgggcgactgacgcac

SEQ ID NO: 88062 - DNA, 75 bp, synthetic construct
  source 1..75: mol_type = other DNA
aatctcacggtgcgcataactacgccatttacctcgacaaagcgcgtaatctgctgtttgccacggtagagattg

SEQ ID NO: 88063 - DNA, 75 bp, synthetic construct
  source 1..75: mol_type = other DNA
cttcctggttaaggattttctgtccagttttgtatttgaacccgaccataaggtaatccgggatgctgaactcag

SEQ ID NO: 88064 - DNA, 75 bp, synthetic construct
  source 1..75: mol_type = other DNA
cggaagaccagcggattgagtccggtatttcttccggcgtggcgatggagatcatcaataacgtgagagaaaacc

SEQ ID NO: 88065 - DNA, 75 bp, synthetic construct
  source 1..75: mol_type = other DNA
gaacaggcactgtggaaacgtgaatgggccgcccgtgattacggcctcgccgtcccggaatgcgttacccgccgt

SEQ ID NO: 88066 - DNA, 75 bp, synthetic construct
  source 1..75: mol_type = other DNA
ttctttctgccgcagtggcgggattgtttctggcgggtaatgcatcggcgcaagcgaaagcagtatcaacgaaag

SEQ ID NO: 88067 - DNA, 75 bp, synthetic construct
  source 1..75: mol_type = other DNA
gagacggcagatcactcaattaaggtgaacggtcatcaagaaatcacatccaccagcaggacgtgtgaccatcta

SEQ ID NO: 88068 - DNA, 75 bp, synthetic construct
  source 1..75: mol_type = other DNA
cagctggtaatcacagccatagagatggccgtcgatttaaccccagtgtttttaaagatacttatcaatatggtt

SEQ ID NO: 88069 - DNA, 75 bp, synthetic construct
  source 1..75: mol_type = other DNA
cgtcccggaattcgtcccccgccgtcaggcggtggttaatcaggcccgcagcctgctgaaaaacaacacacacga

SEQ ID NO: 88070 - DNA, 75 bp, synthetic construct
  source 1..75: mol_type = other DNA
gctggcgtccctgattcagaccgctgaacaggcactgtggaagcgtgaatgggccgcccgtgataacggcctcgc

SEQ ID NO: 88071 - DNA, 75 bp, synthetic construct
  source 1..75: mol_type = other DNA
gatcgtcagtcgggaactgtttacctgtataaaaactttaccaccacgtgaggctgaacctgatttcggtgcgat

SEQ ID NO: 88072 - DNA, 75 bp, synthetic construct
  source 1..75: mol_type = other DNA
cattccgaaaaaaaatctgtagacaactggacgtatttattaatactgaacttgcatctgcggttaatggcaata

SEQ ID NO: 88073 - DNA, 75 bp, synthetic construct
  source 1..75: mol_type = other DNA
atcggtgattgtctggatgaggctgagcaagagcttatcgttaccattaacaaatatgccagtcagttggcagca

SEQ ID NO: 88074 - DNA, 75 bp, synthetic construct
  source 1..75: mol_type = other DNA
cagtcgacggcactggtgcctttcttgtccatgagctggagcgtctcgatcagacactgaatctgccgctggtga

SEQ ID NO: 88075 - DNA, 75 bp, synthetic construct
  source 1..75: mol_type = other DNA
caaagcggtcaaatggctgaaagggcgtggggttggcggtaaagaccgtatgatcgcctacaccaacgacaagaa

SEQ ID NO: 88076 - DNA, 75 bp, synthetic construct
  source 1..75: mol_type = other DNA
aaaagggttatgggcagacaccaaccctgtcccaccatggcagtggagacaggcaaacgaaaagcccagaaaggt

SEQ ID NO: 88077 - DNA, 75 bp, synthetic construct
  source 1..75: mol_type = other DNA
aataattgagccagttattgaattgtataacgacgtggtatggactccgttcaacacactgcacaataaaattaa

SEQ ID NO: 88078 - DNA, 75 bp, synthetic construct
  source 1..75: mol_type = other DNA
ttgacagctctggtgcctttctcatcggggagctggaacgactcgaccagacgctgaacctgccactggtggggt

SEQ ID NO: 88079 - DNA, 75 bp, synthetic construct
  source 1..75: mol_type = other DNA
aaagttattccactggcaccgggccatgcctacgggatgtttttggcacgctttaaagagttacatacgatacat

SEQ ID NO: 88080 - DNA, 75 bp, synthetic construct
  source 1..75: mol_type = other DNA
cgaggcatccgagaaagcgaagatcgaacaggtcttacgtaatcagcctgcgttgtctgcgtttacctcggaaat

SEQ ID NO: 88081 - DNA, 75 bp, synthetic construct
  source 1..75: mol_type = other DNA
tgtctgacgaaaaactggctcaggaaggtctgttccagttcccgaccgtgattggcggcgtggtgctggcggtta

SEQ ID NO: 88082 - DNA, 75 bp, synthetic construct
  source 1..75: mol_type = other DNA
cttatcagcttagagcagacgcgggttgaggcatatcgtaaacttaagcacctattggttatcacccaaccaact

SEQ ID NO: 88083 - DNA, 75 bp, synthetic construct
  source 1..75: mol_type = other DNA
gcccaacatgcggtgctttgcagccagctggtgccgcaggaatttgcttttgaagcgttaatgcatgatgcaaca

SEQ ID NO: 88084 - DNA, 75 bp, synthetic construct
  source 1..75: mol_type = other DNA
gcgagttcttgctcaccctctttacccggtcctgaccagtatgcccggagtcggtgtcaggaccgcagccagact

SEQ ID NO: 88085 - DNA, 75 bp, synthetic construct
  source 1..75: mol_type = other DNA
catcaggaaacagactgaatatttctattgcagaaccgctgaaaatcacgctggcaaaccagatctatttcgaaa

SEQ ID NO: 88086 - DNA, 75 bp, synthetic construct
  source 1..75: mol_type = other DNA
taaatgcagcaaatgcctgagtggctgtaagtttcgcaataatgtcggcaactttggcagcttcctttccattaa

SEQ ID NO: 88087 - DNA, 75 bp, synthetic construct
  source 1..75: mol_type = other DNA
aacgccttcttcctgactataaacaaatggaagaaaaaatagacgccgtaatccgtgagaaatacgggttacccc

SEQ ID NO: 88088 - DNA, 75 bp, synthetic construct
  source 1..75: mol_type = other DNA
atggatggtgccgaacaaactccgggaggcggcgtgaagtggcgttactcactgcgctggaaactgccttatccc

SEQ ID NO: 88089 - DNA, 75 bp, synthetic construct
  source 1..75: mol_type = other DNA
cactggcggcgcaaattcaggacggcgcaaccattgccattagcggtaacggcggcggcatggtggaagctgacc

SEQ ID NO: 88090 - DNA, 75 bp, synthetic construct
  source 1..75: mol_type = other DNA
gattcccattcaaccgccacactgacttttattgcgcatgatgcagcaggtaatcctgttgtcgggctggtgctc

SEQ ID NO: 88091 - DNA, 75 bp, synthetic construct
  source 1..75: mol_type = other DNA
cgcgacacccgtaacctgagtcttacccaagtcggggcactcttttatcaacactgtgattccattcgcaatgag

SEQ ID NO: 88092 - DNA, 75 bp, synthetic construct
  source 1..75: mol_type = other DNA
ggaggatttgcagagcctggtgggtgccacggtggtccgccgccgggtgtatgcgcgttttcttgatgcggtgaa

SEQ ID NO: 88093 - DNA, 75 bp, synthetic construct
  source 1..75: mol_type = other DNA
taaggcagaaaaaattgctgaagcggaatcacagcaggctgaatctcgtaaaacaaagataaccttcacaagcgc

SEQ ID NO: 88094 - DNA, 75 bp, synthetic construct
  source 1..75: mol_type = other DNA
ttattgactggatagcattcattcaggttttgctcatctggttttatatggcttacaggagtggacagtggattg

SEQ ID NO: 88095 - DNA, 75 bp, synthetic construct
  source 1..75: mol_type = other DNA
gatgaacttggctacgatgttgccgactgcgatgctcacggatcaaaggaccccaaaataattgacggtaagaac

SEQ ID NO: 88096 - DNA, 75 bp, synthetic construct
  source 1..75: mol_type = other DNA
ccgttactcctgcggcgatagagatcgaaaaacgcgcgattgaaagagagaaaaaagggcagttccgcattgccg

SEQ ID NO: 88097 - DNA, 75 bp, synthetic construct
  source 1..75: mol_type = other DNA
gcaggcccgtttacaggctaatcctgcgatggcaagtgcagttgataccgtaactggcctcggtgcttcattcgg

SEQ ID NO: 88098 - DNA, 75 bp, synthetic construct
  source 1..75: mol_type = other DNA
aagcaattgaaaatctcaagcagaagttagtggaatgcaatcgctataactactgcgcagatgcagttaaaggcg

SEQ ID NO: 88099 - DNA, 75 bp, synthetic construct
  source 1..75: mol_type = other DNA
acaccttcaggcgcaggaatcctgtcggcttctgcaattacatcaaatcagttccgcggtttttcaagcatagcg

SEQ ID NO: 88100 - DNA, 75 bp, synthetic construct
  source 1..75: mol_type = other DNA
tgggcgatggcggcggagcattgccgacgccggacgcaaagcagacagcactggtaaatgagaaacgccgggctg

SEQ ID NO: 88101 - DNA, 75 bp, synthetic construct
  source 1..75: mol_type = other DNA
ggggcaggtctttaacggaacccggcgtaatttacttgcaacacagagtctggttatcgacaaatacttcaggaa

SEQ ID NO: 88102 - DNA, 75 bp, synthetic construct
  source 1..75: mol_type = other DNA
caagttgacggcacaagtgactacctcaaggatggagaatggcctattgataatggaattattgaggtctacgcc

SEQ ID NO: 88103 - DNA, 75 bp, synthetic construct
  source 1..75: mol_type = other DNA
actccgctggcagaaaaggtgaaaaccaaagcctgcgatctggtgttaaagcaggggctgaacttcatttcctga

SEQ ID NO: 88104 - DNA, 75 bp, synthetic construct
  source 1..75: mol_type = other DNA
atggctgcgtgcgcagatgaagctgacgagcctgtgctgggcgctgaaagaactggcaaaggatatctggagcag

SEQ ID NO: 88105 - DNA, 75 bp, synthetic construct
  source 1..75: mol_type = other DNA
tggcgatccccaacgacccgaccaaccttggtcgcgcacttttactgttgcaaaaagagaagctaattactctga

SEQ ID NO: 88106 - DNA, 75 bp, synthetic construct
  source 1..75: mol_type = other DNA
gccagcaccggtagtgcctgaagaagcaactccggaaaacgtagaaatgctctctggctatgtttcaacgtacaa

SEQ ID NO: 88107 - DNA, 75 bp, synthetic construct
  source 1..75: mol_type = other DNA
aatgacaaggattgtcacacacaatggaacaaaaggtatcttttgggattttagcgatctttacggcggaacatt

SEQ ID NO: 88108 - DNA, 75 bp, synthetic construct
  source 1..75: mol_type = other DNA
aaaagcagcactttcactgggacgtcgcgcaattggcgtggaactggaagaagagagatttaatcagactgtaac

SEQ ID NO: 88109 - DNA, 75 bp, synthetic construct
  source 1..75: mol_type = other DNA
aaggcattgccgaccactggaactatatttagcggtaagattcacttgtcaaataagacaggagaaaccgaaaac

SEQ ID NO: 88110 - DNA, 75 bp, synthetic construct
  source 1..75: mol_type = other DNA
ggtctgagcggtgatgcggatgcggagagggaagccggtgcacaggtgatgcgtgagactgaacagcagatttac

SEQ ID NO: 88111 - DNA, 75 bp, synthetic construct
  source 1..75: mol_type = other DNA
ccatccggcactgacgcgccagttactgatagcgggaggtgcactgctggcgacaacagcaacggttggttcgtt

SEQ ID NO: 88112 - DNA, 75 bp, synthetic construct
  source 1..75: mol_type = other DNA
gatgcgtgatgcgcagttgtggagccacatcgaatttcaccctgaatgcaacgcgatttacgcggcgctggactg

SEQ ID NO: 88113 - DNA, 75 bp, synthetic construct
  source 1..75: mol_type = other DNA
ccatccggtactgacgcgccagctactgatagcaggcggtgcgttgctggcaatgactgcaacgattggctcgtt

SEQ ID NO: 88114 - DNA, 75 bp, synthetic construct
  source 1..75: mol_type = other DNA
ggttgcgcatccgcattgcagatctgattgacggcccgctgcgttctgtcacgcagtggctcacgcgggtggtat

SEQ ID NO: 88115 - DNA, 75 bp, synthetic construct
  source 1..75: mol_type = other DNA
gttgaggactaccgctgcgcagcactggtggaaaacatccagattggcgacttcagcgccgtcgcagtagaaacc

SEQ ID NO: 88116 - DNA, 75 bp, synthetic construct
  source 1..75: mol_type = other DNA
ggcatctgcagacaggcccgtgtttcaggcgtgattgaccctgtgctgttgtgtaatgagatgccggaacttgcc

SEQ ID NO: 88117 - DNA, 75 bp, synthetic construct
  source 1..75: mol_type = other DNA
atgcgtattgcgaactatacctcaaaaaaatggatagacagtccaggtaacgcaatggcgcgccttaacctgaac

SEQ ID NO: 88118 - DNA, 75 bp, synthetic construct
  source 1..75: mol_type = other DNA
gaactggagcagccacaccaccagctggtcagcacatacagcgaactgaaccggcaatatgccagcctgctggag

SEQ ID NO: 88119 - DNA, 75 bp, synthetic construct
  source 1..75: mol_type = other DNA
aggaagttgttttagcgccgccgccgcgcctcctgcgccgcccgtctcgtatggtgtggaggaagatgtcttcca

SEQ ID NO: 88120 - DNA, 75 bp, synthetic construct
  source 1..75: mol_type = other DNA
gttgaacccgaagtggtgcctgaacctgaaccacaacccctgaagggtaaaaaagagaaggagacaaccagtggc

SEQ ID NO: 88121 - DNA, 75 bp, synthetic construct
  source 1..75: mol_type = other DNA
tgctgattacccgtctggataacctgtccatttactggcaggaagatacccgccgccgttcagttatcgacaacc

SEQ ID NO: 88122 - DNA, 75 bp, synthetic construct
  source 1..75: mol_type = other DNA
tgattctctgccgtggcatgcgcgtctgaaagaaaggttaggcagcataacgacacgtcgggcggtgacagcgcc

SEQ ID NO: 88123 - DNA, 75 bp, synthetic construct
  source 1..75: mol_type = other DNA
caccggctgtgcagtcaccaaagcgcagaagcagcagtgacagcgaagtgaaaacggaggacacccatggcagct

SEQ ID NO: 88124 - DNA, 75 bp, synthetic construct
  source 1..75: mol_type = other DNA
gatgccggaatatgaaggcggcttctggcacttcatccgcctgccggacggtgaccgttttcatctggttaacgg

SEQ ID NO: 88125 - DNA, 75 bp, synthetic construct
  source 1..75: mol_type = other DNA
tctgggagatcacagaccgtaccgtccgcacctggcttagcgaagcggtggaagccgcagcggccgacggggtga

SEQ ID NO: 88126 - DNA, 75 bp, synthetic construct
  source 1..75: mol_type = other DNA
cagaaaaagtgatgaggcgttccactctgtctataaacttattgagcaagccggtagtctttgggctcaaaaact

SEQ ID NO: 88127 - DNA, 75 bp, synthetic construct
  source 1..75: mol_type = other DNA
tgtatttttctggtgaaccggcacagattgctgagattaaacgactggccagcggtgcagtcacaccgttttatc

SEQ ID NO: 88128 - DNA, 75 bp, synthetic construct
  source 1..75: mol_type = other DNA
atgaaaaatatcgcggcaggtggtgttcttgagcgtatccgtaagctgaccccgcagcatgtaatcgcgccgtac

SEQ ID NO: 88129 - DNA, 75 bp, synthetic construct
  source 1..75: mol_type = other DNA
catcgctgacgaactgatgaccgggtgcacgaattttgtgttcagcggtaaaaccggcaccgggaaaaatcacct

SEQ ID NO: 88130 - DNA, 75 bp, synthetic construct
  source 1..75: mol_type = other DNA
ttcacccgacacagatcctcgcggatttaatgaccatgctggaacatgcgccaggcaaaacgctgccagagctga

SEQ ID NO: 88131 - DNA, 75 bp, synthetic construct
  source 1..75: mol_type = other DNA
tatcgctgacgaactggttaccggatgcacaaatttcgcgtttagcggaaaacctggtaccgggaagaaccactt

SEQ ID NO: 88132 - DNA, 75 bp, synthetic construct
  source 1..75: mol_type = other DNA
gggacacaagtcggtcagctcgacggaggtgtacacgaaggtgtttgcgctggatgtggctgcacggcaccgggt

SEQ ID NO: 88133 - DNA, 75 bp, synthetic construct
  source 1..75: mol_type = other DNA
agcatccgtgatgccgcttctccggttgaagccgcgcgtcagttcaaacgttccattgccgaactgtggggctaa

SEQ ID NO: 88134 - DNA, 75 bp, synthetic construct
  source 1..75: mol_type = other DNA
agttaaagcagaaaaaagaatcaatggaagatctcatagcgagatggattgcggcgcaaaaatgccgccgcgcct

SEQ ID NO: 88135 - DNA, 75 bp, synthetic construct
  source 1..75: mol_type = other DNA
ctgttaccgttagaactcacaacataagcaatgttgaatccatagctaatatcgttttcctggctggctcagaac

SEQ ID NO: 88136 - DNA, 75 bp, synthetic construct
  source 1..75: mol_type = other DNA
ccctcagaacaataatactgttgtacattcaatcctcagggttaatggccccacaatgcaggtgcgcacaattga

SEQ ID NO: 88137 - DNA, 75 bp, synthetic construct
  source 1..75: mol_type = other DNA
actgctggatgagcaaaactgcctgatgctgcatgaactctggctgcagagtggtactggccggcgtcgctggga

SEQ ID NO: 88138 - DNA, 75 bp, synthetic construct
  source 1..75: mol_type = other DNA
ctgtgtacgcgctggcgaaacaaatgatgccggaatatgaaggcggcttctggcacttcatccgcctgccggacg

SEQ ID NO: 88139 - DNA, 75 bp, synthetic construct
  source 1..75: mol_type = other DNA
tgtcctggatgaaatcggaatgcagcgggatacgcgcaacgagcaggtcacactgaaccagatagtcgaccgcag

SEQ ID NO: 88140 - DNA, 75 bp, synthetic construct
  source 1..75: mol_type = other DNA
tacgcctcaaagagtggttcaaagacaggactttgccgcctaaagagaaaagttacttatctcagttaatgagcg

SEQ ID NO: 88141 - DNA, 75 bp, synthetic construct
  source 1..75: mol_type = other DNA
ggagcagtggcagaacatctggcgcgattaccggcaaatggcgaaaggctggacgcaggggacgtattcttccct

SEQ ID NO: 88142 - DNA, 75 bp, synthetic construct
  source 1..75: mol_type = other DNA
gcgatacgcgaacgggtcaacgccaccggcgcccccattcccgaaggcttgctgcatgaaggcattttccgtatc

SEQ ID NO: 88143 - DNA, 75 bp, synthetic construct
  source 1..75: mol_type = other DNA
tagtggtgggacgccaatgttatctaactcaggttttatgaattctgactcccgattcaaaataggaggttactg

SEQ ID NO: 88144 - DNA, 75 bp, synthetic construct
  source 1..75: mol_type = other DNA
gttgaaccttgagccacgcatagcccaaaaaatggcccaagctgctctgaagtttttatctccagagctgacatc

SEQ ID NO: 88145 - DNA, 75 bp, synthetic construct
  source 1..75: mol_type = other DNA
catggagttctcttacgacaaggaggaaggcgcgtgtacctgcaagatttaccgcaaagaccgtaagcacccgac

SEQ ID NO: 88146 - DNA, 75 bp, synthetic construct
  source 1..75: mol_type = other DNA
agccgcaaccgctacggcattatcgggccaatctatccgcaggaaatgcaacctgaaaccttgcagaagaaaatc

SEQ ID NO: 88147 - DNA, 75 bp, synthetic construct
  source 1..75: mol_type = other DNA
aacattaccaggggccatatcgcggcaaaagtgacggctatgcagcaaaagaaagggaactcaaacagcacataa

SEQ ID NO: 88148 - DNA, 75 bp, synthetic construct
  source 1..75: mol_type = other DNA
caaccaaaaaaagtgaaatttcttcactttttcactcttatttatcgcgctgacctgatggttatgatgataaaa

SEQ ID NO: 88149 - DNA, 75 bp, synthetic construct
  source 1..75: mol_type = other DNA
tgttagaggatgatgaagaccttgccgaactggccgacggtggcacagttgccggactgacgcttgacgacgttg

SEQ ID NO: 88150 - DNA, 75 bp, synthetic construct
  source 1..75: mol_type = other DNA
atggtgaacaggcgaaggcgcggcaccgtagcctggcggaggtgttgcaggaggacacgggtgtgacgctaccgg

SEQ ID NO: 88151 - DNA, 75 bp, synthetic construct
  source 1..75: mol_type = other DNA
tatcattcagtttggtgaaggtaacttcctgcgcgcctttgttgactggcaaatcgatctcctgaatgagcacac

SEQ ID NO: 88152 - DNA, 75 bp, synthetic construct
  source 1..75: mol_type = other DNA
gaaggcaacaaaccccgatatcacccgtagcgtctcagggatggggaatcgtcagtacaactacatcgtcatgcc

SEQ ID NO: 88153 - DNA, 75 bp, synthetic construct
  source 1..75: mol_type = other DNA
agcttgatattgccactcgtgaagtccttatcttacgatgcaatcttattcagcttgcttctgaatatataaaaa

SEQ ID NO: 88154 - DNA, 75 bp, synthetic construct
  source 1..75: mol_type = other DNA
cgagtaagtgaattgctcctgttagaaaaacactcaattaaacctaacatccaaggcggacaattcagtatcata

SEQ ID NO: 88155 - DNA, 75 bp, synthetic construct
  source 1..75: mol_type = other DNA
gcctggcatctgatattgagatcatgatgcgtgaacgtttcaacgtgcttaaccatatcatctgggcgaagccgt

SEQ ID NO: 88156 - DNA, 75 bp, synthetic construct
  source 1..75: mol_type = other DNA
tcattccttgccggatcgtgggcgtgccatgttgccactggtcgccagtggggaggccgcagggttgcacatggt

SEQ ID NO: 88157 - DNA, 75 bp, synthetic construct
  source 1..75: mol_type = other DNA
gatttcgtgggcgctggtggcggtggcaacgtggcttgcgcaacgaatttgtgggccattaacaccacctgcgga

SEQ ID NO: 88158 - DNA, 75 bp, synthetic construct
  source 1..75: mol_type = other DNA
tttacctcacgggctgccggtggagctgccggacattccgcccaccaccaccgtgcagaccgtccagctatggga

SEQ ID NO: 88159 - DNA, 75 bp, synthetic construct
  source 1..75: mol_type = other DNA
taatattttaacgaatgataaggtattcaaggcagggttaagacgtaagatgcgaaaagcagccatggacagaaa

SEQ ID NO: 88160 - DNA, 75 bp, synthetic construct
  source 1..75: mol_type = other DNA
ttcctgacgctgattaacgtcacgccagtgaccgagcagtctggtcagctgctggggctgggtgttggcagcacc

SEQ ID NO: 88161 - DNA, 75 bp, synthetic construct
  source 1..75: mol_type = other DNA
attgccggaaccactgatacctccgcgaaagagcgtgaacccgtcgatccgaccctgatggtcgatgtggaatat

SEQ ID NO: 88162 - DNA, 75 bp, synthetic construct
  source 1..75: mol_type = other DNA
gcgagataccgcgcgcgccagtgagttaatgcgccagcatttactgacgccaattcccattatccagcaggcgat

SEQ ID NO: 88163 - DNA, 75 bp, synthetic construct
  source 1..75: mol_type = other DNA
cttctgttcaccatggagatggcgaacatccagattggtgaacgtatggtgtctgctgccggtggaatgccggta

SEQ ID NO: 88164 - DNA, 75 bp, synthetic construct
  source 1..75: mol_type = other DNA
ctgatgaaggcggtgtatgacatggcccgcaagggggcgcaggatgagctccggctgcagttgcgtgatggcggt

SEQ ID NO: 88165 - DNA, 75 bp, synthetic construct
  source 1..75: mol_type = other DNA
ccttatcaaggttggtgcatcagaagatgttgctaaaaatatcataacagccatcgtaaaaggcgaagtattcgc

SEQ ID NO: 88166 - DNA, 75 bp, synthetic construct
  source 1..75: mol_type = other DNA
cacgggtgctttccactcccatgaagcccggcaatccgcgcagatacagtaataaacgaactgacagcagtaaga

SEQ ID NO: 88167 - DNA, 75 bp, synthetic construct
  source 1..75: mol_type = other DNA
tatgcacttaaattccagaaagcacaggacgcattaaagtatgccgctttgctgcatagccggacggcgcaacaa

SEQ ID NO: 88168 - DNA, 75 bp, synthetic construct
  source 1..75: mol_type = other DNA
ctagattaatatggttacctccggtaccagttaatttagaagacgtaaacaaactaccggtggtaataacgccca

SEQ ID NO: 88169 - DNA, 75 bp, synthetic construct
  source 1..75: mol_type = other DNA
attatcaggggccgtatcgtccgaaagatgccgggtatgaggcgaagggcagggcactgaaacagcatgtgatgg

SEQ ID NO: 88170 - DNA, 75 bp, synthetic construct
  source 1..75: mol_type = other DNA
tcagcagcccgcgccagacccggagttacagctacagcaccaccggcaggctgaccggcgttcacaccaccgcag

SEQ ID NO: 88171 - DNA, 75 bp, synthetic construct
  source 1..75: mol_type = other DNA
tcaattggtcaacgcaacagttatgtgaaaacatggggttgcggaggttttttgaatgagacgaacatttacagc

SEQ ID NO: 88172 - DNA, 75 bp, synthetic construct
  source 1..75: mol_type = other DNA
ggcaaaatcagagctgggaaatcgtcgttttcgatgaacaggggcggcgttgctgcacttgtcggctgggtacgg

SEQ ID NO: 88173 - DNA, 75 bp, synthetic construct
  source 1..75: mol_type = other DNA
atgatctggaaggcgctgtcattggcgcgttctttctgcgtggggcagatcatgaagtgatggatattctggcca

SEQ ID NO: 88174 - DNA, 75 bp, synthetic construct
  source 1..75: mol_type = other DNA
attgtattaatcttggtgagctaggtaattgcattattgggttaacttacaaacctgaagatacatctgattatg

SEQ ID NO: 88175 - DNA, 75 bp, synthetic construct
  source 1..75: mol_type = other DNA
atgggttggactgaagccgcagacctgattgttaaaggtatggaaggcgcaatcaacgccaagaccgtaacctat

SEQ ID NO: 88176 - DNA, 75 bp, synthetic construct
  source 1..75: mol_type = other DNA
gccacccgtatgatactggaaacgtccgaccgtttcacggtggtacaggggtatgccggtgtgggtaagaccaca

SEQ ID NO: 88177 - DNA, 75 bp, synthetic construct
  source 1..75: mol_type = other DNA
atgaacgtaattaaaacagagattccagacgtattaattttcgaaccgaaagtttttggtgacgagcgtggtttc

SEQ ID NO: 88178 - DNA, 75 bp, synthetic construct
  source 1..75: mol_type = other DNA
ggggaaaatcagataccggacatggcctcttttgccagtggtgatggatggatgaaattacccaacgggaaaatc

SEQ ID NO: 88179 - DNA, 75 bp, synthetic construct
  source 1..75: mol_type = other DNA
ttgatggcgctgctttccctgtttttgcgtttatcgaagatggcctgtcaatatccgcacctggtgctgatctcg

SEQ ID NO: 88180 - DNA, 75 bp, synthetic construct
  source 1..75: mol_type = other DNA
attactgacatgcagcagcgccagcgtgatgctgatgcacttgatgctaaatacacgaaggagttagctgatgcg

SEQ ID NO: 88181 - DNA, 75 bp, synthetic construct
  source 1..75: mol_type = other DNA
ggccgtcgatttaaccccagtgtttttaaagatacttatcaatatggttatacaagctcaggtcaaaatacctgg

SEQ ID NO: 88182 - DNA, 75 bp, synthetic construct
  source 1..75: mol_type = other DNA
gagtttgacatgagcgccgccacccacgcacagcaacctgcgctgtttacagccatgctgacacagtttcgtgct

SEQ ID NO: 88183 - DNA, 75 bp, synthetic construct
  source 1..75: mol_type = other DNA
tggtagcgggggatgatttcaccattcgccacggcgtcactatcggcaatcgtggtgccgataacatggcatgtc

SEQ ID NO: 88184 - DNA, 75 bp, synthetic construct
  source 1..75: mol_type = other DNA
gaacgatggctgggtggaaatcgacaacaacatcgctgaaaatgccctgcgggcggtcagtctgggtcgtaaaaa

SEQ ID NO: 88185 - DNA, 75 bp, synthetic construct
  source 1..75: mol_type = other DNA
gggaaagaatggtcaaaacaggatgccgaaacgtttgatccgataagcgacattgaggcttacgctgatttttcc

SEQ ID NO: 88186 - DNA, 75 bp, synthetic construct
  source 1..75: mol_type = other DNA
gtgcctgcaccgattccaaagttaaccgcatccgttttaaagaccatgactttgccgctatcgctgactttgaca

SEQ ID NO: 88187 - DNA, 75 bp, synthetic construct
  source 1..75: mol_type = other DNA
gggtacggcacatcaactgatgcgcgtgctttcagatgttctgctgaagtatgagccacgtattaagcgtgttga

SEQ ID NO: 88188 - DNA, 75 bp, synthetic construct
  source 1..75: mol_type = other DNA
ttcgaacgtctgatggaaggtgctaaactgctgaaatgttcagagtttggtgacgcgatcatcaagaatatgtaa

SEQ ID NO: 88189 - DNA, 75 bp, synthetic construct
  source 1..75: mol_type = other DNA
ttgggaacaatgaaggttacgatatctacatcggcagcgacttataacaagggaattatagttaagggtacctca

SEQ ID NO: 88190 - DNA, 75 bp, synthetic construct
  source 1..75: mol_type = other DNA
acagaaaggggggcagattcgctgccgctttaaggcttcgggagcgctggcggcgaaccagtatgttatggcgtt

SEQ ID NO: 88191 - DNA, 75 bp, synthetic construct
  source 1..75: mol_type = other DNA
ttgggaacaatgaaggttacgataacggcaacaaacacttataacaatgctattttagttcagaatacatcaaac

SEQ ID NO: 88192 - DNA, 75 bp, synthetic construct
  source 1..75: mol_type = other DNA
cgacaaactattatgctcctgctagtgaatattgtctaaaatgggatgataaagatttaaatattcaatggcctt

SEQ ID NO: 88193 - DNA, 75 bp, synthetic construct
  source 1..75: mol_type = other DNA
aatctgtgatagtcagttgggccatttaatgcgcagtatgtatcagggacgccgttttattcagctgaatctgga

SEQ ID NO: 88194 - DNA, 75 bp, synthetic construct
  source 1..75: mol_type = other DNA
acaccgcgcagccgatattgccagcgcaaaatcaggccttaccgccggaagtacgcgcgttcctcaatgccggga

SEQ ID NO: 88195 - DNA, 75 bp, synthetic construct
  source 1..75: mol_type = other DNA
ctccgcgtaacggatatcaccaaaaatgcaacttacccggtgctgattgacagcattgtggtggaagtgaaaaaa

SEQ ID NO: 88196 - DNA, 75 bp, synthetic construct
  source 1..75: mol_type = other DNA
ggcataccaggcaatctatgacggctacaaaaataaaacagataaaaacattcatttcgtcccattaatgacaga

SEQ ID NO: 88197 - DNA, 75 bp, synthetic construct
  source 1..75: mol_type = other DNA
ctggcacgcatgattcacacctacaacgaccccataaacgactgggagtgcggtatctgcgaagtccccgcaagc

SEQ ID NO: 88198 - DNA, 75 bp, synthetic construct
  source 1..75: mol_type = other DNA
cagatcattccactggctaatgcgcttggttgcgatccgatgtggctgttaactggtgggcctattgcccgggct

SEQ ID NO: 88199 - DNA, 75 bp, synthetic construct
  source 1..75: mol_type = other DNA
ctggcgacccgtattctggaaatcaccccggaacgcgtgatcgactttagcggtaattacgaagattacctgcgt

SEQ ID NO: 88200 - DNA, 75 bp, synthetic construct
  source 1..75: mol_type = other DNA
ggtaaaacaaggactgcccggctgtgggcctacgtccgtgatgaccgtaatgccggttcacagatgcccccagcg

SEQ ID NO: 88201 - DNA, 75 bp, synthetic construct
  source 1..75: mol_type = other DNA
ggaactacgtaaagccagagcgcagttgaaactgaatgagctgctactgaaactggatcgctaccgggtgatagt

SEQ ID NO: 88202 - DNA, 75 bp, synthetic construct
  source 1..75: mol_type = other DNA
ccgatacttataaccctgctcatgaacacacattgctatggaatgatccaactatcaatataagttggccaatta

SEQ ID NO: 88203 - DNA, 75 bp, synthetic construct
  source 1..75: mol_type = other DNA
gtgagccgggtactttctgatgagcggcgacggctggagcgtattctggcggaacacctggatgatccgactatt

SEQ ID NO: 88204 - DNA, 75 bp, synthetic construct
  source 1..75: mol_type = other DNA
acgcagcacagtttggtgcgctggttgataaattccgtgcagacctggcggatatggcaggtcagtgcgtcggtg

SEQ ID NO: 88205 - DNA, 75 bp, synthetic construct
  source 1..75: mol_type = other DNA
cgtacgcacttaaccagtggccggcactgacgtactatgcgaacgatggctgggtggaaatcgacaacaacatcg

SEQ ID NO: 88206 - DNA, 75 bp, synthetic construct
  source 1..75: mol_type = other DNA
atcctgtccgtataagagtggctctctctggataaaagttacgggaaatactatgggaggaggtcagaataatgt

SEQ ID NO: 88207 - DNA, 75 bp, synthetic construct
  source 1..75: mol_type = other DNA
ggggcagcagtatgatgaggagtccggcctgtattacaaccgccaccgctattatgacccgctgcaggggaggta

SEQ ID NO: 88208 - DNA, 75 bp, synthetic construct
  source 1..75: mol_type = other DNA
ccgttattttggcggtgcatctcttccggatgagtttcccactaagcatgaacgctatgcccagcgggaaaaaat

SEQ ID NO: 88209 - DNA, 75 bp, synthetic construct
  source 1..75: mol_type = other DNA
atagtttaagtggcagcacgaatgcagctggtaatcacagccatagagatggccgtcgatttaaccccagtgttt

SEQ ID NO: 88210 - DNA, 75 bp, synthetic construct
  source 1..75: mol_type = other DNA
atcgcgctggccgacacgctgtctgacttcggtatcgccaactcgattatccagcgcaaagagattagccagctg

SEQ ID NO: 88211 - DNA, 75 bp, synthetic construct
  source 1..75: mol_type = other DNA
ccgaagcgcgttacatacgtgagatgttggtcaaacagcccaatccgatgaagctggatgagataacagagcggt

SEQ ID NO: 88212 - DNA, 75 bp, synthetic construct
  source 1..75: mol_type = other DNA
gaccgtaatggctctcagttaatccgggattttatgcggcagaccgttgaacggcagcataatacctggttccgt

SEQ ID NO: 88213 - DNA, 75 bp, synthetic construct
  source 1..75: mol_type = other DNA
ttgctctcactgcagccggtggaagaaatctggggagtaggtcgcaggatctcaaagacgcttaattcgatgggc

SEQ ID NO: 88214 - DNA, 75 bp, synthetic construct
  source 1..75: mol_type = other DNA
caaaaattatttgatgcaaataatttgaactttagatcacacattctgggcaatgcatcttcatctcaagaatgt

SEQ ID NO: 88215 - DNA, 75 bp, synthetic construct
  source 1..75: mol_type = other DNA
caggtaaacaggtatcaggacaagtacgggcaacagaaagagggctggcagttgctggcgcaaagcattatcagc

SEQ ID NO: 88216 - DNA, 75 bp, synthetic construct
  source 1..75: mol_type = other DNA
cggacctggcaccgttgattaaaacattgtcgctggcgtttgtggtgatcccccacgggcagcagttccgcgcgt

SEQ ID NO: 88217 - DNA, 75 bp, synthetic construct
  source 1..75: mol_type = other DNA
acagcaagtgattacctgccacagacaaattggccaacaactcaattaccaccaggatatacttgtgcagaaccc

SEQ ID NO: 88218 - DNA, 75 bp, synthetic construct
  source 1..75: mol_type = other DNA
aaggcaatcagggggcaggcaatatcaccgactgtacggtgattgtgaccaaaaaagccgcttccggcatcagta

SEQ ID NO: 88219 - DNA, 75 bp, synthetic construct
  source 1..75: mol_type = other DNA
ccacgcacagtatctcgatggtcgtcgtgaaatgatgcaatggtacgctgactacattgattcactttctgagca

SEQ ID NO: 88220 - DNA, 75 bp, synthetic construct
  source 1..75: mol_type = other DNA
aacagcgcgagcaggaagaccgcgagcggcacatcaacaccgcacgcagtcgcaccgtagcgccctctcgttttc

SEQ ID NO: 88221 - DNA, 75 bp, synthetic construct
  source 1..75: mol_type = other DNA
atggaaacggaagcttttggtgacagtaatgccacgcgaaccacagacgcatttctggaaacggagtgcgtggaa

SEQ ID NO: 88222 - DNA, 75 bp, synthetic construct
  source 1..75: mol_type = other DNA
gtgtgtcagaacagacgatcccacagtgtgaccagcaggtggataatgctgtcccgggccttacgcagaagctgt

SEQ ID NO: 88223 - DNA, 75 bp, synthetic construct
  source 1..75: mol_type = other DNA
acggcagcataatacctggttccgtgaccaggttgaggcaggacgtcagcaactcgagcgcggcgatgtgcttcc

SEQ ID NO: 88224 - DNA, 75 bp, synthetic construct
  source 1..75: mol_type = other DNA
tgccgatgccagccgcctgcgtacctggattgaaaccggtaaagtgatgcctgtgccggcagcagcgttgagcta

SEQ ID NO: 88225 - DNA, 75 bp, synthetic construct
  source 1..75: mol_type = other DNA
ccagacgccacgcgctgaaggggtggtaaaagccacagaaaaaggctttggcttcctggaagtcgacgcgcaaaa

SEQ ID NO: 88226 - DNA, 75 bp, synthetic construct
  source 1..75: mol_type = other DNA
actctatgagcaggcgaaatacctgacgatggtgaattaccttaccaacacctccgtctggattggtggcgaagc

SEQ ID NO: 88227 - DNA, 75 bp, synthetic construct
  source 1..75: mol_type = other DNA
ataaggggaatgccggcagagcagcggcttgctgaacgtcagcgaaaaacgaaaccgctgttgaaatccctggaa

SEQ ID NO: 88228 - DNA, 75 bp, synthetic construct
  source 1..75: mol_type = other DNA
tcttcaatgaagaagaagcgataccaattttttataaaacggtacgtgaattcgaagagttgaagccatatgaag

SEQ ID NO: 88229 - DNA, 75 bp, synthetic construct
  source 1..75: mol_type = other DNA
attacagcggcatatccgcgatattaatggtcagttaaagcgtgacgtgttccccgcgccagcggggataaaccg

SEQ ID NO: 88230 - DNA, 75 bp, synthetic construct
  source 1..75: mol_type = other DNA
caactttcatgccctttatcctgaaggacgatggggtgttgattttaatgagcatcgctttgctttatttgattt

SEQ ID NO: 88231 - DNA, 75 bp, synthetic construct
  source 1..75: mol_type = other DNA
ctgagtggttctataaacttcataacaaaatcagcaaccctcagatagaagagaatgttggcgacttccggctca

SEQ ID NO: 88232 - DNA, 75 bp, synthetic construct
  source 1..75: mol_type = other DNA
tcgctgaaaatgcgttgcggatggtcagtctgggccgcaaaaactacctgttcttcggttcggatcatggaggag

SEQ ID NO: 88233 - DNA, 75 bp, synthetic construct
  source 1..75: mol_type = other DNA
gtgaatatcggctcccaggacatgaacgataatgtctggctgacactggcgaaaaaaattaacaccgactgcgat

SEQ ID NO: 88234 - DNA, 75 bp, synthetic construct
  source 1..75: mol_type = other DNA
agaagacgaagaccgggcggttgtggacctatgttcgtgatgaccgcaacgccgggtcagcgctggcaccggcgg

SEQ ID NO: 88235 - DNA, 75 bp, synthetic construct
  source 1..75: mol_type = other DNA
tggatatcgtttctggtcgcggcgcagtggtgttcgataacaccgaattccgcgtggtgaactcccgtacccagc

SEQ ID NO: 88236 - DNA, 75 bp, synthetic construct
  source 1..75: mol_type = other DNA
acttccggctcactttctctcccactgcgagcgcattaaagccaccaacggtaaagatcgggtgatcatgcactg

SEQ ID NO: 88237 - DNA, 75 bp, synthetic construct
  source 1..75: mol_type = other DNA
gggtgaatatcgcataaagagatacaggaagtatccgcgccagcacctggaggatttaagcaccgggaagaaaga

SEQ ID NO: 88238 - DNA, 75 bp, synthetic construct
  source 1..75: mol_type = other DNA
gcgagagagaaaatccgtcatgaactgcgcatgctggagcagggtattcccgcagagcccggtcgtccgcaggaa

SEQ ID NO: 88239 - DNA, 75 bp, synthetic construct
  source 1..75: mol_type = other DNA
gtttgaattaggttggtcagatttctataccacgacacgaaaaccttcagcgggagatgttggtgcatatacgcg

SEQ ID NO: 88240 - DNA, 75 bp, synthetic construct
  source 1..75: mol_type = other DNA
tcccgccagggcgaacaacatccggcatatgcttcagagcatgaaaacctgcgtggtccgggctactaccactga

SEQ ID NO: 88241 - DNA, 75 bp, synthetic construct
  source 1..75: mol_type = other DNA
gacggagcagtttaatccggcaggcttaagctacacctatcagtatgagaaaaaccgcatcaccatcaccgacag

SEQ ID NO: 88242 - DNA, 75 bp, synthetic construct
  source 1..75: mol_type = other DNA
aatactgtcgctttaacctacggtaattgttctgcttcggtgcgtatcttctccgtggtcattttgaccatgcac

SEQ ID NO: 88243 - DNA, 75 bp, synthetic construct
  source 1..75: mol_type = other DNA
aacaagcctgatgagtgccctgagagtgatcccggaaacgtcccacggtgcgagctgcaccttaaatcaggtgtg

SEQ ID NO: 88244 - DNA, 75 bp, synthetic construct
  source 1..75: mol_type = other DNA
acgagatgttgatattaatgatccagacggaccaacgaatctttccgcatgggtaagacttaagaacaaagaatt

SEQ ID NO: 88245 - DNA, 75 bp, synthetic construct
  source 1..75: mol_type = other DNA
ttatacagcaagtgttggtgcagctaataacgtcagctatgttgttgggaataatgccggtgttggtccatcaga

SEQ ID NO: 88246 - DNA, 75 bp, synthetic construct
  source 1..75: mol_type = other DNA
ggcacaacaggctgtgaatgcttatatcagggagcgggaccgtcatttgccgtgtgtttcatgcgggacgttcga

SEQ ID NO: 88247 - DNA, 75 bp, synthetic construct
  source 1..75: mol_type = other DNA
tatgatttgtgcttcattatggggaattgcttgtcttctgcatgcaggagcaggaagctggatacagcttgcgtt

SEQ ID NO: 88248 - DNA, 75 bp, synthetic construct
  source 1..75: mol_type = other DNA
agaacttcgagtcctccaacgatgcatttgtggtggaagacttcggctgcggctgcctgtttgaaaacattaagt

SEQ ID NO: 88249 - DNA, 75 bp, synthetic construct
  source 1..75: mol_type = other DNA
ctgcgtctgataacacaaccagaatggctggctgaagcggcgcggatcacgctttcatcaaagggggcgcatacc

SEQ ID NO: 88250 - DNA, 75 bp, synthetic construct
  source 1..75: mol_type = other DNA
ctggcgcctggtactgacccgtgatgacctcaatccggataagccccgcaccattgaactgggtgatggctggct

SEQ ID NO: 88251 - DNA, 75 bp, synthetic construct
  source 1..75: mol_type = other DNA
cggtggtggtaaccggtgatgatggtaaggaggtgcttatcagcgccaccagcgaaccggagtattactacgtga

SEQ ID NO: 88252 - DNA, 75 bp, synthetic construct
  source 1..75: mol_type = other DNA
tgccctacaaggccatactttcgcttccaacgcccttggctggatactggatcgtggagaagaccccaattataa

SEQ ID NO: 88253 - DNA, 75 bp, synthetic construct
  source 1..75: mol_type = other DNA
gatgcggtttacggggctgaagcggggataccgtcaggcagagctggttatgatgcatgagccgctggcccgaat

SEQ ID NO: 88254 - DNA, 75 bp, synthetic construct
  source 1..75: mol_type = other DNA
gccgcattacgccagggattacaggcaagcgaaaccgtgctggtgcactacgactggccgggcaatattcgtgaa

SEQ ID NO: 88255 - DNA, 75 bp, synthetic construct
  source 1..75: mol_type = other DNA
gcaaatcagtgtgcgcgggcaggggataaattaccggatttacttgatgaatatatcagagcaacaactgaataa

SEQ ID NO: 88256 - DNA, 75 bp, synthetic construct
  source 1..75: mol_type = other DNA
tttcagcttctggccaaccctgttccagtatgaggtcattctggaatcaccggccagcggcatattctatgttgg

SEQ ID NO: 88257 - DNA, 75 bp, synthetic construct
  source 1..75: mol_type = other DNA
acccgattgacggcagtggctttgagatgaacgggaagggcagcagtgcccgcccgtcgctgacggtgtccaatc

SEQ ID NO: 88258 - DNA, 75 bp, synthetic construct
  source 1..75: mol_type = other DNA
gccactaacggggaatgtggcaaaaggtcagagcaccaccctgactgtggccgttcagccggaaggcgcaacgga

SEQ ID NO: 88259 - DNA, 75 bp, synthetic construct
  source 1..75: mol_type = other DNA
ccttgatgcttcaagaattgttccaactgcaaacgaaaatcgaccccgtaacattgcctttaattatatcgtgag

SEQ ID NO: 88260 - DNA, 75 bp, synthetic construct
  source 1..75: mol_type = other DNA
gtttctatctgaagcccgccgccgtcaagagtgaacaggaggcgtgcaattacctcgatagcctgccagcctccg

SEQ ID NO: 88261 - DNA, 75 bp, synthetic construct
  source 1..75: mol_type = other DNA
gctgcacggcgaagcgaaccataatgccgaagaaggcacggtcgatcttgagttccacggtgaagaaggggatta

SEQ ID NO: 88262 - DNA, 75 bp, synthetic construct
  source 1..75: mol_type = other DNA
acaccgctttgccgccgcccgctggcagacgggtgtgaccggatgcccgcaactggaagaggctctggtttcgtt

SEQ ID NO: 88263 - DNA, 75 bp, synthetic construct
  source 1..75: mol_type = other DNA
attaatgattaaacaagccgatcaagttaaaatgttgcctgatgcgttatcaatgttagggataggtggtagtaa

SEQ ID NO: 88264 - DNA, 75 bp, synthetic construct
  source 1..75: mol_type = other DNA
cgtcttgttgaagacccgggctttattcagtccttaccccattttcgctttatccagcagtcactgcttacgttt

SEQ ID NO: 88265 - DNA, 75 bp, synthetic construct
  source 1..75: mol_type = other DNA
gtgttgtccacgccgacggaaacggatggtgctgtttttccggggcgcatcatgctggccaacacctgcacctgg

SEQ ID NO: 88266 - DNA, 75 bp, synthetic construct
  source 1..75: mol_type = other DNA
gtcggcgtatatggcgactggtttaatgatggcaatcccacttgggatgacggtgatggcgaagacctgtatctc

SEQ ID NO: 88267 - DNA, 75 bp, synthetic construct
  source 1..75: mol_type = other DNA
ctaactaccacgccactaagccgaaatacctcgatcacatcgatcttagtacccgtcccctgattgatatcacgt

SEQ ID NO: 88268 - DNA, 75 bp, synthetic construct
  source 1..75: mol_type = other DNA
caggagaaagatttacaaaaaccagcttatacaggatataatcgcagaggttcgaaagacagccagttacgttaa

SEQ ID NO: 88269 - DNA, 75 bp, synthetic construct
  source 1..75: mol_type = other DNA
atcgaagcggagggccgctcgctgcccgggtatgtccgcgaggcgttcgatgcctacctgcgttgcggcgtactc

SEQ ID NO: 88270 - DNA, 75 bp, synthetic construct
  source 1..75: mol_type = other DNA
ttctactcactttatggtgccttcctgtgcttgcccagcaaattgctgtgccggagctgcgccaacaggtgaccg

SEQ ID NO: 88271 - DNA, 75 bp, synthetic construct
  source 1..75: mol_type = other DNA
atcaggctgagttcagcatcaaggcaatgtgccgcgtgctccgggtggcccgcagcggctggtatacgtggtgtc

SEQ ID NO: 88272 - DNA, 75 bp, synthetic construct
  source 1..75: mol_type = other DNA
tcgccggcgtattttgctgcaaaccctgcgcctgaaacgcctcacgaactacaaaatcatcgctgcatcaataac

SEQ ID NO: 88273 - DNA, 75 bp, synthetic construct
  source 1..75: mol_type = other DNA
aatccacatcggaaaaacagatcgttgcggcattggcggttctctcgctcggcgttttttgttggcttgcggtga

SEQ ID NO: 88274 - DNA, 75 bp, synthetic construct
  source 1..75: mol_type = other DNA
tgcccgaaggccctttctcacgcaaccaggctcttgccgtcacaacagcttaccttaatgtgcttattgaagatg

SEQ ID NO: 88275 - DNA, 75 bp, synthetic construct
  source 1..75: mol_type = other DNA
agtcgcttatatggggattttctgccgccagcttgctccgcagttaccggatatgcagcaaacgttgctggataa

SEQ ID NO: 88276 - DNA, 75 bp, synthetic construct
  source 1..75: mol_type = other DNA
agttacggcattgccgggctgctgatgctggcagtcagccaccggctgtaccgggcggaagacagaacggaacgt

SEQ ID NO: 88277 - DNA, 75 bp, synthetic construct
  source 1..75: mol_type = other DNA
gacgtgacggaaagtcttcttttgaagacctgattgcgtacacctcagtgcgggatgatgtgccggaagatgaac

SEQ ID NO: 88278 - DNA, 75 bp, synthetic construct
  source 1..75: mol_type = other DNA
cttcaacagccacaacgaaggctggcgaagccactgaacaggccagcgcagcagcgaggtcagcttccgcagcga

SEQ ID NO: 88279 - DNA, 75 bp, synthetic construct
  source 1..75: mol_type = other DNA
catctcgttgatgaactggcgatgccagatactgctttttatgcctgggatgcccgagggcatggaaaaagttcg

SEQ ID NO: 88280 - DNA, 75 bp, synthetic construct
  source 1..75: mol_type = other DNA
ttatctgtatacggatgctcccgttcctgatggtgtggcgatgacgggtaccggtaatccgttcctgatgtcgta

SEQ ID NO: 88281 - DNA, 75 bp, synthetic construct
  source 1..75: mol_type = other DNA
atttcagttcatgggcgcgcaggggcattatttcggatcgcctggcaaccgctattctgaacgcagttggtcgaa

SEQ ID NO: 88282 - DNA, 75 bp, synthetic construct
  source 1..75: mol_type = other DNA
ctgtatgcagagcatgagctggaacacgccctgaatgaaacctgtgaggcgcttgtccgggcaatgcatctgagc

SEQ ID NO: 88283 - DNA, 75 bp, synthetic construct
  source 1..75: mol_type = other DNA
tacccagacctctggcgtacagatccgcaccatgaaagcccagcagccaccgattcgtatcatcgcgcctggccg

SEQ ID NO: 88284 - DNA, 75 bp, synthetic construct
  source 1..75: mol_type = other DNA
agaactggcgaaagcgttcgcatacgccctgaaccagtggccggcgctgacgtactatgcagatgatggctgggc

SEQ ID NO: 88285 - DNA, 75 bp, synthetic construct
  source 1..75: mol_type = other DNA
ttcctgaatttaagaaaaattatctttcccctgtttactggtctacatggttccttttgggaatgattgcaggta

SEQ ID NO: 88286 - DNA, 75 bp, synthetic construct
  source 1..75: mol_type = other DNA
tgagccggatgctggtcaatggcggtgaaccggagccggatctgtctgaacatctggtcagcgttggtattcgct

SEQ ID NO: 88287 - DNA, 75 bp, synthetic construct
  source 1..75: mol_type = other DNA
gtggtttgtagggctgtttattacggctattattattgctggcggattatggtacatggggcttcttgacgtacc

SEQ ID NO: 88288 - DNA, 75 bp, synthetic construct
  source 1..75: mol_type = other DNA
atgtcgattaaacattatgatgttgtcagggcggcgtcgccgtcagatcttgcggaaaagctgacacacaaactg

SEQ ID NO: 88289 - DNA, 75 bp, synthetic construct
  source 1..75: mol_type = other DNA
gaactttaccggaagtgggcggagatggataagctcatcctgacggatggtgatgttatcgatcatgctcagata

SEQ ID NO: 88290 - DNA, 75 bp, synthetic construct
  source 1..75: mol_type = other DNA
tgagctgaagctggcgaacgtgacaattactgatatgcaggtacgccagcgtgatgtcgctgcacttgatgccag

SEQ ID NO: 88291 - DNA, 75 bp, synthetic construct
  source 1..75: mol_type = other DNA
ttctgatacctctgataacagcaacaatcgttcttacaggatgcacaccaaagaccagcctggaacgacataccc

SEQ ID NO: 88292 - DNA, 75 bp, synthetic construct
  source 1..75: mol_type = other DNA
ggtgctgaaaaatattatgggcttatggctgcttcagcgagtgcttcaggagcggcaaatcaacgatcttccggc

SEQ ID NO: 88293 - DNA, 75 bp, synthetic construct
  source 1..75: mol_type = other DNA
tttcagcttctggccaactctgtttcagtatgaggtcatcctggagtcaccggccagcggcatattttatgttgg

SEQ ID NO: 88294 - DNA, 75 bp, synthetic construct
  source 1..75: mol_type = other DNA
cagttcgcgtattatctggccggttttccctggtatgaaggaaatatcctgtttgcctttgcggttgtggcacag

SEQ ID NO: 88295 - DNA, 75 bp, synthetic construct
  source 1..75: mol_type = other DNA
catccgaaagcggacctgtcaaaggggcagtacggaaccgtggggcaggggctgcatatcgccaaaaaactgctg

SEQ ID NO: 88296 - DNA, 75 bp, synthetic construct
  source 1..75: mol_type = other DNA
agtttcacttgagacttccgcatgaactccacgcgaaaattaagcagcgtgcgaagatgaataacaggtcgctga

SEQ ID NO: 88297 - DNA, 75 bp, synthetic construct
  source 1..75: mol_type = other DNA
aaacaacagcattcaggtgacgccggtactggatgagaaacgggggacgccgttcacactggtgaaatctccggc

SEQ ID NO: 88298 - DNA, 75 bp, synthetic construct
  source 1..75: mol_type = other DNA
aggtgttgcggcgggtaaagcgcagatccctgttgtcaccggcaatggtgagtttgcggcagtggcggaaattac

SEQ ID NO: 88299 - DNA, 75 bp, synthetic construct
  source 1..75: mol_type = other DNA
agcgcatacaacgtctgctcttggacgaatgtttatcacccagaaaagtatgattctcgcccgtgatttgggcta

SEQ ID NO: 88300 - DNA, 75 bp, synthetic construct
  source 1..75: mol_type = other DNA
acgaaggataaatgcagcaaatgcatgagcgggtgtgaacttcgcggcatggtcgctaattttagtggtttcctt

SEQ ID NO: 88301 - DNA, 75 bp, synthetic construct
  source 1..75: mol_type = other DNA
cccggacagcgggatatcatcaaaacggtggcactggtgctgatggtactggaccacatcaatctgatattccag

SEQ ID NO: 88302 - DNA, 75 bp, synthetic construct
  source 1..75: mol_type = other DNA
gaaattgttgccgtttattccggcgaatgccggtattcttctggttccgtgctgccgtggtggttctgcattttt

SEQ ID NO: 88303 - DNA, 75 bp, synthetic construct
  source 1..75: mol_type = other DNA
ctcagcgaaagctgacgctggtaaggaaggagtatccgaagctatttgtccactggtatttactacgtgcatcga

SEQ ID NO: 88304 - DNA, 75 bp, synthetic construct
  source 1..75: mol_type = other DNA
tgtttgtttccattgacaacaaaagagaaatccttgacacgctggaagcgccgtctgccccgatttattgttcac

SEQ ID NO: 88305 - DNA, 75 bp, synthetic construct
  source 1..75: mol_type = other DNA
ttaagaagggctccgcgtatatcacgttcagaaaaccggaactggttgagcgactgaatgatattattgcagaac

SEQ ID NO: 88306 - DNA, 75 bp, synthetic construct
  source 1..75: mol_type = other DNA
acgacctgaaaggccagccgtgcggcgaggtaacaccactacaacagacgcacgcaggaaaactactggaggaga

SEQ ID NO: 88307 - DNA, 75 bp, synthetic construct
  source 1..75: mol_type = other DNA
gggtcaatccggaacggggacgctgaatattaaacagaagggtcacgtcgatggaggctatttaagattaggttc

SEQ ID NO: 88308 - DNA, 75 bp, synthetic construct
  source 1..75: mol_type = other DNA
aaactgattgaagtcataaagcgcgttgatgtcatcggcacagagaagcagcaaattattcatctggaatatgcg

SEQ ID NO: 88309 - DNA, 75 bp, synthetic construct
  source 1..75: mol_type = other DNA
cgctgattgatgccgatatgccggttatcgtcgttgcaccgaacaacgaattgctggaaaaactgaaatccaaca

SEQ ID NO: 88310 - DNA, 75 bp, synthetic construct
  source 1..75: mol_type = other DNA
cctggttgctcccggtaagcggcacgaacaaccagcgttgtgtgaatcatatttctgaaccggataccgaaattc

SEQ ID NO: 88311 - DNA, 75 bp, synthetic construct
  source 1..75: mol_type = other DNA
ttaagttatctgtgtggtcatcccttgccggcagactggctggtggtggtgctgaacctggtgtttggtgttctg

SEQ ID NO: 88312 - DNA, 75 bp, synthetic construct
  source 1..75: mol_type = other DNA
tcacctgctgatggaaaacctcgccatggtcaatccgaatctcggttattcggtggatgaggcttttctgtaccg

SEQ ID NO: 88313 - DNA, 75 bp, synthetic construct
  source 1..75: mol_type = other DNA
ggatttttcgctcacgcctccgtatccgtttgtgcagcttgcggccctgaaacaacggaccgaaaaagcagccag

SEQ ID NO: 88314 - DNA, 75 bp, synthetic construct
  source 1..75: mol_type = other DNA
tggcaagtgcgctcgacgtgacagaagaggtaattgattcaattttgcagacgatgcaggggcgggtacttgatg

SEQ ID NO: 88315 - DNA, 75 bp, synthetic construct
  source 1..75: mol_type = other DNA
aaaagaccagaaactcaggactcacacccattcctgaaaaacgttcaggaatgcccccggaacatctgcggtttg

SEQ ID NO: 88316 - DNA, 75 bp, synthetic construct
  source 1..75: mol_type = other DNA
cgctcattgaatttgccattgattacctgaagaacaataaaaagcagggactaatgaagcgcattggtcgttgca

SEQ ID NO: 88317 - DNA, 75 bp, synthetic construct
  source 1..75: mol_type = other DNA
ctaaatgcagaacataacatgattcctttatcatccacccccttatcatccagtatttgtgattctgaatggtat

SEQ ID NO: 88318 - DNA, 75 bp, synthetic construct
  source 1..75: mol_type = other DNA
tttatgtccactttgaataaaatggcagagaagaagaaaaacaccgggaaagagatgtttgtgggggttacacgg

SEQ ID NO: 88319 - DNA, 75 bp, synthetic construct
  source 1..75: mol_type = other DNA
gcgagcattctaaaaagcgcctcgacagaacgttcagaagcagtgcggcggtaaagaaaagaatgagtccacgtc

SEQ ID NO: 88320 - DNA, 75 bp, synthetic construct
  source 1..75: mol_type = other DNA
actgttatttatgtatcaaaatacaatggtatatttattaataaattagttcctttttctcttttatttgacagg

SEQ ID NO: 88321 - DNA, 75 bp, synthetic construct
  source 1..75: mol_type = other DNA
aacgcttctgcctgagcctggaactgtagatgggtactataaattcaataattacattgatattctcaccaaaat

SEQ ID NO: 88322 - DNA, 75 bp, synthetic construct
  source 1..75: mol_type = other DNA
gctgttgatgagtccaagcctgttaaagaaaaaattgcgcgaagaagagacatcatattcacagttgcttactga

SEQ ID NO: 88323 - DNA, 75 bp, synthetic construct
  source 1..75: mol_type = other DNA
tctggcgcaaaatgcagaaaaagaacctcgccttcgatgagctgtttgatgtgcgtgcggtacgtattgtcgccg

SEQ ID NO: 88324 - DNA, 75 bp, synthetic construct
  source 1..75: mol_type = other DNA
gcgcaaggtgcggaagttctgggcgatgcgggcaatctgcaattgcaggataaaaatgggcaaatcctctccagc

SEQ ID NO: 88325 - DNA, 75 bp, synthetic construct
  source 1..75: mol_type = other DNA
cttttgtcttattcaaaggccttacatttcaaaaactctgcttaccaggcgcatttcgcccaggggatcaccata

SEQ ID NO: 88326 - DNA, 75 bp, synthetic construct
  source 1..75: mol_type = other DNA
cgccgttcccttgtccgtgactatgtgctctcccttgctgcccgtctgccggtggtggaggtgtcccgtgcgtaa

SEQ ID NO: 88327 - DNA, 75 bp, synthetic construct
  source 1..75: mol_type = other DNA
gcgtatttatatggggcatctgcgacaaaaactggagcaagatcccgcccgcccccgccattttattactgaaac

SEQ ID NO: 88328 - DNA, 75 bp, synthetic construct
  source 1..75: mol_type = other DNA
attattatggggcttgtatttatgtggatagtatcaggaatgttttcattacaacaacaaattagtgatgcagca

SEQ ID NO: 88329 - DNA, 75 bp, synthetic construct
  source 1..75: mol_type = other DNA
atgtttaccaacgtaaatgttgattgttgcaaaacaccaggatgcaaaaacctggggttgttgaatagccaggat

SEQ ID NO: 88330 - DNA, 75 bp, synthetic construct
  source 1..75: mol_type = other DNA
ggtggcaaagttttaaataaattcactgccattcttaacccgtgcatctatatcgttttcggcggtatggcgatt

SEQ ID NO: 88331 - DNA, 75 bp, synthetic construct
  source 1..75: mol_type = other DNA
tggcctgtccggtgaatatgcggagaaatcccttgaagaatgggcggaacagattcgcaaaggaggcagccagtg

SEQ ID NO: 88332 - DNA, 75 bp, synthetic construct
  source 1..75: mol_type = other DNA
aaaccggcagcttcggtgaacccgaagagaaacccgcccccttctggaaacgttccgtctgggggatatctgtag

SEQ ID NO: 88333 - DNA, 75 bp, synthetic construct
  source 1..75: mol_type = other DNA
acccgttgcgtgccggggcaaacccgaagaaatccgctttcagtgcctggaaggccagattacgcgagggggtgc

SEQ ID NO: 88334 - DNA, 75 bp, synthetic construct
  source 1..75: mol_type = other DNA
atgaataataatttcccggcaggtatcagggataacacacggaacacctcgatgaatctgccagtagccatcgat

SEQ ID NO: 88335 - DNA, 75 bp, synthetic construct
  source 1..75: mol_type = other DNA
ctcgatggctaatgttgataaatatgaaaacccatttcgtaaagagttgggcttgccagcaagaatgaaatatta

SEQ ID NO: 88336 - DNA, 75 bp, synthetic construct
  source 1..75: mol_type = other DNA
aaaaaacagttaacattagtcaatccaacgaactgacggaagcggcatattatttgccgttgcaagccaagagag

SEQ ID NO: 88337 - DNA, 75 bp, synthetic construct
  source 1..75: mol_type = other DNA
atgggacataagtccatcaggcatcgtctctctgaaaatcgactggatcatagagcgttaccagttgcctcaaag

SEQ ID NO: 88338 - DNA, 75 bp, synthetic construct
  source 1..75: mol_type = other DNA
attcgagccagacgctcgcatattgtgcttaaggaagatcacaaagcgatgctgaaattatgggaaaacaggtaa

SEQ ID NO: 88339 - DNA, 75 bp, synthetic construct
  source 1..75: mol_type = other DNA
cggatgaagaacgggaagcacgatatgcagccttgcagcaggagtggcgtcaatatctggatgattcagagaggc

SEQ ID NO: 88340 - DNA, 75 bp, synthetic construct
  source 1..75: mol_type = other DNA
ttctatagatagcaccgcatatgacgccttaaataaaataaatagccaatctatttgcgaagataaagagttcgc

SEQ ID NO: 88341 - DNA, 75 bp, synthetic construct
  source 1..75: mol_type = other DNA
aaacctcactcaataacgggatgcaagggatgaatgagctggggccggcagtagatgagctgcgcagaacattag

SEQ ID NO: 88342 - DNA, 75 bp, synthetic construct
  source 1..75: mol_type = other DNA
tgctgcccctgctcttggagcaatggctgtggtcgctgggccaatgggatatgaccttctcgctaatgatgggcg

SEQ ID NO: 88343 - DNA, 75 bp, synthetic construct
  source 1..75: mol_type = other DNA
tatcggccacgttgaccatggtaaaacgactctgaccgctgcaatcacgaccgtactggctaaaacctacggcgg

SEQ ID NO: 88344 - DNA, 75 bp, synthetic construct
  source 1..75: mol_type = other DNA
tatcggccacgttgaccatggtaaaactacactgaccgctgcaatcacgaccgtactggctaaaacctacggcgg

SEQ ID NO: 88345 - DNA, 75 bp, synthetic construct
  source 1..75: mol_type = other DNA
gaggttaagcgcctgaagtcgcttgaggaagagaacgccagactcaagaagctgcttgctgaagccatgctggat

SEQ ID NO: 88346 - DNA, 75 bp, synthetic construct
  source 1..75: mol_type = other DNA
atgcagcttgaagtaattctaccgctggtcgcctatctggtggtggtgttcggtatctctgtttatgcgatgcgt

SEQ ID NO: 88347 - DNA, 75 bp, synthetic construct
  source 1..75: mol_type = other DNA
aaattctgcgaattgcgcaaacctacgaaccatggctggatttctgggaactggttgtgcaaaacgtatcaacaa

SEQ ID NO: 88348 - DNA, 75 bp, synthetic construct
  source 1..75: mol_type = other DNA
cgttaccgtgacgcgttcatcagataatgtgcagatgttccggagcgtcactgaccttgtgactgtagccgacag

SEQ ID NO: 88349 - DNA, 75 bp, synthetic construct
  source 1..75: mol_type = other DNA
tcttggtcatttaaatacgtatttcctatctcgttcgcgtataacaactcagcgagcatttaattcgatgagaat

SEQ ID NO: 88350 - DNA, 75 bp, synthetic construct
  source 1..75: mol_type = other DNA
gaatggtgttcaccaggcaggtctgaataccacgatagaattcattagcgcggaagccagaccaatgaccggtac

SEQ ID NO: 88351 - DNA, 75 bp, synthetic construct
  source 1..75: mol_type = other DNA
ggtaccatcgaactgccggaaggtgtagagatggtaatgccgggcgacaacatcaaaatggttgttaccctgatc

SEQ ID NO: 88352 - DNA, 75 bp, synthetic construct
  source 1..75: mol_type = other DNA
agcgatcgtccggatcgtcaaaaagctatgctgtttaatgcactgcggatatattctacatatgtttacgatgtt

SEQ ID NO: 88353 - DNA, 75 bp, synthetic construct
  source 1..75: mol_type = other DNA
caaaaccgcacgttaacgtcggtactatcggccacgttgaccaaggtaaaaccacactgaccgctgcaatcacga

SEQ ID NO: 88354 - DNA, 75 bp, synthetic construct
  source 1..75: mol_type = other DNA
tcctgaactgatgtttcaggattatgagggattcccggggaatatggcctctgaatgccatatcaactgggcctg

SEQ ID NO: 88355 - DNA, 75 bp, synthetic construct
  source 1..75: mol_type = other DNA
caaacgcacagccggacatggccaacatcaaccgcaaaaaagcgaacgttatgcgcccggtggagtaccagaacg

SEQ ID NO: 88356 - DNA, 75 bp, synthetic construct
  source 1..75: mol_type = other DNA
atgcaaaaacttgaaaaccggtgtgatctgctgctcatccagcatcagaaatggatggcaagtgtaacccggttt

SEQ ID NO: 88357 - DNA, 75 bp, synthetic construct
  source 1..75: mol_type = other DNA
agaagcagcattccagctgttacagttgcacgccgaaaagctgaccgttccagattatatccaggaggcactggc

SEQ ID NO: 88358 - DNA, 75 bp, synthetic construct
  source 1..75: mol_type = other DNA
cgacccggaatacccggagaatttacctgccgcgccgctggtgcgctatggctggacgccgcgcggcgaactggc

SEQ ID NO: 88359 - DNA, 75 bp, synthetic construct
  source 1..75: mol_type = other DNA
aatttaatcatgtttcgcatgacgaaaagttggcaggcaatgactgtgttgaagtgcatgaaaagattggagtgg

SEQ ID NO: 88360 - DNA, 75 bp, synthetic construct
  source 1..75: mol_type = other DNA
ttctgtttatcaggatggcagtaatttaagcttgggtaacgacaacaatattgacactgccacagatgttaatac

SEQ ID NO: 88361 - DNA, 75 bp, synthetic construct
  source 1..75: mol_type = other DNA
atcgcaataatgagatttatcgtcatcagcgtgaaatgaaagaggaactgagcaatctcctggatttgaagcagg

SEQ ID NO: 88362 - DNA, 75 bp, synthetic construct
  source 1..75: mol_type = other DNA
tggcagccattcaggagaatctgaacgcgccaaagaatcagtacaactcattcggtaaatataaatacagaagct

SEQ ID NO: 88363 - DNA, 75 bp, synthetic construct
  source 1..75: mol_type = other DNA
cgtatccacacccgtgccattcacaacatcgacaccgatattaagctcaaccgcgcattgtgggtaatggcagaa

SEQ ID NO: 88364 - DNA, 75 bp, synthetic construct
  source 1..75: mol_type = other DNA
gacagatgaactacagggttccatgcaggccatgggggtaagcagctccgttgaacgccgttctgttcagaacgg

SEQ ID NO: 88365 - DNA, 75 bp, synthetic construct
  source 1..75: mol_type = other DNA
aagccgcggtacaggcggcgcagaaggaagctgacgcgctaatgaaaccctatgtggataagaccgcgttgtcgg

SEQ ID NO: 88366 - DNA, 75 bp, synthetic construct
  source 1..75: mol_type = other DNA
acataataatataggctttgatttcaaattatttcctgaagtcaagctgtctggagaacatcttgaaacggtatt

SEQ ID NO: 88367 - DNA, 75 bp, synthetic construct
  source 1..75: mol_type = other DNA
cggcagatatccgggaatgtttattattgtgggcggcgttcctgaaacagatattcacggcaggctgatggcggg

SEQ ID NO: 88368 - DNA, 75 bp, synthetic construct
  source 1..75: mol_type = other DNA
atgggaacaggctactttctggtcaggggggataagaccacctgtggtggaaaaattattgaaggggcggacgac

SEQ ID NO: 88369 - DNA, 75 bp, synthetic construct
  source 1..75: mol_type = other DNA
attgtggtcacgccgccggtgcagcgtcttgagccgggagccaaaagtatggtccgtctggccagcaccccggat

SEQ ID NO: 88370 - DNA, 75 bp, synthetic construct
  source 1..75: mol_type = other DNA
atgagattagccagtcgttttggttatgcgaaccagatacgccgtgaccgtccgctgacacacgaagaactgatg

SEQ ID NO: 88371 - DNA, 75 bp, synthetic construct
  source 1..75: mol_type = other DNA
gcgacgcagagtgggaagcgaaaatcctggaactggctggcttcctggattcctacattccggaaccagagcgtg

SEQ ID NO: 88372 - DNA, 75 bp, synthetic construct
  source 1..75: mol_type = other DNA
gcgcgtaaaggtgcaaaagtgggtgccgccgttggtgctgtcactggcgttctgaccggcaatggcctcgaaggg

SEQ ID NO: 88373 - DNA, 75 bp, synthetic construct
  source 1..75: mol_type = other DNA
ctatcatgtcaaaaaccattagtgataacaaatgaacagcatcgctttgttgtggctgaacagttaagggaaata

SEQ ID NO: 88374 - DNA, 75 bp, synthetic construct
  source 1..75: mol_type = other DNA
caacaatgtcacattccctgtccagctctccaaaccgcgatttgatgaaacaggggctggaacaggttctgtaat

SEQ ID NO: 88375 - DNA, 75 bp, synthetic construct
  source 1..75: mol_type = other DNA
ggaatggagagctgaaccagtaaccgacacagagacaccacgcccacatacggaacatcatgttaacagcatccc

SEQ ID NO: 88376 - DNA, 75 bp, synthetic construct
  source 1..75: mol_type = other DNA
cggtacagcaaaagtaactttaaacgataaaacagtattgcttgctgcaaatgaatcaatctacattcctctagg

SEQ ID NO: 88377 - DNA, 75 bp, synthetic construct
  source 1..75: mol_type = other DNA
aagttatgctgatctggcctgattttatcgcgtacaaccctaacagtggccagaatgaggcttttcctgcatctg

SEQ ID NO: 88378 - DNA, 75 bp, synthetic construct
  source 1..75: mol_type = other DNA
ctttaaagcaaaagctaaaacttgcaccgatgccgatgaacgtgcggcggctgcgcgtcgttatcgctggatgaa

SEQ ID NO: 88379 - DNA, 75 bp, synthetic construct
  source 1..75: mol_type = other DNA
ggcgaaatgccctgcttgatgaggtacggcgagggctgatggctgcacagcagaatggctgtgatttcagaaaca

SEQ ID NO: 88380 - DNA, 75 bp, synthetic construct
  source 1..75: mol_type = other DNA
cagcttgttattggtgaggtcaaaaatgacggaacctatacaggcatgcaggcgctcctggtggctgaacagaat

SEQ ID NO: 88381 - DNA, 75 bp, synthetic construct
  source 1..75: mol_type = other DNA
cttgcaatgcaagcgcaaaccagcaatgagagcagaagtaataacactgacaacgttgaccagaaaatatgaagg

SEQ ID NO: 88382 - DNA, 75 bp, synthetic construct
  source 1..75: mol_type = other DNA
tcaatcagataactaacaaagatatgttgggctttaaaatcccattacctgaaaatacagaagaacaagccgcca

SEQ ID NO: 88383 - DNA, 75 bp, synthetic construct
  source 1..75: mol_type = other DNA
gctgtttctggccggttgtgcagggctggtgaaacccacccggacgacgcagtatccgccatatccggcgctggt

SEQ ID NO: 88384 - DNA, 75 bp, synthetic construct
  source 1..75: mol_type = other DNA
ccctgtttgcgctggtcagcggctgcaacatggcgggtaaaaccttacgtcagcacagccttaaccgcctgtggc

SEQ ID NO: 88385 - DNA, 75 bp, synthetic construct
  source 1..75: mol_type = other DNA
atgactgaacgcatagaatttgttttgccttacccgccaacggtgaacacttactggcgtcgtcgtggcagcaca

SEQ ID NO: 88386 - DNA, 75 bp, synthetic construct
  source 1..75: mol_type = other DNA
atgcagtaccggcaggaaaacattctgacgaaagcctctcgtttaccccatactctgtccatttcctgttatttt

SEQ ID NO: 88387 - DNA, 75 bp, synthetic construct
  source 1..75: mol_type = other DNA
aagcgtttctggcagagcacgggggctggaaggcatttttgtggaagccaccctatgcataccggcagataaagg

SEQ ID NO: 88388 - DNA, 75 bp, synthetic construct
  source 1..75: mol_type = other DNA
tatttagtgtatttacttacaccggtggctatgatgataatataaaatattatggcatgatgattgatcgaagta

SEQ ID NO: 88389 - DNA, 75 bp, synthetic construct
  source 1..75: mol_type = other DNA
atgggggattctgtgacacctgaggtggaagtattgagcaacatgattcgacagtacttcagtcaggaacgatct

SEQ ID NO: 88390 - DNA, 75 bp, synthetic construct
  source 1..75: mol_type = other DNA
ccttatgcataccggcagataaaggtgacctgtgccgggtggtctgcgcgggtcgggatgttgcgcgttgagttc

SEQ ID NO: 88391 - DNA, 75 bp, synthetic construct
  source 1..75: mol_type = other DNA
ctgcaatcccacggcggcagcatgatcatgctggcgaaaggtaaccgcagtcagcaggttaccgacgcgtgccat

SEQ ID NO: 88392 - DNA, 75 bp, synthetic construct
  source 1..75: mol_type = other DNA
acaccatgtatatcgacaagccgatgcgtggccacaacctgatgcaggccattgcgcgtgttaaccgcgtgttcc

SEQ ID NO: 88393 - DNA, 75 bp, synthetic construct
  source 1..75: mol_type = other DNA
ggctcagacacgggaggtcagagcgcagcgatcctgtacagcctgctggcgacatgccggctgaatggagtggat

SEQ ID NO: 88394 - DNA, 75 bp, synthetic construct
  source 1..75: mol_type = other DNA
gtttttgtgaagactatctcacgttcaaggatggcctgagttccttcttttcatttgtgaatttcgaattacatg

SEQ ID NO: 88395 - DNA, 75 bp, synthetic construct
  source 1..75: mol_type = other DNA
acatctgatcaaccagaccgtcttataaaagactttaagtatcatgattgcttcggcagttataatgtacaaata

SEQ ID NO: 88396 - DNA, 75 bp, synthetic construct
  source 1..75: mol_type = other DNA
gtatccgccggacaaaacgccgggcgccgtggaactgattttgaagcaggcagaagtggtgtcgaacagctggac

SEQ ID NO: 88397 - DNA, 75 bp, synthetic construct
  source 1..75: mol_type = other DNA
atcatgaataccaccccggctactgtggatcctgtaacagtatgtagtaaggacaaaaataacatcacccttgaa

SEQ ID NO: 88398 - DNA, 75 bp, synthetic construct
  source 1..75: mol_type = other DNA
aggttgtcgcagtgaaaacatttgctgatgttgatgaagcgcaggcattgcgtctggcggcggcgctggagcaag

SEQ ID NO: 88399 - DNA, 75 bp, synthetic construct
  source 1..75: mol_type = other DNA
aagtgatttgcttccctgctgatgtcggtgatctatctctgcatgaggagatgctcgacgcggcgcaaaaccagt

SEQ ID NO: 88400 - DNA, 75 bp, synthetic construct
  source 1..75: mol_type = other DNA
cagcggtagacgctatcaaaacgctgatggattcacttattgagatttctgctatcgctggtgtggcgcataaac

SEQ ID NO: 88401 - DNA, 75 bp, synthetic construct
  source 1..75: mol_type = other DNA
cctgtttgatgagtccggggcattgattgccgtgggcaactgcccggaaagctataagccgcaactggctgaagg

SEQ ID NO: 88402 - DNA, 75 bp, synthetic construct
  source 1..75: mol_type = other DNA
caagaatttcggctggcgccagatggtccgcgagcgcgaaaagcgcgccacgctggagccgctgcacgcaatcgc

SEQ ID NO: 88403 - DNA, 75 bp, synthetic construct
  source 1..75: mol_type = other DNA
aacgcttcctaccaggttgctgcttatctggcggatgaaatcgccaaactggggccgtatgagttcatctgtacc

SEQ ID NO: 88404 - DNA, 75 bp, synthetic construct
  source 1..75: mol_type = other DNA
ccggccttcactctcggcggtgaagccaccgacatcgtggtgatgcgcattatgtgtcgtcgcggcttcgaaatg

SEQ ID NO: 88405 - DNA, 75 bp, synthetic construct
  source 1..75: mol_type = other DNA
gtaaacatggttgccgatctgtggcatgcgcctgcgccgaaaaatggtcaggccgttggcaccaacaccattggt

SEQ ID NO: 88406 - DNA, 75 bp, synthetic construct
  source 1..75: mol_type = other DNA
atgtcgggtaaattcagatttagtcgtcgcagcgaaaagaatctggagggcgttaaaccacagctggttgctgtc

SEQ ID NO: 88407 - DNA, 75 bp, synthetic construct
  source 1..75: mol_type = other DNA
gcctgacgagtcagccagtaatagtttgaatcgctgggaaggtaaatctgctaccgttgggcaacttatgggaat

SEQ ID NO: 88408 - DNA, 75 bp, synthetic construct
  source 1..75: mol_type = other DNA
agcatccgtgatgccgcttctccggtggaagccgcacgtcagttcaaacgttccatcgccgaactgtggggctaa

SEQ ID NO: 88409 - DNA, 75 bp, synthetic construct
  source 1..75: mol_type = other DNA
gagcatgccaaatggtctgactccacatttggctgcgttggccccattggtccactgaaacacctctcaaaagag

SEQ ID NO: 88410 - DNA, 75 bp, synthetic construct
  source 1..75: mol_type = other DNA
cgaatcgaaatgcgaaatgattgtggtcatcgaaaactttatgacctcatcggcaaaatatgccgacattctgct

SEQ ID NO: 88411 - DNA, 75 bp, synthetic construct
  source 1..75: mol_type = other DNA
gttacgggcagatgcagtaccgctattgcggaaaaagtggtttacgcctgcccgcgttatcgctcggtttatggc

SEQ ID NO: 88412 - DNA, 75 bp, synthetic construct
  source 1..75: mol_type = other DNA
accagatgctgcactcggtcggtcttgatgcgctggcgaccgctaacgacatgaaccgtaacgtactctgcacct

SEQ ID NO: 88413 - DNA, 75 bp, synthetic construct
  source 1..75: mol_type = other DNA
tcggagccctggtccttcctgtcatctatcgggcgattaaaactcactatccacagcttttactgcgcaacccgc

SEQ ID NO: 88414 - DNA, 75 bp, synthetic construct
  source 1..75: mol_type = other DNA
agggaacgaaaatttattagaatagacaaagacaattttgatgaagtgatgacgtcaatgagtccgaaagctcat

SEQ ID NO: 88415 - DNA, 75 bp, synthetic construct
  source 1..75: mol_type = other DNA
catatctatcgcaaccaaccaacgatgatccgcgagaacaaaccgctgatctcactatgggcacaatggtatatc

SEQ ID NO: 88416 - DNA, 75 bp, synthetic construct
  source 1..75: mol_type = other DNA
cggacggcccggggcgtacgcgacatttccggtgggatgcgcagaaccagataacccgttaccaggacgaagccg

SEQ ID NO: 88417 - DNA, 75 bp, synthetic construct
  source 1..75: mol_type = other DNA
acgaactaccagaggtcggagttctacaggctgcgtttgcccgtctgatcggtatggggggttatgatgtttttt

SEQ ID NO: 88418 - DNA, 75 bp, synthetic construct
  source 1..75: mol_type = other DNA
ccattggtccactgaaacacctctcaaaagaggcactggaagccgcagccgaaccagacgatcttagcgagtggg

SEQ ID NO: 88419 - DNA, 75 bp, synthetic construct
  source 1..75: mol_type = other DNA
ctggtgggatttaaagggtaaacacgaagagcatgggaaatctaatcttggaaaaattgaaatcttcacaaaaat

SEQ ID NO: 88420 - DNA, 75 bp, synthetic construct
  source 1..75: mol_type = other DNA
ctggcgaggtgttaagcgatgatgaaattgctgtcctcgaagaaatcaaccggacgtttacgcatgtcaccatcg

SEQ ID NO: 88421 - DNA, 75 bp, synthetic construct
  source 1..75: mol_type = other DNA
acaataaatccgtcacttttgccgaacttgatgtgtttgatttgagtgaagcgttaagcgcacccgacgttattt

SEQ ID NO: 88422 - DNA, 75 bp, synthetic construct
  source 1..75: mol_type = other DNA
cgtgcagctggccacgcttaagcagcgcaccgaaaaagcggccaggacagccggccgagctcccgccggtagcca

SEQ ID NO: 88423 - DNA, 75 bp, synthetic construct
  source 1..75: mol_type = other DNA
cagcaaggagactcagaaagtggagggatcaacacggggaaagatgccgcagagagggccgctatttccgtagct

SEQ ID NO: 88424 - DNA, 75 bp, synthetic construct
  source 1..75: mol_type = other DNA
tcaattgatcttggtcatggcgatggcagaggacgatatattgaacaggtttattgtcagttattaggctatgag

SEQ ID NO: 88425 - DNA, 75 bp, synthetic construct
  source 1..75: mol_type = other DNA
ggcgtttttcttcttttttaataaagaatttgacagccatgatttagctcatgaggagtgtatgaagattataga

SEQ ID NO: 88426 - DNA, 75 bp, synthetic construct
  source 1..75: mol_type = other DNA
cgggagctgaacaagcaccgggatattgtccgacagattgtcgattcctccagtcgtattgtgtcggaaaagtga

SEQ ID NO: 88427 - DNA, 75 bp, synthetic construct
  source 1..75: mol_type = other DNA
cgctggcgattggcgcgtttggtatcgggacaacggagttctcgccaatgggcttgttgcccgtcattgcgcgcg

SEQ ID NO: 88428 - DNA, 75 bp, synthetic construct
  source 1..75: mol_type = other DNA
aaacaggccagcgcagttgccactatgtttatggggttaaccctggcaaatatcggtggcgtgccggcggcgacc

SEQ ID NO: 88429 - DNA, 75 bp, synthetic construct
  source 1..75: mol_type = other DNA
tgagccgcactagtgggacagaaccacagagtagtacacaaagtacaacctctggctatccttatctttctcagg

SEQ ID NO: 88430 - DNA, 75 bp, synthetic construct
  source 1..75: mol_type = other DNA
catattcacgatcagagcgaacggcgctttgtggtggaatgtgacggcgaaaaagccggtctggtggagctggtg

SEQ ID NO: 88431 - DNA, 75 bp, synthetic construct
  source 1..75: mol_type = other DNA
gaaaaagagtaaagcactctcaaaagaaagttatggattgtattattgctgaccataatgctgatatatgtgtgt

SEQ ID NO: 88432 - DNA, 75 bp, synthetic construct
  source 1..75: mol_type = other DNA
ggttaggggttgcggtaactgctgttgcagctatttttaacccagctctctgggctgttgttgctgttagtgcaa

SEQ ID NO: 88433 - DNA, 75 bp, synthetic construct
  source 1..75: mol_type = other DNA
atcagcctcgttaccggcgtccttgtactggcgagctgatacaaattgatggctgcgaccaccactggtttgaaa

SEQ ID NO: 88434 - DNA, 75 bp, synthetic construct
  source 1..75: mol_type = other DNA
ctgatgacattctggattacgtggttgttgatacagataaaacaggacaaattcatgtcagagtggtggaaggaa

SEQ ID NO: 88435 - DNA, 75 bp, synthetic construct
  source 1..75: mol_type = other DNA
ggggtttaacatgatgaataacctgccggtcaccagtacatccacgatcagtgcagccagttgtaccggaagtgt

SEQ ID NO: 88436 - DNA, 75 bp, synthetic construct
  source 1..75: mol_type = other DNA
cgcagtaagcagcaatatcactggattaggtattcagcttaaacaggctgggcagcgttttaggatcaatacgcc

SEQ ID NO: 88437 - DNA, 75 bp, synthetic construct
  source 1..75: mol_type = other DNA
atgttaagtaaccttcccggattactgaatgtggcgttatgcacggttatcgtgctgacgctctttttttatcgt

SEQ ID NO: 88438 - DNA, 75 bp, synthetic construct
  source 1..75: mol_type = other DNA
tttcacctgcagggagaggagcgcacacagcttcacaacgtggcccagagcatttatcacgcagaccgggcgttc

SEQ ID NO: 88439 - DNA, 75 bp, synthetic construct
  source 1..75: mol_type = other DNA
gccagccagcaaagtttcctgggttattgttaatgattacggaggatatcagcaaggagaatctgttctggagta

SEQ ID NO: 88440 - DNA, 75 bp, synthetic construct
  source 1..75: mol_type = other DNA
ggggatcaaggtaaacgtaagtatctcgatcagatgaaagatgtgcgtgagcgtgcaaccaaaagctatgatgag

SEQ ID NO: 88441 - DNA, 75 bp, synthetic construct
  source 1..75: mol_type = other DNA
cgggagattgccgcgctgaaaaacgagatggagctgaagcgtgaactggcccgcaacagcgtgctgaccattatt

SEQ ID NO: 88442 - DNA, 75 bp, synthetic construct
  source 1..75: mol_type = other DNA
tgagtacgatcccggtgagctgaagccacaagatgttgaagtgcaggtggattactgcgggatctgccattccga

SEQ ID NO: 88443 - DNA, 75 bp, synthetic construct
  source 1..75: mol_type = other DNA
ttggaagaatatcaagttaagtttcgtgaaaaacgtgatgagcagctaattagcagtcagaaaaaagagaaggac

SEQ ID NO: 88444 - DNA, 75 bp, synthetic construct
  source 1..75: mol_type = other DNA
gtcatcacgcgggtattgatgacaatacagcggcaaaagccattgcccatgccattctcggtggtgtgacagcag

SEQ ID NO: 88445 - DNA, 75 bp, synthetic construct
  source 1..75: mol_type = other DNA
cgcgcgctgttaaaatcgctacataaagacgagcgtgtaattattttagaggacgttcacgaagtcacggtcgat

SEQ ID NO: 88446 - DNA, 75 bp, synthetic construct
  source 1..75: mol_type = other DNA
ctggaacatctgcgcaaactcaccagtcacgaacccgtgattggcattatggggaaaagcggggccggtaaatcc

SEQ ID NO: 88447 - DNA, 75 bp, synthetic construct
  source 1..75: mol_type = other DNA
ctgtgacacggaaagaagcatcagagagcggttttctgaatatcaggtcagtgggcagcgcccgggcaacgacga

SEQ ID NO: 88448 - DNA, 75 bp, synthetic construct
  source 1..75: mol_type = other DNA
gacgtacagggtgatgctttccgtgacccgggaggaggcccggcatctggaagcgttcctggcagagcacggggg

SEQ ID NO: 88449 - DNA, 75 bp, synthetic construct
  source 1..75: mol_type = other DNA
acacttcatttaacggaactttcaaatgcggtggtaatataattattgaggggcatgttgagggcgatgttattt

SEQ ID NO: 88450 - DNA, 75 bp, synthetic construct
  source 1..75: mol_type = other DNA
gacaagaaaaaacttgtccttgagtattgtcagaaaaatttcgttgataaaggcatgattgccgatatcgctttt

SEQ ID NO: 88451 - DNA, 75 bp, synthetic construct
  source 1..75: mol_type = other DNA
caacaactcccgttggcagtcattgacgaagtgattgtccgcgcgggggactatatcgacattggtacgcctctt

SEQ ID NO: 88452 - DNA, 75 bp, synthetic construct
  source 1..75: mol_type = other DNA
accctcatgaaatagaacttgttaaacgtaatgctgcccttcacggcatgagcatgagcagagaaattgctattc

SEQ ID NO: 88453 - DNA, 75 bp, synthetic construct
  source 1..75: mol_type = other DNA
atcctgctctggatatggctggcgcattgactacggtaaaacgccagcatcgccccgctcttgatctttcacgtc

SEQ ID NO: 88454 - DNA, 75 bp, synthetic construct
  source 1..75: mol_type = other DNA
catttcatattagcacctgttaatgctccagaacatatcgtaaaagactctacagcattgtggaatgaagttgaa

SEQ ID NO: 88455 - DNA, 75 bp, synthetic construct
  source 1..75: mol_type = other DNA
gaaccatctgtaccagtaaaaacatgtttatacccacatgaactggagttaataaagcgtaatgctgcattacac

SEQ ID NO: 88456 - DNA, 75 bp, synthetic construct
  source 1..75: mol_type = other DNA
cttggcgtatcaatggggcttgaggctggtttcggtgcaatgatgcgcttgtatgagtccaaagcagcaaggaat

SEQ ID NO: 88457 - DNA, 75 bp, synthetic construct
  source 1..75: mol_type = other DNA
gaatttatactgtctattggtggaaaaccttctatgccaaagttaaaacaaactaacagaaaatctaacatcaaa

SEQ ID NO: 88458 - DNA, 75 bp, synthetic construct
  source 1..75: mol_type = other DNA
atgaaaaatgtatgttttagattaaatgatgatgaatatgaacttgcgagagtaaatgcagcttcatatggagtt

SEQ ID NO: 88459 - DNA, 75 bp, synthetic construct
  source 1..75: mol_type = other DNA
cccactcgcggcattgatgttggcgccaaactggaaatctatgagttaatgaatcgcctggtggcaaaagggaaa

SEQ ID NO: 88460 - DNA, 75 bp, synthetic construct
  source 1..75: mol_type = other DNA
ctgtaggaaaatgggtgacaaatggctgggatcctaagtacgatccaacatggataaaatatgctgaagtaaatc

SEQ ID NO: 88461 - DNA, 75 bp, synthetic construct
  source 1..75: mol_type = other DNA
tggaagccaaaagcgagatcctgaaactacgggcgcagctaaaacgtaccgaagaagaacgggatatcctgaaaa

SEQ ID NO: 88462 - DNA, 75 bp, synthetic construct
  source 1..75: mol_type = other DNA
cgatgaagaaattatcatccagtgggagagcggagagtacgaaccaaccatcagcatgcttatccctctggctaa

SEQ ID NO: 88463 - DNA, 75 bp, synthetic construct
  source 1..75: mol_type = other DNA
gcaattgttgaagtgctgtcgcccggtcaacccccgactaaacgcggattaatttacgccgcgacgccagccagc

SEQ ID NO: 88464 - DNA, 75 bp, synthetic construct
  source 1..75: mol_type = other DNA
tggtgcagagcatgatcaatgcattgcaggccgaagtcggtgagattactcagccagaaccggccccggcacagc

SEQ ID NO: 88465 - DNA, 75 bp, synthetic construct
  source 1..75: mol_type = other DNA
cagaacattcgggagaaaacggaggcggtattccgtctgttccggcccgtacatccggttgttgccgtatcggcc

SEQ ID NO: 88466 - DNA, 75 bp, synthetic construct
  source 1..75: mol_type = other DNA
tttcgcacactggcctgtagtgccttaattgagtcaggtttgtggtctgaagatgcggtagaactccagatgagc

SEQ ID NO: 88467 - DNA, 75 bp, synthetic construct
  source 1..75: mol_type = other DNA
aaaattcttatacggaatcaggacttcaacgttccacatcttatactcagtcaagtatagaaaaaaacgctttac

SEQ ID NO: 88468 - DNA, 75 bp, synthetic construct
  source 1..75: mol_type = other DNA
gaacagaggtgatatgctcacctcagaacaacacaggtgctccaatgaaaaaaagaaatttcagcgcagagttta

SEQ ID NO: 88469 - DNA, 75 bp, synthetic construct
  source 1..75: mol_type = other DNA
gccgtgcggagtaccatgcccgctatctcgacattcagattgtgttaaaaggtcaggaaggcatgaccttcagca

SEQ ID NO: 88470 - DNA, 75 bp, synthetic construct
  source 1..75: mol_type = other DNA
cgggcggggcagccttcgggctggccggtttccaataaggccggtattcctacccccgttcgggtcaccacccat

SEQ ID NO: 88471 - DNA, 75 bp, synthetic construct
  source 1..75: mol_type = other DNA
gtcgctatcatattaatgaagatgcgttgattacacttccttctggtgaaattgttgctatttctaatcaatggg

SEQ ID NO: 88472 - DNA, 75 bp, synthetic construct
  source 1..75: mol_type = other DNA
atcttctggcggtcccgtgccttcagaatatagtctggggcaaatcattcgtgcgtggtcaccgtttttaatctt

SEQ ID NO: 88473 - DNA, 75 bp, synthetic construct
  source 1..75: mol_type = other DNA
gtacagaattcgtaaaaaatatgttctcagtcgccagtcagcatgaaatacagacaatgtacaatatttatgtcc

SEQ ID NO: 88474 - DNA, 75 bp, synthetic construct
  source 1..75: mol_type = other DNA
gcgtctgtattgcctctgttgcacgcacggttctgcgtgccgtccgtgactcggtggtctctgttgcccgcgctg

SEQ ID NO: 88475 - DNA, 75 bp, synthetic construct
  source 1..75: mol_type = other DNA
cccaaatgaaacactgaaaacagcagttacagcggaatggtttgaacgaaataaagtagaattaggctattggta

SEQ ID NO: 88476 - DNA, 75 bp, synthetic construct
  source 1..75: mol_type = other DNA
ggtgcctccggtgccggaaaaaccacattaatgaaagtattatgtggactgtttgaaccagatagtggaaaagta

SEQ ID NO: 88477 - DNA, 75 bp, synthetic construct
  source 1..75: mol_type = other DNA
cagaagcacaccgtgccggcaggggcgatgagctttatatctttcatctgggctggccggaaatctctgcgcgtt

SEQ ID NO: 88478 - DNA, 75 bp, synthetic construct
  source 1..75: mol_type = other DNA
cattgtgtttgatcccaaaggtgatgctgatctgctgctgcgtgtctgggcggaagcacaccgtgccgggcgggg

SEQ ID NO: 88479 - DNA, 75 bp, synthetic construct
  source 1..75: mol_type = other DNA
ctcaggctctggcagaacgaagggcgtatatcgcggcgtcttccggtaacaacctcttctgacgctggcgttgaa

SEQ ID NO: 88480 - DNA, 75 bp, synthetic construct
  source 1..75: mol_type = other DNA
gagtgcttatcagaccatccaggaaaatatgctgaaaggcgggatttccggtcgcagtgcaaaaggaaaacgtat

SEQ ID NO: 88481 - DNA, 75 bp, synthetic construct
  source 1..75: mol_type = other DNA
gtgctttccggcgtgctttatcctgaaattacaggtggcgaagtgtcgctttcgttgctgaccacgcaggcatat

SEQ ID NO: 88482 - DNA, 75 bp, synthetic construct
  source 1..75: mol_type = other DNA
cggtcaccaggatacggcggacgtgtctgccggtcaggatttcacgtccagcacccaggatcgtgtcggcacggt

SEQ ID NO: 88483 - DNA, 75 bp, synthetic construct
  source 1..75: mol_type = other DNA
gtttctggggcggggatttcgctggacccagaagcatacccagcgtctccaggatacgctgcgaccggaggtggc

SEQ ID NO: 88484 - DNA, 75 bp, synthetic construct
  source 1..75: mol_type = other DNA
tatcacaccggtgaaggatggtggaatgagccgccgtcagcgcaggccgccggaacagatgaaggaggcggatat

SEQ ID NO: 88485 - DNA, 75 bp, synthetic construct
  source 1..75: mol_type = other DNA
tttgcagttcttctttgctatctgaaaaatgtcggttttgctcctgataagaaaacgccccctctgatgcattgt

SEQ ID NO: 88486 - DNA, 75 bp, synthetic construct
  source 1..75: mol_type = other DNA
gcaccagtggtgttctgcccggatgtggagggcgaagcactgaaggaatgtctgcgccccaaccgcagggttgaa

SEQ ID NO: 88487 - DNA, 75 bp, synthetic construct
  source 1..75: mol_type = other DNA
tggatgagctggtggattgtgtggcggagctggaaaccaaagttggaaagtttgaaaaaatggtgcaggaggtgc

SEQ ID NO: 88488 - DNA, 75 bp, synthetic construct
  source 1..75: mol_type = other DNA
agatacatttagggtgaccctgcgcaatacgcttagcggagcaggaatctccagttcgtttgcatttagcattac

SEQ ID NO: 88489 - DNA, 75 bp, synthetic construct
  source 1..75: mol_type = other DNA
aaatgtggtggagaaagttatcgaaggtgcttacgaggtggtgggcgtgtttgaccggatagaggagaagcgtga

SEQ ID NO: 88490 - DNA, 75 bp, synthetic construct
  source 1..75: mol_type = other DNA
gtagcgaaggagaaatggacgtcaacagcaattatcactcagcccgacgtggggcaaattgctggctataacaat

SEQ ID NO: 88491 - DNA, 75 bp, synthetic construct
  source 1..75: mol_type = other DNA
gtttcagggggaggtcaccccggtcagtgatgttcacgccggcacccgggaagtgcggcgcttccgtctgagtgg

SEQ ID NO: 88492 - DNA, 75 bp, synthetic construct
  source 1..75: mol_type = other DNA
gcttaccgctatgtaatgaaaccgacgttacctattcgtcgcgatagcccgaaaaaggcaattaccttgattctg

SEQ ID NO: 88493 - DNA, 75 bp, synthetic construct
  source 1..75: mol_type = other DNA
gcggtgctgctgggcggcatggttggcgcggggattgtgctggggcgtaacgctctgcgtaattacaacgcgaag

SEQ ID NO: 88494 - DNA, 75 bp, synthetic construct
  source 1..75: mol_type = other DNA
atgctcgcagatatcagatattgggaaaacgatgccacaaataaacattatgcaattgcccattttaacgtatgg

SEQ ID NO: 88495 - DNA, 75 bp, synthetic construct
  source 1..75: mol_type = other DNA
tgccaacaaagcacaaaacttcgaagtagttgcacaatatcagttcgacttcggtctgcgtccgtccgttgctta

SEQ ID NO: 88496 - DNA, 75 bp, synthetic construct
  source 1..75: mol_type = other DNA
tggcctgaactttgcagctcagtatcagggcaaaaatgaccgaaatgaagtaactgaagctaatggcgatggttt

SEQ ID NO: 88497 - DNA, 75 bp, synthetic construct
  source 1..75: mol_type = other DNA
aggtggatgaggttcctgtttaccggcagaaaaaatcagagcaggaggataaaccccgtcgccgtgaggcggctg

SEQ ID NO: 88498 - DNA, 75 bp, synthetic construct
  source 1..75: mol_type = other DNA
actgactcttgaacgctgtgatgaggatttgcgggagcgcctgcaatcctcatcgttcagtgatatgctgtccgg

SEQ ID NO: 88499 - DNA, 75 bp, synthetic construct
  source 1..75: mol_type = other DNA
tggagccgtggcagctctttgtgatctgctgtgcgtttggctgggtcaataaaggctcccggctgcgccgcttcc

SEQ ID NO: 88500 - DNA, 75 bp, synthetic construct
  source 1..75: mol_type = other DNA
atccgtcgcgttttctcagccactggctggcgctcgacggcccggcctataccctttcaaccgcctgctcttcca

SEQ ID NO: 88501 - DNA, 75 bp, synthetic construct
  source 1..75: mol_type = other DNA
atgctgaaaggcgggatttccggtcgcagcgctaaaggaaaacgtatccacacccgtgccattcacagcatcgac

SEQ ID NO: 88502 - DNA, 75 bp, synthetic construct
  source 1..75: mol_type = other DNA
caccgatgcgctttacaccacgatgcttaccgggatgggggcgcgacgtcagccactgatgtgggccatcaccac

SEQ ID NO: 88503 - DNA, 75 bp, synthetic construct
  source 1..75: mol_type = other DNA
ctcccgacagctgggataaggccttccgttttgtggacgggatttgtgagcttcatctttatagcaatggcgtgg

SEQ ID NO: 88504 - DNA, 75 bp, synthetic construct
  source 1..75: mol_type = other DNA
tgatagctactccggacgacctttaacccgtctggctgttgagctcacgttattaatctttattcgttccagtga

SEQ ID NO: 88505 - DNA, 75 bp, synthetic construct
  source 1..75: mol_type = other DNA
cgcagtgcgatccgcacgctgaaataagcgaagagggtcgggaatggattgatgcgcctgcggtgggcaaggaga

SEQ ID NO: 88506 - DNA, 75 bp, synthetic construct
  source 1..75: mol_type = other DNA
gttgcagtggtgggcggattttctagatgtaaatcgcgagaaagtgattagcccgtttgattttgccaaaatttt

SEQ ID NO: 88507 - DNA, 75 bp, synthetic construct
  source 1..75: mol_type = other DNA
gcagtgcaaagcggtttgatcgattacaatcctgctcaggagatggctggggcagttgcttcaagtaatcgtgtc

SEQ ID NO: 88508 - DNA, 75 bp, synthetic construct
  source 1..75: mol_type = other DNA
gcggatgtggggacatatgttaggcattattgaagcgaacaatatctttaaacgcccacggctggcggatgaaac

SEQ ID NO: 88509 - DNA, 75 bp, synthetic construct
  source 1..75: mol_type = other DNA
ctgctggcaccggactatctggacatgaacgatgcgcgaccgatttttgactgggaacaggtgatccgtaaaaag

SEQ ID NO: 88510 - DNA, 75 bp, synthetic construct
  source 1..75: mol_type = other DNA
cgctattcgctcgaagaactgttggcgcagtgcgatccgcacgctgaaataagcgaagagggtcgggaatggatt

SEQ ID NO: 88511 - DNA, 75 bp, synthetic construct
  source 1..75: mol_type = other DNA
actgccattttgatttcccgccgtttagtggcgatgaagaggccagcctgcaacgcgcggcacaagcgggcgtag

SEQ ID NO: 88512 - DNA, 75 bp, synthetic construct
  source 1..75: mol_type = other DNA
gatgatgcgacagggagagaacaggtctacatccacgcgcagaagaacatggataccgaagtgctcaacgaccgt

SEQ ID NO: 88513 - DNA, 75 bp, synthetic construct
  source 1..75: mol_type = other DNA
aatcagaaggcgatagatttgcttaattcgctggtggacggcgcgacactgacagatgaacagcgccagatcctg

SEQ ID NO: 88514 - DNA, 75 bp, synthetic construct
  source 1..75: mol_type = other DNA
agagtgggaagcgaaaatcctggaactggctggcttcctggattcttatattccggaaccagagcgtgcgattga

SEQ ID NO: 88515 - DNA, 75 bp, synthetic construct
  source 1..75: mol_type = other DNA
aatggctttaccgccgattaccagtctatgctgcaaaagacggggttcaacgctgataaggcagccgttcagtcc

SEQ ID NO: 88516 - DNA, 75 bp, synthetic construct
  source 1..75: mol_type = other DNA
cacaccaaagccgatcgctgaaggtgtctgggagatcatgaagctctacggcgcggacgtaggtaacactctgga

SEQ ID NO: 88517 - DNA, 75 bp, synthetic construct
  source 1..75: mol_type = other DNA
tgacccagttcctgaaaaacgttgaagtgttcgataccggcggtcgtggcgcgaccaccacttttgccgagcgcg

SEQ ID NO: 88518 - DNA, 75 bp, synthetic construct
  source 1..75: mol_type = other DNA
tccgcgagagagtgcacagcaacagcgaactaaaagaaattctacgcgctattgatggtgatgtgttcgctccct

SEQ ID NO: 88519 - DNA, 75 bp, synthetic construct
  source 1..75: mol_type = other DNA
atcgccgtattcacgccgcctgttctataaacgcaatatcattggcaatcaggtctttacctgggcgtggcgttt

SEQ ID NO: 88520 - DNA, 75 bp, synthetic construct
  source 1..75: mol_type = other DNA
aaacggtcatcaggtaccggaaatcattttactcaacagccatgacggctcatcaagctaccagatgctgccggg

SEQ ID NO: 88521 - DNA, 75 bp, synthetic construct
  source 1..75: mol_type = other DNA
gattagcagggcttttaagtatgcgcttgatgaaatcacaaagaaaaaatccccggccgccaccgaggattttaa

SEQ ID NO: 88522 - DNA, 75 bp, synthetic construct
  source 1..75: mol_type = other DNA
ggtcgatttttagaaaggacagggaatagtgtagccgcacaaaattatctgattgcgcatgattaccagacaacg

SEQ ID NO: 88523 - DNA, 75 bp, synthetic construct
  source 1..75: mol_type = other DNA
tttccggataccggcgtctatgcagcggccgttagtgaaacccgggtgctcgatgcctggctttgctggccatgc

SEQ ID NO: 88524 - DNA, 75 bp, synthetic construct
  source 1..75: mol_type = other DNA
ggtcatggcggtcgtttttgcgtttgcctgcgcaggcttgctgatctctttcatcctgccgcaaaaatggaccag

SEQ ID NO: 88525 - DNA, 75 bp, synthetic construct
  source 1..75: mol_type = other DNA
cagcgacgatatggtgcagctggtggactggattaacagccagcctgaaaaataccgtgaacgcttgtatcgcgg

SEQ ID NO: 88526 - DNA, 75 bp, synthetic construct
  source 1..75: mol_type = other DNA
tcgaaggaggtggagcaaactggccttgaaccaaaaaacgagacgttaatatctaattctcaggatggggcaagc

SEQ ID NO: 88527 - DNA, 75 bp, synthetic construct
  source 1..75: mol_type = other DNA
gcattatcctgtgtgctcaaaacgaaaatcgtaacctcttatcccggtatcacaatgtgtcagttaacacgagac

SEQ ID NO: 88528 - DNA, 75 bp, synthetic construct
  source 1..75: mol_type = other DNA
aggaagtacccgacctgattggtgtaatggtaatacatgtggtattgaggttaaaaactataacattgctacaaa

SEQ ID NO: 88529 - DNA, 75 bp, synthetic construct
  source 1..75: mol_type = other DNA
accctgcttgataacctgcagcgtgaaggctttcagccattctttgcctgccagactcgagtgcgcgaccagagc

SEQ ID NO: 88530 - DNA, 75 bp, synthetic construct
  source 1..75: mol_type = other DNA
tgccgatacagcaggattcaccgaccatttgttcggagccagtagcctgctcggctacaatctcgttctgcgaat

SEQ ID NO: 88531 - DNA, 75 bp, synthetic construct
  source 1..75: mol_type = other DNA
gtgaatacctacagcatcacattaccctggcctccgagcaataaccgctactaccggcataatcgcgggcgcacg

SEQ ID NO: 88532 - DNA, 75 bp, synthetic construct
  source 1..75: mol_type = other DNA
cgattcgctctggaacgcctaaagatgcacaaacgctacggctggtggtcgatcttaccgaaaacggtaaaaccg

SEQ ID NO: 88533 - DNA, 75 bp, synthetic construct
  source 1..75: mol_type = other DNA
ctgtatctgagaaaacatggcatcccggggcggccgggaacacatatcaggcttgaggtcagtgaggactttccg

SEQ ID NO: 88534 - DNA, 75 bp, synthetic construct
  source 1..75: mol_type = other DNA
cctgggcgctggatccactggcaaatgccattaattggcggaatctgctgtgctgctttttatgcctggctgacg

SEQ ID NO: 88535 - DNA, 75 bp, synthetic construct
  source 1..75: mol_type = other DNA
ataattgggaaaaagaaaaagttgataatttcgtttggtgtggttatttttcattttctcgaccaaaaacattta

SEQ ID NO: 88536 - DNA, 75 bp, synthetic construct
  source 1..75: mol_type = other DNA
gagtgggcgtttgtgggttgccaccctttttcattttgggttgaatctgtgtcacttgttattttttacctatcc

SEQ ID NO: 88537 - DNA, 75 bp, synthetic construct
  source 1..75: mol_type = other DNA
cagtcatagtgctgtgtttgacggtgctgggatttacgcttctggtcggagactcgctgtgtgagtttacggtga

SEQ ID NO: 88538 - DNA, 75 bp, synthetic construct
  source 1..75: mol_type = other DNA
caggcccccaggattcagcataaagcgattcttcttgatgagctgaaaagtgcccgggagcaacaaaaaaggcgt

SEQ ID NO: 88539 - DNA, 75 bp, synthetic construct
  source 1..75: mol_type = other DNA
aacatcagtgggggaaactcgcgcgttaaactttcaggagataatcagattatacctgataatgtttcctgggga

SEQ ID NO: 88540 - DNA, 75 bp, synthetic construct
  source 1..75: mol_type = other DNA
gacgacagccatccggaagccctggctcgcaatacccagaaaattttccgctgggtagagaaagacacccctgat

SEQ ID NO: 88541 - DNA, 75 bp, synthetic construct
  source 1..75: mol_type = other DNA
ggctggtgaaagatgtggatgattttgtcgcagcggcgatcgcctggggcaccctgactaacagtgggggtcagc

SEQ ID NO: 88542 - DNA, 75 bp, synthetic construct
  source 1..75: mol_type = other DNA
gtcagcaacggtaacagcaggctggatgtcacacggtttgataatcagggcggcagactggtggcacagcagtca

SEQ ID NO: 88543 - DNA, 75 bp, synthetic construct
  source 1..75: mol_type = other DNA
actgccgggcacttcagcaataatggtggcacgataaatgccgacacactgcagatatcggcacagagcctgtca

SEQ ID NO: 88544 - DNA, 75 bp, synthetic construct
  source 1..75: mol_type = other DNA
gaccacctaccagcgtatccaggaaaacctgattaaaggcggtctgccgggcagaacaacgaaaggtaaacgggc

SEQ ID NO: 88545 - DNA, 75 bp, synthetic construct
  source 1..75: mol_type = other DNA
cctggccgccaagcaacaaccgctactaccggcacaaccggggacgcacacacatcagcgcggaagggcaggcat

SEQ ID NO: 88546 - DNA, 75 bp, synthetic construct
  source 1..75: mol_type = other DNA
atgccgtggcaaccattaagacgatgcacagaaccaggctgtaacaggcgcgttaaatccggcaagtgtgaggag

SEQ ID NO: 88547 - DNA, 75 bp, synthetic construct
  source 1..75: mol_type = other DNA
taaaacggatcgagcaagggaacaccttcaataacgcaagaaaagcaagaaaacaagtccataaaaataacgaag

SEQ ID NO: 88548 - DNA, 75 bp, synthetic construct
  source 1..75: mol_type = other DNA
ggcgtttattatgatggctacgtaggctggaataactacgcgaccgatagcatttataacggtgatatttatccg

SEQ ID NO: 88549 - DNA, 75 bp, synthetic construct
  source 1..75: mol_type = other DNA
atgctttttgatgtttttcagcaatatcctgctgcgatgcctgtcctggcaaccgtcggaggattaatcatcggc

SEQ ID NO: 88550 - DNA, 75 bp, synthetic construct
  source 1..75: mol_type = other DNA
ctttattttctgcaccggcactttctgccatccaatgtggcggttacaagctaactattaacgattctgagggtc

SEQ ID NO: 88551 - DNA, 75 bp, synthetic construct
  source 1..75: mol_type = other DNA
aaaaagattatctgcaacatcaaaaaaagttgcttgccgtattcggtaaggtgccggcagattccataaaaccag

SEQ ID NO: 88552 - DNA, 75 bp, synthetic construct
  source 1..75: mol_type = other DNA
gaaaaagcaaaacagttaccaacatccgcctatgtaatcagcaatcaatacggcaaccgatatatgtacaaaggc

SEQ ID NO: 88553 - DNA, 75 bp, synthetic construct
  source 1..75: mol_type = other DNA
acaatgaccggtgacggaatgactgttattaacggtgaaaccgtcacatctcagaaaatcaaatttctgggaaaa

SEQ ID NO: 88554 - DNA, 75 bp, synthetic construct
  source 1..75: mol_type = other DNA
tcaatgcctcgttgtttatgatttacccggttctggatagtgcgtttaaaaaccggaaacgtgtagagaaaatta

SEQ ID NO: 88555 - DNA, 75 bp, synthetic construct
  source 1..75: mol_type = other DNA
tgcgttaacacagtgggcgggcttgctggtggctctggagaagggcgaagattacaacgtgacgcctatcagaaa

SEQ ID NO: 88556 - DNA, 75 bp, synthetic construct
  source 1..75: mol_type = other DNA
tcgctgccgcctcggggtatcagtccgtgacttcagagccagcgctcaatcgtaaaagacctaaaacgcttgatg

SEQ ID NO: 88557 - DNA, 75 bp, synthetic construct
  source 1..75: mol_type = other DNA
gcgtctgtgttgcctctgttgcccgtaaggttctgcgcgctgttcgtgacaccgtggtctctgttgcccgcgcgg

SEQ ID NO: 88558 - DNA, 75 bp, synthetic construct
  source 1..75: mol_type = other DNA
ccacgtcgaaggctgtgaaggcggcaatggatgaggccaaggcggcgagacagaaggcagaagaggttgctgcag

SEQ ID NO: 88559 - DNA, 75 bp, synthetic construct
  source 1..75: mol_type = other DNA
ccagcggcgcgatggtcgggtttaacgttcatttccactctctggcaagcgcctcgattactgcgatgtttagtt

SEQ ID NO: 88560 - DNA, 75 bp, synthetic construct
  source 1..75: mol_type = other DNA
ggcagccctggaactgtgggcggggcttctggtttcgcttgaacgaggggaaaactacaatgttattcctttatc

SEQ ID NO: 88561 - DNA, 75 bp, synthetic construct
  source 1..75: mol_type = other DNA
cagatctggcctccgaatacttcgagcgccagatacttccgagatggaaacatcccgatatccttcgccggagaa

SEQ ID NO: 88562 - DNA, 75 bp, synthetic construct
  source 1..75: mol_type = other DNA
ttgccgatgatatgtcggcattatcctgttcaatcattccggcccatccgtgggtgtatgggctgggtcagtcca

SEQ ID NO: 88563 - DNA, 75 bp, synthetic construct
  source 1..75: mol_type = other DNA
aaatatttggtgtgaaagggcttaaatatccgtcaaaagaaaaaatgctctccgtaggagagctggagtctgagg

SEQ ID NO: 88564 - DNA, 75 bp, synthetic construct
  source 1..75: mol_type = other DNA
tttagcaccttccagggggtcaagacatggcgtttcaaaagtgggcctctcaaggatgtgagcaaaattcaacga

SEQ ID NO: 88565 - DNA, 75 bp, synthetic construct
  source 1..75: mol_type = other DNA
gattgacgatgccaatttaacgccagatattcgcgctgatattcatgccgaactggtcagactgtcgtttatgcc

SEQ ID NO: 88566 - DNA, 75 bp, synthetic construct
  source 1..75: mol_type = other DNA
atcccgatcgcggcgcggtcagcgaatacgaggcgctgcacgaaatttttaaagttgtacgtaaaggtattaaag

SEQ ID NO: 88567 - DNA, 75 bp, synthetic construct
  source 1..75: mol_type = other DNA
cggtcatggatgtaatggaaataccagctgaaccgcaggtcttccagtcggggacacagagtacagggctggagc

SEQ ID NO: 88568 - DNA, 75 bp, synthetic construct
  source 1..75: mol_type = other DNA
gccatcgcaacccacggttgctttttgagtcgctgctcacgttagccatcacactgacgttaagctggctttcga

SEQ ID NO: 88569 - DNA, 75 bp, synthetic construct
  source 1..75: mol_type = other DNA
atggataagaagcaagtaacggatttaaggtcggaactactcgattcacgttttggcgctaagtctatttcgact

SEQ ID NO: 88570 - DNA, 75 bp, synthetic construct
  source 1..75: mol_type = other DNA
ggtgcttacgaagtggtgggcgtgtttgaccggattgaggaaaagcgtgatgtcatgcagtcgctggtcctgccg

SEQ ID NO: 88571 - DNA, 75 bp, synthetic construct
  source 1..75: mol_type = other DNA
cgaggatggaggctggattatctcaagaaaaattatctcaacttcttggtgtagcggaaggtattaacactcgat

SEQ ID NO: 88572 - DNA, 75 bp, synthetic construct
  source 1..75: mol_type = other DNA
agcatcgacacggacattaagctcaatcgcgcattgtgggtgatggcagaaacactgctgaagagtatgcgctga

SEQ ID NO: 88573 - DNA, 75 bp, synthetic construct
  source 1..75: mol_type = other DNA
ggcttccattgaagacttcaacgaagcgttcggcacccactttagcgatgaagaggttgacactatcggtggtct

SEQ ID NO: 88574 - DNA, 75 bp, synthetic construct
  source 1..75: mol_type = other DNA
gatgccgaaggtaatatcaccaccatcttctgtacttatgacgccgacaccttaagcaaagatccggcagatggt

SEQ ID NO: 88575 - DNA, 75 bp, synthetic construct
  source 1..75: mol_type = other DNA
acggaagtggccggcaaagcggcgaatgtgatggttgccaacccgtatggtatcacctgtgacggctgtggtttt

SEQ ID NO: 88576 - DNA, 75 bp, synthetic construct
  source 1..75: mol_type = other DNA
tcccgcaatgggtgatagacgctggcatgttaaaagccggttccctcatcgaacgctatttccgtgttttcgaaa

SEQ ID NO: 88577 - DNA, 75 bp, synthetic construct
  source 1..75: mol_type = other DNA
gcatggctatgaatgcctgggcgcgtccggatggtgaaaaagttccggcggccaagataaccagggcttatttcg

SEQ ID NO: 88578 - DNA, 75 bp, synthetic construct
  source 1..75: mol_type = other DNA
atgtttaaatcagacgtaattaatttttatgggacgaaagccaaagtagcgaaagctgctggtgttgatccatct

SEQ ID NO: 88579 - DNA, 75 bp, synthetic construct
  source 1..75: mol_type = other DNA
cgtctcggtgttgatgtggttgagtacactgtggactgcggccccggcatcgcccgcccgcaaaagtactggagc

SEQ ID NO: 88580 - DNA, 75 bp, synthetic construct
  source 1..75: mol_type = other DNA
atgatagatcgtgctaatgatcctcagcatgtgatgaatgataaaggtaaagaaaataaaaaaatcacacagaat

SEQ ID NO: 88581 - DNA, 75 bp, synthetic construct
  source 1..75: mol_type = other DNA
gtgcgattacccggcagggagttcgaaacagtattgactatatgagccgtgagtcagagctaccagtgatgagtg

SEQ ID NO: 88582 - DNA, 75 bp, synthetic construct
  source 1..75: mol_type = other DNA
aaatcctctccgaaggtgattttcctgcacatgatggggtctcatccgaacccgtgtgaccggcttcactcctgg

SEQ ID NO: 88583 - DNA, 75 bp, synthetic construct
  source 1..75: mol_type = other DNA
atggggctctttctatccagtttttttcaacatcaaggtgtttgtatggggttatttaattacaaatcttatgcg

SEQ ID NO: 88584 - DNA, 75 bp, synthetic construct
  source 1..75: mol_type = other DNA
tgcacgcgcggattaagcgaagaagaggtgcagggtgagtacgaactgaacactggcaaagtgattatcgaaacg

SEQ ID NO: 88585 - DNA, 75 bp, synthetic construct
  source 1..75: mol_type = other DNA
agtgtctgggctgaagacgacattcagtttgattcccgttttctggaattaaaaggcgacacaaaaattgatctg

SEQ ID NO: 88586 - DNA, 75 bp, synthetic construct
  source 1..75: mol_type = other DNA
cggacaatatatcccggattttattgtttttattcttcccgggcatgtgtgtaataaccactgccgcatgcggat

SEQ ID NO: 88587 - DNA, 75 bp, synthetic construct
  source 1..75: mol_type = other DNA
ccaggcggatattgatgattatcgtgagggatatgaccgctttacgactcatctcagctccctgaacaccattgt

SEQ ID NO: 88588 - DNA, 75 bp, synthetic construct
  source 1..75: mol_type = other DNA
tatcacgccaactcaacggctgaagactcactggcagtcggtgaagactcgctggcaatgggcgcgaaaaccatc

SEQ ID NO: 88589 - DNA, 75 bp, synthetic construct
  source 1..75: mol_type = other DNA
acacacgcatctctgttattgcttctgatgcggagcataccgttttcctcaagaaaggcagcttcgcttcccgta

SEQ ID NO: 88590 - DNA, 75 bp, synthetic construct
  source 1..75: mol_type = other DNA
acaggaaaaggttcaggtgattgtccgtaacctcgccagacaaaattgttccgcagacagtaagaatatttgtag

SEQ ID NO: 88591 - DNA, 75 bp, synthetic construct
  source 1..75: mol_type = other DNA
gtgttcggcctgagacgttgctcagacaggttaacaccgtctcgttgccggacagtgcgatcccgccaggcttca

SEQ ID NO: 88592 - DNA, 75 bp, synthetic construct
  source 1..75: mol_type = other DNA
gctgcttgttttcccgcgagctggaggccttcagccagcaagatgacgaagtgaccttgcacctgaaaacggcag

SEQ ID NO: 88593 - DNA, 75 bp, synthetic construct
  source 1..75: mol_type = other DNA
atatattcaggcgtggctgcgttacccgggggttcatgtaggtcaaaattacctcggtaatattaaaatactgcc

SEQ ID NO: 88594 - DNA, 75 bp, synthetic construct
  source 1..75: mol_type = other DNA
caccgacaaggataattactatgtgctgggcagcatgggagaacgctgggccggtcagggggctgaacagcttgg

SEQ ID NO: 88595 - DNA, 75 bp, synthetic construct
  source 1..75: mol_type = other DNA
tggtcaggtggaaaaccgcgccttatatccccgccctgaaggatggggttttacggcgcaccggataaaaagcgc

SEQ ID NO: 88596 - DNA, 75 bp, synthetic construct
  source 1..75: mol_type = other DNA
actcattcgtgatgccgttattgaagctcagcaaattacgcaggctccccttgggcttgtggcagcgtctgccct

SEQ ID NO: 88597 - DNA, 75 bp, synthetic construct
  source 1..75: mol_type = other DNA
tcgctgcctccactcattcgtgatgccgttattgaagctcagcaaatcacgcaggctcccctggggcttgtggca

SEQ ID NO: 88598 - DNA, 75 bp, synthetic construct
  source 1..75: mol_type = other DNA
acaggaaatgttgcgacaggcggaacaactggaaaaaacaggtgtaacaaaagatgccattcgtcgggatatggt

SEQ ID NO: 88599 - DNA, 75 bp, synthetic construct
  source 1..75: mol_type = other DNA
cacactttctggttttttaaagagaaaaacccgattgaggtctacaaagttaacgggctgttaagtagcaatgaa

SEQ ID NO: 88600 - DNA, 75 bp, synthetic construct
  source 1..75: mol_type = other DNA
ggttccgggcatgatcgagcgctacactgctgccatcactggtgcagaaggcaagatccaccgtctggaagactg

SEQ ID NO: 88601 - DNA, 75 bp, synthetic construct
  source 1..75: mol_type = other DNA
atggaattagtattgaaagacgcgcagagcgcgctgactgtttccgaaactaccttcggtcgtgatttcaacgaa

SEQ ID NO: 88602 - DNA, 75 bp, synthetic construct
  source 1..75: mol_type = other DNA
ggcgcaggtggaaaaaatcggagtcaaagcagccgaggagatcgggcaactcatcaccgtcgcgcgtgaagaact

SEQ ID NO: 88603 - DNA, 75 bp, synthetic construct
  source 1..75: mol_type = other DNA
cgaccgaacaaagtggtacttatttaattttattcagcgccagtgatgccttgttttggttcttcccgataatcc

SEQ ID NO: 88604 - DNA, 75 bp, synthetic construct
  source 1..75: mol_type = other DNA
cggcgaaaaaagcggctaaccgttttgcggtgccaccaccaccccgcctggtggtgaataatgataatgagggca

SEQ ID NO: 88605 - DNA, 75 bp, synthetic construct
  source 1..75: mol_type = other DNA
ctaagaccgcacgaatataacggtgggttacccccaaacgaatcggaaaatcgatactggaaaaactctaacgcg

SEQ ID NO: 88606 - DNA, 75 bp, synthetic construct
  source 1..75: mol_type = other DNA
gccacggcaccctcacactcgacaatcctgacccggagatacagctccggatcgtccgcgaactcgccggcagga

SEQ ID NO: 88607 - DNA, 75 bp, synthetic construct
  source 1..75: mol_type = other DNA
aattgcctgttgtctatgtggtgggtgcctacacaaccacttgaagcattgaaggttgtagaagcgtggggcttt

SEQ ID NO: 88608 - DNA, 75 bp, synthetic construct
  source 1..75: mol_type = other DNA
tttttgggcgtgcatctcacccgcatgatcgatggcagcgtgaccgtcgggccaaacgcggtgctggctttcaaa

SEQ ID NO: 88609 - DNA, 75 bp, synthetic construct
  source 1..75: mol_type = other DNA
aacaccgaggtgctgaataaccgcaccactgatgtgataaacaaccatgccgaaaaaataggtaacaaccaggcg

SEQ ID NO: 88610 - DNA, 75 bp, synthetic construct
  source 1..75: mol_type = other DNA
caaagctgatggctctatcgactacagcaacatcactctcggtggcggcaatagcggtacgactcgcatcagcaa

SEQ ID NO: 88611 - DNA, 75 bp, synthetic construct
  source 1..75: mol_type = other DNA
cgggatgagcgctatctcagcagcagcacttccctggcaagccgagcgctggacagtctgcaggacggaatcagg

SEQ ID NO: 88612 - DNA, 75 bp, synthetic construct
  source 1..75: mol_type = other DNA
aaaggtgagcagttactctttaaagcgctcacatataatcagtggctccttgttggaaggaaaacatttgactct

SEQ ID NO: 88613 - DNA, 75 bp, synthetic construct
  source 1..75: mol_type = other DNA
tgcccagggcgaaatactgcatcctgaaattgctgtttatcaggagaaagttattcgtgaggttaaatcaggtaa

SEQ ID NO: 88614 - DNA, 75 bp, synthetic construct
  source 1..75: mol_type = other DNA
atgaatgcgccaggaattaaagatgcttatgtcaatgggcaaaaatatcgcacaacaaaccgtaatggagtggtg

SEQ ID NO: 88615 - DNA, 75 bp, synthetic construct
  source 1..75: mol_type = other DNA
aatcaaagtactacctgatggcgctggatgcaggcaccggaagtattcgggctgtgatattcgacctggaaggca

SEQ ID NO: 88616 - DNA, 75 bp, synthetic construct
  source 1..75: mol_type = other DNA
gtcaagttatagataatcggaaaaaaaataccaggatatgtagctggcattatggtggaaagctttttacaagat

SEQ ID NO: 88617 - DNA, 75 bp, synthetic construct
  source 1..75: mol_type = other DNA
atgaaaaagttaacagtggcggctttggcagtaacaactcttctctctggcagtgcctttgcgcatgaagcaggc

SEQ ID NO: 88618 - DNA, 75 bp, synthetic construct
  source 1..75: mol_type = other DNA
gataaagacaaacccgttacgatccgtatcaccgattacaagcgtaatctcgctcaaaatgcaaaatttcacgcg

SEQ ID NO: 88619 - DNA, 75 bp, synthetic construct
  source 1..75: mol_type = other DNA
tgaagcgtatggcaagcctgattgagtacacaacttcctgggctgtggagcaggggatcagatttaccgacagga

SEQ ID NO: 88620 - DNA, 75 bp, synthetic construct
  source 1..75: mol_type = other DNA
aactcgcgcgcgcactgcgcaacatgatccgcaccggccttgtcgtcgaaaccgaccttaacgccggtcgctgcc

SEQ ID NO: 88621 - DNA, 75 bp, synthetic construct
  source 1..75: mol_type = other DNA
cccctctgcctcggcggatgcgtggcatgtggttttccctgatggtgcggtcattgagtacgagcccgagaccag

SEQ ID NO: 88622 - DNA, 75 bp, synthetic construct
  source 1..75: mol_type = other DNA
acggacccgtcgccgagcaacttgcgagcgatccgatgctacgagaaagcggggtttgagaggcaaggtaccgta

SEQ ID NO: 88623 - DNA, 75 bp, synthetic construct
  source 1..75: mol_type = other DNA
ctgccattccgggacgttacactgttcaggcaccttataaaacgggtgccgggattggcgtcctagaattgcata

SEQ ID NO: 88624 - DNA, 75 bp, synthetic construct
  source 1..75: mol_type = other DNA
gcaagaataaaaatgtggcatccatgtatcctgagtacatgtaccatatttctgatagtgttgtttatacacttg

SEQ ID NO: 88625 - DNA, 75 bp, synthetic construct
  source 1..75: mol_type = other DNA
atgcgtgagctggttctgaataagggcagggcatttaccgtaacggacgtgaaggtgatgccggaatcactaccg

SEQ ID NO: 88626 - DNA, 75 bp, synthetic construct
  source 1..75: mol_type = other DNA
tggtactacgatgaatcggaccgtatcactcaccgcacggtgaacggcgaaccggcagagcagtggcagtatgat

SEQ ID NO: 88627 - DNA, 75 bp, synthetic construct
  source 1..75: mol_type = other DNA
gggatgtggcacctgcaattccagttaaaaatgttaatttggacgaagatgaactggtttggcagttaaatcttg

SEQ ID NO: 88628 - DNA, 75 bp, synthetic construct
  source 1..75: mol_type = other DNA
cctgattatcgatctcggtggcaccacgctcgatgccggtgtgattgtcggccagtttgatgatatcagtgcggt

SEQ ID NO: 88629 - DNA, 75 bp, synthetic construct
  source 1..75: mol_type = other DNA
cagcaacaatcagttgccccagggactggccgcatacgcgcttaatattattcgcgaacgctacaacgatttcgg

SEQ ID NO: 88630 - DNA, 75 bp, synthetic construct
  source 1..75: mol_type = other DNA
ggatcaggacgatatgttcaatgccctggtgaaacttcagtcacgctctgaagagatatttgggaagaaaccgat

SEQ ID NO: 88631 - DNA, 75 bp, synthetic construct
  source 1..75: mol_type = other DNA
tcaggcctggcctctggctcatgaccgtatcgaggttataggcgatccgcagatggcgctggccagggagattgc

SEQ ID NO: 88632 - DNA, 75 bp, synthetic construct
  source 1..75: mol_type = other DNA
tggccccggctggaaagcgccttctgataaccgcatcgcggaggatgcgcactatgtctaccgccacgatgaata

SEQ ID NO: 88633 - DNA, 75 bp, synthetic construct
  source 1..75: mol_type = other DNA
aagccaggccacacagcagagtcttgaagcctcccgccaatgggtggaacaactcgacaaaaacttcccgctgga

SEQ ID NO: 88634 - DNA, 75 bp, synthetic construct
  source 1..75: mol_type = other DNA
ccatgtaatgcacgtttacgctttaaaggtctctgctttgttgaacaaactgacccctggggtgcagcaagcgtt

SEQ ID NO: 88635 - DNA, 75 bp, synthetic construct
  source 1..75: mol_type = other DNA
acctcgaatttatcgccgaaagtctctgtttatacgcgatcaagccgaaaaaaggcgaatctgcgctggagacca

SEQ ID NO: 88636 - DNA, 75 bp, synthetic construct
  source 1..75: mol_type = other DNA
ttatatctgacgtaatgaataaacaaaccgatatctcaccggaagctaaaacagcagcgaatttcgctggttgcg

SEQ ID NO: 88637 - DNA, 75 bp, synthetic construct
  source 1..75: mol_type = other DNA
tatggtaccaaatttttccagaccgtttctgtaacggcagacctgaaatatccccagaaggggtagaaccgtggg

SEQ ID NO: 88638 - DNA, 75 bp, synthetic construct
  source 1..75: mol_type = other DNA
tttgcatgagctcaatcacctttacaaggagaaattatcaagaagagagttattagcttttcatagtcgttataa

SEQ ID NO: 88639 - DNA, 75 bp, synthetic construct
  source 1..75: mol_type = other DNA
tgacagagtttagtcgttcttatatggacaaattaaaggatgtatcggggtttgtggtttgtgctaaatctccca

SEQ ID NO: 88640 - DNA, 75 bp, synthetic construct
  source 1..75: mol_type = other DNA
atgaaacgcttgattgcgctggctttgctatgcgcgctttctggctgcgcccagaacacgcttccatctgcattt

SEQ ID NO: 88641 - DNA, 75 bp, synthetic construct
  source 1..75: mol_type = other DNA
atgctgactactatgtctctcggtgcgcttggaccagaaaaggcgtttgctgttcaggataagatggttggtcgt

SEQ ID NO: 88642 - DNA, 75 bp, synthetic construct
  source 1..75: mol_type = other DNA
tatcgttaggagcagtagggacttcggcggtgagtctgggattaacggcaaattatgcacgtaccggagggcagg

SEQ ID NO: 88643 - DNA, 75 bp, synthetic construct
  source 1..75: mol_type = other DNA
ggagtgcattgaaagaagcgtggttctccgatccaaaaggtgcacggggtgatttcagttttgtggatatcgact

SEQ ID NO: 88644 - DNA, 75 bp, synthetic construct
  source 1..75: mol_type = other DNA
ggctggacaaatcacgcctggtggagatgaagctggcgggcgatcgtgacgaagagctgtaccgtgaactattgc

SEQ ID NO: 88645 - DNA, 75 bp, synthetic construct
  source 1..75: mol_type = other DNA
tatatcaacgggtcaatgtgactgcgatgaaatagcagagtcgaacttcaatcgtatgattgcctatatgtctaa

SEQ ID NO: 88646 - DNA, 75 bp, synthetic construct
  source 1..75: mol_type = other DNA
gggtaatgttccacagcgatagtaataatgccggtatcagtttttatcatcactctgtttgctgtttaaccagac

SEQ ID NO: 88647 - DNA, 75 bp, synthetic construct
  source 1..75: mol_type = other DNA
gccgctgtcgcgtccgggcgctgtctgcggcccgcatgaaagaactggggctacaggtcagttatggtgcgtcat

SEQ ID NO: 88648 - DNA, 75 bp, synthetic construct
  source 1..75: mol_type = other DNA
ctacccggactcgccgctgaaagacaaaatggagtactacattgagcctgcggagcaaacgccggaagtgcaggc

SEQ ID NO: 88649 - DNA, 75 bp, synthetic construct
  source 1..75: mol_type = other DNA
acccaaattatggtgggctgggtgggggcaccgaaaggtgcgccggtttccgtatgcgccggttacgccaaccct

SEQ ID NO: 88650 - DNA, 75 bp, synthetic construct
  source 1..75: mol_type = other DNA
gcgcctacacctggtttaaccgcttatgtgcgatacgctatatggagctgcacggttatcttgatcacggcttcc

SEQ ID NO: 88651 - DNA, 75 bp, synthetic construct
  source 1..75: mol_type = other DNA
tatgcctggatatcagttatatggggcttctgcatctggcacaggtcacaggagccattcagtgggggcaatgca

SEQ ID NO: 88652 - DNA, 75 bp, synthetic construct
  source 1..75: mol_type = other DNA
aaagaagccgttgaatatgggcgagcaaaaaagtggatagcgcacgcgcccttattgcccggggatggggagtaa

SEQ ID NO: 88653 - DNA, 75 bp, synthetic construct
  source 1..75: mol_type = other DNA
cagagcacggtcaacagtgtccttatgtcagaccggagcgcaaggagatacaactgattaaacgtctgcagcaat

SEQ ID NO: 88654 - DNA, 75 bp, synthetic construct
  source 1..75: mol_type = other DNA
acttgctctcgccaaatctgaaaactacaggtaaattgatgatggcagatgataaaagtaaagtgtatgtctatg

SEQ ID NO: 88655 - DNA, 75 bp, synthetic construct
  source 1..75: mol_type = other DNA
actcaatcctcttcacaacaagagcaaaaaagtgatgaagagaccaaaaaaaatgcgatgaagctaataaattaa

SEQ ID NO: 88656 - DNA, 75 bp, synthetic construct
  source 1..75: mol_type = other DNA
gacaaagaactctgtttcgtcctttttgaacattttcgtatttacgtcaccctggcggatggctttaacagccac

SEQ ID NO: 88657 - DNA, 75 bp, synthetic construct
  source 1..75: mol_type = other DNA
taaaattgaagataaaaacgcgatggagcgtatttgtcgtattcgccagctgccggacggtcacaactttaccct

SEQ ID NO: 88658 - DNA, 75 bp, synthetic construct
  source 1..75: mol_type = other DNA
aaaacatgctgattacatttccagatccggcgaatataaaaactataaatcgcgggaggatctggaattttcttc

SEQ ID NO: 88659 - DNA, 75 bp, synthetic construct
  source 1..75: mol_type = other DNA
tcgtaccggatgccttacccgtggtgcgtaaagccagctggtactgcagacaatgtcaccacgattattatgggg

SEQ ID NO: 88660 - DNA, 75 bp, synthetic construct
  source 1..75: mol_type = other DNA
gtcccaggtctcggatctcttaaaaatgaccgccaacattgtcgataccggtatcggcaacgatctgcctacgat

SEQ ID NO: 88661 - DNA, 75 bp, synthetic construct
  source 1..75: mol_type = other DNA
atgccgatgaaatttgatgagatacttaaacagcgtgataaataccatgctgacaacatggagacgatgaatatc

SEQ ID NO: 88662 - DNA, 75 bp, synthetic construct
  source 1..75: mol_type = other DNA
agaaagaaaaaactaaatgaatgtcctgcggctgatgcaggtacagtaagtaaaattatttcaagctttggccga

SEQ ID NO: 88663 - DNA, 75 bp, synthetic construct
  source 1..75: mol_type = other DNA
atttcgcttttgctggttttattctgcatgacgccgaagatgtgatttcaccgatggaattgcgtctgttcaact

SEQ ID NO: 88664 - DNA, 75 bp, synthetic construct
  source 1..75: mol_type = other DNA
agagtatggtcagtctgttactgatgaatgcatatcatggcaacagacagaacaattattatcaactctggcagc

SEQ ID NO: 88665 - DNA, 75 bp, synthetic construct
  source 1..75: mol_type = other DNA
gaacggtgagggttgtgtgccgtgagtggagtgtcacggataatgcccggcacagtgatttcagttgcacgattg

SEQ ID NO: 88666 - DNA, 75 bp, synthetic construct
  source 1..75: mol_type = other DNA
ttatgaacaacgaagcccaaacggacttaatcattctctgcgtgtttttacctgtgatttcagggttgaggcgaa

SEQ ID NO: 88667 - DNA, 75 bp, synthetic construct
  source 1..75: mol_type = other DNA
acagacgttaggcatgaaggtgtcgcgaggatataacgctggcggggcgggaatgacctttgtcgcgccgttaat

SEQ ID NO: 88668 - DNA, 75 bp, synthetic construct
  source 1..75: mol_type = other DNA
tataccttcacccatggccgcgtcagcgtctttgcgcaaaacctgtttgattctgacaagcggattatggtgatc

SEQ ID NO: 88669 - DNA, 75 bp, synthetic construct
  source 1..75: mol_type = other DNA
ccgcactgaatgagttgattgaattaccagataatctgcgtggtcgcatggctaggctgattgaacgactggaac

SEQ ID NO: 88670 - DNA, 75 bp, synthetic construct
  source 1..75: mol_type = other DNA
gtcgcgaagaaaattctggtgacgtgcgcgctgccgtacgctaacggctcaatccacctcggccatatgctggag

SEQ ID NO: 88671 - DNA, 75 bp, synthetic construct
  source 1..75: mol_type = other DNA
tttctccctggcaggaatggcagggaaaactctctctcgcattaacctctgatatccagcaactgcgttatcagg

SEQ ID NO: 88672 - DNA, 75 bp, synthetic construct
  source 1..75: mol_type = other DNA
gtacaacgattatatctcagcgatcgcctatgctcgggcggaagaagaatgggagagaaaattctccccctgtcc

SEQ ID NO: 88673 - DNA, 75 bp, synthetic construct
  source 1..75: mol_type = other DNA
gtgtacaacctaattttttttactaacatcctcagacttcttgaagaaagagacatgacaaagcaggaactatcc

SEQ ID NO: 88674 - DNA, 75 bp, synthetic construct
  source 1..75: mol_type = other DNA
gcttgttctagtgcggcatgtcgggttgatgtagagcagcaaatgaacgcttatgtacttggtagttattatgct

SEQ ID NO: 88675 - DNA, 75 bp, synthetic construct
  source 1..75: mol_type = other DNA
gcgtaaagccagccggcactgcagacaatgtcatcacgattattatggggagcggtactgcacgcactgccatac

SEQ ID NO: 88676 - DNA, 75 bp, synthetic construct
  source 1..75: mol_type = other DNA
gatccggcgtaaacactccggcaactggtactggtggtacagctggaacagctactggcgggctaatcaatatcc

SEQ ID NO: 88677 - DNA, 75 bp, synthetic construct
  source 1..75: mol_type = other DNA
gtgctgacccaggggcaagcgggtaagggcaacgcggtgcttaattttggcccaggaaaattaagcatggataac

SEQ ID NO: 88678 - DNA, 75 bp, synthetic construct
  source 1..75: mol_type = other DNA
ttgatagcaacggacgtctgacgggcgcccgtactgcacaggccgcaccttatgctcactacacctgccacttgt

SEQ ID NO: 88679 - DNA, 75 bp, synthetic construct
  source 1..75: mol_type = other DNA
ctgctgcatgcatttgtgaaaaaaacgcaaaagacaccaacgaaagctattgaaattgccaggatgcgtctgaag

SEQ ID NO: 88680 - DNA, 75 bp, synthetic construct
  source 1..75: mol_type = other DNA
cagctacacgacatggtagtgcatgttgataccagcagcagacggccgatcaattccacctgccgcttccagtac

SEQ ID NO: 88681 - DNA, 75 bp, synthetic construct
  source 1..75: mol_type = other DNA
acggccagcgtgacggcttctgattctgttactgccacggtaccggtggtcacggtgaaagcgtcaacccgtgtc

SEQ ID NO: 88682 - DNA, 75 bp, synthetic construct
  source 1..75: mol_type = other DNA
cagcactggatgaactgcttgaactaccagatgatttgcgaggtcgcatgaccagattaattgagcgactggaga

SEQ ID NO: 88683 - DNA, 75 bp, synthetic construct
  source 1..75: mol_type = other DNA
tattggcaatggcgcgaaactggaagaaattatcgcctgtctggataatttcgatttgtgggtgaatatcgtaac

SEQ ID NO: 88684 - DNA, 75 bp, synthetic construct
  source 1..75: mol_type = other DNA
atattggtacgcttaactcaacaacaatgtcattcagcggtggtgctggttggttcaaattagcaacggtaacca

SEQ ID NO: 88685 - DNA, 75 bp, synthetic construct
  source 1..75: mol_type = other DNA
acagagtgagcagacaggaccgaactgaacctgaacgggttaaatcaccgtcacgtggattttctatgggattct

SEQ ID NO: 88686 - DNA, 75 bp, synthetic construct
  source 1..75: mol_type = other DNA
tccaccagtatgcagggtgcaggtttcgcactgaaagattctaagggacaggaagtgaaacagtctcttgggcag

SEQ ID NO: 88687 - DNA, 75 bp, synthetic construct
  source 1..75: mol_type = other DNA
tacagtgatggggattgttttttctggcatgtttgccgcaggtctgatcttgtatattgcagtcaaaccagacgt

SEQ ID NO: 88688 - DNA, 75 bp, synthetic construct
  source 1..75: mol_type = other DNA
tcatcatgacgtttaccgttatcagtttcaacgcacgcacaaagggaaacgctcatagacaggatctgttatccc

SEQ ID NO: 88689 - DNA, 75 bp, synthetic construct
  source 1..75: mol_type = other DNA
gaaagccattcctgtactgggtatccgtaatgcggatgaaaacggttttgcaggtattgcaagcggtaatattat

SEQ ID NO: 88690 - DNA, 75 bp, synthetic construct
  source 1..75: mol_type = other DNA
cggtaaaggcggcacctactttggcgcaacgggctgtggcaaaagttacaccatgcaatttttaacgcgtctttt

SEQ ID NO: 88691 - DNA, 75 bp, synthetic construct
  source 1..75: mol_type = other DNA
tgatgaagaagggaatgtcgatgagtttattttcttctccggggcatattgtggttgccggacaatccggtggcg

SEQ ID NO: 88692 - DNA, 75 bp, synthetic construct
  source 1..75: mol_type = other DNA
tcgctgttgttctcgacctgttcgcaagaaaaccagtgggctgggcaatgtcgtactcgccggatagcagactca

SEQ ID NO: 88693 - DNA, 75 bp, synthetic construct
  source 1..75: mol_type = other DNA
atgaatatcagaaaactgttttgtccgggcaacacaccccggattttattgtttttattcttttttgttgtttct

SEQ ID NO: 88694 - DNA, 75 bp, synthetic construct
  source 1..75: mol_type = other DNA
atttctctgctcattgcgcctggcgccattgcggtactcctgacacaacgctttcatattgcgctcctgctggcg

SEQ ID NO: 88695 - DNA, 75 bp, synthetic construct
  source 1..75: mol_type = other DNA
caaaatattcatattggtgattttaatatcagtgattttcaggctgcgaataccgtaagcactgctgctgatttg

SEQ ID NO: 88696 - DNA, 75 bp, synthetic construct
  source 1..75: mol_type = other DNA
gtttttaatgataataaaattattcatattagaccatcaggcaacgcgccagagttgagatgctattgtgagtca

SEQ ID NO: 88697 - DNA, 75 bp, synthetic construct
  source 1..75: mol_type = other DNA
ttagcgggggaagcccgcaaggccgacgcgctgtatattcttggcgatctgtttgaagcatggattggcgacgac

SEQ ID NO: 88698 - DNA, 75 bp, synthetic construct
  source 1..75: mol_type = other DNA
gcccgtaagcagggcgagacggtggaggtggatgaggttcctgtttaccggcagaaaaagacgcaggcgtgccac

SEQ ID NO: 88699 - DNA, 75 bp, synthetic construct
  source 1..75: mol_type = other DNA
agcatcgacgctgattagctgttccgggctgatggctgaccggctggtgaaaatgctcggcctcgaaccgggctt

SEQ ID NO: 88700 - DNA, 75 bp, synthetic construct
  source 1..75: mol_type = other DNA
ccattgcggtactcctgacacaacgctttcatattgcgctcctgctggcgactggcatatcgatattggtctcaa

SEQ ID NO: 88701 - DNA, 75 bp, synthetic construct
  source 1..75: mol_type = other DNA
aaaacatggagtacactgatggaactgttgtttctgctgcctatgcactgggtattgcaaacggtcagactattg

SEQ ID NO: 88702 - DNA, 75 bp, synthetic construct
  source 1..75: mol_type = other DNA
catcaatgctcacgcgaaggaaaatgtcgatccacaggatctcccgactagtacaacaaccagagagcaacatct

SEQ ID NO: 88703 - DNA, 75 bp, synthetic construct
  source 1..75: mol_type = other DNA
atttagcaacgcattattcatcgctgtggctttatcggctctggtatcaacgaccggcgtttacctctcttattt

SEQ ID NO: 88704 - DNA, 75 bp, synthetic construct
  source 1..75: mol_type = other DNA
cactactgggtaaatcacttgcacaaatggggctggtgaagcatggaagaccagaccgagggaatggcgtgttct

SEQ ID NO: 88705 - DNA, 75 bp, synthetic construct
  source 1..75: mol_type = other DNA
gatgaaagagctggaagcagcgattgaatcgggacgctttcatcatgacggcaatcccatcatgacctggtgtat

SEQ ID NO: 88706 - DNA, 75 bp, synthetic construct
  source 1..75: mol_type = other DNA
cagataagttctcctgaccagacctggtcagtggatactgccgatgcacgtacagagaatggacagcttgttttt

SEQ ID NO: 88707 - DNA, 75 bp, synthetic construct
  source 1..75: mol_type = other DNA
tagcattatgctttgcaacctgtttagcttttagctcttcagctattgcagatatcgtcatttcaggtacacgcg

SEQ ID NO: 88708 - DNA, 75 bp, synthetic construct
  source 1..75: mol_type = other DNA
ttgtccgcgcttatctgagagcttcaacagctgaacaggatgcttcgcgtgcccaggaaaccatcgaagcttttg

SEQ ID NO: 88709 - DNA, 75 bp, synthetic construct
  source 1..75: mol_type = other DNA
atcaattttcctaaaattccagagaatttcaatttggtttttgagcagttttttttgtctaatataaattacaca

SEQ ID NO: 88710 - DNA, 75 bp, synthetic construct
  source 1..75: mol_type = other DNA
ggaaatcaacggtaataacggaaaagttatccaggacggcgatctggatgtcagcggcggcggtcacggcattga

SEQ ID NO: 88711 - DNA, 75 bp, synthetic construct
  source 1..75: mol_type = other DNA
ctggtaccgccgaaagtgcgttttcttattgcggctgtggacgtgcagggcgggaagaaccgacggtttgtggtg

SEQ ID NO: 88712 - DNA, 75 bp, synthetic construct
  source 1..75: mol_type = other DNA
gtcactggtgagagtgtgcgcagggattatatgtcggtatatggctatcccgtgccaaccacaccgtggctgaat

SEQ ID NO: 88713 - DNA, 75 bp, synthetic construct
  source 1..75: mol_type = other DNA
aagttatagctattggtcaaattaatatttccggcaatgtcacaccagcgaactggtggaaacatattcggctac

SEQ ID NO: 88714 - DNA, 75 bp, synthetic construct
  source 1..75: mol_type = other DNA
ccgctgcctacggcaagatgcctctgtcgagattgagtgccatgatatcctcatgtcagcagagaatgctgaaga

SEQ ID NO: 88715 - DNA, 75 bp, synthetic construct
  source 1..75: mol_type = other DNA
caaccgataaaaggtaacgagatgaacgaggtggttcaggcctttggcctggccagtgaccagttagccactcaa

SEQ ID NO: 88716 - DNA, 75 bp, synthetic construct
  source 1..75: mol_type = other DNA
aatagtgaaggtgcattctccatccacaatcacgtggcagacaatgtgttgctggaaaacggtggtcatttagac

SEQ ID NO: 88717 - DNA, 75 bp, synthetic construct
  source 1..75: mol_type = other DNA
agtggcaatataatcacaacggtgagctcgttattacgggcgacaataccacagtaaacaacactggaaaaacca

SEQ ID NO: 88718 - DNA, 75 bp, synthetic construct
  source 1..75: mol_type = other DNA
cttaaccggttatggctgcatgactgtatgccgagaaactccgaatcaagggcaatcagttacgcgctcaagcta

SEQ ID NO: 88719 - DNA, 75 bp, synthetic construct
  source 1..75: mol_type = other DNA
tgaagcggtatgccgcctgggtacgtgctacaggaaataccggcacacagttcgtgaagcaggctgcgacgttct

SEQ ID NO: 88720 - DNA, 75 bp, synthetic construct
  source 1..75: mol_type = other DNA
gtcgcaagactgaaagacggaggtactcagtttgaagttatgacgcgcaaacagattgagctggtgcgcagccag

SEQ ID NO: 88721 - DNA, 75 bp, synthetic construct
  source 1..75: mol_type = other DNA
cagtcattatacgagcaggcagttccggcagttactgtggagataccggatcaggcagagtatgagtcggcgtgg

SEQ ID NO: 88722 - DNA, 75 bp, synthetic construct
  source 1..75: mol_type = other DNA
tgggctgtggcgcgcaaacgggaaaagcgcgagcttgaactgatgattgacgagtacctgttatacgcctgttga

SEQ ID NO: 88723 - DNA, 75 bp, synthetic construct
  source 1..75: mol_type = other DNA
aggatccgattgggctgaaggggggatggaacctgtatacatatccgctgagcccggtgaatagcatggatccat

SEQ ID NO: 88724 - DNA, 75 bp, synthetic construct
  source 1..75: mol_type = other DNA
actctcggcggtgaagccaccgacatcgtggtgatgcgcattatgtgtcgtcgcggcttcgaaatggactttgct

SEQ ID NO: 88725 - DNA, 75 bp, synthetic construct
  source 1..75: mol_type = other DNA
ccgcaaagcgaactggtgatgaacaggttgaagatccacgagccaaaactggacgtgcgcgatgtgcttcccctt

SEQ ID NO: 88726 - DNA, 75 bp, synthetic construct
  source 1..75: mol_type = other DNA
tttttcccgaacagcgatccttttataggtcttatagccgcctttgctacctttggtgtcggttttttgactcgt

SEQ ID NO: 88727 - DNA, 75 bp, synthetic construct
  source 1..75: mol_type = other DNA
cccgcaagggtttccccgctctggaatgtctgacgctcaccgtcatgcataaaaccggcggcgtgacgttccgcg

SEQ ID NO: 88728 - DNA, 75 bp, synthetic construct
  source 1..75: mol_type = other DNA
actgtttgggcagtggcagtacaggaggttcgggagggtgggagccagatgaggatggcgaaataagaaatacct

SEQ ID NO: 88729 - DNA, 75 bp, synthetic construct
  source 1..75: mol_type = other DNA
tttactccgccggtgagcatctggagctctgctgtggtaaggcaaggctggtgctgacgaaggacggacaaattt

SEQ ID NO: 88730 - DNA, 75 bp, synthetic construct
  source 1..75: mol_type = other DNA
atcgagttgcgccagaaacaatacgagtattatcgtgatttactgttcagtttcccgaaacctgatactgtcagt

SEQ ID NO: 88731 - DNA, 75 bp, synthetic construct
  source 1..75: mol_type = other DNA
gcgcagttaaaacagcgtcacgcaacgatgcgttttgaagaaatgaacgacgtcgaacgtgaacgactggtatgt

SEQ ID NO: 88732 - DNA, 75 bp, synthetic construct
  source 1..75: mol_type = other DNA
tcactctcggcggtgaagccaccgacatcgtggtgatgcgcattatgtgtcgtcgcggcttcgaaatggactttg

SEQ ID NO: 88733 - DNA, 75 bp, synthetic construct
  source 1..75: mol_type = other DNA
gtgcgacctgtccggattgtcacgttccgcacgagtttgtgccgaagatgatacgcaagctcaaagcaagtaaag

SEQ ID NO: 88734 - DNA, 75 bp, synthetic construct
  source 1..75: mol_type = other DNA
agctggccgttatcgtgcgccagcttatgcagaaattcagcgacccgatggcagcgcgcactctgctccagtcgc

SEQ ID NO: 88735 - DNA, 75 bp, synthetic construct
  source 1..75: mol_type = other DNA
atgagccagtttttttatattcatcctgataacccgcagcaacgtctgatcaaccaggcggtggagatcgtgcgt

SEQ ID NO: 88736 - DNA, 75 bp, synthetic construct
  source 1..75: mol_type = other DNA
atcatctttcagatctctcgctcatcgcaaagtaaagcgatccaactggcgacccattccgattacagccacacc

SEQ ID NO: 88737 - DNA, 75 bp, synthetic construct
  source 1..75: mol_type = other DNA
cgtctgcccgtatccgcaccagtcgtccggaaaatgactcaaacaccgtgcggcaaaagtattaccagtgtaata

SEQ ID NO: 88738 - DNA, 75 bp, synthetic construct
  source 1..75: mol_type = other DNA
tgagttcccgcagccgctgcacgatgcgctggataaattccaggccgacaccggtatcgacatcgacatgcacat

SEQ ID NO: 88739 - DNA, 75 bp, synthetic construct
  source 1..75: mol_type = other DNA
caaagccggagaatcccgcctgccagcagtgggggcttaaatgtgctattaccccctgttttggtgcccgcctgg

SEQ ID NO: 88740 - DNA, 75 bp, synthetic construct
  source 1..75: mol_type = other DNA
taaaggccgtgaagatggtctgcgcgatctggagcgcaaggcattgcaggtgggcaccgatgaagacggtggcta

SEQ ID NO: 88741 - DNA, 75 bp, synthetic construct
  source 1..75: mol_type = other DNA
gtttatgaggtcgacagccagtggggaaaagtgtatatcctgcgcgtattgcatactgcacagaagtggccatag

SEQ ID NO: 88742 - DNA, 75 bp, synthetic construct
  source 1..75: mol_type = other DNA
ttcgggaagcccgagtcattcgtgaccggataatgtatgagtttttcaccatccgtgatcgactgaaaccaaagc

SEQ ID NO: 88743 - DNA, 75 bp, synthetic construct
  source 1..75: mol_type = other DNA
cagcctggcctgtgaactatttcctgagtggaaacaggcgtttgacgggctactggctaacgggggaatacgtca

SEQ ID NO: 88744 - DNA, 75 bp, synthetic construct
  source 1..75: mol_type = other DNA
tcgtgagtacattgcggagcagaacctgatggccgccattgaactggacgaacggattggttattcagccagcag

SEQ ID NO: 88745 - DNA, 75 bp, synthetic construct
  source 1..75: mol_type = other DNA
gtttttattcttttttgttgtttctgtcataaccacaattgcatgcggatacactgagaagaatgccaccgggaa

SEQ ID NO: 88746 - DNA, 75 bp, synthetic construct
  source 1..75: mol_type = other DNA
ttgtcggcctgtttaaaggtgagttgcagttctccgatccggaattccataaaaaagaaacgacgatgatgggta

SEQ ID NO: 88747 - DNA, 75 bp, synthetic construct
  source 1..75: mol_type = other DNA
catcattaatgatgcaaaaaaatcgtcaatattcgatgaatacgcggttgttgttgaacatcaacttcgtggctg

SEQ ID NO: 88748 - DNA, 75 bp, synthetic construct
  source 1..75: mol_type = other DNA
tgggacgacgaaaacgtccataaattgatggatttgtcgatcaataaaaactggatcgacaaagaagaatatccg

SEQ ID NO: 88749 - DNA, 75 bp, synthetic construct
  source 1..75: mol_type = other DNA
tgtgctaaaagcgggcaatggtgagactatcctcaccagcgagctgtatacctcaaaagcctctgcggaaaaggg

SEQ ID NO: 88750 - DNA, 75 bp, synthetic construct
  source 1..75: mol_type = other DNA
ttaatctggataaagcccgtcgattgctgtggccagtcaagaaaaaatacggctccagtatttcctggggagacc

SEQ ID NO: 88751 - DNA, 75 bp, synthetic construct
  source 1..75: mol_type = other DNA
gtctgcgcggctggcaggttccggccttcactctcggcggtgaagccaccgacatcgtggtgatgcgcattatgt

SEQ ID NO: 88752 - DNA, 75 bp, synthetic construct
  source 1..75: mol_type = other DNA
cgatttcacgccaccggtaaagggggaaacgcttgaaactcatgccccggcattctggcgctggctggaccgggc

SEQ ID NO: 88753 - DNA, 75 bp, synthetic construct
  source 1..75: mol_type = other DNA
agtgctgcctgaaggtgcggtaacccttctttcaacacagatttacgacctgaatatttataaacaggggcacgc

SEQ ID NO: 88754 - DNA, 75 bp, synthetic construct
  source 1..75: mol_type = other DNA
ttacagggatgcactggcggttgatccgaacgggcagcttttatcccgctacgagtctggagcgtggaaagttat

SEQ ID NO: 88755 - DNA, 75 bp, synthetic construct
  source 1..75: mol_type = other DNA
gaataatgtggcactgccagtaaacgctttccctgaagcagtaaaagtcacactccggcatgtcagtgaagtctc

SEQ ID NO: 88756 - DNA, 75 bp, synthetic construct
  source 1..75: mol_type = other DNA
cactgaaaattattcaatatgggaaacagcaggctcgtttaagggggccatagtgccattgagtccctctacaaa

SEQ ID NO: 88757 - DNA, 75 bp, synthetic construct
  source 1..75: mol_type = other DNA
cttttgtgaaatcagcgattgcagcaatggtgggttctgcacctgcggcactggatacactgaacgaactggcgg

SEQ ID NO: 88758 - DNA, 75 bp, synthetic construct
  source 1..75: mol_type = other DNA
ccattactacagggttaatttccccagacaattcccaaatgcacaaatagcaacgctggcaacactagcgagtta

SEQ ID NO: 88759 - DNA, 75 bp, synthetic construct
  source 1..75: mol_type = other DNA
gaagttcgcgcgggcgacatcgcagctgcaatcggtctgaaagacgtaaccactggtgacaccctgtgtgacccg

SEQ ID NO: 88760 - DNA, 75 bp, synthetic construct
  source 1..75: mol_type = other DNA
gcaaatcatgggcagtgaccgatgtggtgggtaagcccccggagtggttccagttcgatatggaaaaccgcctgc

SEQ ID NO: 88761 - DNA, 75 bp, synthetic construct
  source 1..75: mol_type = other DNA
ggagtgaacatacacgtcagaagttagagcaagaagccaaagcaatgctggagatcatgcaagaaaagaaaaaca

SEQ ID NO: 88762 - DNA, 75 bp, synthetic construct
  source 1..75: mol_type = other DNA
gcgcagactgtccgaatattgatgcaataaaacggcacaaacaacaggccggagccatcagggaatacactgagt

SEQ ID NO: 88763 - DNA, 75 bp, synthetic construct
  source 1..75: mol_type = other DNA
atttaggcacggttgaacccgattttgaaaataatgtcctgtatggaaaactggcgtttattcgggacctggtaa

SEQ ID NO: 88764 - DNA, 75 bp, synthetic construct
  source 1..75: mol_type = other DNA
caactggtggccacgggtaagagccagaccatgaacagccgccaccttacggggcatgccgtggatgttgtggct

SEQ ID NO: 88765 - DNA, 75 bp, synthetic construct
  source 1..75: mol_type = other DNA
ccttttcactgcaaaccacaccttaccagagtgcgaataaaaccaactcctggcggcacgtcaaaaacgatcgcg

SEQ ID NO: 88766 - DNA, 75 bp, synthetic construct
  source 1..75: mol_type = other DNA
caacggggtacttgatacccaaagcggcctgttcagcccgcacagtaaatcacactggctgcgcacgctgtgcga

SEQ ID NO: 88767 - DNA, 75 bp, synthetic construct
  source 1..75: mol_type = other DNA
atctccctgtttccgtgctggaagaggtgatactgcgtattacccgccccgaaagcccggatctggtcgtcagca

SEQ ID NO: 88768 - DNA, 75 bp, synthetic construct
  source 1..75: mol_type = other DNA
caggatacgggctggcgaaacttttttgtcgatccccaggtcagcaggctgatcggtgaagccctgaataataac

SEQ ID NO: 88769 - DNA, 75 bp, synthetic construct
  source 1..75: mol_type = other DNA
cgacggcgtgccggtgcagtacaagcaggatgacaaagttatccacgacaaagcgctactgatggattttaacca

SEQ ID NO: 88770 - DNA, 75 bp, synthetic construct
  source 1..75: mol_type = other DNA
atgttaactggggcttttctctatctgccgttggtgttcatgcccgaggcagatagcctcaagcacccgcagcta

SEQ ID NO: 88771 - DNA, 75 bp, synthetic construct
  source 1..75: mol_type = other DNA
gtaatgtgctgctggaaaaccattcgtctctagaggtcagggagaattttactggtggtattgaggcttatgaca

SEQ ID NO: 88772 - DNA, 75 bp, synthetic construct
  source 1..75: mol_type = other DNA
tgttcactctcagttggcgtaaggtagtgtctttttcattattgatggtgtctgttgtcctaggagtggtcaata

SEQ ID NO: 88773 - DNA, 75 bp, synthetic construct
  source 1..75: mol_type = other DNA
ccgcgtttgttcaggcggctctgacggctcttattaatggtgcgccagccacgttggacacgctgaaagaaatag

SEQ ID NO: 88774 - DNA, 75 bp, synthetic construct
  source 1..75: mol_type = other DNA
gttcaacgttgactacctgggtggtcaaattggtacttttgccatcaacttctcccgcccggcgggtcaggtaat

SEQ ID NO: 88775 - DNA, 75 bp, synthetic construct
  source 1..75: mol_type = other DNA
cccaccgccacaccgccagcaggctggttacagtgcaacggagctacgttcaccaaagaacaatatcctgttctg

SEQ ID NO: 88776 - DNA, 75 bp, synthetic construct
  source 1..75: mol_type = other DNA
acagcgaaacacccaacttccgcccgtgtcgggcaacccggagccggtcaattccccggccattattcaggagtt

SEQ ID NO: 88777 - DNA, 75 bp, synthetic construct
  source 1..75: mol_type = other DNA
ttcctgatattgatgaatctgctcaccccttccatgtctgttatggtggatatttattaaatcctggtgtttcag

SEQ ID NO: 88778 - DNA, 75 bp, synthetic construct
  source 1..75: mol_type = other DNA
tctcaaggccgaggcggtcgcccattgggagcgcctgccaagcgacgagctggccaatctgttcgccctctatct

SEQ ID NO: 88779 - DNA, 75 bp, synthetic construct
  source 1..75: mol_type = other DNA
accgggaaggatgtccgcgagctggggtatccctaccagatgaatcaggatgagtccgtcagacttctggcgcat

SEQ ID NO: 88780 - DNA, 75 bp, synthetic construct
  source 1..75: mol_type = other DNA
gcagattcagagtagtaagtaaagataactggcaacatacagtatcggaagaacgcgctatccgttgtgccaaaa

SEQ ID NO: 88781 - DNA, 75 bp, synthetic construct
  source 1..75: mol_type = other DNA
tgccatcaacagcacgtctgaaatactggccgccacaccgaaagcggtcaaggctgcatacgatctggcaaacgg

SEQ ID NO: 88782 - DNA, 75 bp, synthetic construct
  source 1..75: mol_type = other DNA
agatactcagctactttgagccggataacctcgaatgggtgacaggtgagattggtgcgccgccgttcgatgtat

SEQ ID NO: 88783 - DNA, 75 bp, synthetic construct
  source 1..75: mol_type = other DNA
tgccagcgccgccgcgctcggtgtgccgctaaaaattacccatatggcggtcggcgatggcggcggagtattgcc

SEQ ID NO: 88784 - DNA, 75 bp, synthetic construct
  source 1..75: mol_type = other DNA
ttgaaaaacagccagcaactatgcgccggataattggtaagcatcttgccgtccctcgctggcaggatacatgtg

SEQ ID NO: 88785 - DNA, 75 bp, synthetic construct
  source 1..75: mol_type = other DNA
ccgactaacaaaccgaacctggtgtgcggtccggtacaaatctgctggcataaattcgcccgctactgggatgtg

SEQ ID NO: 88786 - DNA, 75 bp, synthetic construct
  source 1..75: mol_type = other DNA
cgtttgaggaacttttgacgcgcatatttgatgaataccaacaacaacgctcaatctttggtattcccgagcaac

SEQ ID NO: 88787 - DNA, 75 bp, synthetic construct
  source 1..75: mol_type = other DNA
ccggataattggtaagcatcttgccgtccctcgctggcaggatacatgtgattattataatcagatgatggagcg

SEQ ID NO: 88788 - DNA, 75 bp, synthetic construct
  source 1..75: mol_type = other DNA
ggcaaaacatcttgccgcaccggacccgcattcacagtatgcacagaaagaaagtcctacgtttaccgggacacc

SEQ ID NO: 88789 - DNA, 75 bp, synthetic construct
  source 1..75: mol_type = other DNA
ctggcactgaaagcgccgctgtcgagtccggcactcactggaacgccaacagcccccactgcggcgcagtcggtc

SEQ ID NO: 88790 - DNA, 75 bp, synthetic construct
  source 1..75: mol_type = other DNA
gacttaacagcaccagtggccggatggcacggcaggcatatgactggctgagtctggcaccgctctttctggata

SEQ ID NO: 88791 - DNA, 75 bp, synthetic construct
  source 1..75: mol_type = other DNA
ctttctcactcgctctgcggctgaccttttttatcagcctgtccacgatactggcttttatcgcattcacctggt

SEQ ID NO: 88792 - DNA, 75 bp, synthetic construct
  source 1..75: mol_type = other DNA
ttggcggtaaaaatgtggcctggctgcactctgaagtcaccgcatggatggccggccgcattgccggacgcaaac

SEQ ID NO: 88793 - DNA, 75 bp, synthetic construct
  source 1..75: mol_type = other DNA
ttatgctgcattctgttgataagcattttgccgagcaggatgtcagcgatctgcaacaaatcagcaccacactaa

SEQ ID NO: 88794 - DNA, 75 bp, synthetic construct
  source 1..75: mol_type = other DNA
ctcccgcccctgtgacgccactgatgccgctgccggacatcacacaggagcgttttttacgtctgccggaagtga

SEQ ID NO: 88795 - DNA, 75 bp, synthetic construct
  source 1..75: mol_type = other DNA
gtagtacagtgcaaaactatacagcagcaacaataaccagtcttcttaacgaaatatcccagaaaatacagaata

SEQ ID NO: 88796 - DNA, 75 bp, synthetic construct
  source 1..75: mol_type = other DNA
gtggtgcctctattatgtatggaaacagggacctgaaaccggagaccagtgtaaccgaagagatcggtattattt

SEQ ID NO: 88797 - DNA, 75 bp, synthetic construct
  source 1..75: mol_type = other DNA
gatattgagtttggattctggctggattcagctgcgagcgacaaaaacgctctgtgcgctcactggctaactgag

SEQ ID NO: 88798 - DNA, 75 bp, synthetic construct
  source 1..75: mol_type = other DNA
gaaaccaatccctgaagagcatttatcaaggttgtttgaccgtttttatcgggtggatccgtccagacaacgaaa

SEQ ID NO: 88799 - DNA, 75 bp, synthetic construct
  source 1..75: mol_type = other DNA
gtgctggttaccccgcaaggcgcagaagtgctctacgccatgccgaaaacagtgttgctcacgggagaggcataa

SEQ ID NO: 88800 - DNA, 75 bp, synthetic construct
  source 1..75: mol_type = other DNA
agctgaacccgattatcacccgcgtgctgttcccggcgttcgccaaaatccaggacgacacggccaaactgcgcg

SEQ ID NO: 88801 - DNA, 75 bp, synthetic construct
  source 1..75: mol_type = other DNA
gtgctgcaattgctgtgtgtggtgggtctgctgcgctccgtgggtaacccgattggttcgctgctgatggcgaaa

SEQ ID NO: 88802 - DNA, 75 bp, synthetic construct
  source 1..75: mol_type = other DNA
gtctgggggaatgtgggcgttcaggttgccgataggggatataatgacacctctgcaatggttggcattaagtgg

SEQ ID NO: 88803 - DNA, 75 bp, synthetic construct
  source 1..75: mol_type = other DNA
gttggcccgcagtcgcaagcacagaaaatcagcggtatcagtaccagcgccgcgcagctgcgaaccgatgatggt

SEQ ID NO: 88804 - DNA, 75 bp, synthetic construct
  source 1..75: mol_type = other DNA
cgctgaatatcagtcaattggcggcactgtcaggtgtacatcgccagactgctgcggcaaggctgcaaaatctac

SEQ ID NO: 88805 - DNA, 75 bp, synthetic construct
  source 1..75: mol_type = other DNA
aaccatggcgctgaaacagcaggccaagctgtctgataccactaccgatggtgaagatgcgttgattaccattcg

SEQ ID NO: 88806 - DNA, 75 bp, synthetic construct
  source 1..75: mol_type = other DNA
tggatcttctcagtagcgtttcatctcctagtgaccccaatacagctaactataaagggcggtgcgttagccttc

SEQ ID NO: 88807 - DNA, 75 bp, synthetic construct
  source 1..75: mol_type = other DNA
gccgaaggtgaaatcgaaatgagtacccgcagctttaaccagctcggggaagtggctgctcaggcgggatcgtgg

SEQ ID NO: 88808 - DNA, 75 bp, synthetic construct
  source 1..75: mol_type = other DNA
ctggggctggaagttgaacgctctgcatttggtaaatacaacacagatgatgcgataaacgctaatattcgttat

SEQ ID NO: 88809 - DNA, 75 bp, synthetic construct
  source 1..75: mol_type = other DNA
gcgccgctgccgccgtaccgggtgcttaccgggatggcggaccgcttcgggcggacgctgacgtacaggcgtgag

SEQ ID NO: 88810 - DNA, 75 bp, synthetic construct
  source 1..75: mol_type = other DNA
cggataacttattaaaaactcttgaagagaaaaaacagtattacaatatgatctacgaagaaatccgtaaaaaga

SEQ ID NO: 88811 - DNA, 75 bp, synthetic construct
  source 1..75: mol_type = other DNA
catcactgatggacggattaattttatcgaaccatcgacagggctggagaagaagggaaacagcaaaggctccat

SEQ ID NO: 88812 - DNA, 75 bp, synthetic construct
  source 1..75: mol_type = other DNA
gcggcgcgaaatggtccgcgattgcgacggttatcattattgctcttggcctggcgcagatgacggtgctggcgc

SEQ ID NO: 88813 - DNA, 75 bp, synthetic construct
  source 1..75: mol_type = other DNA
gacttttacaccggaagcagaccgtttttgtatggcagcagtccggggatgaacaacaccaccgcgtgtacccaa

SEQ ID NO: 88814 - DNA, 75 bp, synthetic construct
  source 1..75: mol_type = other DNA
gcgcaacagtctgctgattgaattaaaaaaaacgctctgtcggagcggcaaactgaaaacgttattacgtgttcc

SEQ ID NO: 88815 - DNA, 75 bp, synthetic construct
  source 1..75: mol_type = other DNA
gttccaacaaacctgcgccctgatggtgcttatcatcgtcacggtcagcctgctggatttcctctctcaacggtt

SEQ ID NO: 88816 - DNA, 75 bp, synthetic construct
  source 1..75: mol_type = other DNA
caggcgcaatgtgcttcatgctgtttgtgtggcttggtggtgtgctggctcttgttgctacagctgcggtggtaa

SEQ ID NO: 88817 - DNA, 75 bp, synthetic construct
  source 1..75: mol_type = other DNA
tctctgctgatagccaatccacttatccgatagtattaagcctgaaagatagtaacggtaaggcattaaccggac

SEQ ID NO: 88818 - DNA, 75 bp, synthetic construct
  source 1..75: mol_type = other DNA
ccagaacacgcttccatctgcatttagcggtaagggagaacccgtaaacacatctcaaattatggcggagttaaa

SEQ ID NO: 88819 - DNA, 75 bp, synthetic construct
  source 1..75: mol_type = other DNA
agaacatcctctttatggtggatgaagtcggtcagttcattggcaaaaatacgcaaatgatgctgaagctgcaga

SEQ ID NO: 88820 - DNA, 75 bp, synthetic construct
  source 1..75: mol_type = other DNA
gtatcagttctatatttcggaaaagaaagatgccgtgattggcaaagtggtgaagagcgaagatattcctgccgc

SEQ ID NO: 88821 - DNA, 75 bp, synthetic construct
  source 1..75: mol_type = other DNA
aaggtgtaaattcgtggaatgttggagccacagtacaggataacagaggcaacgtttccaactatgccgtgatga

SEQ ID NO: 88822 - DNA, 75 bp, synthetic construct
  source 1..75: mol_type = other DNA
ggtgcgtttattcgtctggttaatgacgataaccagactgaagtcgctcgctacgatctgaccgaagatgcgtcc

SEQ ID NO: 88823 - DNA, 75 bp, synthetic construct
  source 1..75: mol_type = other DNA
ccatgcgtcgccgtgtctacaatccggaccgcctgaaatatccgatgaaacgagtcggggcgcgcggtgaaggca

SEQ ID NO: 88824 - DNA, 75 bp, synthetic construct
  source 1..75: mol_type = other DNA
cggaaatatagcatctggcacaaaattcattacagtcatgaagagtaaagaaatcggcggaaaaccaaaaagaaa

SEQ ID NO: 88825 - DNA, 75 bp, synthetic construct
  source 1..75: mol_type = other DNA
tggactttgctgaactgttgctggaagactacaaagcctccctgaaatatctcagcgaccacccgaaactgcagg

SEQ ID NO: 88826 - DNA, 75 bp, synthetic construct
  source 1..75: mol_type = other DNA
ctgctggcataaattcgcccgctactgggatgtggagttgcgtgagatccctatgcgccccggtcagttgtttat

SEQ ID NO: 88827 - DNA, 75 bp, synthetic construct
  source 1..75: mol_type = other DNA
gaatcagtgaaagaatcaggcgaaagcacatcacaattcatcattgcgtcaatgcaaggcgagatcaaacgccgc

SEQ ID NO: 88828 - DNA, 75 bp, synthetic construct
  source 1..75: mol_type = other DNA
gtaccgctggttttttagttactgccgcaaaaggcgagatcaaacgccgccagcggcgcaaggccaaagagcagg

SEQ ID NO: 88829 - DNA, 75 bp, synthetic construct
  source 1..75: mol_type = other DNA
gcacgggacagtttataaacgcagccatgcgcggcgaaatcaaacgccgccagcgccgcaaggccaaagaaccag

SEQ ID NO: 88830 - DNA, 75 bp, synthetic construct
  source 1..75: mol_type = other DNA
gttaaaccgctgctgcaaatactggggcagtacgccgcccacattaacggggcgggacatatttcagggcgcttc

SEQ ID NO: 88831 - DNA, 75 bp, synthetic construct
  source 1..75: mol_type = other DNA
ctacaaagcctccctgaaatatctcagcgatcacccgaaactgcagggtattgcccagcagaacagctttaaaca

SEQ ID NO: 88832 - DNA, 75 bp, synthetic construct
  source 1..75: mol_type = other DNA
tgagttcccacaaccgctgcacgatgcgctggataaattccaggccgacaccggtatcgacatcgacatgcacat

SEQ ID NO: 88833 - DNA, 75 bp, synthetic construct
  source 1..75: mol_type = other DNA
aactgttgctggaagactacaaagcctccctgaaatatctcagcgaccacccgaaactgcagggtattgcccagc

SEQ ID NO: 88834 - DNA, 75 bp, synthetic construct
  source 1..75: mol_type = other DNA
ggccaaaacaagcgtccttgctgttatccaataccttgatttaagagaacttggcacaagcggtgaaaagatccc

SEQ ID NO: 88835 - DNA, 75 bp, synthetic construct
  source 1..75: mol_type = other DNA
atcattcacacaatatacctgttggtcacactggcgcggggaatggtgtatcagccggttttaacgctgcgttag

SEQ ID NO: 88836 - DNA, 75 bp, synthetic construct
  source 1..75: mol_type = other DNA
ttttttgtgccttggtaaagcgttacgctatgttgcagttgcagcagctaccgttcagggcatgatgtggtggca

SEQ ID NO: 88837 - DNA, 75 bp, synthetic construct
  source 1..75: mol_type = other DNA
gggattgacaatagacctagcagtccagatatagccagatactgtataagtgctatatattcacaaggaattgac

SEQ ID NO: 88838 - DNA, 75 bp, synthetic construct
  source 1..75: mol_type = other DNA
aagactctgtcatcacggtacgcagactctataatggatatttcggtaatggcgcagtcaatatttccaataatg

SEQ ID NO: 88839 - DNA, 75 bp, synthetic construct
  source 1..75: mol_type = other DNA
atgttttaggctttttatgttctgttgctcttgatgttgatgcgattgtagtgcctataaattgtaattcaatga

SEQ ID NO: 88840 - DNA, 75 bp, synthetic construct
  source 1..75: mol_type = other DNA
ctggcggcgcgctggcgcaaagtgcatggcgatatcgactttgtcatgctggcgaaaaaaccgaccatcgacgcc

SEQ ID NO: 88841 - DNA, 75 bp, synthetic construct
  source 1..75: mol_type = other DNA
ctgcccagcgcacagaacgctatcatcaatgttgccgccatcggcataaccctgaacccggccagcaagctggcg

SEQ ID NO: 88842 - DNA, 75 bp, synthetic construct
  source 1..75: mol_type = other DNA
ttaaaaagagaacagtcaagggacgattggttaacccgaaagttaactatgtgagatatgctgatgattttatta

SEQ ID NO: 88843 - DNA, 75 bp, synthetic construct
  source 1..75: mol_type = other DNA
gaatcaatgaaaaatataaagcggaaatgcaagatgcctttaatcgagttgtcgattctggctggtatattatgg

SEQ ID NO: 88844 - DNA, 75 bp, synthetic construct
  source 1..75: mol_type = other DNA
gtcgatctgatttatggtgatgtgattgccgatgcccaaccgctggatttgctggtgaatagcagttatttcgcg

SEQ ID NO: 88845 - DNA, 75 bp, synthetic construct
  source 1..75: mol_type = other DNA
ccggaacagccgtcaggtcacgggtgttgtgaaaaatgtcactgtcagccagtcctgcggtaagtggtacatcag

SEQ ID NO: 88846 - DNA, 75 bp, synthetic construct
  source 1..75: mol_type = other DNA
ctcccgcccctgtgacaccactgatgccgctgccggacatcacgcaggagcgttttttacgtctgccggaagtga

SEQ ID NO: 88847 - DNA, 75 bp, synthetic construct
  source 1..75: mol_type = other DNA
ttttgaaagagggcgatcgcgtatcggtacgtgatttaagccgtggtttaattgtggattccggaaatgacgctt

SEQ ID NO: 88848 - DNA, 75 bp, synthetic construct
  source 1..75: mol_type = other DNA
gtattcccgcgcggcggaggatgcacgctaacgttcccagttaaagccggtgatgaatgtttgatgatttttgcc

SEQ ID NO: 88849 - DNA, 75 bp, synthetic construct
  source 1..75: mol_type = other DNA
tcgcaaagtacaatggcgaacaggtatgcccgtgacactttccctgctgattgggttgttatctgtagcatggag

SEQ ID NO: 88850 - DNA, 75 bp, synthetic construct
  source 1..75: mol_type = other DNA
ttttgggctgaattatcctggcatttacgccaacgtactacctcaaagacgaaagccttatataacaaaagctga

SEQ ID NO: 88851 - DNA, 75 bp, synthetic construct
  source 1..75: mol_type = other DNA
atagaaaagttggcagtgatagtaccccatatcatatgactcaagatgaaaacccactccgcgctgccatgattg

SEQ ID NO: 88852 - DNA, 75 bp, synthetic construct
  source 1..75: mol_type = other DNA
aaatctcgtctcaagcgagtttttaacgatatatatgtgcaacttgattcaatctataacatgcagcacacagaa

SEQ ID NO: 88853 - DNA, 75 bp, synthetic construct
  source 1..75: mol_type = other DNA
catcggcctcgccctcgcatggcatttcattaatcaaaagcaaccggtgattgtcagctatcggacacactatcc

SEQ ID NO: 88854 - DNA, 75 bp, synthetic construct
  source 1..75: mol_type = other DNA
tcgtcgagggtggaaacagagcctttgaatgtaagatagaagacattgaaataattggtaaaattataagtttaa

SEQ ID NO: 88855 - DNA, 75 bp, synthetic construct
  source 1..75: mol_type = other DNA
cgtgcttgtcgagtcaggttttttatccatggatcggtgtctacttccgaagcaagaaactagcagcttgatgtt

SEQ ID NO: 88856 - DNA, 75 bp, synthetic construct
  source 1..75: mol_type = other DNA
gctgcataaagaaaccgccagtatcgctcttgatctgagtggtgatggtttacatctgcgtggctatcgcgatcg

SEQ ID NO: 88857 - DNA, 75 bp, synthetic construct
  source 1..75: mol_type = other DNA
ctatcgctgaaaagccgggagcgttacgcgttctgacacatacgcttaaccaggcgtggctcaccgccagcggtg

SEQ ID NO: 88858 - DNA, 75 bp, synthetic construct
  source 1..75: mol_type = other DNA
acaccgcggcggcgtatgaccaaacagcagcgtaaaaaccgcagacgcgttaaccgtcttattgagctatggcct

SEQ ID NO: 88859 - DNA, 75 bp, synthetic construct
  source 1..75: mol_type = other DNA
ctgatggtgtatgccgaggctctggtcattctgcatggatacgaaaagatccgctggccggatgcaccggagtgg

SEQ ID NO: 88860 - DNA, 75 bp, synthetic construct
  source 1..75: mol_type = other DNA
ccgcacggtatgttgatggggttactccggaggaaaatatcagatcgccgttttctcagactgattgaagtgctg

SEQ ID NO: 88861 - DNA, 75 bp, synthetic construct
  source 1..75: mol_type = other DNA
gaggcagaaacacggctgatggtgctgaatgagaagcacaagcgccagcgccgggcagcaaagggggatacatgc

SEQ ID NO: 88862 - DNA, 75 bp, synthetic construct
  source 1..75: mol_type = other DNA
gcagcacggcaaggatttcacgctgtaccagatggagagcctgcgcagtgatgcggaaaaggccacagggcagag

SEQ ID NO: 88863 - DNA, 75 bp, synthetic construct
  source 1..75: mol_type = other DNA
gcggtaatgctgttgagcctggaatcactgaattgcgcgacatgatgctcgatggtcgcttcaaagtattcaaca

SEQ ID NO: 88864 - DNA, 75 bp, synthetic construct
  source 1..75: mol_type = other DNA
taaaatggtttaacgcagataaaggttttggctttatcactcctgatgatggcagcaaagacgttttcgtccatt

SEQ ID NO: 88865 - DNA, 75 bp, synthetic construct
  source 1..75: mol_type = other DNA
gtcgccagttgatgcaaaacatccctgcctggacctataaaggccgttggtggcagcgttttggctggcgcaaac

SEQ ID NO: 88866 - DNA, 75 bp, synthetic construct
  source 1..75: mol_type = other DNA
taaataccgtatgaagccgtcactgaaccgcgagttttatatccggtttgcggctgaatttggctatgtgattga

SEQ ID NO: 88867 - DNA, 75 bp, synthetic construct
  source 1..75: mol_type = other DNA
gcagaggaaatggcagacgctgcgcagagcgcaatgcttgccactaccggctttgatgccgatctgttgctgcag

SEQ ID NO: 88868 - DNA, 75 bp, synthetic construct
  source 1..75: mol_type = other DNA
cgcgcgcgggtattcccgacagtgggacaaataccgcgccctgtacctgagcaaaaacccgttatgcgtgcgttg

SEQ ID NO: 88869 - DNA, 75 bp, synthetic construct
  source 1..75: mol_type = other DNA
gaccatccaggagaatatgctgaaaggcgggatttccggccgcagtgcaaaaggaaaacgtatccacacccgtgc

SEQ ID NO: 88870 - DNA, 75 bp, synthetic construct
  source 1..75: mol_type = other DNA
acggtaaaaaaagcggaaatcaaggtggagctgctgccgaaatatgctgcctgggcggagggcgttctggctgcc

SEQ ID NO: 88871 - DNA, 75 bp, synthetic construct
  source 1..75: mol_type = other DNA
agattgttgatgaaatctgcgattttgtggcgaatcagcaggcggttttcctgggcggtcactacatccttcagg

SEQ ID NO: 88872 - DNA, 75 bp, synthetic construct
  source 1..75: mol_type = other DNA
gtatatcacggcgtcttccggtaacgaactcttctggcattggcgttgaattattacctgtggagatgacgctgg

SEQ ID NO: 88873 - DNA, 75 bp, synthetic construct
  source 1..75: mol_type = other DNA
tacacgctttaaaaatctgtggctgaataccggtcacggcacgctcggctggacgatggcttgcggttccggtca

SEQ ID NO: 88874 - DNA, 75 bp, synthetic construct
  source 1..75: mol_type = other DNA
atgaatatcagcacggaaacccgcgaaattctgcgcaattacaaagccgtgattaatgcgcggcgtcgtgaaatg

SEQ ID NO: 88875 - DNA, 75 bp, synthetic construct
  source 1..75: mol_type = other DNA
agcagagatacgcgacatgatgctcgacggtcgtttcaaggtatttaacacctgcgagccattctttgaagagtt

SEQ ID NO: 88876 - DNA, 75 bp, synthetic construct
  source 1..75: mol_type = other DNA
atgaagctgacgcaaatagattaagacgctatgccgagagtaaaggtacgaaaattgatgatgcgtcctacagtg

SEQ ID NO: 88877 - DNA, 75 bp, synthetic construct
  source 1..75: mol_type = other DNA
gaggtaagaacttcgctggcgtagtgttttatgcattgagaccagcttctcatcacaaagttgatccagttgtcg

SEQ ID NO: 88878 - DNA, 75 bp, synthetic construct
  source 1..75: mol_type = other DNA
gttcccggtattggtggaagatgtcgtcatgatgggccggtatggccatatgggtatgctgcgtagagcgggtaa

SEQ ID NO: 88879 - DNA, 75 bp, synthetic construct
  source 1..75: mol_type = other DNA
tattacagaccatgaacgcacaggaatatgaagatatccgggctgccggaagtgatgaacgccgtgagctgacac

SEQ ID NO: 88880 - DNA, 75 bp, synthetic construct
  source 1..75: mol_type = other DNA
atctggctcataatcgcgagccggatacatttgaaagccctgatgactgtgccgaatgccgcagaagagtgaata

SEQ ID NO: 88881 - DNA, 75 bp, synthetic construct
  source 1..75: mol_type = other DNA
gttaaaaaatccagcgccgcaggtactgaagtcaaagaaggcgatttcactgcagttgctaactttaatctgagt

SEQ ID NO: 88882 - DNA, 75 bp, synthetic construct
  source 1..75: mol_type = other DNA
atgagtattgtaaaagaggagcacaaagccacgctgcgcaaatggcacgaggaattgcaggagaaacgtggcgaa

SEQ ID NO: 88883 - DNA, 75 bp, synthetic construct
  source 1..75: mol_type = other DNA
aatccggcgaaagagcaggaagtactggcgatgggtgccgataaagtggtgaatagccgcgatccgcaggcactg

SEQ ID NO: 88884 - DNA, 75 bp, synthetic construct
  source 1..75: mol_type = other DNA
aaccctttgaattaccttttgatccgcgcacaactgcactggtcatgatcgacatgcagcgtgactttgtcgaag

SEQ ID NO: 88885 - DNA, 75 bp, synthetic construct
  source 1..75: mol_type = other DNA
acggtggcgaacgaccggcgcataacggtacgtaatgaccagacgctgaaggtgacgaatgaccggacggtgagc

SEQ ID NO: 88886 - DNA, 75 bp, synthetic construct
  source 1..75: mol_type = other DNA
gacgggcatcagcacgaaaagggaggcggcgctcagctcaaggaacaatacgccgacgctgggttcgacatgttg

SEQ ID NO: 88887 - DNA, 75 bp, synthetic construct
  source 1..75: mol_type = other DNA
gttgagcaacaactggtgaccgggagtacgaacgttctggcgcttgaacaagccagggggcaaatcgaaagtacc

SEQ ID NO: 88888 - DNA, 75 bp, synthetic construct
  source 1..75: mol_type = other DNA
agtatcgagaatatttcaccctaaaatatatctcgcttttcagaacgaaggcatacatattatcactggcagtgc

SEQ ID NO: 88889 - DNA, 75 bp, synthetic construct
  source 1..75: mol_type = other DNA
ggtattggcgggctgggacatatcgctataaaacttctgcacgcaatgggatgcgaggtgacagcctttagttca

SEQ ID NO: 88890 - DNA, 75 bp, synthetic construct
  source 1..75: mol_type = other DNA
gatgaccatccgctcgaagacctataaaggaagcggctttaatgaactgcgtttcgaggatgcgacggacagtga

SEQ ID NO: 88891 - DNA, 75 bp, synthetic construct
  source 1..75: mol_type = other DNA
agtgatgaacgtcgtgagctgacacacgccgtgatgcgggagctggatgcgccggacaactggacgctgaacggc

SEQ ID NO: 88892 - DNA, 75 bp, synthetic construct
  source 1..75: mol_type = other DNA
gccgttatttctggtgcagaaagttgggaagatatagaggatttcggggaaacacatctcgatttcttgaagcaa

SEQ ID NO: 88893 - DNA, 75 bp, synthetic construct
  source 1..75: mol_type = other DNA
tccagacggtataccagccgggaagcttcacgccgctcctgagaatcgaaacagagaatggcgaacaggcgaagg

SEQ ID NO: 88894 - DNA, 75 bp, synthetic construct
  source 1..75: mol_type = other DNA
cgtgtgggtcaggaggtgattgtggacttcctcaacggcgatccggaccagccgattattatggggcgtacctac

SEQ ID NO: 88895 - DNA, 75 bp, synthetic construct
  source 1..75: mol_type = other DNA
ggctgattgctgatgccaaacctgcaagccgccaccttattggcctgaacattacccgggacattcccggctacc

SEQ ID NO: 88896 - DNA, 75 bp, synthetic construct
  source 1..75: mol_type = other DNA
tccccagaagaccaaaaacaaatactgaaagaagttataaactcctgtacccaaggagaaagagccattttaaat

SEQ ID NO: 88897 - DNA, 75 bp, synthetic construct
  source 1..75: mol_type = other DNA
cagaaattctgacaaatctccgcctgatagagcgctctcaagtcgcattcattgatgacgcacagtgcaccgtat

SEQ ID NO: 88898 - DNA, 75 bp, synthetic construct
  source 1..75: mol_type = other DNA
ggcggatacctgaatctgatacacaacgcctccggactgtgggctgacattgtggccctgggaacccgccacagc

SEQ ID NO: 88899 - DNA, 75 bp, synthetic construct
  source 1..75: mol_type = other DNA
tgtcattctctgtgccggtcacaccgcacacgttcaggcacagttatgcgatgcacatgctgtatgccggtattc

SEQ ID NO: 88900 - DNA, 75 bp, synthetic construct
  source 1..75: mol_type = other DNA
gtttcactgggacaggtataacccggcaacggaggcgagttcgtgctgggtgagtgtgtcgcaggcgtgggcggg

SEQ ID NO: 88901 - DNA, 75 bp, synthetic construct
  source 1..75: mol_type = other DNA
tcccggtaagcggcacgaacaaccagcgttgtgtgaatcatgtttctgaaccggataccgaaattccgccaggct

SEQ ID NO: 88902 - DNA, 75 bp, synthetic construct
  source 1..75: mol_type = other DNA
cggcagagaagaaatccgtcttcatattgtttgcgatgtccctgatgaacttattgatttcacgtttgaatggaa

SEQ ID NO: 88903 - DNA, 75 bp, synthetic construct
  source 1..75: mol_type = other DNA
cggcagatccgaaaacctggtatctggcggcggcacagggcactgacaccattgaagtggcctggctggatggtg

SEQ ID NO: 88904 - DNA, 75 bp, synthetic construct
  source 1..75: mol_type = other DNA
gaggtctatacgaaggtgtttgcgctcgatgtcgcggcacggcaccgggtgcagtttgctatgccggaagctgaa

SEQ ID NO: 88905 - DNA, 75 bp, synthetic construct
  source 1..75: mol_type = other DNA
atgagaatcatgaggccggtaataaatacatcccttacgggaaaatggcttcctggctggttgagtggaaaaacg

SEQ ID NO: 88906 - DNA, 75 bp, synthetic construct
  source 1..75: mol_type = other DNA
gtttcactgggacaggtataacccggcaacggaggcgagttcgtgctgggtgtgtgtgtctcaggcgtgggcggg

SEQ ID NO: 88907 - DNA, 75 bp, synthetic construct
  source 1..75: mol_type = other DNA
gcaagatacctggcgactaccgggaaaacgggaacggaatttgttcagcgagcgacgacgttttttggaccggac

SEQ ID NO: 88908 - DNA, 75 bp, synthetic construct
  source 1..75: mol_type = other DNA
gtttcactgggacaggtataacccggcaacggaggcgagttcgtgctgggtgggtgtgtcacaggcgtgggcggg

SEQ ID NO: 88909 - DNA, 75 bp, synthetic construct
  source 1..75: mol_type = other DNA
atccggacatactaaatactcaggcaatagctctttgtgttgacctccagcatacaaaaaatataaccatgccac

SEQ ID NO: 88910 - DNA, 75 bp, synthetic construct
  source 1..75: mol_type = other DNA
caacatgtgcgtgccggtttccgtctgggcagccacaacgatatgacctttggtgaaggcacctcatcccgtgac

SEQ ID NO: 88911 - DNA, 75 bp, synthetic construct
  source 1..75: mol_type = other DNA
tcttctgagtaaaggaatgtctcgggaagacgttgcagagatggcaaatttaccccttgccgagattgataagct

SEQ ID NO: 88912 - DNA, 75 bp, synthetic construct
  source 1..75: mol_type = other DNA
cttcctgttgtcattgattatccggcagctctggcacttcgccagatgtcgatggttcatgatgaactgccgaaa

SEQ ID NO: 88913 - DNA, 75 bp, synthetic construct
  source 1..75: mol_type = other DNA
agcgtcttgtcattctgcggtcgctggcggattacaacggcgaactgggtgaatccgtgctccaggactgtctgg

SEQ ID NO: 88914 - DNA, 75 bp, synthetic construct
  source 1..75: mol_type = other DNA
gtggcgatcaaactgtttgataacccgctggagcaaaaacaggcaatgtggaacggtcttcgccgtctactgctg

SEQ ID NO: 88915 - DNA, 75 bp, synthetic construct
  source 1..75: mol_type = other DNA
tggaagtggacggcctgccaccggacgcgtttgcggtggtctcctttcatctgaaccagtcactctcttcacttt

SEQ ID NO: 88916 - DNA, 75 bp, synthetic construct
  source 1..75: mol_type = other DNA
gccgctcgggtatctgattaacgtgacggagtggtgggagacgaacgaccccccgggcacgtttcgccttgatat

SEQ ID NO: 88917 - DNA, 75 bp, synthetic construct
  source 1..75: mol_type = other DNA
atgaaaacgcggtaccggcgacattccccgtcagccgttctgcaatgcccccggaacctctgcggtttgccacgg

SEQ ID NO: 88918 - DNA, 75 bp, synthetic construct
  source 1..75: mol_type = other DNA
atgagtaattcactgttaccgccatcagccagcagtttcatgcgttgcgccgaagctgtcggagcgcgcattaca

SEQ ID NO: 88919 - DNA, 75 bp, synthetic construct
  source 1..75: mol_type = other DNA
cgacatgctgccgtctgaacctgtcaccattgtgctgtcgcagatgggctgggtacgcagcgctaaaggccatga

SEQ ID NO: 88920 - DNA, 75 bp, synthetic construct
  source 1..75: mol_type = other DNA
ccggaaccatcgtcaacaccggtgcagaaggtggtccggagtctgaaaatgtgtccaccggtcagatggtcgggg

SEQ ID NO: 88921 - DNA, 75 bp, synthetic construct
  source 1..75: mol_type = other DNA
agaaagatattgcagagaagatacaaaaacagggaggtgattatttattcgcggtaaaaggaaaccaggggcggc

SEQ ID NO: 88922 - DNA, 75 bp, synthetic construct
  source 1..75: mol_type = other DNA
ggtaacaccatcacctgtactggctcatgacacctggcagcgtatccacctgctgacaggcgagatgatggatgc

SEQ ID NO: 88923 - DNA, 75 bp, synthetic construct
  source 1..75: mol_type = other DNA
gcttcaactactcggtagaggggctgaagaaaacctttggtaaacggcttactccttatcagtgtgaaatgctgg

SEQ ID NO: 88924 - DNA, 75 bp, synthetic construct
  source 1..75: mol_type = other DNA
gattgctagtgctgcaaatgaactggggacggccggtgatactggtactgcggttgtgatttccggtcaggacgg

SEQ ID NO: 88925 - DNA, 75 bp, synthetic construct
  source 1..75: mol_type = other DNA
cgtgaattattcagtctgtttgagtatgcaccgacaattctgacgtcggtaaaaccagagcaatatctgcattaa

SEQ ID NO: 88926 - DNA, 75 bp, synthetic construct
  source 1..75: mol_type = other DNA
actgacaaatcatgacaaccagattgtcctcggtacggccaacggaatgaccatcagtaccggtctggagtatgg

SEQ ID NO: 88927 - DNA, 75 bp, synthetic construct
  source 1..75: mol_type = other DNA
tatcggccacgttgaccaaggtaaaactacgctgaccgctgcaatcacaaccgtactggctaaaacctacggcgg

SEQ ID NO: 88928 - DNA, 75 bp, synthetic construct
  source 1..75: mol_type = other DNA
ttcgcgatctggttaactgctttggcgtacagtgcgtgcatcaagggttgaatcttgatgttaagcgcggcgaag

SEQ ID NO: 88929 - DNA, 75 bp, synthetic construct
  source 1..75: mol_type = other DNA
aaatcactcggcagtgcatgggaagggctgcgtatccgcattgcagatctgattgatggtccgctgcgttctgtc

SEQ ID NO: 88930 - DNA, 75 bp, synthetic construct
  source 1..75: mol_type = other DNA
aaaaacgttcgataaaaatgacgtgcaattaatcagccagcaaaactggtttggcaaatatcagcccgtcgccgc

SEQ ID NO: 88931 - DNA, 75 bp, synthetic construct
  source 1..75: mol_type = other DNA
cgttgtgaatgaccttccacctgaaggcgtgtttgatactgaattctgtaaccgttacgaaaaaggcggggaaga

SEQ ID NO: 88932 - DNA, 75 bp, synthetic construct
  source 1..75: mol_type = other DNA
agatattcggtaacgttcttggcggtgcgttacaacttgttctgacacctgcaaaaatgctactggatacgctgg

SEQ ID NO: 88933 - DNA, 75 bp, synthetic construct
  source 1..75: mol_type = other DNA
ttaccgatcgcggcgaaggttttgtccacgatgatgcgtcagtggcgcgtgacgtagccactggcgtactggccc

SEQ ID NO: 88934 - DNA, 75 bp, synthetic construct
  source 1..75: mol_type = other DNA
atgtcacacaacctggagcaccagaaagtccacaccagaatggtgaaagaggttctgaaagccgtcgccagagcc

SEQ ID NO: 88935 - DNA, 75 bp, synthetic construct
  source 1..75: mol_type = other DNA
atgcaggttatagcggaaccagtatgacgggcgggaaaggtgctgctggggtttgtattatcgaggagtttgcat

SEQ ID NO: 88936 - DNA, 75 bp, synthetic construct
  source 1..75: mol_type = other DNA
tgataacggacttactcgtggcgaacaaatggaactggcacgaattgcactggcatcactggaacgcgaacagat

SEQ ID NO: 88937 - DNA, 75 bp, synthetic construct
  source 1..75: mol_type = other DNA
ggtgctgctcgcgcattcgaccagatcgataacgcgccggaagaaaaagctcgtggtatcaccatcaacacttct

SEQ ID NO: 88938 - DNA, 75 bp, synthetic construct
  source 1..75: mol_type = other DNA
tggtggcaggccgtccggggtgattgagatccccggcagtattacggaagaaaatgcgaaaaaactgaagagcaa

SEQ ID NO: 88939 - DNA, 75 bp, synthetic construct
  source 1..75: mol_type = other DNA
tcactctcacccggcgttatggcgtcagtctaattcatctggacgccggcgcagaatgtctgccgggtttaccca

SEQ ID NO: 88940 - DNA, 75 bp, synthetic construct
  source 1..75: mol_type = other DNA
acaggtggagccggaatacacaccggcgcgaaaagttcatttttaccactgcgaccaccggggcctgccgctggc

SEQ ID NO: 88941 - DNA, 75 bp, synthetic construct
  source 1..75: mol_type = other DNA
gaaatggaagttcgtgaacttctgtctcagtacgacttcccgggcgacgacactccgatcgttcgtggttctgct

SEQ ID NO: 88942 - DNA, 75 bp, synthetic construct
  source 1..75: mol_type = other DNA
gcatgcgacggtaacagggactgaaacgaccggtaatgaaaaccgtaagcttgaagttacgcggtgtaaggtttg

SEQ ID NO: 88943 - DNA, 75 bp, synthetic construct
  source 1..75: mol_type = other DNA
gaccgtcctgttctggcatccgtggctgtgccgtggcctgccggtgcgtccggttccggcgatggcgctgatgct

SEQ ID NO: 88944 - DNA, 75 bp, synthetic construct
  source 1..75: mol_type = other DNA
tttaccggcagcggctatctgttacgtactgatacgtggccgtatccggttctgcggcttaaacgactgggcctg

SEQ ID NO: 88945 - DNA, 75 bp, synthetic construct
  source 1..75: mol_type = other DNA
aatggaaatatttacatagacgatgttctgaaggtttctcatgaaatagaaagtaaatttgccaaaactaggtta

SEQ ID NO: 88946 - DNA, 75 bp, synthetic construct
  source 1..75: mol_type = other DNA
aaagttttccccgcccccgtaaattcggacctgggactgatgacctcttttatcgaagcatacctgggcgctgac

SEQ ID NO: 88947 - DNA, 75 bp, synthetic construct
  source 1..75: mol_type = other DNA
tgaccgctgcaatcaccaccgtactggctaaaacctacggcggtgctgctcgtgcattcgaccagatcgataacg

SEQ ID NO: 88948 - DNA, 75 bp, synthetic construct
  source 1..75: mol_type = other DNA
ggatggctccatggttgataagcatacgcatggcggcgtggaagtcggcggcagcaatacgaaaccactgggagg

SEQ ID NO: 88949 - DNA, 75 bp, synthetic construct
  source 1..75: mol_type = other DNA
ttcaaccttaacggtctgaaaattctgcctgacggccgcctgcagctggtggatggctccatggttgataagcat

SEQ ID NO: 88950 - DNA, 75 bp, synthetic construct
  source 1..75: mol_type = other DNA
ggtttctgtttcggcaaactatccgggtgctgatgcgcagaccgtgcaggatacggtgacgcaggttatcgaaca

SEQ ID NO: 88951 - DNA, 75 bp, synthetic construct
  source 1..75: mol_type = other DNA
atgatcatcggaaatattcataatcttcagccgtggctaccccaggagttacgccaggcgattgagcatatcaaa

SEQ ID NO: 88952 - DNA, 75 bp, synthetic construct
  source 1..75: mol_type = other DNA
gcaccgaaagctgcccgtttgccattatggctaacgaagaaaaacgcttctatggcgtacagttccacccggaag

SEQ ID NO: 88953 - DNA, 75 bp, synthetic construct
  source 1..75: mol_type = other DNA
ggtggtggagctgaccgggcggcggaataacggtgtgcctgtgtccctttcagtatcaacaggagcagagaatgg

SEQ ID NO: 88954 - DNA, 75 bp, synthetic construct
  source 1..75: mol_type = other DNA
aaaaagaggggcttatcagcaactaccgcaccattccgctgaactccctggcgcggcaggaggaagatttacatc

SEQ ID NO: 88955 - DNA, 75 bp, synthetic construct
  source 1..75: mol_type = other DNA
aaccgcaatgctgctgcaccgcgctatcggtaaaaacctgacttgcgtattcgtcgacaacggcctgctgcgtct

SEQ ID NO: 88956 - DNA, 75 bp, synthetic construct
  source 1..75: mol_type = other DNA
atgacggcgcgctatcaggggatgaaccgaaataccggccttggcatcagcgataccgagcatatcagccagagc

SEQ ID NO: 88957 - DNA, 75 bp, synthetic construct
  source 1..75: mol_type = other DNA
gctacgcgcaggttgaagtcgtaaacgacagcgcactggttcgcggtatcgaagatgcgctgaccgcagacggta

SEQ ID NO: 88958 - DNA, 75 bp, synthetic construct
  source 1..75: mol_type = other DNA
ggcggctacccgaaggtaatccctatctgaggacggagaccagaaacacgtatacatcgcgctttacagaagtgg

SEQ ID NO: 88959 - DNA, 75 bp, synthetic construct
  source 1..75: mol_type = other DNA
cagtccggcggcgaagacggtggcagtgtggtgttcccgccggtgctggtgcagatgctcgaccggctggaaagt

SEQ ID NO: 88960 - DNA, 75 bp, synthetic construct
  source 1..75: mol_type = other DNA
gggaaaccctagcccagcagcaaaaacgcttacaggcccttcaggagccgtttaaggggctatccaaggatcagg

SEQ ID NO: 88961 - DNA, 75 bp, synthetic construct
  source 1..75: mol_type = other DNA
aaatctcaaagggacttaaaagcctggcaaaatccggcggttttccgctgattgctctgagccagctctcccgcg

SEQ ID NO: 88962 - DNA, 75 bp, synthetic construct
  source 1..75: mol_type = other DNA
agctgtggggggaagatcaggcctttgattatctaaaacaacttaacgccaacgtctcccagtacaccaaatcag

SEQ ID NO: 88963 - DNA, 75 bp, synthetic construct
  source 1..75: mol_type = other DNA
tgccgctgccggaagagtaccggattggttatcgtcgcaatgaaggtgcctggccgatgggtgagcctcgcaagt

SEQ ID NO: 88964 - DNA, 75 bp, synthetic construct
  source 1..75: mol_type = other DNA
agcccaaatgcgttacaagacgagccagaaacgaaacaatccgaaccagtagcgcaacaggaagaggaaaaagtc

SEQ ID NO: 88965 - DNA, 75 bp, synthetic construct
  source 1..75: mol_type = other DNA
ctgaaagcgctggaaggcgatgcagagtgggaagcgaaaatcctggaactggctggcttcctggattcttacatt

SEQ ID NO: 88966 - DNA, 75 bp, synthetic construct
  source 1..75: mol_type = other DNA
catggcaacattcgacgggcatatcgttgaggcattgatgaaaatgcctgaagttaacgtcatgtattcagagct

SEQ ID NO: 88967 - DNA, 75 bp, synthetic construct
  source 1..75: mol_type = other DNA
gcgacacttgatgcgcagggatacagtgttaacgacatcatccatatcctgatggcagaaggaggtcaggcatga

SEQ ID NO: 88968 - DNA, 75 bp, synthetic construct
  source 1..75: mol_type = other DNA
gtcgtttgttaaacacgaatatttttaaaagctctggaaaatatatcccaacaccagggacaaaaaagataaggg

SEQ ID NO: 88969 - DNA, 75 bp, synthetic construct
  source 1..75: mol_type = other DNA
ataagcaggtcatttcttcccaagctgactcgctgattaaaatttcgcggatctgggccgatttttttcccgcaa

SEQ ID NO: 88970 - DNA, 75 bp, synthetic construct
  source 1..75: mol_type = other DNA
ctggcggatacggtggcggttgatcttgcgtacgaagtggccggtcatggtgactggcgaacggatgcgtttatt

SEQ ID NO: 88971 - DNA, 75 bp, synthetic construct
  source 1..75: mol_type = other DNA
ccggtgattactgataccgggcgcaaaacctgggtgaagtcgtcactggagcactatgttgcagcgctgcggcgc

SEQ ID NO: 88972 - DNA, 75 bp, synthetic construct
  source 1..75: mol_type = other DNA
gttcgtggtcagccagtatctggtggacgtctgggggtgaagatttaccccataatgcttgaagggcaggtcaaa

SEQ ID NO: 88973 - DNA, 75 bp, synthetic construct
  source 1..75: mol_type = other DNA
accgaaggctgtgaaggctgcatatgatcttgcagcaggtaaagcatccgccagtcacacacacccgtggaatca

SEQ ID NO: 88974 - DNA, 75 bp, synthetic construct
  source 1..75: mol_type = other DNA
cgctgaatatgctctatatcgacccgcaaaacagcagccagattattgctgaacaggtgatccctgaaaacgagg

SEQ ID NO: 88975 - DNA, 75 bp, synthetic construct
  source 1..75: mol_type = other DNA
tgcaccgcatgcggtcagaccggtggcggcaactgtcctgactgtggtgcggtgatggggaacgcaacctacctg

SEQ ID NO: 88976 - DNA, 75 bp, synthetic construct
  source 1..75: mol_type = other DNA
tgtttaagatcccagaccccatcaccgtcgatgaatttgcccgccgcacgggcaagaccgaatcagccgtaagaa

SEQ ID NO: 88977 - DNA, 75 bp, synthetic construct
  source 1..75: mol_type = other DNA
actctgaccggcgacgatcgacgcgtagcactgttatgcctaagcaccggcgcacgctggggcgaaggtagcacg

SEQ ID NO: 88978 - DNA, 75 bp, synthetic construct
  source 1..75: mol_type = other DNA
gtatttctcgccatgatgcagagcaaatagcaagagaaagcagcggcagcgataatcagaaagctgaagttgtgg

SEQ ID NO: 88979 - DNA, 75 bp, synthetic construct
  source 1..75: mol_type = other DNA
gtttgaggaaatgggtataaccagagctgatcaacttaccaaaaaatcgataaccgattaccgggtgttgatgat

SEQ ID NO: 88980 - DNA, 75 bp, synthetic construct
  source 1..75: mol_type = other DNA
gcgttagcggaaaattatcaaccgctgtatgccgcattgggcttgcatcctggtatgttggaaaaacatagcgat

SEQ ID NO: 88981 - DNA, 75 bp, synthetic construct
  source 1..75: mol_type = other DNA
gtgcttgatttcatagatgcgcttaatgcgactgacatcagcactgcaccggatatcaactggccggaaatgcct

SEQ ID NO: 88982 - DNA, 75 bp, synthetic construct
  source 1..75: mol_type = other DNA
actcgtagtgaaaggcaaacatttcaagagttgttaaccgttttagaacctgtatctcccgcgcctaatgaattg

SEQ ID NO: 88983 - DNA, 75 bp, synthetic construct
  source 1..75: mol_type = other DNA
acgatgaacgcgattaagcggggtggacaacgaggcgtgtatttacgggctaataaagagcgtgccgtggcgcac

SEQ ID NO: 88984 - DNA, 75 bp, synthetic construct
  source 1..75: mol_type = other DNA
ggtacagccgcagccggcagtaacatgacgttctcaccgtcccagaatggcacgtcactggacctgcaggccgga

SEQ ID NO: 88985 - DNA, 75 bp, synthetic construct
  source 1..75: mol_type = other DNA
ttccacaggcaattagagggatttcgcagcagtttgcgatggcccccatcgtaacattaacgctgggggaattcc

SEQ ID NO: 88986 - DNA, 75 bp, synthetic construct
  source 1..75: mol_type = other DNA
caaaaccgcacgttaacgtgggtactatcggccacgttgaccatggtaaaaccacactgaccgctgcaatcacga

SEQ ID NO: 88987 - DNA, 75 bp, synthetic construct
  source 1..75: mol_type = other DNA
atgagtgatttcattactgaagatcagcgtcttgtcattctgcggtcgctggcggattacaacggcgaactgggt

SEQ ID NO: 88988 - DNA, 75 bp, synthetic construct
  source 1..75: mol_type = other DNA
cgttacccattcgtcgtgatagccctaagaaggcaatcaccttgattctggcggtgctgctgggcggcatggttg

SEQ ID NO: 88989 - DNA, 75 bp, synthetic construct
  source 1..75: mol_type = other DNA
ccctcatttacgccggtggtgaccagacggtacacggagaggcacataacacccggctggaggggggtaaccagt

SEQ ID NO: 88990 - DNA, 75 bp, synthetic construct
  source 1..75: mol_type = other DNA
tatcggccacgttgaccaaggtaaaacaactctgaccgctgcaatcacaaccgtactggctaaaacctacggcgg

SEQ ID NO: 88991 - DNA, 75 bp, synthetic construct
  source 1..75: mol_type = other DNA
catattgttctgccggacggcgctgataccgcgaaggccggggaaaacgacggctggatgcggctttcgccgcag

SEQ ID NO: 88992 - DNA, 75 bp, synthetic construct
  source 1..75: mol_type = other DNA
tcagggatggccagcattctcacagtggcttgatgcggtgattcagcgtgtcgaaatgtacaacgcatcgcttcc

SEQ ID NO: 88993 - DNA, 75 bp, synthetic construct
  source 1..75: mol_type = other DNA
tcgctatattgatgtggacgatcttctgcatcgcaccctggtccacctgacccaaacgaaagaagaactcccgca

SEQ ID NO: 88994 - DNA, 75 bp, synthetic construct
  source 1..75: mol_type = other DNA
tgcccgaaggccctttctcacgcgaacaggcggttgccgtcacaacagcttaccgcaatgtgtttactgaagatg

SEQ ID NO: 88995 - DNA, 75 bp, synthetic construct
  source 1..75: mol_type = other DNA
tatattctgaaatttgtaatgtaatgctgtttccggcatatttcagaagtgactctggtcttattggtgcaactc

SEQ ID NO: 88996 - DNA, 75 bp, synthetic construct
  source 1..75: mol_type = other DNA
ggaaactttcgcacagtatgtggctaatacgcacacgccagaaatacaggccaagagaggcaggaaaggtggcat

SEQ ID NO: 88997 - DNA, 75 bp, synthetic construct
  source 1..75: mol_type = other DNA
tcggtggctcaattacttagaatcaaaaaatgcattagttagaatccccgttgctggtaaggtttgtgcgtatgc

SEQ ID NO: 88998 - DNA, 75 bp, synthetic construct
  source 1..75: mol_type = other DNA
tgccagtactattgctgaattaatagtaagtttaaaattactgcttgattgtcaggttgttgttgtcggaggaag

SEQ ID NO: 88999 - DNA, 75 bp, synthetic construct
  source 1..75: mol_type = other DNA
ctggtttttgacgttgaccgcgagggggcagcgattgactggagcgaccggaacgctcccgcgccgaacatcacc

SEQ ID NO: 89000 - DNA, 75 bp, synthetic construct
  source 1..75: mol_type = other DNA
aaaggtaatgtgtatcttcctcgcgatattaaagaagaacttccggcgatgattggcaccgataagaagttaaag

SEQ ID NO: 89001 - DNA, 75 bp, synthetic construct
  source 1..75: mol_type = other DNA
cagtgcaaaacacagtgtgcgtgaactgccggtgaactggtgggtacagccttccgttatccgcaccttcagctc

SEQ ID NO: 89002 - DNA, 75 bp, synthetic construct
  source 1..75: mol_type = other DNA
gactttaaccgatttctcacggcacgtaatcgttccgtaataagagggtttgatgatgtcagtattgccatttca

SEQ ID NO: 89003 - DNA, 75 bp, synthetic construct
  source 1..75: mol_type = other DNA
gagtcacgcgagttccctatggacaagccagatcccatagaagcaatcaagttccgtatggatcaacaaggcctc

SEQ ID NO: 89004 - DNA, 75 bp, synthetic construct
  source 1..75: mol_type = other DNA
tctggaaaatggcggacgtctggatgtactgagcggccataccgccacaaacacacatgtggatgaggggggtac

SEQ ID NO: 89005 - DNA, 75 bp, synthetic construct
  source 1..75: mol_type = other DNA
ccgttgatcacaatgccgccatgattgaagaattgcgcgcagatcctgattatgcaaacgcttatcttgctaatg

SEQ ID NO: 89006 - DNA, 75 bp, synthetic construct
  source 1..75: mol_type = other DNA
acgacgaagagcgcgtgcgcgaaacggcgttgccccttacatcccggcgtctttttgccgggatgccaggagcgc

SEQ ID NO: 89007 - DNA, 75 bp, synthetic construct
  source 1..75: mol_type = other DNA
gctgacgcaaatgttaataggaaaggtatatatgttgtcagttcaactggcggtgtttggattattcctggggcg

SEQ ID NO: 89008 - DNA, 75 bp, synthetic construct
  source 1..75: mol_type = other DNA
tcgctcgatatcagtatcagcctgaggctcaccgagcgcacgctcgtcaaagaggtcgacggcgcgctgcatgtc

SEQ ID NO: 89009 - DNA, 75 bp, synthetic construct
  source 1..75: mol_type = other DNA
agtacgtttgtgtgctgcgccgttggtcgaaggtacactggcagcaacggtcagcgcggcctcgggggcggatat

SEQ ID NO: 89010 - DNA, 75 bp, synthetic construct
  source 1..75: mol_type = other DNA
atgtctgatatcacagcctcccgtccggaagtggtcaacgggcatacggacgttatctgctcaaccagtatctgc

SEQ ID NO: 89011 - DNA, 75 bp, synthetic construct
  source 1..75: mol_type = other DNA
ctggcccgtcaggtgcatacgagtattttgcacgcagcgccagcggtctggtacgcgatgcgcgggccatcagcc

SEQ ID NO: 89012 - DNA, 75 bp, synthetic construct
  source 1..75: mol_type = other DNA
tcggcctgctcgcttttctgctgccttgcgcactggcattgagcacaactgttcatgccgaaactaacaaactgg

SEQ ID NO: 89013 - DNA, 75 bp, synthetic construct
  source 1..75: mol_type = other DNA
tgccgcgattgcgttcttagtccgtggctattgcaccaccatcacgcgaaagggacagctaagcgcggcgggatg

SEQ ID NO: 89014 - DNA, 75 bp, synthetic construct
  source 1..75: mol_type = other DNA
acgctggacacgctgaaagaaattgccgcggccattaacaatgacccgaaattcagtaccaccattaacaatgcg

SEQ ID NO: 89015 - DNA, 75 bp, synthetic construct
  source 1..75: mol_type = other DNA
gatgaccacatccagtctgttcaaggtaaagaggactatgaagatgagatgttcagcatcagatactttaagaag

SEQ ID NO: 89016 - DNA, 75 bp, synthetic construct
  source 1..75: mol_type = other DNA
cagatccgcgcccagcaattccccatgacgaagttgagcgcagaatggcagaacgctttgctaagatgcgtaagg

SEQ ID NO: 89017 - DNA, 75 bp, synthetic construct
  source 1..75: mol_type = other DNA
taaagcccctgatacggtgaatccaagtttatggcgtcaggcgcaactgataaatatcagcgggttattcgaagt

SEQ ID NO: 89018 - DNA, 75 bp, synthetic construct
  source 1..75: mol_type = other DNA
ctgacggtacagagcgccagaatcgtgacatggcggctgaatgcaaaactgtacttttaccccggcccggaatcc

SEQ ID NO: 89019 - DNA, 75 bp, synthetic construct
  source 1..75: mol_type = other DNA
atgcacaggcccatgatacatggtaccggtcactggaatatgataattttccggaaatcaatgaagcgaacattc

SEQ ID NO: 89020 - DNA, 75 bp, synthetic construct
  source 1..75: mol_type = other DNA
ggattttcgctgtggctgctggctcatggagaaacctgaaacggcaatgaaagccatcacacacaatctcgatcg

SEQ ID NO: 89021 - DNA, 75 bp, synthetic construct
  source 1..75: mol_type = other DNA
atcattaaatactttaagaagggtggatctgcacacatcactttcaaaaggctggagctgattgacagaattaac

SEQ ID NO: 89022 - DNA, 75 bp, synthetic construct
  source 1..75: mol_type = other DNA
ggccggcgcctttaactacaccctgaaccgtgacagcgatgaagactggtacctgcgcagtgaaaatgcttatcg

SEQ ID NO: 89023 - DNA, 75 bp, synthetic construct
  source 1..75: mol_type = other DNA
ggatacccgcccggtggccgaccgcctgacggtacagagcgccagaatcgtgacatggcggctgaatgcaaaact

SEQ ID NO: 89024 - DNA, 75 bp, synthetic construct
  source 1..75: mol_type = other DNA
ttacgtggtggaagtgctgctgatgctgaagcctggcgtgatgactacgaagcaggaaaaacacctgtcgaagca

SEQ ID NO: 89025 - DNA, 75 bp, synthetic construct
  source 1..75: mol_type = other DNA
cgaaatctggcgtgacctgatgcaacgttccgggatgctgtcattaatggatgcgcaggcccgtgatacatggta

SEQ ID NO: 89026 - DNA, 75 bp, synthetic construct
  source 1..75: mol_type = other DNA
aagccatcacccgcaatctcgatcgagaaatctggcgtgacctgatgcaacgttcagggatgctttccttaatgg

SEQ ID NO: 89027 - DNA, 75 bp, synthetic construct
  source 1..75: mol_type = other DNA
ccagcccgacatttaccggaacccccaaagcgccaacgccagcggcgggggataataccacgcaggttgcgacca

SEQ ID NO: 89028 - DNA, 75 bp, synthetic construct
  source 1..75: mol_type = other DNA
acggaggaatgggctctctgggtgagcgcataataattgatgactgctgtgagcagacgccttcatcactgcgtg

SEQ ID NO: 89029 - DNA, 75 bp, synthetic construct
  source 1..75: mol_type = other DNA
atatcacccacattaatctccatatcaattcaccgggtggcgatgtctttgaaggcatcgccatttttaatgccc

SEQ ID NO: 89030 - DNA, 75 bp, synthetic construct
  source 1..75: mol_type = other DNA
aaccagaactggttgacaggcttaatgatattattgccagacactacccggaagccctggcaagcacagtgaaca

SEQ ID NO: 89031 - DNA, 75 bp, synthetic construct
  source 1..75: mol_type = other DNA
atgccccacaggcccgtaacgatttccgcgatgcggtgatccagaagctaacgacgcttgggatcgctgcagata

SEQ ID NO: 89032 - DNA, 75 bp, synthetic construct
  source 1..75: mol_type = other DNA
atcagattgtgcgcgggatgttggggagtttgctggggggggagaagaaggtaagccaggtgcgatttgtctttg

SEQ ID NO: 89033 - DNA, 75 bp, synthetic construct
  source 1..75: mol_type = other DNA
aacttatggggtacacgacaacaaggacatcagtaaccttaaaagtatcaaccggaaatggtttgtatggaacta

SEQ ID NO: 89034 - DNA, 75 bp, synthetic construct
  source 1..75: mol_type = other DNA
gtgagcagtgaaagccgggcgtggcttgcgcagtgcgggctgacggtggagcaactggccagacaggtggagccg

SEQ ID NO: 89035 - DNA, 75 bp, synthetic construct
  source 1..75: mol_type = other DNA
gaataaggatgaggtgtttgagcggggggtgatcaacgtcttcaggggactgagctggaattacaaaaccaactc

SEQ ID NO: 89036 - DNA, 75 bp, synthetic construct
  source 1..75: mol_type = other DNA
cgtgagggaatgccgccgcgtgaaggtggcgacgagttcagccaggcatggaagcaggaagtgacaatcagcaag

SEQ ID NO: 89037 - DNA, 75 bp, synthetic construct
  source 1..75: mol_type = other DNA
tatgcaaatagaacggcaatttatttacgacaatccgatctgttttggcgaagagtcgttattttcacgcgttga

SEQ ID NO: 89038 - DNA, 75 bp, synthetic construct
  source 1..75: mol_type = other DNA
gagcttgaggcgttggcgcgcggggcaacagtaatttatgacggtgagcggtttagttatgctgtaaaagacgat

SEQ ID NO: 89039 - DNA, 75 bp, synthetic construct
  source 1..75: mol_type = other DNA
ccggaaatcagcgaggcgaatatcctgagtacgtttgaacaactgcaccagaataaggacgaagtatttgagcga

SEQ ID NO: 89040 - DNA, 75 bp, synthetic construct
  source 1..75: mol_type = other DNA
gaagcagcagggactttctctgaaagagcttcagaagggggccagcaacgtagcggcggacgcgatcaagaatgg

SEQ ID NO: 89041 - DNA, 75 bp, synthetic construct
  source 1..75: mol_type = other DNA
ctggttgatagtggtgttatcggatgggatgacccggaagttgtgacggtgctcaggagtgcattaaaacatggt

SEQ ID NO: 89042 - DNA, 75 bp, synthetic construct
  source 1..75: mol_type = other DNA
gctgattttgaagataatgacttcagcggcaaacgctctttgatggagtctgtcgaagcgaaaaccaaagacatt

SEQ ID NO: 89043 - DNA, 75 bp, synthetic construct
  source 1..75: mol_type = other DNA
caaaaattataggtgagtggtttccaaaatctgaacgtcctgttgctgctggctgggcgggtgtcggtttttcta

SEQ ID NO: 89044 - DNA, 75 bp, synthetic construct
  source 1..75: mol_type = other DNA
gcctcaatccatgaaacgcaaaacgaccgtgaagtggtcagcctgtatgcgcatttggtccagccagttttagat

SEQ ID NO: 89045 - DNA, 75 bp, synthetic construct
  source 1..75: mol_type = other DNA
ttggcggtaaaaatgtggcctggctgcactctgaaatcaccgcatggatggccgggcgcattgccggacgcaaac

SEQ ID NO: 89046 - DNA, 75 bp, synthetic construct
  source 1..75: mol_type = other DNA
atgtgcgatacgctatatggagctgcacggttatcttgatcacggcttccgtatgttatcccacccggaaacccc

SEQ ID NO: 89047 - DNA, 75 bp, synthetic construct
  source 1..75: mol_type = other DNA
taacttctggctgtcagtattaagtgatctgcaaaaccgtggcgttgaagacattctgattgcctgcgtggatgg

SEQ ID NO: 89048 - DNA, 75 bp, synthetic construct
  source 1..75: mol_type = other DNA
ggaagggggaccggatgcggaaaatggtgataccgggcagaccgtctacggagatgccgtacgcaccaccatcaa

SEQ ID NO: 89049 - DNA, 75 bp, synthetic construct
  source 1..75: mol_type = other DNA
gcgaatggcggaagcgtttgtttgcctgaagttgcactgtatgctgctggttacaggtcaatgaaatcaattacg

SEQ ID NO: 89050 - DNA, 75 bp, synthetic construct
  source 1..75: mol_type = other DNA
acgctggacacgctgaaagaaatagccgcagccattaacaatgatccgaatttcagtaccaccattaacaatgtg

SEQ ID NO: 89051 - DNA, 75 bp, synthetic construct
  source 1..75: mol_type = other DNA
taagcttggtgggcttatcaggctggatcaggcctctgtatatcgtcaggctctcggtaatgaccaggttggcca

SEQ ID NO: 89052 - DNA, 75 bp, synthetic construct
  source 1..75: mol_type = other DNA
agggcttatgattgggtcagaaatcatcttattcaaaatgaagatgcaattcctggccttgagatgatttccaag

SEQ ID NO: 89053 - DNA, 75 bp, synthetic construct
  source 1..75: mol_type = other DNA
atgctctgcgtgaaaaatgtttcgctacgtttaccagaaagccgcttgctgaaaaacgttaactttacggtgagt

SEQ ID NO: 89054 - DNA, 75 bp, synthetic construct
  source 1..75: mol_type = other DNA
aaaagcgccgcccgccaggtgacgaatcagattgtgcgtggaatgttggggagtttgctggggggagaagaaggt

SEQ ID NO: 89055 - DNA, 75 bp, synthetic construct
  source 1..75: mol_type = other DNA
caggtaaaactgtcacgctgcaaaaactggcggaatctctgtcagaaatcggcgttccggtgtttatggccgatg

SEQ ID NO: 89056 - DNA, 75 bp, synthetic construct
  source 1..75: mol_type = other DNA
actggcaaatcacgacaaccagattgtcctcggtacggccaacggaatgaccatcagtaccgggctggagtatgg

SEQ ID NO: 89057 - DNA, 75 bp, synthetic construct
  source 1..75: mol_type = other DNA
caatgttaaaccaaaaaatgaagtcttaaatacctggtgtgtgggaatgaatgattttgctcgtaatgccgaggg

SEQ ID NO: 89058 - DNA, 75 bp, synthetic construct
  source 1..75: mol_type = other DNA
gttaacgcaggggagattcgctttgataatcagacgacaccggatgccgcgctgagccgtgctgttgcaaaaggc

SEQ ID NO: 89059 - DNA, 75 bp, synthetic construct
  source 1..75: mol_type = other DNA
ttcaggccggttatgcccacagcgtcagcggcagcagcgctgaagggtataacggtcaggccacactgaatgtga

SEQ ID NO: 89060 - DNA, 75 bp, synthetic construct
  source 1..75: mol_type = other DNA
atcagattgtacgcgggatgttggggagtttgctggggggggagaagaaggtaagtcaggcgagatttgtctttg

SEQ ID NO: 89061 - DNA, 75 bp, synthetic construct
  source 1..75: mol_type = other DNA
tttcgcattctgactaacgaagcaggcgaacctgagtatcaccgcgtacagctgttcacgacgggcgatgaacgc

SEQ ID NO: 89062 - DNA, 75 bp, synthetic construct
  source 1..75: mol_type = other DNA
gcagaggatgctggagcaacagttcactctgttcctctgaaaggcaaggggaatgtcgtaagacgtatgttctca

SEQ ID NO: 89063 - DNA, 75 bp, synthetic construct
  source 1..75: mol_type = other DNA
agcaactgaatactgttctgctggtcattctgggaacgtaccttattcacagtgatgacccacacaaccgaatca

SEQ ID NO: 89064 - DNA, 75 bp, synthetic construct
  source 1..75: mol_type = other DNA
ccacccgtttccagcaggcccgtctggctatgcagggggtgaatgaaatagttcgccgcccggtggaacgggaaa

SEQ ID NO: 89065 - DNA, 75 bp, synthetic construct
  source 1..75: mol_type = other DNA
gaaaatgatggtggggctgtaccgtcagaacaggggacaaattactcttgacggggttgcgatgcagcaactgga

SEQ ID NO: 89066 - DNA, 75 bp, synthetic construct
  source 1..75: mol_type = other DNA
cctgcgcggcaatttcgcgcgccagcggcagcttaaacaaccctaccctgtctgccgataacgcgctttcattag

SEQ ID NO: 89067 - DNA, 75 bp, synthetic construct
  source 1..75: mol_type = other DNA
aggctgcaccgcgagacggtgcgcagcttcggcaataacgcatacgaactgaccagcacatacactcccgcaggc

SEQ ID NO: 89068 - DNA, 75 bp, synthetic construct
  source 1..75: mol_type = other DNA
ccggtaatgaagaggcataccaatatcttatccagtggatggcgcacattatccaaaagcctgatgaaaaaccgt

SEQ ID NO: 89069 - DNA, 75 bp, synthetic construct
  source 1..75: mol_type = other DNA
cgttccggcccaggccgatattatcgacgacaccattggcaatattcagcaggcgattaacgacgcttataaccc

SEQ ID NO: 89070 - DNA, 75 bp, synthetic construct
  source 1..75: mol_type = other DNA
aacaggaaccggaaaaagtctgcaccgcctgcggtcagagcggtggcggcaactgccctgattgtggcgcggtga

SEQ ID NO: 89071 - DNA, 75 bp, synthetic construct
  source 1..75: mol_type = other DNA
gaaccatgcctgaggagttgccgaccccgcaggtcagcatcaagcagttggaaaacagtgtaaaaattacagaga

SEQ ID NO: 89072 - DNA, 75 bp, synthetic construct
  source 1..75: mol_type = other DNA
ggtatcctgctggcggagatccagcaagaccgcctgctgatgcagtacgacactatcattattgacgaagcgcac

SEQ ID NO: 89073 - DNA, 75 bp, synthetic construct
  source 1..75: mol_type = other DNA
aaaactggcttttatgtgactggtaaagccggtgcttcagttgtggctcagactgaccagcgcttccgtcaggac

SEQ ID NO: 89074 - DNA, 75 bp, synthetic construct
  source 1..75: mol_type = other DNA
gttctttctgtacgtttttgcgccgctgctgcggttcaacatctgggccggagcactgagcggcgggatttttat

SEQ ID NO: 89075 - DNA, 75 bp, synthetic construct
  source 1..75: mol_type = other DNA
ctctatggaagtaccatctccgcaggcgggtatcgttaaagagatcaaagtctctgttggcgataaaacccagac

SEQ ID NO: 89076 - DNA, 75 bp, synthetic construct
  source 1..75: mol_type = other DNA
cggaactggtcaacggacatacggacgttatctgctcaaccagtatccgccacattctggctgtacgaaagagtg

SEQ ID NO: 89077 - DNA, 75 bp, synthetic construct
  source 1..75: mol_type = other DNA
tagggtgtggcaaatcgacgctactgaaaatgatggtggggctgtaccgtcagaacaggggacaaattactcttg

SEQ ID NO: 89078 - DNA, 75 bp, synthetic construct
  source 1..75: mol_type = other DNA
aagagtcagaagatcctggatcatatgggttcaacagaactggcggctaatctctttcgagctacccaaacagaa

SEQ ID NO: 89079 - DNA, 75 bp, synthetic construct
  source 1..75: mol_type = other DNA
tccttatattatggggctggctgatggtttaatgaaaaacgatataccatacaaattaatatcagaaggaaactg

SEQ ID NO: 89080 - DNA, 75 bp, synthetic construct
  source 1..75: mol_type = other DNA
gaattagagaaagacgcaaacaggttggtttaagtcaaaacgatttaagcaaagctgctggcgtatctggctcat

SEQ ID NO: 89081 - DNA, 75 bp, synthetic construct
  source 1..75: mol_type = other DNA
ccggtctgcccttcagtatcactgacaacctgatgctggagccacaactgcagtatacctggcagggactttccc

SEQ ID NO: 89082 - DNA, 75 bp, synthetic construct
  source 1..75: mol_type = other DNA
atatttttagctgttttagtaatttttcaaatgattggtggtataacagatttctatcgttcatggcgtggtgta

SEQ ID NO: 89083 - DNA, 75 bp, synthetic construct
  source 1..75: mol_type = other DNA
gacgggcaggggaactggggcgcaccggacgatccgaaatcgttcgcggcaatgcgttacaccgaatcccgcctg

SEQ ID NO: 89084 - DNA, 75 bp, synthetic construct
  source 1..75: mol_type = other DNA
ttatttcttttggattatgttctgcggttaatgcagccagccaaggccaagggattattaatttcaaaggaatta

SEQ ID NO: 89085 - DNA, 75 bp, synthetic construct
  source 1..75: mol_type = other DNA
tatcaatgtcatctggaatgcgctcggaaagaaccgcatgtttgacgggaataaagagcttaaggagttcatcat

SEQ ID NO: 89086 - DNA, 75 bp, synthetic construct
  source 1..75: mol_type = other DNA
gtctgtgctacccgcacgttaaggtgtatgactctgtcaccgacagcgaacggctggagccgctttcctcccgcg

SEQ ID NO: 89087 - DNA, 75 bp, synthetic construct
  source 1..75: mol_type = other DNA
cttctcagggctcaatgaccgccctgccagtgaccatcgactatcccgcagcactggctttgcggcagatggcgc

SEQ ID NO: 89088 - DNA, 75 bp, synthetic construct
  source 1..75: mol_type = other DNA
aagagtcgccgcaggggagcgattcatgtcattagtgcgttctcaacaatgcacagtctggtcatcggacagatc

SEQ ID NO: 89089 - DNA, 75 bp, synthetic construct
  source 1..75: mol_type = other DNA
gaacctggcattaccccttctctccaggcaccaccagcgatgaccgcattaacaccgattactggcaggatttac

SEQ ID NO: 89090 - DNA, 75 bp, synthetic construct
  source 1..75: mol_type = other DNA
ggatgatgattgtgctgttcgttttgtgccttctggcgcagttaagcggctgcacgactacgcgaacggtctacg

SEQ ID NO: 89091 - DNA, 75 bp, synthetic construct
  source 1..75: mol_type = other DNA
tattggattatatccaggaagattaaaaatcctcttcttcacactgctggcggtatcgaccgttgcagcattgca

SEQ ID NO: 89092 - DNA, 75 bp, synthetic construct
  source 1..75: mol_type = other DNA
cagcatggttgttaaccgatcgttttccccgcctgctcataattgctgtaactattggcagtgtaaccagtttcc

SEQ ID NO: 89093 - DNA, 75 bp, synthetic construct
  source 1..75: mol_type = other DNA
actgcagcagcctgaagccgattccgccattcagcgggaagccgatcgggtagtcccggaaaacaccgggcagtc

SEQ ID NO: 89094 - DNA, 75 bp, synthetic construct
  source 1..75: mol_type = other DNA
cgttatcccattgaacattatgagaatcgtgatgtttcggtcgatggtgcggaaaagcgcggcgtgctctactgc

SEQ ID NO: 89095 - DNA, 75 bp, synthetic construct
  source 1..75: mol_type = other DNA
ggcacccgtcttgagcgcccggaactttttcgtcttctgagagattgccaacaaaatgacattttgcttatcgag

SEQ ID NO: 89096 - DNA, 75 bp, synthetic construct
  source 1..75: mol_type = other DNA
accgtaccatcggtcaaaaaaggccacttcagatatctcatatctgggggatccggattagacttgagttggaag

SEQ ID NO: 89097 - DNA, 75 bp, synthetic construct
  source 1..75: mol_type = other DNA
acgtatgacgcgcagcacccgggccggatggtggcgcaccgttacgcgggaaggccggagatgcgctaccgctac

SEQ ID NO: 89098 - DNA, 75 bp, synthetic construct
  source 1..75: mol_type = other DNA
tcacgctggcagcaaaacagctgcaaatcagtgaaggtacgctgcgcaatctttactacaaagtcaaagaccata

SEQ ID NO: 89099 - DNA, 75 bp, synthetic construct
  source 1..75: mol_type = other DNA
tttccggctactcaaagaatcagacagtcgctttctggctgttttctccaggatccttggacaatatgagcaagc

SEQ ID NO: 89100 - DNA, 75 bp, synthetic construct
  source 1..75: mol_type = other DNA
cgctgctgcaaataaatggctgtccggtggcgttcctaaccgttaccgcttcaaagtcaaacctgatgacccgat

SEQ ID NO: 89101 - DNA, 75 bp, synthetic construct
  source 1..75: mol_type = other DNA
ctacttaaattactccatgtacgtaatcatggaccgtgcgttgccgtttattggtgatggtctgaaacctgttca

SEQ ID NO: 89102 - DNA, 75 bp, synthetic construct
  source 1..75: mol_type = other DNA
ccatcagtaccgggctggagtatgggccggataacgaggccaataccggcggccaatggatacaaaatggcggta

SEQ ID NO: 89103 - DNA, 75 bp, synthetic construct
  source 1..75: mol_type = other DNA
tgaccgcctttccgataccgtctctgcacgcaatacctccggattccgtgaacaggtcgctgcatggctggaaaa

SEQ ID NO: 89104 - DNA, 75 bp, synthetic construct
  source 1..75: mol_type = other DNA
acactccatcgccccctggctgatgccgtgacagcatggttcccggaaaacaaacaatctgatgtatcacagata

SEQ ID NO: 89105 - DNA, 75 bp, synthetic construct
  source 1..75: mol_type = other DNA
tcacggcagagaagaaacccgtcttcatattgtttgcgatgtccctgatgagcttattgatttcacgtttgaata

SEQ ID NO: 89106 - DNA, 75 bp, synthetic construct
  source 1..75: mol_type = other DNA
ggaaaaatcaggaagtggcacactcactgtcagcaacaccacactcacccagaaaaccgtcaacctgaatgaagg

SEQ ID NO: 89107 - DNA, 75 bp, synthetic construct
  source 1..75: mol_type = other DNA
gcaggcacaggacactcttaattactacaaaaatcaggccgggagtcttgactcatatctaaaacgttatcagga

SEQ ID NO: 89108 - DNA, 75 bp, synthetic construct
  source 1..75: mol_type = other DNA
gatctggcggaacattgcgaatttgaagaagtggcgcacctgctgatccacggcaaactgccgacccgtgacgaa

SEQ ID NO: 89109 - DNA, 75 bp, synthetic construct
  source 1..75: mol_type = other DNA
caggctgccgggtatgcctatggcggttctctgtatgcccgtaatcaggtcagaaatatccagcttatctccatg

SEQ ID NO: 89110 - DNA, 75 bp, synthetic construct
  source 1..75: mol_type = other DNA
cgtttgccctgagccgcccgcttcaggccggcgcctttaactacaccctgaaccgtgacagcgatgaagactggt

SEQ ID NO: 89111 - DNA, 75 bp, synthetic construct
  source 1..75: mol_type = other DNA
cgggttaaacacttttatttatgataatgtaggtgaggcaaatatcagaggggtggagcttgcaactcagattcc

SEQ ID NO: 89112 - DNA, 75 bp, synthetic construct
  source 1..75: mol_type = other DNA
tttacaaatgtcggaaacagcaacctcggggtggcaacctccggacagggtatccgggttgtggatgcacagaat

SEQ ID NO: 89113 - DNA, 75 bp, synthetic construct
  source 1..75: mol_type = other DNA
tgggttaaacacttttatttatgataatgtgggtgaggcaaatatcagaggtgtggagcttgcaactcagattcc

SEQ ID NO: 89114 - DNA, 75 bp, synthetic construct
  source 1..75: mol_type = other DNA
cctcgaactgaaactgcgtcatcttgccaaactggaagagatgaagattcgcggtgagcagagtgagctggaaaa

SEQ ID NO: 89115 - DNA, 75 bp, synthetic construct
  source 1..75: mol_type = other DNA
gtaaatcggcttttaatcataaagtcagacatggtgcggacaagaaagcatatacctggacgccaacaaaagaag

SEQ ID NO: 89116 - DNA, 75 bp, synthetic construct
  source 1..75: mol_type = other DNA
ccattcgcatgtgtatattccagcatcagtatctggcagagcacaaaacaccgggtcagactctcctgaagccga

SEQ ID NO: 89117 - DNA, 75 bp, synthetic construct
  source 1..75: mol_type = other DNA
ttctggcatcagggcaatctcaagctgcgtttgagttatcagtttgagccgggggcagatgctgacggagtgacc

SEQ ID NO: 89118 - DNA, 75 bp, synthetic construct
  source 1..75: mol_type = other DNA
ctgattatcctcggggcgattatccttggcctgatgctctctatcgtgggtgtgctgctgcgctcgttgtttaat

SEQ ID NO: 89119 - DNA, 75 bp, synthetic construct
  source 1..75: mol_type = other DNA
ttatgcggtcaacacattgaaagaagtggaaaccagtctgagccgctttgagcaaaacggtattccggtgaaagg

SEQ ID NO: 89120 - DNA, 75 bp, synthetic construct
  source 1..75: mol_type = other DNA
gcaggctacagggaaacgcatcgcaataactggcagattgaaaatattgcccttgagcggaacagagaacgtcag

SEQ ID NO: 89121 - DNA, 75 bp, synthetic construct
  source 1..75: mol_type = other DNA
atgaccctgcgtcgcctgccggatgaagatccgcagaacctggctgacccggcttaccgtcgtcgccgtattatt

SEQ ID NO: 89122 - DNA, 75 bp, synthetic construct
  source 1..75: mol_type = other DNA
cggcgcgaacggtggcgaaccgtattgcggaagagctaaaaacggagccgggcggttgcatcggttacaaagtgc

SEQ ID NO: 89123 - DNA, 75 bp, synthetic construct
  source 1..75: mol_type = other DNA
gtgggcggtacgcaacgacttgatagctaagaacctgaccgaaggtcttgagctgaaagtcccgcagcgtaaagc

SEQ ID NO: 89124 - DNA, 75 bp, synthetic construct
  source 1..75: mol_type = other DNA
ccagaataaggatgacgtgtttgagcgaggagtgatcaacgtcttcagagtgctgagctggaattacaaaaccaa

SEQ ID NO: 89125 - DNA, 75 bp, synthetic construct
  source 1..75: mol_type = other DNA
caacaggaaccatcatcaacaccggcgcagaaggcggcccggattctgacaactcgtacacgggtcagaaggtcc

SEQ ID NO: 89126 - DNA, 75 bp, synthetic construct
  source 1..75: mol_type = other DNA
tgaagtccccctgtatgcctccatgctgacacaggcaatggactatgaccggattctggcaggctcccgcagcca

SEQ ID NO: 89127 - DNA, 75 bp, synthetic construct
  source 1..75: mol_type = other DNA
aacatacggacctggtagcaacgttgtactgccagcagaagaagcggaagaactggcacggattgcactggcatc

SEQ ID NO: 89128 - DNA, 75 bp, synthetic construct
  source 1..75: mol_type = other DNA
cctgtttaagcagaaagtcgtcagaaggtaaaccacaaatatttacaaccttacgaaatattgatcttaaccttc

SEQ ID NO: 89129 - DNA, 75 bp, synthetic construct
  source 1..75: mol_type = other DNA
agcacatccgtatcatcagtgtgacgactgcggcggccatccatccagtcatcggttcgtctgagaatgacgtgc

SEQ ID NO: 89130 - DNA, 75 bp, synthetic construct
  source 1..75: mol_type = other DNA
gacaggtgtttccgctgacggcaggacggaatgtatttcttgccggaatggactggaaaacactgcccgcaagcc

SEQ ID NO: 89131 - DNA, 75 bp, synthetic construct
  source 1..75: mol_type = other DNA
tccggtcacgtcagcggttatagcgtggcgcatcaggcgctggaagaagaactggccgagtggctgggctattcg

SEQ ID NO: 89132 - DNA, 75 bp, synthetic construct
  source 1..75: mol_type = other DNA
gcttcgcgccaaaagatcatcgtcgttgggatgatatctgggaagacggactggaagctgaaaagctacgggaag

SEQ ID NO: 89133 - DNA, 75 bp, synthetic construct
  source 1..75: mol_type = other DNA
cttataccatcttgttcgtgctgattgcgttagttgcggcaatgacctggattgtacctgcgggaaaatatcaga

SEQ ID NO: 89134 - DNA, 75 bp, synthetic construct
  source 1..75: mol_type = other DNA
cctttaatcttaaagcccgtgcagtgagtaaaggccaggttactcctggagatatcagttctgttataaccgtca

SEQ ID NO: 89135 - DNA, 75 bp, synthetic construct
  source 1..75: mol_type = other DNA
ccagtgccagtaaccaagaagcgcaccaagatgagcttgggtacctaccctcacctctcattagcaaaggcaaga

SEQ ID NO: 89136 - DNA, 75 bp, synthetic construct
  source 1..75: mol_type = other DNA
gcctttgcgtgcatcctcggctttaaggttaaggccaccggacggcgcaaatacacgagcgcctttatcgaagtg

SEQ ID NO: 89137 - DNA, 75 bp, synthetic construct
  source 1..75: mol_type = other DNA
tttgaggtggagccgttcccgcaaacctacctcagattcagtccggcggcgaaatcgttcgaagtttttgttaac

SEQ ID NO: 89138 - DNA, 75 bp, synthetic construct
  source 1..75: mol_type = other DNA
gttcagggacaaacctggacaacctcgcgggcaatatgaacacaaagcgcctggttatcactccggcaacggata

SEQ ID NO: 89139 - DNA, 75 bp, synthetic construct
  source 1..75: mol_type = other DNA
ctttaattaataaaaagaataatcagtcaactcattacattaaagccactgtaccagcatgcagagtgtgcaatt

SEQ ID NO: 89140 - DNA, 75 bp, synthetic construct
  source 1..75: mol_type = other DNA
gtgcgcatcggtgccccaaccggtgtggcctgttcggggtgccccggcggagtgacgtccggccatccggtcaat

SEQ ID NO: 89141 - DNA, 75 bp, synthetic construct
  source 1..75: mol_type = other DNA
cgcttcagcagtccggcggcgaagacggtggcagtgtggtgttcccgccggtgctggtgcagatgctcgaccggc

SEQ ID NO: 89142 - DNA, 75 bp, synthetic construct
  source 1..75: mol_type = other DNA
gatcccccctctgtcatggatgatggtacgaggccttggtgccggattttccagcgtatacagccactttgcgtc

SEQ ID NO: 89143 - DNA, 75 bp, synthetic construct
  source 1..75: mol_type = other DNA
ccggaaatcatcaatctgtttcaggactacgtccagaactgcgtgctgggtgatatttacctgaaccacaaatac

SEQ ID NO: 89144 - DNA, 75 bp, synthetic construct
  source 1..75: mol_type = other DNA
gctcaaaccggcgctggcgcgcggcgagctgaaaaccatcgccgccaccacctggagcgagtacaaaaaatactt

SEQ ID NO: 89145 - DNA, 75 bp, synthetic construct
  source 1..75: mol_type = other DNA
atgcgaaggccaacggttcaccagtggttctctcggagttgtcacaggtgcagataaaatactcagacctcgcta

SEQ ID NO: 89146 - DNA, 75 bp, synthetic construct
  source 1..75: mol_type = other DNA
ccggcagtcgcatcctccgggtactcaaagcgctgcgcggtcatgccctgaacggtatttccaacggtgaactgg

SEQ ID NO: 89147 - DNA, 75 bp, synthetic construct
  source 1..75: mol_type = other DNA
ggcacattccaggcagaacacgaagattttgctttcgatatgagcgacagtcacaaagagcgactggctttattt

SEQ ID NO: 89148 - DNA, 75 bp, synthetic construct
  source 1..75: mol_type = other DNA
gtagcgctgaaatatatcccgcttctggccgggatcccgcgctcgtctgcagcgcagatgacgaagctggatatt

SEQ ID NO: 89149 - DNA, 75 bp, synthetic construct
  source 1..75: mol_type = other DNA
gcaagtcgtaatacaaggtgggacaaaactgagacacataaggcctcgcaatggcttgcaaggctttacatgttt

SEQ ID NO: 89150 - DNA, 75 bp, synthetic construct
  source 1..75: mol_type = other DNA
ttaaaagagattagcgccacccttgaacgggtactaaatcaccctgacgaaacgcaagcccgacgcttaatgacg

SEQ ID NO: 89151 - DNA, 75 bp, synthetic construct
  source 1..75: mol_type = other DNA
ctatttgcgtgagacgattaagccatgtctggaacgactggagcatgtacgcgagagtcagctatccacttcttt

SEQ ID NO: 89152 - DNA, 75 bp, synthetic construct
  source 1..75: mol_type = other DNA
cgcgaagcgcaatctgccattatgaccgatgaaatcccgttagatgatgcactgttacaattgcgagaatttatc

SEQ ID NO: 89153 - DNA, 75 bp, synthetic construct
  source 1..75: mol_type = other DNA
tccttcgcggtggcagtattccgtcaggagcaggcctgcgtatcttctatcggaaccagcgtttgcaggaagatg

SEQ ID NO: 89154 - DNA, 75 bp, synthetic construct
  source 1..75: mol_type = other DNA
gcatctccctatgtcagctatgaagccgtgttgcataaacgtgagcagcaccgtaagtcgctggagtttttccgt

SEQ ID NO: 89155 - DNA, 75 bp, synthetic construct
  source 1..75: mol_type = other DNA
ttgacctctactgcgaccaggccagcggtcttgtgaatattgccattatggacggtaccgtctggcgtcttctga

SEQ ID NO: 89156 - DNA, 75 bp, synthetic construct
  source 1..75: mol_type = other DNA
cggcaggcccaacccaacctggacaaatgcgacggtaagacaaagtagtgattatctggtcggcatgtttgctgc

SEQ ID NO: 89157 - DNA, 75 bp, synthetic construct
  source 1..75: mol_type = other DNA
accgccgacattctgacaccacgacgccgggaggattacggtaaggacctgtggagtacttatcagaccatccag

SEQ ID NO: 89158 - DNA, 75 bp, synthetic construct
  source 1..75: mol_type = other DNA
aacggctggcagcctgcgcaggtcagtcagttgctcgatgagattgataacgtcgacctgcaggtgaccaatctg

SEQ ID NO: 89159 - DNA, 75 bp, synthetic construct
  source 1..75: mol_type = other DNA
tgatgcgcaggatgctgctcacggggatggccgagccgtatgctgcagctcagcctgctgcactggaagaggggg

SEQ ID NO: 89160 - DNA, 75 bp, synthetic construct
  source 1..75: mol_type = other DNA
acttcgacaacacgattttgcgccgttcatacgaacggcaggggatcccctgcccgtggcgttactacaacgatc

SEQ ID NO: 89161 - DNA, 75 bp, synthetic construct
  source 1..75: mol_type = other DNA
taccggaacccgccatcatcgcggagcctgactttgaagcaattctggctgacacaaaagccatgatgattgcgt

SEQ ID NO: 89162 - DNA, 75 bp, synthetic construct
  source 1..75: mol_type = other DNA
ggcatgccggaatatctcggcgcattactctcggccagcctgtctcattcggcggacatgttcagaaaactgtac

SEQ ID NO: 89163 - DNA, 75 bp, synthetic construct
  source 1..75: mol_type = other DNA
agcaggacgtgtgaccatctaatgatcgaccttgaaaccatgggaaaaaatcctgatgccccgatcatctcaata

SEQ ID NO: 89164 - DNA, 75 bp, synthetic construct
  source 1..75: mol_type = other DNA
gtaattttaaagcaatagataaccacgggaaggaaataacaaacagaaaaggattacctaatgtctgcagagttc

SEQ ID NO: 89165 - DNA, 75 bp, synthetic construct
  source 1..75: mol_type = other DNA
aagatgaaattattatcagcaccccggaaaccctgacgctgaacggtggcgggtcttacctgagactgagtaaga

SEQ ID NO: 89166 - DNA, 75 bp, synthetic construct
  source 1..75: mol_type = other DNA
gttatttctacggctccagtcagtctgccagccagattatgcgccagaacgtcaccatgaatgccctgaaagagg

SEQ ID NO: 89167 - DNA, 75 bp, synthetic construct
  source 1..75: mol_type = other DNA
aggtgagcgccacaatgcgctggatgatgcccgttaccaggcaaaatacgtttcaactatctggcaaaaactgct

SEQ ID NO: 89168 - DNA, 75 bp, synthetic construct
  source 1..75: mol_type = other DNA
atattgtaagagggcagtattctgaactacaaaatcatcataaaacagaagcattaactcagaataataaatata

SEQ ID NO: 89169 - DNA, 75 bp, synthetic construct
  source 1..75: mol_type = other DNA
ccgatgaacgtcacttttgacaacctagcccctgaagtacagaacgctgtcatggttaagttcgacacatgtgaa

SEQ ID NO: 89170 - DNA, 75 bp, synthetic construct
  source 1..75: mol_type = other DNA
agccaaaatgcgttacaaaacgagccagaaacgaaacaacctgaaccagtcgtgcaacaggaagaggaaaaagtt

SEQ ID NO: 89171 - DNA, 75 bp, synthetic construct
  source 1..75: mol_type = other DNA
gagtttccccggggacaacactgaatacaaatcaagatatgaacaaaactaataaatatggcgtgaaatataagg

SEQ ID NO: 89172 - DNA, 75 bp, synthetic construct
  source 1..75: mol_type = other DNA
gtgaatgaagtttatgtgattgccggtggtgagtggttgcggaataacctgaacgccattgcggcatttatgagt

SEQ ID NO: 89173 - DNA, 75 bp, synthetic construct
  source 1..75: mol_type = other DNA
ggtgaacgcaaggaaaccggaaaatacacgtctgttgttgatctcgcccgcgccagagtccaccgacagcacact

SEQ ID NO: 89174 - DNA, 75 bp, synthetic construct
  source 1..75: mol_type = other DNA
aaatcaaccgaaacaagcaacaggctggcgtgacagccggcaaaccaaaactcgacctgacgaacactgactgga

SEQ ID NO: 89175 - DNA, 75 bp, synthetic construct
  source 1..75: mol_type = other DNA
tatctggaagaagagggcgcgaacaagagcagcaatacagaaaccttcgtggcgatccgcgtcgacattgataac

SEQ ID NO: 89176 - DNA, 75 bp, synthetic construct
  source 1..75: mol_type = other DNA
agcgggcgtgcatgaatatgttgtttccactggcgatacgctaagcagcattctcaatcagtatggtattgatat

SEQ ID NO: 89177 - DNA, 75 bp, synthetic construct
  source 1..75: mol_type = other DNA
tttcagtgcctggaaggccagattacgcgagggggtgccaccagaggccatgctggatggcgtgaggcgttacgc

SEQ ID NO: 89178 - DNA, 75 bp, synthetic construct
  source 1..75: mol_type = other DNA
ctggcctggacaaggcgctggctgccggtggtaccgaaatctcaaaagaagaatattttgcccgaaaaaatggca

SEQ ID NO: 89179 - DNA, 75 bp, synthetic construct
  source 1..75: mol_type = other DNA
aatgccaacaccgtctgaagatgcattaaaacagatggtggatgataagaaagaacgattgaaggggccattatg

SEQ ID NO: 89180 - DNA, 75 bp, synthetic construct
  source 1..75: mol_type = other DNA
tcatggctgttctggagtcgctttctcccgcagttgagccctactcaattgatgaaatgttcattgatttgcggg

SEQ ID NO: 89181 - DNA, 75 bp, synthetic construct
  source 1..75: mol_type = other DNA
taacaactcggctgctgctaaccgtttgctcgacaggctcgaatttctgcgtaccctgaatatcaatcatagtgc

SEQ ID NO: 89182 - DNA, 75 bp, synthetic construct
  source 1..75: mol_type = other DNA
atgccagatcaaacgaggatcttgctcatcgttttattgtgcggtgtcgggaaacttccaccattctgcccgcag

SEQ ID NO: 89183 - DNA, 75 bp, synthetic construct
  source 1..75: mol_type = other DNA
atctcggaggagggaaagcgttatcgccgggctgtggcgcttattgttcgccagcagcggctgaaattaagcctg

SEQ ID NO: 89184 - DNA, 75 bp, synthetic construct
  source 1..75: mol_type = other DNA
gctggcactgtccctgatttacccgcagagcgtggccgtcagttttgtcgccacctgggcgattctggcgacggt

SEQ ID NO: 89185 - DNA, 75 bp, synthetic construct
  source 1..75: mol_type = other DNA
tgctgaacgtgtcgctggcgctgatgctggcactgtccctgatttacccgcagagcgtggccgtcaattttgtcg

SEQ ID NO: 89186 - DNA, 75 bp, synthetic construct
  source 1..75: mol_type = other DNA
gcgggtgaatgtcctgaagggtgaacagcgtcgggtcagtggcagtgcccgggtttccctcaagcgtcgtatctg

SEQ ID NO: 89187 - DNA, 75 bp, synthetic construct
  source 1..75: mol_type = other DNA
aaacaacagctctactgagcttgataaaagatgaaggtctgctctctgggctggataaatatcttgcacctcatc

SEQ ID NO: 89188 - DNA, 75 bp, synthetic construct
  source 1..75: mol_type = other DNA
aacgccaatatcaaacccaacaaaaagaaatcctccaacaagatagacccggcggtttctgcactcatggcgttc

SEQ ID NO: 89189 - DNA, 75 bp, synthetic construct
  source 1..75: mol_type = other DNA
acagaaatttgaacagcttttacagaaggggcagacctgggcggagggcgatccggtcaaactggagtttgtcaa

SEQ ID NO: 89190 - DNA, 75 bp, synthetic construct
  source 1..75: mol_type = other DNA
ccatcccggtaatgttactgagctccggattgacgaatgcattgtcagaaaatatatggaaagtgccgacaggat

SEQ ID NO: 89191 - DNA, 75 bp, synthetic construct
  source 1..75: mol_type = other DNA
gagtgcttatcagaccatccaagagaatatgctgaaaggcgggatttccggtcgcagcgctaaaggaaaacgtat

SEQ ID NO: 89192 - DNA, 75 bp, synthetic construct
  source 1..75: mol_type = other DNA
aattcaaaatcagaaaaattagacggaatattgagtatagtttcagaggttctgacagatatttttatttgttta

SEQ ID NO: 89193 - DNA, 75 bp, synthetic construct
  source 1..75: mol_type = other DNA
gtatcaccagtaatgcagcccgtaacggtgataccgccagcctggtcagtctggccacgacttcgtcgatggaga

SEQ ID NO: 89194 - DNA, 75 bp, synthetic construct
  source 1..75: mol_type = other DNA
attgccatataaccaaaagcctgattgctgtctccgaactggcccgcagggttacctgcaaaagccatcgcagac

SEQ ID NO: 89195 - DNA, 75 bp, synthetic construct
  source 1..75: mol_type = other DNA
agccaatatcagccagcctgacgccgatgaactgcttgcagtatcacgtggtgaatttgttgcagggattagcga

SEQ ID NO: 89196 - DNA, 75 bp, synthetic construct
  source 1..75: mol_type = other DNA
aataattgcggctgtagggtttgtcgcaggtaaggcaattttctctgataatgttgtgtttaggcgaaggatgta

SEQ ID NO: 89197 - DNA, 75 bp, synthetic construct
  source 1..75: mol_type = other DNA
cggggctgatggcagccgggctgttgttgacatccgctcaggtactggcggtggatgtgccgattaaaattaccg

SEQ ID NO: 89198 - DNA, 75 bp, synthetic construct
  source 1..75: mol_type = other DNA
cgcgatccacgacggctttaccctcgacgatcctaaacgcccgcgtaactattcgccgcagcaatatatgcgtag

SEQ ID NO: 89199 - DNA, 75 bp, synthetic construct
  source 1..75: mol_type = other DNA
ccagcgtgtacagccacttcgcctcttcctctatcagtccgacggccagtgcagcaggcagtgtggttgacggta

SEQ ID NO: 89200 - DNA, 75 bp, synthetic construct
  source 1..75: mol_type = other DNA
ctatttgcgtgagacgattaagccatgtttggagcgactggagcatgtacgcgacagccagctatctgcatcttt

SEQ ID NO: 89201 - DNA, 75 bp, synthetic construct
  source 1..75: mol_type = other DNA
ggcgatttggcgcagtggagtagcaacgcgcaggatcgctggcatcttggcgtgatggcaggttacgctaatcag

SEQ ID NO: 89202 - DNA, 75 bp, synthetic construct
  source 1..75: mol_type = other DNA
gaagaactggagtccaggggcttattccgtcgagctgcaacggtgtggatggaggcattccgtgaaagccactcc

SEQ ID NO: 89203 - DNA, 75 bp, synthetic construct
  source 1..75: mol_type = other DNA
atggctttaagctgttccgcgaaaaactggatacccgtcgcggttcaaattcacaactcgaaacggcagtgaaag

SEQ ID NO: 89204 - DNA, 75 bp, synthetic construct
  source 1..75: mol_type = other DNA
atcacacagcgaacggtgaatggtgaaaccgcagaacagtggcggtacgacgaacgcggctggctgacacaaatc

SEQ ID NO: 89205 - DNA, 75 bp, synthetic construct
  source 1..75: mol_type = other DNA
cgcagataaaatattaagtgcattcaaacgctgggctgatgacgcgatcctcagtaaggggggagtagtttcagt

SEQ ID NO: 89206 - DNA, 75 bp, synthetic construct
  source 1..75: mol_type = other DNA
accgtactggaaagcctgcagcaggaaggctttcagccgttcttcgcctgccagacccgcgtacgtgacccgggc

SEQ ID NO: 89207 - DNA, 75 bp, synthetic construct
  source 1..75: mol_type = other DNA
acaccgtccagaactggttgcaggtcggtaaatatatggcgattgctgtgggcggcattatcgccatcagaaaaa

SEQ ID NO: 89208 - DNA, 75 bp, synthetic construct
  source 1..75: mol_type = other DNA
tttgatgcctgtattgattcgtggaaagcggacccggaattaaataattcgagttatatgtggaatatcctgata

SEQ ID NO: 89209 - DNA, 75 bp, synthetic construct
  source 1..75: mol_type = other DNA
aagactacctaaattttggtgaagtatctcagttagccgtggatgtacttaccacgaaagatatgttaccagtat

SEQ ID NO: 89210 - DNA, 75 bp, synthetic construct
  source 1..75: mol_type = other DNA
agcgcaggcgctcactatcaacaaggatgaggttaactcaactgttgatttaactcttacaaaacaaacagggac

SEQ ID NO: 89211 - DNA, 75 bp, synthetic construct
  source 1..75: mol_type = other DNA
ctcatcagcacggaaggggcaacagcgtggtgcgcagaatatgatgaatggggcaacctgctgaatgaagagaac

SEQ ID NO: 89212 - DNA, 75 bp, synthetic construct
  source 1..75: mol_type = other DNA
caggccgagatccacgatttcctgatgctggatattgaacgccgggtttacgacctgaacaacattaacgacaga

SEQ ID NO: 89213 - DNA, 75 bp, synthetic construct
  source 1..75: mol_type = other DNA
ggtattgattacattacccgtaatggtgaacttgaggcttactgttatgatggaaaaggttcagagcaaacaggg

SEQ ID NO: 89214 - DNA, 75 bp, synthetic construct
  source 1..75: mol_type = other DNA
gcgccgctgccgccgtaccgggtactgaccgggctggtggaccgcttcgggcgcacacagacgttccaccgtgag

SEQ ID NO: 89215 - DNA, 75 bp, synthetic construct
  source 1..75: mol_type = other DNA
catggctttgaacgcaattgctgtcctctcggttgtggggatttgggcgatgattgctgcgatgctgctgatttg

SEQ ID NO: 89216 - DNA, 75 bp, synthetic construct
  source 1..75: mol_type = other DNA
gtctggttgtgaaggaaagcgattacccctgctggcttgatgaagatgacgaaaatctgccgtggtgctcgatgc

SEQ ID NO: 89217 - DNA, 75 bp, synthetic construct
  source 1..75: mol_type = other DNA
ccagaactatacgtacatccccaccatcaccgtgctggaaagtctgcagcgggaaggcttccagccattcttcgc

SEQ ID NO: 89218 - DNA, 75 bp, synthetic construct
  source 1..75: mol_type = other DNA
tgtgttgccaacattggttcaaacaaagtttgttcttgcgactaaagctatcaagattgatttttcagtattaaa

SEQ ID NO: 89219 - DNA, 75 bp, synthetic construct
  source 1..75: mol_type = other DNA
tgtatgtaatgcctggcacgcactgtaaatgggttcgggtcgatggcgatcgggtagaagattttcgcacggtga

SEQ ID NO: 89220 - DNA, 75 bp, synthetic construct
  source 1..75: mol_type = other DNA
agcatcgacaccgacattaagctcaaccgcgcattgtgggtgatggctgaaacgctgctggagagtatgcgctga

SEQ ID NO: 89221 - DNA, 75 bp, synthetic construct
  source 1..75: mol_type = other DNA
attccgcggcttcaatagttttagatgctgcaaataaagttaataacggctttacaaagtcgtggaatgatatgt

SEQ ID NO: 89222 - DNA, 75 bp, synthetic construct
  source 1..75: mol_type = other DNA
acatgtattttccagcaattatgcgctgtaccacagcatgagccaacgggttatggctgttctggagtcgctttc

SEQ ID NO: 89223 - DNA, 75 bp, synthetic construct
  source 1..75: mol_type = other DNA
tgccgctggcgcttgtcagcacggaaggggcaacagaatggtgcgcagaatacgatgaatggggcaacctgctga

SEQ ID NO: 89224 - DNA, 75 bp, synthetic construct
  source 1..75: mol_type = other DNA
attgccgctcatgaaggcaaagcgccgcagcagatcatcattatggcgcatctggatacttacgccccgctgagc

SEQ ID NO: 89225 - DNA, 75 bp, synthetic construct
  source 1..75: mol_type = other DNA
gaggaccagtcagaacagaaattaccaacttaacgccggagcaggctgcagaggcgtatagaaaaatgatgggct

SEQ ID NO: 89226 - DNA, 75 bp, synthetic construct
  source 1..75: mol_type = other DNA
gaaacaggattacgccgacattccggctcatcaagttgaacattatctcccgcagacaccggttgaagtcctgga

SEQ ID NO: 89227 - DNA, 75 bp, synthetic construct
  source 1..75: mol_type = other DNA
atgtctcgtattgaaagcgatttccttggtgagcgtgaagttccggatgattgctattatggtgttcagacactt

SEQ ID NO: 89228 - DNA, 75 bp, synthetic construct
  source 1..75: mol_type = other DNA
ggaaacactcaggcggagggcgtccgttgctatggcgcaatccaggataatcaggcgctgagtgaagggatcacc

SEQ ID NO: 89229 - DNA, 75 bp, synthetic construct
  source 1..75: mol_type = other DNA
tcaatatcgttggttcacaaaagaaactgggcgctgcctgcgaagtttcacagcaggccgtctataagtggcttc

SEQ ID NO: 89230 - DNA, 75 bp, synthetic construct
  source 1..75: mol_type = other DNA
ctgggtgtcggaaccacgaaaaacgccgtttttcagcatatccagagcctgccccgcggacagcagaaagaggct

SEQ ID NO: 89231 - DNA, 75 bp, synthetic construct
  source 1..75: mol_type = other DNA
acaactccttaatcccccgcatatcgccgtcaggggtggcaaaacaaagtccatgctataacgttgtgtcgcgta

SEQ ID NO: 89232 - DNA, 75 bp, synthetic construct
  source 1..75: mol_type = other DNA
cgaatataccatgacgcagtctgcgccgttgatggtgttgccggatccggacgcgtttgtggtagttcaggtgaa

SEQ ID NO: 89233 - DNA, 75 bp, synthetic construct
  source 1..75: mol_type = other DNA
gagcaaaggagatttatgaagaattgataattgccgtgccgagcagggaaaatgaattcaggaagctttctctcg

SEQ ID NO: 89234 - DNA, 75 bp, synthetic construct
  source 1..75: mol_type = other DNA
tgaacgccgtcaccggtaatctgtcgccggttgccccggaagcgattgcggccgcagaagccggaaccgatgccg

SEQ ID NO: 89235 - DNA, 75 bp, synthetic construct
  source 1..75: mol_type = other DNA
ggctacgcctgaccttaaccgccgcccatgaaatgcaggatattgaccgtttgctggagatgctgcatggcaacg

SEQ ID NO: 89236 - DNA, 75 bp, synthetic construct
  source 1..75: mol_type = other DNA
ttggatgtttttgatgacagaacaagcgaatgtctttctgaagagattaagatatatcaagaatgccatgaaaaa

SEQ ID NO: 89237 - DNA, 75 bp, synthetic construct
  source 1..75: mol_type = other DNA
ggcagaagtcacgctgcgcaaagtgatctccctgcccgctccgctgcgcggttccgcagtttaccggcacggcga

SEQ ID NO: 89238 - DNA, 75 bp, synthetic construct
  source 1..75: mol_type = other DNA
acgattagagagtattttgattctgcgtgctcattttttgattgctgtggctttttgttgtgggagtgttgaatg

SEQ ID NO: 89239 - DNA, 75 bp, synthetic construct
  source 1..75: mol_type = other DNA
gaaatgcagttagctcatgtggataaaaacgccatcagaggcacctataaccacgcacagtatctggatggtcgc

SEQ ID NO: 89240 - DNA, 75 bp, synthetic construct
  source 1..75: mol_type = other DNA
tattggcaatgccaacatcattccgcgtcagccgcgcctgtatctgtatcatgcctatctggcgtatatggaagc

SEQ ID NO: 89241 - DNA, 75 bp, synthetic construct
  source 1..75: mol_type = other DNA
taggtgcaatatttttcgatccgcaaaccggagatatgggaccggaatttagtaagactatcgatctggaaactg

SEQ ID NO: 89242 - DNA, 75 bp, synthetic construct
  source 1..75: mol_type = other DNA
ggttccccgcaaatatcaccttatcagaacagcttatgaaattaacgaagagccgaccgcctatggcgatcacgg

SEQ ID NO: 89243 - DNA, 75 bp, synthetic construct
  source 1..75: mol_type = other DNA
atgaaaacggcatctggaaaaatatccctgccgccactttttcacggaatgtggctgatttattccagcgcttac

SEQ ID NO: 89244 - DNA, 75 bp, synthetic construct
  source 1..75: mol_type = other DNA
gaaagaggtcgatttactccttcgcggcggcagtattccgtcaggagcaggtctgcgtatcttctatcggaacca

SEQ ID NO: 89245 - DNA, 75 bp, synthetic construct
  source 1..75: mol_type = other DNA
caaacagcgaattacagaccatcagcgacagcagcttgtctatgaattgaagtccagaggatttgatggcagcga

SEQ ID NO: 89246 - DNA, 75 bp, synthetic construct
  source 1..75: mol_type = other DNA
attaataactttaaaaagcatcttcaggtcatgattgattgtatgggagatgattatgaacgtcactttaaagac

SEQ ID NO: 89247 - DNA, 75 bp, synthetic construct
  source 1..75: mol_type = other DNA
gaaggggcttacgaggtggtgggcgtgtttgaccggatagaggagaagcttgatgccatgcagtcgctggtcctg

SEQ ID NO: 89248 - DNA, 75 bp, synthetic construct
  source 1..75: mol_type = other DNA
cctgtctacccttgtcgctgcgcatatgagcatgtgtcttgatgccgcttgtggtgatttgtacgcctccgatga

SEQ ID NO: 89249 - DNA, 75 bp, synthetic construct
  source 1..75: mol_type = other DNA
gaaacattcgatgaagagaatcaggctgaagctcagaaaaatgatccggaggaaatggaaggcactgaacatctg

SEQ ID NO: 89250 - DNA, 75 bp, synthetic construct
  source 1..75: mol_type = other DNA
tacagaaagagcttggcctcgccacgttcaaagtggatcaggaggtcagaaagctggtggaggctggccgtaaat

SEQ ID NO: 89251 - DNA, 75 bp, synthetic construct
  source 1..75: mol_type = other DNA
gggactgagggcagagaactggcgtttggcgctggtacattacacgcggcagtggcgtcttatgtgcagtctccg

SEQ ID NO: 89252 - DNA, 75 bp, synthetic construct
  source 1..75: mol_type = other DNA
aaagaagaattggtatttcaggtatgcagtgccagtgagtaaaaaaagaaccaaaatgagccttgggacctatcc

SEQ ID NO: 89253 - DNA, 75 bp, synthetic construct
  source 1..75: mol_type = other DNA
ggcttttgccaacgttttctgtttatctcttcgctggcggcgcgccatcccgagctctcctggtacgcaaattcc

SEQ ID NO: 89254 - DNA, 75 bp, synthetic construct
  source 1..75: mol_type = other DNA
tccggatgaagcagggcgttacagcatggacgttgagcacggccagtacagcgttattctgttggtggagggatt

SEQ ID NO: 89255 - DNA, 75 bp, synthetic construct
  source 1..75: mol_type = other DNA
atgcttatcaggcacctcattaaaacgggtgccgggattgagaccccggataatgtcaaaggcgacacagacgcc

SEQ ID NO: 89256 - DNA, 75 bp, synthetic construct
  source 1..75: mol_type = other DNA
actggcgagtgaaactgctctggcgtatgagcaggataaaacctacaaaattacagttctgcataccaatgatca

SEQ ID NO: 89257 - DNA, 75 bp, synthetic construct
  source 1..75: mol_type = other DNA
gttgctacggtgccattcaggatgcacaggcattgtctgaaggtgtggtggcctcttcccgttacccgaaacact

SEQ ID NO: 89258 - DNA, 75 bp, synthetic construct
  source 1..75: mol_type = other DNA
ttgacctctactgcgatcaggccagcggccttgtgaatatcgccattatggacggtacggtctggcgtctgctga

SEQ ID NO: 89259 - DNA, 75 bp, synthetic construct
  source 1..75: mol_type = other DNA
tttttcactgattcgacttcccgaccaggaaaagtggagcggtgacggggccggactaaaagccatcactggcgg

SEQ ID NO: 89260 - DNA, 75 bp, synthetic construct
  source 1..75: mol_type = other DNA
caggcgggaaaccagcagacggacagactggtgctgggggaaaacctgcttgatgcagactacaacacggactgg

SEQ ID NO: 89261 - DNA, 75 bp, synthetic construct
  source 1..75: mol_type = other DNA
agttgggcgggtgatgatccggataagcaggcatttgccagagaagtggcctcccgtcagccagaaatgctggag

SEQ ID NO: 89262 - DNA, 75 bp, synthetic construct
  source 1..75: mol_type = other DNA
gcagtacgaagcatctgttaccaggtggcagacgatgcgcggcgtatccgggcggcgctgaccaccaccggtcag

SEQ ID NO: 89263 - DNA, 75 bp, synthetic construct
  source 1..75: mol_type = other DNA
ggggcttacgaggtggtgggcgtttttgaccggatagaggagatgcgtgatgccatgcagtcgctgattctgccg

SEQ ID NO: 89264 - DNA, 75 bp, synthetic construct
  source 1..75: mol_type = other DNA
gagcaccggaaagagaatgatcagcgtacatatgatcttaatgtcaggaatgctgaccgtgaatatgcgctgaaa

SEQ ID NO: 89265 - DNA, 75 bp, synthetic construct
  source 1..75: mol_type = other DNA
gtgagcagcaggattgagctgtatattggcggcagtattttttccggctggctgacggtaagcgtccgtcgttct

SEQ ID NO: 89266 - DNA, 75 bp, synthetic construct
  source 1..75: mol_type = other DNA
aatcaacgtcaaaggcgacctctatatcgacgatcaccacaccgtcgaagataccggcctggcgctgggcgaagc

SEQ ID NO: 89267 - DNA, 75 bp, synthetic construct
  source 1..75: mol_type = other DNA
aattaacagctataaaaatgcgttggctgaagcacggaaaaatgttcttgcagtaaaacgtgctcaggaggagtt

SEQ ID NO: 89268 - DNA, 75 bp, synthetic construct
  source 1..75: mol_type = other DNA
cgctggtacggcgctgacctgcctgatgctgtgcgccggttgcaccagcgccccgcctgcaccgacgccagtgat

SEQ ID NO: 89269 - DNA, 75 bp, synthetic construct
  source 1..75: mol_type = other DNA
caaaatgatcctcgggtcagacagccacacccgttacggtgcattagggacaatggcagtcggtgagggcggcgg

SEQ ID NO: 89270 - DNA, 75 bp, synthetic construct
  source 1..75: mol_type = other DNA
aattacatagataacaatcaagaaaaagcagaggaaatctatgctactgtcagagcacaatatgaaatgaaagta

SEQ ID NO: 89271 - DNA, 75 bp, synthetic construct
  source 1..75: mol_type = other DNA
gaaagtaataacatagcaacaatccaagcgggtgttaaggcgctttatacatcagcgtcaagttttacaggatta

SEQ ID NO: 89272 - DNA, 75 bp, synthetic construct
  source 1..75: mol_type = other DNA
atggcgtgctgccgccggtcctggcgtctgccatgcaaaaactgaccggaaccgtggcggaacttgtactgtccg

SEQ ID NO: 89273 - DNA, 75 bp, synthetic construct
  source 1..75: mol_type = other DNA
tttgattcagtacaacagccagtttattggccaggacataaaccaggcgctgcctggcgatatgatttttttcga

SEQ ID NO: 89274 - DNA, 75 bp, synthetic construct
  source 1..75: mol_type = other DNA
cctggcctccgccattcagaaactgaccggaaccggggcggaactggtactgtccggcagtcagtggcagtcgct

SEQ ID NO: 89275 - DNA, 75 bp, synthetic construct
  source 1..75: mol_type = other DNA
caccaatgttttgatgcacgttcagggttattttcgcccgcatattgattccacagaacgccagcagctggctgc

SEQ ID NO: 89276 - DNA, 75 bp, synthetic construct
  source 1..75: mol_type = other DNA
catactttaatgaactggatagctatgcagaaagtttaggtctgaatactcgccagattatcgaaggcgtttgtc

SEQ ID NO: 89277 - DNA, 75 bp, synthetic construct
  source 1..75: mol_type = other DNA
cggtcaggtcgacttcacggaaaaagtacccgccgatgcgatggtatgcactctggaacggttcaaattttatct

SEQ ID NO: 89278 - DNA, 75 bp, synthetic construct
  source 1..75: mol_type = other DNA
agaacgttttgctgcgttgttacaggaaggagcgattaagcaaaatatcccgaccctgtttaccgactccactga

SEQ ID NO: 89279 - DNA, 75 bp, synthetic construct
  source 1..75: mol_type = other DNA
tcattggtgagcgttcagaacgcgcagaacgttttgctgcgttgttacaggaaggcgcgattaagcaaaatatcc

SEQ ID NO: 89280 - DNA, 75 bp, synthetic construct
  source 1..75: mol_type = other DNA
ccgacagcattaacgtgcaggcactgaacatggggcgaattgtcgttgacgtcgatggtgttgagcttgccgaac

SEQ ID NO: 89281 - DNA, 75 bp, synthetic construct
  source 1..75: mol_type = other DNA
gggcacttcgtggtgcagggaatacgaaaataccgctactgattaacggtagcctgaatattcttaatattatta

SEQ ID NO: 89282 - DNA, 75 bp, synthetic construct
  source 1..75: mol_type = other DNA
caagcttcgggatggcgatttgcggtcgtatgctggaagcgcagggctttcgcgtcgggatcatcgcccagccag

SEQ ID NO: 89283 - DNA, 75 bp, synthetic construct
  source 1..75: mol_type = other DNA
cctgctctctcgcttcccatatcaccctgcgtgagagcggaaaggattttacgctcgtcagtgtggatttaatga

SEQ ID NO: 89284 - DNA, 75 bp, synthetic construct
  source 1..75: mol_type = other DNA
cggttcaggttcttctgcaacacctatcaatgcattcaaaggaaatgttgtcgtggcatcagccgatacagggcc

SEQ ID NO: 89285 - DNA, 75 bp, synthetic construct
  source 1..75: mol_type = other DNA
cgctggtttgaccgtggtgttctgcgggaggtggtccgggaagcccggaacgaaatccgcagcatggcggattca

SEQ ID NO: 89286 - DNA, 75 bp, synthetic construct
  source 1..75: mol_type = other DNA
cagctacagaatgagatagcccggctcaggcaggcgctggagcaggaaaagaaacggggattctggtccaggttg

SEQ ID NO: 89287 - DNA, 75 bp, synthetic construct
  source 1..75: mol_type = other DNA
tccaagcgctgagccagagcctgaccgcgattggttgctagacgtgcgtttgtatagcgagcagttttttgctga

SEQ ID NO: 89288 - DNA, 75 bp, synthetic construct
  source 1..75: mol_type = other DNA
tcctggcctccgccattcagagactgaccggaaccggggcggaactggtactgtccggcagtcagtggcagtcgc

SEQ ID NO: 89289 - DNA, 75 bp, synthetic construct
  source 1..75: mol_type = other DNA
atgttgaaaattgatgctatagcgttttttggcagcaaaacaaagcttgccaatgtcgcaggagttaggctggca

SEQ ID NO: 89290 - DNA, 75 bp, synthetic construct
  source 1..75: mol_type = other DNA
aaattaacgctatgtatccggaacgcaaactgttcgctatcggatgggttaaacacaaatgtaatccgggtgcca

SEQ ID NO: 89291 - DNA, 75 bp, synthetic construct
  source 1..75: mol_type = other DNA
ctgcatccggaaatcgacggttgcgaaggtattctcaacgcgatggcgcgtccgcagacggcgattgtctccctg

SEQ ID NO: 89292 - DNA, 75 bp, synthetic construct
  source 1..75: mol_type = other DNA
tgtgctgcgtataccggatgaaccgccccgccgctggtttgaccgtggtgttctgcgggaggtggtccgggaagc

SEQ ID NO: 89293 - DNA, 75 bp, synthetic construct
  source 1..75: mol_type = other DNA
atccgcgtatcacctacattcacaacgacattaacagcggggcgtgcgcggtacgtaaccaggcgattatgctgg

SEQ ID NO: 89294 - DNA, 75 bp, synthetic construct
  source 1..75: mol_type = other DNA
ggaacaaaaccgatcgcaatccgaatttagtacacaccctcgacacactggatgtggagattgcagcagccacac

SEQ ID NO: 89295 - DNA, 75 bp, synthetic construct
  source 1..75: mol_type = other DNA
gacgttgctgacccgccagacgcgccgctttcgcctggttgtgaaggaaagcgatcacccctgctggctcgatga

SEQ ID NO: 89296 - DNA, 75 bp, synthetic construct
  source 1..75: mol_type = other DNA
atcttgtggcaaagcatgcctccggactcaccgaagagcagctggccgggtacgatgcctgttccctggatggtg

SEQ ID NO: 89297 - DNA, 75 bp, synthetic construct
  source 1..75: mol_type = other DNA
aaaatgccagaccagcggaaaaggccgtcaagctcactgacgggtttggcctctacctgctggtgcatcccaacg

SEQ ID NO: 89298 - DNA, 75 bp, synthetic construct
  source 1..75: mol_type = other DNA
gctgcgtataccggatgaaccgccccgccgctggtttgaccgtggtgttctgcgggaggtggtccgggaagcccg

SEQ ID NO: 89299 - DNA, 75 bp, synthetic construct
  source 1..75: mol_type = other DNA
cctggcctccgccattcagaaactgaccggaaccggagcggaacttgttctgtccggcagtcagtggcagtcgct

SEQ ID NO: 89300 - DNA, 75 bp, synthetic construct
  source 1..75: mol_type = other DNA
taactggaattaactacaacacctatgctggatatgagcagggaaaagtaaagatgtcttttgacgcaggtatga

SEQ ID NO: 89301 - DNA, 75 bp, synthetic construct
  source 1..75: mol_type = other DNA
atggaccagcgccgcgagcaccatatcgaacagggcgacgccacccgcagccgggacagccgcgtcttctaccgg

SEQ ID NO: 89302 - DNA, 75 bp, synthetic construct
  source 1..75: mol_type = other DNA
aaaatgtgatcttttcgccggagtttttacgcgaagggaaagcactttatgataacttgcatccatcacgcattg

SEQ ID NO: 89303 - DNA, 75 bp, synthetic construct
  source 1..75: mol_type = other DNA
caggcgtggattgatgatggcgacacgtctctgccgccagaaaagattcaggttcctttcatgttaacgccacca

SEQ ID NO: 89304 - DNA, 75 bp, synthetic construct
  source 1..75: mol_type = other DNA
gctatgttggactctcgaacggtattctgattgcccagaaccatgaagtggttgcgctggatatcgtgcagtcca

SEQ ID NO: 89305 - DNA, 75 bp, synthetic construct
  source 1..75: mol_type = other DNA
cattgcaatgggatattaacgaaatgtcatatttttattctgcatcgacaaacggattttattcgactgaatttc

SEQ ID NO: 89306 - DNA, 75 bp, synthetic construct
  source 1..75: mol_type = other DNA
gatattaaccttcttatcatgccattggttggagttttgactctgtgggggatttttattattggtgtagtaacc

SEQ ID NO: 89307 - DNA, 75 bp, synthetic construct
  source 1..75: mol_type = other DNA
agatggatgagtcagttttacaggtcaggcaaagcctgcgtgaagcgttttatccgcaggagattgaacaagagc

SEQ ID NO: 89308 - DNA, 75 bp, synthetic construct
  source 1..75: mol_type = other DNA
ggtggtggagctgaccgggcggcggaataacggtgtgcctgtgtccctttccgtatcaacaggagcagagaatgg

SEQ ID NO: 89309 - DNA, 75 bp, synthetic construct
  source 1..75: mol_type = other DNA
tccgaccaacagtcaacctgcacaccaccaccgttaacaacccttaccggcatacgctgcagcaccgcacatatc

SEQ ID NO: 89310 - DNA, 75 bp, synthetic construct
  source 1..75: mol_type = other DNA
gaacatgggacgcattgtcgttgacgtcgatggtattgagctcgctgaactgattaacaatgtcactgaaaacgg

SEQ ID NO: 89311 - DNA, 75 bp, synthetic construct
  source 1..75: mol_type = other DNA
attgcctgcggtcgttcctctgccccgatgccgcagcgtgtaacagaagaagaaaaacaggatgatgaagaaaaa

SEQ ID NO: 89312 - DNA, 75 bp, synthetic construct
  source 1..75: mol_type = other DNA
cgtattctccatctccggtcgtggtactgttgttaccggtcgtgtagaacgcggtatcatcaaagttggtgaaga

SEQ ID NO: 89313 - DNA, 75 bp, synthetic construct
  source 1..75: mol_type = other DNA
ctacctacggtggaaatatttgcaacggtgccaccagcgcagattctgccacgccaacgctaatttatgacgcga

SEQ ID NO: 89314 - DNA, 75 bp, synthetic construct
  source 1..75: mol_type = other DNA
gtgtggatatgctcaacgcgcgtgtatcacccattgttgacaaagagatccaacagtacctgagctcaggcgagt

SEQ ID NO: 89315 - DNA, 75 bp, synthetic construct
  source 1..75: mol_type = other DNA
gcctaaataccgatgaatggccagctattaagacgttatcactgccccgctgggctaaggagtatgcaaatgact

SEQ ID NO: 89316 - DNA, 75 bp, synthetic construct
  source 1..75: mol_type = other DNA
ttgcgcttcttcgtgggccgctgaactggcgaagcctcttacacttgaccagcttcaacaacaaaatggcaaagc

SEQ ID NO: 89317 - DNA, 75 bp, synthetic construct
  source 1..75: mol_type = other DNA
atttatcgtctgattatgaagagcggttcagataacttccgcgcgtcttccattcaggggattatgaaacgtatt

SEQ ID NO: 89318 - DNA, 75 bp, synthetic construct
  source 1..75: mol_type = other DNA
atggaacgaaataaacttgctcgtcagattattgacacttgcctggaaatgacccgcctgggactgaaccagggg

SEQ ID NO: 89319 - DNA, 75 bp, synthetic construct
  source 1..75: mol_type = other DNA
ttgaaaacggcatgttgattactcccagcggtattccttatgaaagaatgacggagaatatgattgtctatgttg

SEQ ID NO: 89320 - DNA, 75 bp, synthetic construct
  source 1..75: mol_type = other DNA
cattacaaatattggaactgaggaattaatagtcatgctctgggcaaatgaaattttcaaccgtgatgagcccga

SEQ ID NO: 89321 - DNA, 75 bp, synthetic construct
  source 1..75: mol_type = other DNA
gataatctccatccttcacgtattgtcatcggtgagcgttcagaacgcgcagaacgttttgctgcgttgttacag

SEQ ID NO: 89322 - DNA, 75 bp, synthetic construct
  source 1..75: mol_type = other DNA
ctcaccgtaccggacctggtgatcccgacgttgatggtaaaagtactgccaccgtttgctgccgggatcttcctt

SEQ ID NO: 89323 - DNA, 75 bp, synthetic construct
  source 1..75: mol_type = other DNA
atgagtatttcctcggcagccgctctatgggcggtattgtgctggcgatgacgctcaccgcgacctatatcagtg

SEQ ID NO: 89324 - DNA, 75 bp, synthetic construct
  source 1..75: mol_type = other DNA
gatgcattaacccatgcgatagaagcctatgtttccaccatggcgaatccgttgacagatgcggcggcattaaaa

SEQ ID NO: 89325 - DNA, 75 bp, synthetic construct
  source 1..75: mol_type = other DNA
cgttcgttggtgcgatgaccgtgcagtttatcggcggtgcgcgcctgctggaaaccgcggcgggtattccttatg

SEQ ID NO: 89326 - DNA, 75 bp, synthetic construct
  source 1..75: mol_type = other DNA
tcttttgtgagatgttaaaaacgccttcagcggggcagttttcatttttcacagcgcatcccggtataacgcgtg

SEQ ID NO: 89327 - DNA, 75 bp, synthetic construct
  source 1..75: mol_type = other DNA
cggagaggtgacgccggaggccgaaaaacaggtgaaacgccagttatggcaggtgaacggctatgaatggacccc

SEQ ID NO: 89328 - DNA, 75 bp, synthetic construct
  source 1..75: mol_type = other DNA
atgaaagcaaaagtttgggttctgggcgacgcagtggtggacctgctaccggagagtgaagggcgcttgctacag

SEQ ID NO: 89329 - DNA, 75 bp, synthetic construct
  source 1..75: mol_type = other DNA
ttcaggggctgatagaactagagaaatttaaccctgaaacactgtgctcgggcgagagctggatggcaccttcag

SEQ ID NO: 89330 - DNA, 75 bp, synthetic construct
  source 1..75: mol_type = other DNA
aagccgacgtcattatctctaaccgaatggcagaagagcttaaggatgtggcagataaggtatacacccgcgatc

SEQ ID NO: 89331 - DNA, 75 bp, synthetic construct
  source 1..75: mol_type = other DNA
ttggtaaatggtgtaaaccgaactataactcgttcgtggctaccttctgccataacattgccaacaatattgaca

SEQ ID NO: 89332 - DNA, 75 bp, synthetic construct
  source 1..75: mol_type = other DNA
cgcgcaggcagacgcccacgaggattgccaggattgcgaagtctctgtagccactttgcggttcacacagcgtct

SEQ ID NO: 89333 - DNA, 75 bp, synthetic construct
  source 1..75: mol_type = other DNA
acatactcttattacggaaaatgttggtcagggtttttcacgagcgttatattcaacttggcttagttacttgca

SEQ ID NO: 89334 - DNA, 75 bp, synthetic construct
  source 1..75: mol_type = other DNA
gcagaaccctatttattcccagacattaataaacccgatgggccagcaacagcagggatagatgatttgggtgaa

SEQ ID NO: 89335 - DNA, 75 bp, synthetic construct
  source 1..75: mol_type = other DNA
gacaccgttgtcgagtgcgtgcttaacaaactctgcccgtcgcatacctacgtaatttttaaatatccggagtaa

SEQ ID NO: 89336 - DNA, 75 bp, synthetic construct
  source 1..75: mol_type = other DNA
atcttgctaaaaatgtgttcgctgttcatggggttgaccaaaatggcaaaaccgttctggtgaaatccagagtaa

SEQ ID NO: 89337 - DNA, 75 bp, synthetic construct
  source 1..75: mol_type = other DNA
tatctggggcgacaccgtcgtcgaatgtgtgcttaacaaactctccccttcgcatacctacgtaatttttaaata

SEQ ID NO: 89338 - DNA, 75 bp, synthetic construct
  source 1..75: mol_type = other DNA
catgctgatggagaagttcaaaccgctcgatcagttgatgcgctacgtgcaggaacagcgcggtaagtcaggcat

SEQ ID NO: 89339 - DNA, 75 bp, synthetic construct
  source 1..75: mol_type = other DNA
agcgaacaccgtcatcaggccgcagaaaacacacaacaggcagcaacgttcattcgttatatgaacgccatcaat

SEQ ID NO: 89340 - DNA, 75 bp, synthetic construct
  source 1..75: mol_type = other DNA
gtcaggcctcaccattataacggagggctgacgccggaagagtcagagaacagataccatttttactgtaaaacc

SEQ ID NO: 89341 - DNA, 75 bp, synthetic construct
  source 1..75: mol_type = other DNA
ccattccggacgaacaggcaataaaggaagaaggtgcagtcgctgtagccactgccattgaagccggcgacgaac

SEQ ID NO: 89342 - DNA, 75 bp, synthetic construct
  source 1..75: mol_type = other DNA
atccttcatggcctatgactcccatcaacgggaactgcaagattatcggtgttgtcgtagaggcgagggtcaaat

SEQ ID NO: 89343 - DNA, 75 bp, synthetic construct
  source 1..75: mol_type = other DNA
agccatcgagcgtctgaaatcatatcaagtagagtttaatacgttaaccgtcattaataacgttaatgtccatta

SEQ ID NO: 89344 - DNA, 75 bp, synthetic construct
  source 1..75: mol_type = other DNA
cgggcgcttccgccggactgccatgcaactgtcgacatcgactgtaaaggaaaatcggtgtccaggtcgtcgatt

SEQ ID NO: 89345 - DNA, 75 bp, synthetic construct
  source 1..75: mol_type = other DNA
atgcaggaaaaccgctgggatgaggagtctgcttcctttgtcccggttgagactgaatcagatccgatgaacgtc

SEQ ID NO: 89346 - DNA, 75 bp, synthetic construct
  source 1..75: mol_type = other DNA
gaagtgcacaagccactgtgcgcagtgggcgagccagccagggttcgcaaagcggttgtgaagatgcagatggta

SEQ ID NO: 89347 - DNA, 75 bp, synthetic construct
  source 1..75: mol_type = other DNA
aactgacggtatattgtgcgatggagctggctgcaggatattatggggccaccaaccgctatggcacgatttcac

SEQ ID NO: 89348 - DNA, 75 bp, synthetic construct
  source 1..75: mol_type = other DNA
atgggatggagattggggtggcgtgatgagagggaatgtgcgcgctgggcccccccccccccccccccccccccc

SEQ ID NO: 89349 - DNA, 75 bp, synthetic construct
  source 1..75: mol_type = other DNA
gcactaaaacgcgtttcctgaacgtccagttgttgcagaacagcatggacgcgccgaaaattatcggctccttcc

SEQ ID NO: 89350 - DNA, 75 bp, synthetic construct
  source 1..75: mol_type = other DNA
tcccagatggtaaaggggactatacttgtggtggccaagaccaacggggagaatcaaaaggagatggtctatggg

SEQ ID NO: 89351 - DNA, 75 bp, synthetic construct
  source 1..75: mol_type = other DNA
acgccggacagtctgccgccggtggagtggctgacctacggcagcggctatcttgcgggcatgaagctgggcggg

SEQ ID NO: 89352 - DNA, 75 bp, synthetic construct
  source 1..75: mol_type = other DNA
gcactttagacccgcagtcgcaggccggcgagatgggcctgttacaggcatataaatcgcctaaccttgaacaga

SEQ ID NO: 89353 - DNA, 75 bp, synthetic construct
  source 1..75: mol_type = other DNA
ctggcagtcagcatcccgatgtcgcaacgatcgcggaacaggaggagctgattgatcggacgagcgagttcgctt

SEQ ID NO: 89354 - DNA, 75 bp, synthetic construct
  source 1..75: mol_type = other DNA
atgaaaaaaaaagaaaagattgattttcttaatgcaataaaagcagggcactctggctttatagctggtaatcct

SEQ ID NO: 89355 - DNA, 75 bp, synthetic construct
  source 1..75: mol_type = other DNA
atgaaaacgttaattgcccggcataaagctggtgaacatatcggcatatgttcagtctgttctgcccatccgttg

SEQ ID NO: 89356 - DNA, 75 bp, synthetic construct
  source 1..75: mol_type = other DNA
gaagaatcaccatcacctgctacggaaaagcgtggactgcggcttggtttgctatgggcggtgatgatgtgcaga

SEQ ID NO: 89357 - DNA, 75 bp, synthetic construct
  source 1..75: mol_type = other DNA
tatcgacaatcgagcgcttgtgcgcggatgctctggtcgccgctgagcggcggattgaaacgcggattgcggaaa

SEQ ID NO: 89358 - DNA, 75 bp, synthetic construct
  source 1..75: mol_type = other DNA
atgtcacgacgccatattttcaccgaacggcagcgagcagcgctgttcgatctgcccacggacgaactgtcgcta

SEQ ID NO: 89359 - DNA, 75 bp, synthetic construct
  source 1..75: mol_type = other DNA
atgaccatcaccactgtcggtatcgatcttgctaaaaatgtgtttgctgttcactgcattgaccaaaatggtaaa

SEQ ID NO: 89360 - DNA, 75 bp, synthetic construct
  source 1..75: mol_type = other DNA
cgtctttgggaagtggcggtactctttcacctccgggatgcttttcgttccggagatgtctggctcgctcattcg

SEQ ID NO: 89361 - DNA, 75 bp, synthetic construct
  source 1..75: mol_type = other DNA
tttcttggtggcgatcgcccggttacggtagtcaacccgcccgcaatgcgtcatccgcagatacggattgtcgta

SEQ ID NO: 89362 - DNA, 75 bp, synthetic construct
  source 1..75: mol_type = other DNA
ggagcatcatttctagaatttgcaacatcgttagcctataagcacaggttaaagctaccaaatggtattgaggca

SEQ ID NO: 89363 - DNA, 75 bp, synthetic construct
  source 1..75: mol_type = other DNA
ggttaaaaaaagaaccacgggcatcttatttttttctgttccagctgtatacccgcattcacaatacatttttct

SEQ ID NO: 89364 - DNA, 75 bp, synthetic construct
  source 1..75: mol_type = other DNA
aacgcttcttccgcagtctgaaaacagaatgggtgccaacgaatggttacgcaggcaaggacgaggcccggcagc

SEQ ID NO: 89365 - DNA, 75 bp, synthetic construct
  source 1..75: mol_type = other DNA
tacatcgcggcgattttatgtgcgttccagatggcatctgatatcagtccgatcagccgggctttccagcatgcc

SEQ ID NO: 89366 - DNA, 75 bp, synthetic construct
  source 1..75: mol_type = other DNA
gttaggtcgggcggtgatccccgatctcaccgtaccggatctggtgatcccgacgttaatggtaaaagtgctgcc

SEQ ID NO: 89367 - DNA, 75 bp, synthetic construct
  source 1..75: mol_type = other DNA
ccgcgcctttaaccatatggcggctggtgttaagcaactggcggatgaccgcacgctgctgatggcgggggtaag

SEQ ID NO: 89368 - DNA, 75 bp, synthetic construct
  source 1..75: mol_type = other DNA
gcgtcgtcgtggcagcacatattttgtatcaaaagcaggggagcgttatcgccgggatgtggcgcttattgttcg

SEQ ID NO: 89369 - DNA, 75 bp, synthetic construct
  source 1..75: mol_type = other DNA
ggatgaagaaacagaccagaacactgctgatattctccagccgtcagcagcacaaactgatgcagtggaaactga

SEQ ID NO: 89370 - DNA, 75 bp, synthetic construct
  source 1..75: mol_type = other DNA
acgccgtatcaggcacgaaaacgccagccgctgagggcaaaaaaaggacgcattaaacgggcgatgtttcagaag

SEQ ID NO: 89371 - DNA, 75 bp, synthetic construct
  source 1..75: mol_type = other DNA
aaccataggccctgaaggttttggtaaaaaagaaagaagctggaatgacagaaaaatgtctgtcctttggcgtga

SEQ ID NO: 89372 - DNA, 75 bp, synthetic construct
  source 1..75: mol_type = other DNA
tttacgggaaattcgtacaggtttttgtgaagagttgaagttaaaaggttatgacgttaaagcgacccataagca

SEQ ID NO: 89373 - DNA, 75 bp, synthetic construct
  source 1..75: mol_type = other DNA
ggtggaattcactggcaaggtgcaacgcatcgcgcagattcatcagttcggactcaaagaccggccaaaccctca

SEQ ID NO: 89374 - DNA, 75 bp, synthetic construct
  source 1..75: mol_type = other DNA
gaacagccaagccaacggataagcagtacaaactgaccgatggcagcggtatgcacctgcttgttccttttaatg

SEQ ID NO: 89375 - DNA, 75 bp, synthetic construct
  source 1..75: mol_type = other DNA
ggaggtaacacgtctcgacatgtcaagttccgttatccagcgggccatgccaatgctgaaaagcctgcgtgcaag

SEQ ID NO: 89376 - DNA, 75 bp, synthetic construct
  source 1..75: mol_type = other DNA
aagaaaaagcactatggcttgctaaagccgcagaaacaaaccgccctgcaatgaaacgtatccacagtgccaaat

SEQ ID NO: 89377 - DNA, 75 bp, synthetic construct
  source 1..75: mol_type = other DNA
agacgaagattcagaagatggtgaaattatcgactttgagccgggcgacccggactctggttttgccaacacgct

SEQ ID NO: 89378 - DNA, 75 bp, synthetic construct
  source 1..75: mol_type = other DNA
aagtatcaattactgggaaggggaaagtgcttgaactgagtttttgggggaatacgagaagcaaaaaagatgcac

SEQ ID NO: 89379 - DNA, 75 bp, synthetic construct
  source 1..75: mol_type = other DNA
gcgtgtcgtttgtggtgttgctggcaacgctgggcagcgtaggtattccgctggaaggtctggcgtttattgccg

SEQ ID NO: 89380 - DNA, 75 bp, synthetic construct
  source 1..75: mol_type = other DNA
tgtaaaaacccctgaagcagtaaggaaattaacgcgcgacagggcgctggcaattgcgcgcagtcacggaatagc

SEQ ID NO: 89381 - DNA, 75 bp, synthetic construct
  source 1..75: mol_type = other DNA
atcaatgactacggtggacgtccggtactgcagttctcctgtgcaggaagtcgctgtactgcagtaaagaaataa

SEQ ID NO: 89382 - DNA, 75 bp, synthetic construct
  source 1..75: mol_type = other DNA
cggctggcgacgttacttatcaaccgtcacggcggcgtactgccgccgctcctggcctccgccattcacaaactg

SEQ ID NO: 89383 - DNA, 75 bp, synthetic construct
  source 1..75: mol_type = other DNA
ttccggattcttatgatcgtcctgatccacgtattatgcagctggcacgcaggaatacacaaacccccggaggta

SEQ ID NO: 89384 - DNA, 75 bp, synthetic construct
  source 1..75: mol_type = other DNA
tgagtccccccatccgacatccccgtcactccgtacgctgctttcacttaaagcatcagcaggagaagccccggc

SEQ ID NO: 89385 - DNA, 75 bp, synthetic construct
  source 1..75: mol_type = other DNA
aatacgagaagcaaaaaagatgcactggttcttcttaaggatatgactaagtggatggactcaaaaataagaaca

SEQ ID NO: 89386 - DNA, 75 bp, synthetic construct
  source 1..75: mol_type = other DNA
atggcactccgggccaggcattccagatggtgaaagatgcactttcccctgccaaagatacgctgacactgacag

SEQ ID NO: 89387 - DNA, 75 bp, synthetic construct
  source 1..75: mol_type = other DNA
aatatgatgaatggggcaacctgctgaatgaagagaacccgcatcagctgcagcagcttatccggctgccggggc

SEQ ID NO: 89388 - DNA, 75 bp, synthetic construct
  source 1..75: mol_type = other DNA
atttaccttctgctcaacatttttatgctggcgctgggcgcattaatgctatttttctcggggcgagtgtgggcg

SEQ ID NO: 89389 - DNA, 75 bp, synthetic construct
  source 1..75: mol_type = other DNA
cgatcacgcgaagcacaatccgctatttttaccgatgaaatctcgttagatgttgctctccggctattcatagaa

SEQ ID NO: 89390 - DNA, 75 bp, synthetic construct
  source 1..75: mol_type = other DNA
gatttggatgcgattaacgaactttccgaactcgtctgcgctgcagaatgcggggatcgcattgaaccatataaa

SEQ ID NO: 89391 - DNA, 75 bp, synthetic construct
  source 1..75: mol_type = other DNA
gctcaggactgcgcttataaatttcttgtctgtgaggataaacccggtacaccccgcccagccctcgactcctgg

SEQ ID NO: 89392 - DNA, 75 bp, synthetic construct
  source 1..75: mol_type = other DNA
gtattcagctacgcctgcccgttctgttacaagtacgacaaagcggttaccggtccggtatcggaaaaagtgaaa

SEQ ID NO: 89393 - DNA, 75 bp, synthetic construct
  source 1..75: mol_type = other DNA
ggaaaagatctgcaccgcctgcggtcagagcggtggcggcaactgccctgattgtggtgcggtgatgggtgacgc

SEQ ID NO: 89394 - DNA, 75 bp, synthetic construct
  source 1..75: mol_type = other DNA
ttgttatgcctggtggctggactgacagggggcgttatgcttatggaatgttctggcaatatcaaaacaatgaac

SEQ ID NO: 89395 - DNA, 75 bp, synthetic construct
  source 1..75: mol_type = other DNA
ttacaacttgcctctacctatatattttcggtacacaagttgttcctgcattcgcaggtattttacctgttgagg

SEQ ID NO: 89396 - DNA, 75 bp, synthetic construct
  source 1..75: mol_type = other DNA
gccaattttgataccggaccactgacgcatactgtgagttatgattatgtcgatgcgcgcaatgcgattaccgac

SEQ ID NO: 89397 - DNA, 75 bp, synthetic construct
  source 1..75: mol_type = other DNA
tctatatgccgacctggaaccgccaacaactggcgattcgggcgataaaatcggtcctgcgccaggactacagca

SEQ ID NO: 89398 - DNA, 75 bp, synthetic construct
  source 1..75: mol_type = other DNA
gcgtagtgtcaaatcttaccgtgataaatccaaagtcagtaaggtcattgctggtaagaaaccatcggcaagtat

SEQ ID NO: 89399 - DNA, 75 bp, synthetic construct
  source 1..75: mol_type = other DNA
atgggaaaagaatataaaactctcataaacaaagcacttgagcgtttttattttcgcttaagtgcatcaggtact

SEQ ID NO: 89400 - DNA, 75 bp, synthetic construct
  source 1..75: mol_type = other DNA
ttgcaccagctcctcatactcgtatgcgtggcgttaaatcttaccgtgataaaacaaaagtcagtaaggtcgttg

SEQ ID NO: 89401 - DNA, 75 bp, synthetic construct
  source 1..75: mol_type = other DNA
gatgatgggaaaaagaaaaaaactactgaggcaatagtccttttgacatggttaaatgcaataagaaatggtacc

SEQ ID NO: 89402 - DNA, 75 bp, synthetic construct
  source 1..75: mol_type = other DNA
aaaagcggataacgctctggacaatatgcctatgatttcgaatgacagaaatacgcatgcaacaaagttaaaacc

SEQ ID NO: 89403 - DNA, 75 bp, synthetic construct
  source 1..75: mol_type = other DNA
catcattcgccactggctgcctgcaagcggcgagaaaatgcgtaaagcaccgattctgtttcactacaccaatct

SEQ ID NO: 89404 - DNA, 75 bp, synthetic construct
  source 1..75: mol_type = other DNA
attgaacacgctattcgtcgataaaaacttgcgttttcacggcctgatgcaggcattttcccgcaccaaccgtat

SEQ ID NO: 89405 - DNA, 75 bp, synthetic construct
  source 1..75: mol_type = other DNA
agggtttggttttaggagatgaacatattcattcagtaaagaatgtgttatcagatgaaaaaaataataagatta

SEQ ID NO: 89406 - DNA, 75 bp, synthetic construct
  source 1..75: mol_type = other DNA
atgattctaggtaatgattacgttgatttagctcctctgttctctgcgcatagcactagaaattatctgctttct

SEQ ID NO: 89407 - DNA, 75 bp, synthetic construct
  source 1..75: mol_type = other DNA
tcctgcgacgatctcacaatgttacaaaacgcctgccagcgcctgccagcccatcgccaggcgatacgcggtgtt

SEQ ID NO: 89408 - DNA, 75 bp, synthetic construct
  source 1..75: mol_type = other DNA
ggtctgggtaacgaaatcaacgccagtcccaatgatttagtgattgcagtcatgggtgaagaagatatttgcaat

SEQ ID NO: 89409 - DNA, 75 bp, synthetic construct
  source 1..75: mol_type = other DNA
atgacacctgagcaattagccttatcggaggcaatcgctctggctggtggtcaatcagaattggctcggaagctc

SEQ ID NO: 89410 - DNA, 75 bp, synthetic construct
  source 1..75: mol_type = other DNA
cgttatcgtctcggcggtgatgagtgccaaattactttacgatagccatggacaggagatcctccactggttggg

SEQ ID NO: 89411 - DNA, 75 bp, synthetic construct
  source 1..75: mol_type = other DNA
ccgtgaagtggtgctggcaaaaatgcacgaaaaacgcgttgaaaaagcgctggtggttgatgacgaattccacct

SEQ ID NO: 89412 - DNA, 75 bp, synthetic construct
  source 1..75: mol_type = other DNA
ataccgtcgccgttctcaacaacggagggagagcgcgaaaaatacttatcagtggaagaagccggaatggttgcg

SEQ ID NO: 89413 - DNA, 75 bp, synthetic construct
  source 1..75: mol_type = other DNA
ctgtgggcggtgacgaccggcggcggggaaagccattttgaaattggtgcgcatccgggctttgatgtgctgtcg

SEQ ID NO: 89414 - DNA, 75 bp, synthetic construct
  source 1..75: mol_type = other DNA
tgaagcggtgccatatcaactatttgccaagatgattggtcgcaaagaatcaaccgtcagaaccatgattgacgc

SEQ ID NO: 89415 - DNA, 75 bp, synthetic construct
  source 1..75: mol_type = other DNA
agaacttcgccaccctgcgccgctatacgccggccttgttggaggtgctggaactgcgcgccgccccggctgcgc

SEQ ID NO: 89416 - DNA, 75 bp, synthetic construct
  source 1..75: mol_type = other DNA
gccaagccgtaacgaacgaacagggtaaggctaccgtcacttataccaatacccgctcctcgatagaatcaggag

SEQ ID NO: 89417 - DNA, 75 bp, synthetic construct
  source 1..75: mol_type = other DNA
ccgaaaccactggcacgtggagaataagctgcactggcgtctggacgtggtaatgaatgaagacgactgcaaaat

SEQ ID NO: 89418 - DNA, 75 bp, synthetic construct
  source 1..75: mol_type = other DNA
ctggatttgtttaccggtttcactgtcacacacactgacagcagtgcctccgccgatgttttcagtggtaaaacg

SEQ ID NO: 89419 - DNA, 75 bp, synthetic construct
  source 1..75: mol_type = other DNA
caccgggcgctcatgctggcggatgtggcaaaggtatcggaagaggaactgttctttatcagcggtgaacaggat

SEQ ID NO: 89420 - DNA, 75 bp, synthetic construct
  source 1..75: mol_type = other DNA
ggattaccgatgcgcgtaccgtcacgctgtaccatccgcagggctgccccgcctgtaatcacaaaggttttcgcg

SEQ ID NO: 89421 - DNA, 75 bp, synthetic construct
  source 1..75: mol_type = other DNA
gctgtacgccggattgcaggagctgaacaaccactcgcgcaacattctcacggttgaagaccccatcgaatacat

SEQ ID NO: 89422 - DNA, 75 bp, synthetic construct
  source 1..75: mol_type = other DNA
ggggctttcccgtttcagcgtcccgctgaaatcgtcggcttacctcctttcgccatgcaagcagtctatcgctaa

SEQ ID NO: 89423 - DNA, 75 bp, synthetic construct
  source 1..75: mol_type = other DNA
ccgttattgctgaacggaaatgaagaggggctggattataccctgcgggttgtccgtaatggtcagccgttaaag

SEQ ID NO: 89424 - DNA, 75 bp, synthetic construct
  source 1..75: mol_type = other DNA
tatctattcactgcaaaccagtatgttgctcataacgttgattggtttcttcctgattactttcgtctatatgta

SEQ ID NO: 89425 - DNA, 75 bp, synthetic construct
  source 1..75: mol_type = other DNA
ccgttgccagtttgaaccaccctgccccgccagagaaagagatcgttactgaatttaaagtgccaatatctttcg

SEQ ID NO: 89426 - DNA, 75 bp, synthetic construct
  source 1..75: mol_type = other DNA
ccgaatcattacctggagcagtatccccgaaaggttgcctgttacctcgccagcatcagtaaactggataacttt

SEQ ID NO: 89427 - DNA, 75 bp, synthetic construct
  source 1..75: mol_type = other DNA
gtgagagaacagcattgattaatcgcatccggggattgctcagtgagttaggtattgttctcccgcaggcgttta

SEQ ID NO: 89428 - DNA, 75 bp, synthetic construct
  source 1..75: mol_type = other DNA
gatattcttgcatgtagcccccgaaattatgggctgcatcataacataaaaacatgggaccccttggttagaaat

SEQ ID NO: 89429 - DNA, 75 bp, synthetic construct
  source 1..75: mol_type = other DNA
ctattcaattcagactacagagtgggcgattttaatctatggcctggtgatgatcttctttttatacatgtatgt

SEQ ID NO: 89430 - DNA, 75 bp, synthetic construct
  source 1..75: mol_type = other DNA
agacgaagataatgaacgcattatggtttttaacggagagaggtatgtacaggaagacagtctgaaaccgcagcc

SEQ ID NO: 89431 - DNA, 75 bp, synthetic construct
  source 1..75: mol_type = other DNA
atcaggaaaaattacgaaacatcatgtttattttcctgaccacaggataaataaacatgatgaagataagagata

SEQ ID NO: 89432 - DNA, 75 bp, synthetic construct
  source 1..75: mol_type = other DNA
cttgctcagagaacgagcaggaatgaagttgatctcagccgttgatgtcagagatatagcacaattgcttgatga

SEQ ID NO: 89433 - DNA, 75 bp, synthetic construct
  source 1..75: mol_type = other DNA
cgggccgaggtcgcagcttctgatgccttcgtggtcgcggtggatgcagatgtggctgctgattgttgtgacgct

SEQ ID NO: 89434 - DNA, 75 bp, synthetic construct
  source 1..75: mol_type = other DNA
ggaaattaactttaaagctattgtaggtcaaactgatatctcggctgcaactggaaagacctctaccacgaatga

SEQ ID NO: 89435 - DNA, 75 bp, synthetic construct
  source 1..75: mol_type = other DNA
ggaatttcctgccgccgttgccgaggaggctgcactgctggcgcttgtggaggcgttcgtttctgatgattttgc

SEQ ID NO: 89436 - DNA, 75 bp, synthetic construct
  source 1..75: mol_type = other DNA
atgtactatttaaaaaacacaaacttttggatgttcggtttattctttttcttttacttttttatcatgggagcc

SEQ ID NO: 89437 - DNA, 75 bp, synthetic construct
  source 1..75: mol_type = other DNA
cacagagctcatcagggatatgtcagtgagagaacagcattgattaatcgcatccggggattgctcagtgagtta

SEQ ID NO: 89438 - DNA, 75 bp, synthetic construct
  source 1..75: mol_type = other DNA
agagttgtatcctgtatcagtcctgcaaaatttcacgagtgctttattaactggatgcgagattgccatacttca

SEQ ID NO: 89439 - DNA, 75 bp, synthetic construct
  source 1..75: mol_type = other DNA
gcccatatttttggtggcggatatgccgcaggttattacgcttatctgtggacgcaaatgttggccgatgatggt

SEQ ID NO: 89440 - DNA, 75 bp, synthetic construct
  source 1..75: mol_type = other DNA
gtggaacagattaattcaaataaaaaacattctaacagaagaaaatacttttctttattggcggtagttttattt

SEQ ID NO: 89441 - DNA, 75 bp, synthetic construct
  source 1..75: mol_type = other DNA
ctctgagtcatgccgtagtggatgcttcaaaagcacagtcctttaccaataaaggtcagattaaagctgcgtccg

SEQ ID NO: 89442 - DNA, 75 bp, synthetic construct
  source 1..75: mol_type = other DNA
gcagagcagcggcttgctgaacgtcagcgaaaaacgaaaccgctgttgaaatccctggaaagctggttgcgtgaa

SEQ ID NO: 89443 - DNA, 75 bp, synthetic construct
  source 1..75: mol_type = other DNA
tgggtaacaataatgccagcgatgcgcaaccagtcaccttcgtggcggataaggacagcgcagttgtcgttctgc

SEQ ID NO: 89444 - DNA, 75 bp, synthetic construct
  source 1..75: mol_type = other DNA
catagtaggtcgcataggtgatgcatcaaatcggcttagcgaacacacccgaggcctactaaaggatattgagtc

SEQ ID NO: 89445 - DNA, 75 bp, synthetic construct
  source 1..75: mol_type = other DNA
aatttaaccacgtaatgcatgaagtaaagccagccggtaatgatagtcaggaaatcacggagggggttactgcca

SEQ ID NO: 89446 - DNA, 75 bp, synthetic construct
  source 1..75: mol_type = other DNA
ttcccgaagcagatcccgcttggtggtaaaaatgttgcctgggcacagtcagaggtaagcgcatggatggcggag

SEQ ID NO: 89447 - DNA, 75 bp, synthetic construct
  source 1..75: mol_type = other DNA
gtaaaaatgttgcctgggcacagtcagaggtaagcgcatggatggcggagcgtataagtgcccgcggacggggat

SEQ ID NO: 89448 - DNA, 75 bp, synthetic construct
  source 1..75: mol_type = other DNA
aggtgaaggataattacggcaacggtgtaccccagcaggaggtaaccctcagagtatcaccaagtgaaggcgtga

SEQ ID NO: 89449 - DNA, 75 bp, synthetic construct
  source 1..75: mol_type = other DNA
ccatgcccagtatctggaaggcagaaaaaaaatgatgaattggtatgctaatcatatctttaatataggggttcc

SEQ ID NO: 89450 - DNA, 75 bp, synthetic construct
  source 1..75: mol_type = other DNA
gagatcacagctatcccagaacttcttaacatgctggatattaaaggaaaaatcatcacaaccgatgcgatgggt

SEQ ID NO: 89451 - DNA, 75 bp, synthetic construct
  source 1..75: mol_type = other DNA
acgctatcgtgatgaaatcattgatacctttgaaaaagacatttttccctacattggcaaacgccctatcgccga

SEQ ID NO: 89452 - DNA, 75 bp, synthetic construct
  source 1..75: mol_type = other DNA
ggcgacgagaataaacttccggcgaagtccatctggtggcagggggaggagtataaagcctggccgtgtcaggtt

SEQ ID NO: 89453 - DNA, 75 bp, synthetic construct
  source 1..75: mol_type = other DNA
cgctctgattaacggcgcgccagacacgctggacacactgaaagaaattgccgcggccattaacaatgacccgaa

SEQ ID NO: 89454 - DNA, 75 bp, synthetic construct
  source 1..75: mol_type = other DNA
atgatgtcagatatcacaatctcccgcccggaactggtcaacggacatacggacgttatctgctcaaccagtatc

SEQ ID NO: 89455 - DNA, 75 bp, synthetic construct
  source 1..75: mol_type = other DNA
ggcgcgcgcacgctggctgaaatgctgacccaaaacggcgtcccgatgagccgttatcgtgccggacggctgatg

SEQ ID NO: 89456 - DNA, 75 bp, synthetic construct
  source 1..75: mol_type = other DNA
agggtggtgttgttgcggcaacgactaaacctgcaggtgcgaatgaaacacgcccacgaaatgtcgcttttaact

SEQ ID NO: 89457 - DNA, 75 bp, synthetic construct
  source 1..75: mol_type = other DNA
ggatacggcacatcgctattaatattttgacgaatgataaggtattcaaggcagggttaagacgtaagatgcgaa

SEQ ID NO: 89458 - DNA, 75 bp, synthetic construct
  source 1..75: mol_type = other DNA
ccaggggcggcttaataaagcctttgaggaaaaatttccgctgaaagaattaaataatccagagcatgacagtta

SEQ ID NO: 89459 - DNA, 75 bp, synthetic construct
  source 1..75: mol_type = other DNA
aacgagaagagggggccgccacggtgtggcgctgcccgctgtacgtgccaaaacagccgagcaccctgaaacgcc

SEQ ID NO: 89460 - DNA, 75 bp, synthetic construct
  source 1..75: mol_type = other DNA
acaagggattcagtgcacagggactggtacagcttatccgtgacagcctgcctgagcagagaaaggacgaagccg

SEQ ID NO: 89461 - DNA, 75 bp, synthetic construct
  source 1..75: mol_type = other DNA
atggcggattcgaatctcaatgtgccggtaatcatccaggctacgcggctcgatacatcagtccttccacgcaat

SEQ ID NO: 89462 - DNA, 75 bp, synthetic construct
  source 1..75: mol_type = other DNA
ttgaactgcgcggtgaaaagcagattgaaatcaaatccggtgcaaaaacgtccgtctggctgttcctgctgggcg

SEQ ID NO: 89463 - DNA, 75 bp, synthetic construct
  source 1..75: mol_type = other DNA
gtttctatcacctggcgagcatgaaaggcaccgttgaacgggccgatatgcactacatcatccgtgatttcgacc

SEQ ID NO: 89464 - DNA, 75 bp, synthetic construct
  source 1..75: mol_type = other DNA
tggttctgcgttttggggattaattgccggaggcgtttgttacgtggtgttgaatttaatcgctgacagaaaccg

SEQ ID NO: 89465 - DNA, 75 bp, synthetic construct
  source 1..75: mol_type = other DNA
actttcacatgaggaagagttggcaatgctggttaaacaattggtaagtcagttgaaaaaagcgaaaccagattg

SEQ ID NO: 89466 - DNA, 75 bp, synthetic construct
  source 1..75: mol_type = other DNA
cggtccataatagcagaacaaaagaaagagccagaaatgacggtcagatattatatcagttctgctgatttaacc

SEQ ID NO: 89467 - DNA, 75 bp, synthetic construct
  source 1..75: mol_type = other DNA
atctatcaagaagctcaagaagaggtaaattccatacagcaaaatattcacctaatgaagttcgaactcactgcg

SEQ ID NO: 89468 - DNA, 75 bp, synthetic construct
  source 1..75: mol_type = other DNA
gcccacagaggcaattgctcaggctgaaaatgtggtaatgcgtctgtccggtatgtctgagtttgttgtgaatga

SEQ ID NO: 89469 - DNA, 75 bp, synthetic construct
  source 1..75: mol_type = other DNA
ttggcggtaaaaatgtggcctggctgcactctgaagtcactgcatggatggccgggcgcattgccggacgcaaac

SEQ ID NO: 89470 - DNA, 75 bp, synthetic construct
  source 1..75: mol_type = other DNA
ccgtgcggaatacaactccattagtacctggatacagcgcgatattgccgcgttaagaagccagattatgattgg

SEQ ID NO: 89471 - DNA, 75 bp, synthetic construct
  source 1..75: mol_type = other DNA
ggcgggcagcatgttaataagacctcaacggctattcatctgcgttttgacattcgggcgtccagcctgccagag

SEQ ID NO: 89472 - DNA, 75 bp, synthetic construct
  source 1..75: mol_type = other DNA
agcagcagcgcacttgctgatgcttcactggatcctgcatggcgaccagcacaaaacaataattttgtcgggaat

SEQ ID NO: 89473 - DNA, 75 bp, synthetic construct
  source 1..75: mol_type = other DNA
gcccacggaggcaattgctcaggctgaaaacgtggtgttacgtctgtccggaatgtctgagtttgtggtgaataa

SEQ ID NO: 89474 - DNA, 75 bp, synthetic construct
  source 1..75: mol_type = other DNA
accgccagtgacataacgtctcatcagcccgtcagtagaaaaatcagtgcccgtcatttcgcaggtatttttcag

SEQ ID NO: 89475 - DNA, 75 bp, synthetic construct
  source 1..75: mol_type = other DNA
ggatcaataaacacataattagccagattggagctatgccactggaaaaatgcgagctacgccactggctggcct

SEQ ID NO: 89476 - DNA, 75 bp, synthetic construct
  source 1..75: mol_type = other DNA
aatccccaccgtggtgggacctcccgggccaaagggggaacaggggcccgcgggtcctcaggggccgaagggtga

SEQ ID NO: 89477 - DNA, 75 bp, synthetic construct
  source 1..75: mol_type = other DNA
attgcgctgatcctccccgaaaaaccagaaatcgccaatgagttggtaagccttgaatgcccgcggactcatttt

SEQ ID NO: 89478 - DNA, 75 bp, synthetic construct
  source 1..75: mol_type = other DNA
tcagcaggggaggcatcggagtcagcccggcaggcggcagaaagtgcagcctcagcaaagcagtcagaggatgcg

SEQ ID NO: 89479 - DNA, 75 bp, synthetic construct
  source 1..75: mol_type = other DNA
ttcctggctggaagatcagtcaacggaagatgagagcgaagcactggaaacactgttcagtgagtatctgttacc

SEQ ID NO: 89480 - DNA, 75 bp, synthetic construct
  source 1..75: mol_type = other DNA
tgcatgacatccggcgcacctttacaaccatgctgaacgatttaggcgttgatcctcacgtcgtggagcagctta

SEQ ID NO: 89481 - DNA, 75 bp, synthetic construct
  source 1..75: mol_type = other DNA
aaaaagacggcagaaagtgcagccggtaatgcagccagggatgcaacgaccgcagcagaaaaagcccgggagtca

SEQ ID NO: 89482 - DNA, 75 bp, synthetic construct
  source 1..75: mol_type = other DNA
gggcatcctgacgctaatgatgggtgggtaatacctggtgcgtcgtggataccatcacactggatgccgctacca

SEQ ID NO: 89483 - DNA, 75 bp, synthetic construct
  source 1..75: mol_type = other DNA
gtgacgacctgtacgatcgagcatcaagccaggataaacgctatcacattgttgaaggcgcaaaccatatggatc

SEQ ID NO: 89484 - DNA, 75 bp, synthetic construct
  source 1..75: mol_type = other DNA
cccgcaatccacttatttccatccatgaaaccacacaatttgaaattcaatccgtgattgcccgttgccgctttc

SEQ ID NO: 89485 - DNA, 75 bp, synthetic construct
  source 1..75: mol_type = other DNA
cggcagacattctggagtccgatgagaatggtattatcccggagcaggacagggtaatcacgcaggtggtgatac

SEQ ID NO: 89486 - DNA, 75 bp, synthetic construct
  source 1..75: mol_type = other DNA
atgagtaccacaacacgaaaatttaaaaccgttatcaccgatacgggtgcaaaaaaattagcgcaggcagccgca

SEQ ID NO: 89487 - DNA, 75 bp, synthetic construct
  source 1..75: mol_type = other DNA
gtgctaaagcgcttgggtcgaatcccgtttggcaaaatatggtggctatgatgctcactggggaactggtcgact

SEQ ID NO: 89488 - DNA, 75 bp, synthetic construct
  source 1..75: mol_type = other DNA
aagcattgggcgaaccgatgctttccacatcactgatgctgccaggcagcgaatttaccgaatccgatccggaag

SEQ ID NO: 89489 - DNA, 75 bp, synthetic construct
  source 1..75: mol_type = other DNA
attttcagcagcccgcggagatgcgctttaaccgcgcccgtgtccggcgggcgtttgtcacgattgggcagcgtc

SEQ ID NO: 89490 - DNA, 75 bp, synthetic construct
  source 1..75: mol_type = other DNA
gcgttgattaggcactatatcgagcgagcgcaactaaaacctgatggcaagctatttgaatttagtaactctgca

SEQ ID NO: 89491 - DNA, 75 bp, synthetic construct
  source 1..75: mol_type = other DNA
tgcgtgaggcggcagtagcaattgaaacagtagcaacgcctcaaaaattgctggcatttcgtatgaaagccacac

SEQ ID NO: 89492 - DNA, 75 bp, synthetic construct
  source 1..75: mol_type = other DNA
gggcgtcggatgtgatgctcctgaattctccattacggtaggtttgagtaacttacgtcgttttgctgacacact

SEQ ID NO: 89493 - DNA, 75 bp, synthetic construct
  source 1..75: mol_type = other DNA
tggttgccacggggaccagctccatgtcgtgggagtaccgttacacgctgaacgcagtgattgaggatttcagcg

SEQ ID NO: 89494 - DNA, 75 bp, synthetic construct
  source 1..75: mol_type = other DNA
tgagcgcctcagagcgtcgtagcgtcgataaacattacgggctggggcgaaactgccatctgttcgaaatgacgc

SEQ ID NO: 89495 - DNA, 75 bp, synthetic construct
  source 1..75: mol_type = other DNA
tgatgaaacaggaacgcattttttgaatggactgctatgcgcagcctctgtagaggctaagcctcgactacaaaa

SEQ ID NO: 89496 - DNA, 75 bp, synthetic construct
  source 1..75: mol_type = other DNA
gggcagatggttccatcaaactacggaaactttgatgcccgctatcagcagcgaaatggcggcgtgcaggatgtg

SEQ ID NO: 89497 - DNA, 75 bp, synthetic construct
  source 1..75: mol_type = other DNA
aagaaaatttaccccaccgtccctatcacacggatgatctcgcttttggtcttcgcatctccggcaaagggcgtg

SEQ ID NO: 89498 - DNA, 75 bp, synthetic construct
  source 1..75: mol_type = other DNA
ctggtttttgacgttgaccgcgagggggctgcgattgactggagcgaccggaacgcccccgcgccgaacatcacc

SEQ ID NO: 89499 - DNA, 75 bp, synthetic construct
  source 1..75: mol_type = other DNA
cggcgggactgaatcctctgttgccaacgtacagtgtcacgatccgtgtccgtaaaggggagcatcaggcgctgg

SEQ ID NO: 89500 - DNA, 75 bp, synthetic construct
  source 1..75: mol_type = other DNA
ctgtacgaacgatttcgcgtacggcgttcgcattctgccgaaaaacattgccattcttgcccgtttcatccagca

SEQ ID NO: 89501 - DNA, 75 bp, synthetic construct
  source 1..75: mol_type = other DNA
cgcagactgcatcggcaaactccgcgacagcagccaaaaaatcagaaaccaacgcgaaaaatagcgagacagccg

SEQ ID NO: 89502 - DNA, 75 bp, synthetic construct
  source 1..75: mol_type = other DNA
gaatacagcactaaaggtaagccaaatatcattgttttaacaatggatgatttagggtatggacaattgcctttt

SEQ ID NO: 89503 - DNA, 75 bp, synthetic construct
  source 1..75: mol_type = other DNA
gaaggagcacagcaaaacgaaggtcgcaatattccggcccataccggaagcgatcctgccgttcgtcacgcagct

SEQ ID NO: 89504 - DNA, 75 bp, synthetic construct
  source 1..75: mol_type = other DNA
ggacaacgaacagctgcgtcgccgggggacggatgtgtccggccaggtcagtgaagccgtggcgggaatgcagaa

SEQ ID NO: 89505 - DNA, 75 bp, synthetic construct
  source 1..75: mol_type = other DNA
gaaccgctgttggtggtgggtatggccggggtcgttttgtttattgttctggcaattctgcagccgctcctgcag

SEQ ID NO: 89506 - DNA, 75 bp, synthetic construct
  source 1..75: mol_type = other DNA
ctcggggctggaatcgaacgagatcgctatccttcagcgctctttgccttcccgctttaatcttcggcatttgaa

SEQ ID NO: 89507 - DNA, 75 bp, synthetic construct
  source 1..75: mol_type = other DNA
gtgaacggggaccgagaggagatacaggtccggcaggtccgcaggggccgaaaggtgacaggggagagcggggag

SEQ ID NO: 89508 - DNA, 75 bp, synthetic construct
  source 1..75: mol_type = other DNA
tggcttgatgccgtgattcagcgtgtcgaaatgtacaacgcatcgcttcccgttccgctttcacctcctgaatgt

SEQ ID NO: 89509 - DNA, 75 bp, synthetic construct
  source 1..75: mol_type = other DNA
gccacggcgaaagcgcaaaaagcggtggatgacatcgccgttcagtgctggctacggcacaaattagcggagtag

SEQ ID NO: 89510 - DNA, 75 bp, synthetic construct
  source 1..75: mol_type = other DNA
cgtcaacgcgaaaactcagcgtccgagcacatgtaatacggtagaaacgttgctggtgaataaaaacatcgccga

SEQ ID NO: 89511 - DNA, 75 bp, synthetic construct
  source 1..75: mol_type = other DNA
tacgccagagactctgcgtgtctgggttcgccagcatgagagggataccggggcggtgatggtgggctcaccacc

SEQ ID NO: 89512 - DNA, 75 bp, synthetic construct
  source 1..75: mol_type = other DNA
caacaggttcctctggctcacattctcatactgtaggtattggttctcatcagcacactgtcggtattggtgcac

SEQ ID NO: 89513 - DNA, 75 bp, synthetic construct
  source 1..75: mol_type = other DNA
tatccgcctgccggggcagcagtatgatgaggagtccggcctgtattacaaccgccaccgctattatgacccgct

SEQ ID NO: 89514 - DNA, 75 bp, synthetic construct
  source 1..75: mol_type = other DNA
attgccgacgatgtgcgccaggtgtgcaatctcgccgatccggtggggcaggtaatcgatggcggcgtactggac

SEQ ID NO: 89515 - DNA, 75 bp, synthetic construct
  source 1..75: mol_type = other DNA
atgcacctgcttcctgaactcgccagccaccatgcggtgtcaattcccgagctgctcgtcagccgggatgaaagg

SEQ ID NO: 89516 - DNA, 75 bp, synthetic construct
  source 1..75: mol_type = other DNA
gcagaatacgatgaatggggcaacctgctgaatgaagagaacccgcatcagctgcagcagcttatccgcctgccg

SEQ ID NO: 89517 - DNA, 75 bp, synthetic construct
  source 1..75: mol_type = other DNA
agccgtgaagaagttctcaacgaactgtgggagctcaaaaaaaatggcgttgttgataaaacgggtcacacctgg

SEQ ID NO: 89518 - DNA, 75 bp, synthetic construct
  source 1..75: mol_type = other DNA
atgacagaacaacaaaaattgacctttacggccttgcagcagcggctggattcgctgatgctgcgcgacagactg

SEQ ID NO: 89519 - DNA, 75 bp, synthetic construct
  source 1..75: mol_type = other DNA
aacagcacgataaacgttcagatatcaaagagcgcgaatggcaggtggataaagcacgtatcatgaaaaacgccc

SEQ ID NO: 89520 - DNA, 75 bp, synthetic construct
  source 1..75: mol_type = other DNA
gccgtttcagaggacttagcgtttgtctcagacgttttggccgccttcgcggaattgcctgccgccgttgccgag

SEQ ID NO: 89521 - DNA, 75 bp, synthetic construct
  source 1..75: mol_type = other DNA
atgagtaccacaacacgaaaatttaaaaccattatcactgatactggtgccaaaaaattagctcaggctgccgcg

SEQ ID NO: 89522 - DNA, 75 bp, synthetic construct
  source 1..75: mol_type = other DNA
caaaatttcacgagtgctttattaactggatgcgtgactgccattcttcagatgataaagacgtcatcgcaattg

SEQ ID NO: 89523 - DNA, 75 bp, synthetic construct
  source 1..75: mol_type = other DNA
gacgaagataatgaacccgttatggtttttaacggagagaaaaatgtgccggcagacagtctgaaaccgcagcct

SEQ ID NO: 89524 - DNA, 75 bp, synthetic construct
  source 1..75: mol_type = other DNA
atgacgagaatgagcgaaaccgaactactaaaaataatccgccgcgttaccggaatcagccaggaagcaggcaaa

SEQ ID NO: 89525 - DNA, 75 bp, synthetic construct
  source 1..75: mol_type = other DNA
accactggcacgtggagaataagctgcactggcgtctggacgtggtaatgaatgaagacgactgcaaaataagaa

SEQ ID NO: 89526 - DNA, 75 bp, synthetic construct
  source 1..75: mol_type = other DNA
agagccagatgattttgagcgcaaacatttagtgatagagggcatttacgccgcccctccagcaccagtagtacc

SEQ ID NO: 89527 - DNA, 75 bp, synthetic construct
  source 1..75: mol_type = other DNA
atcatgtcggtgctggcggatggagtgctggtggtcggtattgtggtggtgctttttcctttggtgaaaaaggag

SEQ ID NO: 89528 - DNA, 75 bp, synthetic construct
  source 1..75: mol_type = other DNA
gtggccttgccgcgatacttcagatgccgatcaggggacttcttatctgtttaaagagaagtttgataccccgaa

SEQ ID NO: 89529 - DNA, 75 bp, synthetic construct
  source 1..75: mol_type = other DNA
tacgccggagactctgcgtgtctgggtacgccagcatgagcgggataccggaagcggtgatggcgggctcaccac

SEQ ID NO: 89530 - DNA, 75 bp, synthetic construct
  source 1..75: mol_type = other DNA
gataaactcatcgaaacaaggccagttttttaccctgtccacacgatgccaatgtactcggaaaaatatcaaaag

SEQ ID NO: 89531 - DNA, 75 bp, synthetic construct
  source 1..75: mol_type = other DNA
caggtcagctgatgctctcgctcgacagagacgtgattgccgaaaagctcatccacgaccgcagaatcaacccca

SEQ ID NO: 89532 - DNA, 75 bp, synthetic construct
  source 1..75: mol_type = other DNA
catggacacaccatcaccgttaacgctgctggtaacgcggaaaacaccgttaaaaacatcgcatttaattatatt

SEQ ID NO: 89533 - DNA, 75 bp, synthetic construct
  source 1..75: mol_type = other DNA
tggctacatggtgggggatcatcgttgcgcgatccttatgctcctcgacaaggctggaaaccaactatgggatgt

SEQ ID NO: 89534 - DNA, 75 bp, synthetic construct
  source 1..75: mol_type = other DNA
ttctgtcttttgtatttgttggtgttatggctatgattgtatgtattcctttttacatcgtttaccttgcgcaac

SEQ ID NO: 89535 - DNA, 75 bp, synthetic construct
  source 1..75: mol_type = other DNA
ttaatctttggcagattgatgaagcgaataacactgttgcccttgaaggggtgagcgcagatggcgcaacgaagt

SEQ ID NO: 89536 - DNA, 75 bp, synthetic construct
  source 1..75: mol_type = other DNA
aatggcataaaccggcatccgtactgcacaacatggtacgtgccgttgccgatccgtggccgggtgccttcagct

SEQ ID NO: 89537 - DNA, 75 bp, synthetic construct
  source 1..75: mol_type = other DNA
atgagaatggcattatcccggagcaggacagggtaatcacgcaggtggtgatactggatgcggataaaaagcaga

SEQ ID NO: 89538 - DNA, 75 bp, synthetic construct
  source 1..75: mol_type = other DNA
ttatgagggcgaacagctgtatcttaatgagttaggatatgtttatggtaatgaagaaaaaacaaatgaaattgt

SEQ ID NO: 89539 - DNA, 75 bp, synthetic construct
  source 1..75: mol_type = other DNA
tattcaccctgctcacgctgtccaccgttccggcccaggccgatattatcgacgacaccattggcaatattcagc

SEQ ID NO: 89540 - DNA, 75 bp, synthetic construct
  source 1..75: mol_type = other DNA
ctgaaagagccttctgtccgttttatctctgtcacacggcaactggagaacggtcgtttccactatcaatttaca

SEQ ID NO: 89541 - DNA, 75 bp, synthetic construct
  source 1..75: mol_type = other DNA
tatgactcacaatgggcggcaatttgtttcattgctccaaagattggctgtacgccagagactctgcgtgtctgg

SEQ ID NO: 89542 - DNA, 75 bp, synthetic construct
  source 1..75: mol_type = other DNA
atgagcggaaaaccggcggcgcggcagggcgacatgacccgcaagggactggatattgtgcagggttcagcaggg

SEQ ID NO: 89543 - DNA, 75 bp, synthetic construct
  source 1..75: mol_type = other DNA
cggtttcctgatttctataacgaagaaatattcagggaggtggccgaagagagcgagtcaacatttaaagagctt

SEQ ID NO: 89544 - DNA, 75 bp, synthetic construct
  source 1..75: mol_type = other DNA
acatttgccacacattttataatgaatggaggtaacataatcacattgcagcgcatcctgggtcattctaacatt

SEQ ID NO: 89545 - DNA, 75 bp, synthetic construct
  source 1..75: mol_type = other DNA
gataaacggagaacatgtccctgaaatcattctgctcaactcccatgacggtacctccagctaccagatgctgcc

SEQ ID NO: 89546 - DNA, 75 bp, synthetic construct
  source 1..75: mol_type = other DNA
gcatgtcatgcgtcatacatttgccacacactttatgatgaatggcggaaatattgttacgttgcaacgaatcct

SEQ ID NO: 89547 - DNA, 75 bp, synthetic construct
  source 1..75: mol_type = other DNA
ttaaacggatcaagaccaaaaattcaggcaggctttttaatgccagttactacaaagtgcgcaacgctctcaggg

SEQ ID NO: 89548 - DNA, 75 bp, synthetic construct
  source 1..75: mol_type = other DNA
cccatgcgccagccattgagctgtgccgcaaactggtggcgatgacgccgcaaccgctggagtgcgtttttctcg

SEQ ID NO: 89549 - DNA, 75 bp, synthetic construct
  source 1..75: mol_type = other DNA
cagggatagcaagagcacgggatgcaggaaaacgttttggtcgcccaccggtattaaatgaagaacaaaaacaga

SEQ ID NO: 89550 - DNA, 75 bp, synthetic construct
  source 1..75: mol_type = other DNA
aaatcgccagtcgtctgcagcaaaggatatctgctgtaatgcgttatgccgtacagtctggcatcatcagatata

SEQ ID NO: 89551 - DNA, 75 bp, synthetic construct
  source 1..75: mol_type = other DNA
cttcattgcttcctacgggacatcttataaggcaccaaatctggggcaactgtatggcttctacggaaatccgaa

SEQ ID NO: 89552 - DNA, 75 bp, synthetic construct
  source 1..75: mol_type = other DNA
gtgaagctgttacagaaatggcttttttgtccagtgaagagattacgcggctgttatccatgcttgatggtgatg

SEQ ID NO: 89553 - DNA, 75 bp, synthetic construct
  source 1..75: mol_type = other DNA
tcagggctggccagcgttctcacagtggcttgaagcggtgatccagcgtgtcgaaatgtacaatgcatcgcttcc

SEQ ID NO: 89554 - DNA, 75 bp, synthetic construct
  source 1..75: mol_type = other DNA
gatgaactggcggattatcttgatttgagcgcctcagcgtgccgtagcatcgataaaaactatggcatggggcga

SEQ ID NO: 89555 - DNA, 75 bp, synthetic construct
  source 1..75: mol_type = other DNA
agatggatggtcgccacagtgcccaaattgctgaaatcgctgaaagcgagctgccacagggggatgtggaggtca

SEQ ID NO: 89556 - DNA, 75 bp, synthetic construct
  source 1..75: mol_type = other DNA
ccggcgtcattgtgggctggcgggtctcatcgtcgatgaaaacgacgttcgtgctggatgcactggagcaggcgc

SEQ ID NO: 89557 - DNA, 75 bp, synthetic construct
  source 1..75: mol_type = other DNA
ggccagtatcagcgccattgctcgggagtttaatacaacccggcaaaccatactcagggtaaaggcaggacagta

SEQ ID NO: 89558 - DNA, 75 bp, synthetic construct
  source 1..75: mol_type = other DNA
gttatccgggccgattattgaagatcaactggcggttcgtctcagcgccgataggcagcggcgcgacagcttcgt

SEQ ID NO: 89559 - DNA, 75 bp, synthetic construct
  source 1..75: mol_type = other DNA
tgtgtacggcatcatctgtgatccggcggatatgctggtggtgcagatgactgagacgaaggcgcgtgagcattc

SEQ ID NO: 89560 - DNA, 75 bp, synthetic construct
  source 1..75: mol_type = other DNA
gtcacgggatcagcgactggaatctggaattaaccagcaacctgttttacaacgattataaagatatgcagttac

SEQ ID NO: 89561 - DNA, 75 bp, synthetic construct
  source 1..75: mol_type = other DNA
acaccaaaatgttactggcatttagtcaaggtgaaatcgtggccgcatattggaactgggttgtaaatccaattg

SEQ ID NO: 89562 - DNA, 75 bp, synthetic construct
  source 1..75: mol_type = other DNA
atggttacagttgtcagcaattattgtcaattatctcaaacccaactcagtcagacatttgcagaaaaatttact

SEQ ID NO: 89563 - DNA, 75 bp, synthetic construct
  source 1..75: mol_type = other DNA
tttctgcagatgattaacattctgccggtcgcagaaatgaagggcgagaaaatcggcgtcggtgtgaccggcacc

SEQ ID NO: 89564 - DNA, 75 bp, synthetic construct
  source 1..75: mol_type = other DNA
aggtctggcgggaatacccgttgcgtgccggagcaaacccgaagaaatccgctttcagtgcctggaaggccagat

SEQ ID NO: 89565 - DNA, 75 bp, synthetic construct
  source 1..75: mol_type = other DNA
tatgtggtcgaggcgtatgccgccgggtgcctgctggaaaatatcaccctgggtgatttcaccgcacctgcagta

SEQ ID NO: 89566 - DNA, 75 bp, synthetic construct
  source 1..75: mol_type = other DNA
gtcatgggagccagtgtgatgcccctgctgagatatcatccagccatcaccactgctctgggacttaatgagaga

SEQ ID NO: 89567 - DNA, 75 bp, synthetic construct
  source 1..75: mol_type = other DNA
ttggggagttggtaaaatcacaaatattagcaatgaataagcgaaagggattttattatataaatcctaattttg

SEQ ID NO: 89568 - DNA, 75 bp, synthetic construct
  source 1..75: mol_type = other DNA
gcgttgttgatcctgttatgaccagcatcgcgcgtggctacaggaatgcagccttcatcggagaacatatatttc

SEQ ID NO: 89569 - DNA, 75 bp, synthetic construct
  source 1..75: mol_type = other DNA
catcttcggtaaagacgatgacgtctgttgaacgctgggaaggaggccatggtgatcctgttgaggtcattgagg

SEQ ID NO: 89570 - DNA, 75 bp, synthetic construct
  source 1..75: mol_type = other DNA
ggcggatcaacaaatgatagacggtaacgcagagtgtaacgctcgaggcgttacaaaaagtgcaatagaccgtat

SEQ ID NO: 89571 - DNA, 75 bp, synthetic construct
  source 1..75: mol_type = other DNA
ggggcatttgccgtcgatgttgcaatgcgccttgaccaggcatttccgttaatgatgaagcaacttgagctgatg

SEQ ID NO: 89572 - DNA, 75 bp, synthetic construct
  source 1..75: mol_type = other DNA
tatccatacccgggccattcacagcattgataccgatataaaactcaaccgcgcattgtgggtgatggcagaaac

SEQ ID NO: 89573 - DNA, 75 bp, synthetic construct
  source 1..75: mol_type = other DNA
cgcactgaaacggcgcgggaagtccagagaccgagcattgatgctcaccttctgtggcttgaagcagagctgaag

SEQ ID NO: 89574 - DNA, 75 bp, synthetic construct
  source 1..75: mol_type = other DNA
tcattcgcctgttcgcgctggggatgagctaccaggatatcagccgggagatcgaagatttatatgccttcagtg

SEQ ID NO: 89575 - DNA, 75 bp, synthetic construct
  source 1..75: mol_type = other DNA
gagagctggcgtcgcattatggatgaactgtcagtcatctcctgcgatctctaccgtggctacgtacgtgaaaac

SEQ ID NO: 89576 - DNA, 75 bp, synthetic construct
  source 1..75: mol_type = other DNA
ctaaggtcagaactaaaagaggcgcggaagtcacatatagtggctttgccggaaataacgcagcatcagtagtat

SEQ ID NO: 89577 - DNA, 75 bp, synthetic construct
  source 1..75: mol_type = other DNA
ttggaaaaaaagctgaagatattctttaccatattgttagaaacccaacaaatgagaccctatcgattatccgac

SEQ ID NO: 89578 - DNA, 75 bp, synthetic construct
  source 1..75: mol_type = other DNA
atctggaacaacggcagttgaacagggagaggctgaaacaatggaaccggacgcaactgaacatcatcaggacac

SEQ ID NO: 89579 - DNA, 75 bp, synthetic construct
  source 1..75: mol_type = other DNA
gtggcgcaaccttaccagcgtaaccagatttttttgtctgcgtcgcgtcgtcaggcgttccagtttaaaagcatt

SEQ ID NO: 89580 - DNA, 75 bp, synthetic construct
  source 1..75: mol_type = other DNA
cactgcaacagtatgaccggtgataaacccggagaagctcattcatcaggctggaccctggctgccaaacgtgga

SEQ ID NO: 89581 - DNA, 75 bp, synthetic construct
  source 1..75: mol_type = other DNA
ggacggtttcccgtaattatcagggaggagactctcatcagttcagttataacgggactgtgggggggaatctgg

SEQ ID NO: 89582 - DNA, 75 bp, synthetic construct
  source 1..75: mol_type = other DNA
cagcggcgctgtgtccgtggtggttcctccggctgttcctggtggccgttttcgaacggtggagacgcgacgcgt

SEQ ID NO: 89583 - DNA, 75 bp, synthetic construct
  source 1..75: mol_type = other DNA
tcgaaatgtacaacgcatcgctccccgttccgctttcacctcctgaatgtcgggctattggcaagagtattgcga

SEQ ID NO: 89584 - DNA, 75 bp, synthetic construct
  source 1..75: mol_type = other DNA
gcacgccgttcttgcctgtggagagatggtgcagtcaggccgctcgttgaagcaggaacccaccgaaatgattca

SEQ ID NO: 89585 - DNA, 75 bp, synthetic construct
  source 1..75: mol_type = other DNA
tcaaactgggcgtcaataaattcaatgtcgatgaagagcatccgcacattgttgtgaaggccgatgccgataaac

SEQ ID NO: 89586 - DNA, 75 bp, synthetic construct
  source 1..75: mol_type = other DNA
agccggatatggaggtgaactcacagccatcggtgcgtgaagtgcgttttggtgacgggtactcacagcgtatgg

SEQ ID NO: 89587 - DNA, 75 bp, synthetic construct
  source 1..75: mol_type = other DNA
cgctacaggcatgtaagcgcaaaaaacgtgaactggaggaagaagaaaaaaggctgatacgtgaatatcagcctg

SEQ ID NO: 89588 - DNA, 75 bp, synthetic construct
  source 1..75: mol_type = other DNA
gtgtcagacacactgcccgggacaacgcatcccgacgacaatcacgaccgcctctggtggggactgccctgcacc

SEQ ID NO: 89589 - DNA, 75 bp, synthetic construct
  source 1..75: mol_type = other DNA
ttgaccggattgaggaaaagcgtgatgccatgcagtcgcaggtcctgccgccaccggcacgtcaggcgctggcac

SEQ ID NO: 89590 - DNA, 75 bp, synthetic construct
  source 1..75: mol_type = other DNA
ttgacgatcaaaaatcctttccccggggcacgtatgccacacaccagggcggactctggcgggcgtatgaaaaaa

SEQ ID NO: 89591 - DNA, 75 bp, synthetic construct
  source 1..75: mol_type = other DNA
ccagaactatacgtacatccccaccatcaccgtactggaaagcctgcagcaggaaggttttcagccattcttcgc

SEQ ID NO: 89592 - DNA, 75 bp, synthetic construct
  source 1..75: mol_type = other DNA
aacgccgacctgctggcggcaggactggtctataacagtgagcgggtaaaaaattatcagcctggccctacctat

SEQ ID NO: 89593 - DNA, 75 bp, synthetic construct
  source 1..75: mol_type = other DNA
gcgacacaactgcacgggaggctctgtacagagccggtcaggtcgcaggcccgtgacggttttggcgaagctgtg

SEQ ID NO: 89594 - DNA, 75 bp, synthetic construct
  source 1..75: mol_type = other DNA
cccttgaacaaccgctggcatcacttcctgagacgcttcgccagctgattcttgaacgcattcagaacctcaccc

SEQ ID NO: 89595 - DNA, 75 bp, synthetic construct
  source 1..75: mol_type = other DNA
tcaacgggaaaccttttggcctggattacgaactggcgaaacagtttgccgattacctcggcgtaaaactgaaag

SEQ ID NO: 89596 - DNA, 75 bp, synthetic construct
  source 1..75: mol_type = other DNA
agatagcctcaagcacccgcagcaattctacttaactctcgctttacagcaaaccgtttttgcccgatatgggaa

SEQ ID NO: 89597 - DNA, 75 bp, synthetic construct
  source 1..75: mol_type = other DNA
gcaaagagcatgcggttaacagcagtatccagaagaaaggcgacttcaccgtactggtgattcaggaggtgacgc

SEQ ID NO: 89598 - DNA, 75 bp, synthetic construct
  source 1..75: mol_type = other DNA
tgacgaacatcagccggtcaccaccgctgacattctgacaccacgacgcagggaggattacggtaaagacctgtg

SEQ ID NO: 89599 - DNA, 75 bp, synthetic construct
  source 1..75: mol_type = other DNA
taatcactttcttactcttctggctggtgaacgtcggaatcggtttcggtggtggcaaagttttaaataaattca

SEQ ID NO: 89600 - DNA, 75 bp, synthetic construct
  source 1..75: mol_type = other DNA
atgcgattagccagtcgttttggttatgctgcaaaccagatacgccgtgaccgtccactgacacatgaagagctg

SEQ ID NO: 89601 - DNA, 75 bp, synthetic construct
  source 1..75: mol_type = other DNA
cgaattaatgaagagtcatgttactggcgtgatgctttattccgtgcattacgtgaattattcagcctgtttgag

SEQ ID NO: 89602 - DNA, 75 bp, synthetic construct
  source 1..75: mol_type = other DNA
tgataataatgctgaacagccaggcatgggccgcagctacaccacaggcgagccgttatgatgcacgtatccagc

SEQ ID NO: 89603 - DNA, 75 bp, synthetic construct
  source 1..75: mol_type = other DNA
cactgcaacagtatgaccggtgataaacccggagaagctcattcatcagcctggaccctggctgcaaaacgtggg

SEQ ID NO: 89604 - DNA, 75 bp, synthetic construct
  source 1..75: mol_type = other DNA
tggagaatggatattctcagaaagctattgcggcgatgctgaatgtacatcgtaatacgatccgtaattgggcaa

SEQ ID NO: 89605 - DNA, 75 bp, synthetic construct
  source 1..75: mol_type = other DNA
caccaaatatccgggcaaaggcagtttcaacatagttcccgactttgcttatgacgatggccgctttacgttcgt

SEQ ID NO: 89606 - DNA, 75 bp, synthetic construct
  source 1..75: mol_type = other DNA
gaggctgtttatcagatagtgaaacggtttttccctgctgctattccgtacaccttcacgctgtcatcaaaacgg

SEQ ID NO: 89607 - DNA, 75 bp, synthetic construct
  source 1..75: mol_type = other DNA
gaactcagacgtaaagtaaatgaagaggatactccatgtctggaatgtgaatcactagaaaaagaatttgaggaa

SEQ ID NO: 89608 - DNA, 75 bp, synthetic construct
  source 1..75: mol_type = other DNA
accaatttgatcgcatcattcgtgaggaggaatgccgacgccttaccggtatttgccgaacgacgcgttatatga

SEQ ID NO: 89609 - DNA, 75 bp, synthetic construct
  source 1..75: mol_type = other DNA
tttttgtttttatgataagtttggtatctatccaaacatttgcaggtgttagccaggagtttagaactaactgtg

SEQ ID NO: 89610 - DNA, 75 bp, synthetic construct
  source 1..75: mol_type = other DNA
ttccgtataactttaatatcgcttcaaagcgggcgctggtcatgaagatgcttcaggtggtccgtgccggacgct

SEQ ID NO: 89611 - DNA, 75 bp, synthetic construct
  source 1..75: mol_type = other DNA
atgctcgacgaagcgcgcgcagtgggtgcagagttcaaccgtatcgccggggaaaactgcctctacttcgaaacc

SEQ ID NO: 89612 - DNA, 75 bp, synthetic construct
  source 1..75: mol_type = other DNA
ccgtaccagcgaaaccagatttttttgtcagcctcgcgccgtcaggcttttcagtttaaaggcgtgattcagaag

SEQ ID NO: 89613 - DNA, 75 bp, synthetic construct
  source 1..75: mol_type = other DNA
tccgtgcgctgggtgaagaattttccgcagtgctggcggatttaaagcgcacatttgaggggaaaatagccgcgc

SEQ ID NO: 89614 - DNA, 75 bp, synthetic construct
  source 1..75: mol_type = other DNA
aaaggtggcgaatatgccaacctggacgccgtggtgatggatgcggtcaatgagcttatcgacgtggtctaccag

SEQ ID NO: 89615 - DNA, 75 bp, synthetic construct
  source 1..75: mol_type = other DNA
ctggagatcgggcgtcacgccctgcgtcatggctgggtgatgccgttgggtaaccgcaacgtgcagaccgtgctg

SEQ ID NO: 89616 - DNA, 75 bp, synthetic construct
  source 1..75: mol_type = other DNA
tgagggatatacctaccgcacggaaacgcagaacggtgatgtgctgattaaggcacaccccgcggcggcaatgaa

SEQ ID NO: 89617 - DNA, 75 bp, synthetic construct
  source 1..75: mol_type = other DNA
gaaaaccctgaaggcagcagctattgccgaagccattatcagtaccatcgcgccactggaaagcatcagacgcag

SEQ ID NO: 89618 - DNA, 75 bp, synthetic construct
  source 1..75: mol_type = other DNA
acgatctaattgaattatccagggacatttcaacaaaagacgataagaagcatggggttgtaaagtacatgatag

SEQ ID NO: 89619 - DNA, 75 bp, synthetic construct
  source 1..75: mol_type = other DNA
ctgggacataaatcgcctaaccagacagctaaataccatgatgatcgtggtaaggaatgggcaaaaatcaaggtt

SEQ ID NO: 89620 - DNA, 75 bp, synthetic construct
  source 1..75: mol_type = other DNA
gattaatggtggtggaagttatatccggattgagggtagcggcattgagccgggaacgccgggggattataacgt

SEQ ID NO: 89621 - DNA, 75 bp, synthetic construct
  source 1..75: mol_type = other DNA
acggtcaaaaaagcggaaatcaaggtggagctgctgccgaaatacgccgcctgggcggagggtgtcctggctgcc

SEQ ID NO: 89622 - DNA, 75 bp, synthetic construct
  source 1..75: mol_type = other DNA
ccactggatgacagggaaaaaggcttcatttccagcaccaccgtccccgtctttaaatatctgattgacccgcag

SEQ ID NO: 89623 - DNA, 75 bp, synthetic construct
  source 1..75: mol_type = other DNA
tcatacttggcggtgagatgatcgggcgtgtgctcttttatggcctgcacatgacagtaggaatggctattgcag

SEQ ID NO: 89624 - DNA, 75 bp, synthetic construct
  source 1..75: mol_type = other DNA
ggtgagtttcctgacctggaactatttcatcaacgcgatgggaatgacctggggaagctacttcggcgtcgattt

SEQ ID NO: 89625 - DNA, 75 bp, synthetic construct
  source 1..75: mol_type = other DNA
cattttttatcgggataattgtttctccggcccgggctgagctctattttaatccgcgttttctgtctgatgacc

SEQ ID NO: 89626 - DNA, 75 bp, synthetic construct
  source 1..75: mol_type = other DNA
tgagtacgggcaggaccgcgtgaccatcacggacagcctgaaccggcgggaggtgctgtacacggagggcgaggg

SEQ ID NO: 89627 - DNA, 75 bp, synthetic construct
  source 1..75: mol_type = other DNA
aaaagtgacggcatttctgccggaaaatgtactgaccatcggaggtcaatttcagcatgcagaactccgtgatga

SEQ ID NO: 89628 - DNA, 75 bp, synthetic construct
  source 1..75: mol_type = other DNA
tctgcataaagcgattggcactgtcctgagtgaaagtaatccggcttccgcccttaatcatctcaaccatgcgtt

SEQ ID NO: 89629 - DNA, 75 bp, synthetic construct
  source 1..75: mol_type = other DNA
tcgggagaaaactgtcgactcgctggttcagcaaaccgcggaagggatcgccatcaagccgctgtataccgaagc

SEQ ID NO: 89630 - DNA, 75 bp, synthetic construct
  source 1..75: mol_type = other DNA
aacctgaccgataatctcacactcaaaggggggatcgcaaaagcatttcgggctccttcaattcgtgaggtgagt

SEQ ID NO: 89631 - DNA, 75 bp, synthetic construct
  source 1..75: mol_type = other DNA
cttcacgactggagagctttctgaatgatgactgccttgtctggtacgatattccggtgggacggaaaaaccggc

SEQ ID NO: 89632 - DNA, 75 bp, synthetic construct
  source 1..75: mol_type = other DNA
attgccggtgagagcaatatttttgctgactgggcggcttcccggcagggatgtaccgttggcgggaaatctgac

SEQ ID NO: 89633 - DNA, 75 bp, synthetic construct
  source 1..75: mol_type = other DNA
cgttatcccctgaaagtggtgcgttgggagggggacccggaacagaatcccttcgggctggcgcttgactgctac

SEQ ID NO: 89634 - DNA, 75 bp, synthetic construct
  source 1..75: mol_type = other DNA
gcagaagagttctttgccacttcaggttcaacaatgtgttaatgacctgctggaacacattgatcgtattgaaga

SEQ ID NO: 89635 - DNA, 75 bp, synthetic construct
  source 1..75: mol_type = other DNA
tctgcctgcagtccgcatgccgtatcgggccttgggttctaacctgttgcgtagatttatgcagcggactgcctt

SEQ ID NO: 89636 - DNA, 75 bp, synthetic construct
  source 1..75: mol_type = other DNA
ttctttgtgccgctttactgacggtcacacctgctgcgtcagcggatgtgaacagcgacatgaaccagttcttca

SEQ ID NO: 89637 - DNA, 75 bp, synthetic construct
  source 1..75: mol_type = other DNA
aaaccgcaaaaccaaaagaaaagccctataagctgtctgatggtggcggtatgtatctactcattaacactaatg

SEQ ID NO: 89638 - DNA, 75 bp, synthetic construct
  source 1..75: mol_type = other DNA
tggtatcatgcgccacagccggtagtaacaccggaagaagaagagttacgcaaactggcgcaactgctgcgttat

SEQ ID NO: 89639 - DNA, 75 bp, synthetic construct
  source 1..75: mol_type = other DNA
ttattaactggatgcgtgactgccattcttcagatgataaagacgtcattgcaattgatggaaaaacgctccggc

SEQ ID NO: 89640 - DNA, 75 bp, synthetic construct
  source 1..75: mol_type = other DNA
gagtcacggcagagaagaaatccgtcttcatattgtttgcgatgtccctgatgaacttattgatttcacgtttga

SEQ ID NO: 89641 - DNA, 75 bp, synthetic construct
  source 1..75: mol_type = other DNA
cgaagcggcgcgttgtactgaaatgtggtttacagatggcttgaccaaagcgacgaaccgattgcacgcctttaa

SEQ ID NO: 89642 - DNA, 75 bp, synthetic construct
  source 1..75: mol_type = other DNA
tttgaagcctacgccaccgggatcaactggggaatttactctcccaatgactgccgcgacctggaagatatgaat

SEQ ID NO: 89643 - DNA, 75 bp, synthetic construct
  source 1..75: mol_type = other DNA
gacaagaagtgaaatcaggcggggattatctgacttgtcgataaaaatgctcagggaggttttaacctcccatga

SEQ ID NO: 89644 - DNA, 75 bp, synthetic construct
  source 1..75: mol_type = other DNA
attctgctcaactcccatgacggtacctccagctaccagatgctgccgggttacttcaggttcgtctgtcagaac

SEQ ID NO: 89645 - DNA, 75 bp, synthetic construct
  source 1..75: mol_type = other DNA
cggacgacgttagccacaacatacctcacggcacgccgtgtttatgatatggcacaccaggaatataaccagtgt

SEQ ID NO: 89646 - DNA, 75 bp, synthetic construct
  source 1..75: mol_type = other DNA
agatgagatcaagatcaccgcgaagaagaaaatcacccttaacggcggtggcagctacatccggctggatgcctg

SEQ ID NO: 89647 - DNA, 75 bp, synthetic construct
  source 1..75: mol_type = other DNA
gcagttgcggcaggcacagcaggaacaggaaagagcgcttgccgcgcgggaagaagcggagagcagttttgttgt

SEQ ID NO: 89648 - DNA, 75 bp, synthetic construct
  source 1..75: mol_type = other DNA
cagaaatgacggtcagatattatatcagttctgctgatttaaccgcagagaagttcgccacagcaatccgaaacc

SEQ ID NO: 89649 - DNA, 75 bp, synthetic construct
  source 1..75: mol_type = other DNA
cgaacgcaggaaatcacgctgatatcggtgttgtgaagaatatgtttatcggtgtgggtcaggcgctgagcgtgt

SEQ ID NO: 89650 - DNA, 75 bp, synthetic construct
  source 1..75: mol_type = other DNA
tgagtggtttcggtcctgtcgctcagatattcatcggcgggaaagacaaacagacctggcgtaatctgaccataa

SEQ ID NO: 89651 - DNA, 75 bp, synthetic construct
  source 1..75: mol_type = other DNA
tcgaaccttatttgaaggtcaaaaggttaccttctctgtagagagtggtgctaaaggtcctgcagcagcaaatgt

SEQ ID NO: 89652 - DNA, 75 bp, synthetic construct
  source 1..75: mol_type = other DNA
tgctgaccaactgccataactcactctgcgccgtcggcggcaccattaacggtgatgaccatgtttttggtttat

SEQ ID NO: 89653 - DNA, 75 bp, synthetic construct
  source 1..75: mol_type = other DNA
cgaatttgcggcgtgatttttgactgggatgagtacagtctcgatttatgtagcgatatcaatcaacttaatgaa

SEQ ID NO: 89654 - DNA, 75 bp, synthetic construct
  source 1..75: mol_type = other DNA
taactattgtgcgacttattcttcaagcacaaataaagggcctcatcaatatccagatagcgtctatagtggttt

SEQ ID NO: 89655 - DNA, 75 bp, synthetic construct
  source 1..75: mol_type = other DNA
aaaaattgctggtgaagcgcctgtaatgcctttcgatcagcgaattaatgcgcttaacgattttatgaagcactt

SEQ ID NO: 89656 - DNA, 75 bp, synthetic construct
  source 1..75: mol_type = other DNA
gacttcctcaacggcgatccggaccagccgatcattatggggcgtacctaccaccaggaaaaccgcacccccggc

SEQ ID NO: 89657 - DNA, 75 bp, synthetic construct
  source 1..75: mol_type = other DNA
aacttcgtgaaatcgctgaaaaaacaaaaattgctggtgaagcacctgtaatgcctttcgatcagcgaattaatg

SEQ ID NO: 89658 - DNA, 75 bp, synthetic construct
  source 1..75: mol_type = other DNA
tgggcacccaataaatgctgataagcgacatgtcatgatacctaaagaaaatggcagttggctttgcctgattga

SEQ ID NO: 89659 - DNA, 75 bp, synthetic construct
  source 1..75: mol_type = other DNA
taaagcggctattggtcgtctgaaaagtgaggaactggcgcaatataatttatggctggattatctggacgcact

SEQ ID NO: 89660 - DNA, 75 bp, synthetic construct
  source 1..75: mol_type = other DNA
cattaggcaaagcaaaaaaatattatcagccaattctcgaaggatttagagagttaagacgagcaggaatactcg

SEQ ID NO: 89661 - DNA, 75 bp, synthetic construct
  source 1..75: mol_type = other DNA
cgacatgtcatgatacctaaagaaaatggcagttggctttgcctgattgacttagaacacgcactacgcgtcgct

SEQ ID NO: 89662 - DNA, 75 bp, synthetic construct
  source 1..75: mol_type = other DNA
aaggcactattgcctggtctattctctcttctcataatacgtccggaaatatggataaacttaaaattaagtttg

SEQ ID NO: 89663 - DNA, 75 bp, synthetic construct
  source 1..75: mol_type = other DNA
agtgcgtgttccgcaccggggaaatgtggtggacagagtcattgaaggggcttacgaggtggtgggcgtgtttga

SEQ ID NO: 89664 - DNA, 75 bp, synthetic construct
  source 1..75: mol_type = other DNA
tggcgagctaatcaatgaacctccgtttaatggcgaagtccgtttgtttgcaaaggatatggttagtcggtttgt

SEQ ID NO: 89665 - DNA, 75 bp, synthetic construct
  source 1..75: mol_type = other DNA
agaaaatggcagttggctttacctgattgacctagaacacgcattacgcgtcgctgacattcgcatcaaaggaga

SEQ ID NO: 89666 - DNA, 75 bp, synthetic construct
  source 1..75: mol_type = other DNA
ccatctggtggatgccgggaaacagcagcgcggtgaaggctttgaactgcgtaccgatctgtggggcgcggtgcg

SEQ ID NO: 89667 - DNA, 75 bp, synthetic construct
  source 1..75: mol_type = other DNA
aaagctggaaagtaaacccgttcatgatatcggtgatatcaggaacaaaaataatcgtatgcgttctggctttct

SEQ ID NO: 89668 - DNA, 75 bp, synthetic construct
  source 1..75: mol_type = other DNA
cttctgggtgcctctaaccccagttccgcagaagatgcgttgtatctgaaagagtacatcaactcgccggatatg

SEQ ID NO: 89669 - DNA, 75 bp, synthetic construct
  source 1..75: mol_type = other DNA
tccgctgacacacgaagaactgatgcaccatgtgccggggattttcggggaagataaacacacgtcccgaagcca

SEQ ID NO: 89670 - DNA, 75 bp, synthetic construct
  source 1..75: mol_type = other DNA
aaaatgccgcagtggcggcgtatattacaaggcgagacggggtacaacgaaccagacgtgtttgcggtctgtcgt

SEQ ID NO: 89671 - DNA, 75 bp, synthetic construct
  source 1..75: mol_type = other DNA
tttttgacagcgccagtcagaaacaactgtcagaagcacagtcaaaagccctttcagcgcgttttaacacggcac

SEQ ID NO: 89672 - DNA, 75 bp, synthetic construct
  source 1..75: mol_type = other DNA
gttccggtatgacccggtggacaggctgacggagcagcgcggctttgacggcaggacacagcgttaccggtacag

SEQ ID NO: 89673 - DNA, 75 bp, synthetic construct
  source 1..75: mol_type = other DNA
ctgtgcctgttctggtcgtggctggtggcgcgatatctcgaccgtacacagccgtctgtcggcggaggtaaatag

SEQ ID NO: 89674 - DNA, 75 bp, synthetic construct
  source 1..75: mol_type = other DNA
tgatgaattaatcgtaatgttgtgggcgaatgaaatatttaatcgtgatcaacctgatactatagcgagcgtttt

SEQ ID NO: 89675 - DNA, 75 bp, synthetic construct
  source 1..75: mol_type = other DNA
taagaagtcagttctttattgattatggtgtcaggcttccaactattttatatagaacaagcaatgagcttaagg

SEQ ID NO: 89676 - DNA, 75 bp, synthetic construct
  source 1..75: mol_type = other DNA
cagcgaagccctgcgcgacctggccttctggctgtaccgccagctggaaaacgagtacgactggctgacctcaga

SEQ ID NO: 89677 - DNA, 75 bp, synthetic construct
  source 1..75: mol_type = other DNA
acgagtacgactggctgacctcagatgccgctgtggatgaggcccttctcatcaacgaatataccttcaccgaag

SEQ ID NO: 89678 - DNA, 75 bp, synthetic construct
  source 1..75: mol_type = other DNA
cgagcagcgtgaatattacgagggagtaatcgcggatgggagtaagcgtattgcagaactggaagcacgggaaat

SEQ ID NO: 89679 - DNA, 75 bp, synthetic construct
  source 1..75: mol_type = other DNA
cggaacagtccgactggtcaggcaatgacaaccgatgcggaagccgcagtcagcgaagccctgcgcgacctggcc

SEQ ID NO: 89680 - DNA, 75 bp, synthetic construct
  source 1..75: mol_type = other DNA
aggcacaggagaacgagcgaaaacagacgatccagaaacgaatcgagggaaaaaaacaacgacgggaacgcaatc

SEQ ID NO: 89681 - DNA, 75 bp, synthetic construct
  source 1..75: mol_type = other DNA
tagacaggggcgcacgcattggcggttattgtgtcgtaaaaacatccgaaggcgactatctgaccgaagagatga

SEQ ID NO: 89682 - DNA, 75 bp, synthetic construct
  source 1..75: mol_type = other DNA
tgcttgtaacactaattaccggatgttcctcaccgcctccaccagtacccgtggaatggaataaaaagccggtat

SEQ ID NO: 89683 - DNA, 75 bp, synthetic construct
  source 1..75: mol_type = other DNA
ctacaatacaatatggactccagccgtattttacgcagtcgcccactcaacacgaattgtcgtcactgcacaatc

SEQ ID NO: 89684 - DNA, 75 bp, synthetic construct
  source 1..75: mol_type = other DNA
cagtgcactatgcggatgccattcgttataatgctcgaacgcctctgcaaggttctttgctgccgttaacccgtc

SEQ ID NO: 89685 - DNA, 75 bp, synthetic construct
  source 1..75: mol_type = other DNA
atgaaccgcgttctgtgtgtggtcatcattgctctgctggtggcctgtggtgcgcttagtctggggctgaatcat

SEQ ID NO: 89686 - DNA, 75 bp, synthetic construct
  source 1..75: mol_type = other DNA
gctgggccatactcctccggcagaagcagaaaaagcttattatgcttccatcggaaacgatgatctggcagcctg

SEQ ID NO: 89687 - DNA, 75 bp, synthetic construct
  source 1..75: mol_type = other DNA
gtgcgtaaagtctggcgtcagttgttacgggaaggtatcagagtggccagatgcactgtggcacgtctcatggcg

SEQ ID NO: 89688 - DNA, 75 bp, synthetic construct
  source 1..75: mol_type = other DNA
tctcgcccgtaatgatctggcacgcatttgcacccccggcagccgctacgtcgccgatctcaccaaagttgaccg

SEQ ID NO: 89689 - DNA, 75 bp, synthetic construct
  source 1..75: mol_type = other DNA
ggcaatggtcatgcttttacgcaggttaaattcaccccaaaaggtgttgagtggattgctggtctgcttgctgca

SEQ ID NO: 89690 - DNA, 75 bp, synthetic construct
  source 1..75: mol_type = other DNA
ctggacagcatcggcctgactctgcagcacgacgacgcaattgcgtcttatgaagagaagcaaccggcgtttatg

SEQ ID NO: 89691 - DNA, 75 bp, synthetic construct
  source 1..75: mol_type = other DNA
atagcctggcacccttctggccgtcttatcagaacaaaatcatcggtgtccttgagcgtgcgctgcgtgagcagt

SEQ ID NO: 89692 - DNA, 75 bp, synthetic construct
  source 1..75: mol_type = other DNA
aatcacaactgacaactgtcagagtcccactagatgttatgcaagggatggaatccgttaagctggacggcgaaa

SEQ ID NO: 89693 - DNA, 75 bp, synthetic construct
  source 1..75: mol_type = other DNA
atgcgtaaagcccgttttactgagcatcagatcatcgccgtgattaagtcggttgaagccggacgaactgttaaa

SEQ ID NO: 89694 - DNA, 75 bp, synthetic construct
  source 1..75: mol_type = other DNA
tctgatattaaaaagatcaaggatcttgaggacgagaacccacgtctcaaacagatgtttgccgacctgagtctt

SEQ ID NO: 89695 - DNA, 75 bp, synthetic construct
  source 1..75: mol_type = other DNA
taacctgtcgatttacttcatggatgatgcgcaccgccgcgccatcattgaagagccgaaaaaagaccgtatcga

SEQ ID NO: 89696 - DNA, 75 bp, synthetic construct
  source 1..75: mol_type = other DNA
agtataccgacacgaatggtgacagcaccggaagaaatagcctttgcgacctgggatgtgcatattgaccttcgg

SEQ ID NO: 89697 - DNA, 75 bp, synthetic construct
  source 1..75: mol_type = other DNA
gagtaatgtgctgggtttcgcgtcaccaggtgaagcaaagccgtaccagaagcagatcacccgggatgtggtact

SEQ ID NO: 89698 - DNA, 75 bp, synthetic construct
  source 1..75: mol_type = other DNA
cgccgcactgggcgtgcctgtggaatatctgctggcggcatcgttaatggcgatccccggcgggatcttgtttgc

SEQ ID NO: 89699 - DNA, 75 bp, synthetic construct
  source 1..75: mol_type = other DNA
gggaggcggttgccgccgctgccgctgatggtgtgacgttctctgtcccggtcacgccacatacgttccgccatt

SEQ ID NO: 89700 - DNA, 75 bp, synthetic construct
  source 1..75: mol_type = other DNA
ctcttcaggccgcggatatccggcgtagtggagaggatacatttatcattcagcagcagcgtcaggaagcccttg

SEQ ID NO: 89701 - DNA, 75 bp, synthetic construct
  source 1..75: mol_type = other DNA
gagtaagcgaagcccggtgccagttaatactgactcagttagttctggcgggtctggcgaaggataacggcgggt

SEQ ID NO: 89702 - DNA, 75 bp, synthetic construct
  source 1..75: mol_type = other DNA
ccgtcagccacgcgttgtgtttcctgtcagtcagtctttgaagcaaaaaacaaacattaccggagaacggcatga

SEQ ID NO: 89703 - DNA, 75 bp, synthetic construct
  source 1..75: mol_type = other DNA
gcgagggctatcagtcgccatgtgttcagcctttggagagattcgttaatgagttcgtggaggtgcgccgtgata

SEQ ID NO: 89704 - DNA, 75 bp, synthetic construct
  source 1..75: mol_type = other DNA
gccatttttagactcggtgggactggtacttgatgataataaatattatctcttttcacggagggcgaatgataa

SEQ ID NO: 89705 - DNA, 75 bp, synthetic construct
  source 1..75: mol_type = other DNA
ccatgacgctactgcgcatctggatgttggtcagcagcgactcaacctgacgatccctcaggcatttatgagtaa

SEQ ID NO: 89706 - DNA, 75 bp, synthetic construct
  source 1..75: mol_type = other DNA
gaaatctgcgaaacgagaaaactttcaccctctacgattggtggttataaaaaatgccgtagtgcgttagcctca

SEQ ID NO: 89707 - DNA, 75 bp, synthetic construct
  source 1..75: mol_type = other DNA
aaactggtgcatgaggtctggcgtcacgctctgaataaagtcagcgtggataataagaataaaaactatatcgtg

SEQ ID NO: 89708 - DNA, 75 bp, synthetic construct
  source 1..75: mol_type = other DNA
taaatacatgccggagctggaagcctacttccactaccgctatctcgatgttagcaccctgaaagagctggcgcg

SEQ ID NO: 89709 - DNA, 75 bp, synthetic construct
  source 1..75: mol_type = other DNA
ttcacatcacgtgttttaaaaaagactgaagtaatcagggcttatattacaagatttaatgctcgcactggcaat

SEQ ID NO: 89710 - DNA, 75 bp, synthetic construct
  source 1..75: mol_type = other DNA
agccgcattaaaagcccagttggaagccgaccagcatgacaaaacagtgtccgaagtagctgaagactattttaa

SEQ ID NO: 89711 - DNA, 75 bp, synthetic construct
  source 1..75: mol_type = other DNA
tcaaaagcggcgatgatgaagtagatatggaatacggtctcgacacgcttgcaggaactgcagaggttacttgct

SEQ ID NO: 89712 - DNA, 75 bp, synthetic construct
  source 1..75: mol_type = other DNA
cctcgtgttatgacaattggcgcgtatggcgttatctcactggctaaagcccgggagatcacccgagagctggct

SEQ ID NO: 89713 - DNA, 75 bp, synthetic construct
  source 1..75: mol_type = other DNA
ggcgacagaggctgctggcagtgcggcagcggcagcacagagcaaaagtacggcagaatccgcagcaacgcgcgc

SEQ ID NO: 89714 - DNA, 75 bp, synthetic construct
  source 1..75: mol_type = other DNA
taaatacatgccggagctggaagcctacttccactaccgttatctcgatgtcagcaccctgaaagagctggcgcg

SEQ ID NO: 89715 - DNA, 75 bp, synthetic construct
  source 1..75: mol_type = other DNA
gcgttgtgctggatgacgacctttacgcgggtgtggagtgggtatctgacgctgaagtcgctccagcgtcagtaa

SEQ ID NO: 89716 - DNA, 75 bp, synthetic construct
  source 1..75: mol_type = other DNA
tggcgaaagacattaatcctcgcataggtcagaaaaaggttaaggacgtcaaaccccgagatattgatgccttgc

SEQ ID NO: 89717 - DNA, 75 bp, synthetic construct
  source 1..75: mol_type = other DNA
ttgaagcactgactctgatgccggtaggttctaaatgggaactgactatcccgcaggaactggcatatggcgagc

SEQ ID NO: 89718 - DNA, 75 bp, synthetic construct
  source 1..75: mol_type = other DNA
caaaaaagaaggtgtgaatagcaccgaatctggcctgcaattccgcgtgatcaaccagggtgaaggcgcaattcc

SEQ ID NO: 89719 - DNA, 75 bp, synthetic construct
  source 1..75: mol_type = other DNA
tgctggccattgccaccacgatggcaagcgtgaatgcatttgccgatgctgacgcgcagtacagggcgggggctg

SEQ ID NO: 89720 - DNA, 75 bp, synthetic construct
  source 1..75: mol_type = other DNA
acatctgaaacaaaacagattgttatccagtctcagaatatttcgtttgcttcctccgaagcgggatacacagga

SEQ ID NO: 89721 - DNA, 75 bp, synthetic construct
  source 1..75: mol_type = other DNA
gcggtcactccaatattcaggggctgacggacctggggctgctgtcgcagagcctgccaggttacatgacgctgc

SEQ ID NO: 89722 - DNA, 75 bp, synthetic construct
  source 1..75: mol_type = other DNA
tgagctggagctggcgaacgtgacaattactgatatgcaggtacgccagcgtgatgtcgctgcacttgatgccag

SEQ ID NO: 89723 - DNA, 75 bp, synthetic construct
  source 1..75: mol_type = other DNA
cgccagcgtgatgtcgctgcacttgatgccagatactcgagggaattagccgatgcgagagctgaaaatgaaact

SEQ ID NO: 89724 - DNA, 75 bp, synthetic construct
  source 1..75: mol_type = other DNA
cgccttatggcggaatgcaaattgcagaagattatcaggccttcaaccttggtattggtaaagatttaggacttt

SEQ ID NO: 89725 - DNA, 75 bp, synthetic construct
  source 1..75: mol_type = other DNA
gtattcagcggtgagccaacaggctggaacccgtttgctctgccagccactaagcgaaacatcaatttcattaag

SEQ ID NO: 89726 - DNA, 75 bp, synthetic construct
  source 1..75: mol_type = other DNA
ggcacgtaccgaccgcgttcgtgttcattacaccggaaaactgatcgacggcaccgtgtttgacagctccgttgc

SEQ ID NO: 89727 - DNA, 75 bp, synthetic construct
  source 1..75: mol_type = other DNA
cttttcagataccggcttcaccacgcactacatcgtgctggggttccgcctgaaggtgagtgaggcagacctgcg

SEQ ID NO: 89728 - DNA, 75 bp, synthetic construct
  source 1..75: mol_type = other DNA
ggttctgcggcttaaacgcctggggctgtcaaaaacgttccgtcgtctggttatcacacttacccgacgttatgg

SEQ ID NO: 89729 - DNA, 75 bp, synthetic construct
  source 1..75: mol_type = other DNA
atgatgttacgtggtgattttcaccagtcagcaaaatattctcagcgtgatattgagcaggcgcggcaactgcat

SEQ ID NO: 89730 - DNA, 75 bp, synthetic construct
  source 1..75: mol_type = other DNA
gctgctcgggcgtaagttggtccattccgtctcctttttgaagaaatacaccataccggaacctgttgcgggtgg

SEQ ID NO: 89731 - DNA, 75 bp, synthetic construct
  source 1..75: mol_type = other DNA
atgagtgaagctctcaaggcactgaacaatattcgtacacttcgcgcacatgctcgtgaaacagatctggcaact

SEQ ID NO: 89732 - DNA, 75 bp, synthetic construct
  source 1..75: mol_type = other DNA
ttgaagcaaaccagaccgctgattttgaagacaatgacttcagcggcaaacgctccctgatggagtctgtcgaag

SEQ ID NO: 89733 - DNA, 75 bp, synthetic construct
  source 1..75: mol_type = other DNA
accgataatagttgtgtggagaactgtttaaaagggaagtttaaagaggtaaggccgcgttattctgtattgcct

SEQ ID NO: 89734 - DNA, 75 bp, synthetic construct
  source 1..75: mol_type = other DNA
acaacgaatacaccggtaacggcgttacgacatcgtttccgtatacttttcgaattttcagaaaatccgacctgg

SEQ ID NO: 89735 - DNA, 75 bp, synthetic construct
  source 1..75: mol_type = other DNA
tcaaaaacatccgggaaagtgatggtctgtgggggagacgtcttctgtctcgatggcgaatgtgataaggctcag

SEQ ID NO: 89736 - DNA, 75 bp, synthetic construct
  source 1..75: mol_type = other DNA
gccgccgtgacctggacaacattctgaaagcaccgctggatgcgctgacgcatgcggaagtgctcattgatgacg

SEQ ID NO: 89737 - DNA, 75 bp, synthetic construct
  source 1..75: mol_type = other DNA
tgtatttcccacagcgtcgcaatattgcaccaaagctccgcgccctgattgactacgtcaaagaatggcggcagc

SEQ ID NO: 89738 - DNA, 75 bp, synthetic construct
  source 1..75: mol_type = other DNA
aagtattgatgcaacagagcttgcgaaacttgcaataaacttggctgaccagaaatccattgactacaaaggtat

SEQ ID NO: 89739 - DNA, 75 bp, synthetic construct
  source 1..75: mol_type = other DNA
tagaagttaatgaaaaactcagtgaaaagggattaacgcctgaagaactcattcagtctgtatcagctcagctcg

SEQ ID NO: 89740 - DNA, 75 bp, synthetic construct
  source 1..75: mol_type = other DNA
tccgggtgtaccgaaggagcagcgcgttactcaggttctttgcgctgctttaccggttgcttatcactattcccc

SEQ ID NO: 89741 - DNA, 75 bp, synthetic construct
  source 1..75: mol_type = other DNA
tgaatgcgccggaatggcggtattactggcaggtcaatatgccagctgccaccaacaccacctggatgacatgtg

SEQ ID NO: 89742 - DNA, 75 bp, synthetic construct
  source 1..75: mol_type = other DNA
gacaggatatcgggctggccaaatgcagcagtgatgaaaaggccctggctaaagcaaaatcaaacaaactgaccg

SEQ ID NO: 89743 - DNA, 75 bp, synthetic construct
  source 1..75: mol_type = other DNA
cagctgacgggcgctcgcttgtttgagcgtggtcgtcagggggcgcaacttaccttacccggcgaacaattttta

SEQ ID NO: 89744 - DNA, 75 bp, synthetic construct
  source 1..75: mol_type = other DNA
ggtttgcagcaatatcgacgatttcagtggcttgatcattaaagctcagggccatgttgtggcgggtcaaacacc

SEQ ID NO: 89745 - DNA, 75 bp, synthetic construct
  source 1..75: mol_type = other DNA
gttggcggcgtacagttccctctcctgcaccactggaaattattgagcacgacaccatcgctcacctggtgcgcc

SEQ ID NO: 89746 - DNA, 75 bp, synthetic construct
  source 1..75: mol_type = other DNA
atggaatcgctctcagaaggaaccacagcaggctaccagcaaatccacgacggcattattcatctggtcgatagc

SEQ ID NO: 89747 - DNA, 75 bp, synthetic construct
  source 1..75: mol_type = other DNA
gtcaggatgtggggctggcgaagtgcaacagtgaagaaaaggcgctgggaaaggcaaaggacaacaaactgacgg

SEQ ID NO: 89748 - DNA, 75 bp, synthetic construct
  source 1..75: mol_type = other DNA
taaacgaaaacgcatcgcttgaaaaaatggttatggggatgcgtgtaaagtcagatcagtctacgtgctcagtaa

SEQ ID NO: 89749 - DNA, 75 bp, synthetic construct
  source 1..75: mol_type = other DNA
gacggatttccttattgcgatattggaggagctaacagacgggtaaacgaaaacgcatcgcttgaaaaaatggtt

SEQ ID NO: 89750 - DNA, 75 bp, synthetic construct
  source 1..75: mol_type = other DNA
tgacccatcagggcgcggcgcgactggcaaacgcgaccgcactcggtactaaactgaatattacacaaatggccg

SEQ ID NO: 89751 - DNA, 75 bp, synthetic construct
  source 1..75: mol_type = other DNA
tctgcccaggggactggatactgatcacggaaagaatcaaagaagggatactcagcctgctgaccaggccgaggg

SEQ ID NO: 89752 - DNA, 75 bp, synthetic construct
  source 1..75: mol_type = other DNA
aaaattatccatcagctgctggccggggtgcacatcgccgttgccgccgaagcgatggcgcttgccgcccgcgcc

SEQ ID NO: 89753 - DNA, 75 bp, synthetic construct
  source 1..75: mol_type = other DNA
atgaagagaacccgcatcagctgcagcagcttatccgcctgccggggcagcagtatgatgaggagtccggcctgt

SEQ ID NO: 89754 - DNA, 75 bp, synthetic construct
  source 1..75: mol_type = other DNA
cagcgaagccctgcgcgacctggccttctggttgtaccgtcagctggaaaacgagtacgactggctgacctcaga

SEQ ID NO: 89755 - DNA, 75 bp, synthetic construct
  source 1..75: mol_type = other DNA
ccagtcgtgtactggccattgcttttatatttatgtccctgctcattgttctcagtctggctgttaacgtgattc

SEQ ID NO: 89756 - DNA, 75 bp, synthetic construct
  source 1..75: mol_type = other DNA
ttactctgggacgatacccggatatgagcctcaaagaggcccgttcttcgcgtgataaatgccgccaatggctgg

SEQ ID NO: 89757 - DNA, 75 bp, synthetic construct
  source 1..75: mol_type = other DNA
tatgctgaatgatttaggtgtcgatccgcatatcgtggagcacatcacagcgcatcagatgccaggtcagcaaaa

SEQ ID NO: 89758 - DNA, 75 bp, synthetic construct
  source 1..75: mol_type = other DNA
ctctgttgtccgtacggccctgcgcgctgttcgtgacaccgtggtctctgttgcccgcgcggtatggaactggat

SEQ ID NO: 89759 - DNA, 75 bp, synthetic construct
  source 1..75: mol_type = other DNA
aattcattgaagcccatccgggctgtacttccggagacattgcggatgcttttgcaggttactcacggcagcgcg

SEQ ID NO: 89760 - DNA, 75 bp, synthetic construct
  source 1..75: mol_type = other DNA
caacgataatttgctgttcaagtggcgccagtactggcgcgaaggaaaactacgtcctccttcaacaacagaaaa

SEQ ID NO: 89761 - DNA, 75 bp, synthetic construct
  source 1..75: mol_type = other DNA
caggtcgctggaggttatgtcgcaggagggtatctggaaggtgtactgtcagaggataaattttcaattaatggc

SEQ ID NO: 89762 - DNA, 75 bp, synthetic construct
  source 1..75: mol_type = other DNA
gattttttaaatcagtgttcaacggctgatccggcggctatatcgaaaatcatgagtaagtttggtcgtgtcaga

SEQ ID NO: 89763 - DNA, 75 bp, synthetic construct
  source 1..75: mol_type = other DNA
atacagaattttccattggtggtactgaattgctgctgtttaaacagatgggtaaagccacggtggatggcatcc

SEQ ID NO: 89764 - DNA, 75 bp, synthetic construct
  source 1..75: mol_type = other DNA
tctaagtctaaaataaatgtattgcgtgggatgcattatcaaacacaaaatactcaaggaaaattggttcgggta

SEQ ID NO: 89765 - DNA, 75 bp, synthetic construct
  source 1..75: mol_type = other DNA
tgttatcactgtttattctatttgccttcagccctgtagcctcagcggctgatgcatgtaaaaccgtattatgtc

SEQ ID NO: 89766 - DNA, 75 bp, synthetic construct
  source 1..75: mol_type = other DNA
gtgcgcagtgaacaggcagcacaggtggcgattgcgcggatgaaccgggccattgatgaggtactgagacgatga

SEQ ID NO: 89767 - DNA, 75 bp, synthetic construct
  source 1..75: mol_type = other DNA
caactggcaggggatcgtagagtcgctgacgctgccgaaattcacccgcaaatatgagaagtatcgcggcggcgg

SEQ ID NO: 89768 - DNA, 75 bp, synthetic construct
  source 1..75: mol_type = other DNA
ccgtcgagtggtctgtcggtggcctgcctgatgtggcgctgtgggcgcagtacgccgcgccgggtgctgacgctg

SEQ ID NO: 89769 - DNA, 75 bp, synthetic construct
  source 1..75: mol_type = other DNA
aaacgcaagtgattcataaaagggaaaaaaggaatacaaacaacataaaaaaaacagaggagattattcaaactg

SEQ ID NO: 89770 - DNA, 75 bp, synthetic construct
  source 1..75: mol_type = other DNA
aacttaccctctcgctaccgtggcagacgctggtctggctgtcgaatgaggatgccacggcgaccacggtgaatg

SEQ ID NO: 89771 - DNA, 75 bp, synthetic construct
  source 1..75: mol_type = other DNA
ggcgtgacaacgaaagtgcgtattgacgctggtgtcgcgccagttgatcaccgcggtctggtgaaatgtacggcg

SEQ ID NO: 89772 - DNA, 75 bp, synthetic construct
  source 1..75: mol_type = other DNA
cagtcaaaacgtacagaggaatttaaaaagatgccggaatccattcgaaacatgattactccgccacgcaacagt

SEQ ID NO: 89773 - DNA, 75 bp, synthetic construct
  source 1..75: mol_type = other DNA
gctgtggagcttgtggtgcgtggacgtcacaaagaagtggattccggcgagtggaagacgggcgaaagcaacacc

SEQ ID NO: 89774 - DNA, 75 bp, synthetic construct
  source 1..75: mol_type = other DNA
ctggatgttgagccggggtggtaccgtgtgacgctgaatacggaaggttacgcgccgtcatatgtgggtgacatt

SEQ ID NO: 89775 - DNA, 75 bp, synthetic construct
  source 1..75: mol_type = other DNA
gaggcacagcataacgccgcagtagacgcggcagaagtacggcgccagtcactgattgatgctgctatggcttcc

SEQ ID NO: 89776 - DNA, 75 bp, synthetic construct
  source 1..75: mol_type = other DNA
gtccactcagaaagatgtgcctgagcctggcgagtttcgtgtacgcagtcgcccggccactttcggcggtcgtga

SEQ ID NO: 89777 - DNA, 75 bp, synthetic construct
  source 1..75: mol_type = other DNA
aaaccgactgcggaactgcatcagatgtgccttgaggtggtggatcgcgcggttaaagatgaagagatcctgacg

SEQ ID NO: 89778 - DNA, 75 bp, synthetic construct
  source 1..75: mol_type = other DNA
ccgggaaaaccaccgatgaaattgctgccatgctggcggatgagacctggatgtccggtgccgaatgtctggcac

SEQ ID NO: 89779 - DNA, 75 bp, synthetic construct
  source 1..75: mol_type = other DNA
gcacggaatctgtccggtctcaggcccgtgaacagtttaccggtgcggtggaccggatatttgacacggcggaga

SEQ ID NO: 89780 - DNA, 75 bp, synthetic construct
  source 1..75: mol_type = other DNA
ccatccggagaaagtgcagctgctgtcaatgaatgaggccgtgatgcagatcgaacaggatgtgctgacgacctg

SEQ ID NO: 89781 - DNA, 75 bp, synthetic construct
  source 1..75: mol_type = other DNA
aacaggaacgacttaacggaatccgtgaattgtttggcaccttcaacggaagatataacgacctggctataagtt

SEQ ID NO: 89782 - DNA, 75 bp, synthetic construct
  source 1..75: mol_type = other DNA
gcacagcatagagcagcagtagacatggcagaaacacagcggcagtcgctgattgatgctgcaatggtttccatt

SEQ ID NO: 89783 - DNA, 75 bp, synthetic construct
  source 1..75: mol_type = other DNA
tttatctctcgcggtaattttgtcatactcccccgattatggaataactctgaggttcacagatggttcgtcaat

SEQ ID NO: 89784 - DNA, 75 bp, synthetic construct
  source 1..75: mol_type = other DNA
ctttttatcccttttagcagaacaagaatctcctcattttcaggactttttttatttttcgccaatatgttattg

SEQ ID NO: 89785 - DNA, 75 bp, synthetic construct
  source 1..75: mol_type = other DNA
cttgcgctggccgcacggcagtattacggacagcgccttggcgaactgtcacaggccatgagccaggggagcgta

SEQ ID NO: 89786 - DNA, 75 bp, synthetic construct
  source 1..75: mol_type = other DNA
aatgaaagtgatttgaatgacgtgttgatgccagcatcattaagtgatgataaaattatcaaacatatggcgcgc

SEQ ID NO: 89787 - DNA, 75 bp, synthetic construct
  source 1..75: mol_type = other DNA
gcagcgccacgacggcatccacgaaggcaacagaggctgctggcagtgcgacggcggcagcacagagcaagaata

SEQ ID NO: 89788 - DNA, 75 bp, synthetic construct
  source 1..75: mol_type = other DNA
atggtttcttatacctgacgttatcgaagggacagaggcagaaaacgacgagcagattgagttggttcctgattg

SEQ ID NO: 89789 - DNA, 75 bp, synthetic construct
  source 1..75: mol_type = other DNA
aaatttttagatataaaatggggaatagtagagccgaaaatttcagctaaagatagattagctgagccgtttagc

SEQ ID NO: 89790 - DNA, 75 bp, synthetic construct
  source 1..75: mol_type = other DNA
ggtctgagcacaacactgaggcattcgccggactacacaacgagcgcaaacgcatcatcgtggtattcgatgaag

SEQ ID NO: 89791 - DNA, 75 bp, synthetic construct
  source 1..75: mol_type = other DNA
agtatatttgatgctgggttaacaagagctgttgtgcgtgaaatagcattactaaaaaacagagtggacgattgt

SEQ ID NO: 89792 - DNA, 75 bp, synthetic construct
  source 1..75: mol_type = other DNA
ttaccttgttggaaataatggtggtaattgtgatcttgggagttctggccagtctggtggtcccgaatctgatgg

SEQ ID NO: 89793 - DNA, 75 bp, synthetic construct
  source 1..75: mol_type = other DNA
acgtattgctgaatatggtttcgttgaaaatcaggactatatgattgcttcccaaattcgggaagcaaaaggtag

SEQ ID NO: 89794 - DNA, 75 bp, synthetic construct
  source 1..75: mol_type = other DNA
cgtgaaaatcgtgaactgcgccgcagtaacgatatccttcgccaggcttccgcttattttgcgaaggcggagttc

SEQ ID NO: 89795 - DNA, 75 bp, synthetic construct
  source 1..75: mol_type = other DNA
gaagcggttattgccgggatcacctattcaggtcatgtgcatcacgataacggtgaaggcagcaaaacgggagga

SEQ ID NO: 89796 - DNA, 75 bp, synthetic construct
  source 1..75: mol_type = other DNA
gaaggcagtacagacaagtctgcactattgcaacgcctcgctaatgaagaactggcacgggcggaatacgacgaa

SEQ ID NO: 89797 - DNA, 75 bp, synthetic construct
  source 1..75: mol_type = other DNA
tcaatgtatcacggatgggtaccagatcttcatattcatgcagaagacactctcctgcctttctatcttggggaa

SEQ ID NO: 89798 - DNA, 75 bp, synthetic construct
  source 1..75: mol_type = other DNA
ctcatgataattacaagcaggtgcaaggaccgttctatcatggaaccaaagccaatttggcgattggtgacttgc

SEQ ID NO: 89799 - DNA, 75 bp, synthetic construct
  source 1..75: mol_type = other DNA
accgttaagtaaagcggcagatatcctcttcccggtcatctcagacagcatccgtcagcaggcccttcctgcgta

SEQ ID NO: 89800 - DNA, 75 bp, synthetic construct
  source 1..75: mol_type = other DNA
ccgcgacgaattcatcatgatccgcaagatgaagaacgttaactggctggatgatgaaggtcgcgatcaggtaca

SEQ ID NO: 89801 - DNA, 75 bp, synthetic construct
  source 1..75: mol_type = other DNA
tcgcccgaccggacttaccgccggagataccggcgtgtatcaccatgaggggcaccgtatacgtctgacaaagaa

SEQ ID NO: 89802 - DNA, 75 bp, synthetic construct
  source 1..75: mol_type = other DNA
ggttgtgcatggccagatcctaagcacagtgcgtcattcgacatttgtgaaaacggcgcaaaagcaatcgcctgg

SEQ ID NO: 89803 - DNA, 75 bp, synthetic construct
  source 1..75: mol_type = other DNA
gtcattggagccaagaaagacggcttgaattcatcgattttcgcctactgtgggaaggtcggcttaaccgtgcag

SEQ ID NO: 89804 - DNA, 75 bp, synthetic construct
  source 1..75: mol_type = other DNA
tatggttctggaaagtcagggcgaatatgactcacaatgggcgacaatttgttccattgctccaaagattggctg

SEQ ID NO: 89805 - DNA, 75 bp, synthetic construct
  source 1..75: mol_type = other DNA
ttcttcgagagcttcagcagcaaggtgtttaatgaagcggtgggccgccaggtggattttgttcaggacaaccac

SEQ ID NO: 89806 - DNA, 75 bp, synthetic construct
  source 1..75: mol_type = other DNA
atgccgttaagtccctacctctcttttgccggtaactgttccgacgcgattgcctattatcaacgtacgttgggc

SEQ ID NO: 89807 - DNA, 75 bp, synthetic construct
  source 1..75: mol_type = other DNA
ttttggaaagcatgtaggtgttatactttctggggataaaaataatcaaatctatatcccacctggatttgcaca

SEQ ID NO: 89808 - DNA, 75 bp, synthetic construct
  source 1..75: mol_type = other DNA
gggccggtagtgtttcttgcctccagcgcttcagattatgtaaatggttataccattgctgtggatggcggttgg

SEQ ID NO: 89809 - DNA, 75 bp, synthetic construct
  source 1..75: mol_type = other DNA
gacatttggcaaatgggtgggtgtagaattatctgggaataataaaagacaattgtggatccccgaaggttttgc

SEQ ID NO: 89810 - DNA, 75 bp, synthetic construct
  source 1..75: mol_type = other DNA
tggagctggcaccgtcagtcattctctctctggggattatttcaattaccgatggtcttggtggattacgcgccg

SEQ ID NO: 89811 - DNA, 75 bp, synthetic construct
  source 1..75: mol_type = other DNA
ttaccgctgaacgtattagcgactacatgactgaagcagttaatacagactctattgccgttgcggaaatgtttc

SEQ ID NO: 89812 - DNA, 75 bp, synthetic construct
  source 1..75: mol_type = other DNA
tttaaattcatgggagtatgcgccagaccatcgtggtgaaaccgtctatagcactgacacgggaaacaccgaaga

SEQ ID NO: 89813 - DNA, 75 bp, synthetic construct
  source 1..75: mol_type = other DNA
aactggagcgttttgctgcacgtaaggcggtcgttgctgcggttgacgcactcggcctgctggaagagatcaaac

SEQ ID NO: 89814 - DNA, 75 bp, synthetic construct
  source 1..75: mol_type = other DNA
atgacacaggcaaaattaaacagtgaatttattgccacagtagcgggtgatattaccgtctataactatgacaac

SEQ ID NO: 89815 - DNA, 75 bp, synthetic construct
  source 1..75: mol_type = other DNA
ccagtcaatacagaacggaatcctcagaggggaatgaaacccgcccacgcaatattgccttcaattatattgtga

SEQ ID NO: 89816 - DNA, 75 bp, synthetic construct
  source 1..75: mol_type = other DNA
agcgatatcgtggcgctggagaatgcgctggatatgtaccgactggataacgggcgttatccgaccaccgaacag

SEQ ID NO: 89817 - DNA, 75 bp, synthetic construct
  source 1..75: mol_type = other DNA
accttattgccgtacaggcgggaaacgtcatcgtttataactatgatggtgagacgcgggaatatatttccgaat

SEQ ID NO: 89818 - DNA, 75 bp, synthetic construct
  source 1..75: mol_type = other DNA
gtatcccggcatggtatgacgaagcgggtaacgtttatgttggccgcaacgaagacgaagtgcgtaaagaaaata

SEQ ID NO: 89819 - DNA, 75 bp, synthetic construct
  source 1..75: mol_type = other DNA
cgacatggaaaaaggcactggctgcgtgaagatcactccggcgcacgactttaacgactatgaagtaggtaaacg

SEQ ID NO: 89820 - DNA, 75 bp, synthetic construct
  source 1..75: mol_type = other DNA
attgctgtctgaattgaccacgagaaaatggagaaagtccaaatgtatgcggcagaaagtgaagtggtttatcag

SEQ ID NO: 89821 - DNA, 75 bp, synthetic construct
  source 1..75: mol_type = other DNA
cagacgtactgatttttgaaccgaaagtatttggtgatgagcgtggtttcttttttgagagctttaatcagaaga

SEQ ID NO: 89822 - DNA, 75 bp, synthetic construct
  source 1..75: mol_type = other DNA
tggaaggcccggtgaccagcacccgtaacccgtgggtatggaaagtcggacagggaaatgaaggcctggaggtta

SEQ ID NO: 89823 - DNA, 75 bp, synthetic construct
  source 1..75: mol_type = other DNA
ctgaaaatcggctggccttccatcaatgtcatgtcatcctctgattttaaatgtgtggcgctgactgattacgac

SEQ ID NO: 89824 - DNA, 75 bp, synthetic construct
  source 1..75: mol_type = other DNA
tggccgtgtccgcactgcggggaatattttcagccggtgatggataacatgaccggataccggaataacccggat

SEQ ID NO: 89825 - DNA, 75 bp, synthetic construct
  source 1..75: mol_type = other DNA
ccgaagggctgattgatggctggattgtgtacggcatcatctgtgatccggcggatatgctggtggtgcagatga

SEQ ID NO: 89826 - DNA, 75 bp, synthetic construct
  source 1..75: mol_type = other DNA
ttacgtggaggaagtacagctgaagcctggcgtgatgactacgaagcaggaaaaacacctgtcgaagcatattgt

SEQ ID NO: 89827 - DNA, 75 bp, synthetic construct
  source 1..75: mol_type = other DNA
cggcatgcagatgcaggcggcggcgaaggagatcacccgcaatggcgggatcccgttcgcggccttcgtcagcga

SEQ ID NO: 89828 - DNA, 75 bp, synthetic construct
  source 1..75: mol_type = other DNA
aagaacgtcgccgcctgtttgaaaagctggggcaactgtacgaaggctgctttatcgttacgttcacctggtttc

SEQ ID NO: 89829 - DNA, 75 bp, synthetic construct
  source 1..75: mol_type = other DNA
atggctgattttggttcaactaaatataacgccagttttgaagaatggcatgaactgttaatggactatgcagag

SEQ ID NO: 89830 - DNA, 75 bp, synthetic construct
  source 1..75: mol_type = other DNA
tgggcgcttttttgttagaatatgctggcgacgttagctatatttctgaccattttttcattatagacaaatata

SEQ ID NO: 89831 - DNA, 75 bp, synthetic construct
  source 1..75: mol_type = other DNA
ccagtcgtgtaatggccatcgcctttatatttatgtcagtgcttattgttctcagcctctctgttaacgttattc

SEQ ID NO: 89832 - DNA, 75 bp, synthetic construct
  source 1..75: mol_type = other DNA
acaaactgatgtggtacgtcattatccatctgacgtttgtgctttctgcatttgtgatgggctatcttgaccgac

SEQ ID NO: 89833 - DNA, 75 bp, synthetic construct
  source 1..75: mol_type = other DNA
ctggacagggttctcaaaccgttggaatgctggctgatatggcggcgagctatccaattgtcgaagaaacgtttg

SEQ ID NO: 89834 - DNA, 75 bp, synthetic construct
  source 1..75: mol_type = other DNA
ttaagggcgtggaggaacggcgcgtaacttaccgtcgtgaaggctacgaatatgattgcgtgatgcctgtttatc

SEQ ID NO: 89835 - DNA, 75 bp, synthetic construct
  source 1..75: mol_type = other DNA
tgaaagacggcacaggaaaaccggtagagaactgtaccattcaactgaaagccagacgtaacagcgccacggtgg

SEQ ID NO: 89836 - DNA, 75 bp, synthetic construct
  source 1..75: mol_type = other DNA
agtggaaccagtggcgctctgtgtcgcaggaaatctctgaggggctgcgggatgttgtcggcaatacgccggtgg

SEQ ID NO: 89837 - DNA, 75 bp, synthetic construct
  source 1..75: mol_type = other DNA
taataaggtgcctcttcgtcggcgtacgaaggataaagatttggatgtgagcagtgatggaacatcaggtgaata

SEQ ID NO: 89838 - DNA, 75 bp, synthetic construct
  source 1..75: mol_type = other DNA
gcatttgcaggtcaggtttggtgacgggccgtggcaggatgttaagggactggatgaagtgggcagtgatacagg

SEQ ID NO: 89839 - DNA, 75 bp, synthetic construct
  source 1..75: mol_type = other DNA
caccaagtaaatggtgtacagaaagcaccctcattgcttcgacagggctaaaaccaggcaccattgagcgagcca

SEQ ID NO: 89840 - DNA, 75 bp, synthetic construct
  source 1..75: mol_type = other DNA
gcgacgatgtggcggggctgtcacaggcgggagagtttccgtttaacccggacacatcggcaggagcggagacgg

SEQ ID NO: 89841 - DNA, 75 bp, synthetic construct
  source 1..75: mol_type = other DNA
gctctattatccttatcacacctttgagcatgtgctggaactgctgcgtcaggcttcgttcgacccgagcgtact

SEQ ID NO: 89842 - DNA, 75 bp, synthetic construct
  source 1..75: mol_type = other DNA
taccacatttacggtggcggagatccgcacgctgtcggtaatgaggttgcacgtcggcaacagtctgcaaatgct

SEQ ID NO: 89843 - DNA, 75 bp, synthetic construct
  source 1..75: mol_type = other DNA
cagccctggcaagttttaccgtacacgcgcagcctccttcacagaccgtagaacaaacagtccggcagatttatc

SEQ ID NO: 89844 - DNA, 75 bp, synthetic construct
  source 1..75: mol_type = other DNA
actggacggaaatatcaggatattcctgttgaaacgccgtatgcgccgggagaacacattaagggagggcagcaa

SEQ ID NO: 89845 - DNA, 75 bp, synthetic construct
  source 1..75: mol_type = other DNA
gtaatcgctacgttccccgcggcaatcgccgcaaagtacgggcgcagttggcgatttacgactacatcaaatcac

SEQ ID NO: 89846 - DNA, 75 bp, synthetic construct
  source 1..75: mol_type = other DNA
gggcgtccggcgaagtcggtgtttactgtgcacaacctggcctatcaaggcatgttttatgcacatcacatgaat

SEQ ID NO: 89847 - DNA, 75 bp, synthetic construct
  source 1..75: mol_type = other DNA
gtgaccgatgcgcaggtagtatcccgtcgtgataccttcgccggacatatcacgctgttgttcggtcattacaac

SEQ ID NO: 89848 - DNA, 75 bp, synthetic construct
  source 1..75: mol_type = other DNA
gtcaagggtatgaatgaacctgaagagagcatgattaatcttgttaaaaccagcaatggctggaaagcgatctaa

SEQ ID NO: 89849 - DNA, 75 bp, synthetic construct
  source 1..75: mol_type = other DNA
tctcgcacgcgggtgggattaccgaatgctataaaatcgctggtatggcagaggcttacgatgtagcgctggcac

SEQ ID NO: 89850 - DNA, 75 bp, synthetic construct
  source 1..75: mol_type = other DNA
agcggtatgacgctggtggagagttcccccggcagggatgtgaaggatgtgaaatggcgacggacttcaccgcat

SEQ ID NO: 89851 - DNA, 75 bp, synthetic construct
  source 1..75: mol_type = other DNA
aaagatttaacgaattcttatatgaatggaatgggaaaaaagaatacagtagttacttgggaacaccaaataaca

SEQ ID NO: 89852 - DNA, 75 bp, synthetic construct
  source 1..75: mol_type = other DNA
atcgtttacccccgcgctggatgttcctcaaaatagagactgacgaaggcgtggtgggatggggcgaacccgtga

SEQ ID NO: 89853 - DNA, 75 bp, synthetic construct
  source 1..75: mol_type = other DNA
gtgtcagccgcagcagcggatttgaatacggtaaggcccggatgttcggctgtctgggctgggcgctgtgtgcca

SEQ ID NO: 89854 - DNA, 75 bp, synthetic construct
  source 1..75: mol_type = other DNA
aaagtcacgggcggggatttaccggacacgtccaatcccggtagcccgatacagttttgtcccatgccaccgccg

SEQ ID NO: 89855 - DNA, 75 bp, synthetic construct
  source 1..75: mol_type = other DNA
caaaatcggctctaatcttgcgggggggcttgcgggttcgctggacaccctgcgccgccatatcctggacaactt

SEQ ID NO: 89856 - DNA, 75 bp, synthetic construct
  source 1..75: mol_type = other DNA
atgcatcatattaaaacagccgcggatcttaattgttttttaaattcaatggttgctgtttcgcaaccaactgtt

SEQ ID NO: 89857 - DNA, 75 bp, synthetic construct
  source 1..75: mol_type = other DNA
agccttgcgcaggtatacggcgtacgcgggagagttgaacgttgtgctcagggaagatcgatggtgatagtggat

SEQ ID NO: 89858 - DNA, 75 bp, synthetic construct
  source 1..75: mol_type = other DNA
cggtcatgcaggcatcatttctacggcaaaactctttcaactttctcacaccagcctctcacactggattaatct

SEQ ID NO: 89859 - DNA, 75 bp, synthetic construct
  source 1..75: mol_type = other DNA
acgggttgccagtggaatgccctgaatgccaccgggatatgctcgtcaagctctgctcaccgccgcttccaggag

SEQ ID NO: 89860 - DNA, 75 bp, synthetic construct
  source 1..75: mol_type = other DNA
gcgatgaactctgggaaaaaatggctccgttgctcccggaacacaaaactcaccatccgctgggtacgcatcgca

SEQ ID NO: 89861 - DNA, 75 bp, synthetic construct
  source 1..75: mol_type = other DNA
atttatgacgatcttcgtaagggggaagatattggcatggtcaaatctgacaggcctaaccctaacctggaaact

SEQ ID NO: 89862 - DNA, 75 bp, synthetic construct
  source 1..75: mol_type = other DNA
tatctggtttataaaaattatccggtcagcggccggcagagtgatacgaaagaaatcgctgccggaaaaatgatc

SEQ ID NO: 89863 - DNA, 75 bp, synthetic construct
  source 1..75: mol_type = other DNA
gtattacgggcgcactgagggcgtggtcgagacggtgctgcaggctaatcccggtctgtctgagctgggcgtcat

SEQ ID NO: 89864 - DNA, 75 bp, synthetic construct
  source 1..75: mol_type = other DNA
gtgcccatgctcagtgatgagtctgcgggaatgaatcagggggtttttctggatgagtggggcagaccgaaaaaa

SEQ ID NO: 89865 - DNA, 75 bp, synthetic construct
  source 1..75: mol_type = other DNA
ctgtgagcagttggatgccatcgactggtcatggctgtcgatggatggctgtatgacgaagtcaccgctggctgg

SEQ ID NO: 89866 - DNA, 75 bp, synthetic construct
  source 1..75: mol_type = other DNA
aacccggtatggatgtggtttcggccccttccgtcaggaaagtgcgctttggtgatggctattcccagcgagcgc

SEQ ID NO: 89867 - DNA, 75 bp, synthetic construct
  source 1..75: mol_type = other DNA
atgtttttccaggggctttttcaacgcaaaaataacactcccgttacaacacccgggatgcttgcggaagagctg

SEQ ID NO: 89868 - DNA, 75 bp, synthetic construct
  source 1..75: mol_type = other DNA
gctgaacggatgggggttacacctccggtcatttcccgtctggaaaataacatcactaaagccagcatcgacaca

SEQ ID NO: 89869 - DNA, 75 bp, synthetic construct
  source 1..75: mol_type = other DNA
agcagaagattggggaaagctctcaaccttatatgtttcatggacaacttaatggttatatggatgtaaatatac

SEQ ID NO: 89870 - DNA, 75 bp, synthetic construct
  source 1..75: mol_type = other DNA
cagcctgacggcgcgtctcgatgcggacggatacagtcaggccagcatcatcagtattctggcagcggagggcgc

SEQ ID NO: 89871 - DNA, 75 bp, synthetic construct
  source 1..75: mol_type = other DNA
atgaagcgtggatttaccttgctggaagtaatgctcgcgctggcgatttttgcgttggccgccatggcggtgtta

SEQ ID NO: 89872 - DNA, 75 bp, synthetic construct
  source 1..75: mol_type = other DNA
atgctgatttcgacatatcaagagcgccagacacgcaacagagaaaaaataaaacaactgctgaacttcctgaaa

SEQ ID NO: 89873 - DNA, 75 bp, synthetic construct
  source 1..75: mol_type = other DNA
accacccgtactatcgtgttttatctggcacctccatgccgtttccccacatacatgaagctgtttccgaacagt

SEQ ID NO: 89874 - DNA, 75 bp, synthetic construct
  source 1..75: mol_type = other DNA
tccttacccgccgcagtcggtgaacgttgagcagacaggtgagcataactggcgctactgcatcactgacgccta

SEQ ID NO: 89875 - DNA, 75 bp, synthetic construct
  source 1..75: mol_type = other DNA
cggtgcgcacgtatttacaggaagaagttctgcatctccgctatgcctcggatgatggctttctggggcgttccc

SEQ ID NO: 89876 - DNA, 75 bp, synthetic construct
  source 1..75: mol_type = other DNA
gcgcagcaacgccagatttgagccgactttatctcatttccgggcgcattatgtttgatgatgatgatcaggcct

SEQ ID NO: 89877 - DNA, 75 bp, synthetic construct
  source 1..75: mol_type = other DNA
catattgctgacagtgccgacgacttagaaaaggtgattatagtttcctctacaagtttcgcttcagctcacagc

SEQ ID NO: 89878 - DNA, 75 bp, synthetic construct
  source 1..75: mol_type = other DNA
tttagccgaagccgaaaccgtacaggatgctccccggaaaaagaccggcaataacgccagacaggcgaaaaaggc

SEQ ID NO: 89879 - DNA, 75 bp, synthetic construct
  source 1..75: mol_type = other DNA
taaatctcgtttcctcagaaggagtagggaaaaatataggggaaataactatttcagaaaccagctacggattgc

SEQ ID NO: 89880 - DNA, 75 bp, synthetic construct
  source 1..75: mol_type = other DNA
gtggagtttgactctgctgaccttctccgcgccacgccaaccgaacgttatgccacttatgagcgcggtattaag

SEQ ID NO: 89881 - DNA, 75 bp, synthetic construct
  source 1..75: mol_type = other DNA
gtgaggcgcgagaatggctgagtaatcacccggtggattttctcctgaacgagcagccgaacgactgccagacgc

SEQ ID NO: 89882 - DNA, 75 bp, synthetic construct
  source 1..75: mol_type = other DNA
gagggggaattgtagttaacagaaaattattaacaggtgtttctggattagccggacatgttgggcatatattgt

SEQ ID NO: 89883 - DNA, 75 bp, synthetic construct
  source 1..75: mol_type = other DNA
gtgagcaggcccgttaccttgataacaaccacgatctggttattggtgtatttgacaagctggaagaacgggtgg

SEQ ID NO: 89884 - DNA, 75 bp, synthetic construct
  source 1..75: mol_type = other DNA
ttttccccgtccaggtccgtttcacgcctgcccacgaacgtttccacctggcgttatgttcaccgggcgatgtct

SEQ ID NO: 89885 - DNA, 75 bp, synthetic construct
  source 1..75: mol_type = other DNA
gagtaccgcagcgagttcggcggcttcttccccgtacagatacgctttaccccctcgcacggcaattaccatatt

SEQ ID NO: 89886 - DNA, 75 bp, synthetic construct
  source 1..75: mol_type = other DNA
ggtggcgcttgcactctctgaattgaaaaaatttactcgtgctgatttcggcttatatcatccaggaggtgcact

SEQ ID NO: 89887 - DNA, 75 bp, synthetic construct
  source 1..75: mol_type = other DNA
ggctgtatcagttccgtcgttgttcatcccgggagacactggaaaaagtgatttcccacacgcgttataagctta

SEQ ID NO: 89888 - DNA, 75 bp, synthetic construct
  source 1..75: mol_type = other DNA
tggtgaacacggtggcctcagaaaatccggatgaagccggtcgttacagcatggacgttgagtacggtcagtaca

SEQ ID NO: 89889 - DNA, 75 bp, synthetic construct
  source 1..75: mol_type = other DNA
ctggaagcgaaacgggggcagcaatatccggtggtgctccagtcctggcgccgcaagagggaaaatctgtcagcg

SEQ ID NO: 89890 - DNA, 75 bp, synthetic construct
  source 1..75: mol_type = other DNA
ccctgcagtccatgaatgcacaggaatatgaagatatccgtgctgcgggaagcgatatgcgccgtaatctcactc

SEQ ID NO: 89891 - DNA, 75 bp, synthetic construct
  source 1..75: mol_type = other DNA
gctgccgtactggcctatctcggaattaaaaagctcaaaaaagggcggggcagttcatggctacgggacctggtc

SEQ ID NO: 89892 - DNA, 75 bp, synthetic construct
  source 1..75: mol_type = other DNA
gctttacccggccatgcaggcatggccttgtgggttttcagttatgtggccaccgtgtcgtgtgcgggctgtgcc

SEQ ID NO: 89893 - DNA, 75 bp, synthetic construct
  source 1..75: mol_type = other DNA
ttgtgctgtgcataatgatgagacaagtatcggtaaatttggtcttgcatataaaagtaatattcagcgtaaact

SEQ ID NO: 89894 - DNA, 75 bp, synthetic construct
  source 1..75: mol_type = other DNA
tgctgcgtgtggagcggtcactggaaaggtgtgtgaagcaacagccaccgcagaaagtgtatgacgcggtggtgt

SEQ ID NO: 89895 - DNA, 75 bp, synthetic construct
  source 1..75: mol_type = other DNA
ctttatgtttctgttcattgtaacaatcgttacctccttccttgcggtgcaatgtcttacgaacagtttgatatt

SEQ ID NO: 89896 - DNA, 75 bp, synthetic construct
  source 1..75: mol_type = other DNA
cgattctgctcctgcttaccgatacgctggcacgcagcattggaacaacagaaatcccacttggcattctgaccg

SEQ ID NO: 89897 - DNA, 75 bp, synthetic construct
  source 1..75: mol_type = other DNA
gtaccgatgcgtggtcgtatccggttctgcggcttaaacgcctgggcctgtccagaacgttccgtcgtctggttg

SEQ ID NO: 89898 - DNA, 75 bp, synthetic construct
  source 1..75: mol_type = other DNA
gcgagaaattatgatggtgcaccaggattacttcttgcgtatcaaaatggagatattaatacgattcagtctttt

SEQ ID NO: 89899 - DNA, 75 bp, synthetic construct
  source 1..75: mol_type = other DNA
gaatctgaccggacctcagcagactgcacgccaccatttgttgcccttaccggcatacgctgcagtaccgcacat

SEQ ID NO: 89900 - DNA, 75 bp, synthetic construct
  source 1..75: mol_type = other DNA
atgaatcccgattatgtgcaagccttgcagacatccccccacttcccaacagatgtaacctacagattatttcct

SEQ ID NO: 89901 - DNA, 75 bp, synthetic construct
  source 1..75: mol_type = other DNA
aacaatacgaagagagaaacaaagattataagactgaactacagatctggaatacccggcagaaagcgcttgctg

SEQ ID NO: 89902 - DNA, 75 bp, synthetic construct
  source 1..75: mol_type = other DNA
gcaggatattgttccgggcattctgggactgggatgtgcccgtaatgtaatcgttgtaggggatcgtaagcaact

SEQ ID NO: 89903 - DNA, 75 bp, synthetic construct
  source 1..75: mol_type = other DNA
gggacggcgaccggctgaccacaatacagaacgacagaacccgcatccagacgatttatcagccggggagcttca

SEQ ID NO: 89904 - DNA, 75 bp, synthetic construct
  source 1..75: mol_type = other DNA
agttacgttcagatgtgccggctgacctggaggttcctgtgaattatcgcggaaatattcagattgcattacagg

SEQ ID NO: 89905 - DNA, 75 bp, synthetic construct
  source 1..75: mol_type = other DNA
gtgaaaaagtctcccagatggtcagttgggggcactggtttgcactgttcaatattctgctttcgctcgtcattg

SEQ ID NO: 89906 - DNA, 75 bp, synthetic construct
  source 1..75: mol_type = other DNA
agcggccaggatcagaagtggtggcctgctgctggtattgctgcatatggaagcaaccacgctggttttactgtt

SEQ ID NO: 89907 - DNA, 75 bp, synthetic construct
  source 1..75: mol_type = other DNA
aaccgcatttttgcattgaactgcggcgacaatcacttcgggcaggatttcacattatacgaagcacttcgcacg

SEQ ID NO: 89908 - DNA, 75 bp, synthetic construct
  source 1..75: mol_type = other DNA
cgaaaacatatcacgttaatatccctctggcattaattccgtcatttgcgttacctttttcagcctataccttat

SEQ ID NO: 89909 - DNA, 75 bp, synthetic construct
  source 1..75: mol_type = other DNA
aggcgtacaggaagcgttggtgccgactgataatgatctttctcatggaaaatatgacgatgccactttctcatt

SEQ ID NO: 89910 - DNA, 75 bp, synthetic construct
  source 1..75: mol_type = other DNA
gtccgatgacgggatatgaaaattttaaccgcgaggcatttcacaaagcggaagaggtgctgaaacgggaagggc

SEQ ID NO: 89911 - DNA, 75 bp, synthetic construct
  source 1..75: mol_type = other DNA
ttggtttgatatttgtaacatcctatgtcgcaaaatatgtggggccaggtacttttggacaaatatcattttcaa

SEQ ID NO: 89912 - DNA, 75 bp, synthetic construct
  source 1..75: mol_type = other DNA
gaagaggaactgaaacgggaagggcatacagtcttaaacccggcagtacttccggacgggctgacacagccgcac

SEQ ID NO: 89913 - DNA, 75 bp, synthetic construct
  source 1..75: mol_type = other DNA
cgactttaactactgagtttatctcgcttacattattcaattacttttttaaaaacggcttggttttaaaacttc

SEQ ID NO: 89914 - DNA, 75 bp, synthetic construct
  source 1..75: mol_type = other DNA
acgtactacaaaagcggtacgtttgccactgagtcgctggtctggcctgactctgtggatgcggtgaaaaaagcc

SEQ ID NO: 89915 - DNA, 75 bp, synthetic construct
  source 1..75: mol_type = other DNA
ttttttgcgatgactgcggcgcataccaatgatgaattacagcgtcttgatgaacagttttccgctgaactggcg

SEQ ID NO: 89916 - DNA, 75 bp, synthetic construct
  source 1..75: mol_type = other DNA
ttctgaactgtcagccctgcagcgtattgagcatctcgccctgatgaaacagcaggcagaatccgacagtaaccg

SEQ ID NO: 89917 - DNA, 75 bp, synthetic construct
  source 1..75: mol_type = other DNA
ggattccattcctattctctgcattactggtcaagctcccgtaggaaaacttcataaagaagatttccaggccgt

SEQ ID NO: 89918 - DNA, 75 bp, synthetic construct
  source 1..75: mol_type = other DNA
accgtattgacggggatgtgttattcagtcggcagtgctacgcgccaggggagcagttcgccgacccggtttatc

SEQ ID NO: 89919 - DNA, 75 bp, synthetic construct
  source 1..75: mol_type = other DNA
tggcactctctcctttgctgctgatggtatttttaatactgaaattaaaaatgcccatccattattccgtactga

SEQ ID NO: 89920 - DNA, 75 bp, synthetic construct
  source 1..75: mol_type = other DNA
acataaagaaattacgtaaaaaaataggtcttactcagacagagtgcggtgaaatttttggtgtaggtttaagta

SEQ ID NO: 89921 - DNA, 75 bp, synthetic construct
  source 1..75: mol_type = other DNA
cagagttgaaactgccaccggtgaactggccagaacgcagcgccgcagcctggcggatgcgcttcagcagtccgg

SEQ ID NO: 89922 - DNA, 75 bp, synthetic construct
  source 1..75: mol_type = other DNA
ggcgtggaagcggtgcgtgaagaccatccgctggcatcactgctgccgtgcgataacgtctttgccatcgaaagc

SEQ ID NO: 89923 - DNA, 75 bp, synthetic construct
  source 1..75: mol_type = other DNA
ttattcactccgtgtggtggaggaatccgaccaacagtcaacctgcacacctccgccatttgcaacccttgccgg

SEQ ID NO: 89924 - DNA, 75 bp, synthetic construct
  source 1..75: mol_type = other DNA
gtccaatgacgggatatgaaaatttcaaccgcgaggcatttcacagggcggaagaagcactgaaacgggaagggc

SEQ ID NO: 89925 - DNA, 75 bp, synthetic construct
  source 1..75: mol_type = other DNA
ggtatggcgcactgaagggactatggccgatcgtgattgtgatcctcggcgctattttcagttataacgtcatgc

SEQ ID NO: 89926 - DNA, 75 bp, synthetic construct
  source 1..75: mol_type = other DNA
gtttatcgactccagtcatgccggcacgtcaaaaggctggctgaccgacgagaccatcggctggctggaagccca

SEQ ID NO: 89927 - DNA, 75 bp, synthetic construct
  source 1..75: mol_type = other DNA
atgctttccgcgtttaccgttattctgctggtggtctgtggtgcgctgtggctggcaacagaccattaccgtgat

SEQ ID NO: 89928 - DNA, 75 bp, synthetic construct
  source 1..75: mol_type = other DNA
cgtttgtgatgagtgtggatgtcgccagcgattcttttatgcagacggcggagatgctgctggagaagaacgcaa

SEQ ID NO: 89929 - DNA, 75 bp, synthetic construct
  source 1..75: mol_type = other DNA
tacaaaagtgaactggctgtctggaaaaacaaggaagagcttttaaaggctcagaaaaaagcattgttgtcaaaa

SEQ ID NO: 89930 - DNA, 75 bp, synthetic construct
  source 1..75: mol_type = other DNA
atggaatttaaagatttaccaaaagaaatccagacaattgctgcaacgactctcggtgatagtctggtgaaaatt

SEQ ID NO: 89931 - DNA, 75 bp, synthetic construct
  source 1..75: mol_type = other DNA
gattatttcactctcagagagcggctgataataatgcaaaaacaactggaaggggcacagctatacattcgtgag

SEQ ID NO: 89932 - DNA, 75 bp, synthetic construct
  source 1..75: mol_type = other DNA
gcatgacgccgaagatgtgatttcaccgatggaattgcgtctgttcaactatctggtcgagcgtaaagatctgat

SEQ ID NO: 89933 - DNA, 75 bp, synthetic construct
  source 1..75: mol_type = other DNA
tcgtccgaacagcatactcaaagccggtcagcatcgttatcagcgggcatttatccagcgattaaataatgggcg

SEQ ID NO: 89934 - DNA, 75 bp, synthetic construct
  source 1..75: mol_type = other DNA
tgaaggacggcgcggggaagccggtaccgggatgcacaatagaactgaaagcgcgacgcaccacagaaacggtga

SEQ ID NO: 89935 - DNA, 75 bp, synthetic construct
  source 1..75: mol_type = other DNA
cactggttgatttgaaattcatcatggccgatactggctttggtaaaaccttcatctacgaccggattaagtccg

SEQ ID NO: 89936 - DNA, 75 bp, synthetic construct
  source 1..75: mol_type = other DNA
gtttcactgggacaggtataacccggcaacggaggcgagttcgtgctgggtgggtgtgtcccaggcgtgggcggg

SEQ ID NO: 89937 - DNA, 75 bp, synthetic construct
  source 1..75: mol_type = other DNA
gtttcactgggacaggtataacccggcaacggaggcgagttcgtgctgggtgcgtgtgtcgcaggcgtgggcggg

SEQ ID NO: 89938 - DNA, 75 bp, synthetic construct
  source 1..75: mol_type = other DNA
ttctggcaattacaggctgaaatcagtcaccggggacgttactgccatccgtacagcatggatatcactgttacc

SEQ ID NO: 89939 - DNA, 75 bp, synthetic construct
  source 1..75: mol_type = other DNA
atcgctttcccgaaaccctgacgaatcagagccgctggtttggccttcctgtggatgagcttattccggcgattg

SEQ ID NO: 89940 - DNA, 75 bp, synthetic construct
  source 1..75: mol_type = other DNA
tagttgtagcaggcgttctggctgcgcttatggcagggaatgttgcgttggcatctgatgtgcctactgaagtga

SEQ ID NO: 89941 - DNA, 75 bp, synthetic construct
  source 1..75: mol_type = other DNA
atttcagctatggtgaagggaaaatctctgccgatatcatgacgtctgctgtcgtaataagttcgtggtacacag

SEQ ID NO: 89942 - DNA, 75 bp, synthetic construct
  source 1..75: mol_type = other DNA
gtttcactgggacaggtataacccggcaacggaggcgagttcgtgctgggtgtgggtgtcacaggcgtgggcggg

SEQ ID NO: 89943 - DNA, 75 bp, synthetic construct
  source 1..75: mol_type = other DNA
gtttcactgggacaggtataacccggcaacggaggcgagttcgtgctgggtgagggtgtctcaggcgtgggcggg

SEQ ID NO: 89944 - DNA, 75 bp, synthetic construct
  source 1..75: mol_type = other DNA
tggtgttgtgcgttcagaagatgcttatgaattgttccgtcccggagaagaggtaccctccaccggtttttataa

SEQ ID NO: 89945 - DNA, 75 bp, synthetic construct
  source 1..75: mol_type = other DNA
ccagactgaaacgggcgacggtcagaaatccgaacgcaaaaattatcgttaaccgcggtgatcttccagtgatta

SEQ ID NO: 89946 - DNA, 75 bp, synthetic construct
  source 1..75: mol_type = other DNA
gcttttacaacctagaagaaattgatcgctggattgaacgtcaggcatcagcaagaccaagacgtcatcttactt

SEQ ID NO: 89947 - DNA, 75 bp, synthetic construct
  source 1..75: mol_type = other DNA
cgtgaccgcgccattccccgtgtgatggctgcggcgctgctgtcatccacggaacaggcatttgaacggcaggca

SEQ ID NO: 89948 - DNA, 75 bp, synthetic construct
  source 1..75: mol_type = other DNA
ttcattcgctgaattttgttatacggcctgatgttgaaggtggttacgttaatgatcccactgaccgtggcggcg

SEQ ID NO: 89949 - DNA, 75 bp, synthetic construct
  source 1..75: mol_type = other DNA
cttatcgagaagctgaatccggccaacatcgtggtgctaggcatagcaggattgatcttacccagcaatagtgga

SEQ ID NO: 89950 - DNA, 75 bp, synthetic construct
  source 1..75: mol_type = other DNA
ctgcctgtcatgggcggttaatcattaccgtgataacgccatcacctacaaaaagcagcgcgataaggccgcatc

SEQ ID NO: 89951 - DNA, 75 bp, synthetic construct
  source 1..75: mol_type = other DNA
cccactgatgcacgggcatatcaatatgctggggcattatacgtttacgctaccggaggatattttgaaggggga

SEQ ID NO: 89952 - DNA, 75 bp, synthetic construct
  source 1..75: mol_type = other DNA
aagaagctgccgagcatttgggggtaagtgtccagactcttgctaactgggcgtgtactggcaaggtaaaaatcc

SEQ ID NO: 89953 - DNA, 75 bp, synthetic construct
  source 1..75: mol_type = other DNA
gtcagaaatggcgtttgaacaggaaaaagagccggacggcgaacgctggcatgactggtcagatccttaccgcaa

SEQ ID NO: 89954 - DNA, 75 bp, synthetic construct
  source 1..75: mol_type = other DNA
acgccagtttgtaagttctgctgcacaaaaaccagcatcggcatccgcagtaacgcgtataaatctgaccatgac

SEQ ID NO: 89955 - DNA, 75 bp, synthetic construct
  source 1..75: mol_type = other DNA
taatttaaataaattactttccggacaagaacaaaaagtcactctactgaagagtgctaaaacggaatggaaaaa

SEQ ID NO: 89956 - DNA, 75 bp, synthetic construct
  source 1..75: mol_type = other DNA
atggcaacagaccattaccgtgataacgcgattacctacaaagcgcagcgcgataacaaagccagtgaactgaag

SEQ ID NO: 89957 - DNA, 75 bp, synthetic construct
  source 1..75: mol_type = other DNA
cacaactgatgcgatgggttgccagaaagatattgcagagaagatacaaaaacagggaggtgattatttattcgc

SEQ ID NO: 89958 - DNA, 75 bp, synthetic construct
  source 1..75: mol_type = other DNA
aaatatccttatgtcgaaggattgcgtctcgacgaagcaatgcatccgctcacactgatgaccgtaggtgtttat

SEQ ID NO: 89959 - DNA, 75 bp, synthetic construct
  source 1..75: mol_type = other DNA
ttttgggcaccgccctgatgatcacttcgcctgtgacagtatatgcacagtcacctgccacactcagctttccgc

SEQ ID NO: 89960 - DNA, 75 bp, synthetic construct
  source 1..75: mol_type = other DNA
tgccgcaaagcatgttgtttttacagcactatttacaaaatgcggacacattttcactgcctggcgagcgcgtac

SEQ ID NO: 89961 - DNA, 75 bp, synthetic construct
  source 1..75: mol_type = other DNA
gcatataaaggtaaagaatcccagcagatttattttgttccctttatgaccgatggtagcggagttaatacaccg

SEQ ID NO: 89962 - DNA, 75 bp, synthetic construct
  source 1..75: mol_type = other DNA
cgggttactttaagtaactcacaaaatttgcaaccatctttaagagggttacaaatttccccgaaagcccgctcc

SEQ ID NO: 89963 - DNA, 75 bp, synthetic construct
  source 1..75: mol_type = other DNA
gcttcaaaaattaatgcggaggctaaaacaaggattaaattacgagaaaaaaaatttcttgaagatatagttggt

SEQ ID NO: 89964 - DNA, 75 bp, synthetic construct
  source 1..75: mol_type = other DNA
tgcagataaaaagtgcactgtcctggtggctggtctgccggggggaaattcataaattccgctgtgtgccacatc

SEQ ID NO: 89965 - DNA, 75 bp, synthetic construct
  source 1..75: mol_type = other DNA
tggagaggcggcagatcccttaattgcggtgaacggtcatcacgttatcacatccaccagcagagtgtggattca

SEQ ID NO: 89966 - DNA, 75 bp, synthetic construct
  source 1..75: mol_type = other DNA
taaggaagagctggcgttatccttaatttgttgggttttcaccagtccttttaccaactggaccgataaagtctt

SEQ ID NO: 89967 - DNA, 75 bp, synthetic construct
  source 1..75: mol_type = other DNA
cgcggcgtcatcatcgtggtggcggtgctggcgaatatcttgctgacccagcgaagcagtaaagcgaaacgctaa

SEQ ID NO: 89968 - DNA, 75 bp, synthetic construct
  source 1..75: mol_type = other DNA
tgcagagttccacatgaaagacaaccgctgggtgcctggctggatgtgtgcaccacgtccacagacggatgccac

SEQ ID NO: 89969 - DNA, 75 bp, synthetic construct
  source 1..75: mol_type = other DNA
cagattaaatctgctatcgaaagtaagttctatgacgcatcgtcctatgcaggcaaaacctgtacgctgcgcata

SEQ ID NO: 89970 - DNA, 75 bp, synthetic construct
  source 1..75: mol_type = other DNA
gactggtaacccgttcctgatgtcgttcttcacccagaccacagacggcaaactgaatctgatgcatcacaagaa

SEQ ID NO: 89971 - DNA, 75 bp, synthetic construct
  source 1..75: mol_type = other DNA
ggtacgggtaaaaccggtggactggaaatcagcatccgtggaatgcctgccagttatacgctgatactgattgat

SEQ ID NO: 89972 - DNA, 75 bp, synthetic construct
  source 1..75: mol_type = other DNA
ggccggaatggaacgctggcagtggcaggatatgccgttctggcaggttattgcggaagccagtcttgcagcaag

SEQ ID NO: 89973 - DNA, 75 bp, synthetic construct
  source 1..75: mol_type = other DNA
gtgtatgccagacgacaccccgggatgtggctgaaccggctcaggcgcgtattgcgctgtgggacaaatggcttg

SEQ ID NO: 89974 - DNA, 75 bp, synthetic construct
  source 1..75: mol_type = other DNA
ctgagtggctcgacccgaagtgaagcggtagagaagctggctctgcactccgttgatgaactgataaaagaatac

SEQ ID NO: 89975 - DNA, 75 bp, synthetic construct
  source 1..75: mol_type = other DNA
ggcgctgctggccggactggtggaacgcttcggtacgcaactgctgccctcgcgaccggccagccggaaaatggc

SEQ ID NO: 89976 - DNA, 75 bp, synthetic construct
  source 1..75: mol_type = other DNA
ccgcgttcatgcgtgacccgcgattccgtggttttacgggggatgatacagaagtgcaggcccgtcttgcccgtg

SEQ ID NO: 89977 - DNA, 75 bp, synthetic construct
  source 1..75: mol_type = other DNA
tgttgtttgcgctgtttgtgttcatcagccgcaaaaccgccttcgggcgctcggtttttgccgttggcggtaatg

SEQ ID NO: 89978 - DNA, 75 bp, synthetic construct
  source 1..75: mol_type = other DNA
gatcctgacgttaaccctacctaccagcagatgcttgagcattataatgtcgcagttttgcctgcgcggccacgt

SEQ ID NO: 89979 - DNA, 75 bp, synthetic construct
  source 1..75: mol_type = other DNA
ggatgttcgttcaccggagtgcttctggatgtgagaatgggctatgcacgccgtctgttacaggcccgtctgccg

SEQ ID NO: 89980 - DNA, 75 bp, synthetic construct
  source 1..75: mol_type = other DNA
atggtaacgcatgagttttttttgcttatcaccaatgcagttatttgtactggcatagcaattcgcgttgtcaca

SEQ ID NO: 89981 - DNA, 75 bp, synthetic construct
  source 1..75: mol_type = other DNA
gccttcttcagaggctctacgtacccgaacaggggcagatattgattgatggccatgatatttccctggttaacc

SEQ ID NO: 89982 - DNA, 75 bp, synthetic construct
  source 1..75: mol_type = other DNA
aaagcgattatgggatttgtgcgtctgaccagcgggaagatatctgttctgggtattcccacacgacaggcgcta

SEQ ID NO: 89983 - DNA, 75 bp, synthetic construct
  source 1..75: mol_type = other DNA
gggtaaccgaagggcaggcactacaacctgaagcgccggatgtggtaaccgaagaggtcgctccaaaagttaccg

SEQ ID NO: 89984 - DNA, 75 bp, synthetic construct
  source 1..75: mol_type = other DNA
gttctacttcctcttcaccgacaaggatggcgaaaaatacggtcgcgcaaacaaactttctggtctggaaaaagc

SEQ ID NO: 89985 - DNA, 75 bp, synthetic construct
  source 1..75: mol_type = other DNA
tctggttacgcacgccaatggctgtggatttatctgaggtcattatcaacgctgtcatgcttgctgcggttatta

SEQ ID NO: 89986 - DNA, 75 bp, synthetic construct
  source 1..75: mol_type = other DNA
caagccgctgtagaaaacgatatacaggcagtggacaaacttttgaataagctcactgggggcgcgaccccggga

SEQ ID NO: 89987 - DNA, 75 bp, synthetic construct
  source 1..75: mol_type = other DNA
gcatttcagctcatgggcgcgtcgtggcattattcccgatcgtatggcaaccgctattctgaacgtagccggtcg

SEQ ID NO: 89988 - DNA, 75 bp, synthetic construct
  source 1..75: mol_type = other DNA
atggaagtttccgttatatttttctgggttatcactgctcttattgccatcttattcttaaaatcagcaataacc

SEQ ID NO: 89989 - DNA, 75 bp, synthetic construct
  source 1..75: mol_type = other DNA
tgcagatgctggggagtgcaccacagcagaacgctcaggcgcaaccgcagcctcagcagaatgggcagccacaga

SEQ ID NO: 89990 - DNA, 75 bp, synthetic construct
  source 1..75: mol_type = other DNA
tttacgctctcaggtgacgatggcgctgaaaaaatatcgcccacaggccgacgatacccggctgctcgccgagtt

SEQ ID NO: 89991 - DNA, 75 bp, synthetic construct
  source 1..75: mol_type = other DNA
accccgcccagccctcgactcctgggatgctgaatatatgctggaaaaccgctgggatgaggcgtctgcttcctt

SEQ ID NO: 89992 - DNA, 75 bp, synthetic construct
  source 1..75: mol_type = other DNA
gagcttctgtttaatttttatgagtgttgctataagtttttaccaagagctcagcctcaagataaaatcgatagc

SEQ ID NO: 89993 - DNA, 75 bp, synthetic construct
  source 1..75: mol_type = other DNA
tcaggcaggcattgatacaggcctggctgatcaactgattaatgctgcagatgccgttgatgtaatggtttctgc

SEQ ID NO: 89994 - DNA, 75 bp, synthetic construct
  source 1..75: mol_type = other DNA
ttcctctcagcacagagcaacaggccgcatggcgggcggtggcggagacagaaaaacgccgccaccagggtaaca

SEQ ID NO: 89995 - DNA, 75 bp, synthetic construct
  source 1..75: mol_type = other DNA
gcaggagtgcagccggaaagagccacggcactggcagcagaagctgtcgataaaaaaatgacggatttcttccat

SEQ ID NO: 89996 - DNA, 75 bp, synthetic construct
  source 1..75: mol_type = other DNA
atgtgatgtaccacaatgcaaaagtggcaacaaataaccagaaactgggaacctttggtgcatttgataatgaat

SEQ ID NO: 89997 - DNA, 75 bp, synthetic construct
  source 1..75: mol_type = other DNA
gataccactgatgctgaccatgataagcgtatcgcagagaactatgtctatgatgaagtgctgggtgtcaatgtt

SEQ ID NO: 89998 - DNA, 75 bp, synthetic construct
  source 1..75: mol_type = other DNA
gtggcagagcatgacctggaaaccctgttctggcagtggggcgagcgttttccgtcactggccggaatggaacgc

SEQ ID NO: 89999 - DNA, 75 bp, synthetic construct
  source 1..75: mol_type = other DNA
caatatgctcttatcccccatgatgaaattgagttaagtcggtcaatttctggactaatggctgattttatgatg

SEQ ID NO: 90000 - DNA, 75 bp, synthetic construct
  source 1..75: mol_type = other DNA
ctcttactcacgcatctggaaaataacgaacagcggacaatcagttggcaggaaggtggagaagcggaagagcgg

SEQ ID NO: 90001 - DNA, 75 bp, synthetic construct
  source 1..75: mol_type = other DNA
cgcaaaaaatgaaatatattactggggctaaagtccgtcgggtttccagtggcgatctagctaaaattactattc

SEQ ID NO: 90002 - DNA, 75 bp, synthetic construct
  source 1..75: mol_type = other DNA
gaaatgtcctccaccagccttgagcattgccagcgatacgcggcactgacaggcagtgaattgtcgatgaccttt

SEQ ID NO: 90003 - DNA, 75 bp, synthetic construct
  source 1..75: mol_type = other DNA
gtttactcgtcctgatcttttcaagtactggtgggctggcggcgaagaaaattgcaacattggtgactccgatag

SEQ ID NO: 90004 - DNA, 75 bp, synthetic construct
  source 1..75: mol_type = other DNA
atgcgagcactgatccgttcgacaaacaaggctgttcgtattacaggattgtctggtgttgggaagactcgaatc

SEQ ID NO: 90005 - DNA, 75 bp, synthetic construct
  source 1..75: mol_type = other DNA
tgtgaggaatccgacctgctggaagcagaaatgaagctgatgcgctgtatagcgaaggtcagggcgtggacgccg

SEQ ID NO: 90006 - DNA, 75 bp, synthetic construct
  source 1..75: mol_type = other DNA
atcccgccgggaatatctggctttccagcctgatagcatcgcttcccatcctgtttttcttctttgcgctgatta

SEQ ID NO: 90007 - DNA, 75 bp, synthetic construct
  source 1..75: mol_type = other DNA
gaaaactccggtgaattttttgttcaggtctggggaaatggagccaacttcgacaacacgattttgcgccgttca

SEQ ID NO: 90008 - DNA, 75 bp, synthetic construct
  source 1..75: mol_type = other DNA
cacaactatgaagaagcctcctctcaaccgggagccatgacattacggccttttgaggctgcctggtggttgcag

SEQ ID NO: 90009 - DNA, 75 bp, synthetic construct
  source 1..75: mol_type = other DNA
ccaccacggatatccgtaaggacagatgcagcaagtgcatgcgcgggtgtgaactgcgcaggaatgtcggcaatt

SEQ ID NO: 90010 - DNA, 75 bp, synthetic construct
  source 1..75: mol_type = other DNA
aagactctgtcatcacggtacgcagactctataatggatatttcggtaatggcacactcaatatttccaataatg

SEQ ID NO: 90011 - DNA, 75 bp, synthetic construct
  source 1..75: mol_type = other DNA
ctaaccccttctatgtcacttgagcaggtcagaaagaatagctatcaaaggttgaggcagccgagctatcgtggc

SEQ ID NO: 90012 - DNA, 75 bp, synthetic construct
  source 1..75: mol_type = other DNA
ttcgcacccgtagctgggaagataacggtatcacccgttacgtcactgaaattcttgttaagaccacgggcacca

SEQ ID NO: 90013 - DNA, 75 bp, synthetic construct
  source 1..75: mol_type = other DNA
acgcaaatattaaagaaaacaatgacgtgataaacccacatcgtattttcattaaagattttaactggtcaaaac

SEQ ID NO: 90014 - DNA, 75 bp, synthetic construct
  source 1..75: mol_type = other DNA
ctcggtgatgcgatgattcagagcccggtaaaaacaggggcgcgtattttaaatgagttcagccgtatggggctg

SEQ ID NO: 90015 - DNA, 75 bp, synthetic construct
  source 1..75: mol_type = other DNA
ctgtcattagcactgaccctgatcccttcaggtgtgaattttgatgccgatgaaaacgatccagtgaaattactg

SEQ ID NO: 90016 - DNA, 75 bp, synthetic construct
  source 1..75: mol_type = other DNA
ggcgttatcgattttatctgtacgtccctgattgcggttattctgacgattaagctatttctgctgattaatcag

SEQ ID NO: 90017 - DNA, 75 bp, synthetic construct
  source 1..75: mol_type = other DNA
agcaggattacctgatgacggcgattatgggtggggcgtcgaatattacccagcccaccagcgatgtgaatagct

SEQ ID NO: 90018 - DNA, 75 bp, synthetic construct
  source 1..75: mol_type = other DNA
ttgcgctcaatttagaaggtagctcgcaggaacgtacattttcattatcgattgcagaaaatctaatagcaaaaa

SEQ ID NO: 90019 - DNA, 75 bp, synthetic construct
  source 1..75: mol_type = other DNA
gttcatcgatccgaaaggtcatactctgactcagagtcagaacgacgcgctggtagctgtcttccaggctgcgtt

SEQ ID NO: 90020 - DNA, 75 bp, synthetic construct
  source 1..75: mol_type = other DNA
agatctgcgccacgaaaccagcggcaggtgaaatttatcgtttcccaagtcgtgtgaaaaaatctgaacaaccca

SEQ ID NO: 90021 - DNA, 75 bp, synthetic construct
  source 1..75: mol_type = other DNA
tttataccgactgtttcaacaataaatgataaaaatcatactcctcgtttaaggccacctacacgccgtggccta

SEQ ID NO: 90022 - DNA, 75 bp, synthetic construct
  source 1..75: mol_type = other DNA
ctcaatccgtcgatacatgaaaacaaaaaatataattcaccacaattgagaccatccagttatcgtattaataaa

SEQ ID NO: 90023 - DNA, 75 bp, synthetic construct
  source 1..75: mol_type = other DNA
actttaaaacaggaagcgatcttagccagataacgcattttgaagtgaactacccggatgattttgtaaaacaag

SEQ ID NO: 90024 - DNA, 75 bp, synthetic construct
  source 1..75: mol_type = other DNA
tctttcaaggaacgtggtgccaattacgttaccgagtccgcccagcagggctttgagaacctgactccagaagct

SEQ ID NO: 90025 - DNA, 75 bp, synthetic construct
  source 1..75: mol_type = other DNA
cccgagcaaactgcaaccacgggcgattaccgtgttgtatttaaaactggagaatattttaagaaacaaaatctt

SEQ ID NO: 90026 - DNA, 75 bp, synthetic construct
  source 1..75: mol_type = other DNA
aattaacgggagtggtgcgtccagaccagcagaacgcattgaaaaggtgcgtccggacaaccgttatttcacgga

SEQ ID NO: 90027 - DNA, 75 bp, synthetic construct
  source 1..75: mol_type = other DNA
ggcccagcacgaggaagcgttagaaaaagcagcagcagctttagataatgaagaaaaagcgttatggcttgctaa

SEQ ID NO: 90028 - DNA, 75 bp, synthetic construct
  source 1..75: mol_type = other DNA
tgtcgctggccaagctggccggtgttggatttgtaatgaacgggatatccatctggcgcaaggccggactcgatg

SEQ ID NO: 90029 - DNA, 75 bp, synthetic construct
  source 1..75: mol_type = other DNA
atgcttaatccgttgatcctcaatatttgccgtttgcttcagcgtaaaaaaacatcaattcctacagttgggcag

SEQ ID NO: 90030 - DNA, 75 bp, synthetic construct
  source 1..75: mol_type = other DNA
cgcgaagtggggatggactggatgtcgcaagatctcgctgcgcgtttgtctacccgcgcagctcaggggattggt

SEQ ID NO: 90031 - DNA, 75 bp, synthetic construct
  source 1..75: mol_type = other DNA
cagggccgtcacgctcagtccggcacaggcggaatatctggtcacaggaaaaatattaccggctgagttattccg

SEQ ID NO: 90032 - DNA, 75 bp, synthetic construct
  source 1..75: mol_type = other DNA
ttaatattcatgctgaacctgatatcgaatattttcgagttatcgatagggcatttgatgaggtagccaattaca

SEQ ID NO: 90033 - DNA, 75 bp, synthetic construct
  source 1..75: mol_type = other DNA
ccgggcaaagatggcgcatgagcagcagcgttttaatccggacatggtcattctggccgacgtcaacgcccagcc

SEQ ID NO: 90034 - DNA, 75 bp, synthetic construct
  source 1..75: mol_type = other DNA
cgtagtgaagatgatgtggctgacgatgatgaccgcacagaacaggttcaggagaaagcctccgtggaggaaatc

SEQ ID NO: 90035 - DNA, 75 bp, synthetic construct
  source 1..75: mol_type = other DNA
atcgtgaagtggtcagcctgtatgctcatctggtccagccggttttagatgcccaggcgcggcgcgaaatcagcc

SEQ ID NO: 90036 - DNA, 75 bp, synthetic construct
  source 1..75: mol_type = other DNA
aaaaactgaaggaaaaactacaggaattactggcgaatactaatgacaattctgaaaattatgaaagaaaggaat

SEQ ID NO: 90037 - DNA, 75 bp, synthetic construct
  source 1..75: mol_type = other DNA
tccggtcacgtcagcggttatagcgtggcgcaccaggtgctggaagaagaactggccgaatggctgggctattcg

SEQ ID NO: 90038 - DNA, 75 bp, synthetic construct
  source 1..75: mol_type = other DNA
gggcatggttgaacgaattacaggaagttcttgatcgctgtccatcaccgaaaaaaattggcttttacaccattg

SEQ ID NO: 90039 - DNA, 75 bp, synthetic construct
  source 1..75: mol_type = other DNA
atgacaataagttttagtgctgttccgtcgaatacgctggtgccgttgttctacgccgagatggacaattctgcg

SEQ ID NO: 90040 - DNA, 75 bp, synthetic construct
  source 1..75: mol_type = other DNA
ctagtgcagtcttactgggtggcgttctcggcgcactgctcagccaacgcttaccggaacgtatccgcgtctcca

SEQ ID NO: 90041 - DNA, 75 bp, synthetic construct
  source 1..75: mol_type = other DNA
acattgtttccctggaaaacggggcgcatggctctgttcaaacatctgaatattttcatgtggcatgttataaaa

SEQ ID NO: 90042 - DNA, 75 bp, synthetic construct
  source 1..75: mol_type = other DNA
aaagatgcctttatcctgtggctgaaccagaacgttcaggcggcggagctgctggcggagatggcgatttccagc

SEQ ID NO: 90043 - DNA, 75 bp, synthetic construct
  source 1..75: mol_type = other DNA
caccatggacgtgaaaatgctgtttcatgctcattaccccagccagaagatgctggtggctcgatataaaaatgg

SEQ ID NO: 90044 - DNA, 75 bp, synthetic construct
  source 1..75: mol_type = other DNA
aagaacgcctgaacgaactgatggccgttacgacgcgctggaaaaccagtgtgaggaatccgacctgctggaagc

SEQ ID NO: 90045 - DNA, 75 bp, synthetic construct
  source 1..75: mol_type = other DNA
ttgactcgctggaaaccgctatcggattccacatgcgcgactggtggcagccgacaaaagcaaacttcttcggac

SEQ ID NO: 90046 - DNA, 75 bp, synthetic construct
  source 1..75: mol_type = other DNA
ttggtgagctgtatgtgattgccgttccggaagccacaggcgcggcggcaacggttacgctgacggtgaccgggg

SEQ ID NO: 90047 - DNA, 75 bp, synthetic construct
  source 1..75: mol_type = other DNA
ctctggctgactggttttatctcaacccggaatggctgaacggcagggtacgttatcctttaagccgtgccggtg

SEQ ID NO: 90048 - DNA, 75 bp, synthetic construct
  source 1..75: mol_type = other DNA
gacgagtgaacacgcaactggttgacccgatgatggtgcgctggcctctggctgagctgtgtgattattacaatg

SEQ ID NO: 90049 - DNA, 75 bp, synthetic construct
  source 1..75: mol_type = other DNA
ctggacggcctgctgatcctgcctgaaatgagtcaggatcatgtgaaacgcctgtccaccctggtagctgcgcat

SEQ ID NO: 90050 - DNA, 75 bp, synthetic construct
  source 1..75: mol_type = other DNA
gaaattaatgaacttgaaattattgcagggcaggcaatactgcctgaagagagttttctctggttgaaaactgac

SEQ ID NO: 90051 - DNA, 75 bp, synthetic construct
  source 1..75: mol_type = other DNA
ttgtatcgtgaaattagtgacggaaaaagcatcacgtacatgatcgccgggttaaacaaagaatatggcgatgtg

SEQ ID NO: 90052 - DNA, 75 bp, synthetic construct
  source 1..75: mol_type = other DNA
tccgaaccgctcacggtcattgcccaggctttcgcgctgcgtgaactgctgcttcgccagcgcattaatgagggc

SEQ ID NO: 90053 - DNA, 75 bp, synthetic construct
  source 1..75: mol_type = other DNA
gttgagtgttgttctgtttatcttttatggtaatagccataaatttattactctcttatgcattctatatgtttt

SEQ ID NO: 90054 - DNA, 75 bp, synthetic construct
  source 1..75: mol_type = other DNA
ccaccgacgcagtgatggaaagtgacacctcgctgagactacgggcgcaacgggcatatgacggtctgagtgttg

SEQ ID NO: 90055 - DNA, 75 bp, synthetic construct
  source 1..75: mol_type = other DNA
acacttaaataatggcggatatggagcgagacccaacaaaccgcctacgcccgatccaagtaaattgccggacat

SEQ ID NO: 90056 - DNA, 75 bp, synthetic construct
  source 1..75: mol_type = other DNA
atgagcatgtgccttgatgccgcttgtggcgatttgtatgccaccgatgatgttaagccagaagaaatccgcaag

SEQ ID NO: 90057 - DNA, 75 bp, synthetic construct
  source 1..75: mol_type = other DNA
cgaccagggcgcttgcgccccttggactcgtggcaataactgtccccttgctgaaaatttgaaccaacaggagaa

SEQ ID NO: 90058 - DNA, 75 bp, synthetic construct
  source 1..75: mol_type = other DNA
atgagcagcagcgttttaatccggacatggtcattctggctgacgtcaacgcccagccttcccatatcagcaagc

SEQ ID NO: 90059 - DNA, 75 bp, synthetic construct
  source 1..75: mol_type = other DNA
gttaatcaaagagagcttgctaaaaaatactgtgtcagtcagacggtgattcacaatatccagtctggtaaatcg

SEQ ID NO: 90060 - DNA, 75 bp, synthetic construct
  source 1..75: mol_type = other DNA
ctggcatcaaaatatggacacttaaataatggcggatatggagcgagacccaacaaaccgcctacgcccgatcca

SEQ ID NO: 90061 - DNA, 75 bp, synthetic construct
  source 1..75: mol_type = other DNA
ctgaatccggttcagtatatagattcaatgggactggcatcaaaatatggacacttaaataatggcggatatgga

SEQ ID NO: 90062 - DNA, 75 bp, synthetic construct
  source 1..75: mol_type = other DNA
attacctgcgataccgctgtccgtgaccctcaaatggaaatgacgttgacctggagtggtacgcagagtgacttt

SEQ ID NO: 90063 - DNA, 75 bp, synthetic construct
  source 1..75: mol_type = other DNA
ccgggcaaagttggcgcatgagcagcagcgttttaacccggacatggtcattctggcagacgtcagcgcccagcc

SEQ ID NO: 90064 - DNA, 75 bp, synthetic construct
  source 1..75: mol_type = other DNA
gctgaccgccaaaaaagaacaggagtccgagatgagcagtacgggggcaatgctcggactcgaccccagcagccg

SEQ ID NO: 90065 - DNA, 75 bp, synthetic construct
  source 1..75: mol_type = other DNA
tataacggctggccacaaaccttaaatggcccttctggtcatgaacctgccgccttaaacctctctgctagctgg

SEQ ID NO: 90066 - DNA, 75 bp, synthetic construct
  source 1..75: mol_type = other DNA
aagcaattgcacgcctgatggcaaccatgaaagaagcttcggctggcaaactggttcgtactctggctgctgtac

SEQ ID NO: 90067 - DNA, 75 bp, synthetic construct
  source 1..75: mol_type = other DNA
ggcacgtaacgactgaacgtctgtttttggcgattccagctgaaatcggcgcgttgattaggcactatatcgagc

SEQ ID NO: 90068 - DNA, 75 bp, synthetic construct
  source 1..75: mol_type = other DNA
gcaggaaaaatttctcgatacccagtcgctggtggcattgattcgacgtcacgaaccggcgttgttgattggcaa

SEQ ID NO: 90069 - DNA, 75 bp, synthetic construct
  source 1..75: mol_type = other DNA
gacgaacatccacttggtcgagcagataccacgttacctgagccaaatggtcagccatgaatgcagacttattgg

SEQ ID NO: 90070 - DNA, 75 bp, synthetic construct
  source 1..75: mol_type = other DNA
ttgatggggagttgctgaaaggtggcggtggaattgctaatggacggccctcacatagacaatcagaaaaggatg

SEQ ID NO: 90071 - DNA, 75 bp, synthetic construct
  source 1..75: mol_type = other DNA
gcgtgtggtggtcaccaatgaaaacgtgcttggtaaacgtattcgcgacctgcactttaaagaacgctatgacgt

SEQ ID NO: 90072 - DNA, 75 bp, synthetic construct
  source 1..75: mol_type = other DNA
aaagcgaatgcaaaatttgaggtcaaagccgctgcctttgaaggtgagctgatcccggcgtctcagatcgaccgc

SEQ ID NO: 90073 - DNA, 75 bp, synthetic construct
  source 1..75: mol_type = other DNA
taggcctccaaagcgagggcttctggacccatggagggagtggttaaaagagcaacgagaatgtggtaattataa

SEQ ID NO: 90074 - DNA, 75 bp, synthetic construct
  source 1..75: mol_type = other DNA
caaataatgcgttttatccggcctcgcttcgttcggtttatgaggctgccggaagctggccggaagactgtgttg

SEQ ID NO: 90075 - DNA, 75 bp, synthetic construct
  source 1..75: mol_type = other DNA
tacgtcttgttgtcagagagttatcactgaagaaatcacctgagccagaaatatctgtgcctgtagcatcgctcc

SEQ ID NO: 90076 - DNA, 75 bp, synthetic construct
  source 1..75: mol_type = other DNA
gacccccggctgtaccgtacaggcctgcggcttacgcgataacatggatgagttgaaaaaagcgggcgttgatgt

SEQ ID NO: 90077 - DNA, 75 bp, synthetic construct
  source 1..75: mol_type = other DNA
aaagctgatcgtctacgaagctgatggcggtaccagcgaaagcgacaaacaaaccaaaggcggtaaggtcaccag

SEQ ID NO: 90078 - DNA, 75 bp, synthetic construct
  source 1..75: mol_type = other DNA
gtatgtcaccggtgcccgaccggtacaactggccaagctggcggtaaaagatttacgtattgatacccgaaactc

SEQ ID NO: 90079 - DNA, 75 bp, synthetic construct
  source 1..75: mol_type = other DNA
atggctgagataaacagcactgcacaggtcgcatcagcgttaaccggcgtcagcgatgttctgagtccggtgttc

SEQ ID NO: 90080 - DNA, 75 bp, synthetic construct
  source 1..75: mol_type = other DNA
cctctgaaagaggcggatattcgcccgtatgacgatcgcgctacagcatatgttcagatgatggaagaacgcgcc

SEQ ID NO: 90081 - DNA, 75 bp, synthetic construct
  source 1..75: mol_type = other DNA
attaccggaatgcgtcgctgggtatggagcagcagcgactccggatgcagaaatacaaccagcgacggcttgagt

SEQ ID NO: 90082 - DNA, 75 bp, synthetic construct
  source 1..75: mol_type = other DNA
gagacgtggcgatgtttaccgccgctatggagtcagaacttatcgaactcaccgaacaacgtcaggaagaaggca

SEQ ID NO: 90083 - DNA, 75 bp, synthetic construct
  source 1..75: mol_type = other DNA
gacgcacggtaggctggcgatgcatcaacgattgttctttgattacgcgcttggagtcggcgctatcacaagtca

SEQ ID NO: 90084 - DNA, 75 bp, synthetic construct
  source 1..75: mol_type = other DNA
ctttcacatgcgcgactggtggcagccgacgaaagcaaactttttcggacacctgaaaaagccgcagattatcgc

SEQ ID NO: 90085 - DNA, 75 bp, synthetic construct
  source 1..75: mol_type = other DNA
cgactggagggtgatgcgcgtcgtgttgccattctgtgtctttctactggtgcccgatggagtgaagcatcggaa

SEQ ID NO: 90086 - DNA, 75 bp, synthetic construct
  source 1..75: mol_type = other DNA
tcagttacctgaatgaagatattgattttgtgctgaatgaactgaaagccaaaggcctgtgccgcgattttctcg

SEQ ID NO: 90087 - DNA, 75 bp, synthetic construct
  source 1..75: mol_type = other DNA
cgaaaaattacggttatttcatgccgcagcagcagggactttctctggcgaaacttcaggaaggagccagcaacg

SEQ ID NO: 90088 - DNA, 75 bp, synthetic construct
  source 1..75: mol_type = other DNA
ccacccacggcggtttccgtatggaaatcaacgtcaaaggcgacctctatatcgacgatcaccacaccgtcgaag

SEQ ID NO: 90089 - DNA, 75 bp, synthetic construct
  source 1..75: mol_type = other DNA
gcagcgtgttgtgagaaattcccgcaaccctgaatttatgaatgaagttaaagacgcctgccttaaaaagcaggc

SEQ ID NO: 90090 - DNA, 75 bp, synthetic construct
  source 1..75: mol_type = other DNA
gtgaagcaccgcttatctccgaagccatcgagtctgaaatcatcgaaatggcagaacaacgccaggaagaaggca

SEQ ID NO: 90091 - DNA, 75 bp, synthetic construct
  source 1..75: mol_type = other DNA
aggagaaggcgattattctattttccggaaacaaggtgaatattcaaaaattcctgtcaaattgcctttcgccct

SEQ ID NO: 90092 - DNA, 75 bp, synthetic construct
  source 1..75: mol_type = other DNA
cccgagcgtcagcgaagtggccgtctggtttatctatcttatcccggcgctggtggcgtttgcgctgccaccacg

SEQ ID NO: 90093 - DNA, 75 bp, synthetic construct
  source 1..75: mol_type = other DNA
ggttattgctaccgctgcctcggcgttaatcacggcaacttattttaaaccgaaggtgctcagtgaggaagaaat

SEQ ID NO: 90094 - DNA, 75 bp, synthetic construct
  source 1..75: mol_type = other DNA
gttaaaaattgccctcggcgataaacgcggtatttgccgctttggttttgtgctgccgatggacgaatgccttgc

SEQ ID NO: 90095 - DNA, 75 bp, synthetic construct
  source 1..75: mol_type = other DNA
tactgtggtggaaaagtcagggtttaacagcacgttttctgacagggaaaaaaaccggtatgaaaacgtgatctc

SEQ ID NO: 90096 - DNA, 75 bp, synthetic construct
  source 1..75: mol_type = other DNA
aagcaggtaaggcgctggaaaatcagaacgtgagtgcctcagtggaacgaataattccatatgcgccagctctgc

SEQ ID NO: 90097 - DNA, 75 bp, synthetic construct
  source 1..75: mol_type = other DNA
cccgaatgatccgaaatgggtgaaagggatccagagtcgcgacgctgaggaccagaatcagcccaacgtgaaaca

SEQ ID NO: 90098 - DNA, 75 bp, synthetic construct
  source 1..75: mol_type = other DNA
accatttcgttgaaaccaccaaaatggttgtattaggttcagggctcaacgagaacttgaagatgttcatctctc

SEQ ID NO: 90099 - DNA, 75 bp, synthetic construct
  source 1..75: mol_type = other DNA
acttccgtactactgacgtgactggtaccatcgaactgccggaaggtgtagagatggtaatgccgggcgacaaca

SEQ ID NO: 90100 - DNA, 75 bp, synthetic construct
  source 1..75: mol_type = other DNA
gtcgaaagattgatagcttcggtgactggtcgccacagactgaacatccagctatcactattcagcgtaaagaac

SEQ ID NO: 90101 - DNA, 75 bp, synthetic construct
  source 1..75: mol_type = other DNA
gcgatattcagcgatatcagaaaagaaggatacacattacgcaatgggagacgcttgattatcagccctgacatt

SEQ ID NO: 90102 - DNA, 75 bp, synthetic construct
  source 1..75: mol_type = other DNA
tataattgattacattgaatactacaatcaccatcgcattaaagagaaactcgatggcatgagtccggttcaata

SEQ ID NO: 90103 - DNA, 75 bp, synthetic construct
  source 1..75: mol_type = other DNA
acccggatcaatcatcttgccgttcgtcggttaaccgagctttccggcggtcagcgccagcgcgcatttctggcg

SEQ ID NO: 90104 - DNA, 75 bp, synthetic construct
  source 1..75: mol_type = other DNA
tatcggccacgttgaccaaggtaaaaccactctgaccgctgcaatcacgaccgtactggctaaaacctacggcgg

SEQ ID NO: 90105 - DNA, 75 bp, synthetic construct
  source 1..75: mol_type = other DNA
caccgtgcagctcttgaactgaaccgtatacctgaattacttcatcgcatagatcactattctggcagaccgtta

SEQ ID NO: 90106 - DNA, 75 bp, synthetic construct
  source 1..75: mol_type = other DNA
tgaaattaggcgagcttacaatcgctcgacctatataaaacaaagagaagaactcatgcaatggtggggtaataa

SEQ ID NO: 90107 - DNA, 75 bp, synthetic construct
  source 1..75: mol_type = other DNA
tatcggccacgttgaccaaggtaaaacgactctgaccgctgcaatcaccaccgtactggctaaaacctacggcgg

SEQ ID NO: 90108 - DNA, 75 bp, synthetic construct
  source 1..75: mol_type = other DNA
tatcggccacgttgaccagggtaaaactactctgaccgctgcaatcactaccgtactggctaaaacctacggcgg

SEQ ID NO: 90109 - DNA, 75 bp, synthetic construct
  source 1..75: mol_type = other DNA
caactgaaggtggaactggcgaatctggaaacggagatggcgggttatctgaaggagttgggttatggtgcctaa

SEQ ID NO: 90110 - DNA, 75 bp, synthetic construct
  source 1..75: mol_type = other DNA
gaagaaagcattattactgacgatgaacacccttttgtggcacatcgaccgtcagcggtgcagagggaagaaaga

SEQ ID NO: 90111 - DNA, 75 bp, synthetic construct
  source 1..75: mol_type = other DNA
ctattgccgctctggttggggtaaacggttccggaaaatcgacgttgtttaaagcgattatgggatttgtgcgtc

SEQ ID NO: 90112 - DNA, 75 bp, synthetic construct
  source 1..75: mol_type = other DNA
atgcacaaatttactaaagccctggcagccattggtctggcagccgttatgtcacaatccgctatggcggagaac

SEQ ID NO: 90113 - DNA, 75 bp, synthetic construct
  source 1..75: mol_type = other DNA
actggctaagccgggcaccatcaagcctcacaccaagttcgaatctgaagtgtacattctgtccaaagatgaagg

SEQ ID NO: 90114 - DNA, 75 bp, synthetic construct
  source 1..75: mol_type = other DNA
tcaggtactggctaagccgggcaccatcaagccgcacaccaagttcgaatctgaagtgtacattctgtccaaaga

SEQ ID NO: 90115 - DNA, 75 bp, synthetic construct
  source 1..75: mol_type = other DNA
cagaagtacagccgccagcaggcacgggaggcagagcagaaaacccgtgcgtaccaggcgctggttgctcaggca

SEQ ID NO: 90116 - DNA, 75 bp, synthetic construct
  source 1..75: mol_type = other DNA
atacacgtctgttagagaattgccaccggatagtggcgctgtgttcggtattgatcgacatggtaaatccgtttc

SEQ ID NO: 90117 - DNA, 75 bp, synthetic construct
  source 1..75: mol_type = other DNA
atatgcgcaggtcagaaagagtttgatgcttttttaaaactggcagaaaaactgagagaaaaccctacgggtaat

SEQ ID NO: 90118 - DNA, 75 bp, synthetic construct
  source 1..75: mol_type = other DNA
aagaatcactaccccgcgttactgctggagcggttgcccgaactgcttggccgcatcggtgactatcagcagggc

SEQ ID NO: 90119 - DNA, 75 bp, synthetic construct
  source 1..75: mol_type = other DNA
ggcgaaatgacttatatattgagggtgattggtgattcaatgattgatgagtaccgtccgggagacatgattttt

SEQ ID NO: 90120 - DNA, 75 bp, synthetic construct
  source 1..75: mol_type = other DNA
atgacaccagaaattatccagcaacgcacaggtattgacataaacaatgtcgaacagggagatgatgcatggcaa

SEQ ID NO: 90121 - DNA, 75 bp, synthetic construct
  source 1..75: mol_type = other DNA
gacaacggacaaatcgtcgaaacccaggtggtgggagataaattaaccttttcctctgacgccggacgtgtgcta

SEQ ID NO: 90122 - DNA, 75 bp, synthetic construct
  source 1..75: mol_type = other DNA
cagatatgcccgctggtcagaaattgatattgaaaatgccatgtggaccattcctgccgaacgcgagcctctgcc

SEQ ID NO: 90123 - DNA, 75 bp, synthetic construct
  source 1..75: mol_type = other DNA
gaaacattcgatgaagagaatcaggttgaagttcaggaaaatgatccggaggaaatggaaggcgctgaacatcca

SEQ ID NO: 90124 - DNA, 75 bp, synthetic construct
  source 1..75: mol_type = other DNA
aaaaaatgaaagaagaggcaagaaaaaaactggccaagtatcatgaattacgtaaacagcgaggtatgagccttc

SEQ ID NO: 90125 - DNA, 75 bp, synthetic construct
  source 1..75: mol_type = other DNA
cttaagcaaagatccggcagatggtcgtaaagtgaaaggcgttattcactgggtgagcgcggcacatgcgctgcc

SEQ ID NO: 90126 - DNA, 75 bp, synthetic construct
  source 1..75: mol_type = other DNA
tatcggccacgttgaccaaggtaaaactacactgaccgctgcaatcaccaccgtactggctaaaacctacggcgg

SEQ ID NO: 90127 - DNA, 75 bp, synthetic construct
  source 1..75: mol_type = other DNA
taataaatacatatcacggcgatatttataactgcacaacaaataccgataatgctaaaacgccagacacaccga

SEQ ID NO: 90128 - DNA, 75 bp, synthetic construct
  source 1..75: mol_type = other DNA
atattaataaatctggtgtgctgacagaggctgccattgacgagccacgatttgaacgtgatggcctgcttattg

SEQ ID NO: 90129 - DNA, 75 bp, synthetic construct
  source 1..75: mol_type = other DNA
cagtttcacgtcggcacataccgacgcctggcgtcagcagggctacgaggacacgatgctgacgatggagcatat

SEQ ID NO: 90130 - DNA, 75 bp, synthetic construct
  source 1..75: mol_type = other DNA
ggcacggcaggcatatgactggctgagtctggcaccactctttctggatactgaaacgacaggactggataatac

SEQ ID NO: 90131 - DNA, 75 bp, synthetic construct
  source 1..75: mol_type = other DNA
cgatacctgctgaacgagaacccctaaagggtgttaaacactcacatcgtggttctaaaatgcgtagccctcatc

SEQ ID NO: 90132 - DNA, 75 bp, synthetic construct
  source 1..75: mol_type = other DNA
tatctgacactatcgcgattttaggctgtggcctggacgtgcaatggctatccagttctgttctggatgaaaaac

SEQ ID NO: 90133 - DNA, 75 bp, synthetic construct
  source 1..75: mol_type = other DNA
gtgaatgcaaagcgtgtttaccggataatgagcgaaaataacctgttattgttacatgacaaaccatcacgacag

SEQ ID NO: 90134 - DNA, 75 bp, synthetic construct
  source 1..75: mol_type = other DNA
tgggtttagggcaatggcctgtagtgcattgatcgaatcaggtttatggtcaagagatgctgttgagcgtcagat

SEQ ID NO: 90135 - DNA, 75 bp, synthetic construct
  source 1..75: mol_type = other DNA
aaggtcttttggaagctttcgaggcgtctgaagagccgcatactgatataaagcagctgcagctggctgggtatg

SEQ ID NO: 90136 - DNA, 75 bp, synthetic construct
  source 1..75: mol_type = other DNA
caccggttccgctgtgtgccgcacctgaccggacggcgctttgaacacggtgtgacggactgttacaccctgttc

SEQ ID NO: 90137 - DNA, 75 bp, synthetic construct
  source 1..75: mol_type = other DNA
acttttcattgctgaaaaaattgttccaggcaatgaacctctgccagatccccggacgtgcaggagcactgctta

SEQ ID NO: 90138 - DNA, 75 bp, synthetic construct
  source 1..75: mol_type = other DNA
agcgagcgctacgaagcctcggcggaatttacccaggtctggcggcgcttattgctgggggaaaccgtcaatttc

SEQ ID NO: 90139 - DNA, 75 bp, synthetic construct
  source 1..75: mol_type = other DNA
aacaagtgcgggcgaaagctgccgcgcatggacgcaaaattcgtttcggtattcgtctgcatgtgattgttcgtg

SEQ ID NO: 90140 - DNA, 75 bp, synthetic construct
  source 1..75: mol_type = other DNA
cgggggcaatcctcgcgaccggtcatcgcgcccataacccatgggggctggcaattgtgactgcgcccaatgtgg

SEQ ID NO: 90141 - DNA, 75 bp, synthetic construct
  source 1..75: mol_type = other DNA
aactgtccgaagtttggcagttatttggtgatatgcctgatgacactacgttaggtgtcgatttagcggcactct

SEQ ID NO: 90142 - DNA, 75 bp, synthetic construct
  source 1..75: mol_type = other DNA
gctttacaaccaaggggttctgttgcccgtattgcccgggagcatgatatcaatgataatcttctgttcaaatgg

SEQ ID NO: 90143 - DNA, 75 bp, synthetic construct
  source 1..75: mol_type = other DNA
cgacgcttcttcgccatatatcgacaatcaacgggtttgacaatctgatggctcagccgttgttgtcagatgagc

SEQ ID NO: 90144 - DNA, 75 bp, synthetic construct
  source 1..75: mol_type = other DNA
tggaaaaagacgtattccctgccatcggggagattcctgtccagcaaataaaagcccgaacactagttgaagccc

SEQ ID NO: 90145 - DNA, 75 bp, synthetic construct
  source 1..75: mol_type = other DNA
cagacagaaaacctgttatcggtcaacgaacaggaaaaaacgataaaaccaactggattatttttatgaaagagg

SEQ ID NO: 90146 - DNA, 75 bp, synthetic construct
  source 1..75: mol_type = other DNA
caatcccggcagaacgagaagctattgaaggagtgaagcattcggaacgtggctcgaaaatgcgtactcctcatt

SEQ ID NO: 90147 - DNA, 75 bp, synthetic construct
  source 1..75: mol_type = other DNA
gaaaacgccattcagctgatcgaagatggcctgcgcgaagtgtcgtgtggctatgacgcggaatataagcagact

SEQ ID NO: 90148 - DNA, 75 bp, synthetic construct
  source 1..75: mol_type = other DNA
tatcggccacgttgaccatggtaaaactacgctgaccgctgcaatcactaccgtactggctaaaacctacggcgg

SEQ ID NO: 90149 - DNA, 75 bp, synthetic construct
  source 1..75: mol_type = other DNA
tttccgctctatggcctgtagtgccttaatcgaatccggcttatggtcaagggatgctgttgagcgtcagatgag

SEQ ID NO: 90150 - DNA, 75 bp, synthetic construct
  source 1..75: mol_type = other DNA
gctgcagtggtgggcagattttcttgatgtaaatcgggtgaagggcgtcagcccatttgattttgccaaggagaa

SEQ ID NO: 90151 - DNA, 75 bp, synthetic construct
  source 1..75: mol_type = other DNA
atggcatttggggtttatcctgaaacgtcactggctgatgctcgtcaaaaaagggaagaggccagaaaacttgtt

SEQ ID NO: 90152 - DNA, 75 bp, synthetic construct
  source 1..75: mol_type = other DNA
tgaagtggatatctggggacaaacatccctgcccggttgttttgcggtgggagaagtagccggaactcacggcgt

SEQ ID NO: 90153 - DNA, 75 bp, synthetic construct
  source 1..75: mol_type = other DNA
tgaagtacggcgggcgtataatcgttctatttatttagaacaacgcagagaattgatgtcatggtggggtataaa

SEQ ID NO: 90154 - DNA, 75 bp, synthetic construct
  source 1..75: mol_type = other DNA
atgaaaccccggcgcaatgaacaggaaccagacaaatcacaacccccggtaaaacaacagcaaacgctcaatcgc

SEQ ID NO: 90155 - DNA, 75 bp, synthetic construct
  source 1..75: mol_type = other DNA
atggcaacgacgaacgcattctgtctggcgtcaccgccactggcacgcatctgccttcacggggatttgcaacga

SEQ ID NO: 90156 - DNA, 75 bp, synthetic construct
  source 1..75: mol_type = other DNA
ttttctgccaccacgatgctgttttcactgggggccagcatgatactgggtggtgtggcacagatgcttgccccg

SEQ ID NO: 90157 - DNA, 75 bp, synthetic construct
  source 1..75: mol_type = other DNA
catgatggcgatggtctttttctgctcgttaaaacgaacggtaagaagttatggcgtttccgttatcaacgtcca

SEQ ID NO: 90158 - DNA, 75 bp, synthetic construct
  source 1..75: mol_type = other DNA
cgctgtgaagaaaaagcatattggtatgatgagaaactaatagtccctcaaagctctacagtggaaatgcctaat

SEQ ID NO: 90159 - DNA, 75 bp, synthetic construct
  source 1..75: mol_type = other DNA
tgtctggaacggctggagcatgtacgcgacagtcagctatccacttcttttcgctttatggcgagccatgaaggg

SEQ ID NO: 90160 - DNA, 75 bp, synthetic construct
  source 1..75: mol_type = other DNA
tgcccgtttattcgcgtcgaacaaccgggattctcaaatcagcaagtgtgtgaagggaagaccgccaccatttcc

SEQ ID NO: 90161 - DNA, 75 bp, synthetic construct
  source 1..75: mol_type = other DNA
gcgcaggtctacatcgaggggcaactccgtacccgtagctgggaagataacggtattacccgttacgtcactgaa

SEQ ID NO: 90162 - DNA, 75 bp, synthetic construct
  source 1..75: mol_type = other DNA
aaaaactccaggctgttgctgaacaccttcgggaagccgaaggctgggaatggtgcgccggacgtatggagcctg

SEQ ID NO: 90163 - DNA, 75 bp, synthetic construct
  source 1..75: mol_type = other DNA
agaaaccgccgcaaaccagtgccctatgaactcatcccgggttcgctggcgcgtatgttgtgtgccgactggtgg

SEQ ID NO: 90164 - DNA, 75 bp, synthetic construct
  source 1..75: mol_type = other DNA
acctggtcaaagtccatcgggtggataatgtgccggtcggtctggcgatgccactttcactgacgacacgtatcg

SEQ ID NO: 90165 - DNA, 75 bp, synthetic construct
  source 1..75: mol_type = other DNA
gcgacacgctggatatggaagatgtggtaaacgccagcagcagcaacccggcgcatcgccgcaatgagatgatgg

SEQ ID NO: 90166 - DNA, 75 bp, synthetic construct
  source 1..75: mol_type = other DNA
cgcagttcgtcaggcaaagagaaaggccaacatgacatacatgaaggcgtatcaaaaagcatggaaagaacaccg

SEQ ID NO: 90167 - DNA, 75 bp, synthetic construct
  source 1..75: mol_type = other DNA
gcggcaactgccctgattgtggtgcggtgatgggtgacgcaacataccaggaaatattcgatggagagaatcagc

SEQ ID NO: 90168 - DNA, 75 bp, synthetic construct
  source 1..75: mol_type = other DNA
cagaacaccgcaattatccgtattggaggccagactacagccgggttgcgtcatttatttggtcatgtcaggaat

SEQ ID NO: 90169 - DNA, 75 bp, synthetic construct
  source 1..75: mol_type = other DNA
atgctggttggctcccggcgaatctcccaggacatcagtacccgtgatgagggcggagacgggaaagtggtggtt

SEQ ID NO: 90170 - DNA, 75 bp, synthetic construct
  source 1..75: mol_type = other DNA
tttttgaagccggtgaggccggtcgtggtgcaccggtacagatacgtgcacttgagcagtggatgatcccgaaca

SEQ ID NO: 90171 - DNA, 75 bp, synthetic construct
  source 1..75: mol_type = other DNA
ccgcagggacctaaaggggatacgggagccgcaggcccggcaggaccgcagggacctaaaggggatacgggagct

SEQ ID NO: 90172 - DNA, 75 bp, synthetic construct
  source 1..75: mol_type = other DNA
agaacagcttatgaaattaacgaagagccgaccgcctatggcgatcacggcattcgtatttatggcatctggtca

SEQ ID NO: 90173 - DNA, 75 bp, synthetic construct
  source 1..75: mol_type = other DNA
tgtgttttatgcgcaaaaaagatcgccgagccattactgctttgttgcgtaagttttccattcgtgaagaccgcg

SEQ ID NO: 90174 - DNA, 75 bp, synthetic construct
  source 1..75: mol_type = other DNA
agcatcacgatagcgataatgaaactggcgagacggcagatcactcaattaaggtgaacggtcatcaagaaatca

SEQ ID NO: 90175 - DNA, 75 bp, synthetic construct
  source 1..75: mol_type = other DNA
gataagttgcttgctgcctctcgcggagaatttgttgcagggattagcgaccctaatgatccgaaatgggttaag

SEQ ID NO: 90176 - DNA, 75 bp, synthetic construct
  source 1..75: mol_type = other DNA
atgagtcatgacgatatgaacaattgcagcggctttaacgaggccgccgcagcattttcatggaacggctcgaaa

SEQ ID NO: 90177 - DNA, 75 bp, synthetic construct
  source 1..75: mol_type = other DNA
catcagaagatgttgctaaaaatatcataacagccatcgtaaaaggcgaagtattcgcaacaaaaataacctact

SEQ ID NO: 90178 - DNA, 75 bp, synthetic construct
  source 1..75: mol_type = other DNA
tcggtgagtgccgtgaggatgccggaacataccgctgtctgccggagccggaagcggtgctgacggaggcagaag

SEQ ID NO: 90179 - DNA, 75 bp, synthetic construct
  source 1..75: mol_type = other DNA
tggaggcgactggtttttaccgtgtcgcactgacagaggcgcagccgggcgatgtgctgctgtgctgctttggtt

SEQ ID NO: 90180 - DNA, 75 bp, synthetic construct
  source 1..75: mol_type = other DNA
acgctgacggatattaccaaaaatgcaacgtatggcgttgagatagaaagtctggtgctggagataaatgcaccg

SEQ ID NO: 90181 - DNA, 75 bp, synthetic construct
  source 1..75: mol_type = other DNA
atgtcagttacagagtctaaggcaaaaacggggcgtaaatccagccgtaaactgtcaaaaacacaggaaacggca

SEQ ID NO: 90182 - DNA, 75 bp, synthetic construct
  source 1..75: mol_type = other DNA
agcacagtctgatttttgccagcgttatcggcgttatcacgttgttgcaggcgtatgtgtttactggaatgttgg

SEQ ID NO: 90183 - DNA, 75 bp, synthetic construct
  source 1..75: mol_type = other DNA
actgctggcatggacgctctgcctgaatgtgtttggcagcggagcgtacagtaaaccagcacaaatcagcctgga

SEQ ID NO: 90184 - DNA, 75 bp, synthetic construct
  source 1..75: mol_type = other DNA
ctgcttttattcgtgcactgtctgatttgctacttgatagaaatggtgtttctattattgcaactcactcacctg

SEQ ID NO: 90185 - DNA, 75 bp, synthetic construct
  source 1..75: mol_type = other DNA
attgtaccgcgcgagcaatatatggcggcgatgacctttgttacgctgcccgggcaagtcggtccgctgcttggt

SEQ ID NO: 90186 - DNA, 75 bp, synthetic construct
  source 1..75: mol_type = other DNA
gagttttctgactgggaagatagccgtcggcgaattgatttattggcaatcgataaacaggcaaatttagtggtt

SEQ ID NO: 90187 - DNA, 75 bp, synthetic construct
  source 1..75: mol_type = other DNA
tccttcgcggcggcagtattccgtcaggagcaggcctgcgtatcttctatcggaaccagcgtttgcaggaagatg

SEQ ID NO: 90188 - DNA, 75 bp, synthetic construct
  source 1..75: mol_type = other DNA
tgcgccagagcagcatttaacgaccctgactggtttgtgaaaaaccaccacgcagttcgtcaggcaaagagaaag

SEQ ID NO: 90189 - DNA, 75 bp, synthetic construct
  source 1..75: mol_type = other DNA
agaaaccacgtaaacagcattcgcctgaattccgcagcgaagccctgaagcttgcggagcgcatcggcgttgccg

SEQ ID NO: 90190 - DNA, 75 bp, synthetic construct
  source 1..75: mol_type = other DNA
cggcattgcggaaatcagccctgtccccgatgctggcgacactcccgctcatctttctgctgactcctctggtct

SEQ ID NO: 90191 - DNA, 75 bp, synthetic construct
  source 1..75: mol_type = other DNA
tgatctttctgaggcagaagaagcacaggaacaacctaaaggccataaacagccttcttttgatgttcttgatga

SEQ ID NO: 90192 - DNA, 75 bp, synthetic construct
  source 1..75: mol_type = other DNA
gaccagccagtaagcatgggaacttatgacgccaatgattttttaaatgtgggagatgtttctggcagtcataca

SEQ ID NO: 90193 - DNA, 75 bp, synthetic construct
  source 1..75: mol_type = other DNA
cgctgggttttaatcgtacctgggaggaatggcagcgcgaggaagatgcacgaacacacaccaccgagaggagac

SEQ ID NO: 90194 - DNA, 75 bp, synthetic construct
  source 1..75: mol_type = other DNA
tgaccgtactgaaggagccacgctggagttttacgaagctgaggcgaaaaagcaggcgaagcagtttttcatgga

SEQ ID NO: 90195 - DNA, 75 bp, synthetic construct
  source 1..75: mol_type = other DNA
acaccgttcgtcggcgtgccggtgggtattttcgtgggcatttatgtctttgccaaagtggttcgactgatttca

SEQ ID NO: 90196 - DNA, 75 bp, synthetic construct
  source 1..75: mol_type = other DNA
tcttgttgaggtgagcatacccggagaactgctgacagatttccggcagatacagaataatgtggctgatgacct

SEQ ID NO: 90197 - DNA, 75 bp, synthetic construct
  source 1..75: mol_type = other DNA
ttgatacagccctcaacacggggttggccctgcttggttggttttacatcatgttcagcgcggggaagtgggtga

SEQ ID NO: 90198 - DNA, 75 bp, synthetic construct
  source 1..75: mol_type = other DNA
ttgcaattattggatcatttatttttgtttttaatggttactctttggattccggctcatttagttatacaggct

SEQ ID NO: 90199 - DNA, 75 bp, synthetic construct
  source 1..75: mol_type = other DNA
ttcttccgttcgctctcatacaccatgggcgtgacgctacacctgaaaaccaaaggtaaaaacgatcaccaccgt

SEQ ID NO: 90200 - DNA, 75 bp, synthetic construct
  source 1..75: mol_type = other DNA
aatttcagcaccgacagtaatggtttccagaactactaccgcgatttagctcagcgagtgaaaaatcaggatatt

SEQ ID NO: 90201 - DNA, 75 bp, synthetic construct
  source 1..75: mol_type = other DNA
atgttaattttccagattgccaataagcacctcagcaaagctgtgtactgcaaaggcggcagtgatagcggagca

SEQ ID NO: 90202 - DNA, 75 bp, synthetic construct
  source 1..75: mol_type = other DNA
cgatagaagctgttgtgaccggtgggagagcagaacattttgctaaagaaattgcagcatcgggtgatatagcaa

SEQ ID NO: 90203 - DNA, 75 bp, synthetic construct
  source 1..75: mol_type = other DNA
gcaaacagcctgatgcccttcgctacgaccgccagactatttttggccttgtccgtgaacgtccgatcgacattc

SEQ ID NO: 90204 - DNA, 75 bp, synthetic construct
  source 1..75: mol_type = other DNA
ttatcgcaggccaactgtggtgggataaagtggcctcgcagccgccgcaactctctgaagccgtgcccgtaacgc

SEQ ID NO: 90205 - DNA, 75 bp, synthetic construct
  source 1..75: mol_type = other DNA
aaatcctggaactggctggcttcttggattcctacattccggaaccagagcgtgcaattgacaagccgttcctgc

SEQ ID NO: 90206 - DNA, 75 bp, synthetic construct
  source 1..75: mol_type = other DNA
tgatgcactgctgcaattccgggaatttatcgacgaaaactccggtgaattttttgttcaggtctggggtaacgg

SEQ ID NO: 90207 - DNA, 75 bp, synthetic construct
  source 1..75: mol_type = other DNA
ccaccgagctgccgcggcgcgaactgcgcctgcaccgcgcccgtgcgcccaccaccgcgcagttgacccagctgg

SEQ ID NO: 90208 - DNA, 75 bp, synthetic construct
  source 1..75: mol_type = other DNA
aacgcgaaaaatagcgagacagccgcaaagacgagcgaaaccaacgcaaagtccagccagacggcagcgaagacc

SEQ ID NO: 90209 - DNA, 75 bp, synthetic construct
  source 1..75: mol_type = other DNA
accaggtacaacagccaggatagcgacaaaaggcgacctgatgatagtgatgttccgacaggagagagcagagaa

SEQ ID NO: 90210 - DNA, 75 bp, synthetic construct
  source 1..75: mol_type = other DNA
atgcctgtaacgaagtgtgaaccagaaactacccgcaaagcaagccgtaaatctgtaaaaacgcaggaaactgca

SEQ ID NO: 90211 - DNA, 75 bp, synthetic construct
  source 1..75: mol_type = other DNA
cagcgttttaacccagacatggtcattctggcagatgtcagcgcccagcccacccacatcagcaagccgctgatg

SEQ ID NO: 90212 - DNA, 75 bp, synthetic construct
  source 1..75: mol_type = other DNA
ttcctgaatcagaaactgaacatgatggaatgcctgttttctggagattccaggcgacagttgaagaagatggaa

SEQ ID NO: 90213 - DNA, 75 bp, synthetic construct
  source 1..75: mol_type = other DNA
gtacttttcctcgctggataacatgattgctcaggggaacccgatgccggtgccttacggtgaaatgctggttgg

SEQ ID NO: 90214 - DNA, 75 bp, synthetic construct
  source 1..75: mol_type = other DNA
gaaagaggtcgatttactgcttcgcggcggcagtattccgtcaggagcaggcctacgtatcttctatcggaacca

SEQ ID NO: 90215 - DNA, 75 bp, synthetic construct
  source 1..75: mol_type = other DNA
ggaataatacgattgtgttcaaagtcgacaaaccactgaatgcagcctttccttcagataccagcgtctcagcgt

SEQ ID NO: 90216 - DNA, 75 bp, synthetic construct
  source 1..75: mol_type = other DNA
ccacagggaccggcgggagagcggggagctcaggggcctcagggtgtagctggtcctgtcggcccggcaggtgca

SEQ ID NO: 90217 - DNA, 75 bp, synthetic construct
  source 1..75: mol_type = other DNA
tgtcatggcggaaaccacgcagctggtgaccgacaccaaagcctttaccgacgctattaaagcaggcgatatcga

SEQ ID NO: 90218 - DNA, 75 bp, synthetic construct
  source 1..75: mol_type = other DNA
agcaaataaccgtaggtgatgatgttattaaaatgccatccgataaggttgttagcttcaaacgcgcatcaggtg

SEQ ID NO: 90219 - DNA, 75 bp, synthetic construct
  source 1..75: mol_type = other DNA
cgcaacgggagccgggattgcccgcgactgtgccctgcgcgggctgcgcgtgattttggttgagcgccacgacat

SEQ ID NO: 90220 - DNA, 75 bp, synthetic construct
  source 1..75: mol_type = other DNA
ccatcactggcaggctgagtctgtggagttttcactggtaccgggacagggatttacgctgaatctgtcactgac

SEQ ID NO: 90221 - DNA, 75 bp, synthetic construct
  source 1..75: mol_type = other DNA
cggtaattggttcgaaacaatatgccgtgaatttattatggggaagttctcaggatacagaaacaacaaatcagg

SEQ ID NO: 90222 - DNA, 75 bp, synthetic construct
  source 1..75: mol_type = other DNA
ggatgactggtggcgcaacggtcagaacctgtacctggacaacctggcggaaaacggcttttaccgggtgtctcc

SEQ ID NO: 90223 - DNA, 75 bp, synthetic construct
  source 1..75: mol_type = other DNA
cggcaggcccaacccaacctggacaaatgcgacggtaagacaaagtagtgattacctggtcggcatgtttgctgc

SEQ ID NO: 90224 - DNA, 75 bp, synthetic construct
  source 1..75: mol_type = other DNA
cagcgggctatggttataggctcttactccgaactgtcactatcaaaagccagagaaacagcaaaagagctgtca

SEQ ID NO: 90225 - DNA, 75 bp, synthetic construct
  source 1..75: mol_type = other DNA
aatgtcaccgcagccagtttggagaagcgcagaaaaacctgaagaagaaattcaaacgctattatcagtttggtt

SEQ ID NO: 90226 - DNA, 75 bp, synthetic construct
  source 1..75: mol_type = other DNA
ggaaaccaggggcggctaaataaagcctttgaggaaaaatttccgctgaaagaattaaataatccagagcatgac

SEQ ID NO: 90227 - DNA, 75 bp, synthetic construct
  source 1..75: mol_type = other DNA
gttaatgaatatactcttaatattcttggccaaaatgtttcaagagtcacaacggggaaaaaaccgtatgattta

SEQ ID NO: 90228 - DNA, 75 bp, synthetic construct
  source 1..75: mol_type = other DNA
ctgaaaaggcggcgaaggttccacgacctgatacccgtcggtggctgctgtttctggcgtttgtcatgtcaggag

SEQ ID NO: 90229 - DNA, 75 bp, synthetic construct
  source 1..75: mol_type = other DNA
atttacgcggacggctttatctgcatcgcggcatcgagcgcacttatacccgtgacttgctcgtggaagtttttc

SEQ ID NO: 90230 - DNA, 75 bp, synthetic construct
  source 1..75: mol_type = other DNA
aagctgacgtcattatctccaatcgtatggcagaagagcttaaggatgtggcagataaggtatacacccgcgatc

SEQ ID NO: 90231 - DNA, 75 bp, synthetic construct
  source 1..75: mol_type = other DNA
aaatatattgacgacatatttgtttatgtcatcaggagcggtgacagccagaaatgttcaaaccttttctccaac

SEQ ID NO: 90232 - DNA, 75 bp, synthetic construct
  source 1..75: mol_type = other DNA
atggaacttaaaaaattgatggaacatatttctattatccctgattacagacaagcctggaaagtggaacataaa

SEQ ID NO: 90233 - DNA, 75 bp, synthetic construct
  source 1..75: mol_type = other DNA
cggtcacgcaggctcctgcacctacggccttgttgcaccatgggttactgcgtcaggcagcactgacgccacagg

SEQ ID NO: 90234 - DNA, 75 bp, synthetic construct
  source 1..75: mol_type = other DNA
accatgatggatgcggtgaacgccgaagaagtggtgcgcattgaaaccgggcaggcctttcgtgaccatttcggc

SEQ ID NO: 90235 - DNA, 75 bp, synthetic construct
  source 1..75: mol_type = other DNA
agaaaacgtcaggtctggttgtgattggcgatggcaataccgttaatatgaatggtggacttgaactgattggag

SEQ ID NO: 90236 - DNA, 75 bp, synthetic construct
  source 1..75: mol_type = other DNA
tgacaacggaatgcgcgcagtcagtctgcaacaacttatgacatggaaggacacccgatggatacccaacgattc

SEQ ID NO: 90237 - DNA, 75 bp, synthetic construct
  source 1..75: mol_type = other DNA
gcaggcggtgacacaggcgattgccggattaagtgaacgaaaagtgcagtttacgtacacggacgtgctggccag

SEQ ID NO: 90238 - DNA, 75 bp, synthetic construct
  source 1..75: mol_type = other DNA
aattatgaactggaaaaagcaaaactccacaacataatgaccgtcgctaaattatggcacatgtttatggactcc

SEQ ID NO: 90239 - DNA, 75 bp, synthetic construct
  source 1..75: mol_type = other DNA
gtggtaacccaccattatattcgtgcggtcttagtgcgctgtaatatccaacgatatagtccgttattgcgtgag

SEQ ID NO: 90240 - DNA, 75 bp, synthetic construct
  source 1..75: mol_type = other DNA
aaatgccggtggcagacggcgagcgtctgagggtgacagggaaaattcccggactccgcgtctccggcggtgacc

SEQ ID NO: 90241 - DNA, 75 bp, synthetic construct
  source 1..75: mol_type = other DNA
cgatccatccgtgggtatcaacgtttacggcagtgataataacgtgacgctggatggaaagttaactgttgtatc

SEQ ID NO: 90242 - DNA, 75 bp, synthetic construct
  source 1..75: mol_type = other DNA
attatctaccatacgatgttcgacaacatgcaaaaagcgattgacctgaatcgtcctgcctgtcaggacaccggg

SEQ ID NO: 90243 - DNA, 75 bp, synthetic construct
  source 1..75: mol_type = other DNA
tttacgcctggcttcagcagccgcattctcaacgccatcaggcagacctgagactgacaggacagattaaacagt

SEQ ID NO: 90244 - DNA, 75 bp, synthetic construct
  source 1..75: mol_type = other DNA
atgcagaagcacaaaagcctgcgcaaagcgctgattaacgccgtgccgcagctccgaaacaaccccgatatgctg

SEQ ID NO: 90245 - DNA, 75 bp, synthetic construct
  source 1..75: mol_type = other DNA
gtgtgtctcacactgttgatattcacttatctgacacgaaaatcgctgtgcgagattcgttacagagacggacac

SEQ ID NO: 90246 - DNA, 75 bp, synthetic construct
  source 1..75: mol_type = other DNA
gaatgaagacgactgcaaaataagaagaggaaatgcagcagaattattttcagggatacggcacattgctattaa

SEQ ID NO: 90247 - DNA, 75 bp, synthetic construct
  source 1..75: mol_type = other DNA
tcatcgcagacgttccagactcccgccgccgcgacctcgacaacatcctgaaaggtttactcgactcccttatcc

SEQ ID NO: 90248 - DNA, 75 bp, synthetic construct
  source 1..75: mol_type = other DNA
gaagaattacgccgttgttactccatttgccgcagctatctgcctggcgaaattagtgtggcggtgaaagccatt

SEQ ID NO: 90249 - DNA, 75 bp, synthetic construct
  source 1..75: mol_type = other DNA
caaatgggctggatatttagcgccggaatactcggtttgctacccggcgcgttggttggcggaatgctggcggac

SEQ ID NO: 90250 - DNA, 75 bp, synthetic construct
  source 1..75: mol_type = other DNA
atccgctatatctcggctttgttattgtgccgttgttggtgtggccgacggtggttgttgttggtatcacactga

SEQ ID NO: 90251 - DNA, 75 bp, synthetic construct
  source 1..75: mol_type = other DNA
tctggagtcgctgttgattgttgatatcggtggaacgacccttgatattgcacatgtccgcagcaaaatgtcagg

SEQ ID NO: 90252 - DNA, 75 bp, synthetic construct
  source 1..75: mol_type = other DNA
gatgcctatggttcgcaatattccatgcgtatctggctggacccggcgaaactcaacagtttccagatgacggct

SEQ ID NO: 90253 - DNA, 75 bp, synthetic construct
  source 1..75: mol_type = other DNA
gaaggcgcgattaagcaaaatatcccgaccctgtttaccgactccactgaagcagaagcgattaaactttttgca

SEQ ID NO: 90254 - DNA, 75 bp, synthetic construct
  source 1..75: mol_type = other DNA
agtcggccaaacctgctgacaaggattacaaactttctgatggtcaaggactttaccttcttatcaagaaatctg

SEQ ID NO: 90255 - DNA, 75 bp, synthetic construct
  source 1..75: mol_type = other DNA
ggtattcaaggcagggttaagacgtaagatgcgaaaagcagccatggacagaaactacctggcgtcagtccttgc

SEQ ID NO: 90256 - DNA, 75 bp, synthetic construct
  source 1..75: mol_type = other DNA
atatttctattatccccgattacagacaagcctggaaagtggaaaataaattatcggatattctactgttgacta

SEQ ID NO: 90257 - DNA, 75 bp, synthetic construct
  source 1..75: mol_type = other DNA
tgaaaagagtcacggcagagaagaaatccgtcttcacattgtttgcgatgtccctgatgaacttattgatttcac

SEQ ID NO: 90258 - DNA, 75 bp, synthetic construct
  source 1..75: mol_type = other DNA
aagccgacgtcattatctccaaccgtatggcagaagagcttagggatgtggcagataaggtctacacccgcgatc

SEQ ID NO: 90259 - DNA, 75 bp, synthetic construct
  source 1..75: mol_type = other DNA
gagggcggcggcgcgatggggtgaagtcatgcagctggtggagacagacaaggaacggcatcacatcacgatgcg

SEQ ID NO: 90260 - DNA, 75 bp, synthetic construct
  source 1..75: mol_type = other DNA
tcgggcctgcttatgaagataaagtagcacgtcgcggtctgcgtgttggcgaccttttcgacaaagaaaccttcg

SEQ ID NO: 90261 - DNA, 75 bp, synthetic construct
  source 1..75: mol_type = other DNA
aatgcgtaggaatttgttcttttcctaatgcagaaaagaacgtcagaaaacatttggagtcttttgtcagtggac

SEQ ID NO: 90262 - DNA, 75 bp, synthetic construct
  source 1..75: mol_type = other DNA
acatgaaattgaactctattccgtggtatctataatttctggcgaatgggttgttaaatatgaccagggcttagc

SEQ ID NO: 90263 - DNA, 75 bp, synthetic construct
  source 1..75: mol_type = other DNA
gcggagatccgcaaaatctacgagaacggtcgcggttctgtgcgtatgcgcgcggtgtggaagaaagaagatggc

SEQ ID NO: 90264 - DNA, 75 bp, synthetic construct
  source 1..75: mol_type = other DNA
atgaatcctgagcgttctgaacgcattgaaatccccgtattgccgctgcgcgatgtggtggtttatccgcacatg

SEQ ID NO: 90265 - DNA, 75 bp, synthetic construct
  source 1..75: mol_type = other DNA
cttgttctgcacgatatatcaggcaatccgatcaaagtttctgaagggatggaatttgtgcaatcaggtacaaac

SEQ ID NO: 90266 - DNA, 75 bp, synthetic construct
  source 1..75: mol_type = other DNA
aaatgtcagatgaagatgaatatcggacagtggccccggtgaacgtttgggataatttccgcttcacatacttca

SEQ ID NO: 90267 - DNA, 75 bp, synthetic construct
  source 1..75: mol_type = other DNA
tgcattgcggaaagatttccctgttctttctcaccagcatgctggagaacctggctcaccacgaattctttgcct

SEQ ID NO: 90268 - DNA, 75 bp, synthetic construct
  source 1..75: mol_type = other DNA
cagcatattgccaaatctatttatccgcatgagcccctccctcaggcgatccataaaagtattcttgatgacgat

SEQ ID NO: 90269 - DNA, 75 bp, synthetic construct
  source 1..75: mol_type = other DNA
atgaaatcgcacctgatgaacaaaaaaaacatggcgaaaagctgccgtgtaagtgcgacagcgttcgacaagtgg

SEQ ID NO: 90270 - DNA, 75 bp, synthetic construct
  source 1..75: mol_type = other DNA
tgaagccgaataaagcgcgtctgcgtttagattacacgcctgcaagtcccagtttgcgaggtattcggcttcctg

SEQ ID NO: 90271 - DNA, 75 bp, synthetic construct
  source 1..75: mol_type = other DNA
aacttaaaaacgagcgcgaacgcggcgaggtgattgatacaaagttttgcatctacgcgatttcaaaactagcga

SEQ ID NO: 90272 - DNA, 75 bp, synthetic construct
  source 1..75: mol_type = other DNA
ccatacccgggccattcacaacatcgacaccgacattaagctcaatcgcgcattgtgggtgatggcggaaacgct

SEQ ID NO: 90273 - DNA, 75 bp, synthetic construct
  source 1..75: mol_type = other DNA
aatttaaaaaatcggcccgtaccgtcggtgacgtactgggtaaataccatccgcacggcgatagcgcctgttatg

SEQ ID NO: 90274 - DNA, 75 bp, synthetic construct
  source 1..75: mol_type = other DNA
cgagccgctcaccggcaaattaacgttgccgcctggagcgaccgttgaccatatgctgatggaaagcgacgatca

SEQ ID NO: 90275 - DNA, 75 bp, synthetic construct
  source 1..75: mol_type = other DNA
cgaatggagaaagagcaatcggctacaaacaacgttttaaaatgccctacattggcttgactggaagttatcgtt

SEQ ID NO: 90276 - DNA, 75 bp, synthetic construct
  source 1..75: mol_type = other DNA
atgaaaaaaatcgcgcttattatcggcagcatgatcgcgggcggtattatttctgcggcaggttttacctggttt

SEQ ID NO: 90277 - DNA, 75 bp, synthetic construct
  source 1..75: mol_type = other DNA
gccaaactggaagagatgaagattcgcggtgagcagagtgagctggaaaaagagcgcgaccagttgcagggcatt

SEQ ID NO: 90278 - DNA, 75 bp, synthetic construct
  source 1..75: mol_type = other DNA
cgccaggaccgttgaaggcgccattcagttttaccgggccagatggtcatactgcaagagcgtaccttgattcat

SEQ ID NO: 90279 - DNA, 75 bp, synthetic construct
  source 1..75: mol_type = other DNA
gcgctgccggatgtggtgacctgtattgactgtcagcagatgcgggaacgcaggaggaaaacgtgtcctgggaaa

SEQ ID NO: 90280 - DNA, 75 bp, synthetic construct
  source 1..75: mol_type = other DNA
ggatagcaaagcttggtctcgacgattcgctttacagcacacattccatgagaagaacaaaaccttaccttatct

SEQ ID NO: 90281 - DNA, 75 bp, synthetic construct
  source 1..75: mol_type = other DNA
ggagtatcgcgaaattcacattgcgttgctgacgggtttgctttcccatatcggcatgaaagatgccgataaaca

SEQ ID NO: 90282 - DNA, 75 bp, synthetic construct
  source 1..75: mol_type = other DNA
tgtaacttccggcacatgcgagtatgtgatcaacacaaccaaaggtgggaaagttatagccaaaacgctgaacaa

SEQ ID NO: 90283 - DNA, 75 bp, synthetic construct
  source 1..75: mol_type = other DNA
ccggcaaccggtgtggagtggcagtgctgaccggtgtccgggcggatgaatccctcaaccgctttatgggactgg

SEQ ID NO: 90284 - DNA, 75 bp, synthetic construct
  source 1..75: mol_type = other DNA
tcgattcagaatacaaaccacacttgataataatcttgatttttatgatcaggagttattgatgttgaataggtg

SEQ ID NO: 90285 - DNA, 75 bp, synthetic construct
  source 1..75: mol_type = other DNA
accgtcgtttaagtggcccgtatgcgtccacgtatgcgctggccgagcaggtcagtaaactgcttcagcgctgca

SEQ ID NO: 90286 - DNA, 75 bp, synthetic construct
  source 1..75: mol_type = other DNA
attgaagaaagcattatcgatgataatgatgattttatcaaaacaacgctgtatttaacagctacgcaaagaagt

SEQ ID NO: 90287 - DNA, 75 bp, synthetic construct
  source 1..75: mol_type = other DNA
gtgaattgtatatggatgtcacagagtcgttttactgggtggccctgcctctgacaacggtgaatggggtttccc

SEQ ID NO: 90288 - DNA, 75 bp, synthetic construct
  source 1..75: mol_type = other DNA
gcagaggaaatggcagacgcggcgcagagcgcaatgcttgctgccaccggctttgatgcagatctgttgctgcag

SEQ ID NO: 90289 - DNA, 75 bp, synthetic construct
  source 1..75: mol_type = other DNA
cgaactttttccctttttatcaatatgccatgacatttgaagaattcattccggctttttcatcctggatggcca

SEQ ID NO: 90290 - DNA, 75 bp, synthetic construct
  source 1..75: mol_type = other DNA
atggcctatgaacgtgaaaacctaatagagaagcatctcgtcgccgaagtgaaaaaggctggcggggtcgccttt

SEQ ID NO: 90291 - DNA, 75 bp, synthetic construct
  source 1..75: mol_type = other DNA
cgtgacaagctgtctccgtatgacaccgaagagatgcttgaggctatgcgtatttttctggaagaacagagtggt

SEQ ID NO: 90292 - DNA, 75 bp, synthetic construct
  source 1..75: mol_type = other DNA
gcagaggaaatggcagacgcggcacagagcgcaatgcttgccactaccgggtttgatgccgatctgttgctgcag

SEQ ID NO: 90293 - DNA, 75 bp, synthetic construct
  source 1..75: mol_type = other DNA
gcaccggtcacgcaggctcctgcacctacggccttgttgcaccatgggttactgcgtcaggcagcactgacgcca

SEQ ID NO: 90294 - DNA, 75 bp, synthetic construct
  source 1..75: mol_type = other DNA
ctgtaaaaaaaatatccgaaataatggactacatagaagcatattgtgccatgaactcaattcatcttagcgaat

SEQ ID NO: 90295 - DNA, 75 bp, synthetic construct
  source 1..75: mol_type = other DNA
gtgaatggttaccgtatcgaactgggggaaatcgagcgctgcattgcgcgacatcccgatgtggagcagtcagtg

SEQ ID NO: 90296 - DNA, 75 bp, synthetic construct
  source 1..75: mol_type = other DNA
gacgtggtaatgaatgaagacgactgcaaaataagaagaggaaatgcagcagaattattttcagggatacggcac

SEQ ID NO: 90297 - DNA, 75 bp, synthetic construct
  source 1..75: mol_type = other DNA
ccgcccacagtcaaacacctggaacccgttcgcattcagcaccgaagccttcaccgccgaaaccatgcagtccat

SEQ ID NO: 90298 - DNA, 75 bp, synthetic construct
  source 1..75: mol_type = other DNA
gggcagtaatacaaatgttctgaagacggatgttgataattttggtatcgcgctctaccagggagacggaacgac

SEQ ID NO: 90299 - DNA, 75 bp, synthetic construct
  source 1..75: mol_type = other DNA
cagttataaggggcagcctgtcacccggcttgccgttatgctgaatctgctggtgtttattcgttccagtgaact

SEQ ID NO: 90300 - DNA, 75 bp, synthetic construct
  source 1..75: mol_type = other DNA
acctcatacaccgcacggcctggggaaacccgctgtggaatgcactgcacaacctgaacatcattggtctgtgtc

SEQ ID NO: 90301 - DNA, 75 bp, synthetic construct
  source 1..75: mol_type = other DNA
atgtacgaacaggacacactcagcacactggatgccatcacggaggcacaacggattgcttttgctcctatgctt

SEQ ID NO: 90302 - DNA, 75 bp, synthetic construct
  source 1..75: mol_type = other DNA
accctcgacttcactgatccggtgggcgttagttctcataaagtagctgtttcccagcttgtcgaaagcaacgaa

SEQ ID NO: 90303 - DNA, 75 bp, synthetic construct
  source 1..75: mol_type = other DNA
ccccttaactcgtgaagaactgatgcaggtcgtccccagcgtattcggggaagagaaacacacatccagaagcga

SEQ ID NO: 90304 - DNA, 75 bp, synthetic construct
  source 1..75: mol_type = other DNA
ccatacccgtgccattcacagcatcgacaccgacattaagctcaaccgcgcattgtgggtgatggcagaaacgct

SEQ ID NO: 90305 - DNA, 75 bp, synthetic construct
  source 1..75: mol_type = other DNA
ggttgttttccagcccggagcgcgatattgccaccagtcacagaaacaccgagaacaccagatttcagcggtcgc

SEQ ID NO: 90306 - DNA, 75 bp, synthetic construct
  source 1..75: mol_type = other DNA
aaatgtggtggacagagtcattgaaggggcttacgaggtggtggaggtttttgaccggattgaggaaaagcgtga

SEQ ID NO: 90307 - DNA, 75 bp, synthetic construct
  source 1..75: mol_type = other DNA
aatgacctgtggcctgcagcccggtgacctggtcctgctggctgcccgtccgtcaatggggaaaacctctctggc

SEQ ID NO: 90308 - DNA, 75 bp, synthetic construct
  source 1..75: mol_type = other DNA
attgctatctctaactcaggtgaatccagcgaaatcacggccttaattccagtgcttaagcgtcttcacgtaccg

SEQ ID NO: 90309 - DNA, 75 bp, synthetic construct
  source 1..75: mol_type = other DNA
aagaccgcctgctgatgcagtacgacaccatcattattgacgaagcgcacgaacgcagcctgaatatcgattttc

SEQ ID NO: 90310 - DNA, 75 bp, synthetic construct
  source 1..75: mol_type = other DNA
gtgctttctggcgtgctttatcctgaaattacaggtggcgaagtgtcgctttcgctgctgaccacgcaggcatat

SEQ ID NO: 90311 - DNA, 75 bp, synthetic construct
  source 1..75: mol_type = other DNA
ttctgcaggatgcgcaggccaacgcctacgccgtaccgacgtttaacatccacaacgccgaaacgatccaggcga

SEQ ID NO: 90312 - DNA, 75 bp, synthetic construct
  source 1..75: mol_type = other DNA
ccgcatctttagttttagatgctgcaattagaattaattctgattttaaaaagcagtggaatgatatgtcatgcg

SEQ ID NO: 90313 - DNA, 75 bp, synthetic construct
  source 1..75: mol_type = other DNA
cccctggtgggggctaccctgcaccgtgacgccctgtttcggtgcacgtctggtgcaggagggtaaccggttgca

SEQ ID NO: 90314 - DNA, 75 bp, synthetic construct
  source 1..75: mol_type = other DNA
gtgttccgctctttgcgcccgttgctgctttgcgtgatttccatcggcatcggcgcgctggcgggaacggtcgcc

SEQ ID NO: 90315 - DNA, 75 bp, synthetic construct
  source 1..75: mol_type = other DNA
aatgggtgcctgcgactatattctcaaaacgacgccccctgctgttttgctagcgcgtttacgtttgcatttgcg

SEQ ID NO: 90316 - DNA, 75 bp, synthetic construct
  source 1..75: mol_type = other DNA
cactacaaaccgcatccactgactgcgacacaattgtggaagctgcagcactattacccgcttttgatcaggcag

SEQ ID NO: 90317 - DNA, 75 bp, synthetic construct
  source 1..75: mol_type = other DNA
gtgtcagacacactccccgggacaacgcttcccgacgacaatcacgaccgcccctggtgggggctgccctgcacc

SEQ ID NO: 90318 - DNA, 75 bp, synthetic construct
  source 1..75: mol_type = other DNA
ggtgacgggtactcacagcgtatggcggcagggctgaatgctgacctgaaaacatacagggtgacgctttccgtg

SEQ ID NO: 90319 - DNA, 75 bp, synthetic construct
  source 1..75: mol_type = other DNA
caaaaactgacggtagatttacctgacataccgatttctggcttgtcagtagccgagggagatgcttttgataag

SEQ ID NO: 90320 - DNA, 75 bp, synthetic construct
  source 1..75: mol_type = other DNA
tggaatatcaccgcgcgtgttctgcgttacctgattgttgaccggacggccgcgcctgccgggatatctgcggag

SEQ ID NO: 90321 - DNA, 75 bp, synthetic construct
  source 1..75: mol_type = other DNA
tacccatggcttaaacctgactgcccataaatacccgggcttacgcggcacactacaaaccgcatccactgactg

SEQ ID NO: 90322 - DNA, 75 bp, synthetic construct
  source 1..75: mol_type = other DNA
ggagatggtctatgggggccaggtaaagcaagtaatgatacaaaagaagctgctggccgttgtgacctcgttgaa

SEQ ID NO: 90323 - DNA, 75 bp, synthetic construct
  source 1..75: mol_type = other DNA
ggtgctttcatcgacgataacgcgctacgcctggatctggcctttccgttgatactcaagcaactggagctgatg

SEQ ID NO: 90324 - DNA, 75 bp, synthetic construct
  source 1..75: mol_type = other DNA
tgtatgacatgctgaccaacggtgtactgcaggcgaatgtggcattcgacaaagcgcagctcaattgccagaaca

SEQ ID NO: 90325 - DNA, 75 bp, synthetic construct
  source 1..75: mol_type = other DNA
ctagcggttatgctgaatttactggtttttattcgttccagtgaactcagataagcccgttggtctgaaattgat

SEQ ID NO: 90326 - DNA, 75 bp, synthetic construct
  source 1..75: mol_type = other DNA
ggcagattgacaaaagggccgctgagaaaatcagcgccggtcagtcagccggaagcaaacccgaagagccgctca

SEQ ID NO: 90327 - DNA, 75 bp, synthetic construct
  source 1..75: mol_type = other DNA
gcgggttaccgctatcatgtcactgaggatgcctggattgagccacaggctgagctggtttacggtgctgtatcc

SEQ ID NO: 90328 - DNA, 75 bp, synthetic construct
  source 1..75: mol_type = other DNA
tgtacttctgtacggcggtctgtgtgctgtatcttctttcgggtgggtacagggcagtgcgcgatttctggcgca

SEQ ID NO: 90329 - DNA, 75 bp, synthetic construct
  source 1..75: mol_type = other DNA
atgaaaagaacattacttctttgtgcatttcttgttggcttggtaagcagcaatgtaatggcattgactctggat

SEQ ID NO: 90330 - DNA, 75 bp, synthetic construct
  source 1..75: mol_type = other DNA
atgacatttctgaaccagttaatgctgtacttctgtacggtggtctgtgtgctgtatcttctttcgggtgggtac

SEQ ID NO: 90331 - DNA, 75 bp, synthetic construct
  source 1..75: mol_type = other DNA
ctggcagttatgctgaatttactggtttttattcgttccagtgaactcagataagcccgttggtctgaaattgat

SEQ ID NO: 90332 - DNA, 75 bp, synthetic construct
  source 1..75: mol_type = other DNA
atctccctgctcgacagcctacagcgagaaggcttccagccattctttgcctgtcagacccgcgtgcgtgacccg

SEQ ID NO: 90333 - DNA, 75 bp, synthetic construct
  source 1..75: mol_type = other DNA
ggctactgcctgccgaaggataccaagcagctactagcgaactaccagtcggtgcctaacaacatcatctccgcc

SEQ ID NO: 90334 - DNA, 75 bp, synthetic construct
  source 1..75: mol_type = other DNA
gttatgttggtttgtcgaacggtattctgattgcccagcaccacgaagtggtcgctctggatatcgttccaacga

SEQ ID NO: 90335 - DNA, 75 bp, synthetic construct
  source 1..75: mol_type = other DNA
gcacacccgcgccattcaaggcatcgacggcgatatcaaactcaaccgcgccctgtgggtgatggctgaaaacat

SEQ ID NO: 90336 - DNA, 75 bp, synthetic construct
  source 1..75: mol_type = other DNA
cctgcgtgaaggccgtgcgctttacgacaacctgcacccgtcgcgcattgtcattggtgagcgctctgcgcgtgc

SEQ ID NO: 90337 - DNA, 75 bp, synthetic construct
  source 1..75: mol_type = other DNA
aggcggatgtgatcatctctaaccgtatggcggaagagctggcggatgtggcggacaaggtttacacccgcgatc

SEQ ID NO: 90338 - DNA, 75 bp, synthetic construct
  source 1..75: mol_type = other DNA
gagacagtcctgcacggtttattgcaccggggcgcaaatatccgcagccgtatgtggcactgccggcttttgacc

SEQ ID NO: 90339 - DNA, 75 bp, synthetic construct
  source 1..75: mol_type = other DNA
tgtttttactgtttggttatgagttttataacattacaaccaaaaacggaacggccattttccttattagccgag

SEQ ID NO: 90340 - DNA, 75 bp, synthetic construct
  source 1..75: mol_type = other DNA
ccagacttcggtgagtatataggtacgtcatgggctggctgtgcaaaagaggcgcgcaaggatggctggcgaata

SEQ ID NO: 90341 - DNA, 75 bp, synthetic construct
  source 1..75: mol_type = other DNA
atgttcagtggtttgacggttccgatccgcagaaaatgcataaccattatgcgtacatctacaacgaactggtgt

SEQ ID NO: 90342 - DNA, 75 bp, synthetic construct
  source 1..75: mol_type = other DNA
aagctgatgttattatttctaaccgtatgtctgccgatctggctgatgtagcagataaggtttatacgcgcgact

SEQ ID NO: 90343 - DNA, 75 bp, synthetic construct
  source 1..75: mol_type = other DNA
cacgttttcgtgggacggcagtgagcctgatgtattgcggtgttcccattggcgcggcgctggcggcgacactgg

SEQ ID NO: 90344 - DNA, 75 bp, synthetic construct
  source 1..75: mol_type = other DNA
gtatttggtcaggtcactgatgaaaaacacagagataatgctgcacgggtaaggaagatcctcacaactttggaa

SEQ ID NO: 90345 - DNA, 75 bp, synthetic construct
  source 1..75: mol_type = other DNA
cagttacggcattacgttttgctaccatcgtgcctggcgcttattgctggcatcatgctgatgataatgaatttg

SEQ ID NO: 90346 - DNA, 75 bp, synthetic construct
  source 1..75: mol_type = other DNA
gcgcgaatgaatgtctatccagtcagcacgacaggtgtaccaccagaaaccgggcgatttgaagccacggcaacg

SEQ ID NO: 90347 - DNA, 75 bp, synthetic construct
  source 1..75: mol_type = other DNA
acaagcctggaaagtggaacataaattatcggatattctattgttgactatttgtgccgttatttctggtgcaga

SEQ ID NO: 90348 - DNA, 75 bp, synthetic construct
  source 1..75: mol_type = other DNA
attatgatccgaaaacaaattattttaatacctcaagcgtggaagcggtcattcgcgatgtgacagaaattaatc

SEQ ID NO: 90349 - DNA, 75 bp, synthetic construct
  source 1..75: mol_type = other DNA
cctgcgtgaaggccgtgcgctgtacgacaacctgcacccatcgcgcattgttattggtgagcgctctgcgcgtgc

SEQ ID NO: 90350 - DNA, 75 bp, synthetic construct
  source 1..75: mol_type = other DNA
gacggtgatggcgaagacctgtatctcaaagaggtaacccactggatgcagctaccagaaccgccgcaggaggtg

SEQ ID NO: 90351 - DNA, 75 bp, synthetic construct
  source 1..75: mol_type = other DNA
gaccgtctaccagcgcgtgcaggagaacctgatgaaagggggattgtcaggacgaaccgcacaggggaaaagcag

SEQ ID NO: 90352 - DNA, 75 bp, synthetic construct
  source 1..75: mol_type = other DNA
gcgtatttctgcgtgccgataattccctgattgacatgaactatatcaccagtttcaccggtatgaccgacagag

SEQ ID NO: 90353 - DNA, 75 bp, synthetic construct
  source 1..75: mol_type = other DNA
taccgaaatcttgccgctttatgcgcggctttcgaacagcgaacaaaatagggtgttccagtcgcacagcgggcg

SEQ ID NO: 90354 - DNA, 75 bp, synthetic construct
  source 1..75: mol_type = other DNA
taatggcggatatggagcgagacccaacaaaccgcctacgcccgatccaagtaaattgccggacatagcgaaaca

SEQ ID NO: 90355 - DNA, 75 bp, synthetic construct
  source 1..75: mol_type = other DNA
ttgattacaaaaaatatagagctttcacgtatttatcaggaaatatcttggatgacgtaactcactggatgccgc

SEQ ID NO: 90356 - DNA, 75 bp, synthetic construct
  source 1..75: mol_type = other DNA
attatctcaactatctgcgcgtgcgcgaatggcaggatatctacacccagttgcgccaggtggtgaaagaacttg

SEQ ID NO: 90357 - DNA, 75 bp, synthetic construct
  source 1..75: mol_type = other DNA
tcaaaacattcttcagagcattaagcccttacgactacacactgtattgcaggaagtgggtaaaaccaaatctga

SEQ ID NO: 90358 - DNA, 75 bp, synthetic construct
  source 1..75: mol_type = other DNA
ggcgactgaatgtatcgcggcggacgttatccttgattttaagagtgggcgtggtttttatgagtctcattcgtt

SEQ ID NO: 90359 - DNA, 75 bp, synthetic construct
  source 1..75: mol_type = other DNA
aaatcgttgagaaaggcaaaaccgctccgcgagttacgcctcaatatatcgaaagcatcattcttgaagagcatt

SEQ ID NO: 90360 - DNA, 75 bp, synthetic construct
  source 1..75: mol_type = other DNA
tgcagaaattggtcggaagattgcccggcagaatgctgtaaacaaaatctggatgcttgaaggttacttgctgaa

SEQ ID NO: 90361 - DNA, 75 bp, synthetic construct
  source 1..75: mol_type = other DNA
cccggtcagcccattcttgtggggcatcacagcgaacgccgcgcccgtcgtgatgcgcagcgtattgaaaacggc

SEQ ID NO: 90362 - DNA, 75 bp, synthetic construct
  source 1..75: mol_type = other DNA
tatactcaacatgaactagatctggttgctgctcagctaaacaacagaccgagaaagacactgaagttcaaaaca

SEQ ID NO: 90363 - DNA, 75 bp, synthetic construct
  source 1..75: mol_type = other DNA
ctggttctatggtccgcagccttcggggctgttggcgtggtcgaatattttcgccctgtattgctacctttcgct

SEQ ID NO: 90364 - DNA, 75 bp, synthetic construct
  source 1..75: mol_type = other DNA
ttgctaccgtcattgctgccaacgccgcagggatcccctttactcagggcattttgctgcgtgttattttgctgt

SEQ ID NO: 90365 - DNA, 75 bp, synthetic construct
  source 1..75: mol_type = other DNA
taccttcacctccaaaaatagggttttcaccgttccaccccataaacaaaaagtccgtaacctctttcgagatta

SEQ ID NO: 90366 - DNA, 75 bp, synthetic construct
  source 1..75: mol_type = other DNA
agtctggtcatcggacagatcaagacggatgagaaatctaatgagattacagctatcccagaacttcttaacatg

SEQ ID NO: 90367 - DNA, 75 bp, synthetic construct
  source 1..75: mol_type = other DNA
gcaacggcgtatgtcgaaagcggggtgctgcgcattcagcgtgatgtcaccacgtacaggaaaaacgcttacggg

SEQ ID NO: 90368 - DNA, 75 bp, synthetic construct
  source 1..75: mol_type = other DNA
tattgggactgcgataactttagggactccatttacgcccggaaaaatcacaggtaataatgcagataaaactat

SEQ ID NO: 90369 - DNA, 75 bp, synthetic construct
  source 1..75: mol_type = other DNA
ttgttcagtatgcagagcgggccgcagagaaactacgtggggagcgtcagtattgtcggcaggtgacgacatttg

SEQ ID NO: 90370 - DNA, 75 bp, synthetic construct
  source 1..75: mol_type = other DNA
atgccgattcagcaacttccgctcatgaaaggtgtcggcaaagacttccgaaatgccgactatatcgactatcta

SEQ ID NO: 90371 - DNA, 75 bp, synthetic construct
  source 1..75: mol_type = other DNA
tgtaagaagcaaggtgaatatttccccatgaatccgataagttcaaatgataatgatagtgtagacttgcgaaat

SEQ ID NO: 90372 - DNA, 75 bp, synthetic construct
  source 1..75: mol_type = other DNA
gcgaagtcggtgacgtcgccggaagtggtcgcgtatcaatggcgcatggtcgaacatctcaggctgtaggcgtta

SEQ ID NO: 90373 - DNA, 75 bp, synthetic construct
  source 1..75: mol_type = other DNA
tctggttggcgagctggagcaggttttatgtgctgtgccggcgaatatcactatgactgatgttgtatcccgttc

SEQ ID NO: 90374 - DNA, 75 bp, synthetic construct
  source 1..75: mol_type = other DNA
gttgactggattgagacaacacgtaaccgcgacggtacgttaaaaaatccaccggttcgaatgagagcactggtc

SEQ ID NO: 90375 - DNA, 75 bp, synthetic construct
  source 1..75: mol_type = other DNA
gaggctcttgataatcgttcgtcaatggattggtgtgttgctgtccatgatatgaatgccggatttgatgaaaag

SEQ ID NO: 90376 - DNA, 75 bp, synthetic construct
  source 1..75: mol_type = other DNA
cctgtgacgcctgtcagacgaacaaaaccgtgtggctgaaccgtaaaaccgaactggccgccgcaatgcaggaat

SEQ ID NO: 90377 - DNA, 75 bp, synthetic construct
  source 1..75: mol_type = other DNA
attgtcgatgccaaccgcacgcgtaaagacttcatctctgattcgatccttgcgcgtcagccgaaagtggtgggc

SEQ ID NO: 90378 - DNA, 75 bp, synthetic construct
  source 1..75: mol_type = other DNA
gcctcagtatccgcagatacagttttccacgccggataagccgcgcacggtggcgccttatgccacctatcgcgt

SEQ ID NO: 90379 - DNA, 75 bp, synthetic construct
  source 1..75: mol_type = other DNA
ggaacattttgctgaagcaaccaacgttggattattgatgcaacatttgatccgattctgtatctataccggagg

SEQ ID NO: 90380 - DNA, 75 bp, synthetic construct
  source 1..75: mol_type = other DNA
tataaaaatgaactcagcgatctgtttatttgcaacgaagcgctggtagtgagcgatgggcaaaatgcgcgtatc

SEQ ID NO: 90381 - DNA, 75 bp, synthetic construct
  source 1..75: mol_type = other DNA
gttcctgctcgtgcagctgaacggctgcgccggtacgcggacagtttacgtaccagtttcggcggtaccactact

SEQ ID NO: 90382 - DNA, 75 bp, synthetic construct
  source 1..75: mol_type = other DNA
aaaaggagcgtgctgatgaggctatacgaaatgctgaatcagcaactgccattacccgtaacgttctgcaatcac

SEQ ID NO: 90383 - DNA, 75 bp, synthetic construct
  source 1..75: mol_type = other DNA
ctgaagcaggcgctgaaaacctataccgactcaaaaggcaaagggcagtccacggtcgatgcccgggaagccttt

SEQ ID NO: 90384 - DNA, 75 bp, synthetic construct
  source 1..75: mol_type = other DNA
catatcacctccgtgatggttgccgatggcgaccatttactcggtgtgttacatatgcatgatttactgcgtgca

SEQ ID NO: 90385 - DNA, 75 bp, synthetic construct
  source 1..75: mol_type = other DNA
acctaccatttataccattcattttctggatgacaggcattgggaactggatagtcagtgtattaataggatgta

SEQ ID NO: 90386 - DNA, 75 bp, synthetic construct
  source 1..75: mol_type = other DNA
gccccggccaggagcgggcagagcaacatattgacctggcttatgccatcaccgcccacggtgcgcagggggcga

SEQ ID NO: 90387 - DNA, 75 bp, synthetic construct
  source 1..75: mol_type = other DNA
tttggggatgcggacgatttcctggactgctttatcattccagcccgcattgttggcggtacattttggggctga

SEQ ID NO: 90388 - DNA, 75 bp, synthetic construct
  source 1..75: mol_type = other DNA
agcagtgtggggtatggctctgcctgagccggaatttacacctgctgagcttgccgcattccgggattactggat

SEQ ID NO: 90389 - DNA, 75 bp, synthetic construct
  source 1..75: mol_type = other DNA
gcataccttcagaatgaagtgatatcccgaaaacaaaaacattcgctcaccagcgataacagccatcccccggaa

SEQ ID NO: 90390 - DNA, 75 bp, synthetic construct
  source 1..75: mol_type = other DNA
tccatgaccggctcaggttacatcgctgcctcccgggataagatgaagagccgctttgactccgttgctgaacaa

SEQ ID NO: 90391 - DNA, 75 bp, synthetic construct
  source 1..75: mol_type = other DNA
tgcaggtcattcagcagtttgaacagaccggctcacacgctaaccgctatgatgtcacaattctggtcaacggcc

SEQ ID NO: 90392 - DNA, 75 bp, synthetic construct
  source 1..75: mol_type = other DNA
tgattacccctcccccttttcgtgggtggacagcagggacagtgaacagtgtgactggttatggaacgccatgca

SEQ ID NO: 90393 - DNA, 75 bp, synthetic construct
  source 1..75: mol_type = other DNA
actatctgtggcgtccggggctggagctggggcagccgtcctctctggcgggttacggtatcgctgaaaacgaac

SEQ ID NO: 90394 - DNA, 75 bp, synthetic construct
  source 1..75: mol_type = other DNA
atgacgacaccaaccagacggataagtttctatctgaagcccgccgccgtcaagagtgaacaggaggcgtgcaat

SEQ ID NO: 90395 - DNA, 75 bp, synthetic construct
  source 1..75: mol_type = other DNA
taagtatcttgtgctggcaatcatcggcgtgggcggtctgtccggcctggtcgccagccagagcacaggaagaaa

SEQ ID NO: 90396 - DNA, 75 bp, synthetic construct
  source 1..75: mol_type = other DNA
catgtgggatggctggttcagacttcaggatatggttgagggttacctggtgatgaagtctcttgatcaggagat

SEQ ID NO: 90397 - DNA, 75 bp, synthetic construct
  source 1..75: mol_type = other DNA
aatggggggaataaatgcccgcgcaaaagttgctggcctgatgatgcgccaggacgatagcgacacgctgaattc

SEQ ID NO: 90398 - DNA, 75 bp, synthetic construct
  source 1..75: mol_type = other DNA
cctggctggttgaaccacatgagtgggtggttattaatcgttctcttactgggattgttacagtgccagtatcag

SEQ ID NO: 90399 - DNA, 75 bp, synthetic construct
  source 1..75: mol_type = other DNA
gtccgggcgttcggcaaacttcagcatattgtatccggcgacgcgacggcggtgaccgcagacgccattatcaaa

SEQ ID NO: 90400 - DNA, 75 bp, synthetic construct
  source 1..75: mol_type = other DNA
acagcgcaggcgctcactatcaacaggaatgaggttaactcaactgttgatttaacccttacaaaacaatcaggg

SEQ ID NO: 90401 - DNA, 75 bp, synthetic construct
  source 1..75: mol_type = other DNA
atggaaaggagaacccggtggcgtgattgcagaatgtcatgttaactgcctggttgaaacagatgctcaggctta

SEQ ID NO: 90402 - DNA, 75 bp, synthetic construct
  source 1..75: mol_type = other DNA
agtcgccggatttcgctgaccgatctccgcttttttgctcctgcgctgacgaaggaggaatttcatggcaaccgt

SEQ ID NO: 90403 - DNA, 75 bp, synthetic construct
  source 1..75: mol_type = other DNA
cttcaatggctgtatgccatcgatgtgctgattgaaacacagggcgaggtctgcctccttccccttccctgcgat

SEQ ID NO: 90404 - DNA, 75 bp, synthetic construct
  source 1..75: mol_type = other DNA
cagcttcattatcctataacgatcttgatttcatacgattgcctaaacatattttccaagattgtccgtcggaat

SEQ ID NO: 90405 - DNA, 75 bp, synthetic construct
  source 1..75: mol_type = other DNA
accagcaatagcgatatctgcgtttcatgcgttaaaacgtaatcctcaggaagatccattgcttctagttcttgc

SEQ ID NO: 90406 - DNA, 75 bp, synthetic construct
  source 1..75: mol_type = other DNA
tctaatcgcacaaaatcatgaggttgtggcattagatattttaccgtcacgcgttgctatgctgaatgatcggat

SEQ ID NO: 90407 - DNA, 75 bp, synthetic construct
  source 1..75: mol_type = other DNA
aacacctaccagctcgacagcgcctcgctgtacatgccgggcaacagtatcacctctgcgctggccaacgaattt

SEQ ID NO: 90408 - DNA, 75 bp, synthetic construct
  source 1..75: mol_type = other DNA
tcaccaggcacttctgcagtatatccgtcctggcgcgcagaataagatgaaagtgattctggccgaagaagcaaa

SEQ ID NO: 90409 - DNA, 75 bp, synthetic construct
  source 1..75: mol_type = other DNA
tccaaccgtatggcagaagagcttaaggatgtggcagataaagtctacacccgcgatctctttggcagcgactaa

SEQ ID NO: 90410 - DNA, 75 bp, synthetic construct
  source 1..75: mol_type = other DNA
tacggggctgaagcggggctaccgactggcagagctggtcctgatgcatgagccgctggcccggatgcggtggtg

SEQ ID NO: 90411 - DNA, 75 bp, synthetic construct
  source 1..75: mol_type = other DNA
ttgaaaccggttaatagtaatcaattaagatacagtgctaaacatatgttgaaaaaaaagcaatatatcaaagga

SEQ ID NO: 90412 - DNA, 75 bp, synthetic construct
  source 1..75: mol_type = other DNA
caggcacccttgagtctggggatgtgatgatacgcatcgccccactcgatacgcaggatatcgacctgcaaatca

SEQ ID NO: 90413 - DNA, 75 bp, synthetic construct
  source 1..75: mol_type = other DNA
cgtggaatataactggctgagggaggcgatcccgtttttacaacaggaatccagatcggcaatgccgggagtgga

SEQ ID NO: 90414 - DNA, 75 bp, synthetic construct
  source 1..75: mol_type = other DNA
tagtgagagaacaattcctttaaatgataaagattctgtagttgaaagaacatattttatctattactacgaaac

SEQ ID NO: 90415 - DNA, 75 bp, synthetic construct
  source 1..75: mol_type = other DNA
ctgtgttcttcccctgccatccgatgcggggcatcgtctgttcccgtccgttccttttcgtgaaggtgagcggcg

SEQ ID NO: 90416 - DNA, 75 bp, synthetic construct
  source 1..75: mol_type = other DNA
caggggtagaacgccaggtacgtaatctgctgtggaaagggaaatcgcaggtagatttttatcggagtatggagt

SEQ ID NO: 90417 - DNA, 75 bp, synthetic construct
  source 1..75: mol_type = other DNA
gataagttttatcatgtccaacaatttattgaaaaacctaaccattcgacggcagaagagtatgtttccacagga

SEQ ID NO: 90418 - DNA, 75 bp, synthetic construct
  source 1..75: mol_type = other DNA
cgccagcgccggtatgctgatttttggttcgacgctgattatgcagcacacgcgccatccttttgtgctggcagc

SEQ ID NO: 90419 - DNA, 75 bp, synthetic construct
  source 1..75: mol_type = other DNA
ccagtcgtgtactggccattgcttttatatttatgtccctgctcattgttctcagtctgactgttaacgtgattc

SEQ ID NO: 90420 - DNA, 75 bp, synthetic construct
  source 1..75: mol_type = other DNA
caacagttcagcggtcatcctcagccgcaaccgccggagggggaggattacgggttttcagacgatatcccgttc

SEQ ID NO: 90421 - DNA, 75 bp, synthetic construct
  source 1..75: mol_type = other DNA
ggtaagtgtcggaacggttatgggggatgcaattaacaaaggaacaagtaatgtatctaaggcagcagcaaaaag

SEQ ID NO: 90422 - DNA, 75 bp, synthetic construct
  source 1..75: mol_type = other DNA
tatctttgacaacaatgaggataaaacggattcagcagcactgttgccctgtatcgaacaggccagagaggatat

SEQ ID NO: 90423 - DNA, 75 bp, synthetic construct
  source 1..75: mol_type = other DNA
ttttcctcgaaaggaaagggaacgctgtaacatcccgggctgaacgggttattatctatggtgataaatatgctg

SEQ ID NO: 90424 - DNA, 75 bp, synthetic construct
  source 1..75: mol_type = other DNA
tacgattggcgcccatgcggttatttcgcaaaaaagttatttatgcaccgggagtcatgattatgccagtcaaca

SEQ ID NO: 90425 - DNA, 75 bp, synthetic construct
  source 1..75: mol_type = other DNA
cgctgaaagtctgggtcttaactcccgccaaattattgagggggtttgccttgatccgcgtatcggtaatcacta

SEQ ID NO: 90426 - DNA, 75 bp, synthetic construct
  source 1..75: mol_type = other DNA
tgatggttggtgcaatgggaatgatcgagattggcatgaaaaaatgaagggctatatctgcgatttcttacgtaa

SEQ ID NO: 90427 - DNA, 75 bp, synthetic construct
  source 1..75: mol_type = other DNA
ggcagcactgatgcagcaaccggacaaatccctggcactgctggcatggacgctctgcctgaatgtgtttgacag

SEQ ID NO: 90428 - DNA, 75 bp, synthetic construct
  source 1..75: mol_type = other DNA
tgaacgcaagcaacgggaagaacaggcagaaaaagaaaagaaacaaaaaacagaaataaattctgataatgatag

SEQ ID NO: 90429 - DNA, 75 bp, synthetic construct
  source 1..75: mol_type = other DNA
gactgaaacgtggggaagtggcgctttatgacgatcaggggcaatccgttgtcctgactcgttccggtattgtgg

SEQ ID NO: 90430 - DNA, 75 bp, synthetic construct
  source 1..75: mol_type = other DNA
ttcccctcagcgcagagcaacaggccgcatggcgggcggtggcggagacagaaaaacgccgccaccagggaaaca

SEQ ID NO: 90431 - DNA, 75 bp, synthetic construct
  source 1..75: mol_type = other DNA
attcctccaactgcatatattaatcagggaactgttttatcagtgattgttccgaggaatattgacttttctgag

SEQ ID NO: 90432 - DNA, 75 bp, synthetic construct
  source 1..75: mol_type = other DNA
tgaacaactgcgtgttgaagtggcttatctaaaaaagttgcaggccttgctcagggaaaaaagcacgtcaaaacg

SEQ ID NO: 90433 - DNA, 75 bp, synthetic construct
  source 1..75: mol_type = other DNA
tatgtatttccgcaccatttctggttgcgggctgtgatgatgcgacaaaggagaatgtaagtaagaaggcggcag

SEQ ID NO: 90434 - DNA, 75 bp, synthetic construct
  source 1..75: mol_type = other DNA
gtgtgtccagcgtggtgtgcagttgcgcagtgaagatgacgcggctgacgacgctgaccgcacggaacaggtgca

SEQ ID NO: 90435 - DNA, 75 bp, synthetic construct
  source 1..75: mol_type = other DNA
gcatttaccatccgtgatggtcgtctgtttactctgcgtgagcgtgaactgcccgcttttcgtctgtatcgtatg

SEQ ID NO: 90436 - DNA, 75 bp, synthetic construct
  source 1..75: mol_type = other DNA
agtcgcaggaaattaacctggactacattcttggcctgattttcgaccacaacagagagaaaaaaggtaaagaag

SEQ ID NO: 90437 - DNA, 75 bp, synthetic construct
  source 1..75: mol_type = other DNA
atgcaggtgagccagtggaccggacagaacggggaaacgcggcagggctggcaggttatcgcagacagcgtaatc

SEQ ID NO: 90438 - DNA, 75 bp, synthetic construct
  source 1..75: mol_type = other DNA
ctggaaaaccagtatttcgcgctggatttaagtacggatgcggcccgggcgatgctggacgcggggcgttgtact

SEQ ID NO: 90439 - DNA, 75 bp, synthetic construct
  source 1..75: mol_type = other DNA
aaaccgccagagtggtgtttaatgaattaagcgtcaccgaaccggcgacagtcggggagattgcacagaatactt

SEQ ID NO: 90440 - DNA, 75 bp, synthetic construct
  source 1..75: mol_type = other DNA
gctcttcggctaagagcgaaacaggtgagcagtggatgggagccgccggaaccaaactgggactgagtaaacctt

SEQ ID NO: 90441 - DNA, 75 bp, synthetic construct
  source 1..75: mol_type = other DNA
tcccgcaggtattcccatgtatgaaaatgtagcagggcttcccatgtattacagcgttgcttatttaacagcagg

SEQ ID NO: 90442 - DNA, 75 bp, synthetic construct
  source 1..75: mol_type = other DNA
cattgctgagaccggctgtggagttcaatacggcagtggtggcagcaacagcagcatgtatctgtgtgacagccc

SEQ ID NO: 90443 - DNA, 75 bp, synthetic construct
  source 1..75: mol_type = other DNA
atgatatttgtactgttctggggttgttcagggaaggcgagaacccggcacacaagcggaagagcactaatttcg

SEQ ID NO: 90444 - DNA, 75 bp, synthetic construct
  source 1..75: mol_type = other DNA
agaccgttaatcgcggtgccgtccggccaggtatgctggttaaacacaaagatggtacctggacggcatcagcta

SEQ ID NO: 90445 - DNA, 75 bp, synthetic construct
  source 1..75: mol_type = other DNA
aattgtccgtaaaatggcagagaacaaacctgacctgccggacggcaaaacagagcaggctgtcagggagattgc

SEQ ID NO: 90446 - DNA, 75 bp, synthetic construct
  source 1..75: mol_type = other DNA
aaacttgcccgccatccctcctttacggtggtttctgagcagataaaggcgcgggccggtgagacattgctggaa

SEQ ID NO: 90447 - DNA, 75 bp, synthetic construct
  source 1..75: mol_type = other DNA
agcagcacttgaaaagtgtatagcaaataaacccgtacctcccacacaacaggttctcatcgttaatgacgcgac

SEQ ID NO: 90448 - DNA, 75 bp, synthetic construct
  source 1..75: mol_type = other DNA
actgcagggcagtgtcgataaggatgtttttacccgtcttctggagggaaggctgccggacggagcggatctaag

SEQ ID NO: 90449 - DNA, 75 bp, synthetic construct
  source 1..75: mol_type = other DNA
ttgttcatcagttgctgctatggaatatggttgacagtctgattaaaacattaatagccattctaacaatcccac

SEQ ID NO: 90450 - DNA, 75 bp, synthetic construct
  source 1..75: mol_type = other DNA
cggatgcccttgccctggtggataatgtgtatcaccggattgccggtatcagcaaggatgacgggctgataaccc

SEQ ID NO: 90451 - DNA, 75 bp, synthetic construct
  source 1..75: mol_type = other DNA
atgctgcctggctgacctgtcccgttacccgtcttgttcgtgatgcacagggacagtggtgcagggacccgcgtt

SEQ ID NO: 90452 - DNA, 75 bp, synthetic construct
  source 1..75: mol_type = other DNA
atagcgggacatgctcgcagtcgcggtttgattgtggttaccaacaatacccgagagtttgagcgagtggcggga

SEQ ID NO: 90453 - DNA, 75 bp, synthetic construct
  source 1..75: mol_type = other DNA
ctgaacttgacataactaaactgcctgacaggagccaggcattacttaatgaaatgcatgaaggaacgggaataa

SEQ ID NO: 90454 - DNA, 75 bp, synthetic construct
  source 1..75: mol_type = other DNA
gcactgatgatcagcatgatgatgtttttcagctgggcggcattgccagggatcgccttagggatttttgtccgc

SEQ ID NO: 90455 - DNA, 75 bp, synthetic construct
  source 1..75: mol_type = other DNA
gatggaagaagtggcaaaacgcgttgaagttgatggcatccaggcgtggtgggatctcgatgcgaaagagatcct

SEQ ID NO: 90456 - DNA, 75 bp, synthetic construct
  source 1..75: mol_type = other DNA
ccgaactgttcccgatgtcgaaaattaacgacgccatccagcatgtacgcgatggtaaagcgcgctaccgcgtgg

SEQ ID NO: 90457 - DNA, 75 bp, synthetic construct
  source 1..75: mol_type = other DNA
ggaaacgggctgcggggattcagtggtgaaggccgggtgaagggcagtgaagatgcacagtttgtggccctgcag

SEQ ID NO: 90458 - DNA, 75 bp, synthetic construct
  source 1..75: mol_type = other DNA
ctgatcccgctttcaattcttttcactggcgcgtcgctggaaacgatgaaaaccaccgtcgtactcacagccctt

SEQ ID NO: 90459 - DNA, 75 bp, synthetic construct
  source 1..75: mol_type = other DNA
ccgcgcctggccacggcccggacgactatgtgatcggtcagaaatacggcctggaaaccgctaacccggttggcc

SEQ ID NO: 90460 - DNA, 75 bp, synthetic construct
  source 1..75: mol_type = other DNA
cgctacatgaatttacggaaaacgcctatttaaactactccatgtacgtgatcatggaccgcgcgttgccgttta

SEQ ID NO: 90461 - DNA, 75 bp, synthetic construct
  source 1..75: mol_type = other DNA
gagaagttgcgtgcggactggcaatgggtgattccactgccagaaaatattgatatcgagtccgccgggccgctg

SEQ ID NO: 90462 - DNA, 75 bp, synthetic construct
  source 1..75: mol_type = other DNA
gcgctgtatcacatcgcagaagcgctggtgcgctggatggcaccaatcctctccttcaccgctgatgaagtgtgg

SEQ ID NO: 90463 - DNA, 75 bp, synthetic construct
  source 1..75: mol_type = other DNA
gtagctaaacgatctaaggtgttcctggacaaactgcaggagccaacgtctgaaatgataaataagcgagggaat

SEQ ID NO: 90464 - DNA, 75 bp, synthetic construct
  source 1..75: mol_type = other DNA
cggaaacaccaatatacgcagaacacctggcgttcgtgaagagaaactaaaaaatattaatagggatgataagga

SEQ ID NO: 90465 - DNA, 75 bp, synthetic construct
  source 1..75: mol_type = other DNA
aagaccacaggcacacagggtaatcagccaccagcgggaggcgatgacccttacggtgatgatattccgttctga

SEQ ID NO: 90466 - DNA, 75 bp, synthetic construct
  source 1..75: mol_type = other DNA
aaactgccagagtggtgtttaatgaattaagcgtcaccgaaccggcgaccgtcggggaaattgcgcataatactt

SEQ ID NO: 90467 - DNA, 75 bp, synthetic construct
  source 1..75: mol_type = other DNA
cgggcaggagcgtgaccgtgctgtcacctctgaacgggaaaccgcactgccggagagtgtactgcgtgaaccaca

SEQ ID NO: 90468 - DNA, 75 bp, synthetic construct
  source 1..75: mol_type = other DNA
aaatccacctgtaccactgcgaccatcgcggcctgccgctggcgcttgtcagcacggaaggggcaacagaatggt

SEQ ID NO: 90469 - DNA, 75 bp, synthetic construct
  source 1..75: mol_type = other DNA
attgggggtcgaccaatcttcgtgcctggctttaccagagtgaaaagtgtctggagagccggaaatcggaggccg

SEQ ID NO: 90470 - DNA, 75 bp, synthetic construct
  source 1..75: mol_type = other DNA
caccaggcagcactcaggaaaatgagatcgatctgcttcgtctggtcggcgagttatgggatcaccgtaagttta

SEQ ID NO: 90471 - DNA, 75 bp, synthetic construct
  source 1..75: mol_type = other DNA
acaaagatcagatggtggggactgattcccattatcggatatcttctttgcaagggaaagtgtttaaactgtaat

SEQ ID NO: 90472 - DNA, 75 bp, synthetic construct
  source 1..75: mol_type = other DNA
cgatccacaaagttccggtaccgcctacaccgcgctggctacctttgcgcagctgtggggggaagatcaggcctt

SEQ ID NO: 90473 - DNA, 75 bp, synthetic construct
  source 1..75: mol_type = other DNA
aaaataattatatatgagggagatatacgcaacattgacttgattgattctgtgtttgcaaataatgatatcgag

SEQ ID NO: 90474 - DNA, 75 bp, synthetic construct
  source 1..75: mol_type = other DNA
atgattcttcagacacacaccattgctgaaaccagtaactttatcgttcttgataagtacatcaaggctgagcaa

SEQ ID NO: 90475 - DNA, 75 bp, synthetic construct
  source 1..75: mol_type = other DNA
ctcctgttccgttaagccggataataatggcggtgctgtgactccggttgatccaactccggaaacaccggaaac

SEQ ID NO: 90476 - DNA, 75 bp, synthetic construct
  source 1..75: mol_type = other DNA
cgagagcgtcaggggattgcgccctttgccacacctattactccagaccagcaacgtatccgcgaactggaaaag

SEQ ID NO: 90477 - DNA, 75 bp, synthetic construct
  source 1..75: mol_type = other DNA
gtctggaatgcagtgcccgcactgatgcagatgctgtgcgaataccacagcggcgatcggatgagttatccgacg

SEQ ID NO: 90478 - DNA, 75 bp, synthetic construct
  source 1..75: mol_type = other DNA
acaacttgggcacaggcactggttattctgttttggaactcctgacagcttttgaaagagtaacttctcgtaaag

SEQ ID NO: 90479 - DNA, 75 bp, synthetic construct
  source 1..75: mol_type = other DNA
cctgatgtcacccttcgggacttaacgctttcccctggctaccacagtgattatgcccctcaacccattccggag

SEQ ID NO: 90480 - DNA, 75 bp, synthetic construct
  source 1..75: mol_type = other DNA
agaggaaatgcagcagaattattttcagggatacggcacattgctattaatattttgacgaatgataaggtattc

SEQ ID NO: 90481 - DNA, 75 bp, synthetic construct
  source 1..75: mol_type = other DNA
atcttggagggaggatacaggcgaacctggaagaaatcaggaagcaggaagagacattgcagaaactgaacgcga

SEQ ID NO: 90482 - DNA, 75 bp, synthetic construct
  source 1..75: mol_type = other DNA
ggttcttcacgctgcctgatggctcgattgtgcagggtgatactgctgagtacgaaccctctgacactgacctca

SEQ ID NO: 90483 - DNA, 75 bp, synthetic construct
  source 1..75: mol_type = other DNA
cggctttctgattcgcattattgagtggtggcagaccggagagacaccgggcacgtttcgtctggatatcggcgt

SEQ ID NO: 90484 - DNA, 75 bp, synthetic construct
  source 1..75: mol_type = other DNA
cagattgccgccaccgagcggatattatggaaaatcaacagctcctataaagcgaaaaactggtccactcccgaa

SEQ ID NO: 90485 - DNA, 75 bp, synthetic construct
  source 1..75: mol_type = other DNA
tccagagcatgacagttatgcaattagtgaaaagagtcacagcagagaagaaatccgtcttcatattgtttgcga

SEQ ID NO: 90486 - DNA, 75 bp, synthetic construct
  source 1..75: mol_type = other DNA
atatggaagagattacccaacaaaggatggcactggtgtccgtgattatatccatgtaatggatctcgctgaagg

SEQ ID NO: 90487 - DNA, 75 bp, synthetic construct
  source 1..75: mol_type = other DNA
agtaacgacacttggcgattatcccactcatacaacacccattgcccctacatcattatatgataaatggaatgg

SEQ ID NO: 90488 - DNA, 75 bp, synthetic construct
  source 1..75: mol_type = other DNA
atgaacacactacgttattttgattttggagctgcccgccccgttttgttattaattgcccgtatcgccgtggtc

SEQ ID NO: 90489 - DNA, 75 bp, synthetic construct
  source 1..75: mol_type = other DNA
gatgctgaacatatatcaagacaggtcagaaactttattactacttcactgggattggaagttaatgaagcaaag

SEQ ID NO: 90490 - DNA, 75 bp, synthetic construct
  source 1..75: mol_type = other DNA
ctgaagcagaaaatgcaagggcggcacgctctccggagatccaccacaggaattgtgcagctcttcgttcctgac

SEQ ID NO: 90491 - DNA, 75 bp, synthetic construct
  source 1..75: mol_type = other DNA
actcgcgaacgcagcgttacacgacccgccgtggaaatgtttatgttcgctgtctttcggcctcgtgggatgcag

SEQ ID NO: 90492 - DNA, 75 bp, synthetic construct
  source 1..75: mol_type = other DNA
agcgcagaaaaacctgaagaagaaattcaaacgctattatcagtttggttttaccggcacccctattttcccgga

SEQ ID NO: 90493 - DNA, 75 bp, synthetic construct
  source 1..75: mol_type = other DNA
tttaatgcctccggtattacctggccattacctgaatcactttcagtcgcccaacttgatgccatactttatgcc

SEQ ID NO: 90494 - DNA, 75 bp, synthetic construct
  source 1..75: mol_type = other DNA
aagctggaacgccagcctatgaaagagcgttgagtaacgctgcaaatgccatcaggccgctgcttgctactgagg

SEQ ID NO: 90495 - DNA, 75 bp, synthetic construct
  source 1..75: mol_type = other DNA
ttctgtgccggtttttcgttatccatttacctgccgtttattccgtttatcttctggatgaccggcatcggtaac

SEQ ID NO: 90496 - DNA, 75 bp, synthetic construct
  source 1..75: mol_type = other DNA
atgctcaataacaaagtgctacctgtaaccatttacaacgtagcaccattcaataaaacattctggaatttaatc

SEQ ID NO: 90497 - DNA, 75 bp, synthetic construct
  source 1..75: mol_type = other DNA
ggttatcgcaatgaagctgaacgattagccgagatgcaggctgaacagttcaagtctgtggtatttgagacactt

SEQ ID NO: 90498 - DNA, 75 bp, synthetic construct
  source 1..75: mol_type = other DNA
ctgaaagccagttttggcactgagtttagcaaaatgagaaatctcaccgagcgccttaaagccgccggacttgat

SEQ ID NO: 90499 - DNA, 75 bp, synthetic construct
  source 1..75: mol_type = other DNA
gttgctatttggcattttcttcctgagtaaaaaacgcgagcaaatagttatggaaacgcctgtaccttcagcaat

SEQ ID NO: 90500 - DNA, 75 bp, synthetic construct
  source 1..75: mol_type = other DNA
gcttcagagcctcaatggtgtgatgtttaatgacagcgagtggcggcgcttcacggagcagtatctggacaaccc

SEQ ID NO: 90501 - DNA, 75 bp, synthetic construct
  source 1..75: mol_type = other DNA
tgaatccgcaatataaaacgaaaaaacaggcagttttccagaaaatcgtctcgtttattgagaagtttaaaggcg

SEQ ID NO: 90502 - DNA, 75 bp, synthetic construct
  source 1..75: mol_type = other DNA
tgggcgatgaatatcggctgccacctgaccatcccgcagagctgcgagtaccagcaactacgcgataagcaggag

SEQ ID NO: 90503 - DNA, 75 bp, synthetic construct
  source 1..75: mol_type = other DNA
gctgttcagggttgtcggacttgtgcaagttgccaggaggagatcgaacttaagaacaaacaatggggactgtga

SEQ ID NO: 90504 - DNA, 75 bp, synthetic construct
  source 1..75: mol_type = other DNA
acggagcctgctggtatccgctgacatcagaaaaagtggcgagtgccgccgatgcgcgacgtatcgtcagccatt

SEQ ID NO: 90505 - DNA, 75 bp, synthetic construct
  source 1..75: mol_type = other DNA
aacaacccggcttaacgctgtgctggattacattgacgcggtgacggcaacagataccagcaccgcgccggatgt

SEQ ID NO: 90506 - DNA, 75 bp, synthetic construct
  source 1..75: mol_type = other DNA
taaccgcttccacgatgctcgcaccgcgcctgtttaaagagtttgaaattgagaccgggaaatccacctggctgt

SEQ ID NO: 90507 - DNA, 75 bp, synthetic construct
  source 1..75: mol_type = other DNA
agccttgaagttactttattaggcaacagggaagatcaaatagaagaaagacgcttaaaaaatacagtccgtaaa

SEQ ID NO: 90508 - DNA, 75 bp, synthetic construct
  source 1..75: mol_type = other DNA
ttcacccaacccaaatcctcgcagatttgatgaccatgctggaacattccccgggcaaaaaactgtcggaactga

SEQ ID NO: 90509 - DNA, 75 bp, synthetic construct
  source 1..75: mol_type = other DNA
ccgtgggaccgcgccgcggtggatgcgaccacggagattaaggtggcactgcgtctcgccggcacgccgatcggt

SEQ ID NO: 90510 - DNA, 75 bp, synthetic construct
  source 1..75: mol_type = other DNA
tgagcactgtagatcagaacactgatcgccagcttgcaggagtaactctcgataaagtctttgaagataagctgt

SEQ ID NO: 90511 - DNA, 75 bp, synthetic construct
  source 1..75: mol_type = other DNA
ggctgcagtctcggaaaataggtatttttgtacctgacgtggtggtgtcggagaagcatgttgatgccctggaaa

SEQ ID NO: 90512 - DNA, 75 bp, synthetic construct
  source 1..75: mol_type = other DNA
cgaacatctgctcgttcatcatgcgcgagcagcctgaagcagtgcttaagaatctggagcaggcggtgctgcgcg

SEQ ID NO: 90513 - DNA, 75 bp, synthetic construct
  source 1..75: mol_type = other DNA
cagaaccacgtttaccggcgacgttgagatccagaaaggtctgggcgttaaaggtaaaagccagttcgacagcaa

SEQ ID NO: 90514 - DNA, 75 bp, synthetic construct
  source 1..75: mol_type = other DNA
aacagcggcttgctgaacgtcagcgaaaaacgaaaccgctgttgaaatccctggaaagctggttgcgtgaaaaga

SEQ ID NO: 90515 - DNA, 75 bp, synthetic construct
  source 1..75: mol_type = other DNA
ggcgggcgtatgaaaaaacgcacgggatgcggggatgggaatgcctggttgacggggtggcggatattgacgtca

SEQ ID NO: 90516 - DNA, 75 bp, synthetic construct
  source 1..75: mol_type = other DNA
tgattttgataatccgccctttaaaaaagtgccggcttactggtttcatccaggactgacttatcttaaaggacg

SEQ ID NO: 90517 - DNA, 75 bp, synthetic construct
  source 1..75: mol_type = other DNA
gtgatttcaatacgccaccctttaagaaagagcctgatggctggatccagccggggctgacttatctcaaatggc

SEQ ID NO: 90518 - DNA, 75 bp, synthetic construct
  source 1..75: mol_type = other DNA
cagcaacctttacgggatgctggccggtggtgcggctgcgtacggatttaacaaggcttttcttcgtcccgcatc

SEQ ID NO: 90519 - DNA, 75 bp, synthetic construct
  source 1..75: mol_type = other DNA
gccttctgcctgctgaaaccagttgcccggcctgtggtggttctctgaaagaaatgggggaaacaatctcagagc

SEQ ID NO: 90520 - DNA, 75 bp, synthetic construct
  source 1..75: mol_type = other DNA
aggcggacaataacacagcagaaagagcgcttcgtgccgtctgtctcgggaaaaagaattacatgttcttcggca

SEQ ID NO: 90521 - DNA, 75 bp, synthetic construct
  source 1..75: mol_type = other DNA
gagatcttctacagccttgcatcgcttaatcagcgcattcgggagttgctggaaagactgaataacaaaataatg

SEQ ID NO: 90522 - DNA, 75 bp, synthetic construct
  source 1..75: mol_type = other DNA
ctaagctgcctgtacggcagtgaacatacggcttcggcagtcgctgttaacgaagtttttctaagctgcctgtac

SEQ ID NO: 90523 - DNA, 75 bp, synthetic construct
  source 1..75: mol_type = other DNA
taaccgcaaagttacacataacggtacggaacgtaatgcttactccttctttgaagataaaatcaaagatgcatt

SEQ ID NO: 90524 - DNA, 75 bp, synthetic construct
  source 1..75: mol_type = other DNA
aacccaaagcgctaatccacgatatcagcgaaatgctattggcgcagtacgccaacagtgagttgctgaacaaat

SEQ ID NO: 90525 - DNA, 75 bp, synthetic construct
  source 1..75: mol_type = other DNA
cgtccgttaccggcacaccttccccgtgaaatacaccgcctggagccagaagaaagctgttgcccggagtgtggc

SEQ ID NO: 90526 - DNA, 75 bp, synthetic construct
  source 1..75: mol_type = other DNA
tattaccgtctatagctatgatggtgaaactcgggaatatatttccacttcaaatgaatatcttgccgttggtgt

SEQ ID NO: 90527 - DNA, 75 bp, synthetic construct
  source 1..75: mol_type = other DNA
tgccctccacgccagctatgacgatgggcagtcaggcgaaaaatttttgcgggaactgtgcgaagtggatctgct

SEQ ID NO: 90528 - DNA, 75 bp, synthetic construct
  source 1..75: mol_type = other DNA
actgcggcggttcactgagctatctgggcgaggataccgccgaacagctggagttgatgcgtagcgccttccggg

SEQ ID NO: 90529 - DNA, 75 bp, synthetic construct
  source 1..75: mol_type = other DNA
ggcaacttgcagaaggccagaaacgttgtgaggagatcaaccgtcagaatcgtcagttgcgggtggaaaaaatcc

SEQ ID NO: 90530 - DNA, 75 bp, synthetic construct
  source 1..75: mol_type = other DNA
cgtgccgaagaaaagatcgaagaagatgaacgggaaatagaacatctgcgggctcagatagaaaaactgcgccgg

SEQ ID NO: 90531 - DNA, 75 bp, synthetic construct
  source 1..75: mol_type = other DNA
agttaccaatgaaacgttaaacacttacaaaaaagcaatcttccggataatccatcatcccataacgaacgaata

SEQ ID NO: 90532 - DNA, 75 bp, synthetic construct
  source 1..75: mol_type = other DNA
atgtttccattaaatgatctgtcgttaaaaactcagtcggttcaattaaataaagtcacatctaatactgagtct

SEQ ID NO: 90533 - DNA, 75 bp, synthetic construct
  source 1..75: mol_type = other DNA
aggaagcggtattggctgataatgtcggaacacagattaaacagcttggtgaagcagttaaccgctatatcagta

SEQ ID NO: 90534 - DNA, 75 bp, synthetic construct
  source 1..75: mol_type = other DNA
cctatagccgctgggtttaagggacttcttccctatacaagcaagaaacgcttggcttgttcggatagtgatgcc

SEQ ID NO: 90535 - DNA, 75 bp, synthetic construct
  source 1..75: mol_type = other DNA
accacaaagcctccagatacttcactgctgaaaagcattacgggtaacgtggcgtcattactgggaggcggctaa

SEQ ID NO: 90536 - DNA, 75 bp, synthetic construct
  source 1..75: mol_type = other DNA
aacaaaagagcgaaaagttaaaccagcggcagaattcgaacggtccatattcaaatgggctggtggaaaatttgg

SEQ ID NO: 90537 - DNA, 75 bp, synthetic construct
  source 1..75: mol_type = other DNA
gatacgcgttaagccaggcgaaatccatcgctgatgaactgatgaccgggtatacaaattttgcgttcagcggaa

SEQ ID NO: 90538 - DNA, 75 bp, synthetic construct
  source 1..75: mol_type = other DNA
caggtgaatcaccagaacggctcgtttctcagctgtgtggtgaatgcgctgagcggacccacggacagcccgtcc

SEQ ID NO: 90539 - DNA, 75 bp, synthetic construct
  source 1..75: mol_type = other DNA
ggctccctgcaggaacatgacggcatctgcgaaattcacgttgctaaatacgctgaaacattcgggttgacctcc

SEQ ID NO: 90540 - DNA, 75 bp, synthetic construct
  source 1..75: mol_type = other DNA
ctggattatatcgacgagctgaacgcactggatatcagcacggcacctgaaatcagctggccggaagcgccactg

SEQ ID NO: 90541 - DNA, 75 bp, synthetic construct
  source 1..75: mol_type = other DNA
cagttcgtgccttcggtattttccggtgataaacatgagtcccggagtgaacgttatacgtatattccaacaatc

SEQ ID NO: 90542 - DNA, 75 bp, synthetic construct
  source 1..75: mol_type = other DNA
tctccggcagcattcattacgacaacgtggcaccgtgttttcttggtggtatgcagttgatgattgaagaaaacg

SEQ ID NO: 90543 - DNA, 75 bp, synthetic construct
  source 1..75: mol_type = other DNA
agaattgctgacagaatatgcactcagtcggtgtgatcgcgtggcggcgttaagaaaactcccggcagaaataaa

SEQ ID NO: 90544 - DNA, 75 bp, synthetic construct
  source 1..75: mol_type = other DNA
ggagcgtatgaagtgctcggtgtctttgataaggtcactgataatatggaggcgatgaaagaaattcatcttaac

SEQ ID NO: 90545 - DNA, 75 bp, synthetic construct
  source 1..75: mol_type = other DNA
gttttgagctggggcgaaaagccttttgatcttgattcacatttgatcttccctggcggacatatctattttgat

SEQ ID NO: 90546 - DNA, 75 bp, synthetic construct
  source 1..75: mol_type = other DNA
ctttatttctggtgacttcacccttgatgacagcaccaaacttagcctgcccctaaaccaacgtaaattagttgc

SEQ ID NO: 90547 - DNA, 75 bp, synthetic construct
  source 1..75: mol_type = other DNA
cagagcagcggcttgctgaacgtcagcgaaaaacgaaaccgctgttgaaatccctggaaagctggttgcgtgaaa

SEQ ID NO: 90548 - DNA, 75 bp, synthetic construct
  source 1..75: mol_type = other DNA
atgacagtgaaagcaaagcgttttcgcataggggtggaaggtgccaccaccgacggacgcgaaatccagcgtgaa

SEQ ID NO: 90549 - DNA, 75 bp, synthetic construct
  source 1..75: mol_type = other DNA
ggcgtgtatccgtcttactgggaggaatggaaaaaagtcagggaggtggtaaaagttgcctgtccggagtgtgga

SEQ ID NO: 90550 - DNA, 75 bp, synthetic construct
  source 1..75: mol_type = other DNA
tgcgccatattctgagcgtactgccggaatggccctccaaccgtgttgacgaactcctgccatggaacgtagtac

SEQ ID NO: 90551 - DNA, 75 bp, synthetic construct
  source 1..75: mol_type = other DNA
gggaatataccgtctaaatatttgctcaatgtgcgtatttatcggttgctgtcttccggcttaaccaaactggaa

SEQ ID NO: 90552 - DNA, 75 bp, synthetic construct
  source 1..75: mol_type = other DNA
cacattacgggggtaagggcagtaaaaactacacggcccattactctgtgcctttcggttactggcagttttccg

SEQ ID NO: 90553 - DNA, 75 bp, synthetic construct
  source 1..75: mol_type = other DNA
gtatggctctgatgcgatgggtggtgtggtgaatatcattaccaaaaagaatgcagacaaatggctctcttccgt

SEQ ID NO: 90554 - DNA, 75 bp, synthetic construct
  source 1..75: mol_type = other DNA
tggtttaagggtgatgttgtggaacgttatgattttcgtcagactgcaagtaagacatctcgtggcctgcttgat

SEQ ID NO: 90555 - DNA, 75 bp, synthetic construct
  source 1..75: mol_type = other DNA
taccaggacaagagccattacaggtattgatggtgatataagaatcaacaaggcgttatggatgattgccgaaca

SEQ ID NO: 90556 - DNA, 75 bp, synthetic construct
  source 1..75: mol_type = other DNA
cgccattcatcgtgaagagtcggtaaaacgtggtatgcctgttatcagagattgccagcgttgtggtggtcgtgg

SEQ ID NO: 90557 - DNA, 75 bp, synthetic construct
  source 1..75: mol_type = other DNA
tatttattcacctgctttcagatacctacagcgcagaaaaacaattaacccgggcactggcaaaactcgcaagag

SEQ ID NO: 90558 - DNA, 75 bp, synthetic construct
  source 1..75: mol_type = other DNA
aggaaggttttcagccattcttcgcctgccagacctgtgtgcgcgacccgggccgccggggatacacaaaacaca

SEQ ID NO: 90559 - DNA, 75 bp, synthetic construct
  source 1..75: mol_type = other DNA
tgtaccgccagtctgaaatgtacggccgccagggcgtggagctgagtcgttcactgctgtcgggctgggtggatg

SEQ ID NO: 90560 - DNA, 75 bp, synthetic construct
  source 1..75: mol_type = other DNA
tgaatgtggtgttaagctcggttatcgtgctgacgctctttttttatcgtcgcggtgagtcgagatataaaccgc

SEQ ID NO: 90561 - DNA, 75 bp, synthetic construct
  source 1..75: mol_type = other DNA
gattaacctggtgttctgcgtgctggtgatacgagcacgcgggaacgtatcaaaaatcctttcattacggaggtg

SEQ ID NO: 90562 - DNA, 75 bp, synthetic construct
  source 1..75: mol_type = other DNA
ttttaatctgctgttctgcgtgctggtgatacgcgcacgcgggaacgtcacaaaaatctttccattgttgaggtg

SEQ ID NO: 90563 - DNA, 75 bp, synthetic construct
  source 1..75: mol_type = other DNA
tgcaggaatacgcctccagtcgcgggttcggtatgagtgacagggaagcccgtcgctttattaccatgcttcagg

SEQ ID NO: 90564 - DNA, 75 bp, synthetic construct
  source 1..75: mol_type = other DNA
acgtcagcaaatcagcatgctggccaccattgcctcaggtattgcgggcgggcttgtcggcaacagtacaagtgc

SEQ ID NO: 90565 - DNA, 75 bp, synthetic construct
  source 1..75: mol_type = other DNA
atcagggtgccgtgggcggctggtcactgtccgatgcacagggggcatccctgcaactgaaacagatgtatgcaa

SEQ ID NO: 90566 - DNA, 75 bp, synthetic construct
  source 1..75: mol_type = other DNA
acaccagcacagagcgcggatggctgataccaaccagtggcgatccggattatgacgaagcgctcgacaggctgt

SEQ ID NO: 90567 - DNA, 75 bp, synthetic construct
  source 1..75: mol_type = other DNA
gccgccgccgagcgcctgaccgcccacaaaaatgccgttactttgcgtgttaacgcccttaaggagcaagcatga

SEQ ID NO: 90568 - DNA, 75 bp, synthetic construct
  source 1..75: mol_type = other DNA
gatggccatgctcgggggggataaacgtcttattgatgcacataaccaggctgtggattttgctgtccgtcaggt

SEQ ID NO: 90569 - DNA, 75 bp, synthetic construct
  source 1..75: mol_type = other DNA
agtagcgccagttcgcaggtgaaattaggcagcctgcaacaagcgcgttacgatgcgcgcatcgaccagttgcgc

SEQ ID NO: 90570 - DNA, 75 bp, synthetic construct
  source 1..75: mol_type = other DNA
ccgcaaatcctcggcgcggcacaaatggacccaaaagtggtgtttgttaccacctgtttgattgccggtatcggc

SEQ ID NO: 90571 - DNA, 75 bp, synthetic construct
  source 1..75: mol_type = other DNA
cgtcaatgcagggctgaatctgcaggaaagcaacaaatggggtaacagcagccagtttaatttctggagcagtgg

SEQ ID NO: 90572 - DNA, 75 bp, synthetic construct
  source 1..75: mol_type = other DNA
gatggtgagtactacgaaattttcgtagtgcaaaaattaaacaacacaacatctgaaactatctccatgacctac

SEQ ID NO: 90573 - DNA, 75 bp, synthetic construct
  source 1..75: mol_type = other DNA
cttcgtttccggctgcaacaatcgacagccagatgctgttaaagatggttaatgaggcgcggaaactgtgcggcg

SEQ ID NO: 90574 - DNA, 75 bp, synthetic construct
  source 1..75: mol_type = other DNA
agaaaagaagttcaggacgagatcagaaaatcgcggtcgcacatagaaggggcaagaaaacttgccatgatgaat

SEQ ID NO: 90575 - DNA, 75 bp, synthetic construct
  source 1..75: mol_type = other DNA
actgtgctggaaagtctgcagcgggagggctttcagcccttcttcgcctgtcagacccgcgtgcgcgacccgggc

SEQ ID NO: 90576 - DNA, 75 bp, synthetic construct
  source 1..75: mol_type = other DNA
ccggggagatgaacccacgccgatgatcctctgtggcgatcgtctttatttgaatcgcatgtggtgtaacgagcg

SEQ ID NO: 90577 - DNA, 75 bp, synthetic construct
  source 1..75: mol_type = other DNA
aagtctgtgggggctggcctgtatgcttccgccatgtttgattccggtgcctatatcgacctgattggcaagtat

SEQ ID NO: 90578 - DNA, 75 bp, synthetic construct
  source 1..75: mol_type = other DNA
aaaggagctgctcgagatggaaggcttcaacgtgattgttgcccacgatggggaacaggcgcttgatcttctgga

SEQ ID NO: 90579 - DNA, 75 bp, synthetic construct
  source 1..75: mol_type = other DNA
tgatgaatacacagaaagctataaagatcgccgatcttactcaacactacagaaactagctagagccgttgagct

SEQ ID NO: 90580 - DNA, 75 bp, synthetic construct
  source 1..75: mol_type = other DNA
gcaggcaatgccgcaacggctcttgttgcactggtcttcagtattcttaccggaagcgctttaggcattatcggg

SEQ ID NO: 90581 - DNA, 75 bp, synthetic construct
  source 1..75: mol_type = other DNA
attccatacgctgacggtcgatgagctggcaaccagcaacagcgcctatgcgatgcgtacaaacctttctgaatc

SEQ ID NO: 90582 - DNA, 75 bp, synthetic construct
  source 1..75: mol_type = other DNA
agtgggcagggggcaagtatcccctgcttgatgatattaaacggcatttgcccaagggcgaatgtctggttgagc

SEQ ID NO: 90583 - DNA, 75 bp, synthetic construct
  source 1..75: mol_type = other DNA
tatatccgcgtgtatgagcgcgtcggtgattctgatgaataccgcgcaatcccgcttgatattgcaggggtttaa

SEQ ID NO: 90584 - DNA, 75 bp, synthetic construct
  source 1..75: mol_type = other DNA
aagtacaggatgtcggtaagaatacggcagataacgtcggcggcgtgtattaccggccgttgcagtatctgttaa

SEQ ID NO: 90585 - DNA, 75 bp, synthetic construct
  source 1..75: mol_type = other DNA
tgatcggcacctgccgtctgaacggtatcgatccggaagcgtatctgcgccatatcctgagcgtactgccggaat

SEQ ID NO: 90586 - DNA, 75 bp, synthetic construct
  source 1..75: mol_type = other DNA
gggccgcccgggatcatggcctcgccgtcccggaatgcgtcacccgccgtcaggcggtgattaatcaggcccgca

SEQ ID NO: 90587 - DNA, 75 bp, synthetic construct
  source 1..75: mol_type = other DNA
gtatccagacggtatacgagccgggaagcttcacgccgctcatccgggtcgagacagagaacggcgagcgggaaa

SEQ ID NO: 90588 - DNA, 75 bp, synthetic construct
  source 1..75: mol_type = other DNA
gctcgcctgcgcttcctcaagcaccgatagataaagaaaggggcctgccgttgctggatctccggcagccacagc

SEQ ID NO: 90589 - DNA, 75 bp, synthetic construct
  source 1..75: mol_type = other DNA
tacccggaactggcaaaggcttatccgacaaataaattgcctgatttacgtggtgagtttattcgcggctgggat

SEQ ID NO: 90590 - DNA, 75 bp, synthetic construct
  source 1..75: mol_type = other DNA
aaccgctgttgaaatccctggaaagctggttgcgtgaaaagatgaagaccctgttcttcggctctggccatggtg

SEQ ID NO: 90591 - DNA, 75 bp, synthetic construct
  source 1..75: mol_type = other DNA
agaaagctacctccgctatgtccttgacgtcatagccgactggccgataaaccgggtcggcgaactgctcccctg

SEQ ID NO: 90592 - DNA, 75 bp, synthetic construct
  source 1..75: mol_type = other DNA
cgcgattgttaaatacgtttcccagcgtgccgggatcggcatcaacgccgggcgtattcgtgcgctgggtagccc

SEQ ID NO: 90593 - DNA, 75 bp, synthetic construct
  source 1..75: mol_type = other DNA
cggtgagcgtcagacggtgcatcacccgcagacggaagcactgctctggcagcatgagaccagacatgcgtacaa

SEQ ID NO: 90594 - DNA, 75 bp, synthetic construct
  source 1..75: mol_type = other DNA
ggtgatggaactgtccgactgaatgcagaaaatgcactgtctggcggtgaatacaacggtattttctttgcgaaa

SEQ ID NO: 90595 - DNA, 75 bp, synthetic construct
  source 1..75: mol_type = other DNA
tctttacgtcatttttcatctggcactggaaacagcaatgcgacaaggtgaaatcttgtcattgcgttgggaaca

SEQ ID NO: 90596 - DNA, 75 bp, synthetic construct
  source 1..75: mol_type = other DNA
ttatcctgcaataccaaaaacagcttcctgtattctgaatcagggcttttgactacagttggcgtgaaagatttg

SEQ ID NO: 90597 - DNA, 75 bp, synthetic construct
  source 1..75: mol_type = other DNA
ctggaggtactggtagcagactttggccattatctcgcgagttatacccaaagcagtttttgagattatcaggcg

SEQ ID NO: 90598 - DNA, 75 bp, synthetic construct
  source 1..75: mol_type = other DNA
ccgctggacccggtccgttatctcattcaaacatgctggttattgatcggtgcatcgcgcaaagaaacgccgaaa

SEQ ID NO: 90599 - DNA, 75 bp, synthetic construct
  source 1..75: mol_type = other DNA
cgttcgccctgaccgctacgcttatcctcaccggctgtagccactcgcaaccggaacaggaaggccgcccgcagg

SEQ ID NO: 90600 - DNA, 75 bp, synthetic construct
  source 1..75: mol_type = other DNA
attatctgatttttaagcaggatttcataaaaagaagaatgctcgttaatccagcgacacatcctgtcggcgtga

SEQ ID NO: 90601 - DNA, 75 bp, synthetic construct
  source 1..75: mol_type = other DNA
tcctgaaactgctgccactggggggattattgaatcagaactggttgccattccggctatgcaaaaacggctgga

SEQ ID NO: 90602 - DNA, 75 bp, synthetic construct
  source 1..75: mol_type = other DNA
gtgtcgtcgttgcccgttgctgccgtcttacctgaattacttaccgctctcgattgtgcatcgcaggtgttatta

SEQ ID NO: 90603 - DNA, 75 bp, synthetic construct
  source 1..75: mol_type = other DNA
cgcatcgctacatcacgcgcgacgccagcgccggaagtgaaaaccatatcgccctgagcgagcaggagtttttta

SEQ ID NO: 90604 - DNA, 75 bp, synthetic construct
  source 1..75: mol_type = other DNA
ttttactttcccgggggcagatcgaagccctgcaacgtatccaggccgaaaagcgtcagaaatctgtgcttggtg

SEQ ID NO: 90605 - DNA, 75 bp, synthetic construct
  source 1..75: mol_type = other DNA
tgccagtccttcgctgatgactgaacttgcggagttgcttcatcacctgcaggcgcgtcgccagcgactgatgtc

SEQ ID NO: 90606 - DNA, 75 bp, synthetic construct
  source 1..75: mol_type = other DNA
actcatctggtgtgggcgacgggaggtggaatggtgccggaagaagagatgaatcaatatctggcaaaaggccgt

SEQ ID NO: 90607 - DNA, 75 bp, synthetic construct
  source 1..75: mol_type = other DNA
ctgttctccctgctcagcgagctgctggaagccagcctgccgtcacgggtgatcgcgctggatctggcgtccctg

SEQ ID NO: 90608 - DNA, 75 bp, synthetic construct
  source 1..75: mol_type = other DNA
aagaaattgatggatgggttttacagggagatattcataatggatattattaatctcaagctacatgaatggctt

SEQ ID NO: 90609 - DNA, 75 bp, synthetic construct
  source 1..75: mol_type = other DNA
tgccttagctgctatagcagctaaaaaaatttatggtgaagattctaatttattaatattgtcggccgatcacat

SEQ ID NO: 90610 - DNA, 75 bp, synthetic construct
  source 1..75: mol_type = other DNA
cggtctgtgatttatcgacggtttctgatcgttccctggtggatattgtgctggcgctaccgttactgaatgcta

SEQ ID NO: 90611 - DNA, 75 bp, synthetic construct
  source 1..75: mol_type = other DNA
gccgcgtatcgttttcacggcaacggatgctgacgtcattaaaacttacgtccggttagggctgggggtaggggt

SEQ ID NO: 90612 - DNA, 75 bp, synthetic construct
  source 1..75: mol_type = other DNA
tcctcaggtgttgcctaaaggattcaagggaggatttacaataactaatcaggatacgggggaagtgatgccgta

SEQ ID NO: 90613 - DNA, 75 bp, synthetic construct
  source 1..75: mol_type = other DNA
gtggaggcatccggtgccagcctagagaaggggcggcatgaccagctgcttacagcgcttcgtgcgctgctgtta

SEQ ID NO: 90614 - DNA, 75 bp, synthetic construct
  source 1..75: mol_type = other DNA
aggattttttaacccgacaccctgacgcggttgtgttcagtgcgaaaaaacgccagtggggcagccaggaagatt

SEQ ID NO: 90615 - DNA, 75 bp, synthetic construct
  source 1..75: mol_type = other DNA
ggttggggtattggtgttgtattctttttcgcagtgaaaagaaaacattctatgcaagagctaaatgtatttcgc

SEQ ID NO: 90616 - DNA, 75 bp, synthetic construct
  source 1..75: mol_type = other DNA
tgcttctggaaatcagagtgtaggaatagtttctggtcgtaatacggatattactgcagctcagtcagtaactgt

SEQ ID NO: 90617 - DNA, 75 bp, synthetic construct
  source 1..75: mol_type = other DNA
cctgatattgataacgcaatcatcatgctcgaccgcatagatacggcggaaagttacgatgatgaccgtattgag

SEQ ID NO: 90618 - DNA, 75 bp, synthetic construct
  source 1..75: mol_type = other DNA
aacctacgataccaacgtggaaggttctatcgtctacggcgcaccgcgtaatttcagcattaccggcacgtatca

SEQ ID NO: 90619 - DNA, 75 bp, synthetic construct
  source 1..75: mol_type = other DNA
atgaatgcctggattgataaggtaaataccaatccagagacgctcttaccaaaacagtttaatacatttggcttt

SEQ ID NO: 90620 - DNA, 75 bp, synthetic construct
  source 1..75: mol_type = other DNA
gaatgcgtgctgtgcggcggccggatggtataccgccgggccattgcggggctgaatgtatcagggctgaagaaa

SEQ ID NO: 90621 - DNA, 75 bp, synthetic construct
  source 1..75: mol_type = other DNA
ctttgctgataccggttgcggaccatttacgatcaactggaaagcgcaagacggacttgcaaggattaatggaca

SEQ ID NO: 90622 - DNA, 75 bp, synthetic construct
  source 1..75: mol_type = other DNA
tgaagcgttccggtatccaactgttgcaccagaagtgttcgtttgcgaattaccaggtgaagaacgacggccaac

SEQ ID NO: 90623 - DNA, 75 bp, synthetic construct
  source 1..75: mol_type = other DNA
gtctgtttaccgctctcacgactggaaaataacgaggagtcacatccgctgttagcaacctgcgtcagcgaaatc

SEQ ID NO: 90624 - DNA, 75 bp, synthetic construct
  source 1..75: mol_type = other DNA
ttcttgaacgtatccgtaagctgactccgcagcatgtaaccgcgccgtgccggacagtggacgagtggcgagagt

SEQ ID NO: 90625 - DNA, 75 bp, synthetic construct
  source 1..75: mol_type = other DNA
accggaataccgatcgtctgctctgtctactgacgttactgcctgtactgattctggctgtcgtttcaggtgtca

SEQ ID NO: 90626 - DNA, 75 bp, synthetic construct
  source 1..75: mol_type = other DNA
ggatggcagaactcacaggcaaatttgcgaaatgttcagccgggcgcagcgggatccgttctggataaaaaacgt

SEQ ID NO: 90627 - DNA, 75 bp, synthetic construct
  source 1..75: mol_type = other DNA
cgggagacgaaaaacgagcaggtggtattacaccagataattgatcgccggacagcatcactgtgcagtgtcggg

SEQ ID NO: 90628 - DNA, 75 bp, synthetic construct
  source 1..75: mol_type = other DNA
atggaaaattcacgcatccctggggaacatttttttaccaccagtgataatacagcgttgttttatcggcactgg

SEQ ID NO: 90629 - DNA, 75 bp, synthetic construct
  source 1..75: mol_type = other DNA
attattttcgcgtcaacataccgcatggatagtcccactcgttatcggaattatcatctttattgttgcaccata

SEQ ID NO: 90630 - DNA, 75 bp, synthetic construct
  source 1..75: mol_type = other DNA
cagacatagcgttatatatattggcatttttatcagccggatatacattccagtatatttacaatgacaatatat

SEQ ID NO: 90631 - DNA, 75 bp, synthetic construct
  source 1..75: mol_type = other DNA
cacgatggctgaagccattgcataccgtgaaaaattcaacgaacgcgagctgatgctcctgtggccggacttcat

SEQ ID NO: 90632 - DNA, 75 bp, synthetic construct
  source 1..75: mol_type = other DNA
actgaaaacgctacgcgaaaacgcccgtagctggctgttgaaatacccggaacatgcccttaccggcctgctgcc

SEQ ID NO: 90633 - DNA, 75 bp, synthetic construct
  source 1..75: mol_type = other DNA
atcagttggggaaaagttggcaccaaagggcaaagccagataaaaagtttttcagatgctgcggcagcggcaaaa

SEQ ID NO: 90634 - DNA, 75 bp, synthetic construct
  source 1..75: mol_type = other DNA
ctcgccaactggacgtttaaccttaatagcgacttccagtccagccaatttgcggataacgccaatactgttgcc

SEQ ID NO: 90635 - DNA, 75 bp, synthetic construct
  source 1..75: mol_type = other DNA
taacttcaacaatcagtacgactccaatcagatcaatgacacggttaccgcccgcggtaaaacccgccatagcgg

SEQ ID NO: 90636 - DNA, 75 bp, synthetic construct
  source 1..75: mol_type = other DNA
ccgttccctgaatcactacccgtgacgaaaagcgactgttgcctgcggcgccgtgctgcccgaactgcggcggtt

SEQ ID NO: 90637 - DNA, 75 bp, synthetic construct
  source 1..75: mol_type = other DNA
gttgcattatttcgtcggttgtttcgcgggcgtgatgatgtatgggcacttagatgggaaagtaaaaccagcggc

SEQ ID NO: 90638 - DNA, 75 bp, synthetic construct
  source 1..75: mol_type = other DNA
catccatccgcagactcatcttgcctgcttcagcggtgtgctgcaagcggatgcgtacgccgggttcaacgagct

SEQ ID NO: 90639 - DNA, 75 bp, synthetic construct
  source 1..75: mol_type = other DNA
aaggtcagctaaagcatcgtgaaatttttgatgacataaagaaaaagattgataacggtgaatggaaagaaggca

SEQ ID NO: 90640 - DNA, 75 bp, synthetic construct
  source 1..75: mol_type = other DNA
caaactggagaaggggtgcaggccatcggagcaatgtcttgagttaatatcttcagcgcttatgattaagtccag

SEQ ID NO: 90641 - DNA, 75 bp, synthetic construct
  source 1..75: mol_type = other DNA
aagcggatgcgtacgccgggttcaacgagctgtatcgcaatggtgggataacggaagctgcctgctgggctcatg

SEQ ID NO: 90642 - DNA, 75 bp, synthetic construct
  source 1..75: mol_type = other DNA
ccgcctcagacctgctcaggatgtatatccttaaagagcatggtggtatttatacagacacagatatgatgcctg

SEQ ID NO: 90643 - DNA, 75 bp, synthetic construct
  source 1..75: mol_type = other DNA
tataaaatcaaacttcgtgcatctggctacagacttgtatatcaagtcattgatgagaaagtcgttttactcgtt

SEQ ID NO: 90644 - DNA, 75 bp, synthetic construct
  source 1..75: mol_type = other DNA
ggctaacgcgacgatgctcggcagtaagctgaatctgacgcaaatggccgttggtgatgcaaatggtgtcttgcc

SEQ ID NO: 90645 - DNA, 75 bp, synthetic construct
  source 1..75: mol_type = other DNA
ggttgtgtttagtgcaaaaaaacgtcagtggggaactcaggaggatttggcatgcgcacagtggatctgggggcg

SEQ ID NO: 90646 - DNA, 75 bp, synthetic construct
  source 1..75: mol_type = other DNA
agtgcccccacgtcagatacgtcactaactcatgcggcagccgtgcctgcccgtcctgcggaaaaaaggccacag

SEQ ID NO: 90647 - DNA, 75 bp, synthetic construct
  source 1..75: mol_type = other DNA
gataagacacatattagtataccatctaccagaaactataatggctactatatgagcatgtgtgttaataattta

SEQ ID NO: 90648 - DNA, 75 bp, synthetic construct
  source 1..75: mol_type = other DNA
ccgaaaaccggccttatctgcgcgcgctttatgcagcaattctcgcaaatgtgcacttacagcgccatcaggatg

SEQ ID NO: 90649 - DNA, 75 bp, synthetic construct
  source 1..75: mol_type = other DNA
gcacgtgaaagccatcgaaatcttcatcaacgaggcgatcagagaaacaaggatacagcagatcagttgcgggat

SEQ ID NO: 90650 - DNA, 75 bp, synthetic construct
  source 1..75: mol_type = other DNA
tgattaagttgctgaccggattattgctgctcgcctggccttttttaatctggctaggtttggtgcataacagcc

SEQ ID NO: 90651 - DNA, 75 bp, synthetic construct
  source 1..75: mol_type = other DNA
aacggtaatattgatgcaaagagcaaacttcaagatctcaaaaagctaaagctaaagcgaatggatagaaggaag

SEQ ID NO: 90652 - DNA, 75 bp, synthetic construct
  source 1..75: mol_type = other DNA
acacgggcggggctgtggcggatgagttcgataaacccaccacggatatccgtaaggacagatgcagcaagtgca

SEQ ID NO: 90653 - DNA, 75 bp, synthetic construct
  source 1..75: mol_type = other DNA
agcgcgttgagatcccgacctatgaaaccgggccgcaggatatacatcccatgttcctggaaaatcgcgtttatc

SEQ ID NO: 90654 - DNA, 75 bp, synthetic construct
  source 1..75: mol_type = other DNA
atgacggacggacagtcagaaacggtgctgaccggtaatctggtgatggcactgtttaaccatgacaccagtcgc

SEQ ID NO: 90655 - DNA, 75 bp, synthetic construct
  source 1..75: mol_type = other DNA
gacgttactttcggtctgcattcatggtgctgttgtggcgggtctgctctatacctcggtacatcaggttattga

SEQ ID NO: 90656 - DNA, 75 bp, synthetic construct
  source 1..75: mol_type = other DNA
aagaagtgatcacccgaacagtgaaagtgaccaacgtgggcaaaccttccgtggcggaagaacgcagcgaaatta

SEQ ID NO: 90657 - DNA, 75 bp, synthetic construct
  source 1..75: mol_type = other DNA
ccgtatcaacaggaatttttggatacatcactttaggtgaaaaagttgatcttattcaggcaacaggagcagtga

SEQ ID NO: 90658 - DNA, 75 bp, synthetic construct
  source 1..75: mol_type = other DNA
gttatcaggaccgccggattagtgcaggacagaacgggcgaaagggtgcggatgattgtcattgacacgctggcc

SEQ ID NO: 90659 - DNA, 75 bp, synthetic construct
  source 1..75: mol_type = other DNA
ttgtgttttcctgatgcatgttcacctggtctttgtcaccagataccgacgtcagatttttgaccatgacgcgac

SEQ ID NO: 90660 - DNA, 75 bp, synthetic construct
  source 1..75: mol_type = other DNA
ttatctccgacagtggtgtccgttctgtctggttactccataaccttgagaatctcaaaagacgatactgaacaa

SEQ ID NO: 90661 - DNA, 75 bp, synthetic construct
  source 1..75: mol_type = other DNA
ttttacaacctggaagaaattgatcgctggattgagcgccaggcatcagcaagaccaagacgtcatcttacttga

SEQ ID NO: 90662 - DNA, 75 bp, synthetic construct
  source 1..75: mol_type = other DNA
tggctaggtttggtgcataacagcctgcactggctgttgccgctgatggcgctgctgcttttattgcgcctgcgc

SEQ ID NO: 90663 - DNA, 75 bp, synthetic construct
  source 1..75: mol_type = other DNA
cagatatctacgaagacgaaggtattctgatgatctcgccgggagcgaccaacccggagctgacccaacgcggtt

SEQ ID NO: 90664 - DNA, 75 bp, synthetic construct
  source 1..75: mol_type = other DNA
cccgaccgaatccgtggccattgatattgcttatgaagtctccggcagtggcgactggcgcactgacggtttcat

SEQ ID NO: 90665 - DNA, 75 bp, synthetic construct
  source 1..75: mol_type = other DNA
tgtagctggtcttctcacataccttggtttgggagaaggctctgcattacctgttggtgtgcctgttccatggcc

SEQ ID NO: 90666 - DNA, 75 bp, synthetic construct
  source 1..75: mol_type = other DNA
tacgtgacggtgattggccttggcggcagtgaaaaacaggcgaaggaaggcgagtttgaggccgtgatgctggca

SEQ ID NO: 90667 - DNA, 75 bp, synthetic construct
  source 1..75: mol_type = other DNA
tcgttcaccgaagaagaaaccgaccttcttccctgagcaaatcgaaggctacgaatacatgtacggtggaaatga

SEQ ID NO: 90668 - DNA, 75 bp, synthetic construct
  source 1..75: mol_type = other DNA
attcagtaccaccattaataatgcgctggcactgaaagcgccgctgttgagtccggaactcaccggaacgccaac

SEQ ID NO: 90669 - DNA, 75 bp, synthetic construct
  source 1..75: mol_type = other DNA
ccgctaaaaattactcatatggcggtgggcgatggcggcggaacattgccaacgccggacgccaagcagacagca

SEQ ID NO: 90670 - DNA, 75 bp, synthetic construct
  source 1..75: mol_type = other DNA
cgctgaatatgctctatatcgacccgcagaacagcagtcagattattgccgaacaggtgattcctgaaaacgagg

SEQ ID NO: 90671 - DNA, 75 bp, synthetic construct
  source 1..75: mol_type = other DNA
gggatctggcaatcaatacggtgcgacaggtttcgctttccaacggtcagaacgactatcagggggcaacctacg

SEQ ID NO: 90672 - DNA, 75 bp, synthetic construct
  source 1..75: mol_type = other DNA
tgaagcacgtcttgtcagcaactggaccagtgcggcccgctcttatatagggaaaaactacacgactctccaggg

SEQ ID NO: 90673 - DNA, 75 bp, synthetic construct
  source 1..75: mol_type = other DNA
atgcgcgttttctggatgcggtgaactttgtggcaggcaatccggaggccgacccggagcaggagctgactgacc

SEQ ID NO: 90674 - DNA, 75 bp, synthetic construct
  source 1..75: mol_type = other DNA
cgaaacgttctcggtatccgggacggaatcatcagcgaccagacagcattgagaatgcttcaggagtacatcagg

SEQ ID NO: 90675 - DNA, 75 bp, synthetic construct
  source 1..75: mol_type = other DNA
gaagctgcaacagcgaagctggtcagcgaacgtctctttattgccacggagctggtttttctgctggagaggttt

SEQ ID NO: 90676 - DNA, 75 bp, synthetic construct
  source 1..75: mol_type = other DNA
ctgcagggccggatactgccgaagattattatacaacatactcaccattatggggacaatatccggaagcattgc

SEQ ID NO: 90677 - DNA, 75 bp, synthetic construct
  source 1..75: mol_type = other DNA
atatccggtcagaatggatatggaaaaagaaggctggtttcagatggtacgaaaaatatctccggatatccctgt

SEQ ID NO: 90678 - DNA, 75 bp, synthetic construct
  source 1..75: mol_type = other DNA
cgtgccgggcaaggaaatgcccgatctgagcgcctttcaactggaaggctgccaggtgctggagtatgcgcggca

SEQ ID NO: 90679 - DNA, 75 bp, synthetic construct
  source 1..75: mol_type = other DNA
ggctgcagaacacttaccggttcgcatgcctcgcctctgctctgcagaacgcctctctgaaagtatggtcgatga

SEQ ID NO: 90680 - DNA, 75 bp, synthetic construct
  source 1..75: mol_type = other DNA
atgactaagagcaccacgatgatgagtagcttcatcatgaccctttccttatttaaggccccttcctcgggaggg

SEQ ID NO: 90681 - DNA, 75 bp, synthetic construct
  source 1..75: mol_type = other DNA
cgtcttattgatgcacataaccaggctgtggattttgctgtccgtcaggtggaggcgctggcttccacacgggtg

SEQ ID NO: 90682 - DNA, 75 bp, synthetic construct
  source 1..75: mol_type = other DNA
gcgtaaccgctggttcagcgtgatggcggggccgtctgtacgcgtgaatgaatggttcagtgcttatgcgatggc

SEQ ID NO: 90683 - DNA, 75 bp, synthetic construct
  source 1..75: mol_type = other DNA
gatccgtcgaaagccaccattagtgtgaaagatatgacaattacggtaaacggcgtggcgacaggtaaggtgcag

SEQ ID NO: 90684 - DNA, 75 bp, synthetic construct
  source 1..75: mol_type = other DNA
gggcagagcaccacgctgaccgtggcattccagccggagggcgcaactgacaagagcttccgtgcggtgtcagcg

SEQ ID NO: 90685 - DNA, 75 bp, synthetic construct
  source 1..75: mol_type = other DNA
tttctgttttcgccctttcctgcaggagcaactatcatcgcgtggtctgagcttcaaccagcccccttccagaat

SEQ ID NO: 90686 - DNA, 75 bp, synthetic construct
  source 1..75: mol_type = other DNA
gctgttatgcaacttagtgctgatatggcgctgaatgaagcaggcaaaattcttaccgcagatattcaaggggcg

SEQ ID NO: 90687 - DNA, 75 bp, synthetic construct
  source 1..75: mol_type = other DNA
catcgtcccggctacgacctgaccttctccgcccccaaaagtgtctccgtgatggccatgttaggcggtgataaa

SEQ ID NO: 90688 - DNA, 75 bp, synthetic construct
  source 1..75: mol_type = other DNA
aggttcagtctattaccccaggcttacctattcctaaatatccctccaaagttaaaatatatcatgtccatggtt

SEQ ID NO: 90689 - DNA, 75 bp, synthetic construct
  source 1..75: mol_type = other DNA
cggcgctgaatgaggccaaagctatcctgattgctgattgtgaaaatgggggggggttatgcgtgatgatcgttt

SEQ ID NO: 90690 - DNA, 75 bp, synthetic construct
  source 1..75: mol_type = other DNA
aggcagacatctgtgaatctcttcacgagcacgccgatgagctttaccgcagctgcctctcacgcttcggggatg

SEQ ID NO: 90691 - DNA, 75 bp, synthetic construct
  source 1..75: mol_type = other DNA
gccggttacaaacctgccgtgaaaagccgtttcagtaagtcagccagtagcaaattctctcatactatcgctttt

SEQ ID NO: 90692 - DNA, 75 bp, synthetic construct
  source 1..75: mol_type = other DNA
ttttaatgccgatgtcagtctggcccctgctgccgtcagtctctatcttgctggcggtatggcgttacagtggct

SEQ ID NO: 90693 - DNA, 75 bp, synthetic construct
  source 1..75: mol_type = other DNA
agctatcgctctggccgttcctaagcaaaaacaccacccatttttatctgccgaagagttgccttattttattca

SEQ ID NO: 90694 - DNA, 75 bp, synthetic construct
  source 1..75: mol_type = other DNA
tggtatcacaatgatatttatagctccttccccttcagctcaggacaaacctgccagcactgacaataccagcgg

SEQ ID NO: 90695 - DNA, 75 bp, synthetic construct
  source 1..75: mol_type = other DNA
tcgatattgttgaaggccgttttgatgccgggatacgactgggtgaaaatgttgataaagatatggttgcagtca

SEQ ID NO: 90696 - DNA, 75 bp, synthetic construct
  source 1..75: mol_type = other DNA
atatcaaacagcctgaaatggcttatttgtatcatgaagatattccacgattactggagttgttatctggtgatg

SEQ ID NO: 90697 - DNA, 75 bp, synthetic construct
  source 1..75: mol_type = other DNA
cggtttcagacgaaggcgtcatggaggccattcgtgaagcgcttgaaggaggcgatccgcgcaccgccggtctga

SEQ ID NO: 90698 - DNA, 75 bp, synthetic construct
  source 1..75: mol_type = other DNA
aggacttgtacggcgcaatggtatgcaggattcacagttggatactattcaacaacgtcttaagcaggcttcaga

SEQ ID NO: 90699 - DNA, 75 bp, synthetic construct
  source 1..75: mol_type = other DNA
ctgaaactgaaagacggcctgccgttcggcaccggtgacgagactgaaatgcagtatgacgtgacactgcgtgaa

SEQ ID NO: 90700 - DNA, 75 bp, synthetic construct
  source 1..75: mol_type = other DNA
ggatagcataatagagaacaattttattgcttcattacttgatgattataaaaaagttttagcaaaggattctaa

SEQ ID NO: 90701 - DNA, 75 bp, synthetic construct
  source 1..75: mol_type = other DNA
ggtgaaagccgtgaataccgtgtcacattccgggaactgaccgcgaaagacagcattgatgctgaatcagaagcc

SEQ ID NO: 90702 - DNA, 75 bp, synthetic construct
  source 1..75: mol_type = other DNA
gggggctggttacggctgaaaatacgattatcggtggcaatgccaccggtgtcggaaccctgaatgtgcaggatc

SEQ ID NO: 90703 - DNA, 75 bp, synthetic construct
  source 1..75: mol_type = other DNA
cgaaatcaaccgtaacaaacaacaggctggcgtgacagccggaaaaccaaaactcgacctgacaaacactgactg

SEQ ID NO: 90704 - DNA, 75 bp, synthetic construct
  source 1..75: mol_type = other DNA
ggcaatccgggaagcacttgagggggctgatccacgcactgccgggctgacagagcaactggcaaagggatatgt

SEQ ID NO: 90705 - DNA, 75 bp, synthetic construct
  source 1..75: mol_type = other DNA
attcaatagccttcccttccccggaaggcgcattacgtgagcctaacggcctgctggcactggggggcgatctta

SEQ ID NO: 90706 - DNA, 75 bp, synthetic construct
  source 1..75: mol_type = other DNA
gagggcattcttaccgggtcgcactggggggctatccgcgcgacggtgaaggatggtcgctttgtggcggcaaaa

SEQ ID NO: 90707 - DNA, 75 bp, synthetic construct
  source 1..75: mol_type = other DNA
atggcagaagatcgcagcacggtgacggcgacgaccggcatgacggtgacacccgccagtgcttccgtagtgaaa

SEQ ID NO: 90708 - DNA, 75 bp, synthetic construct
  source 1..75: mol_type = other DNA
tggcaggggcggcagtatcaggtataccccattcaggggacgggatttgaactgaacggcaagggcagtgctgcc

SEQ ID NO: 90709 - DNA, 75 bp, synthetic construct
  source 1..75: mol_type = other DNA
aggtggaaaacgcctttatggcctgggtgggcggtgcgaatgaggccagcggggtgacaaaaacgctctccggca

SEQ ID NO: 90710 - DNA, 75 bp, synthetic construct
  source 1..75: mol_type = other DNA
atggccgacgaaaacagactcaattccattctgtgtaagtttgacgcggactggatggcgagcgatgaagccaga

SEQ ID NO: 90711 - DNA, 75 bp, synthetic construct
  source 1..75: mol_type = other DNA
cgtggcctccttcaaacaaccgatattggcgacactcaagagggatccactacatcagcgactgggggaagagat

SEQ ID NO: 90712 - DNA, 75 bp, synthetic construct
  source 1..75: mol_type = other DNA
taagaactctacttaataactcaagaacagaacaaccaaattatgattttaaacagggaggtgatgctgccaact

SEQ ID NO: 90713 - DNA, 75 bp, synthetic construct
  source 1..75: mol_type = other DNA
atgaaaaccgccactgcgccgttaccaccgctgcgttcggtcaaggttctggaccagttgcgtgagcgcatacgc

SEQ ID NO: 90714 - DNA, 75 bp, synthetic construct
  source 1..75: mol_type = other DNA
gatgccgttagtggcggataaccccctgacaccggcaggtctgctggcccccacctaccgtaaccagctggcgtt

SEQ ID NO: 90715 - DNA, 75 bp, synthetic construct
  source 1..75: mol_type = other DNA
aagtaaagggatgtctcgggaagacgttgcagaggtgacaactttacctcttacagagattgataagctaattaa

SEQ ID NO: 90716 - DNA, 75 bp, synthetic construct
  source 1..75: mol_type = other DNA
attaacgtgaaataccgttatgagtttacggacacgctggggctggtgacgtcattcagctatgccaacgctgaa

SEQ ID NO: 90717 - DNA, 75 bp, synthetic construct
  source 1..75: mol_type = other DNA
acgatttcagccgcttgcaggcacagagtaacgggctgttcagcgaagccgatctcaaccgcgagctgaaaaaac

SEQ ID NO: 90718 - DNA, 75 bp, synthetic construct
  source 1..75: mol_type = other DNA
cggcgaatggcgaaacgggtatggcggcgggagcgtgacctgacggggtggatgtcgctgtcgcgtaaaccggag

SEQ ID NO: 90719 - DNA, 75 bp, synthetic construct
  source 1..75: mol_type = other DNA
ccaccggattaatgctgttactgtcgcaggcatgatatgtagtggatggcgcatttataatgcttctcctttgtt

SEQ ID NO: 90720 - DNA, 75 bp, synthetic construct
  source 1..75: mol_type = other DNA
tcccggtagcgataatcttaacgggattaacgtgaaataccgttatgaatttacggacacgctggggctggtgac

SEQ ID NO: 90721 - DNA, 75 bp, synthetic construct
  source 1..75: mol_type = other DNA
gactcgcgtaatttatccggcagggcaaaaacaagtgcaacttgccgtgacaaataatgatgaaaatagcaccta

SEQ ID NO: 90722 - DNA, 75 bp, synthetic construct
  source 1..75: mol_type = other DNA
aatagaattaccccctgataaagtttattcactaaggaattattcaacagaaccattccctgttagctttgagca

SEQ ID NO: 90723 - DNA, 75 bp, synthetic construct
  source 1..75: mol_type = other DNA
cagacgttctgacgcgtctaccggagtggccggaagaccgactggaagagttgctgccccttgagggatttacct

SEQ ID NO: 90724 - DNA, 75 bp, synthetic construct
  source 1..75: mol_type = other DNA
ctcggttttctggaaggcgagcatcgtttgttcgcccagcttctgtatggaacgggcatgcggatcagtgagggt

SEQ ID NO: 90725 - DNA, 75 bp, synthetic construct
  source 1..75: mol_type = other DNA
aacaggcttatgtccactgggttcgtgccttcatccgtttccacggtgtgcgtcacccggcaaccttgggcagca

SEQ ID NO: 90726 - DNA, 75 bp, synthetic construct
  source 1..75: mol_type = other DNA
tttttttgagtttttagggatatttccgttggcgctgactgaagcacgtctggctgtcttacggagtgggtatgg

SEQ ID NO: 90727 - DNA, 75 bp, synthetic construct
  source 1..75: mol_type = other DNA
gactggttgcgcgaagtgatcgtgaagctcaatgactggccgtcgaaccgtgtgcatgaactgctgccctggaac

SEQ ID NO: 90728 - DNA, 75 bp, synthetic construct
  source 1..75: mol_type = other DNA
ggtatcttcatgcccggacgagcgctcccggtagcgataatcttaacgggattaacgtgaaataccgttatgaat

SEQ ID NO: 90729 - DNA, 75 bp, synthetic construct
  source 1..75: mol_type = other DNA
atccggtgcgcctgcatgggcgtctgaacatcagtccacgctgagcgcggggtatcttcatgtctcgacgaacgt

SEQ ID NO: 90730 - DNA, 75 bp, synthetic construct
  source 1..75: mol_type = other DNA
cgtaagcagaaccctgaaaacctgtttaccgctgccgaagaaacgcagatcgaactggaagaagcccaggacgaa

SEQ ID NO: 90731 - DNA, 75 bp, synthetic construct
  source 1..75: mol_type = other DNA
tcccggtagtgatgatctgaacgggattaacgtgaaataccgttatgagtttatggacgcgctggggctgattac

SEQ ID NO: 90732 - DNA, 75 bp, synthetic construct
  source 1..75: mol_type = other DNA
acctaccgctctgatgagtgtggttacacgggtggggctgtggcggatgagttcgataaacccaccacggatatc

SEQ ID NO: 90733 - DNA, 75 bp, synthetic construct
  source 1..75: mol_type = other DNA
aggttgctgagaataaaagccaggggataccgaaaccgggagcgctttaaactgggagtgatgttccactacggt

SEQ ID NO: 90734 - DNA, 75 bp, synthetic construct
  source 1..75: mol_type = other DNA
gcgcgatggatattgcaaagattgagacccggcatctggcacagcttgtgaaagcgattgatgataaaggcgtgc

SEQ ID NO: 90735 - DNA, 75 bp, synthetic construct
  source 1..75: mol_type = other DNA
ggacggctataaaggccgggaactgacccgactggcgctggagctgaatctgcatgtcttcctccgttccagtga

SEQ ID NO: 90736 - DNA, 75 bp, synthetic construct
  source 1..75: mol_type = other DNA
tgcgcttcgccacgccgcgcacgtcactactggaaaccaaaatcaccagcaataaaccgctggatctggtgtggg

SEQ ID NO: 90737 - DNA, 75 bp, synthetic construct
  source 1..75: mol_type = other DNA
acggagcgctgtttcccggtcgcatcatgctggcgaacacctgtatgtgggattaccggggagatgaatgcgggt

SEQ ID NO: 90738 - DNA, 75 bp, synthetic construct
  source 1..75: mol_type = other DNA
atccgatcgtttccatcgaagacggtctggacgaatctgactgggacggtttcgcataccagaccaaagttctgg

SEQ ID NO: 90739 - DNA, 75 bp, synthetic construct
  source 1..75: mol_type = other DNA
atgaacgcgataatatcgcccgattattactatgttcttaccgttgctggtcagtctaatgccatggcgtatggc

SEQ ID NO: 90740 - DNA, 75 bp, synthetic construct
  source 1..75: mol_type = other DNA
gtggctgagataaaaacgctgcatctggtcccgcgtgaagggatgcaggtgagtgagaaaccgtcggtggcgagg

SEQ ID NO: 90741 - DNA, 75 bp, synthetic construct
  source 1..75: mol_type = other DNA
ctcggtgaagaacatcgcaagcagatcgagaaagaagcggttgagattgttagcgaagttctgaaaaacgcgtaa

SEQ ID NO: 90742 - DNA, 75 bp, synthetic construct
  source 1..75: mol_type = other DNA
cccgaccgaatccgtggccattgatattgcttatgaaggttacggcagtggcgactggcgcactgacggtttcat

SEQ ID NO: 90743 - DNA, 75 bp, synthetic construct
  source 1..75: mol_type = other DNA
agaatgaatgccaggtgatgccgtacccgaacccggcagatatcgctcgcatgaagcaggataaatccatcaatc

SEQ ID NO: 90744 - DNA, 75 bp, synthetic construct
  source 1..75: mol_type = other DNA
cgcaattgccgaccgctttggtgccaaaccgatgattgttaccggtatgctgatgcgcgccgccggattcgccac

SEQ ID NO: 90745 - DNA, 75 bp, synthetic construct
  source 1..75: mol_type = other DNA
ggtatcggacagaacggtctgctggttgtgctccctgttctggtcatacagacaaatctgagtctgtctgtatgg

SEQ ID NO: 90746 - DNA, 75 bp, synthetic construct
  source 1..75: mol_type = other DNA
cgtggggagctggcgtgcagtttaacccgaccgaatccgtggccattgatgtcgcttatgaaggctccggcagtg

SEQ ID NO: 90747 - DNA, 75 bp, synthetic construct
  source 1..75: mol_type = other DNA
ttttctggccgggctggcacttctgaaaatgaatccggcagaggcttaccgactggccgcatgggctgatgatga

SEQ ID NO: 90748 - DNA, 75 bp, synthetic construct
  source 1..75: mol_type = other DNA
aaatcttcatctgatgaaggctacttccctaaaattttctcccgtgtaaccaaagtggatgcaccggtgcaggga

SEQ ID NO: 90749 - DNA, 75 bp, synthetic construct
  source 1..75: mol_type = other DNA
tatgctggcgaatacctgtatgtgggattacaggggagatgaatgcggatataacggtccggcagtggcagatga

SEQ ID NO: 90750 - DNA, 75 bp, synthetic construct
  source 1..75: mol_type = other DNA
tacagccgtgtgtcgactttctccggggattatctccgcgtaactgacaacaaggggaaaacgcacgatgtgctg

SEQ ID NO: 90751 - DNA, 75 bp, synthetic construct
  source 1..75: mol_type = other DNA
ctgattagccagaaacgcatcgcgccgctgaatcttctgagtgttgacccgaacaaccagagccagattattgcg

SEQ ID NO: 90752 - DNA, 75 bp, synthetic construct
  source 1..75: mol_type = other DNA
catccatcacagcgataaaggctctcagtatgtgtcactggcctatacggagcgactaaaagaagccggattact

SEQ ID NO: 90753 - DNA, 75 bp, synthetic construct
  source 1..75: mol_type = other DNA
tttcctttttcaatgaggataatacagaaaatggtaataaggtttacagggaaagaactctggcaaaaagacttc

SEQ ID NO: 90754 - DNA, 75 bp, synthetic construct
  source 1..75: mol_type = other DNA
gacccggagcaggagctgacggaccggtgggtggtggagcagatgtcatcgctgacggccatgacggcctcgttt

SEQ ID NO: 90755 - DNA, 75 bp, synthetic construct
  source 1..75: mol_type = other DNA
aataacaccacgcagattgcgaccaccgcgtttgttcaggcggcactgacggctcttattaatggtgcgccagcc

SEQ ID NO: 90756 - DNA, 75 bp, synthetic construct
  source 1..75: mol_type = other DNA
tggaaaaacaccgccatattgttgtagctaacgatggatatgacacaaaggatgaatgggagttggccacgattt

SEQ ID NO: 90757 - DNA, 75 bp, synthetic construct
  source 1..75: mol_type = other DNA
gcttgcggcaacgccaaaggctgttaaggcggcatatgacctggctaatggcaaatacaccgcacaggacgctac

SEQ ID NO: 90758 - DNA, 75 bp, synthetic construct
  source 1..75: mol_type = other DNA
caatctggcaaaagcctaccccaccaataaattaccggatttacggggcgaatttattcgtggctgggatgatgg

SEQ ID NO: 90759 - DNA, 75 bp, synthetic construct
  source 1..75: mol_type = other DNA
acagccagcaatacgctgatgcgtatggtcagatagtcaatctcctcgatatcaccagtgttgatgtacaaaatc

SEQ ID NO: 90760 - DNA, 75 bp, synthetic construct
  source 1..75: mol_type = other DNA
tcgatatttcaccctcactgatgtggtggggcgggttgttgtactggctggctgcattagtgacgctgctatggg

SEQ ID NO: 90761 - DNA, 75 bp, synthetic construct
  source 1..75: mol_type = other DNA
cgggcagacggtcagcgtgatggcagacaacagcgcaacggtgtctccgacggtcactacagagccggacggcac

SEQ ID NO: 90762 - DNA, 75 bp, synthetic construct
  source 1..75: mol_type = other DNA
ttacggacacgctggggctggtgacgtcattcagctatgcaggagacaagaatcgccagctgacccgttacagtg

SEQ ID NO: 90763 - DNA, 75 bp, synthetic construct
  source 1..75: mol_type = other DNA
atgcgtaaactttatgccgccattttttccgcagccatctgtctggccgtatccggtgcgcctgcatgggcatct

SEQ ID NO: 90764 - DNA, 75 bp, synthetic construct
  source 1..75: mol_type = other DNA
ccgtctgtgcgcgtgaatgaatggttcagcgcgtatgcgatggcgggtatggcttacagccgtgtgtcgactttc

SEQ ID NO: 90765 - DNA, 75 bp, synthetic construct
  source 1..75: mol_type = other DNA
cattgatattgcttatgaatgctccggcagtggcgactggcgcactgacggtttcatcgtgggtgtcggttataa

SEQ ID NO: 90766 - DNA, 75 bp, synthetic construct
  source 1..75: mol_type = other DNA
cttggcctccgagcaataatcgctactaccggcataatcgcgggcgcacgcacatcagcgcagaagggcaggcat

SEQ ID NO: 90767 - DNA, 75 bp, synthetic construct
  source 1..75: mol_type = other DNA
gttgcaccgaaggcgctggggcaactggcgctggttgcccagcgtctggaagcggcagccatgaccagccataaa

SEQ ID NO: 90768 - DNA, 75 bp, synthetic construct
  source 1..75: mol_type = other DNA
gagacgctatcaaccaggctatccagctgccaaatacaaaagcggaaagcatcgcctggaatgaagatcaaaaag

SEQ ID NO: 90769 - DNA, 75 bp, synthetic construct
  source 1..75: mol_type = other DNA
caaaccgtgctcacccagctacaggcgattgcgccctaccccagccagccggtagtacgtccgtcgtggaacgat

SEQ ID NO: 90770 - DNA, 75 bp, synthetic construct
  source 1..75: mol_type = other DNA
aagttcgtgcagttcatggtcaacttaatgatggcggctttgatagccagcgttatgccattgcccagcatcaac

SEQ ID NO: 90771 - DNA, 75 bp, synthetic construct
  source 1..75: mol_type = other DNA
tcgttgaaaaaagtaaccgcgatccgcgcaatgtcactcgcgttatcgagaaggacatcattcccatcatcggga

SEQ ID NO: 90772 - DNA, 75 bp, synthetic construct
  source 1..75: mol_type = other DNA
gaccgaatccgtggccattgatattgcttatgaaggctccggcagtggcgactggcgcactgacggtttcatcgt

SEQ ID NO: 90773 - DNA, 75 bp, synthetic construct
  source 1..75: mol_type = other DNA
ccagggcggactctggcgggcgtatgaaaaaacgcacgggatgcggggatgggaatgcctggttgacggggtggc

SEQ ID NO: 90774 - DNA, 75 bp, synthetic construct
  source 1..75: mol_type = other DNA
gctacaacaaacctcaacttttgctgagcctgaaacggatgatttagtcaagaggctctggtatgaacgtgataa

SEQ ID NO: 90775 - DNA, 75 bp, synthetic construct
  source 1..75: mol_type = other DNA
gtctcgacgttcgtgatggtcaggtggtgaaaggcgtacagtttcgcaaccatgaaatcattggcgatatcgtgc

SEQ ID NO: 90776 - DNA, 75 bp, synthetic construct
  source 1..75: mol_type = other DNA
cttcctcatctggcgcaaaacgagcatacagaaagggtaaacctttgagcgaagcagagcgacagagagcagctt

SEQ ID NO: 90777 - DNA, 75 bp, synthetic construct
  source 1..75: mol_type = other DNA
tgtccgcagccatctgtctgtccgtatccggtgcgcctgcatgggcatctgagcagcaggccacgctgagcgcgg

SEQ ID NO: 90778 - DNA, 75 bp, synthetic construct
  source 1..75: mol_type = other DNA
gtttgtactgatgctatagctcttctctctgggacggttgaaagcggatataaagttgttgcaccaatttattca

SEQ ID NO: 90779 - DNA, 75 bp, synthetic construct
  source 1..75: mol_type = other DNA
ctgaggcggtggttaaggcggatctgatggtcggtggtgaggtttctgattatcacggaacgatgagtcaaatca

SEQ ID NO: 90780 - DNA, 75 bp, synthetic construct
  source 1..75: mol_type = other DNA
ggtcaaaggttctggtatcgaaaaacgacctgacggcaaccacagaagagaagcaggccgcaaccaacattgacc

SEQ ID NO: 90781 - DNA, 75 bp, synthetic construct
  source 1..75: mol_type = other DNA
gtgatcgcttaaccttcatgaaaacttattacttgaaggataaaaatacaaaaactaaaaagaaaatagaagata

SEQ ID NO: 90782 - DNA, 75 bp, synthetic construct
  source 1..75: mol_type = other DNA
cagggatcacacagcgatatttgcacacatttccactaaattcagtttgttacgttattgacggactgtgttggg

SEQ ID NO: 90783 - DNA, 75 bp, synthetic construct
  source 1..75: mol_type = other DNA
aaaccacgctaccgatgagcgttggatctgccggatacgacacgcaattagattacgtggtaaaggggattattc

SEQ ID NO: 90784 - DNA, 75 bp, synthetic construct
  source 1..75: mol_type = other DNA
atggcaccgttttctgacctggttccggaagtgtttcgctcgccggtcagtcattaccggatgcgtgcggagttc

SEQ ID NO: 90785 - DNA, 75 bp, synthetic construct
  source 1..75: mol_type = other DNA
gcaggcggtgacacaggccattgccggattaagtgaacgcaaagtgcagtttacgtacacggacgtgctggccag

SEQ ID NO: 90786 - DNA, 75 bp, synthetic construct
  source 1..75: mol_type = other DNA
accgcccgttatacgccgcagattgaaaaccttaaaaaagaaatcaaagtgctttttaaagggattcatgactgg

SEQ ID NO: 90787 - DNA, 75 bp, synthetic construct
  source 1..75: mol_type = other DNA
tatgataaagataataatttaattgataatgggaagcaacttgacataagtaaagctgaaaacaaatatcttttt

SEQ ID NO: 90788 - DNA, 75 bp, synthetic construct
  source 1..75: mol_type = other DNA
ggttatccgcctggggcgttcgtctgtacagcgttgcgtgaatcatatttctgagccggataccgaaattccgcc

SEQ ID NO: 90789 - DNA, 75 bp, synthetic construct
  source 1..75: mol_type = other DNA
tgctgccgcataacgaatccctgttccagaaggtgaacttcctgatgcaggcggcaatgggttttatcaacatcg

SEQ ID NO: 90790 - DNA, 75 bp, synthetic construct
  source 1..75: mol_type = other DNA
accttaagtgagaagggcactttgatggcgacgttaccggctaacgtccctggcgatatcccggcgattggcttt

SEQ ID NO: 90791 - DNA, 75 bp, synthetic construct
  source 1..75: mol_type = other DNA
aaaccttgttaggtgccgatgacaaagcaggtattgcagaaatcatgaccgcgctggcggtattgcaacaaaaaa

SEQ ID NO: 90792 - DNA, 75 bp, synthetic construct
  source 1..75: mol_type = other DNA
atggcaaaacgcgttacaaaattaaaggccgcagccgaggccgcaccgcagacccgcgaagaagtcagccgtgat

SEQ ID NO: 90793 - DNA, 75 bp, synthetic construct
  source 1..75: mol_type = other DNA
tgcaaaaccaaccgtgatgagctgacgaacggcggcaaaaccaaaacagccaatctgaccaccggaacggtgtca

SEQ ID NO: 90794 - DNA, 75 bp, synthetic construct
  source 1..75: mol_type = other DNA
ctgcttaaccgtgaactgttcgcggatggcaataccaccgtctccaacgagatgaagggcaagctgcaactggtt

SEQ ID NO: 90795 - DNA, 75 bp, synthetic construct
  source 1..75: mol_type = other DNA
cagcgaggaaattaaccgcctgaatcatcaggcgcgggttgaaaaaatcctgaaccgtgcgggcatccagccgct

SEQ ID NO: 90796 - DNA, 75 bp, synthetic construct
  source 1..75: mol_type = other DNA
agtcaacaacaactgaactacgctctttcaggcagtttagttgcccattcacagggcattaccctggggcaatcg

SEQ ID NO: 90797 - DNA, 75 bp, synthetic construct
  source 1..75: mol_type = other DNA
cgcaatcagcggaagagtgcaacgcgatcctttagcgattgaaattgactcaacagatgctctgccacctattga

SEQ ID NO: 90798 - DNA, 75 bp, synthetic construct
  source 1..75: mol_type = other DNA
agcggcagctatcgggaatcgcctgctgaaagacggtcagacagtgattgtggttaccgtggctgatgttatgag

SEQ ID NO: 90799 - DNA, 75 bp, synthetic construct
  source 1..75: mol_type = other DNA
atcagggatgcggttcgctgcaactgaacggtgcagacctgctgacagatgacagcctgctgacagcggttctga

SEQ ID NO: 90800 - DNA, 75 bp, synthetic construct
  source 1..75: mol_type = other DNA
ttcgacgactacctgctgccggccgagaagttcgccgcactcaagcgcgagcaggccctgcccctggcgatcaac

SEQ ID NO: 90801 - DNA, 75 bp, synthetic construct
  source 1..75: mol_type = other DNA
ctgccctgcattgaacaggccagggaggatatccataccctgcgccagttgcagtttctgcaccagaaccggtga

SEQ ID NO: 90802 - DNA, 75 bp, synthetic construct
  source 1..75: mol_type = other DNA
gtttctacaccctttccgacaccatgtataaacatatggatggctacgaatttaatgacggtgatgatgaagata

SEQ ID NO: 90803 - DNA, 75 bp, synthetic construct
  source 1..75: mol_type = other DNA
agaaagagatctccttcatgtatcaggtacacgacttcgtttatggcgatgaacgccacaacatgattaatcgcc

SEQ ID NO: 90804 - DNA, 75 bp, synthetic construct
  source 1..75: mol_type = other DNA
cagaatgtggtggcgaagtctttgacacatcctttaagccgcagggctctgacagtttcgcgggagccatctgca

SEQ ID NO: 90805 - DNA, 75 bp, synthetic construct
  source 1..75: mol_type = other DNA
gcagcatgagaccagacatgcgtacaacgcacagggactggcgaaccgctgtataccggacagcctgcccgccgt

SEQ ID NO: 90806 - DNA, 75 bp, synthetic construct
  source 1..75: mol_type = other DNA
atttattgctgagaccatgatacagaactattattttattaatccagactatatgtttaatggtgatcgtttaac

SEQ ID NO: 90807 - DNA, 75 bp, synthetic construct
  source 1..75: mol_type = other DNA
acccagccctgctatgacggtcagaacttcttcgacaaggagcatccggtatatccgaatgtggacggcacgggc

SEQ ID NO: 90808 - DNA, 75 bp, synthetic construct
  source 1..75: mol_type = other DNA
atgatgaaaataacgcatcattataaatcctttctttctgccattatttcggtggtcctgttttattcggtagcg

SEQ ID NO: 90809 - DNA, 75 bp, synthetic construct
  source 1..75: mol_type = other DNA
tactgaaccagatcgtcgaccgcagaacggcatcactgcgcagtgtcgggatgctgacgaacctgaatcacgcag

SEQ ID NO: 90810 - DNA, 75 bp, synthetic construct
  source 1..75: mol_type = other DNA
caaatgaaagtgttctgttatttgatgctaatggagaaggctggctgattggctggcgttctctctggtacacct

SEQ ID NO: 90811 - DNA, 75 bp, synthetic construct
  source 1..75: mol_type = other DNA
atgtacgagtttgactggagttccattgtcccttccctgccatatctgctggatgggctggtgatcaccctgaaa

SEQ ID NO: 90812 - DNA, 75 bp, synthetic construct
  source 1..75: mol_type = other DNA
tctggcgtattccgcatctggagaaatttctggcgcaaccgtgccagaaactttctctgctgcgccctgttccgc

SEQ ID NO: 90813 - DNA, 75 bp, synthetic construct
  source 1..75: mol_type = other DNA
cggggaatggcactgagcatgaaagacaaggattataacccactgattggtcgtaccggtgttgacgtgggaaga

SEQ ID NO: 90814 - DNA, 75 bp, synthetic construct
  source 1..75: mol_type = other DNA
acataatacgtatgcgcgacctctaacgatgtccgagatggtggtgatgtttggatacgtgtaccgggagtcaaa

SEQ ID NO: 90815 - DNA, 75 bp, synthetic construct
  source 1..75: mol_type = other DNA
gaaaaaacctcctgttcaccggcaataatggcgaggtcgttctgcagaattccgttaatcagggggccgggtatc

SEQ ID NO: 90816 - DNA, 75 bp, synthetic construct
  source 1..75: mol_type = other DNA
cgtaggcctggagattggcgctgacgactacattccaaaaccgtttaacccgcgtgaactgctggctcgtattcg

SEQ ID NO: 90817 - DNA, 75 bp, synthetic construct
  source 1..75: mol_type = other DNA
agcaaggaaacgcctggttcttcatccccagcgccatcttacttggtgcgcttcatggcctggaaccagggcact

SEQ ID NO: 90818 - DNA, 75 bp, synthetic construct
  source 1..75: mol_type = other DNA
gcaatacgacactgaacgtccctggtttgaacacactgacgatgggctgactgagcacggtcatgagtgccctta

SEQ ID NO: 90819 - DNA, 75 bp, synthetic construct
  source 1..75: mol_type = other DNA
cggtagcacctccgggattctgtttgctggcaacaacacgctgacggccagtaacattactcttaccgggaacag

SEQ ID NO: 90820 - DNA, 75 bp, synthetic construct
  source 1..75: mol_type = other DNA
tttttactcttttctctttaataatgattattcagttatttgtcccttatctgctggcagtgaggaaaacggaag

SEQ ID NO: 90821 - DNA, 75 bp, synthetic construct
  source 1..75: mol_type = other DNA
aatgggattcagtgatacccacctccgttgctatgtcttacatgacgacgaaggccagcacatacatatcattgc

SEQ ID NO: 90822 - DNA, 75 bp, synthetic construct
  source 1..75: mol_type = other DNA
ggcattcggtacagaacgtggcgttaagtggtcagacgaagcgcgactggctctggagtggaaagcaagatgggg

SEQ ID NO: 90823 - DNA, 75 bp, synthetic construct
  source 1..75: mol_type = other DNA
ccagccagtacgttctttattcgctgcgacggactttccatgattgacgccgggatagccccacgtgatttactt

SEQ ID NO: 90824 - DNA, 75 bp, synthetic construct
  source 1..75: mol_type = other DNA
accagctgaatgtcacgaataaactgtcgggcagtaataataccgtcctggtcgactttttaaacaagccagcca

SEQ ID NO: 90825 - DNA, 75 bp, synthetic construct
  source 1..75: mol_type = other DNA
aacactatcgccacggatgacgtaattaacgccacggaaaaaggcgcggatctgcaaattaccggtaccagtaat

SEQ ID NO: 90826 - DNA, 75 bp, synthetic construct
  source 1..75: mol_type = other DNA
aatacgaggcacagaaaaaggttgccctgcaaggtgacattgaacagctactgaaggttcctcagaaatacagca

SEQ ID NO: 90827 - DNA, 75 bp, synthetic construct
  source 1..75: mol_type = other DNA
atggaagggccagctgctgcgtatcagacctgggcgcaactggtttacaaattactgactgcagaacaggagtat

SEQ ID NO: 90828 - DNA, 75 bp, synthetic construct
  source 1..75: mol_type = other DNA
atcctcgacgatacctatcagcgattcgtcgtaaatcctcccgatgatatttgcctgctgacggtgaactacacc

SEQ ID NO: 90829 - DNA, 75 bp, synthetic construct
  source 1..75: mol_type = other DNA
aaccgttcattgaggcgcatcgctacaaagtcgccaaaggcggtcgaggtagcggtaagtcatgggcaattgcga

SEQ ID NO: 90830 - DNA, 75 bp, synthetic construct
  source 1..75: mol_type = other DNA
atgtacgcaaaatcctttctcgcacttgatggtaacggacgtctgacgggggcccgtaccgcacatactgctcct

SEQ ID NO: 90831 - DNA, 75 bp, synthetic construct
  source 1..75: mol_type = other DNA
aggagaaattccgcacctggcgtccggcggattttgctgatgccctgcgccgctggccgccggcacagcgtaaaa

SEQ ID NO: 90832 - DNA, 75 bp, synthetic construct
  source 1..75: mol_type = other DNA
ttctacaggagtaaatgatgattatataatacaaactttagatgtaggcacattttcaccttttggcgaaaaatg

SEQ ID NO: 90833 - DNA, 75 bp, synthetic construct
  source 1..75: mol_type = other DNA
cgctggttataaacacgcagctggcgatgaaaattggtctgaacgaagccatcgtgttgcagcagttgcattact

SEQ ID NO: 90834 - DNA, 75 bp, synthetic construct
  source 1..75: mol_type = other DNA
tgctgtatccgaactggcccacagggtcacctgtaagagccatcgcagactctcccgtcgggtcattctttcatc

SEQ ID NO: 90835 - DNA, 75 bp, synthetic construct
  source 1..75: mol_type = other DNA
actacagagaataaaaacacttcttgtccggacgcttcgcaaccggacggacagacagcagaacaggatttttta

SEQ ID NO: 90836 - DNA, 75 bp, synthetic construct
  source 1..75: mol_type = other DNA
gggttcatttcatgccacaaggcaaagaacggactgagcaaaatggttttgcatgccgagcagattgaattgata

SEQ ID NO: 90837 - DNA, 75 bp, synthetic construct
  source 1..75: mol_type = other DNA
cttgatcacctgaagcacaaagccgaaaccagcgggaccagggcgttacccgaaagccgggcgccaccggctgag

SEQ ID NO: 90838 - DNA, 75 bp, synthetic construct
  source 1..75: mol_type = other DNA
gacagaaatcgacctgctgaacttcatctacaaaaaagacggccagaacgtctttggcgaccgcgtgagttcggc

SEQ ID NO: 90839 - DNA, 75 bp, synthetic construct
  source 1..75: mol_type = other DNA
ggtaactggactgtgggcattccggcggcggatgtcacggcgctggcgaccggtagccagaccatcaccgccagc

SEQ ID NO: 90840 - DNA, 75 bp, synthetic construct
  source 1..75: mol_type = other DNA
tcgtcccggatgccttacccgtggtacgtaaagccagctggtactgcaggcaatgtcaccacgattattatgggg

SEQ ID NO: 90841 - DNA, 75 bp, synthetic construct
  source 1..75: mol_type = other DNA
tggctgggggactggtgcagtgaagagcggcatccggtgatctggtcaaccacgcaggctgcagaacacttaccg

SEQ ID NO: 90842 - DNA, 75 bp, synthetic construct
  source 1..75: mol_type = other DNA
gcaatacgacactgaacggccctggtttgaacacgctgacgaagggctgacggagcacgcgcagcaatgtcctta

SEQ ID NO: 90843 - DNA, 75 bp, synthetic construct
  source 1..75: mol_type = other DNA
ctgactgctttgcaaggcctttcaggtattgcaggggtgtttcagcaggaaaagcaggctcagcggcagaaagaa

SEQ ID NO: 90844 - DNA, 75 bp, synthetic construct
  source 1..75: mol_type = other DNA
tggcggggggtaatttagcaggtgctctggccggagcttcagcaccggaactggcacatctgctgaaatcaacag

SEQ ID NO: 90845 - DNA, 75 bp, synthetic construct
  source 1..75: mol_type = other DNA
cggaaggcctcgaccggaaattctacgaaatctgcgccctgtccgagctgaagaacgccctgcgctccggcgaca

SEQ ID NO: 90846 - DNA, 75 bp, synthetic construct
  source 1..75: mol_type = other DNA
aagtctcgccgcgttggtggttctacttatcaggtaccagttgaagtccgtccggttcgtcgtaatgctctggca

SEQ ID NO: 90847 - DNA, 75 bp, synthetic construct
  source 1..75: mol_type = other DNA
agcgtaaaattctgccggatccgaagttcggatcagaactgctggctaaatttgtaaatatcctgatggtagatg

SEQ ID NO: 90848 - DNA, 75 bp, synthetic construct
  source 1..75: mol_type = other DNA
gcagcgtcacgcagagtcagtttgacgccgtgggcaggctcaggacacagacggatgccgcaggccggacaacag

SEQ ID NO: 90849 - DNA, 75 bp, synthetic construct
  source 1..75: mol_type = other DNA
atgaagctggaagatttaccgaaatactattccccgaaatcgcctggcctgaccgatgcgtccgcctcgacatca

SEQ ID NO: 90850 - DNA, 75 bp, synthetic construct
  source 1..75: mol_type = other DNA
tcgtacgcttttgaggattatgcccgcagtgcagcgagtaaaaaacagtgcccttgttgcggtgggaaaaaattt

SEQ ID NO: 90851 - DNA, 75 bp, synthetic construct
  source 1..75: mol_type = other DNA
gctttgatgttcatcatggccttgacactaggtatacatcttttgggctttatctcaaaaataactactgggaaa

SEQ ID NO: 90852 - DNA, 75 bp, synthetic construct
  source 1..75: mol_type = other DNA
aaaaaacagttaagaaattctatgatgcgctggtgacccggtttgatattgaagaagcatgggctgagcggcagt

SEQ ID NO: 90853 - DNA, 75 bp, synthetic construct
  source 1..75: mol_type = other DNA
ttgatgaacgggtcatgatttgtccgttaacaaacagccagttcatgacaaaagcgaacagtattttcatatcct

SEQ ID NO: 90854 - DNA, 75 bp, synthetic construct
  source 1..75: mol_type = other DNA
aatggaaaaaagtcagggaggtggtaaaagttgcctgtccggagtgtggcggaaagggggaggtttccaccgcct

SEQ ID NO: 90855 - DNA, 75 bp, synthetic construct
  source 1..75: mol_type = other DNA
agctgccggacggagcggatttaagccgcatgcaggatggcagtaataagcatcgtcccggctacgacctgacct

SEQ ID NO: 90856 - DNA, 75 bp, synthetic construct
  source 1..75: mol_type = other DNA
ccatctgataacccctttcacggtcacaatttggaagctagacgcacaattgagagctatcaaccgtttacaccg

SEQ ID NO: 90857 - DNA, 75 bp, synthetic construct
  source 1..75: mol_type = other DNA
attccatacgctgacggtcgatgagctggcaaccagcaacagcgcctatgcgatgcgtacggacctgaacaattc

SEQ ID NO: 90858 - DNA, 75 bp, synthetic construct
  source 1..75: mol_type = other DNA
aacctctaaaacgaaatataaacggggtagtcaaagcagagcaaaccgatgatgccagcgcgtacatcgagttag

SEQ ID NO: 90859 - DNA, 75 bp, synthetic construct
  source 1..75: mol_type = other DNA
atggcaactttgacaaaaaaagaacaggcatggttgaacgaattacaggacgttcttgatcgctgtccatcaccg

SEQ ID NO: 90860 - DNA, 75 bp, synthetic construct
  source 1..75: mol_type = other DNA
taagaaaacttccggcagaaataaaaccggcagtgatgcgcattatggcttcgtatgcttttgaggattatgccc

SEQ ID NO: 90861 - DNA, 75 bp, synthetic construct
  source 1..75: mol_type = other DNA
tatggaaaacgaatcacccggatgcgattcaaattctgatcctcggtgtaaatggcaagaaaaagcacctggaat

SEQ ID NO: 90862 - DNA, 75 bp, synthetic construct
  source 1..75: mol_type = other DNA
gaaagcccgcagctacctgcaaatgctgccgcaacagcttcatggcaatgtcttctcttacacatcgtccggctt

SEQ ID NO: 90863 - DNA, 75 bp, synthetic construct
  source 1..75: mol_type = other DNA
agacagagaccgatacacgcttgaaattgagatggagcgaatacttggccttctaaccactgaactgtataaagc

SEQ ID NO: 90864 - DNA, 75 bp, synthetic construct
  source 1..75: mol_type = other DNA
tcaggaatatcggcagcatatggcacaacgaagatctatactacagatactagagcaagatggctacatggtggg

SEQ ID NO: 90865 - DNA, 75 bp, synthetic construct
  source 1..75: mol_type = other DNA
aagagtacatgcagggctttaccgatgcggcaaccggtgaggctaaacgaggttttatggctgttgtttcggagc

SEQ ID NO: 90866 - DNA, 75 bp, synthetic construct
  source 1..75: mol_type = other DNA
cgaactggaagaaatccaggacgacaaaccgtccctgtttgcccgtgtcacggcgctgtttaccaaaaaagagca

SEQ ID NO: 90867 - DNA, 75 bp, synthetic construct
  source 1..75: mol_type = other DNA
ccgatgcttgaacagatggtgaaggaggcggtaagccatattcctgttccgcgtgatggtcgtgactatgatccc

SEQ ID NO: 90868 - DNA, 75 bp, synthetic construct
  source 1..75: mol_type = other DNA
ctgaacaacgagttcaggaggctcggcgaatctgtaagcgaggctgtgacatcaaacgagacgaaaatcagagac

SEQ ID NO: 90869 - DNA, 75 bp, synthetic construct
  source 1..75: mol_type = other DNA
actttctccggggattatctccgcgtaactgacaacaaggggaaaacgcacgaagtgctgaccggaagtgatgac

SEQ ID NO: 90870 - DNA, 75 bp, synthetic construct
  source 1..75: mol_type = other DNA
accaatacgttacactgatccactggggttagaacgagttataagtgtatatgggcctcccgctccagaccgggc

SEQ ID NO: 90871 - DNA, 75 bp, synthetic construct
  source 1..75: mol_type = other DNA
caggccagaagtggaaaatacaagccttcattaacacctttaacggcagccccgactcattcaaagttactgaag

SEQ ID NO: 90872 - DNA, 75 bp, synthetic construct
  source 1..75: mol_type = other DNA
ttgcatgattttaacgcgcaccggccgctggcattagacgatgaccttgatgcagaatttacctggcgagagcct

SEQ ID NO: 90873 - DNA, 75 bp, synthetic construct
  source 1..75: mol_type = other DNA
gccattgatattgcttatgaaggttccggcagtggtgactggcgcactgacggtttcatcgtgggtgtcggttat

SEQ ID NO: 90874 - DNA, 75 bp, synthetic construct
  source 1..75: mol_type = other DNA
caggtgcttgctgttccgccagcgtacacaagccagcgttgcgcgtgctgtggtcatacagcgaaagaaaatcgc

SEQ ID NO: 90875 - DNA, 75 bp, synthetic construct
  source 1..75: mol_type = other DNA
accggtagtgatgcgcattatggcttcgtacgcttttgaggattatgcccgcagcgcagcgagtaaaaagcagtg

SEQ ID NO: 90876 - DNA, 75 bp, synthetic construct
  source 1..75: mol_type = other DNA
cgatttcgaccttgaaacccgtgctgaaacccgggaactggcaatatctcatgccagcgtattgttgctgcgcac

SEQ ID NO: 90877 - DNA, 75 bp, synthetic construct
  source 1..75: mol_type = other DNA
tcaccgtgaaagaaatcaaccgcctcaaaattcttcaggatgtcgttgaacgtaacctgcgtcctggccaggctg

SEQ ID NO: 90878 - DNA, 75 bp, synthetic construct
  source 1..75: mol_type = other DNA
tgtggaaaattaagagttcctttacagcgaagaactggtcaaaaccggaaagcggtgggtatatctggcacacta

SEQ ID NO: 90879 - DNA, 75 bp, synthetic construct
  source 1..75: mol_type = other DNA
acagtcactgaaagaccttgagcgggcttacaaaaacttcttccggaagcgggctgcttttccccgattcaaaaa

SEQ ID NO: 90880 - DNA, 75 bp, synthetic construct
  source 1..75: mol_type = other DNA
aattcatgccctgtcggcctatctgacgccgtcatgccgtgaactgatggagaacgatgcccgccgccgtaagga

SEQ ID NO: 90881 - DNA, 75 bp, synthetic construct
  source 1..75: mol_type = other DNA
cgagtatggcggtaagacacaacttaatcttggccataacgttgatgaggagcgggtggttagaggagaaggtgc

SEQ ID NO: 90882 - DNA, 75 bp, synthetic construct
  source 1..75: mol_type = other DNA
gcaaaaagtttcgcgtggctgtctccggtgtaacggcagacgggcgcgaaatcaacggcgacatgctgaaagctg

SEQ ID NO: 90883 - DNA, 75 bp, synthetic construct
  source 1..75: mol_type = other DNA
caggcaaaataccaggtgatactggaaccatttattaaactactggacaggcagcatcgttctcaccgatttttc

SEQ ID NO: 90884 - DNA, 75 bp, synthetic construct
  source 1..75: mol_type = other DNA
caccacaaaggcttataaccatcgtgaagcacaatatctgttgcagtccgccccggcagacatgacgcatggtga

SEQ ID NO: 90885 - DNA, 75 bp, synthetic construct
  source 1..75: mol_type = other DNA
cggtggtgcgctgggggctgccgccggtccggtcggggttgccattggctccacggtgggcagttatctcggtga

SEQ ID NO: 90886 - DNA, 75 bp, synthetic construct
  source 1..75: mol_type = other DNA
actgaagctggagaacggctgggtggaaacgcccgggcattccgtcagcgacagtgcgaaggtttttgcctccgt

SEQ ID NO: 90887 - DNA, 75 bp, synthetic construct
  source 1..75: mol_type = other DNA
aagccgatctgcaaaaaacccagggaaaccgtgcaccagcagcagtaaaaaataacgacgtgatcagctttatta

SEQ ID NO: 90888 - DNA, 75 bp, synthetic construct
  source 1..75: mol_type = other DNA
cactggatattctgattgtgtggctgcaggacaatatcgactgcgaatcgggaattatctttgacaacgatgagg

SEQ ID NO: 90889 - DNA, 75 bp, synthetic construct
  source 1..75: mol_type = other DNA
ggtcatccgcctgaccagtgaaaacggcagccacaccaccttccgttacgatgtactcgaccggctgatacagga

SEQ ID NO: 90890 - DNA, 75 bp, synthetic construct
  source 1..75: mol_type = other DNA
tggttaccgtggctgatgtcatgagtgccctacacgccagctatgacgacgggcaatcaggcgaaaaatttttgc

SEQ ID NO: 90891 - DNA, 75 bp, synthetic construct
  source 1..75: mol_type = other DNA
tgaatcgctctggcatccagccattgcaccgcaaatgctcgttttcgaattaccaggtgcagaacgaagggcagc

SEQ ID NO: 90892 - DNA, 75 bp, synthetic construct
  source 1..75: mol_type = other DNA
ttctggaacgcatccgccgactgaccccgccacatgtaaccgccccattcagaacggtagcggagtggcgcgagt

SEQ ID NO: 90893 - DNA, 75 bp, synthetic construct
  source 1..75: mol_type = other DNA
tgggggctgcaatctcgactgcaattctcctgatctggcggcgtcacgcggttaagcatggcaactatctgactg

SEQ ID NO: 90894 - DNA, 75 bp, synthetic construct
  source 1..75: mol_type = other DNA
aataaagacccgcatgccattgtgaaaaccacgtttcgcggaactaatgcttatggcggagtggtgaaacagacg

SEQ ID NO: 90895 - DNA, 75 bp, synthetic construct
  source 1..75: mol_type = other DNA
cgcttgccagcgatgagcgtttttcgattctggcaaatatcgccgccgagcgttttgcccaactcgatctgacgg

SEQ ID NO: 90896 - DNA, 75 bp, synthetic construct
  source 1..75: mol_type = other DNA
cggggcagctaaaaaaggtacagtgtcattgacattttcaggtgtgcctgcagaaaatgcagatgacatgctgca

SEQ ID NO: 90897 - DNA, 75 bp, synthetic construct
  source 1..75: mol_type = other DNA
atggatactataatcgcttttctatcactcgcttttttcgttgctttcttcatcgggttaatcaagccatcactg

SEQ ID NO: 90898 - DNA, 75 bp, synthetic construct
  source 1..75: mol_type = other DNA
gtgacgaaaacggcggacaggccaccgcgaaaaccgccgcacgggtggagcttgtggcccctgaaggctggcggg

SEQ ID NO: 90899 - DNA, 75 bp, synthetic construct
  source 1..75: mol_type = other DNA
gggcgcacacgttatcaccagtgggatgcgcagaatcaggtgacggcgtaccaggacgaagccggacaggtgacg

SEQ ID NO: 90900 - DNA, 75 bp, synthetic construct
  source 1..75: mol_type = other DNA
ggctggcactggctgcaaaactgttatcagggcgttttggtgtcagcgtgggttcctcatcctcgatggggaatt

SEQ ID NO: 90901 - DNA, 75 bp, synthetic construct
  source 1..75: mol_type = other DNA
tatctttgacaacgatgaggataaaacagattcggcagcactgttgccctgtatcgaacaggccagggagggtat

SEQ ID NO: 90902 - DNA, 75 bp, synthetic construct
  source 1..75: mol_type = other DNA
caggggcagtctgtgacgctgacccgggaggggatcgtggtggacggtgcagggaaaacgatcacgtttcgcaat

SEQ ID NO: 90903 - DNA, 75 bp, synthetic construct
  source 1..75: mol_type = other DNA
ggtatgaaatgcgccgccagcttgagtataagcagctctggcatggcggtcaggtactggcagtgccgccagcgt

SEQ ID NO: 90904 - DNA, 75 bp, synthetic construct
  source 1..75: mol_type = other DNA
gtggagccggaatacacaccggcgcgaaaagttcatttttaccactgcgaccaccggggcctgccgctggcgctc

SEQ ID NO: 90905 - DNA, 75 bp, synthetic construct
  source 1..75: mol_type = other DNA
taccagtgccggttcggtatttcttggtgactggtcaccggaatcggcaggtgattacgcctccggcaccaacca

SEQ ID NO: 90906 - DNA, 75 bp, synthetic construct
  source 1..75: mol_type = other DNA
tggattggtgtgttgctgtccatgatatgaatgccggatttgatgaaaagattttgttcccctcatcagttgaaa

SEQ ID NO: 90907 - DNA, 75 bp, synthetic construct
  source 1..75: mol_type = other DNA
gttgcaggaagaactttgtagcgtggtggaggcctccggtgccagcctggagaaagggcggcatgaccagctgct

SEQ ID NO: 90908 - DNA, 75 bp, synthetic construct
  source 1..75: mol_type = other DNA
ctgacgtgatgaacgccaccggcaacccgaacgtcaagttcatgcactgcctgccagccttccacaatgagcaca

SEQ ID NO: 90909 - DNA, 75 bp, synthetic construct
  source 1..75: mol_type = other DNA
gtgggcaatacagaatgcgaaggaaaccacctgggggctggctggcgtcatgcaggaatatacgtccagtctggg

SEQ ID NO: 90910 - DNA, 75 bp, synthetic construct
  source 1..75: mol_type = other DNA
ccgggctgaaaatcgccgctggtgtagcgacggtggtaatggcgtttgtcgcaattattgcgctgatcaacggca

SEQ ID NO: 90911 - DNA, 75 bp, synthetic construct
  source 1..75: mol_type = other DNA
ttttactatcatggtccacgggataaccgcgagcgctactaccgggtctcatttcgcgaggtccccactcgtaac

SEQ ID NO: 90912 - DNA, 75 bp, synthetic construct
  source 1..75: mol_type = other DNA
gccgccgggaatatgatgaaccgggcaggctggtatcggagacatcgcgcagcggggagacagtacgctaccgct

SEQ ID NO: 90913 - DNA, 75 bp, synthetic construct
  source 1..75: mol_type = other DNA
cagaatggtttctccggacctgaaagaaaattcagcctccggctcaggaattgtgaatttaacagtcagggtggg

SEQ ID NO: 90914 - DNA, 75 bp, synthetic construct
  source 1..75: mol_type = other DNA
atggaatcattaaccacagaaacggcgctggatattctgattgcgtggctacagaacaatatcgactgcgaatcc

SEQ ID NO: 90915 - DNA, 75 bp, synthetic construct
  source 1..75: mol_type = other DNA
atcccgacgggtgtgatacggacggacgacgagcggacccaccactaccactacgacagccagcaccggctggtg

SEQ ID NO: 90916 - DNA, 75 bp, synthetic construct
  source 1..75: mol_type = other DNA
tcggacgtaccggtcgccagcagagcgaggatgaaatcattgggggccgcgccctcagtgactcaccaaaagagg

SEQ ID NO: 90917 - DNA, 75 bp, synthetic construct
  source 1..75: mol_type = other DNA
tggtgttaagttatcaacgactttgtgccaccactcagtctacggaaaaagaagaagagtgggatccggcaatct

SEQ ID NO: 90918 - DNA, 75 bp, synthetic construct
  source 1..75: mol_type = other DNA
atgcgtatttttgttgatgacggttccaccaacatcaaactggcctggatggaagaaggcgcagtgaaaacgttg

SEQ ID NO: 90919 - DNA, 75 bp, synthetic construct
  source 1..75: mol_type = other DNA
ggaaccacgctggatatcgcgcacgttcgcagcaaaatgtccggcttcaccaagacgcattgcgatcctaaaacc

SEQ ID NO: 90920 - DNA, 75 bp, synthetic construct
  source 1..75: mol_type = other DNA
gacctgccgctgaagctggattctgagatccagaatatggccatgcacggcaccgtatcgaccggtaaatccacc

SEQ ID NO: 90921 - DNA, 75 bp, synthetic construct
  source 1..75: mol_type = other DNA
atctgatgtatatggtcggtcgtgcgatgattggtgtggccattggcggattctggtcgatgtcagcggcaacgg

SEQ ID NO: 90922 - DNA, 75 bp, synthetic construct
  source 1..75: mol_type = other DNA
cggcaattgatgcgcatgatgacgcagtccaggccgtttaccgtaaagcgcatttcggcggtggtggagcgtccg

SEQ ID NO: 90923 - DNA, 75 bp, synthetic construct
  source 1..75: mol_type = other DNA
ctgctgcagtcctgagtctgtatttgctgacaccggcccatgctgatggcggttttcagggtgccatcaaaggcg

SEQ ID NO: 90924 - DNA, 75 bp, synthetic construct
  source 1..75: mol_type = other DNA
cttcaacggcgcaccccgacgaggatgaccttgttgataccacgtgcactcataagaacctcctgactgaaagat

SEQ ID NO: 90925 - DNA, 75 bp, synthetic construct
  source 1..75: mol_type = other DNA
gcttgatgattaaccgcatcgtgcagcgggtgattttcgttactggctactacggcctgacgcaggggctgctat

SEQ ID NO: 90926 - DNA, 75 bp, synthetic construct
  source 1..75: mol_type = other DNA
tggccgcgatgtcgcataaggactggctgagccgccgccagcggcaaaaacaggggattgaacgggctcatacac

SEQ ID NO: 90927 - DNA, 75 bp, synthetic construct
  source 1..75: mol_type = other DNA
ttctggcgaagcgttaagtgcagcactggcgattggtaacatcgagttggttaagcctaaccaaaaagaactcag

SEQ ID NO: 90928 - DNA, 75 bp, synthetic construct
  source 1..75: mol_type = other DNA
aattcaacctgttcaacagtagccgtatcgatgccatcaacatcaccgaagtgcgcgacaaagcggagggcgaat

SEQ ID NO: 90929 - DNA, 75 bp, synthetic construct
  source 1..75: mol_type = other DNA
gaaaccgataatagttgtgtggagaactgtttaaaagggaagtttaaagaggtaaggccgcgttattctgtattg

SEQ ID NO: 90930 - DNA, 75 bp, synthetic construct
  source 1..75: mol_type = other DNA
aacagctttgtaaaattcgcactggtgaaacactgacgacaaaagaagtggttgttaatgagaagaaaacgacac

SEQ ID NO: 90931 - DNA, 75 bp, synthetic construct
  source 1..75: mol_type = other DNA
atacttgccagtaaaactcagacgcccttgcaggatttagtatgggatctatcaaaatttgcaatcataatcatg

SEQ ID NO: 90932 - DNA, 75 bp, synthetic construct
  source 1..75: mol_type = other DNA
gaaacgaggtgcagaagctggacgtagcagggctgataggtgagcgcatcagccatgattttcagcggctggaag

SEQ ID NO: 90933 - DNA, 75 bp, synthetic construct
  source 1..75: mol_type = other DNA
agtcgccctgcgtccgttagcggacatcaacaccatctttaccgagatggaagaaggcaaaatccgtggccgtat

SEQ ID NO: 90934 - DNA, 75 bp, synthetic construct
  source 1..75: mol_type = other DNA
tccggtgatcaatctggccccggacatgctggaaatatttggtgtggtaacgttcagtatccgggatcatcttca

SEQ ID NO: 90935 - DNA, 75 bp, synthetic construct
  source 1..75: mol_type = other DNA
atgtcagaaataaaatcgctggtcactgctgaggcagtgaaggaagtcctgcgctctgaagaagtccggagcgca

SEQ ID NO: 90936 - DNA, 75 bp, synthetic construct
  source 1..75: mol_type = other DNA
gatgcgattgcttttgttaccgcccaggaaaaaatcattttgcagatccagtgtcggatcagcgacgaagaacgt

SEQ ID NO: 90937 - DNA, 75 bp, synthetic construct
  source 1..75: mol_type = other DNA
attgaagccggccagccgacaatatgttcagaaacctgtgtcggtcgtatccgttatcttggcgtgctgctgtac

SEQ ID NO: 90938 - DNA, 75 bp, synthetic construct
  source 1..75: mol_type = other DNA
tccaacgctggttgatgctttggactacgccgctctgagtagcgccggaatgaatttttatgacagacgttgcca

SEQ ID NO: 90939 - DNA, 75 bp, synthetic construct
  source 1..75: mol_type = other DNA
aaatccagaacttctgtctgcacggcacggtcggggccggtaagtcggaagttatccgtcgtctggccaactacg

SEQ ID NO: 90940 - DNA, 75 bp, synthetic construct
  source 1..75: mol_type = other DNA
atggtgattttgaaaatggtattcctgttcacgataccattgccagagttgtatcctgtatcagtcctgcaaaat

SEQ ID NO: 90941 - DNA, 75 bp, synthetic construct
  source 1..75: mol_type = other DNA
catggttacgaccgaaaccatctgggcgggttataccaccgtcagggtactttccacggccggcagcaactccgt

SEQ ID NO: 90942 - DNA, 75 bp, synthetic construct
  source 1..75: mol_type = other DNA
cgaaggcctgctgatggacatcaacgagggtgctgactgggctacttcgctggcgattgaagacggcgctgacca

SEQ ID NO: 90943 - DNA, 75 bp, synthetic construct
  source 1..75: mol_type = other DNA
caactaaatccactgataaaaatgaaaaatatcggtgattacactatgggtattactgaaagcatatgggcgggt

SEQ ID NO: 90944 - DNA, 75 bp, synthetic construct
  source 1..75: mol_type = other DNA
ttgattgtggtaaagcattaagtcgaacagccacaacgtgcgggaattgcagctcaacggacccttttggaaaaa

SEQ ID NO: 90945 - DNA, 75 bp, synthetic construct
  source 1..75: mol_type = other DNA
cggatatattgatttggggaaattatacccaaccagtgcaggaactccacagggcggaataatatctccaacgct

SEQ ID NO: 90946 - DNA, 75 bp, synthetic construct
  source 1..75: mol_type = other DNA
gatctgaacgcttccttcgtgtcggctaacgcggaacagttttatcagtatcaacccactgaaatcattctctct

SEQ ID NO: 90947 - DNA, 75 bp, synthetic construct
  source 1..75: mol_type = other DNA
acagcggcggtgtatcagaaagttgtgatactggaagataaactggcggaaaaacctgtcacgggtaagaaccgg

SEQ ID NO: 90948 - DNA, 75 bp, synthetic construct
  source 1..75: mol_type = other DNA
agttaattaaagctattaatagtaatttttctttattaaataagaagctagaatctattacgccccaactcgcct

SEQ ID NO: 90949 - DNA, 75 bp, synthetic construct
  source 1..75: mol_type = other DNA
tttgcaggaaaggaatatgagttaaaggtcattgatgaaaaaacgcctattctttttcagtggtttgaacctaat

SEQ ID NO: 90950 - DNA, 75 bp, synthetic construct
  source 1..75: mol_type = other DNA
gcagcgacaactacgcgggcgatgaaatggttaccaaagtagtgccggtacgcaatgtgtcggtacgcgagctgg

SEQ ID NO: 90951 - DNA, 75 bp, synthetic construct
  source 1..75: mol_type = other DNA
gttctggcagaaaactacagcaatgaaactctgcccaacagcactactgctggctcagtattgaatgaaggtgat

SEQ ID NO: 90952 - DNA, 75 bp, synthetic construct
  source 1..75: mol_type = other DNA
ggtgactgcgcatactgcgataatcccgaccgccagtgtgcctgatgttaacgcactcagcaccgacgagcgcaa

SEQ ID NO: 90953 - DNA, 75 bp, synthetic construct
  source 1..75: mol_type = other DNA
taccgtgataacgccataacctacaaagagcagcgcgataaaaaagtcagtgagctggagctggcaaatgcaacc

SEQ ID NO: 90954 - DNA, 75 bp, synthetic construct
  source 1..75: mol_type = other DNA
aaccgaaaatcagtaatggccgcgaccgccgactgacttctggtgaagaacgccgcatttcccgctatttcagga

SEQ ID NO: 90955 - DNA, 75 bp, synthetic construct
  source 1..75: mol_type = other DNA
gactggctgcatgggctgacgatgaagcgttatccctgacacaaaccaggacagaacgccccgtgtcacagccag

SEQ ID NO: 90956 - DNA, 75 bp, synthetic construct
  source 1..75: mol_type = other DNA
ccaaatctttccccttgcccaggtccacctacgtccgtttactttccgttaaaaacgctgacgcccgcagctttt

SEQ ID NO: 90957 - DNA, 75 bp, synthetic construct
  source 1..75: mol_type = other DNA
taatttttgtctgggcaatcgggaaaataattgagccagttattgaattgtataacgacgtggtatgggcgtcgt

SEQ ID NO: 90958 - DNA, 75 bp, synthetic construct
  source 1..75: mol_type = other DNA
ctgcataccggacatatctaccttatccagcgcgcctgtagccaggttgacgagctgcatatcattatgggtttt

SEQ ID NO: 90959 - DNA, 75 bp, synthetic construct
  source 1..75: mol_type = other DNA
acttcttcgataacctgttacccgatagcccgattgtacgtgaccggatcgttaaacgttatcatgctaaatcca

SEQ ID NO: 90960 - DNA, 75 bp, synthetic construct
  source 1..75: mol_type = other DNA
atccgcgaaaaagtagagcgacagaatttttgtttctcattctgtttatcgtgttgatgataccgatatccccgc

SEQ ID NO: 90961 - DNA, 75 bp, synthetic construct
  source 1..75: mol_type = other DNA
gattataagcttattcaagaggtgtttcctgaagggttaagatctctatctttgattacttcgggttatgtaaaa

SEQ ID NO: 90962 - DNA, 75 bp, synthetic construct
  source 1..75: mol_type = other DNA
tacgccggagactctgcgtgtctgggttcgccagtatgagcgggataccggaggcggtgatggtgggcttaccac

SEQ ID NO: 90963 - DNA, 75 bp, synthetic construct
  source 1..75: mol_type = other DNA
gataccgacctgaaatcgttcatcgaaaccgtcggcgctaaccttaataagaccatcattatggggccgggcgtt

SEQ ID NO: 90964 - DNA, 75 bp, synthetic construct
  source 1..75: mol_type = other DNA
actgggagccgatggcgctgacggatgtgacacgctccccttactgcatggtgaatctggggggctttaatatca

SEQ ID NO: 90965 - DNA, 75 bp, synthetic construct
  source 1..75: mol_type = other DNA
gccgggattatttgatgaaatccagccccgtaaaaacagtgaaaagttaatgaaaacactcgatgaactgaacca

SEQ ID NO: 90966 - DNA, 75 bp, synthetic construct
  source 1..75: mol_type = other DNA
taatcgaatgtgatgatgtgctgccagaggatttagttggtgctgaggctgtacataagcaccttaaaatctaca

SEQ ID NO: 90967 - DNA, 75 bp, synthetic construct
  source 1..75: mol_type = other DNA
tggaaggagtgcctgacacagccagattttgataataccgcaaatactctgatcccgatggggacaaaagaggac

SEQ ID NO: 90968 - DNA, 75 bp, synthetic construct
  source 1..75: mol_type = other DNA
ggaataacgttcctcgttttgaaaaatatggtttgctgatagagaatcagcgaacaaacatgttcgtaaatagtt

SEQ ID NO: 90969 - DNA, 75 bp, synthetic construct
  source 1..75: mol_type = other DNA
aactatcggcccggtaaaaggggcgcgcgtacatctggcaatgccgaaaccgtctttattcgtccgtgaacaaaa

SEQ ID NO: 90970 - DNA, 75 bp, synthetic construct
  source 1..75: mol_type = other DNA
acggaaggcccgctggccggacgtactgcgctgtatgcagaaatcgaaccgaccgagcgcatgaagcagcttgtc

SEQ ID NO: 90971 - DNA, 75 bp, synthetic construct
  source 1..75: mol_type = other DNA
caggttaagggacatgacctgacgaaatgggtctggcagaatgaacctgaactgcgccctgaaaacacgcaaaat

SEQ ID NO: 90972 - DNA, 75 bp, synthetic construct
  source 1..75: mol_type = other DNA
cgggtgatttttgtcactggctactacggtctgacgcaggggctgctatctgtcctgcgtcttttctggggtaac

SEQ ID NO: 90973 - DNA, 75 bp, synthetic construct
  source 1..75: mol_type = other DNA
gatgggctggatgttgtctccggaattctttctgctgtatcagcaagctttattctgggaaacagtgacgcacat

SEQ ID NO: 90974 - DNA, 75 bp, synthetic construct
  source 1..75: mol_type = other DNA
ccgcgaggaagtggaagatgcggtggaagtccgcctgagcaaagacgaacaactccaacaacggcgcgctaacca

SEQ ID NO: 90975 - DNA, 75 bp, synthetic construct
  source 1..75: mol_type = other DNA
aactggttcggaaacccagaataaccagcggccgcgatcgccgactcacttccgccgaagaacgcaggctttccc

SEQ ID NO: 90976 - DNA, 75 bp, synthetic construct
  source 1..75: mol_type = other DNA
acggcaaaaccttccggatgaatgctgctcaggtactgcatgataaatatatgatctggtgcggagagcagctat

SEQ ID NO: 90977 - DNA, 75 bp, synthetic construct
  source 1..75: mol_type = other DNA
cgtgtatgaccgctcctgtgagttcgtcaaaagctactatgatccggccacagataaaatccttaacccgctgga

SEQ ID NO: 90978 - DNA, 75 bp, synthetic construct
  source 1..75: mol_type = other DNA
gcggggcgaggaaccgcccctgaatggcaaatgaaacgggaaatgttgagtcagtgttatacaactaaatggcga

SEQ ID NO: 90979 - DNA, 75 bp, synthetic construct
  source 1..75: mol_type = other DNA
cggatgctggatggcagaactcacagacaaatctgcgaaatgtttggtcgggtacagcgggatccattctgggta

SEQ ID NO: 90980 - DNA, 75 bp, synthetic construct
  source 1..75: mol_type = other DNA
gcagtttgccggagtcgttactgttgatcgctctctggaaaaccgtcgtatgcaggccgggcaggtaatcagtgg

SEQ ID NO: 90981 - DNA, 75 bp, synthetic construct
  source 1..75: mol_type = other DNA
acgtggagacgtgactgaaattgttcatgctggcgaccctgatgaagaaggtcagctacttgttgatgaagttct

SEQ ID NO: 90982 - DNA, 75 bp, synthetic construct
  source 1..75: mol_type = other DNA
tgccagagggtgggcaagcaacaatattgcgcaacaaaatgtcaatcttcgtcggatggaattagaggacaagaa

SEQ ID NO: 90983 - DNA, 75 bp, synthetic construct
  source 1..75: mol_type = other DNA
cctgatgagcggttactttggcgaccaggtttcgcaagacgagattgccgcgacgggctggttagacaccggcga

SEQ ID NO: 90984 - DNA, 75 bp, synthetic construct
  source 1..75: mol_type = other DNA
atgacgactgttaataataatgatccgcatgttgccaaaacgggcaatgaaaaaaaacgcctgactaatgaggta

SEQ ID NO: 90985 - DNA, 75 bp, synthetic construct
  source 1..75: mol_type = other DNA
tcgatggcaacggacgcctgactggtgcccgtactgcacagacagcgccttacgatcgatacacctgtcaccttt

SEQ ID NO: 90986 - DNA, 75 bp, synthetic construct
  source 1..75: mol_type = other DNA
ttcgttccagtgaactcagatacgcccgctggtctgaaattgatattgacaatgccatgtggactattccagccg

SEQ ID NO: 90987 - DNA, 75 bp, synthetic construct
  source 1..75: mol_type = other DNA
cgaacaggacgatattgtaaattcacctaattacgaggacattgcagtagttgaattgcagctctgtattagcct

SEQ ID NO: 90988 - DNA, 72 bp, synthetic construct
  source 1..72: mol_type = other DNA
gccgttgttccgtgtcagtggtggcgcattatagggagttattccggcctgacaagaggaaatttaaaataa

SEQ ID NO: 90989 - DNA, 75 bp, synthetic construct
  source 1..75: mol_type = other DNA
gcagaggttccggcggaacagttggacggcaaaagtgagcgcattcatcactatttcaacgcggtttactgctgg

SEQ ID NO: 90990 - DNA, 75 bp, synthetic construct
  source 1..75: mol_type = other DNA
aagtgtattccgacgccgtggacttctcatccgaagacgtaacggcggtcgttaaaccttccctgcgcattgttt

SEQ ID NO: 90991 - DNA, 75 bp, synthetic construct
  source 1..75: mol_type = other DNA
tctgctgacacccgctcatgcagaagagcaacgttatatcagtatccgcaatacggacactgtgtgggtgcctgg

SEQ ID NO: 90992 - DNA, 75 bp, synthetic construct
  source 1..75: mol_type = other DNA
gttcctcacgccacggcgctgatagtaattattcttttgattctatgccgcgtttatccaactcacggcgcaaaa

SEQ ID NO: 90993 - DNA, 75 bp, synthetic construct
  source 1..75: mol_type = other DNA
tggaaaaggaaggcgtgaactgtaaacctaatatcgcctcaacgggaaaaatgaacggcttttcatttcagtacc

SEQ ID NO: 90994 - DNA, 75 bp, synthetic construct
  source 1..75: mol_type = other DNA
ccagtaataaacaatgggcacaatcacacagcgataaagtactcaaaagcctcgagacacacgttttccccttta

SEQ ID NO: 90995 - DNA, 75 bp, synthetic construct
  source 1..75: mol_type = other DNA
tggcgtgctcggtgtgtccgggcgggatgacctcgggcaacccggtgaacccgctgctcggtgcaaaagtacagc

SEQ ID NO: 90996 - DNA, 75 bp, synthetic construct
  source 1..75: mol_type = other DNA
ttccagccgaacgcaaacctctgccaggggtaaaattctcacaccggggctccaagatgcgaacaccacatcttg

SEQ ID NO: 90997 - DNA, 75 bp, synthetic construct
  source 1..75: mol_type = other DNA
aataaagccattgataccgtgaagcagcaaaaaattgaggccagcagccagccttatatgtatcacggccagcta

SEQ ID NO: 90998 - DNA, 75 bp, synthetic construct
  source 1..75: mol_type = other DNA
atgccgatttgttcgacattagccagggcatccagtgaagacacaaggggatcttctccgctgccttctgcctgg

SEQ ID NO: 90999 - DNA, 75 bp, synthetic construct
  source 1..75: mol_type = other DNA
gtggcagatgccgtatggacggggaatcacctgaagatggtccgctttgccgtggaaaataaaacgctgtctgcc

SEQ ID NO: 91000 - DNA, 75 bp, synthetic construct
  source 1..75: mol_type = other DNA
aataattgagctagttattgagttgtataacgacgtggtatgggcgtcgttcaacacactgcacaataaaattaa

SEQ ID NO: 91001 - DNA, 75 bp, synthetic construct
  source 1..75: mol_type = other DNA
cttcggatacgccaaaaacacctatactgcggttggtacaaataataatagcggtcttgatattaaaacccgccg

SEQ ID NO: 91002 - DNA, 75 bp, synthetic construct
  source 1..75: mol_type = other DNA
aacaccttttaaacctcaagaaaaagctcctgctttaaaggtttttgtatattctcctttaaatcgttcagttgg

SEQ ID NO: 91003 - DNA, 75 bp, synthetic construct
  source 1..75: mol_type = other DNA
gattacagcagatgcagaacttcatctgtttggtgaaattctttcccgaaagctggatgaactggaaaagctggt

SEQ ID NO: 91004 - DNA, 75 bp, synthetic construct
  source 1..75: mol_type = other DNA
ggcaggcgctggagaaagtggccaccgcaggaaactgctggcaggtggcccgggcgttgctgaataaccccggag

SEQ ID NO: 91005 - DNA, 75 bp, synthetic construct
  source 1..75: mol_type = other DNA
tcagcggcaggagcttgccagactgtgtggagttaagccagacaactggagccataattatgcgaactactggcg

SEQ ID NO: 91006 - DNA, 75 bp, synthetic construct
  source 1..75: mol_type = other DNA
tcaattgcgctggtcagtcctgttgagtttgcaacatcatcgtggcggcgtgccgttctggaactggaagaacat

SEQ ID NO: 91007 - DNA, 75 bp, synthetic construct
  source 1..75: mol_type = other DNA
taccgcaatgtgcttattgaagatgaccagggaacgcatttccggctggttatccgcaatgctgaagggcagcta

SEQ ID NO: 91008 - DNA, 75 bp, synthetic construct
  source 1..75: mol_type = other DNA
ttcgtgagcagctcattatcgccaccgccgatttgagtggggcaacaaaaggtcagcttgaagcctggcaggaga

SEQ ID NO: 91009 - DNA, 75 bp, synthetic construct
  source 1..75: mol_type = other DNA
gcaatggagtatttatagaaaagaattaaatatgggattaatcagtacaatatattacttttcaagttatattta

SEQ ID NO: 91010 - DNA, 75 bp, synthetic construct
  source 1..75: mol_type = other DNA
accgggatatcacaacactcaataccccggatctgcttatccctgttcgtgctgcagaagctaaacaaatttatg

SEQ ID NO: 91011 - DNA, 75 bp, synthetic construct
  source 1..75: mol_type = other DNA
caggcgctctggcatgtgctgcattattaagcggtaaattagaccaatatattcaaaacagaaaaaccgtcagta

SEQ ID NO: 91012 - DNA, 75 bp, synthetic construct
  source 1..75: mol_type = other DNA
gcacgcgccatgctcaacgagcgttatcaggactatgacgccacggcgtccggtgtgaagcggggcgaggaactg

SEQ ID NO: 91013 - DNA, 75 bp, synthetic construct
  source 1..75: mol_type = other DNA
gattcgtcgtgcggtgaaacgtcatagccaggtgagcggtggtcgccgttctggcggacgtaataataacggtta

SEQ ID NO: 91014 - DNA, 75 bp, synthetic construct
  source 1..75: mol_type = other DNA
atatgcgttttgggctggagctggagaaatcggcgttcgggaaatataacgtggataatgcgataaacgccaact

SEQ ID NO: 91015 - DNA, 75 bp, synthetic construct
  source 1..75: mol_type = other DNA
gaagcgcaaaatatcagccgtaaagtggtgattagcccctccgctgtcgaacgtatgttagtcactcttgctacc

SEQ ID NO: 91016 - DNA, 75 bp, synthetic construct
  source 1..75: mol_type = other DNA
aacgggccgcaggtggggctgctggcgttacagaatctggcgtggaaagaggtagaaccgtatccgctggatgtg

SEQ ID NO: 91017 - DNA, 75 bp, synthetic construct
  source 1..75: mol_type = other DNA
cactatctctcgccatgcccgtcaagcgaattttccgcaatgggcgatgtcaccgcgctgagtacggaagatatt

SEQ ID NO: 91018 - DNA, 75 bp, synthetic construct
  source 1..75: mol_type = other DNA
atgagcaaaatatcaggttggaatttttctcaacacattacatcagccgacaattttaaacaaaaaagtgaagtt

SEQ ID NO: 91019 - DNA, 75 bp, synthetic construct
  source 1..75: mol_type = other DNA
gcattgaccacggtaaaacgccagcatcgccctgctcttgatctttcacgcctgcctgaacttgtgtcgcgtatt

SEQ ID NO: 91020 - DNA, 75 bp, synthetic construct
  source 1..75: mol_type = other DNA
gcattgaccacggtaaaacgccagcatcgccctgctcttgatctttcgcgcctgcctgaacttatgtcgcgtatt

SEQ ID NO: 91021 - DNA, 75 bp, synthetic construct
  source 1..75: mol_type = other DNA
tgtttctgatgttatggatggcgctgttaatcgcagcaatggtgtatccgcaggggatttttccggtactggcag

SEQ ID NO: 91022 - DNA, 75 bp, synthetic construct
  source 1..75: mol_type = other DNA
gcactggctgcgttaattaagaatggctcgctctggcaggagttgagggcatctttgctgaagaccattacccga

SEQ ID NO: 91023 - DNA, 75 bp, synthetic construct
  source 1..75: mol_type = other DNA
gcattgaccacggtaaaacgccagcatcgccctgctcttgatctttctcgcctgcctgaacttttgtcgcgtatt

SEQ ID NO: 91024 - DNA, 75 bp, synthetic construct
  source 1..75: mol_type = other DNA
tcttattgattccttagatgatgcaaaggttaaccttacaccggtcatcgattcgatgctggagacttttttaaa

SEQ ID NO: 91025 - DNA, 75 bp, synthetic construct
  source 1..75: mol_type = other DNA
gaccgattttcaggcgctggcgctgcgcccgtttggctggcgggaagtctggatcggttacgacccagcgaaagg

SEQ ID NO: 91026 - DNA, 75 bp, synthetic construct
  source 1..75: mol_type = other DNA
tcgccctggcgagacgacgctgcgacgttctgttcgccatgatgcgcgacgggactttttataccccgcaggcgt

SEQ ID NO: 91027 - DNA, 75 bp, synthetic construct
  source 1..75: mol_type = other DNA
cgacgagaaaatattcgattgttcagggaaggggattataaatacattttggtgtgcgacctgttcaatgaaggt

SEQ ID NO: 91028 - DNA, 75 bp, synthetic construct
  source 1..75: mol_type = other DNA
ctggcagaaatttattcagcaattaaatacctggaacatggaggatgtcgatcaattacgctggccgctgtgtgc

SEQ ID NO: 91029 - DNA, 75 bp, synthetic construct
  source 1..75: mol_type = other DNA
tgtgatgacacgattccatacttactaggcgaaggtggtatacttgaagaaataaatgatctgaaagcgttacat

SEQ ID NO: 91030 - DNA, 75 bp, synthetic construct
  source 1..75: mol_type = other DNA
cagccataagattgcagagttcgctgccggtgagattggtgagaaagagcacctgaaagccagcgagcagtattc

SEQ ID NO: 91031 - DNA, 75 bp, synthetic construct
  source 1..75: mol_type = other DNA
atgcaaaactggaatgaagatttgcataccgctggttttatcatcgacgccaacccgcagtcagcaaaaattgcg

SEQ ID NO: 91032 - DNA, 75 bp, synthetic construct
  source 1..75: mol_type = other DNA
aaccgttagcttttattcagccgggggaaattttgccctgttgttgccgggcaaaaggcgatattgaaatcgaga

SEQ ID NO: 91033 - DNA, 75 bp, synthetic construct
  source 1..75: mol_type = other DNA
ggacgggtcagggccgtactcctaaagtgatcgctgttgctattgaagcaggtaaaacactggaagatttccaga

SEQ ID NO: 91034 - DNA, 75 bp, synthetic construct
  source 1..75: mol_type = other DNA
cagagtaaatatgccagcacacctgccaccggaagcaatcacagcactagcgagataagaaagaacattcagtca

SEQ ID NO: 91035 - DNA, 75 bp, synthetic construct
  source 1..75: mol_type = other DNA
acggatttgcagaccaggtgacgccagccgttaaggcaatggcatgtattcagtcaaaacgtacagaggaattta

SEQ ID NO: 91036 - DNA, 75 bp, synthetic construct
  source 1..75: mol_type = other DNA
attactccccgtcgtcgggaggataaacagaacgatctctggacaacctggcagcgggttcaggagaatatgata

SEQ ID NO: 91037 - DNA, 75 bp, synthetic construct
  source 1..75: mol_type = other DNA
tcggcgatccggctcgtcaatacgcggtgagcatccctcgcgacggggtaataaagctctcaaacgggcgttgtt

SEQ ID NO: 91038 - DNA, 75 bp, synthetic construct
  source 1..75: mol_type = other DNA
gaaaaatgaagaaagccgggcagccgtgggaaaaggccaaagcgtttgataactcttgtccgctttccgggttta

SEQ ID NO: 91039 - DNA, 75 bp, synthetic construct
  source 1..75: mol_type = other DNA
attgccggtgacgtacagcacgaaagttatattgacggatggcttaaggttctgaagtctgacaaaaaagcgctg

SEQ ID NO: 91040 - DNA, 75 bp, synthetic construct
  source 1..75: mol_type = other DNA
gcattgactacggtaaaacgccagcatcgccccgctcttgatctttctcgcctgcctgaacttttgtcgcgtatt

SEQ ID NO: 91041 - DNA, 75 bp, synthetic construct
  source 1..75: mol_type = other DNA
aggcattaacgatctgtttgccatgttcggcggtcgctatcagacgcttcaggcacagtgcgtggctgatcctga

SEQ ID NO: 91042 - DNA, 75 bp, synthetic construct
  source 1..75: mol_type = other DNA
tggattccgggcgatggcgtgcagtgcattgattgaatcaggtttgtggtcccgcgatgctgtggaacgtcagat

SEQ ID NO: 91043 - DNA, 75 bp, synthetic construct
  source 1..75: mol_type = other DNA
gacccgattgggctggcggggggatggagtctgtatgcgtatccgctgaatccggtgaatggtattgatccatta

SEQ ID NO: 91044 - DNA, 75 bp, synthetic construct
  source 1..75: mol_type = other DNA
ctggctgttatgctgaatttactggtttttattcgttccagtgaactcagataagcccgttggtctgaaattgat

SEQ ID NO: 91045 - DNA, 75 bp, synthetic construct
  source 1..75: mol_type = other DNA
cagaagtacggcagagaactaaggttatcacccttagagtaaataacagagtcgcaagcgaaatcagacggcgag

SEQ ID NO: 91046 - DNA, 75 bp, synthetic construct
  source 1..75: mol_type = other DNA
aatgggctcgcatgtcactgacggagcgcggtattggggtggccagttataaccccatgcagatggtcgggctgg

SEQ ID NO: 91047 - DNA, 75 bp, synthetic construct
  source 1..75: mol_type = other DNA
tcggcggggattgacccttgcgaacagaaaagagctaaaaaagtagtccctgatttacagctctcttttgaacat

SEQ ID NO: 91048 - DNA, 75 bp, synthetic construct
  source 1..75: mol_type = other DNA
agccggggcagtgtctggcttaacagcaataattcctgtgcaggcaccagcaactgcgaatatagagtaaacagt

SEQ ID NO: 91049 - DNA, 75 bp, synthetic construct
  source 1..75: mol_type = other DNA
atggcttctaaaaaattttactcagatgatgacatccagctggcaaaagctgctttatcggaattgccagacctc

SEQ ID NO: 91050 - DNA, 75 bp, synthetic construct
  source 1..75: mol_type = other DNA
cactgcttattgtgtgcggcactgtcacagctgcagataacccgggctggaaaaatgcacgaagcccgcagaccg

SEQ ID NO: 91051 - DNA, 75 bp, synthetic construct
  source 1..75: mol_type = other DNA
ttaacatggctcgctttatcagaagccagacgctaaccctgctggaaaaactcaacgatctggacgcggacgaac

SEQ ID NO: 91052 - DNA, 75 bp, synthetic construct
  source 1..75: mol_type = other DNA
tcgcaagggcgaacatggtacgacggccattttctacaccacgctggagaaggaaaacgacgcaggagaaattga

SEQ ID NO: 91053 - DNA, 75 bp, synthetic construct
  source 1..75: mol_type = other DNA
cggcagatgctgtcgtttccactatggacgggctggtatcaaatatttccgatgcgctggccggaaatgttgtgg

SEQ ID NO: 91054 - DNA, 75 bp, synthetic construct
  source 1..75: mol_type = other DNA
ggtctgcatgagctgattcactggagtggtggcaaaaaacgtctgaaccgtgaaatgaaagggaagtttggcagt

SEQ ID NO: 91055 - DNA, 75 bp, synthetic construct
  source 1..75: mol_type = other DNA
tcctgagaatcgaaacagagaatggcgaacaggcgaaggcgcggcaccggagcctggcggaggtgttgcaggagg

SEQ ID NO: 91056 - DNA, 75 bp, synthetic construct
  source 1..75: mol_type = other DNA
tggtgtgccgggactcgtcatgctgggggcgacggcctggtacacgatgtatcagaatcaggagcaggccagaga

SEQ ID NO: 91057 - DNA, 75 bp, synthetic construct
  source 1..75: mol_type = other DNA
gaaaacaatgccgcgaccgataaagcgccatccactcatacttcaccggtatcagggaaaaatagagcgcctgag

SEQ ID NO: 91058 - DNA, 75 bp, synthetic construct
  source 1..75: mol_type = other DNA
ggttaccggagcgccatctattcgctgatgcggctaacttctatgctaccggtctgcatgagcttgtccactgga

SEQ ID NO: 91059 - DNA, 75 bp, synthetic construct
  source 1..75: mol_type = other DNA
tccccaaagaaaggatgaagcggcgaaaccctcacctggtgtttctatccaggcaggccatggacatcctcatcg

SEQ ID NO: 91060 - DNA, 75 bp, synthetic construct
  source 1..75: mol_type = other DNA
tggggcaaagataaaaactcaaactgtattgtcgagtacaagcttcctgaagtttctcctggtaccttactgaac

SEQ ID NO: 91061 - DNA, 75 bp, synthetic construct
  source 1..75: mol_type = other DNA
aaacgtatcaacaggcatgcaccactgtttgcggatgaactgattgcccgtgaactggctgaacgaccggattat

SEQ ID NO: 91062 - DNA, 75 bp, synthetic construct
  source 1..75: mol_type = other DNA
ctggattaacggggagcatacggatctgattccgttctccccgtcgaagtttgagaagtggatggcgggggaata

SEQ ID NO: 91063 - DNA, 75 bp, synthetic construct
  source 1..75: mol_type = other DNA
atgtatgacttttataaacatcgtgaccatttggtaagatttgacggtaaagtctggaaagacgtaacacaaacc

SEQ ID NO: 91064 - DNA, 75 bp, synthetic construct
  source 1..75: mol_type = other DNA
gatttttgctcagcatcagccggatgcagtgatgcacctggctgctgaaagccatgttgaccgttcaattacagg

SEQ ID NO: 91065 - DNA, 75 bp, synthetic construct
  source 1..75: mol_type = other DNA
cggccaccatccgtgtgaacggacaggagtacgccacccttgagggagccacgttctccccgtccggctttgagc

SEQ ID NO: 91066 - DNA, 75 bp, synthetic construct
  source 1..75: mol_type = other DNA
tatcatttcccggaaaagcttattccactggttattcttaatgcactggaaggtaaggcattacctatttatggc

SEQ ID NO: 91067 - DNA, 75 bp, synthetic construct
  source 1..75: mol_type = other DNA
tatcaacttgcaggcaaactgcagtcacgcttattaaatggagtgtatcaacgggatcttcctcacaaacgcaat

SEQ ID NO: 91068 - DNA, 75 bp, synthetic construct
  source 1..75: mol_type = other DNA
gtctgaaaacatcgggagaagcgctctccgaatggcaggcgaaagagaaggatgcgcagttccgcctgcgcttct

SEQ ID NO: 91069 - DNA, 75 bp, synthetic construct
  source 1..75: mol_type = other DNA
ccggctgcggtacagggtggcgtgccacagacgtcagcagacggtgatgcggacgtgaaaatgctcatggccatg

SEQ ID NO: 91070 - DNA, 75 bp, synthetic construct
  source 1..75: mol_type = other DNA
aatccgctctgaaagaatggaagaagctgggtcatacactacaggtacagttcaaaaagaaactcaaagagcgcc

SEQ ID NO: 91071 - DNA, 75 bp, synthetic construct
  source 1..75: mol_type = other DNA
cgggcaaacgagacatcgatctggcgctggatgctgcgcacaaagtgaaagataaatgggcgcacacctcggtgc

SEQ ID NO: 91072 - DNA, 75 bp, synthetic construct
  source 1..75: mol_type = other DNA
cccggacactgcccagggaatgctggagaaagcagaaaaggcttttgatgaggcggacaaaaaatggcagtggta

SEQ ID NO: 91073 - DNA, 75 bp, synthetic construct
  source 1..75: mol_type = other DNA
gaccttgcggttaagtttcatctctttaccgactacattgatgaagattatctacaacgtgttaatgcttttacc

SEQ ID NO: 91074 - DNA, 75 bp, synthetic construct
  source 1..75: mol_type = other DNA
cttcacaggctgactttatttggaagaatgcggaagacctttggggggacttcaagcatacggactttggcaaga

SEQ ID NO: 91075 - DNA, 75 bp, synthetic construct
  source 1..75: mol_type = other DNA
ccatgatgtatcacgctcaggaacgcattatgaatattcctggttcggaagtaactggcatgcgcggcggcattc

SEQ ID NO: 91076 - DNA, 75 bp, synthetic construct
  source 1..75: mol_type = other DNA
aacgcctggctgccgtgcgaaacaaaatccgccagcaggaagaggtcgtccttgacaagttacgcgagtatcgtc

SEQ ID NO: 91077 - DNA, 75 bp, synthetic construct
  source 1..75: mol_type = other DNA
atggcaaagggtgtgtcaatttctccaactacggtaagaatccctgaatctttacgcgaggctcttgctgtcaga

SEQ ID NO: 91078 - DNA, 75 bp, synthetic construct
  source 1..75: mol_type = other DNA
ggaggctgcccgcgacattctgtcctcatcgccggataaagcagaaccggtttctgcatccacaaccgccctgtt

SEQ ID NO: 91079 - DNA, 75 bp, synthetic construct
  source 1..75: mol_type = other DNA
tgaacggacacatctacaaagtaccaaatcgtcgtaagcgtaaacctgagctgaagccatccgaaataccaacac

SEQ ID NO: 91080 - DNA, 75 bp, synthetic construct
  source 1..75: mol_type = other DNA
gggttatatcaatccggtcagcgggatgagtggttacgacggaatcgcaaaacgcctgcagcaggcgatttctga

SEQ ID NO: 91081 - DNA, 75 bp, synthetic construct
  source 1..75: mol_type = other DNA
ccttcatcaatggtgaacagatgttgagttatgactcgcattcatcagggcgagtctattccagagaagaatata

SEQ ID NO: 91082 - DNA, 75 bp, synthetic construct
  source 1..75: mol_type = other DNA
gatgcgcagttccgcctgcgcttttatgcccagcacggtatggaagaaaaactggcgcgtcagaccaccttcgga

SEQ ID NO: 91083 - DNA, 75 bp, synthetic construct
  source 1..75: mol_type = other DNA
cgcgcctacagcagctaccggaccagaacacccgcgccggtgggggtgtttggtcccggctggaaagcgcccttc

SEQ ID NO: 91084 - DNA, 75 bp, synthetic construct
  source 1..75: mol_type = other DNA
atcctggctgcttcaccgcaggcggatgccggaccatcactccgtgatcagatcatggcactggatgaggcaaaa

SEQ ID NO: 91085 - DNA, 75 bp, synthetic construct
  source 1..75: mol_type = other DNA
atgttcgtgaatttattcgcggtactgtcaacgtcatggagaacctgctgccctaccgtgaacttgggatacccc

SEQ ID NO: 91086 - DNA, 75 bp, synthetic construct
  source 1..75: mol_type = other DNA
aggctcaatggcggggacgggaagccgtgccgtgttaagccgcctgcaggcaccgacgggaaaagcatgggatgc

SEQ ID NO: 91087 - DNA, 75 bp, synthetic construct
  source 1..75: mol_type = other DNA
gacggaaccgtccgcttttcctgataccctgccgggttacaccgaatatggccgggacaacggcatctgtctgcc

SEQ ID NO: 91088 - DNA, 75 bp, synthetic construct
  source 1..75: mol_type = other DNA
acggttaaatcgctgcttgattcattagcgacgttacccgcgcaaaacaaagctcaggaagtcttactggatgtg

SEQ ID NO: 91089 - DNA, 75 bp, synthetic construct
  source 1..75: mol_type = other DNA
gaaaggcgtttctaaagccccttaatccacaatatccaatcatagaaatggacaatgattgcgaaatagtaggtg

SEQ ID NO: 91090 - DNA, 75 bp, synthetic construct
  source 1..75: mol_type = other DNA
caatatttaccattctgaaagaaatgcaggccagttttgagaaaaaccggctcggtactgcccagcaggctgaat

SEQ ID NO: 91091 - DNA, 75 bp, synthetic construct
  source 1..75: mol_type = other DNA
gcatcagggccatctggtcaaagccgccgttgagctggcaaaagactggcgtaccgatcgcatgctgcgcaaact

SEQ ID NO: 91092 - DNA, 75 bp, synthetic construct
  source 1..75: mol_type = other DNA
gctaccggtgcggaattaagtagcggaacagctcttgacgtttttgcggataatgctcagttcggcactcttgat

SEQ ID NO: 91093 - DNA, 75 bp, synthetic construct
  source 1..75: mol_type = other DNA
gtatttgatacccaagactatgaatagaaataatattgttcaatggaaggtagtaactgattatggcgggataag

SEQ ID NO: 91094 - DNA, 75 bp, synthetic construct
  source 1..75: mol_type = other DNA
atagtgaaaaatatacgtctagaagtattaaattaggagaattaaaatcacatttatctaatgacacctataata

SEQ ID NO: 91095 - DNA, 75 bp, synthetic construct
  source 1..75: mol_type = other DNA
cctgtagcctgtattaatccggagagaaagggacaggccgcacgtattgccgcgaccattcgacataaccgggcc

SEQ ID NO: 91096 - DNA, 75 bp, synthetic construct
  source 1..75: mol_type = other DNA
atgaatataatgagaactatctgacagctcagtttgaagaattatctcaacgtgatatgaagaagtacctgggag

SEQ ID NO: 91097 - DNA, 75 bp, synthetic construct
  source 1..75: mol_type = other DNA
ccataatggcgaaccatacgttcccatgaaacctgtcgttgcggggatggggctggcctggcaatcacagttggc

SEQ ID NO: 91098 - DNA, 75 bp, synthetic construct
  source 1..75: mol_type = other DNA
gtcgacaggagtttagtggggcattttattatgaagacagtcagctaacaggaagtcataaaactaattttacga

SEQ ID NO: 91099 - DNA, 75 bp, synthetic construct
  source 1..75: mol_type = other DNA
atgttgccaggatgctgcaaaaatggaattgttatcagtaaaatacctgttatgcaagcagggttaaaagaggtc

SEQ ID NO: 91100 - DNA, 75 bp, synthetic construct
  source 1..75: mol_type = other DNA
ggggtggtgattcctgggcttccgctgacaacttcatgaacggtcgtaccaacggtgttgcaacctaccgtaact

SEQ ID NO: 91101 - DNA, 75 bp, synthetic construct
  source 1..75: mol_type = other DNA
ggtaagaacagcaatcgtggcgttactaaacaaaacggtgatggctatgcgttgtctgtagactacaacatcgaa

SEQ ID NO: 91102 - DNA, 75 bp, synthetic construct
  source 1..75: mol_type = other DNA
gactaatccggaatacagattcgctgggcataccgatatttttattacctggatttataaactcacattgaattt

SEQ ID NO: 91103 - DNA, 75 bp, synthetic construct
  source 1..75: mol_type = other DNA
attgacagtccgggcgggcaggccgccggtgcgtttgactgcgctgacatgatttaccgcctccggcagcagaag

SEQ ID NO: 91104 - DNA, 75 bp, synthetic construct
  source 1..75: mol_type = other DNA
atgttgcaccacttcagaataacgatctactggaagactttttctcacctgtcgcgcgcgatggtgccagtatga

SEQ ID NO: 91105 - DNA, 75 bp, synthetic construct
  source 1..75: mol_type = other DNA
atggttccactatcaaacaggttcaaattaacaaccctggcgatgtgtatactaaagccctggatgcaacgacaa

SEQ ID NO: 91106 - DNA, 75 bp, synthetic construct
  source 1..75: mol_type = other DNA
gcaattctcgtgttgacgcttatcgtaatgagcaacttttgggatcgttttatctcaatagtggttcgcaattta

SEQ ID NO: 91107 - DNA, 75 bp, synthetic construct
  source 1..75: mol_type = other DNA
tggcggtgtgatagatgacctcatcgtctactactttactgaagatttcttccgcctcgttgttaactccgccac

SEQ ID NO: 91108 - DNA, 75 bp, synthetic construct
  source 1..75: mol_type = other DNA
gacgacggtaggcggcattatgaatacctcggtggcgttgttgcagtcctcacaggtagggctgcataaatcact

SEQ ID NO: 91109 - DNA, 75 bp, synthetic construct
  source 1..75: mol_type = other DNA
aacaacacacgctttgcggcgctcgcatggtggatttccacggctggatgatgccgctgcattacggttcgcaaa

SEQ ID NO: 91110 - DNA, 75 bp, synthetic construct
  source 1..75: mol_type = other DNA
aactaatgcaacctggaatgaaattaactttactgaagcgttgtggacgatccctaaggagcgaatgaaacggcg

SEQ ID NO: 91111 - DNA, 75 bp, synthetic construct
  source 1..75: mol_type = other DNA
ctgcatgacctgcaacaaggtaaagaggttacggcgaaacctgccggtgactggaaagtcattgaagcggcctgg

SEQ ID NO: 91112 - DNA, 75 bp, synthetic construct
  source 1..75: mol_type = other DNA
atgattgatttaacagaacgctatgagcttattaaagcaattagtgaacgattgaaagaacaacccaacaaacca

SEQ ID NO: 91113 - DNA, 75 bp, synthetic construct
  source 1..75: mol_type = other DNA
gtcggtggtactggcgacccgtaaatatgtggatgatgaagtcctggaattaaggctgtatgtggatgaccagat

SEQ ID NO: 91114 - DNA, 75 bp, synthetic construct
  source 1..75: mol_type = other DNA
tgaagcccgcatcggtaatgcggctaaaactgcccaggtacagggtaacttcaataacatgattatgctgcgcgt

SEQ ID NO: 91115 - DNA, 75 bp, synthetic construct
  source 1..75: mol_type = other DNA
tgaggcccgtaccggtagtgctgccaaaacggcccaggtgcagggtaactttaataacatgattatgctgcgggt

SEQ ID NO: 91116 - DNA, 75 bp, synthetic construct
  source 1..75: mol_type = other DNA
tccgcaccatggcgtgtggtatcgctggtctgtccgttgctgctgactccctgtctgcaatcaaatatgcgaaag

SEQ ID NO: 91117 - DNA, 75 bp, synthetic construct
  source 1..75: mol_type = other DNA
tatctcttactcatgcctcaggcttgctaagtaataatctgagtggttctggtacagtatctttgatcaatagtg

SEQ ID NO: 91118 - DNA, 75 bp, synthetic construct
  source 1..75: mol_type = other DNA
agcgatgaccgttgctgccctgtgtgaaaagcataacgttgaactggtggcgatcggcaacggtacagcttcccg

SEQ ID NO: 91119 - DNA, 75 bp, synthetic construct
  source 1..75: mol_type = other DNA
gcctcggcggatgatgcggccggtgcgcagattatcattgcgaaagcgggtggagatgctgcggctattcaggcg

SEQ ID NO: 91120 - DNA, 75 bp, synthetic construct
  source 1..75: mol_type = other DNA
ctctgttgcacgcacggttctgcgtgccgtccgtgactcggtggtctctgttgcccgcgctgtatggaactggat

SEQ ID NO: 91121 - DNA, 75 bp, synthetic construct
  source 1..75: mol_type = other DNA
ttattgacctgagtctggatgcggtccgcttcgatgagcagatgacccgcgtaaggcgtcatttttcaggactgg

SEQ ID NO: 91122 - DNA, 75 bp, synthetic construct
  source 1..75: mol_type = other DNA
ggtatggctccggctctgattttgtccggtgctttactgctggtgggcgcactggctatggtcagaagggggacg

SEQ ID NO: 91123 - DNA, 75 bp, synthetic construct
  source 1..75: mol_type = other DNA
gttcgacaaccccaccacggatatccgtaaggacagatgcagcaagtgcatgcgcgggtgtgagatgcgcggcat

SEQ ID NO: 91124 - DNA, 75 bp, synthetic construct
  source 1..75: mol_type = other DNA
tggcaggggcggcaatatcaggcgtacccgattgaggggagtggctttgagatgaacggaaagggcagcagtgcc

SEQ ID NO: 91125 - DNA, 75 bp, synthetic construct
  source 1..75: mol_type = other DNA
ggcactggcgggtcagaatacagagctggcgaagctgaagtaccagactgcgcagggcgaactgaaaaccctgac

SEQ ID NO: 91126 - DNA, 75 bp, synthetic construct
  source 1..75: mol_type = other DNA
tgtgggcgcggtgcctgcttttgccgcgttaatatggtcaatcatcatttttcgccgctggccagtgacactcga

SEQ ID NO: 91127 - DNA, 75 bp, synthetic construct
  source 1..75: mol_type = other DNA
acgttcgctattgccccatcattacctgccaacgatgttcctgttttttcgttctttgctctgtggctggccgtg

SEQ ID NO: 91128 - DNA, 75 bp, synthetic construct
  source 1..75: mol_type = other DNA
catgctggcgaatacctgtatgtggacctaccgctctgatgagtgtggttacacgggcggggctgtggcggatga

SEQ ID NO: 91129 - DNA, 75 bp, synthetic construct
  source 1..75: mol_type = other DNA
cagacgatatggtatttaccttcgagtaccagcacgaggcgaaacgcttctacagcgtgctgccgaaaaggctgg

SEQ ID NO: 91130 - DNA, 75 bp, synthetic construct
  source 1..75: mol_type = other DNA
accaacaccattccgttccaggcgcgttattttgcaaccggtgccgcaaccccaggtgctgctaatgcggatgcg

SEQ ID NO: 91131 - DNA, 75 bp, synthetic construct
  source 1..75: mol_type = other DNA
gttccttcaaaagactccctgactgaacgtattggtttgatgcattttgatggagtactggacgaaatcagctct

SEQ ID NO: 91132 - DNA, 75 bp, synthetic construct
  source 1..75: mol_type = other DNA
ttatgaatgccgcgattgtcaacgggatcaagacggcggcaaacggtatgtccggtgcaggaggatttcttggca

SEQ ID NO: 91133 - DNA, 75 bp, synthetic construct
  source 1..75: mol_type = other DNA
gagcaggagctgagcgaccgctgggtggtggagcagatgtcagagctgacggccatgacggcctcgtttgtgctg

SEQ ID NO: 91134 - DNA, 75 bp, synthetic construct
  source 1..75: mol_type = other DNA
atgatggcacccacaatttatcaccgtatcgacggtaccaaatacaggaatgtctgggttgttggtgatctgcat

SEQ ID NO: 91135 - DNA, 75 bp, synthetic construct
  source 1..75: mol_type = other DNA
accttggttttgtgggggattcatatcaggaggcacgacagcgttacatcagtaatgccctggaagcctggcgta

SEQ ID NO: 91136 - DNA, 75 bp, synthetic construct
  source 1..75: mol_type = other DNA
atgcccgttttctggatgcggtgaattttgtggcgggcaatccggaggcggacccggagcaggagctgagtgacc

SEQ ID NO: 91137 - DNA, 75 bp, synthetic construct
  source 1..75: mol_type = other DNA
gataatcagccgtctggttgcgggtgaaacgttgagcgtgcgcaaactggcggctgagtttggcgtgtcggtgcg

SEQ ID NO: 91138 - DNA, 75 bp, synthetic construct
  source 1..75: mol_type = other DNA
tttgaaaactttatggacatgcacagcccgcaagccgtatcagctggcatggcgtacgatggcagaaaccagggc

SEQ ID NO: 91139 - DNA, 75 bp, synthetic construct
  source 1..75: mol_type = other DNA
cccggcgcacccggtctgggcaaatcggtactcatcaacgcactgtcggagatccagatagcctcagcccagaag

SEQ ID NO: 91140 - DNA, 75 bp, synthetic construct
  source 1..75: mol_type = other DNA
gctgctggtatcgatcctcgtgagcataaacgtgctgtgaaagaagagcaggcgaaagagattattactttcgag

SEQ ID NO: 91141 - DNA, 75 bp, synthetic construct
  source 1..75: mol_type = other DNA
catcccggcggccttttgccgggatgccgggagcgcaggccacggcgcgacagaggcggcgcgaccggaacggtc

SEQ ID NO: 91142 - DNA, 75 bp, synthetic construct
  source 1..75: mol_type = other DNA
gtgagcagagggagaaccagagccgcaccaggtaacaaagtcttattaatactggatgagacaactaatcagaaa

SEQ ID NO: 91143 - DNA, 75 bp, synthetic construct
  source 1..75: mol_type = other DNA
ggcactgaaacagacatgggcggatgaagacatgctgcgcggtgactggctggccgggctgaagtccggctgggg

SEQ ID NO: 91144 - DNA, 75 bp, synthetic construct
  source 1..75: mol_type = other DNA
actatcagccgctgttgcgtgcaatggcaaacgtgccttgtatcgatgttggtacggctaaaagcatccttagca

SEQ ID NO: 91145 - DNA, 75 bp, synthetic construct
  source 1..75: mol_type = other DNA
cggtagaagtagttaaaaacgcaatcgaaaccgcagatggagcattagatctttataataaatatctcgatcagg

SEQ ID NO: 91146 - DNA, 75 bp, synthetic construct
  source 1..75: mol_type = other DNA
accccattcagggaagcggctttgagatgaacggtaagggcagcagcgcacgtcccacacttaaggtatcaaacc

SEQ ID NO: 91147 - DNA, 75 bp, synthetic construct
  source 1..75: mol_type = other DNA
aaaaaacatctgtttttgaactgtggaagaacggaaaaggcttcagtgagatagctaatatcctgggttcgaaac

SEQ ID NO: 91148 - DNA, 75 bp, synthetic construct
  source 1..75: mol_type = other DNA
gttggggctgggacgacttataccgttcaaaatggtaatacatatagtacaggacaggtatacaatcctcttttg

SEQ ID NO: 91149 - DNA, 75 bp, synthetic construct
  source 1..75: mol_type = other DNA
gcgtgcccggtgaacatagtgactcagcaatgcagaatatcggcatgctgtttaaccgtaagttgctggccggcg

SEQ ID NO: 91150 - DNA, 75 bp, synthetic construct
  source 1..75: mol_type = other DNA
ctcacagggtgtgggacgaatgacggggcgtaatatctggatggtggaccaggcaaacctgaccattgatgagat

SEQ ID NO: 91151 - DNA, 75 bp, synthetic construct
  source 1..75: mol_type = other DNA
caacccggaaacgcaggccggaggcatagcagaaatcaacatcacgaaacagcgtaatggcacgctcgggaccat

SEQ ID NO: 91152 - DNA, 75 bp, synthetic construct
  source 1..75: mol_type = other DNA
atgagtattcgtattgaaattggcgaacgttatgtcgttaccagtgacagctttcagtttattctccacgagaaa

SEQ ID NO: 91153 - DNA, 75 bp, synthetic construct
  source 1..75: mol_type = other DNA
aaacctgggtgaagtcttcactggagcactatgttgcagcgttgcggcgcaatgccgcactgcgcgatgcagaaa

SEQ ID NO: 91154 - DNA, 75 bp, synthetic construct
  source 1..75: mol_type = other DNA
tgcagcgttccggagacgaggccggggccttacaggcggcgaacgatatcgccacgaaaggctttgatgagcaga

SEQ ID NO: 91155 - DNA, 75 bp, synthetic construct
  source 1..75: mol_type = other DNA
aagtggtcgaccgtgttgaatgccggaatcagggactggagaaatccagaacgctgatgaccggtattgatgaac

SEQ ID NO: 91156 - DNA, 75 bp, synthetic construct
  source 1..75: mol_type = other DNA
gcaaatgttggaagcgttaaacgttggcagtattgatctcggcagtaccggggatattccgccaatctttgccca

SEQ ID NO: 91157 - DNA, 75 bp, synthetic construct
  source 1..75: mol_type = other DNA
atgcatgtgcttaacattctctgggtggtattcggcattggtctgatgctggtactgaatttgaagttcaaaatc

SEQ ID NO: 91158 - DNA, 75 bp, synthetic construct
  source 1..75: mol_type = other DNA
atgaccaataatcccccttcagcacagattaagcccggcgagtatggtttccccctcaagttaaaagcccgctat

SEQ ID NO: 91159 - DNA, 75 bp, synthetic construct
  source 1..75: mol_type = other DNA
atgccatgttcaatacacggcgttacagacgtaaaaaaatccggtaccgcgataaggtcactggaaaaatagtaa

SEQ ID NO: 91160 - DNA, 75 bp, synthetic construct
  source 1..75: mol_type = other DNA
gtacatatcgatgtatccggcctggtcgggaccgaccatgattacggtgcaatcgcacaactccagttcactttc

SEQ ID NO: 91161 - DNA, 75 bp, synthetic construct
  source 1..75: mol_type = other DNA
atgccggtatcccgtcttaagtctgttgcccgttttgaagatgaagactgggcgcgtttctcgcagggcgtggga

SEQ ID NO: 91162 - DNA, 75 bp, synthetic construct
  source 1..75: mol_type = other DNA
gtatatgcgggaaaaacccttcgcatgaccattggcaacattaacgattggaggattgatgatgccagggccgaa

SEQ ID NO: 91163 - DNA, 75 bp, synthetic construct
  source 1..75: mol_type = other DNA
ggcgtaacgatgacctggaaggcgctgtcatcggtgcgttttttctgcgtggggccgatccggaagtgatggata

SEQ ID NO: 91164 - DNA, 75 bp, synthetic construct
  source 1..75: mol_type = other DNA
cggcagatgctgtcgtttccactatggacgggctggtatcaaatatttccgatgcactggccgggaatgttgtgg

SEQ ID NO: 91165 - DNA, 75 bp, synthetic construct
  source 1..75: mol_type = other DNA
ggcacaggaaacccgtcagttgcttgatgaaacccgtaagcaggtgcatgccctgcagatgcagggaccactgca

SEQ ID NO: 91166 - DNA, 75 bp, synthetic construct
  source 1..75: mol_type = other DNA
taaccggggttacatggaactgaaccgcatgtggttacacgacgacatgccccgcaattctgaatcacgggccat

SEQ ID NO: 91167 - DNA, 75 bp, synthetic construct
  source 1..75: mol_type = other DNA
tgatacgccaacaaatatgttgttcactcagggagcaatacatcgtaccgacgatcgtactcagtcaaatattgg

SEQ ID NO: 91168 - DNA, 75 bp, synthetic construct
  source 1..75: mol_type = other DNA
ctcggaaagaaaaactttatgttctttggcagcgatcacggcggcgagcgtggagcactgttgtacgggctgatc

SEQ ID NO: 91169 - DNA, 75 bp, synthetic construct
  source 1..75: mol_type = other DNA
tgaatgccggaatcaggggctggagaaatccaggacgttgatgaccggtattgatgaactggacgcaaaaacagg

SEQ ID NO: 91170 - DNA, 75 bp, synthetic construct
  source 1..75: mol_type = other DNA
tggttaacaccatgctggataacgctgtcgaaacgttaaatgctggcgaacgaccggtaatacacagtgacagag

SEQ ID NO: 91171 - DNA, 75 bp, synthetic construct
  source 1..75: mol_type = other DNA
ggggcggcggcctggtacacaatgtatcagaaccaggagcaggccagagaatcagcgcgtcagtatgccgcaaca

SEQ ID NO: 91172 - DNA, 75 bp, synthetic construct
  source 1..75: mol_type = other DNA
tattatgcaaaggctgatgctttacgcagtaactggaatgccgggctcaaagaggggctgacgaactgggcagac

SEQ ID NO: 91173 - DNA, 75 bp, synthetic construct
  source 1..75: mol_type = other DNA
ctggtccgtgccgtcccccgcgcagtcccctggcgcatcagaatggatctgatgcccggcgggatgaaggctctt

SEQ ID NO: 91174 - DNA, 75 bp, synthetic construct
  source 1..75: mol_type = other DNA
ggtgactgagcaggggcatggtgtgcttctgttcaccatggagatggcgaacatccagattggtgaacgtatggt

SEQ ID NO: 91175 - DNA, 75 bp, synthetic construct
  source 1..75: mol_type = other DNA
atgctggatattccacaggaaacacatcatgagacgacacgcctcactcagtcagcccaggtggtgctctgggaa

SEQ ID NO: 91176 - DNA, 75 bp, synthetic construct
  source 1..75: mol_type = other DNA
ggcaatcagttacgcgctcaagctaatcaggcagctttatccgcaggtacagtgggttcagtcgtttgcagatga

SEQ ID NO: 91177 - DNA, 75 bp, synthetic construct
  source 1..75: mol_type = other DNA
gcccgactgggctatgctgcggatgatctcggctttgtgggagaggcgtatcagacagccagacagaattatatc

SEQ ID NO: 91178 - DNA, 75 bp, synthetic construct
  source 1..75: mol_type = other DNA
gattatggctctggatgaggcaaaaggggctgaggcgcaggctgaaaaactggcggcgtttcccggaatgacggt

SEQ ID NO: 91179 - DNA, 75 bp, synthetic construct
  source 1..75: mol_type = other DNA
ggaccctgcagaatggcgggcgtcaggccgctgcggcagcccgggagcagcgacgtgccctggcagaactgaaca

SEQ ID NO: 91180 - DNA, 75 bp, synthetic construct
  source 1..75: mol_type = other DNA
cagagcgtgagctggccctgtccagactgaaaggggaagaaaaagagcgtgtccggctggggtatgcggcggatg

SEQ ID NO: 91181 - DNA, 75 bp, synthetic construct
  source 1..75: mol_type = other DNA
atggatacatttctgtggatggcaaaaagagctggctacacgattattccaccagcaaaggagcaaacattatga

SEQ ID NO: 91182 - DNA, 75 bp, synthetic construct
  source 1..75: mol_type = other DNA
aacgaaacgattatttccggtggcaccgcgcatgaaggcggggcggtccatgttattgacacaatgagagtgaat

SEQ ID NO: 91183 - DNA, 75 bp, synthetic construct
  source 1..75: mol_type = other DNA
acgtctggcacatgtctccatcggtcatgtggcgatgcggacactgcccatgacgcagaccatcctgacggggat

SEQ ID NO: 91184 - DNA, 75 bp, synthetic construct
  source 1..75: mol_type = other DNA
ccgaaaaatcctctgcaaccaccggcaatacgcacgaagctcccgggtgtcggggcggtctccggtgccatacct

SEQ ID NO: 91185 - DNA, 75 bp, synthetic construct
  source 1..75: mol_type = other DNA
acagcaggcacagtctgcgctgagtggtgtggacaaaagaaatattgcaggtgctctggataccgtttccgggca

SEQ ID NO: 91186 - DNA, 75 bp, synthetic construct
  source 1..75: mol_type = other DNA
ttttttcttcccttcaccatagccagaagagctttgtggtttccaatcaattacgggaacagcagggcgagctga

SEQ ID NO: 91187 - DNA, 75 bp, synthetic construct
  source 1..75: mol_type = other DNA
gatgctcatgccggattagatgcaaagcccagcctttttggtgtgcgtgttgatgttggcgctaaggttggtggg

SEQ ID NO: 91188 - DNA, 75 bp, synthetic construct
  source 1..75: mol_type = other DNA
tgccctgcatgggttcagcagcagtattgccagtgcctggaactcgctcagtcagtttggttctaaccgggggag

SEQ ID NO: 91189 - DNA, 75 bp, synthetic construct
  source 1..75: mol_type = other DNA
aagcctcgaccagcaggcgctgttagtcggtatggtgaaaggggcgtccatctacaacccgtggcgtaacccaaa

SEQ ID NO: 91190 - DNA, 75 bp, synthetic construct
  source 1..75: mol_type = other DNA
gaaagacaggctgaatctcgatacaaagacgggaggcaagacctggcattattatgtgcagcagatatttggcgg

SEQ ID NO: 91191 - DNA, 75 bp, synthetic construct
  source 1..75: mol_type = other DNA
acaaggcagtctataaaaaattaccgaattgcgaagggactaccaacgcctgcaacagaaacactggatactcaa

SEQ ID NO: 91192 - DNA, 75 bp, synthetic construct
  source 1..75: mol_type = other DNA
gcagcgcgttgtcctggctggctggcgctccactggcagtgctgcgacgcgggcttgcttcatcgggtaacgcag

SEQ ID NO: 91193 - DNA, 75 bp, synthetic construct
  source 1..75: mol_type = other DNA
acgaaagaatgtacggaatgatcgctgtgttatggtttttagtgaaaaaaattggaccgggatctgactggataa

SEQ ID NO: 91194 - DNA, 75 bp, synthetic construct
  source 1..75: mol_type = other DNA
gaaaatacgaccacttttgccccattaacgccatacgataaatgggatggtgagaaatgggtaacagataccgag

SEQ ID NO: 91195 - DNA, 75 bp, synthetic construct
  source 1..75: mol_type = other DNA
aattcgttggctgcatggatacatttctgtggatggcaaaaagagcgggttacacgattattccaccagcaaagg

SEQ ID NO: 91196 - DNA, 75 bp, synthetic construct
  source 1..75: mol_type = other DNA
atctgacacaatttctcgaaagtcatactgaaatgccactttctagagaagaccgcctcgctttcctccgtatat

SEQ ID NO: 91197 - DNA, 75 bp, synthetic construct
  source 1..75: mol_type = other DNA
catcaggcactggcgctggtcttcggcaacggtgactatcgcggctggttcgtgattaccgatgtgactgcaacc

SEQ ID NO: 91198 - DNA, 75 bp, synthetic construct
  source 1..75: mol_type = other DNA
tattcgtaacctgaccacaaaaacatgcatttctgactgcatggttaaagtcttcctcggtagtgatggtttacc

SEQ ID NO: 91199 - DNA, 75 bp, synthetic construct
  source 1..75: mol_type = other DNA
cggatgcgtgccgacagttaccgcgctgggtttatgtgaaaggtgtgtttaatcaggggctggataaccgccgtg

SEQ ID NO: 91200 - DNA, 75 bp, synthetic construct
  source 1..75: mol_type = other DNA
taaccactttgcggtaataccggcagaccggacatggcggccacagccgttgctgaaaccgctggtggacggccc

SEQ ID NO: 91201 - DNA, 75 bp, synthetic construct
  source 1..75: mol_type = other DNA
tgctgccacgctgccggggtttcagcagcttcacacctccgtggagggactgaaactgatcgccgattacgaagg

SEQ ID NO: 91202 - DNA, 75 bp, synthetic construct
  source 1..75: mol_type = other DNA
cgatatgtctatcaataatccatctgatggtgtgaatattgccctgcataatattgaaggttccactattaagca

SEQ ID NO: 91203 - DNA, 75 bp, synthetic construct
  source 1..75: mol_type = other DNA
tacaacggtgggttgacgccggaagaatcagagaacagataccgtatttactgtaaaaccgtggccaatattact

SEQ ID NO: 91204 - DNA, 75 bp, synthetic construct
  source 1..75: mol_type = other DNA
tttcagttatcaactgggctggacagcaggaatgtattgataatcagcgtatcggattatggggaacatcgctgg

SEQ ID NO: 91205 - DNA, 75 bp, synthetic construct
  source 1..75: mol_type = other DNA
cgaccgtttccacatagtgaacggtgcaaactggtttgaccgtaccgtgagtgctgatgcctgcggcatcattct

SEQ ID NO: 91206 - DNA, 75 bp, synthetic construct
  source 1..75: mol_type = other DNA
gtactggaaatatttgccgctctccaataggagagcgttttttgcgaatgaaattaccttctaaaaaaatcgatt

SEQ ID NO: 91207 - DNA, 75 bp, synthetic construct
  source 1..75: mol_type = other DNA
agttccggtgacatcagaagaactggttaaagctgtgcacttttatgaacaactaaaacgcgaaaatccaccagc

SEQ ID NO: 91208 - DNA, 75 bp, synthetic construct
  source 1..75: mol_type = other DNA
tggtgattcagccagcctggtgaatctggccaccacgtcatcgatggagaagcaacgtctggcacatgtctccat

SEQ ID NO: 91209 - DNA, 75 bp, synthetic construct
  source 1..75: mol_type = other DNA
ggagctcatcctctgagtcgagaacctataacagaatcaatgattatgagaaaagatgaatgtcactttgattca

SEQ ID NO: 91210 - DNA, 75 bp, synthetic construct
  source 1..75: mol_type = other DNA
atattgtaggaagacagtattctgaactacaaaatcaccataaaacagaggcattatctcagaataataaatata

SEQ ID NO: 91211 - DNA, 75 bp, synthetic construct
  source 1..75: mol_type = other DNA
attactcctacggcaacatgcagacggagaacgtgaacggcttcagctggagcaccaacagcaccacgtcgtttg

SEQ ID NO: 91212 - DNA, 75 bp, synthetic construct
  source 1..75: mol_type = other DNA
atgctaaaaataaaaacaaagatctatatacctacaactttaacaggaaacatggataaacactatatccctgtt

SEQ ID NO: 91213 - DNA, 75 bp, synthetic construct
  source 1..75: mol_type = other DNA
taaagcatcctatgttcgtgcggatgcaagcaaagcagctactgccggttatgtaaaaaccaactcagcatatac

SEQ ID NO: 91214 - DNA, 75 bp, synthetic construct
  source 1..75: mol_type = other DNA
gcagcaggccagccggggatcgtccgtgctggtggataacatccgctggcagtcctacctgtccggcatgaccac

SEQ ID NO: 91215 - DNA, 75 bp, synthetic construct
  source 1..75: mol_type = other DNA
gccgcacagattgcgggcgggccggatctgctggaggtgggcgagctgccgacaggccgagtgatctacctgccc

SEQ ID NO: 91216 - DNA, 75 bp, synthetic construct
  source 1..75: mol_type = other DNA
aaacgcaatatgactggctgacctcaccggaagccgtggatgaggcgcttatcgccggcggttacaccttcaccg

SEQ ID NO: 91217 - DNA, 75 bp, synthetic construct
  source 1..75: mol_type = other DNA
tcaatgaatgaggctgtgatgcagatcgaacaggaggtgctcaccacctggcctgcggatgccattgcccgggcg

SEQ ID NO: 91218 - DNA, 75 bp, synthetic construct
  source 1..75: mol_type = other DNA
gcattcaccggcacaccaacagcacctacacctgcaaatggcgataacagcaaaaagctggcgacgacggagttt

SEQ ID NO: 91219 - DNA, 75 bp, synthetic construct
  source 1..75: mol_type = other DNA
ttttccgttacccgtcaggccattatcaacgatgacctgacccagttaactacaatccccatggcgatgggacgc

SEQ ID NO: 91220 - DNA, 75 bp, synthetic construct
  source 1..75: mol_type = other DNA
gtccttttaaacgttctaagctatcattaggctgggcaccaccgcatccatctttctatatgaggagggaattat

SEQ ID NO: 91221 - DNA, 75 bp, synthetic construct
  source 1..75: mol_type = other DNA
cgtcagttaaaactgacagcgggcaatgatgcgctcggctccatgcagaaagaatccgacattaacaaggattca

SEQ ID NO: 91222 - DNA, 75 bp, synthetic construct
  source 1..75: mol_type = other DNA
aaaacattgctgaagcggtggtcagtgatgcgggggctacgggaggtaaggccctgcaactgaataaaccggaaa

SEQ ID NO: 91223 - DNA, 75 bp, synthetic construct
  source 1..75: mol_type = other DNA
gcgttattctgttggtggaaggattcccgccgtcacatgccgggaccatcaccgtgtatgaagattctcaacccg

SEQ ID NO: 91224 - DNA, 75 bp, synthetic construct
  source 1..75: mol_type = other DNA
caaaaagctggcgacgacggagtttgtggccaaagcacttgcggcacttgctggcagcgcccctgagacactgga

SEQ ID NO: 91225 - DNA, 75 bp, synthetic construct
  source 1..75: mol_type = other DNA
cctgaaaggcgcgctgccagacaactacttcagccgtcagaatctggaaaccaaaaaactggcgtcactgattga

SEQ ID NO: 91226 - DNA, 75 bp, synthetic construct
  source 1..75: mol_type = other DNA
atatcttcctgctgtcccgcattgcgcattacctgaaaatcatccagcgcgagaatatcggtaccaccaaagacc

SEQ ID NO: 91227 - DNA, 75 bp, synthetic construct
  source 1..75: mol_type = other DNA
acatcatgatgttctttatgctgatagctgccgtagacaggatcctgtcgcagttcggcggttctgctcgtttcc

SEQ ID NO: 91228 - DNA, 75 bp, synthetic construct
  source 1..75: mol_type = other DNA
gcgaacagtcgtattaatgcccgtcttccctatatcttcctgctgtcccgtattgcgcattacctgaagatcatt

SEQ ID NO: 91229 - DNA, 75 bp, synthetic construct
  source 1..75: mol_type = other DNA
catagcgccgcagtagacgcgtcagaagcacagcgccagtcactgattgatgcagcaatggcttccattagtctg

SEQ ID NO: 91230 - DNA, 75 bp, synthetic construct
  source 1..75: mol_type = other DNA
tatcaattacaaggtcgatcattcatgctcacggcggcgagctgtcagcagaacagcaggggcgtgaaattgtgt

SEQ ID NO: 91231 - DNA, 75 bp, synthetic construct
  source 1..75: mol_type = other DNA
ggaaccatacaacccaaaaatgggatgttgtttcagaattgacgagttgtagaaaaaaatgtaaatcaactcgct

SEQ ID NO: 91232 - DNA, 75 bp, synthetic construct
  source 1..75: mol_type = other DNA
aatgttgattatgtgaccagttttgagctgccgtttcgtctgctgttaacccggacaccgcagatgattgacact

SEQ ID NO: 91233 - DNA, 75 bp, synthetic construct
  source 1..75: mol_type = other DNA
tgaaaagcgtcacgggggcgttgcgtcgctgggtggaagctaacccggaactgacaggcacactgatgaaagcat

SEQ ID NO: 91234 - DNA, 75 bp, synthetic construct
  source 1..75: mol_type = other DNA
gaagaacgcaagatagggatttataccggtcaggtctggcacagtgatttaacgctaaaagccgatttcgatgtt

SEQ ID NO: 91235 - DNA, 75 bp, synthetic construct
  source 1..75: mol_type = other DNA
gacccgggcgaatacattccggggaaagtggcagtatttacgggtaagggatggcgccatgaagaagaccaccgc

SEQ ID NO: 91236 - DNA, 75 bp, synthetic construct
  source 1..75: mol_type = other DNA
cgcagtagaaagctatgcgaaagggcataatattagtaatgaacaggccactcaagagttagcgtcaaggagcac

SEQ ID NO: 91237 - DNA, 75 bp, synthetic construct
  source 1..75: mol_type = other DNA
atcagcagtttgcccagtatgtccgtaaacatgcacctcaagatgcagatacattgcttactaataccagctcag

SEQ ID NO: 91238 - DNA, 75 bp, synthetic construct
  source 1..75: mol_type = other DNA
aaatttatggatgcctatcaaatggatgcggtgcagttgccatcagcctatggccaactcagctatcgcatgacc

SEQ ID NO: 91239 - DNA, 75 bp, synthetic construct
  source 1..75: mol_type = other DNA
cgacctcggtcaatgaagacggcgtgattgagcacgagaaagcccgtccgatcttctcaataatcagggatatgg

SEQ ID NO: 91240 - DNA, 75 bp, synthetic construct
  source 1..75: mol_type = other DNA
gatatcctccgttcagataagtcagaaatggagaacgccgacgccaacgatatgatcgaaatgcagatgtatacc

SEQ ID NO: 91241 - DNA, 75 bp, synthetic construct
  source 1..75: mol_type = other DNA
tccggatcttcgctatgtgcagtcagtgcagctggaaggcgacgaaatggtttctgacacctatcacggtggtga

SEQ ID NO: 91242 - DNA, 75 bp, synthetic construct
  source 1..75: mol_type = other DNA
gatggtgctgggcgggatgtttaacgccgtcacccttaatgtgctgaaggggtacgtgctggctatcatgtgggt

SEQ ID NO: 91243 - DNA, 75 bp, synthetic construct
  source 1..75: mol_type = other DNA
ggatgaacgcgatcccgcactcaaattaccgtgcagtcgtgtttaccaaagaacaatacgcccgcattccgctac

SEQ ID NO: 91244 - DNA, 75 bp, synthetic construct
  source 1..75: mol_type = other DNA
aattttctggagcaaaacaggcatgtgaagaaataaaaggttacgaaacatgctgtccagaatgtaaccatgaat

SEQ ID NO: 91245 - DNA, 75 bp, synthetic construct
  source 1..75: mol_type = other DNA
tgaactgctgctgtttaagcagatgggcaaagtcacggtggatggtatccagttgcgctttaccggctctattca

SEQ ID NO: 91246 - DNA, 75 bp, synthetic construct
  source 1..75: mol_type = other DNA
gaaaatacaaccactatcgccccattaacgccatacgatgaatgggatggtgagaaatgggtgacagataccgag

SEQ ID NO: 91247 - DNA, 75 bp, synthetic construct
  source 1..75: mol_type = other DNA
gcggcgactggctgacgcagacgctgaatgccatcgtcacgttcatgtcgacggagaactgggttgttattcggc

SEQ ID NO: 91248 - DNA, 75 bp, synthetic construct
  source 1..75: mol_type = other DNA
tatttggggcgaatctggtttcacgcagtacggactttttatcacagaacccagagataactacgatattcacgg

SEQ ID NO: 91249 - DNA, 75 bp, synthetic construct
  source 1..75: mol_type = other DNA
ggagtctgtcacttgataccgaatgtcccaaatgtggtcacaatttcgatctgctttgtgatccagatttctggg

SEQ ID NO: 91250 - DNA, 75 bp, synthetic construct
  source 1..75: mol_type = other DNA
gttacggcagcagtaacacgaaccagcagcgcgttgtcctggttagctggcgctccactggcactgctgcgacgc

SEQ ID NO: 91251 - DNA, 75 bp, synthetic construct
  source 1..75: mol_type = other DNA
aaaatatcacaacaaaatggtctctcgttatcagggcatgtaggtaagcaatttaatgtagagctcgggtgtcaa

SEQ ID NO: 91252 - DNA, 75 bp, synthetic construct
  source 1..75: mol_type = other DNA
aaagggggcgaatatgccaacctggacgctgtggtgatggatgcggtcaatgagcttatcgacgtggtctaccag

SEQ ID NO: 91253 - DNA, 75 bp, synthetic construct
  source 1..75: mol_type = other DNA
gcagcaccactacgggcggtgaaaccacaccgggcgcggtgaaagtcggtaaagggggcgaatatgccaacctgg

SEQ ID NO: 91254 - DNA, 75 bp, synthetic construct
  source 1..75: mol_type = other DNA
tgccggggtcggtatcgcgacagcgggaacgatggccggggttaaattactgatgcccggttatgactttgcgca

SEQ ID NO: 91255 - DNA, 75 bp, synthetic construct
  source 1..75: mol_type = other DNA
gaaaaactcagagctgcaggccgtgctcggtgtcgacaaacagtcgcctgaaatgcaggcgctgcgtaaacaggc

SEQ ID NO: 91256 - DNA, 75 bp, synthetic construct
  source 1..75: mol_type = other DNA
gaacagccacaggcggtgccaggacggcagggagcggggacggcgctggagaaccattttgcggtgatcccggca

SEQ ID NO: 91257 - DNA, 75 bp, synthetic construct
  source 1..75: mol_type = other DNA
cgcacaaatccgtccttcttccgtggtgacaaaagactacacctttaaacgtcccggctgggcagggcgttttga

SEQ ID NO: 91258 - DNA, 75 bp, synthetic construct
  source 1..75: mol_type = other DNA
acgaaacgaacccatttttagagcttatgacaatcccgatgaaggggaaacggatacaagtatctcgtcttggac

SEQ ID NO: 91259 - DNA, 75 bp, synthetic construct
  source 1..75: mol_type = other DNA
ttaacgcttacctgcagcagctggctcgtctgaacggtgtggcagttgaagaactgtccagcaagtttactgtag

SEQ ID NO: 91260 - DNA, 75 bp, synthetic construct
  source 1..75: mol_type = other DNA
gctcagcgtaaggagctaaatagcttggttgctgctattgcagaagctagcaatactgaagcgtttattatttgg

SEQ ID NO: 91261 - DNA, 75 bp, synthetic construct
  source 1..75: mol_type = other DNA
gcgctcaactggccgtgaccagtcagtcgcttgagaaagcgaaacgcgaagccggtgaactggccgtgcagttta

SEQ ID NO: 91262 - DNA, 75 bp, synthetic construct
  source 1..75: mol_type = other DNA
aggcaacctgtacgagtattttttcaatgttgatggtgtacgcagcattgatacaggcaccgcaatgactaagcc

SEQ ID NO: 91263 - DNA, 75 bp, synthetic construct
  source 1..75: mol_type = other DNA
aaaatccgagttgcaggggtaaatggttttcccacatgggctgaaatacctcaaccatcacatgaagaacttatt

SEQ ID NO: 91264 - DNA, 75 bp, synthetic construct
  source 1..75: mol_type = other DNA
gtggccaaagcacttgcggcgcttgcaggcagcgcccctgagacgctggatacgctcaaagagctggctgatgcc

SEQ ID NO: 91265 - DNA, 75 bp, synthetic construct
  source 1..75: mol_type = other DNA
gaactgctgaaaatgtgtgattacaacggcctgtctatatctggcctgatgatgcacaacgagctggcgctgcgc

SEQ ID NO: 91266 - DNA, 75 bp, synthetic construct
  source 1..75: mol_type = other DNA
atgaacagattcatgatttctgttttttttatttctgcattccttatttctggttgttcaatatcaggcaaccag

SEQ ID NO: 91267 - DNA, 75 bp, synthetic construct
  source 1..75: mol_type = other DNA
agggcggcggtagaagcattaaaaacactatcgaaaacagagatttcacgattgatagcagaagcaaaacaaaga

SEQ ID NO: 91268 - DNA, 75 bp, synthetic construct
  source 1..75: mol_type = other DNA
tgacagtgtcatctctgcggtgaaaacgcgtgactacaaacggctggcgaccatcgctaacaaattacaaagaga

SEQ ID NO: 91269 - DNA, 75 bp, synthetic construct
  source 1..75: mol_type = other DNA
cgcggcagaggctgaaactattcgtttaaaaagtgcggctgaagcagaagctatccgcctgcgcggtgaagctct

SEQ ID NO: 91270 - DNA, 75 bp, synthetic construct
  source 1..75: mol_type = other DNA
cgctcgatgagatgaagcaatacaccgtccagtgggcaaacaatgtcatcgttggtcacggtagtattggtgcgg

SEQ ID NO: 91271 - DNA, 75 bp, synthetic construct
  source 1..75: mol_type = other DNA
tgccaataagcttggcgcagatatcggttcggtgatcgtctacggtttgctggttgggctgatggcatcactgat

SEQ ID NO: 91272 - DNA, 75 bp, synthetic construct
  source 1..75: mol_type = other DNA
cgcgttacagaagggaaaactgcaggtctttcctctggcagatatcaaatcagtcagcctgacatcagaacggtt

SEQ ID NO: 91273 - DNA, 75 bp, synthetic construct
  source 1..75: mol_type = other DNA
gaacgcattggcactgagctgggtatggaccaggatgaagtactgagactgaaacagattagcgggctgacggaa

SEQ ID NO: 91274 - DNA, 75 bp, synthetic construct
  source 1..75: mol_type = other DNA
atgaacgtcaaaatccgaaatgaaattcaggcattaatccgaattcaggaacgcaataacaacggtggtgaatta

SEQ ID NO: 91275 - DNA, 75 bp, synthetic construct
  source 1..75: mol_type = other DNA
ggctttggtaaagtcgatggcttcaattttggcagcttcgtggttgccgttattggcgcgattgtcgtgctgttt

SEQ ID NO: 91276 - DNA, 75 bp, synthetic construct
  source 1..75: mol_type = other DNA
ctgaggatgggaaacgacgcaatatggtgtccctgccgcttcgaaaacttgcaggctggttacaaaccatcaatc

SEQ ID NO: 91277 - DNA, 75 bp, synthetic construct
  source 1..75: mol_type = other DNA
cgtggactaaggaaaattttgctcgcccgccacgccttgttcgatgaagtagcctctgccagcctcgcaccgctc

SEQ ID NO: 91278 - DNA, 75 bp, synthetic construct
  source 1..75: mol_type = other DNA
tcactggagccctgccggctcatttattacagcggaagctggtatctgatcgcgttacagaagggaaaactgcag

SEQ ID NO: 91279 - DNA, 75 bp, synthetic construct
  source 1..75: mol_type = other DNA
gcgccagctcggcgacaataccgccgcctcggcggatgatgcggccggtgcacagataatcatcgcgaaagcggg

SEQ ID NO: 91280 - DNA, 75 bp, synthetic construct
  source 1..75: mol_type = other DNA
ttgcgacggaggcagtccgctggcctgaaagtgtggatgaacacaaaaaggccaacgcctttgtcggcacagccc

SEQ ID NO: 91281 - DNA, 75 bp, synthetic construct
  source 1..75: mol_type = other DNA
cgtcaatgtctgacattgtcagggacctttcgcgtctgggctggacagatgagcgtattggcacagagttgggca

SEQ ID NO: 91282 - DNA, 75 bp, synthetic construct
  source 1..75: mol_type = other DNA
ggtcagcccttttgcacaggagcctgtggactgtgtgttgtgggtgaaagcggatgaggtggtggccaacgatta

SEQ ID NO: 91283 - DNA, 75 bp, synthetic construct
  source 1..75: mol_type = other DNA
gcgataaaatcttttctattattaacaatcacaaagatgccattagtctgctgattttttccgtggttggcgcgc

SEQ ID NO: 91284 - DNA, 75 bp, synthetic construct
  source 1..75: mol_type = other DNA
gccggatatcactgcaacactcccagagtgtttctcgcaactcatcctggcaataagacagtgcatccacatctc

SEQ ID NO: 91285 - DNA, 75 bp, synthetic construct
  source 1..75: mol_type = other DNA
accaacagcgcacaggggccgtggtggatactggggtggtcagagcgggtgccgggtgctgaggacgtgctgcca

SEQ ID NO: 91286 - DNA, 75 bp, synthetic construct
  source 1..75: mol_type = other DNA
ttttgttaagccgggttattcgtaaagatcgcgatgagcagtttgtttataacagcggcggttcctcttttgctt

SEQ ID NO: 91287 - DNA, 75 bp, synthetic construct
  source 1..75: mol_type = other DNA
tctgcaacttgtagattcaatctgtcaatgcaacacccctttcaattatctctttcggtgttttgaacttcagtg

SEQ ID NO: 91288 - DNA, 75 bp, synthetic construct
  source 1..75: mol_type = other DNA
tttctatccacgctgaataaaatggcagagaagaagaaaaacaccgggaaagagatgtttgtgggggttacacgg

SEQ ID NO: 91289 - DNA, 75 bp, synthetic construct
  source 1..75: mol_type = other DNA
attgtcagccagctggcttttgctgatggtgatgctctgattaccggagagatgaatgaattggagagagcttct

SEQ ID NO: 91290 - DNA, 75 bp, synthetic construct
  source 1..75: mol_type = other DNA
gacccgctgcaggggcggtatatcactcaggatccgattgggctgaaggggggatggaacctgtatacatatccg

SEQ ID NO: 91291 - DNA, 75 bp, synthetic construct
  source 1..75: mol_type = other DNA
ctggccaccacgtcatcgatggagaagcaacgtctggcacatgtctccatcggtcatgtggcgatgcggacactg

SEQ ID NO: 91292 - DNA, 75 bp, synthetic construct
  source 1..75: mol_type = other DNA
ctgaccagccagaaaggtctcgacctggtgctggaagccttaccgggtcttctggagcagggcgggcagctggcg

SEQ ID NO: 91293 - DNA, 75 bp, synthetic construct
  source 1..75: mol_type = other DNA
ttactttacctgatatataacctcatcatggcctttatggagaaaaagagttggtctgatgcagctatggcactt

SEQ ID NO: 91294 - DNA, 75 bp, synthetic construct
  source 1..75: mol_type = other DNA
ctcaatgcgccagatatctggctacttaccgatctgacggaagattcaacgctggtagacggttttctggcacag

SEQ ID NO: 91295 - DNA, 75 bp, synthetic construct
  source 1..75: mol_type = other DNA
ctgatccctacacgctgattttttcccgccccagcccgctgcggggcgtttatgacagcaataataatttcgtga

SEQ ID NO: 91296 - DNA, 75 bp, synthetic construct
  source 1..75: mol_type = other DNA
gcttccctggcgaaaccaccgaagacttcgagaaaacgatgaagctgattgccgacgtcaatttcgacatgagct

SEQ ID NO: 91297 - DNA, 75 bp, synthetic construct
  source 1..75: mol_type = other DNA
gaggcccggcaacaaattagcggttatatcctgaattattacaatagcgtcaggcctcaccattacaacggtggg

SEQ ID NO: 91298 - DNA, 75 bp, synthetic construct
  source 1..75: mol_type = other DNA
gccaagccgggagcgcaagcggattactaccgtagtgttcttgttgaaggtggcattgtggaaattaccggagaa

SEQ ID NO: 91299 - DNA, 75 bp, synthetic construct
  source 1..75: mol_type = other DNA
atggagaaacctgaaacggcaatgaaagccatcacccgcaatctcgatcgcgaaatctggcgtgacctgatgcaa

SEQ ID NO: 91300 - DNA, 75 bp, synthetic construct
  source 1..75: mol_type = other DNA
atcgtccgttaccggcagattatgttacgcactgccggaatggttctgtaaagatcattacacctgattcagaag

SEQ ID NO: 91301 - DNA, 75 bp, synthetic construct
  source 1..75: mol_type = other DNA
atgctgacccaaaacggcgtcccgatgagccgttaccgtgccgggcgtctgatgaaatatctgaacctgagcagt

SEQ ID NO: 91302 - DNA, 75 bp, synthetic construct
  source 1..75: mol_type = other DNA
gcaggaaatcgctggtgctatctggcggtcgtcatggatctttttgcccgcagggttatcggctggagcctgtca

SEQ ID NO: 91303 - DNA, 75 bp, synthetic construct
  source 1..75: mol_type = other DNA
ttagacataaacgcatatggttcggcaaataagacgattattaaagataaaggaacaatgtcagttttaacgaat

SEQ ID NO: 91304 - DNA, 75 bp, synthetic construct
  source 1..75: mol_type = other DNA
tttatggagtgaaagtcaaataatgcaatcttaccatggcggaaagcaagatcttattagtgtggtattaagtaa

SEQ ID NO: 91305 - DNA, 75 bp, synthetic construct
  source 1..75: mol_type = other DNA
acagagccttgttgatgccctgtttcgttcagtgaatttagaaaatgatgcaaatctgcgagggcgcataatagc

SEQ ID NO: 91306 - DNA, 75 bp, synthetic construct
  source 1..75: mol_type = other DNA
tgagtacaagcagctctggcgtggtggtcaggtgcttgctgttccgccagcgtacacaagccagcgttgcgcgtg

SEQ ID NO: 91307 - DNA, 75 bp, synthetic construct
  source 1..75: mol_type = other DNA
gtatgacgtcgctttttacgctgatgatctggatgcacttaacgaactttccgagctgatctgtgccgcagaatg

SEQ ID NO: 91308 - DNA, 75 bp, synthetic construct
  source 1..75: mol_type = other DNA
aaattgggattggtccctccagttcgcataccgtggggccaatgaatgccggaaaaagttttattgatcggctgg

SEQ ID NO: 91309 - DNA, 75 bp, synthetic construct
  source 1..75: mol_type = other DNA
gacctctatgaccagcaagatagctcattgcgtcagctaactcagacagcaacacggtatgtgctaaagcttgat

SEQ ID NO: 91310 - DNA, 75 bp, synthetic construct
  source 1..75: mol_type = other DNA
aaattggacaacgtttagaagacctgggcgatgatttgatgcttacatcaaaatattggcaacgttccgttaaag

SEQ ID NO: 91311 - DNA, 75 bp, synthetic construct
  source 1..75: mol_type = other DNA
tattggttcgcatacacacaccattaccattgccgcttatggcaacgcggaaaacaccgtaaaaaacatcgcatt

SEQ ID NO: 91312 - DNA, 75 bp, synthetic construct
  source 1..75: mol_type = other DNA
gctggtagatggttttctggctcagattcactgcctgccatgcgtaccgattaatgaggttgcaaaagagaaact

SEQ ID NO: 91313 - DNA, 75 bp, synthetic construct
  source 1..75: mol_type = other DNA
gtgctggggccgctgtggagcaaagtctccattttgcgctatcacatttcgggtccgctggacgatccgcaaatc

SEQ ID NO: 91314 - DNA, 75 bp, synthetic construct
  source 1..75: mol_type = other DNA
gaagcataatagaggattaagtaaaaattactctttttacgtactcttcgctattgtattagttactccatttat

SEQ ID NO: 91315 - DNA, 75 bp, synthetic construct
  source 1..75: mol_type = other DNA
ttaacgccgcgtgaaatctggacgctgacagacttgaccgaagactcgaccctcgtcgatggttttctggcgcag

SEQ ID NO: 91316 - DNA, 75 bp, synthetic construct
  source 1..75: mol_type = other DNA
atgtttgattttcaagtttccaaacatccccactatgacgaagcatgccgggcttttgcgcagcgtcacaacatg

SEQ ID NO: 91317 - DNA, 75 bp, synthetic construct
  source 1..75: mol_type = other DNA
accaaatcggcattcgggctcgcagatgacaaggcatcgcatatagcagatgtcatatcgatggcgataaataaa

SEQ ID NO: 91318 - DNA, 75 bp, synthetic construct
  source 1..75: mol_type = other DNA
aagcggggacagaatgatgcattccgctacccgcagggcgttaagctcgatcaggaaaacagtcgtatttttctg

SEQ ID NO: 91319 - DNA, 75 bp, synthetic construct
  source 1..75: mol_type = other DNA
tgctattacgtggcctgtcgtggcggtagcggcggctgttgtcgctggcgcgctgcttatccgtaaatactggga

SEQ ID NO: 91320 - DNA, 75 bp, synthetic construct
  source 1..75: mol_type = other DNA
ttgcgccggtcggggaaatgttcgccccgctggcacccattttcgacggtctcggcgaaaaacttcgcggcgtct

SEQ ID NO: 91321 - DNA, 75 bp, synthetic construct
  source 1..75: mol_type = other DNA
ctgcaggagcggctggcccgcattctctttgtgacaaatatccgggggcgtctgcatgagcgtgacaacggctga

SEQ ID NO: 91322 - DNA, 75 bp, synthetic construct
  source 1..75: mol_type = other DNA
atggacgttgagtacggtcagtacagcgttattctgttggtggaaggcttcccgccgtcacatgccgggaccatc

SEQ ID NO: 91323 - DNA, 75 bp, synthetic construct
  source 1..75: mol_type = other DNA
aatgcagtcgttgtatgagtggctccaggggcagatgaacacgctgtcgcgccactcggatacagcgaaagcgtt

SEQ ID NO: 91324 - DNA, 75 bp, synthetic construct
  source 1..75: mol_type = other DNA
ttatataaacaaatccggtgtgtttaaggaagcagccattgacgaaccacgttttgaacgagaagggctgctgat

SEQ ID NO: 91325 - DNA, 75 bp, synthetic construct
  source 1..75: mol_type = other DNA
atgtcaaaagtcgctctcatcaccggtgtaaccggacaagacggttcttacctggcagagtttctgctggaaaaa

SEQ ID NO: 91326 - DNA, 75 bp, synthetic construct
  source 1..75: mol_type = other DNA
caaattcagtagtgtgggatgtgtaatgttattgcctgctgacacatctgtcggatggtttcatgaagcgataca

SEQ ID NO: 91327 - DNA, 75 bp, synthetic construct
  source 1..75: mol_type = other DNA
gcgtgggaagtgttcgaaaaactggaagactgctatttcagccagacttcgaaaagcgcaggtcatcacgagaag

SEQ ID NO: 91328 - DNA, 75 bp, synthetic construct
  source 1..75: mol_type = other DNA
ctgggtgggctgctggtgccgtttattggtatcaaagtcattgatttactgctgaccgtttgcggtctggtgtga

SEQ ID NO: 91329 - DNA, 75 bp, synthetic construct
  source 1..75: mol_type = other DNA
agtatccgcttgatgcggttcatgtggataaatttgctgatttattagggaagccaaagacagccgtcagtgaaa

SEQ ID NO: 91330 - DNA, 75 bp, synthetic construct
  source 1..75: mol_type = other DNA
agtcgccttgttgattatgcgacacgtcttcgaaatgagtcattcgtggcgctggttgatgtcatgaaggacggc

SEQ ID NO: 91331 - DNA, 75 bp, synthetic construct
  source 1..75: mol_type = other DNA
atgaccgacaccaccatgcaattgctcagccagggcacttaccccgtgaaaatgccggattttgatattctcgcc

SEQ ID NO: 91332 - DNA, 75 bp, synthetic construct
  source 1..75: mol_type = other DNA
atggcaatctgtatgtgtttggcggcattggcaaaaatagcaagggcttgactcaggtatttaatgacgtacaca

SEQ ID NO: 91333 - DNA, 75 bp, synthetic construct
  source 1..75: mol_type = other DNA
acgagcaggcagcaagacgcgcagcggcggcaaagtggcagcaactacaacgcggagccgcatcattctccatca

SEQ ID NO: 91334 - DNA, 75 bp, synthetic construct
  source 1..75: mol_type = other DNA
tcagttccgtattgctgaccgcgaggcgtatacgggggtacgcgcctactggcttgatcttaattacgggaaaaa

SEQ ID NO: 91335 - DNA, 75 bp, synthetic construct
  source 1..75: mol_type = other DNA
gaccgacaaccggggatttgaagcggaccagctcaccatcacgctggatgatgcggatggtcagttgcagctacc

SEQ ID NO: 91336 - DNA, 75 bp, synthetic construct
  source 1..75: mol_type = other DNA
gcgctgaagatctttttgatggctctggctattatcgacgatcttggggccatcattatcatcgcattgttctac

SEQ ID NO: 91337 - DNA, 75 bp, synthetic construct
  source 1..75: mol_type = other DNA
cgacttcagctacgatgcgctggaccggttggtacagcagggcggctttgacgggcggacgcaacgttatcatta

SEQ ID NO: 91338 - DNA, 75 bp, synthetic construct
  source 1..75: mol_type = other DNA
ccgcccctccagcaccggtagtgcctgaagaagcaactccggaaaacgtagaaatgctctctggctatgtttcaa

SEQ ID NO: 91339 - DNA, 75 bp, synthetic construct
  source 1..75: mol_type = other DNA
agccccgaccgctgaaacgcctgttcacagccaaccagtgctggacgtccttcctggatgcgggcggtctgcgcg

SEQ ID NO: 91340 - DNA, 75 bp, synthetic construct
  source 1..75: mol_type = other DNA
tgatttaggcctaagaaaagcaaattatggcatagtcatactttctcataactttctaaacaagaaatggacaca

SEQ ID NO: 91341 - DNA, 75 bp, synthetic construct
  source 1..75: mol_type = other DNA
aaaatcttcacgaaaaccgctgccggcagaacttccccgggagacacatcgccttctgcctgctgaaaccagttg

SEQ ID NO: 91342 - DNA, 75 bp, synthetic construct
  source 1..75: mol_type = other DNA
taaccggagaacaacacggatgtatttcctctcgttgtggaacgagcacatcaataggtaatcgctggcagattg

SEQ ID NO: 91343 - DNA, 75 bp, synthetic construct
  source 1..75: mol_type = other DNA
attgttggcgcatccgcatttgtgaaagccaaagcagaaatgcctgctaattatctgattgtcaacagcccggca

SEQ ID NO: 91344 - DNA, 75 bp, synthetic construct
  source 1..75: mol_type = other DNA
gtgggtttataacggtcagggtgacgcctatgcaaacccgttgtcagacgatgactggctgcgactggctaaggt

SEQ ID NO: 91345 - DNA, 75 bp, synthetic construct
  source 1..75: mol_type = other DNA
acgcaatcaccactggcagccgtgttatggttagcggcaccggtcacactggcaagatcctgtcgattgatactg

SEQ ID NO: 91346 - DNA, 75 bp, synthetic construct
  source 1..75: mol_type = other DNA
gcttcctgaaagacgcgatgcgttcgcggtggatgtggaatatgcggcagctgcttctgaaagcgtggtcagagg

SEQ ID NO: 91347 - DNA, 75 bp, synthetic construct
  source 1..75: mol_type = other DNA
gaaattacacagatgatttgctgtgctgatacattgctaccgttaaccatcattaaccgtggtggactaagagga

SEQ ID NO: 91348 - DNA, 75 bp, synthetic construct
  source 1..75: mol_type = other DNA
gcgtctgaacggtgtggcagttgaagaactgtccagcaagttcactgtggagccgtccgtgcagcagacgctgga

SEQ ID NO: 91349 - DNA, 75 bp, synthetic construct
  source 1..75: mol_type = other DNA
aattatccccggcgctatttatctggataagaacggtaacagagtaacggtaaaagaactgatgtttgaccgtgt

SEQ ID NO: 91350 - DNA, 75 bp, synthetic construct
  source 1..75: mol_type = other DNA
gaaaggcatccatccgcagactcatcttgcctgcttcagcggtgtgctgcaagcggatgcgtacgccgggttcaa

SEQ ID NO: 91351 - DNA, 75 bp, synthetic construct
  source 1..75: mol_type = other DNA
cagcgctataagcacgactatcaatgatggggcacagataattttcaatggtggtaccgcttcaacgacgaccat

SEQ ID NO: 91352 - DNA, 75 bp, synthetic construct
  source 1..75: mol_type = other DNA
tgccgcaagtgactactgcgccgatgtgttgcgtcatatcaatcatccgttcgcattaacactgcttatacgtgt

SEQ ID NO: 91353 - DNA, 75 bp, synthetic construct
  source 1..75: mol_type = other DNA
acgctgacggaacgcaaaagtcgttttgagttggtgaagaaaattcctgccaaaaaagccgaagcagtccaaaaa

SEQ ID NO: 91354 - DNA, 75 bp, synthetic construct
  source 1..75: mol_type = other DNA
ttgaagccgtcaccaaaatgctggcctgcggcacacggatactgggtgtaaaagagttcgggtgtgataacccgg

SEQ ID NO: 91355 - DNA, 75 bp, synthetic construct
  source 1..75: mol_type = other DNA
tgcttgccgggatgacatccaccgaatatgccgactggcgacatttttaccgcatgcattattttcacgataccc

SEQ ID NO: 91356 - DNA, 75 bp, synthetic construct
  source 1..75: mol_type = other DNA
cgcgggcttccatattggaaacactgaaaaaacggaactatatcaccctggaaaaaggaaaacttattccgacag

SEQ ID NO: 91357 - DNA, 75 bp, synthetic construct
  source 1..75: mol_type = other DNA
taagaatttctcggctaaggttaaacttgttgataaaacggccggaaagctgggatttgaatttacccacaaaaa

SEQ ID NO: 91358 - DNA, 75 bp, synthetic construct
  source 1..75: mol_type = other DNA
gacggttgaacagtttattaatgagctgtacggtgaactgacaggcatgatttctgatgttgacctgggcaagat

SEQ ID NO: 91359 - DNA, 75 bp, synthetic construct
  source 1..75: mol_type = other DNA
cataaccagtgaaagtttgattaattatgttgattatataattagtaatgattataagtttagcacattatgtct

SEQ ID NO: 91360 - DNA, 75 bp, synthetic construct
  source 1..75: mol_type = other DNA
ctgtccgccgggcgtgaccattatgaacgtgcgtcagggcgaacctttaggtttaggccactccattttatgtgc

SEQ ID NO: 91361 - DNA, 75 bp, synthetic construct
  source 1..75: mol_type = other DNA
caccgccgccattatttaccgaagcctccttgcttgctgcgcttgttcgcgtcgcggattttgtcactgacccaa

SEQ ID NO: 91362 - DNA, 75 bp, synthetic construct
  source 1..75: mol_type = other DNA
atggccatgatgactatatagaaaatcttttattaaatttaaagttgccctctggaagatttaaaataatagttc

SEQ ID NO: 91363 - DNA, 75 bp, synthetic construct
  source 1..75: mol_type = other DNA
gcaggccagttacagagccagcacctgaacagcctggtgtatgaccgtgactacgggtggaatgacaacggcgac

SEQ ID NO: 91364 - DNA, 75 bp, synthetic construct
  source 1..75: mol_type = other DNA
aactcgagcgtggcgatgtgcttccccatgacatggtcgaatcttctgccgctgcatggcgggatgaaatgcgca

SEQ ID NO: 91365 - DNA, 75 bp, synthetic construct
  source 1..75: mol_type = other DNA
ggtctgatactgctgtaaagaaactactcagaaatcgtgctgtgattggatgtttcacacctgctggacgtgaag

SEQ ID NO: 91366 - DNA, 75 bp, synthetic construct
  source 1..75: mol_type = other DNA
cgaagaaaacggccggcggggggaatacggcgcgctacctgggtcgttatcggggggtgagggccaatggaacga

SEQ ID NO: 91367 - DNA, 75 bp, synthetic construct
  source 1..75: mol_type = other DNA
cgtgtccaagctgcatggaaccgtaaaaaagaactcatctccgaaggtatcaaggtatctaggcgttgtcctgca

SEQ ID NO: 91368 - DNA, 75 bp, synthetic construct
  source 1..75: mol_type = other DNA
gcgcgagagcgtgcagcgggaccgcctgcagcagatggagcgcgaaacggtgcgagaccttgagcgtgaaaagac

SEQ ID NO: 91369 - DNA, 75 bp, synthetic construct
  source 1..75: mol_type = other DNA
gagtatttcatggatcgcgtgcggcactatcgcgagcagagcgttgcattgcctaaggcatctgatcctcgctac

SEQ ID NO: 91370 - DNA, 75 bp, synthetic construct
  source 1..75: mol_type = other DNA
gaaagcggcactggcgctcgggcgtcgtgcaattggcgttgagctggagactgaacgttttgagcagacggttcg

SEQ ID NO: 91371 - DNA, 75 bp, synthetic construct
  source 1..75: mol_type = other DNA
ggggatgtggaaaaagcgagccgtgtcttcgtccgcaatgaactgatgccgctgcaaaagcggctgcaggagctg

SEQ ID NO: 91372 - DNA, 75 bp, synthetic construct
  source 1..75: mol_type = other DNA
ggggcatgacaggctcgatgatgccctggcgcaccagaaggccggtctgcacacgccggagcagcaggctatcca

SEQ ID NO: 91373 - DNA, 75 bp, synthetic construct
  source 1..75: mol_type = other DNA
ggtagggactatcaaaatttataacctttcggcagatactgtgaaccgaattaccgggcaggagttttcgaaagt

SEQ ID NO: 91374 - DNA, 75 bp, synthetic construct
  source 1..75: mol_type = other DNA
cgtgcgaaaacctccaaccgtagtgaaaacccgctgctgcaggatgttaacaaaggctggctgcagaaaatccgt

SEQ ID NO: 91375 - DNA, 75 bp, synthetic construct
  source 1..75: mol_type = other DNA
ggaatgaatcttctggtatgtgggtggtgacttctgagctaacccgcaaaggtggacaacggcatcgaaaaataa

SEQ ID NO: 91376 - DNA, 75 bp, synthetic construct
  source 1..75: mol_type = other DNA
tttccgtatcggcagccgttccttatacggatgtctggacgcacaagcctgtgcagtattatccgggcaaacatc

SEQ ID NO: 91377 - DNA, 75 bp, synthetic construct
  source 1..75: mol_type = other DNA
ggtttaacctcagcagcgaaacgcgagtaggtactttcaaaatctataacctttcagctgataccgtaaaccgga

SEQ ID NO: 91378 - DNA, 75 bp, synthetic construct
  source 1..75: mol_type = other DNA
atcgctgattttcgtgcgctgccgtggttgtctgctttgcatcaaaagcagacattaccagatttagacatctgt

SEQ ID NO: 91379 - DNA, 75 bp, synthetic construct
  source 1..75: mol_type = other DNA
taccgctgcgccgcacttgtggaaaacatccagattggcgacttcagcgccgccgcagcagaagccggagcgtaa

SEQ ID NO: 91380 - DNA, 75 bp, synthetic construct
  source 1..75: mol_type = other DNA
aaaagcttgcccggcagtgggatagcgcaaaacttcgggctgaacgcttactgtcccccggtaactggccgctct

SEQ ID NO: 91381 - DNA, 75 bp, synthetic construct
  source 1..75: mol_type = other DNA
gattcagcggtgatttctcgttttttcgaatccctgaaagccaaaattcaggcttaccagcggaaaaaaagatgt

SEQ ID NO: 91382 - DNA, 75 bp, synthetic construct
  source 1..75: mol_type = other DNA
gggaaacttattccgactgatatcggatatgcgcttattgatgccctgcctggtatagcggttaatcctgatatg

SEQ ID NO: 91383 - DNA, 75 bp, synthetic construct
  source 1..75: mol_type = other DNA
ccgctggataactgcgttccggcgcaggtttcaccgctggcagagctggtttacagcatgctaccgcgacctaaa

SEQ ID NO: 91384 - DNA, 75 bp, synthetic construct
  source 1..75: mol_type = other DNA
ttaaccgtaatgccagttatggtgttacagaaaaagctgcgcaaatagtggcagctaccggacgactggactctg

SEQ ID NO: 91385 - DNA, 75 bp, synthetic construct
  source 1..75: mol_type = other DNA
aaaaaaggtattacaggcgagttaaaaggatttatcagttccaggacgaacaaagagttttcggctaaggttaag

SEQ ID NO: 91386 - DNA, 75 bp, synthetic construct
  source 1..75: mol_type = other DNA
ccgacaccgcgcaggcgctgatagaccagacagccatggtcctgccgcacgtcaagatcaccgaactgctgctcg

SEQ ID NO: 91387 - DNA, 75 bp, synthetic construct
  source 1..75: mol_type = other DNA
actcctcgaagaacgcggtggaaaaccacttcgacacctcctacgagctggaagccctgctggaacagcgcgtga

SEQ ID NO: 91388 - DNA, 75 bp, synthetic construct
  source 1..75: mol_type = other DNA
tttttcgcatataaaaaatgacattacccgtcccgatacccgcttgctcctcaccaccattcttgcggatggcat

SEQ ID NO: 91389 - DNA, 75 bp, synthetic construct
  source 1..75: mol_type = other DNA
atggcgcgcattacacgcccccttactaacaacgaaatcctcaaagcgaaaccccgcgaaaaagacttcaccctg

SEQ ID NO: 91390 - DNA, 75 bp, synthetic construct
  source 1..75: mol_type = other DNA
catttagtgatagagggcatttacgccgcccctccagcaccagtagtaccggaagaaaaaccaatgcctaatcct

SEQ ID NO: 91391 - DNA, 75 bp, synthetic construct
  source 1..75: mol_type = other DNA
aacgcgcaaaaccacaagacaaaccatatacaatgaatgatgggcacggtttgtcactactcatcaagccagacg

SEQ ID NO: 91392 - DNA, 75 bp, synthetic construct
  source 1..75: mol_type = other DNA
atcatcactaaaaatgcaaccaagatagtgatgcttacaggtgtgagaacacaagaaatgcgctttgcaacatgg

SEQ ID NO: 91393 - DNA, 75 bp, synthetic construct
  source 1..75: mol_type = other DNA
taagcctcgcagaagcacgtgaaaagcgtgatatcgcccgtaagcaggttgctaatggcattgacccggtagaag

SEQ ID NO: 91394 - DNA, 75 bp, synthetic construct
  source 1..75: mol_type = other DNA
tttaagagattatgcaaaattaaaaataaaagaactattttcgatgttggatgatgatggttataaaagaatcat

SEQ ID NO: 91395 - DNA, 75 bp, synthetic construct
  source 1..75: mol_type = other DNA
tctaggcgatcccatcgcctctgagctgacagcaggtgatttcacaaaatatcgggaagccagattaaaggggga

SEQ ID NO: 91396 - DNA, 75 bp, synthetic construct
  source 1..75: mol_type = other DNA
tggatgggtgagaaggaagaccgtcgacgtttgagtgaactgattgagctgtggcataacctccatggccagtcg

SEQ ID NO: 91397 - DNA, 75 bp, synthetic construct
  source 1..75: mol_type = other DNA
tggcttggtgagaaggaagatcggcggcgattatcagaagtgattgagcagtggtattccctatatggtcaaaca

SEQ ID NO: 91398 - DNA, 75 bp, synthetic construct
  source 1..75: mol_type = other DNA
gggataaatacgaagacggtgaacacctttctgtatctggggcttggtaaaaatggcctgaggtacaggagtgtg

SEQ ID NO: 91399 - DNA, 75 bp, synthetic construct
  source 1..75: mol_type = other DNA
tatctccctttacttcatttcctttctcacaggccagaaaacataactggcctgaatattctctctgggaccacg

SEQ ID NO: 91400 - DNA, 75 bp, synthetic construct
  source 1..75: mol_type = other DNA
tttatatttatgacgagattggtttctggggtgttacggcgaagcagtttatcagtgatctgaatgcactgggcg

SEQ ID NO: 91401 - DNA, 75 bp, synthetic construct
  source 1..75: mol_type = other DNA
gacctgtttaactacaacgtaacggttcgtgattacgacaaagacgattttgacggtgacaagtaccacaacacg

SEQ ID NO: 91402 - DNA, 75 bp, synthetic construct
  source 1..75: mol_type = other DNA
atggatttgaacgaagctagcctgaacgcggcatctacaagggctggggaatcaaaaattaaacataaaattagc

SEQ ID NO: 91403 - DNA, 75 bp, synthetic construct
  source 1..75: mol_type = other DNA
tcatgctttgtatcttgataaaagaaaatatatgatgcaaaaatactcggattttttgatgaatttatctaccgg

SEQ ID NO: 91404 - DNA, 75 bp, synthetic construct
  source 1..75: mol_type = other DNA
atgaaaggactcaataaaatcacctgctgcttgctggcagcactactcatgccttgtgcaggacacgctgagaac

SEQ ID NO: 91405 - DNA, 75 bp, synthetic construct
  source 1..75: mol_type = other DNA
atggaaatgggcacagttacgtgcaggctaccgccagaatctggccagcaatgatggcagtgcgttcaccgccgg

SEQ ID NO: 91406 - DNA, 75 bp, synthetic construct
  source 1..75: mol_type = other DNA
gcccgttcgatggcggcatcgccgctaccacgccgaccatccagcgcacggcgctgctggcccagcagcaggccc

SEQ ID NO: 91407 - DNA, 75 bp, synthetic construct
  source 1..75: mol_type = other DNA
tcttggcgacccaatcgctacccagcttaccgccaaagatttcgcccattatcgggataaacgtctcaagggtga

SEQ ID NO: 91408 - DNA, 75 bp, synthetic construct
  source 1..75: mol_type = other DNA
acctcaaagcgcgggaaaaactttataaagttgcagaccgtgatgggctgtatgtaaccgtatctcccaagggat

SEQ ID NO: 91409 - DNA, 75 bp, synthetic construct
  source 1..75: mol_type = other DNA
tatctgtcgacggatctgatccagccagggatcattaatgtggtccgtgattttaatgccgatgtcagtctggcc

SEQ ID NO: 91410 - DNA, 75 bp, synthetic construct
  source 1..75: mol_type = other DNA
acaggtgactaaataccgaattacctttgtcagaacgaaggggaagaaaaacagaagcattcccatcagtaaaga

SEQ ID NO: 91411 - DNA, 75 bp, synthetic construct
  source 1..75: mol_type = other DNA
ttgttatgcttactggcgtgcgaactcaggaaatgcgctttgctacatggaaagaagttgatctcgaaaacggcg

SEQ ID NO: 91412 - DNA, 75 bp, synthetic construct
  source 1..75: mol_type = other DNA
ggtgaatggacacttccaaacccattagagaagatgcgcaaattcactatcgcagaaaaggaaatggcatggctt

SEQ ID NO: 91413 - DNA, 75 bp, synthetic construct
  source 1..75: mol_type = other DNA
tatgtagctgtgcttacgtcaggtacggtctcgtttcgctatgactaccgtatcaacggtcgccgcgaaacactg

SEQ ID NO: 91414 - DNA, 75 bp, synthetic construct
  source 1..75: mol_type = other DNA
tttcatctgttagccgtcgtggcgggcgttatcgtcgttttcaccctggcgggattgctcaatcgcgtgcgccaa

SEQ ID NO: 91415 - DNA, 75 bp, synthetic construct
  source 1..75: mol_type = other DNA
ctttgaaaacatttgccggtggttctgactacattcttccttctcgttatgattccgatgctccaatgagcagtg

SEQ ID NO: 91416 - DNA, 75 bp, synthetic construct
  source 1..75: mol_type = other DNA
aagctctggcttttgagcgtcacacgatggaagaaaccgaagcaaagccctggctgggtgaatcagtggatcgtc

SEQ ID NO: 91417 - DNA, 75 bp, synthetic construct
  source 1..75: mol_type = other DNA
acggggcttggttcacagttccatggtataacattttgtaaattaattgataaaagcactccattatttattaat

SEQ ID NO: 91418 - DNA, 75 bp, synthetic construct
  source 1..75: mol_type = other DNA
tgttatgtggcgcttgaagagcttcgctggggcgcgtttggtgatgtgatacgtcagggcgaaacaggccaggtt

SEQ ID NO: 91419 - DNA, 75 bp, synthetic construct
  source 1..75: mol_type = other DNA
cttcgggaaagaaatggcgatgattatgttctttgcgatggttatcaacattatgattgcccgtttcacaccgtg

SEQ ID NO: 91420 - DNA, 75 bp, synthetic construct
  source 1..75: mol_type = other DNA
atgactgtaagtaaacaaaaaagtggaaaatggttgtgtgaactctatccaaatggtcgagaagggcggcgtata

SEQ ID NO: 91421 - DNA, 75 bp, synthetic construct
  source 1..75: mol_type = other DNA
tgtacgactgcaaccgccaaagtcccctgctcgctcttgtcgttaaaatctgtctgagcaccggagcacgctggc

SEQ ID NO: 91422 - DNA, 75 bp, synthetic construct
  source 1..75: mol_type = other DNA
cgtttaaaagaaggtctgaccggcgaaggcgctgtacgccagaatgccatcaatgcgtcgtttgcacagggcgtt

SEQ ID NO: 91423 - DNA, 75 bp, synthetic construct
  source 1..75: mol_type = other DNA
tattgagttacttggttacaaaggacgagccacaggtcacggattcaggcatacaatgtcaacaattctacacga

SEQ ID NO: 91424 - DNA, 75 bp, synthetic construct
  source 1..75: mol_type = other DNA
cgtctgaacactctggactggcttggtggtcagggccgggagcaggcagataacgagtggcatgacgcgattaac

SEQ ID NO: 91425 - DNA, 75 bp, synthetic construct
  source 1..75: mol_type = other DNA
ccgatcacttgtttgcactgatgcacctgttgggctttcgcttcgccccgcgaatccgcgacctggccgacaaac

SEQ ID NO: 91426 - DNA, 75 bp, synthetic construct
  source 1..75: mol_type = other DNA
atcggcggcaacatcaacgtgaagcatattcgcgcccattgggatgaaatcctgcggctggccgcctcgatcaaa

SEQ ID NO: 91427 - DNA, 75 bp, synthetic construct
  source 1..75: mol_type = other DNA
gcaggaggcaaaagagtggggcgatctgcgccagcgcctgtcgtccgggcagtcctcgctggtgagctattttct

SEQ ID NO: 91428 - DNA, 75 bp, synthetic construct
  source 1..75: mol_type = other DNA
agacagaccggggaatcgtacttgcaaaagcaatgatcgaacagttgagacagcagcgcatcatcctgccgactg

SEQ ID NO: 91429 - DNA, 75 bp, synthetic construct
  source 1..75: mol_type = other DNA
ccaggctcgtcgaatgttaatgcgagaacgatttttaatgtgagcagccaggtgacttcatttactccctctcgt

SEQ ID NO: 91430 - DNA, 75 bp, synthetic construct
  source 1..75: mol_type = other DNA
acggcaccaaactgaaagatgccgggaaaagcgtgttccaggatatctcgtttaataccgaccgtctgggtgaag

SEQ ID NO: 91431 - DNA, 75 bp, synthetic construct
  source 1..75: mol_type = other DNA
tcgccgtggtgttcgacatgggcgacggctacaagtccctgtgcgagaacatgggcggggtctacctcgacggcg

SEQ ID NO: 91432 - DNA, 75 bp, synthetic construct
  source 1..75: mol_type = other DNA
ctggccgtgcgtaaagagcgagagcaactgaaggtggaactggcgaaactggaaacggagatggcaggttatttg

SEQ ID NO: 91433 - DNA, 75 bp, synthetic construct
  source 1..75: mol_type = other DNA
gctgcagcagctcatccgcctgccggggcagcagtatgatgaggagtccggcctgtattataaccgccaccgcta

SEQ ID NO: 91434 - DNA, 75 bp, synthetic construct
  source 1..75: mol_type = other DNA
cttcgccgcgacattcgcgcatcatcagaactgacgcagaccgaagcagtgaaaactcttggattcctgaaacgg

SEQ ID NO: 91435 - DNA, 75 bp, synthetic construct
  source 1..75: mol_type = other DNA
tgcaatctcagttaatcgtcactctaccgatgtaattgtcacctggaatgcccgtaaggctgatgatgtccacat

SEQ ID NO: 91436 - DNA, 75 bp, synthetic construct
  source 1..75: mol_type = other DNA
atgttgttattgaaccaaatacgccagtacatccaggtgatgaagtctttgtaaggaccaaagacggtcacaaca

SEQ ID NO: 91437 - DNA, 75 bp, synthetic construct
  source 1..75: mol_type = other DNA
atggagaacagaggcagtcatttctcagcaaaaaaaatcagagtttagcgataggtaaagtacctgaagatatat

SEQ ID NO: 91438 - DNA, 75 bp, synthetic construct
  source 1..75: mol_type = other DNA
gggatgccctgaatcagagcctggcagaagtccaggggcagattaacgtttcgttcgagtttttcccgccgcgta

SEQ ID NO: 91439 - DNA, 75 bp, synthetic construct
  source 1..75: mol_type = other DNA
caggaggcctgggaagaacacgaggaaaccgcccgtattgaccatgtcgtccataagctgacggctatccgtgag

SEQ ID NO: 91440 - DNA, 75 bp, synthetic construct
  source 1..75: mol_type = other DNA
tggtgacgcatcttgacgtctcgcgtgaacaactggcagaagtcgccgcccactggcgtgcgtttctggcgcgtt

SEQ ID NO: 91441 - DNA, 75 bp, synthetic construct
  source 1..75: mol_type = other DNA
agagcggcccgaaaacgccggatctgaatagttatttttctgagccgacccggaaaactgatacccggacaccgg

SEQ ID NO: 91442 - DNA, 75 bp, synthetic construct
  source 1..75: mol_type = other DNA
atgactggcagcgactggctaaggtgaaggatctgacgccgggcgagatgacggcagaaccctacgatgataact

SEQ ID NO: 91443 - DNA, 75 bp, synthetic construct
  source 1..75: mol_type = other DNA
gtgccagcatggacctggatgacaactggacgctgggtctggtcgcacagaacctgatcccacgcagcattgaga

SEQ ID NO: 91444 - DNA, 75 bp, synthetic construct
  source 1..75: mol_type = other DNA
gcaaacccggctttactgacaaagcacaacagcaatgatgatttcagccttcttctgccgtctgtcggggcacaa

SEQ ID NO: 91445 - DNA, 75 bp, synthetic construct
  source 1..75: mol_type = other DNA
tttatccgccagtgccgggaacagaacatggatatccatgacgccgtctacctgctggcacaacgcaacttccct

SEQ ID NO: 91446 - DNA, 75 bp, synthetic construct
  source 1..75: mol_type = other DNA
accgatgaatttgaagagaggtggttgactattggaacctccagcaaattaatcgacgatgatgcaattaataaa

SEQ ID NO: 91447 - DNA, 75 bp, synthetic construct
  source 1..75: mol_type = other DNA
ttttcacttttttcgctatgccaggcatcgtatacgccgagtcgccttttagctcactgcagtccgcaaaagaga

SEQ ID NO: 91448 - DNA, 75 bp, synthetic construct
  source 1..75: mol_type = other DNA
cagatattaaaatgacgatgatttatgcacacttctctccagaccacctggaggatgcagtaacaaaaaaccctc

SEQ ID NO: 91449 - DNA, 75 bp, synthetic construct
  source 1..75: mol_type = other DNA
ctctaccgtggtgtgttcagaatcggcgaaacttaccaccccggcgatacggtgacgtggggggctcgttgtggc

SEQ ID NO: 91450 - DNA, 75 bp, synthetic construct
  source 1..75: mol_type = other DNA
tgagcgaggcagatgcgatcgcctcctcggaacaggaagtgcggcagatcctactggaagaagcggatcgcctgc

SEQ ID NO: 91451 - DNA, 75 bp, synthetic construct
  source 1..75: mol_type = other DNA
acaggccgaaattagccgtctggctgacgcgctggcacaggaaaaaaagcggggattctggtcgcggctgtttcg

SEQ ID NO: 91452 - DNA, 75 bp, synthetic construct
  source 1..75: mol_type = other DNA
ggcgagctgcgcacttctgagacaccaaaaaggcacaaggagggacactccaaatctgtcgttagccaggcggaa

SEQ ID NO: 91453 - DNA, 75 bp, synthetic construct
  source 1..75: mol_type = other DNA
gtggaaggaaatccgcgagcgtcttaacagcaaccagacctgtattgttcgttattactataacatcaccacatt

SEQ ID NO: 91454 - DNA, 75 bp, synthetic construct
  source 1..75: mol_type = other DNA
acacgttcaagaaaaacggtatagagctgttttccccgacctatatgcagttccgcaactggatagcgatgatcc

SEQ ID NO: 91455 - DNA, 75 bp, synthetic construct
  source 1..75: mol_type = other DNA
tgccaatgaaatttcgtcaggggcgagtaatgtaggagtggttatattttctatccaggattcggcgaatatatt

SEQ ID NO: 91456 - DNA, 75 bp, synthetic construct
  source 1..75: mol_type = other DNA
aggtgttgcggccggtaaagcgcagatccctgtggtgaccggaaatggtcagtttgcggcagtggcggaaattaa

SEQ ID NO: 91457 - DNA, 75 bp, synthetic construct
  source 1..75: mol_type = other DNA
ctggatattgaaaacgtggtcatgagtccgttttgttctccaatgtcaggcagccaggttatgcgtgacaaaggt

SEQ ID NO: 91458 - DNA, 75 bp, synthetic construct
  source 1..75: mol_type = other DNA
tcaaaaagtcgatcaggttgcgcgtcagggagccacgccgctggtggtggtggaaggttctcgtgtgctgggcgt

SEQ ID NO: 91459 - DNA, 75 bp, synthetic construct
  source 1..75: mol_type = other DNA
ttttctgtcggccagtaaaacgcaggcgtatgtgttccgcgaatacatcatcgcctttgcccgtctggttgacgt

SEQ ID NO: 91460 - DNA, 75 bp, synthetic construct
  source 1..75: mol_type = other DNA
ttgaaatccctggaaagctggttgcgtgaaaagatgaagaccctgtcgcgacactcagagttggcgaaggcgttc

SEQ ID NO: 91461 - DNA, 75 bp, synthetic construct
  source 1..75: mol_type = other DNA
aaatcaccctgacattattgccgggagcaacaacggtgatggatacgactacaagcctgaatgccgttactttga

SEQ ID NO: 91462 - DNA, 75 bp, synthetic construct
  source 1..75: mol_type = other DNA
accggcatcggccagggggtttaccagctcgtgcgctccttcttcccggcggcgcgtgccattcgctacacgccg

SEQ ID NO: 91463 - DNA, 75 bp, synthetic construct
  source 1..75: mol_type = other DNA
tttacgggtatcacattgatggtaaaagatggattaatgttagtggatataacaaagatataaatatttcatcaa

SEQ ID NO: 91464 - DNA, 75 bp, synthetic construct
  source 1..75: mol_type = other DNA
aggcggcggtcaggacgaaagcccgggagatgggaataagtctgattctgcgtggtgattttcaccagtcagcaa

SEQ ID NO: 91465 - DNA, 75 bp, synthetic construct
  source 1..75: mol_type = other DNA
cttaaccagtggccggcactgacgtactatgcgaacgatggctgggtggaaatcgacaacaacatcgctgaaaat

SEQ ID NO: 91466 - DNA, 75 bp, synthetic construct
  source 1..75: mol_type = other DNA
ataccccggtccaggtactgctgccgggtaataagaagacgaagaccgggcggttgtgggcgtatgttcgtgatg

SEQ ID NO: 91467 - DNA, 75 bp, synthetic construct
  source 1..75: mol_type = other DNA
tcaccggcgtgacggacggtgccgggcgggagttccgtctggtactgaccacacaggcacagcgggcggaagagg

SEQ ID NO: 91468 - DNA, 75 bp, synthetic construct
  source 1..75: mol_type = other DNA
tttcacccgttctgtgctctccatgctgacagagatttttctgaagcaggcgatggtggggatagtcgggagtat

SEQ ID NO: 91469 - DNA, 75 bp, synthetic construct
  source 1..75: mol_type = other DNA
atgatgacgctggcggggaaaaatctccgcctttttcctgccggtccccggacagagcacaaaggaagtcgccgc

SEQ ID NO: 91470 - DNA, 75 bp, synthetic construct
  source 1..75: mol_type = other DNA
attgaccagccgcagaccccggcgcttgagttgcagattaaggtcgcctgttacatggccgtgctgaaatgggaa

SEQ ID NO: 91471 - DNA, 75 bp, synthetic construct
  source 1..75: mol_type = other DNA
tattcgcgtggtcgataccgccgaaagccacagtctgaatctgacctatcgcggtaaggataagccgaccaacgt

SEQ ID NO: 91472 - DNA, 75 bp, synthetic construct
  source 1..75: mol_type = other DNA
acccatcttgcggggttcagtggtgtactgcaggcggatgcatacgccgggttcaacgagctgtaccgggatggc

SEQ ID NO: 91473 - DNA, 75 bp, synthetic construct
  source 1..75: mol_type = other DNA
cgtggaatatatcggcatcgatgcgaccgggctcggtcagggcgtcttccagctcgtgcgctcgttctacccggc

SEQ ID NO: 91474 - DNA, 75 bp, synthetic construct
  source 1..75: mol_type = other DNA
atattcccaataagccgctgtttatccaaaacgtcggtttacaggaaacggtaaatcaggcttctggcgcattac

SEQ ID NO: 91475 - DNA, 75 bp, synthetic construct
  source 1..75: mol_type = other DNA
cggtcagaacgaaagcgcgggaactgggtattagtatgatgttacggggtgattatcaccagtcagcaaaatatc

SEQ ID NO: 91476 - DNA, 75 bp, synthetic construct
  source 1..75: mol_type = other DNA
atcgcgcgtacagcgtcgatgccaccgcgccgcttgtgaccatcaacaccatcgccagcgacgatattctcaacg

SEQ ID NO: 91477 - DNA, 75 bp, synthetic construct
  source 1..75: mol_type = other DNA
gagctgcgcgggtaagtcttctgcgtttgttaatggtactgccggggtggttgttccagacagaccggttaccac

SEQ ID NO: 91478 - DNA, 75 bp, synthetic construct
  source 1..75: mol_type = other DNA
ggctggcgggggcggcggtaggtggtggtgcgcttggtgcactgctggcaagcggtggcgatggcgactcgaaaa

SEQ ID NO: 91479 - DNA, 75 bp, synthetic construct
  source 1..75: mol_type = other DNA
tatatccagcaagttgacgaccaggtaaatgaagaactggaacaagacctgaaagacaacatcgcgctgcaaatg

SEQ ID NO: 91480 - DNA, 75 bp, synthetic construct
  source 1..75: mol_type = other DNA
gcggcggtggctggtcttgtgatgacggtgctgaccgttggtctggtgtcgtgtgcaggaaaatcattaccccgt

SEQ ID NO: 91481 - DNA, 75 bp, synthetic construct
  source 1..75: mol_type = other DNA
gctgccgtggtggttctgcatttttggcgggcgatgaaggtaccttcagcgaatccaccggcgcaagcgagacct

SEQ ID NO: 91482 - DNA, 75 bp, synthetic construct
  source 1..75: mol_type = other DNA
cacgtaacgattcactggctgcccggaccgatacccggttgcagtcgttgctggtctggtcacccggacagcggg

SEQ ID NO: 91483 - DNA, 75 bp, synthetic construct
  source 1..75: mol_type = other DNA
aaatataacgacatcattccggcggaccattgtctgcatgatgtgcaggacatgagccgtcttaaccatccgaaa

SEQ ID NO: 91484 - DNA, 75 bp, synthetic construct
  source 1..75: mol_type = other DNA
gggctcgctggtgaaggccgggtgatgggcagcggggacgcggcgtttgcgggtctgcaggccagccgtaacggc

SEQ ID NO: 91485 - DNA, 75 bp, synthetic construct
  source 1..75: mol_type = other DNA
ctatatcttcccgattttcaaaatgacaggcgtaaccccccacgagctgcgccctgatctctatccaaatcccac

SEQ ID NO: 91486 - DNA, 75 bp, synthetic construct
  source 1..75: mol_type = other DNA
gagcgaatggcagcccgtgacagaaatgccgatctggcctggattcgacagcaactggtcgatgccgcctggttt

SEQ ID NO: 91487 - DNA, 75 bp, synthetic construct
  source 1..75: mol_type = other DNA
tgacggcagagcagattgcgtatgttgcacagttacagcgttccggtgatgaggccggggcattgcaggcggcga

SEQ ID NO: 91488 - DNA, 75 bp, synthetic construct
  source 1..75: mol_type = other DNA
cagatacgtccgttcgcacaatctccctgctgccgacagccggagaggctgctgcgcagggctggagcattaaga

SEQ ID NO: 91489 - DNA, 75 bp, synthetic construct
  source 1..75: mol_type = other DNA
atgaccactataaccaaagagcgactgctgacaatcaagcagtggcgcgaaacatacggaccgggtagcaacgtt

SEQ ID NO: 91490 - DNA, 75 bp, synthetic construct
  source 1..75: mol_type = other DNA
tctgccagtggtggtttcagtgacaactacacgcacgttcaggtcggggtcgacaaaaaacacgagctggacgga

SEQ ID NO: 91491 - DNA, 75 bp, synthetic construct
  source 1..75: mol_type = other DNA
cctgatgcaggcgattgcagcagaaggtgatgtggtcgtcagtggtgcaactgagccggagtggtactacgtcat

SEQ ID NO: 91492 - DNA, 75 bp, synthetic construct
  source 1..75: mol_type = other DNA
tgtacgcgcagaaggctggctacccgcctggccgtaccttggcggtaaactggtctatgaacagtattatggcga

SEQ ID NO: 91493 - DNA, 75 bp, synthetic construct
  source 1..75: mol_type = other DNA
cttacgcctgagattatgcgcaaccatttagctgtattcgagcgatatggaatagccccaaacgatagctctacc

SEQ ID NO: 91494 - DNA, 75 bp, synthetic construct
  source 1..75: mol_type = other DNA
gacccggagcaggagctgactgaccggtgggtggtggagcagatgtcatcgctgacggccatgacggcctcgttt

SEQ ID NO: 91495 - DNA, 75 bp, synthetic construct
  source 1..75: mol_type = other DNA
gaacatatatctcaggggaccacatcggtgtctgttattaaccacaccccaccgggcagttattttgctgtggat

SEQ ID NO: 91496 - DNA, 75 bp, synthetic construct
  source 1..75: mol_type = other DNA
tggttttaatatttttgtgattcctccggagtatcgggttcagctcgatcgggaaaataatacctatcatatccg

SEQ ID NO: 91497 - DNA, 75 bp, synthetic construct
  source 1..75: mol_type = other DNA
gaactggctggggaatgtcgctgatgttcttcgggattcttatcgtcggatacggcctactttattggtggcaca

SEQ ID NO: 91498 - DNA, 75 bp, synthetic construct
  source 1..75: mol_type = other DNA
aagaattttttcagcgacgaggctatcgagaaactggaggaattatttttcgaccagtctttcgagtaccagttg

SEQ ID NO: 91499 - DNA, 75 bp, synthetic construct
  source 1..75: mol_type = other DNA
gcttctttcggatgtgctctggtgggttcgtaatccgcctgccgtggaaaacgtcaataacccgtacagccgcaa

SEQ ID NO: 91500 - DNA, 75 bp, synthetic construct
  source 1..75: mol_type = other DNA
catgctggctaatacctgcacctggacctatcgcggtgatgagtgcggttataacggtccggttgttgcggatga

SEQ ID NO: 91501 - DNA, 75 bp, synthetic construct
  source 1..75: mol_type = other DNA
cagagtatgacatgagcggggcatggttctggcgggtactgtggcgattcagggcatattacggacaggttattg

SEQ ID NO: 91502 - DNA, 75 bp, synthetic construct
  source 1..75: mol_type = other DNA
ggcgtccaattaattcccggttaaatactgataagtttcaaaataaatttggattagtattgccaaattgggaaa

SEQ ID NO: 91503 - DNA, 75 bp, synthetic construct
  source 1..75: mol_type = other DNA
tgattttttaagccagtcacaatctaccaactttacagtatcacacaaacaacacatccattatgttaaagagta

SEQ ID NO: 91504 - DNA, 75 bp, synthetic construct
  source 1..75: mol_type = other DNA
ttgtgaatgtcaaacttaagtcacggccggatgccgtcgatttagatccgaaagccgactctcccgatcatgaag

SEQ ID NO: 91505 - DNA, 75 bp, synthetic construct
  source 1..75: mol_type = other DNA
taaaacccgtcagaatgaacatccgcacctccctgttgaaagttggcgtcaggcaaaggggacccgcttcctgtg

SEQ ID NO: 91506 - DNA, 75 bp, synthetic construct
  source 1..75: mol_type = other DNA
atggtggtttatccccgctggcgcggggagctcaacatcggaaacggcttcgcggcggcggcgtccggtttatcc

SEQ ID NO: 91507 - DNA, 75 bp, synthetic construct
  source 1..75: mol_type = other DNA
ttatattgttattggtgataatgtcgatgtaggtgcccatacgtgtattatcgggcttaacgtaaaaataggtag

SEQ ID NO: 91508 - DNA, 75 bp, synthetic construct
  source 1..75: mol_type = other DNA
gtccgccgtccggtggagcgggaacgtcagacacattatctgacagtgaaggatatccagggagagtttcgtttc

SEQ ID NO: 91509 - DNA, 75 bp, synthetic construct
  source 1..75: mol_type = other DNA
atgatgtcgcgcaagcaattgaaaatctcaagcagaagttagtggaatgcaatcgctataactactgcgcagatg

SEQ ID NO: 91510 - DNA, 75 bp, synthetic construct
  source 1..75: mol_type = other DNA
cgcggtctccagcggggataccgaccagctgcagtccattgccccgggccagcccttccgcctgctgcagaagcg

SEQ ID NO: 91511 - DNA, 75 bp, synthetic construct
  source 1..75: mol_type = other DNA
cttgaaagaggagtaaatatatctgtaagaatacagaagaaaattttatcagaaaggccatatgttgcattcaga

SEQ ID NO: 91512 - DNA, 75 bp, synthetic construct
  source 1..75: mol_type = other DNA
actcctgaaaatcttggcttgacggatatcgtgtctcaagctggtaacgccgttcagcgttccggcgataaaatg

SEQ ID NO: 91513 - DNA, 75 bp, synthetic construct
  source 1..75: mol_type = other DNA
atgtttaatatatacggtatgaacgcacaattaaccgaaatcatgcgccttatcaccaatctgatccgaacaggt

SEQ ID NO: 91514 - DNA, 75 bp, synthetic construct
  source 1..75: mol_type = other DNA
atacggctcgctgctgtcggcattgatggaccagccgcagaccccggcactgcgcctgcagattatggccgcgtg

SEQ ID NO: 91515 - DNA, 75 bp, synthetic construct
  source 1..75: mol_type = other DNA
cgctggtgctgccggaactctgaacccgatgccggaaaacagcttaatgcgaggctcgtcagtgaagggcttctc

SEQ ID NO: 91516 - DNA, 75 bp, synthetic construct
  source 1..75: mol_type = other DNA
atgtctatgccattaagcaatgcccttcagagtcaaattattacagataatcacttccttcatcacccaaaagtc

SEQ ID NO: 91517 - DNA, 75 bp, synthetic construct
  source 1..75: mol_type = other DNA
cttcagatttgatatatcttatatcaaagatcgaaaacaacaggaaaattatagagtcaatttatatatcggctg

SEQ ID NO: 91518 - DNA, 75 bp, synthetic construct
  source 1..75: mol_type = other DNA
tactgtatcttattgcactgtcgctgagtggtttcatccatactttcctgcgggctgaagagcggggcatatacg

SEQ ID NO: 91519 - DNA, 75 bp, synthetic construct
  source 1..75: mol_type = other DNA
gtcttggtgactactgtataaaaattggaagcggagctacacctaaaggcggtagtagcgtttatactgataccg

SEQ ID NO: 91520 - DNA, 75 bp, synthetic construct
  source 1..75: mol_type = other DNA
gtcacacaccggcgacagtgccgggtgcgtcgtgctcgcgccgccggtggtctctggtggcaagttccgcatgct

SEQ ID NO: 91521 - DNA, 75 bp, synthetic construct
  source 1..75: mol_type = other DNA
aaaacgccgcgaaaacgataggaaaaaggctttacgggatcctgaatgccatgtgtctcaaacggaaacgcggag

SEQ ID NO: 91522 - DNA, 75 bp, synthetic construct
  source 1..75: mol_type = other DNA
gattcagctttatgcaaagcctgacctgacgccgcatgatttcaaggtcgctgattttctgtcacgccagatgga

SEQ ID NO: 91523 - DNA, 75 bp, synthetic construct
  source 1..75: mol_type = other DNA
ggagacggatgcaaccgcaccactaaatgtttacggtgaaaccaagttagccggagaaaaagcgttacaggaata

SEQ ID NO: 91524 - DNA, 75 bp, synthetic construct
  source 1..75: mol_type = other DNA
gaacgttgttgttgaagaacgtcgtgaagatgctgaacgtgaagcggctgaacgccaggaacttgaagccaaacg

SEQ ID NO: 91525 - DNA, 75 bp, synthetic construct
  source 1..75: mol_type = other DNA
gcggcgttcgcgccagctcttaacagtcatacgcgaaagtcttttttttcgtgcatcgcagcgcagatccgtaaa

SEQ ID NO: 91526 - DNA, 75 bp, synthetic construct
  source 1..75: mol_type = other DNA
ccgttttgcgtagactggctggcaactatccggatattccggatagttcggtgccagcgccaggaaagggcgtca

SEQ ID NO: 91527 - DNA, 75 bp, synthetic construct
  source 1..75: mol_type = other DNA
aatggaacgtctggcgctggtcgcctgcctgctggctgttattccggcgcttaaccttgccaccagtgatgcagc

SEQ ID NO: 91528 - DNA, 75 bp, synthetic construct
  source 1..75: mol_type = other DNA
cccggcagaaaccgaccacgggaaaatcattgtggtgggtgccaatgcccggctgttcacccgtaacaacctgaa

SEQ ID NO: 91529 - DNA, 75 bp, synthetic construct
  source 1..75: mol_type = other DNA
ggtggtgcgggcgttttccatcactgtcatcatttgaccggtttttctggcaggaggaaccactctggcggctga

SEQ ID NO: 91530 - DNA, 75 bp, synthetic construct
  source 1..75: mol_type = other DNA
cgccgtgctgcccgaactgcggcggttcactgagctatctgggcgaggataccgccgaacagctggagttgatgc

SEQ ID NO: 91531 - DNA, 75 bp, synthetic construct
  source 1..75: mol_type = other DNA
ctgcctccttccccttcccggtgatgcagcagagcggttgtttccgtcggtgcggtttcgtgtcagggagcgcag

SEQ ID NO: 91532 - DNA, 75 bp, synthetic construct
  source 1..75: mol_type = other DNA
atgccacaacgaacgtttttaacaatgttaattgtcgtctgtgtgacgatactgtgttttgtctggatggtgagg

SEQ ID NO: 91533 - DNA, 75 bp, synthetic construct
  source 1..75: mol_type = other DNA
cgagattgtggctgcagggatcaaagaaatcctcctggtaactcatgcgtccaagaacgcggtcgaaaaccactt

SEQ ID NO: 91534 - DNA, 75 bp, synthetic construct
  source 1..75: mol_type = other DNA
tgatcggcacctgccgtctgaacggtatcgatccggaagcgtatctgcgccatattctgagcctactgccggaat

SEQ ID NO: 91535 - DNA, 75 bp, synthetic construct
  source 1..75: mol_type = other DNA
gttgacgctctccagagccggacaggccgcagggctgacgtttaaccaggcgagtgagtcactggcagccctggt

SEQ ID NO: 91536 - DNA, 75 bp, synthetic construct
  source 1..75: mol_type = other DNA
atgagcgcacgttcacgggcactgatccccctcagcgcagaacaacaggccgccatgcaggcggtggctgtcaca

SEQ ID NO: 91537 - DNA, 75 bp, synthetic construct
  source 1..75: mol_type = other DNA
aggtcttactcttaaagaagctgctgatatttttggttatcaactgaattcctggcagatgaaagaaagtgcagg

SEQ ID NO: 91538 - DNA, 75 bp, synthetic construct
  source 1..75: mol_type = other DNA
gctgaaaatgcgttgcggatggtcagtctgggccgcaaaaactacctgttcttcggttcggatcatggaggagag

SEQ ID NO: 91539 - DNA, 75 bp, synthetic construct
  source 1..75: mol_type = other DNA
gttaaagctgtgcgcttttatgaacaggtacggcgtgaggatccgccagttgaaaccggagcatggaaagacgct

SEQ ID NO: 91540 - DNA, 75 bp, synthetic construct
  source 1..75: mol_type = other DNA
gttatagtcatcatccatatgttacttattattaagtataatgaagtgcgtcaatgcaatatacttattgctgga

SEQ ID NO: 91541 - DNA, 75 bp, synthetic construct
  source 1..75: mol_type = other DNA
gctggtaatggtgcggacctgctgggtaaaggtggtcttgtcagttgtcgttttaaactcgatggcgcgcttacg

SEQ ID NO: 91542 - DNA, 75 bp, synthetic construct
  source 1..75: mol_type = other DNA
tcgtcagaaaaccacgctgacagagcagaaatacagccgccagcgggaacgtgaggcagaacgacgggaactgga

SEQ ID NO: 91543 - DNA, 75 bp, synthetic construct
  source 1..75: mol_type = other DNA
cacggatgtgtggacgcataaaccggtgcagtactatcccgggaaacatccgtgcgaaaaaccggcagaaatgct

SEQ ID NO: 91544 - DNA, 75 bp, synthetic construct
  source 1..75: mol_type = other DNA
actcatcgaaccggcaggggaaacacccggagcaacacctccgccccttccggggtatcctgcaggcggatgcgt

SEQ ID NO: 91545 - DNA, 75 bp, synthetic construct
  source 1..75: mol_type = other DNA
aacgtgcgtcagggtgaacctttaggtttgggccactccattttgtgtgcacgccccgccattggtgacaaccca

SEQ ID NO: 91546 - DNA, 75 bp, synthetic construct
  source 1..75: mol_type = other DNA
atgaaataccacgtcagtgcgtgaaacctggcgattatgttcttcatgaaggccgcacatatatcgcttcagcaa

SEQ ID NO: 91547 - DNA, 75 bp, synthetic construct
  source 1..75: mol_type = other DNA
aacatttttttaccaccagtgataatacagcgttgttttatcggcactggcccactttacagccaggggcgaaaa

SEQ ID NO: 91548 - DNA, 75 bp, synthetic construct
  source 1..75: mol_type = other DNA
atgaaataccacgtcagtgtgtgactcctggtgactatgttcttcatgaaggccggacatatattgcctcggcaa

SEQ ID NO: 91549 - DNA, 75 bp, synthetic construct
  source 1..75: mol_type = other DNA
gaatggcaacggcatgttgacgcaactcaaccgccagttcccgaccattagcctgttagacattggcgcgatttt

SEQ ID NO: 91550 - DNA, 75 bp, synthetic construct
  source 1..75: mol_type = other DNA
gttaaccctgaactggatttagtccgccagctggcgcttaacggtaagacgcgcgcaatacgggaacaagcgatg

SEQ ID NO: 91551 - DNA, 75 bp, synthetic construct
  source 1..75: mol_type = other DNA
atggcacaggttaatatgaacttaagaatcaacgctgaaataaagaatgcttttatggctgctgcaaaaagcatg

SEQ ID NO: 91552 - DNA, 75 bp, synthetic construct
  source 1..75: mol_type = other DNA
ccgtccagccaggcttcaacaggctacagcgccacggatatcgttgaatacgttaaaatattactaatgagccgc

SEQ ID NO: 91553 - DNA, 75 bp, synthetic construct
  source 1..75: mol_type = other DNA
gtatgatgaggagtccggcctgtattacaaccgccaccgctattatgacccgctgcaggggaggtatatcactca

SEQ ID NO: 91554 - DNA, 75 bp, synthetic construct
  source 1..75: mol_type = other DNA
cgcaccgcgttccgccgcagatgatgggcataatccccaacaatactggcggttttggtgatgtggagaaagcca

SEQ ID NO: 91555 - DNA, 75 bp, synthetic construct
  source 1..75: mol_type = other DNA
taaagaaatcaaagttaaagctcaggacgtacagcgtcacccgtacaaaccgaagctgcagcacatcgacttcgt

SEQ ID NO: 91556 - DNA, 75 bp, synthetic construct
  source 1..75: mol_type = other DNA
atgtttactatcaacgcagaagtacgtaaagagcagggtaagggtgcgagccgccgcctgcgtgccgctaacaag

SEQ ID NO: 91557 - DNA, 75 bp, synthetic construct
  source 1..75: mol_type = other DNA
ccagatgatgctgttgaagttgatgagcaggtgtatattgagttttccggattaccgccgaaaggaaaaatccgt

SEQ ID NO: 91558 - DNA, 75 bp, synthetic construct
  source 1..75: mol_type = other DNA
ggcagaagagaagcatcagcgcggtgaactggaatggccacaccaccagctggtcagtacatacagtgaactgaa

SEQ ID NO: 91559 - DNA, 75 bp, synthetic construct
  source 1..75: mol_type = other DNA
gggcataatccccaacaatactggcggttttggtgatgtggagaaagccagccgcgtgtttgtacgaaatgaatt

SEQ ID NO: 91560 - DNA, 75 bp, synthetic construct
  source 1..75: mol_type = other DNA
aattttttttctgacaaggtcagaaatattatcgaaaaagatctatccagaaaatggacgctggctattattgca

SEQ ID NO: 91561 - DNA, 75 bp, synthetic construct
  source 1..75: mol_type = other DNA
tgtcccggaatgtgttacccgccgtcaggcggtggttaatcaggcccgcgccctgctgaaaaacaacacacacga

SEQ ID NO: 91562 - DNA, 75 bp, synthetic construct
  source 1..75: mol_type = other DNA
aagctatgcttgtctgacaccggaactggtggcgcagtttggtttaaaagaagacgtggcgaaaaatctgcaatg

SEQ ID NO: 91563 - DNA, 75 bp, synthetic construct
  source 1..75: mol_type = other DNA
agaaaacgaagaccgggcggttgtgggcgtatgttcgtgacgaccgtaactccgggtcaacgctggcgccggcgg

SEQ ID NO: 91564 - DNA, 75 bp, synthetic construct
  source 1..75: mol_type = other DNA
agattatcaggaaaatggtctgttcacgcatggattccgtggtaataatttctctgatgccggttctccttttat

SEQ ID NO: 91565 - DNA, 75 bp, synthetic construct
  source 1..75: mol_type = other DNA
taccgcgcttcgtgcgctgctgttaagtcgcaaaaatccgtttggcgatatcaaatcggacggcacggtgaaaac

SEQ ID NO: 91566 - DNA, 75 bp, synthetic construct
  source 1..75: mol_type = other DNA
cagtgagtcagaaggaaatctgaaagcccagggctgggagccggctggcggtaaagctgaaattatcagtgatgc

SEQ ID NO: 91567 - DNA, 75 bp, synthetic construct
  source 1..75: mol_type = other DNA
gattttaacggaacgccagcgaatcatgcagcccgttttacagaagtggtggatcaataccgtgcggaccttgca

SEQ ID NO: 91568 - DNA, 75 bp, synthetic construct
  source 1..75: mol_type = other DNA
tgtcgcaagtcacagaattatttgaaaaaccgttgctggatctgctgtttgaagcgcagcaggtgcatcgtcagc

SEQ ID NO: 91569 - DNA, 75 bp, synthetic construct
  source 1..75: mol_type = other DNA
ctatgagcctgtcatcaacgacagttatcaggcactggctgagcactatggcacggttatcatcccggcccgacc

SEQ ID NO: 91570 - DNA, 75 bp, synthetic construct
  source 1..75: mol_type = other DNA
aacaaggatggtaataaactcgacctttatggcaaggttaccgctctacgttattttactgatgataagcgtgac

SEQ ID NO: 91571 - DNA, 75 bp, synthetic construct
  source 1..75: mol_type = other DNA
cagtgatgaattcactgaaattgtctccctttattctccatggtcgactatcgaaaaaaaagcgtgcgatgctga

SEQ ID NO: 91572 - DNA, 75 bp, synthetic construct
  source 1..75: mol_type = other DNA
gcgcactgttattaatggtgatacttacagcaactcgctcgggcgaagccaggggaatgcgctgggctgaaattg

SEQ ID NO: 91573 - DNA, 75 bp, synthetic construct
  source 1..75: mol_type = other DNA
ctgagctatctgggcgaggataccgccgaacagctggagttgatgcgtagcgccttccgggttatccggacggta

SEQ ID NO: 91574 - DNA, 75 bp, synthetic construct
  source 1..75: mol_type = other DNA
gcgaaaagctttttatcgacttctgtggtcctacggttcctgttattaatccggacaccggtgagatacgccgcg

SEQ ID NO: 91575 - DNA, 75 bp, synthetic construct
  source 1..75: mol_type = other DNA
atgaacgacatctcttctgacgacattttcctgctgaaacagcgcctggccgaacaggaagtgctgatccacgcc

SEQ ID NO: 91576 - DNA, 75 bp, synthetic construct
  source 1..75: mol_type = other DNA
atgaactatcaggcagtatcagaattaatcacatcgtctaatcataatgttcttattgtgggggactcagcttct

SEQ ID NO: 91577 - DNA, 75 bp, synthetic construct
  source 1..75: mol_type = other DNA
catgggcatctgcccgcgatgatttacggcatgcaaggcaacgtctgaaatcgtttcttctggttcatgggggcc

SEQ ID NO: 91578 - DNA, 75 bp, synthetic construct
  source 1..75: mol_type = other DNA
tggggctgaatgcgctgacgctgacggatgttacaaaaaatgcagcgtatggcgttgagatagaaagtctggtgc

SEQ ID NO: 91579 - DNA, 75 bp, synthetic construct
  source 1..75: mol_type = other DNA
aatgtgggcgtgcagctgggtgataatggctacaatgacaccgcagtgatggtgggcctgaaatataagttctga

SEQ ID NO: 91580 - DNA, 75 bp, synthetic construct
  source 1..75: mol_type = other DNA
gctgcctgctgggctcatgcccgccgaaagatccacgatgtgcacgtccgcatcccgtcagcactgacggaagaa

SEQ ID NO: 91581 - DNA, 75 bp, synthetic construct
  source 1..75: mol_type = other DNA
tctacctccgcgaaggctatgagcatgaatgcttcagtccgctcgaacagtttcgtcgtaaattcagggaaatag

SEQ ID NO: 91582 - DNA, 75 bp, synthetic construct
  source 1..75: mol_type = other DNA
cgtttctggcccggagattttttcccgacgttctatgcctgtcatctggctgtgctgggcgttctggcgttgtga

SEQ ID NO: 91583 - DNA, 75 bp, synthetic construct
  source 1..75: mol_type = other DNA
aatttacctacgatgtgctggaccgcctgacggagcagcgcggctttgatggcaggacacagcgttaccggtaca

SEQ ID NO: 91584 - DNA, 75 bp, synthetic construct
  source 1..75: mol_type = other DNA
gacctgaatgatattgaaaaaataacgtatataaaagcaggcaggaagtttcttgctcaaatggatggaagacaa

SEQ ID NO: 91585 - DNA, 75 bp, synthetic construct
  source 1..75: mol_type = other DNA
ggtatcttcactgccacagggcgttgccctgaccggagacggggggaataacctgctggcagcgttctacatcca

SEQ ID NO: 91586 - DNA, 75 bp, synthetic construct
  source 1..75: mol_type = other DNA
gagtgattgctgtatgcaccctggttcagacctggtagggaaggttgaaatgactgagtggttagttgactttgc

SEQ ID NO: 91587 - DNA, 75 bp, synthetic construct
  source 1..75: mol_type = other DNA
gcgctggctgtggagaatgcggggctgaagtctggcgctatgggcgaaatcaaggttatcaaccgtggaggtcag

SEQ ID NO: 91588 - DNA, 75 bp, synthetic construct
  source 1..75: mol_type = other DNA
atagtctgaataaacgttatctgccaccttatggcgatgcgttaaccaaagcgcctaatttccaacgtctggcgg

SEQ ID NO: 91589 - DNA, 75 bp, synthetic construct
  source 1..75: mol_type = other DNA
cggtctggctcgacagccgccatcagcaggtgcgcgaccactaccgggaggggatggtcatggagcgctggaatg

SEQ ID NO: 91590 - DNA, 75 bp, synthetic construct
  source 1..75: mol_type = other DNA
tccctgacggcaaagcggttgattgagatgaagcgttatcgcggcgcgtttgttgccgcccgcaaccagtggaac

SEQ ID NO: 91591 - DNA, 75 bp, synthetic construct
  source 1..75: mol_type = other DNA
tgggtgctggagtacgccgcgggcaacggtgcggctctgttacagaaaggggggcagattcgctgccgctttaag

SEQ ID NO: 91592 - DNA, 75 bp, synthetic construct
  source 1..75: mol_type = other DNA
ctgacaggcatatcaaaggcggcgacatatacgctgctgattgacagtgtgaaggtggaagtgaacaacgcggac

SEQ ID NO: 91593 - DNA, 75 bp, synthetic construct
  source 1..75: mol_type = other DNA
gaatggagtggctggcccggcattccaggttataaaagacggtctgacactgggactgaatgcgctgacgctgac

SEQ ID NO: 91594 - DNA, 75 bp, synthetic construct
  source 1..75: mol_type = other DNA
ctcaatacttgctggcaacagtaaggaaaatacctacaatctcataaaggagattggactcaagctcaatatacc

SEQ ID NO: 91595 - DNA, 75 bp, synthetic construct
  source 1..75: mol_type = other DNA
tttcgtcggtggaaatgtacctggtcagcgattgtattgagcatatcctgtccagtgggctggcctgcgatgtgc

SEQ ID NO: 91596 - DNA, 75 bp, synthetic construct
  source 1..75: mol_type = other DNA
aacgcgcaaaaccacaagacaaaccatatacattgaatgatgggcaaggcttgtcattactcatcaacccagacg

SEQ ID NO: 91597 - DNA, 75 bp, synthetic construct
  source 1..75: mol_type = other DNA
ttttttgtgtcatgagcagcattacgcccaaattatggtggggcgtgcagggccaacttcggttgggccgggttc

SEQ ID NO: 91598 - DNA, 75 bp, synthetic construct
  source 1..75: mol_type = other DNA
gacagaagatcgttttgtcagtcagggtgagctggtcagagacaccgcccgcgatatcagcacggcgttgggact

SEQ ID NO: 91599 - DNA, 75 bp, synthetic construct
  source 1..75: mol_type = other DNA
ttccacagcgtgttctgctgaaagacttccagggcgatatgcgactggtgaaagaagagttccccgaaatggact

SEQ ID NO: 91600 - DNA, 75 bp, synthetic construct
  source 1..75: mol_type = other DNA
gcggcaaatatgagcctgcggggatagttcaccgcggggagtttgttttcacgaaggaggcaaccagccggatag

SEQ ID NO: 91601 - DNA, 75 bp, synthetic construct
  source 1..75: mol_type = other DNA
ctgaccatctacaacacctcatgctaccgggggatccctggcagatatatcgctgccggaccactggcttcacgc

SEQ ID NO: 91602 - DNA, 75 bp, synthetic construct
  source 1..75: mol_type = other DNA
gcgcatcaactgcgctttgccgctcagcgaaacctatcgcgaagcactgaagcaaattggcgaggccgtgtatcg

SEQ ID NO: 91603 - DNA, 75 bp, synthetic construct
  source 1..75: mol_type = other DNA
agtagtgcgcctaatgttttcaaaacattcttcagagcattaagcccttacgactacacactgtattgcaggaag

SEQ ID NO: 91604 - DNA, 75 bp, synthetic construct
  source 1..75: mol_type = other DNA
tccagaacgttccgtcgtctggtcgtcactctcacccggcgttatggcgtcagtctcattcatctggacgccggc

SEQ ID NO: 91605 - DNA, 75 bp, synthetic construct
  source 1..75: mol_type = other DNA
gatatggcaggccagtgcgtcggtggctctgctggcggtgttccctggatatgcggggacacgacgtatttctgg

SEQ ID NO: 91606 - DNA, 75 bp, synthetic construct
  source 1..75: mol_type = other DNA
cgcgcgtaaagcaatgattatcggtactgccggttttaccgccatgctgtgtgtgatggcgctggaagatgccgg

SEQ ID NO: 91607 - DNA, 75 bp, synthetic construct
  source 1..75: mol_type = other DNA
tcggcagtaccgccgtggcgctgctgcataagttgggttatcaggtcgttgccgtttccggtcgcgaaagtaccc

SEQ ID NO: 91608 - DNA, 75 bp, synthetic construct
  source 1..75: mol_type = other DNA
atgactggtcagatccttaccgcaagtggcgtacccgtaagggatacacgcccggcaaaatcctgacgctgaacg

SEQ ID NO: 91609 - DNA, 75 bp, synthetic construct
  source 1..75: mol_type = other DNA
gcgggagctgaacaagcaccgggatattgttcgacagattactgattcttcccgccgtgttgtatcggaaaagtg

SEQ ID NO: 91610 - DNA, 75 bp, synthetic construct
  source 1..75: mol_type = other DNA
atgaagaaacttcaactctcacccaatggaagaaataccgtgtgctgctgatgcgtgttgatacgtcaacagcac

SEQ ID NO: 91611 - DNA, 75 bp, synthetic construct
  source 1..75: mol_type = other DNA
atgggtaaagggtgggatgcgtcctttcggtttggcagacgcgaacgtttacgacaggaggtgttacatcgggag

SEQ ID NO: 91612 - DNA, 75 bp, synthetic construct
  source 1..75: mol_type = other DNA
tatgtattgcaatggagatatcctatctttgtgcggcaaggctcggtgatgtactcgagctgaaatggcaggata

SEQ ID NO: 91613 - DNA, 75 bp, synthetic construct
  source 1..75: mol_type = other DNA
atacgagcgtgggtatgtaaaaaataatccatgcaaaggagtcagaaaattcacacttaaagcccgtactgttta

SEQ ID NO: 91614 - DNA, 75 bp, synthetic construct
  source 1..75: mol_type = other DNA
ggaaaagtgcttgctgataatgtaaaaattgaacaggtaagaattttcatggataagcgaggacttgagagcaag

SEQ ID NO: 91615 - DNA, 75 bp, synthetic construct
  source 1..75: mol_type = other DNA
aagcgatgggaaaagccaattctgttgaactggcggcgcggcttgatatcagccgtgaagaagttctcaacgaac

SEQ ID NO: 91616 - DNA, 75 bp, synthetic construct
  source 1..75: mol_type = other DNA
atggtgacatgcaaaacggtgtgcagggattgtgataacgccattcctcataatacggaatgttgcccgggttac

SEQ ID NO: 91617 - DNA, 75 bp, synthetic construct
  source 1..75: mol_type = other DNA
atggtgatacgcaaaacggtgtgcagggattgtgataacgccatccctcataatacggaatgttgcccgggctac

SEQ ID NO: 91618 - DNA, 75 bp, synthetic construct
  source 1..75: mol_type = other DNA
ggtggaactggtgaaaaaaggccagaaattattcacctctatggaagtcagcccgaagtttgctgatacgggcaa

SEQ ID NO: 91619 - DNA, 75 bp, synthetic construct
  source 1..75: mol_type = other DNA
cttttatcgatcatgatttatcccgtagtcatacccgcattggtgttggtgcggaatactggcgcgattatctga

SEQ ID NO: 91620 - DNA, 75 bp, synthetic construct
  source 1..75: mol_type = other DNA
gataaaagaggctctggatacccgtcgtggttctaattccgaactggaaacggcccttaaagaccttggtgattc

SEQ ID NO: 91621 - DNA, 75 bp, synthetic construct
  source 1..75: mol_type = other DNA
tgaatgtttccgtcaggttaactttgacgataaaactttcatgccgtgctacggactggcagaaaatgcgctggc

SEQ ID NO: 91622 - DNA, 75 bp, synthetic construct
  source 1..75: mol_type = other DNA
tcagcaaagcaactcacggactgaaaaatgtgcagtgggaagcgccgtcattactggctgagggtggcaaaatta

SEQ ID NO: 91623 - DNA, 75 bp, synthetic construct
  source 1..75: mol_type = other DNA
gaaaatctgcccgtggtgctcgatgccatcctgaaccggggagcacgtttttcggcggtggaaatgtatctggtc

SEQ ID NO: 91624 - DNA, 75 bp, synthetic construct
  source 1..75: mol_type = other DNA
gtcgacgtgggcaacaaataccatctgttgaaatgccgaatcacacatggttttgcgtacttgatatcgatggta

SEQ ID NO: 91625 - DNA, 75 bp, synthetic construct
  source 1..75: mol_type = other DNA
atcatatttctgaaccgtggtggggactgaaacgtaatatcaccccgtgcttcggtgcacggctggtacaggaag

SEQ ID NO: 91626 - DNA, 75 bp, synthetic construct
  source 1..75: mol_type = other DNA
gccggtgcttccggcagacggaacgcaggtgtcttttccgtatgccggtgaatggctgaccgaagacgaaatcag

SEQ ID NO: 91627 - DNA, 75 bp, synthetic construct
  source 1..75: mol_type = other DNA
gaagctcgctgaatatcatggcagtccagttacccgcatggcgacaaacctgctgcttctgactggcctcagaac

SEQ ID NO: 91628 - DNA, 75 bp, synthetic construct
  source 1..75: mol_type = other DNA
caggggcccacaggcacggtgcgggtcagattcgacggccgttacacactgtttacgccctctgaaaatgacggg

SEQ ID NO: 91629 - DNA, 75 bp, synthetic construct
  source 1..75: mol_type = other DNA
aactcaaaatcagaagtacagaacgagattataaatacatttccagaattactggcaggtatgctggattgtctc

SEQ ID NO: 91630 - DNA, 75 bp, synthetic construct
  source 1..75: mol_type = other DNA
atgccccatcgcgccctgttactggtcgatttacaaaatgatttctgtgctggtggcgcgctcgccgtgccggaa

SEQ ID NO: 91631 - DNA, 75 bp, synthetic construct
  source 1..75: mol_type = other DNA
atttttgtcggccagtaagacgcaggcttacgtgttccgaaagtacatcatcgcctttgcgcgcatggtcgaggt

SEQ ID NO: 91632 - DNA, 75 bp, synthetic construct
  source 1..75: mol_type = other DNA
gtgagtaaacgaattgcgctttttccggtgttattgctggcgctgctggtggttgctgctgcggcgttgacctgg

SEQ ID NO: 91633 - DNA, 75 bp, synthetic construct
  source 1..75: mol_type = other DNA
actgatgaccctgccagtctgggcactgaaatgctgacattcagcgccagtgcagctcataacccgctggcaaac

SEQ ID NO: 91634 - DNA, 75 bp, synthetic construct
  source 1..75: mol_type = other DNA
cacatcccgtctgagtgcggactacttaatccatgatttgcagacgggtcacttcgtgacagtactgcgttttat

SEQ ID NO: 91635 - DNA, 75 bp, synthetic construct
  source 1..75: mol_type = other DNA
agactgccctgcaggcacaacaggccgcctttaacgaactggtggacaagctgagccatgaggactgccgccagg

SEQ ID NO: 91636 - DNA, 75 bp, synthetic construct
  source 1..75: mol_type = other DNA
atccgccaatacattgaacaacagcaaacacctggtcaggtggaaaaccgcgccttatatccccgccctgaagga

SEQ ID NO: 91637 - DNA, 75 bp, synthetic construct
  source 1..75: mol_type = other DNA
aaatcgccagtcgtctgcagcaaagaatatctgccgtaatgcgttatgccgtacagtctggcatcatcagatata

SEQ ID NO: 91638 - DNA, 75 bp, synthetic construct
  source 1..75: mol_type = other DNA
catattttattagcccctgtttcagcacctgctcacattgttgaaagttcctcagcactctggaatgaagttgaa

SEQ ID NO: 91639 - DNA, 75 bp, synthetic construct
  source 1..75: mol_type = other DNA
gttttatgccgaacgcgcccgtcacggcgtggcgttgattgtcagcggcggcattgcaccagatttaacaggcgt

SEQ ID NO: 91640 - DNA, 75 bp, synthetic construct
  source 1..75: mol_type = other DNA
atgcatacgcggaaggcaataacggaggcgcttcaaaaactcggagtccaaaccggtgacctcttgatggtgcat

SEQ ID NO: 91641 - DNA, 75 bp, synthetic construct
  source 1..75: mol_type = other DNA
ccgtcgcgctggcgctgttttcgctggcggggatgtcaatgctacgcgtcgatgacgatatctcgcagttacagg

SEQ ID NO: 91642 - DNA, 75 bp, synthetic construct
  source 1..75: mol_type = other DNA
atcagatgcggacaagtttataaatcatgttcgtcgctatttagcaggcagggtaatgaagaggcggatatacgc

SEQ ID NO: 91643 - DNA, 75 bp, synthetic construct
  source 1..75: mol_type = other DNA
attgatggcattatttgcgatatcagtgaccttgatcgcagtgcgtttacatcggttgtcactcgtgaacagtat

SEQ ID NO: 91644 - DNA, 75 bp, synthetic construct
  source 1..75: mol_type = other DNA
ttcgccatatttttgccatgactattgatgaatgcgcgacctggattgcccagaccggtgacagtgaaagctggc

SEQ ID NO: 91645 - DNA, 75 bp, synthetic construct
  source 1..75: mol_type = other DNA
ctgcaatttcgggacgttacactattccagcaccttataaagcgggtgccgggcgtggaaacccggaattcacca

SEQ ID NO: 91646 - DNA, 75 bp, synthetic construct
  source 1..75: mol_type = other DNA
gcgtaagtaacattagcaaatgctataacatttaccaaaaccccagagataggttaaaacagtttttcttaccta

SEQ ID NO: 91647 - DNA, 75 bp, synthetic construct
  source 1..75: mol_type = other DNA
agagtccgtgcgtaccttaacaaacagagctattcttctcgatcgtgggacgcaattaagtactggcttatcatc

SEQ ID NO: 91648 - DNA, 75 bp, synthetic construct
  source 1..75: mol_type = other DNA
tgaaggatggtacgggaaaagcggtaccgggatgcacgatagagctgaaagcgcgccgcacaacggagacggtga

SEQ ID NO: 91649 - DNA, 75 bp, synthetic construct
  source 1..75: mol_type = other DNA
cagcagcaaagaaagttcgctgaatctggatgcttaccactggaaagaggacggcatcagcgataaaggcgtgat

SEQ ID NO: 91650 - DNA, 75 bp, synthetic construct
  source 1..75: mol_type = other DNA
ctgctggacaggctggagggggaaatccgggcaaactgcgtgagcagtgaaagccgccagtggcttgcgcagtgc

SEQ ID NO: 91651 - DNA, 75 bp, synthetic construct
  source 1..75: mol_type = other DNA
ggtttgggagaaggtgctccagctattggcgttccgttcttctggccgtccgccgcaatgccaaatactgtaatc

SEQ ID NO: 91652 - DNA, 75 bp, synthetic construct
  source 1..75: mol_type = other DNA
ttgattctgccattccgggacgttacactgttcaggcaccttataaagcgggtgtcgggattggcgtcctggaat

SEQ ID NO: 91653 - DNA, 75 bp, synthetic construct
  source 1..75: mol_type = other DNA
gacggatattaccaaaaatgcagcgtatggcgtcgatatcggcagcctggtgctggagataaatgcaccggcatc

SEQ ID NO: 91654 - DNA, 75 bp, synthetic construct
  source 1..75: mol_type = other DNA
ggcacagacgaagagattgcagagtcgcttaaagctgcattaccgcagtggcgtaaagttaagggtattgatgaa

SEQ ID NO: 91655 - DNA, 75 bp, synthetic construct
  source 1..75: mol_type = other DNA
gattgatacatatcgcaaatttgaagacctctcattgctccagttttaccatgagatatgggctcgtaacttgtt

SEQ ID NO: 91656 - DNA, 75 bp, synthetic construct
  source 1..75: mol_type = other DNA
agtcgtgaagaagtgctgaacgagctgtgggaactcaaaagaaatggcgtcgttgataaaactggtcacacctgg

SEQ ID NO: 91657 - DNA, 75 bp, synthetic construct
  source 1..75: mol_type = other DNA
accacaaacggctgatgagctggctacgttgttcggtacaacatcacgcaaagtggcttcaacgctggcaatggc

SEQ ID NO: 91658 - DNA, 75 bp, synthetic construct
  source 1..75: mol_type = other DNA
gcaactgttgaaaaaagttcgccattttatggaaaccgtcagcccattccccggaggcaaacatggactggcaaa

SEQ ID NO: 91659 - DNA, 75 bp, synthetic construct
  source 1..75: mol_type = other DNA
ggcgattgtgtttaaggatgacaatgtggttagtttttatgaggatgttcaggaggggatcgatgagtataaaca

SEQ ID NO: 91660 - DNA, 75 bp, synthetic construct
  source 1..75: mol_type = other DNA
cacgaacccgtgattggcattatgggtaaaagcggggccggtaaatcctcactctgtaatgcactgtttcagggg

SEQ ID NO: 91661 - DNA, 75 bp, synthetic construct
  source 1..75: mol_type = other DNA
cgctggcggtggtaaccgcaacggggcggctggcacgcgttaatcagaacggtaaatttcgttactgcatgccgg

SEQ ID NO: 91662 - DNA, 75 bp, synthetic construct
  source 1..75: mol_type = other DNA
ttgccaacaaagcacaaaacttcgaagtagttgcacaatatcagttcgacttcggtctgcgtccgtccgttgctt

SEQ ID NO: 91663 - DNA, 75 bp, synthetic construct
  source 1..75: mol_type = other DNA
gacgacaaccgaaagactggctcaactcagcatagttggattacggaactcactgtttttttgggatggaagcga

SEQ ID NO: 91664 - DNA, 75 bp, synthetic construct
  source 1..75: mol_type = other DNA
aagcggtcagtggggatggaccccattacctgatgcacctgtcccggacatgccgaaagtcaacgtaacttcacg

SEQ ID NO: 91665 - DNA, 75 bp, synthetic construct
  source 1..75: mol_type = other DNA
acacacttacaacgggcttttcgttcatggcgatgcggaagcctgggcggtatatcgcgtcatccttcaacagcc

SEQ ID NO: 91666 - DNA, 75 bp, synthetic construct
  source 1..75: mol_type = other DNA
gcataacggatactctgatccagcaacgcggatttttggggttcagttacgcagatctggaaaaagaaattggta

SEQ ID NO: 91667 - DNA, 75 bp, synthetic construct
  source 1..75: mol_type = other DNA
ccaccattgccgtcgcactctccggctgtgcgcagatgacagccggcagccgcccgcacacagacacgccggata

SEQ ID NO: 91668 - DNA, 75 bp, synthetic construct
  source 1..75: mol_type = other DNA
cggacatcagcaggtgctgtttgtggtgacgcaggccgataaaacggagccctgccatgaatgggatatggccgg

SEQ ID NO: 91669 - DNA, 75 bp, synthetic construct
  source 1..75: mol_type = other DNA
gaaaatatgagccttatcttctcaatgataattccattctctccagaattgcccttattaaacttggcattttcg

SEQ ID NO: 91670 - DNA, 75 bp, synthetic construct
  source 1..75: mol_type = other DNA
aatggcgacgtaaaccgccgagccctgtgcagcgcgtttccgtattatccaccgacgagaaggttgcattatttc

SEQ ID NO: 91671 - DNA, 75 bp, synthetic construct
  source 1..75: mol_type = other DNA
gagcggcaaaggttcgcaacaatccgttgaacaggcgtatgccgaagcggggcaaccgcagcataaagtgacgga

SEQ ID NO: 91672 - DNA, 75 bp, synthetic construct
  source 1..75: mol_type = other DNA
tctgaccggacctcagcagactgcacgccaccatttgttgcccttaccggcatacgctgcagtaccgcacatatc

SEQ ID NO: 91673 - DNA, 75 bp, synthetic construct
  source 1..75: mol_type = other DNA
attgccgtgggcaactgcccggaaagctacaagccgcaactggctgaaggcagcgggcgtacccagaccgtgcgc

SEQ ID NO: 91674 - DNA, 75 bp, synthetic construct
  source 1..75: mol_type = other DNA
atgggcaaaggctgggatgcctcactgaaagccgggcggcgtgaccgcctgcgtcaggaggttctgcaccgcatg

SEQ ID NO: 91675 - DNA, 75 bp, synthetic construct
  source 1..75: mol_type = other DNA
atgaatgaaatgctgaatgcactgatttatcgccacgccagcaacctgttgctggcgcagggctggccggaagag

SEQ ID NO: 91676 - DNA, 75 bp, synthetic construct
  source 1..75: mol_type = other DNA
tggtgttctgctcagtaaccgggagtttacggaagatgccattaagatgagaaaatatgaaccttatcttctcaa

SEQ ID NO: 91677 - DNA, 75 bp, synthetic construct
  source 1..75: mol_type = other DNA
attaatccgcagacactcagcgtggaagcggagatcgcattgccggtaaaaggattcggtgtggcgctggacgat

SEQ ID NO: 91678 - DNA, 75 bp, synthetic construct
  source 1..75: mol_type = other DNA
aggtcggtttccaccgttctgcaggctacattctgggcgttgacccgcgtgaagcccccgtccggcttgacctgt

SEQ ID NO: 91679 - DNA, 75 bp, synthetic construct
  source 1..75: mol_type = other DNA
gtgcagtactatcccgggaaacatccgtgcgaaaaaccggcagaaatgctgcagcagataatcagcgcgagcagt

SEQ ID NO: 91680 - DNA, 75 bp, synthetic construct
  source 1..75: mol_type = other DNA
cttgattcaattagatatcggtagatatcaatttgttggtgttattgatgcaatcaatagttacgtcaaaaacaa

SEQ ID NO: 91681 - DNA, 75 bp, synthetic construct
  source 1..75: mol_type = other DNA
aaaatatcgttctgacctgtcggaattcggaggtcagtgtctcgggggctctccgtcatcggttccctggatttg

SEQ ID NO: 91682 - DNA, 75 bp, synthetic construct
  source 1..75: mol_type = other DNA
tcagtgtagcctgtagcaatggatggcgttggtggaaccgaaagaataaaaaaagcgctggccttggcttcgttt

SEQ ID NO: 91683 - DNA, 75 bp, synthetic construct
  source 1..75: mol_type = other DNA
ggcgttaagcgcgtgacctgtagcgcccgtgaagacgcggtggagtttttcgccaagctggggtttgttaatcag

SEQ ID NO: 91684 - DNA, 75 bp, synthetic construct
  source 1..75: mol_type = other DNA
tgcggtttttttgtgtcatgagcagcattacgcccaaattatggtggggcgtgcagggccaacttcggttgggcc

SEQ ID NO: 91685 - DNA, 75 bp, synthetic construct
  source 1..75: mol_type = other DNA
gggcagcaaagcctactgacaaggcttataaactcactgacggggctggcatgttcctgctggtacatcctaatg

SEQ ID NO: 91686 - DNA, 75 bp, synthetic construct
  source 1..75: mol_type = other DNA
atgtcaacgctgaagaatacattttttatccctccacctgatacgccgacgcaggcagggcctgaaaatattttt

SEQ ID NO: 91687 - DNA, 75 bp, synthetic construct
  source 1..75: mol_type = other DNA
ggtgttatgtatcatttgaatctggtaaaaagagccgtaggtagtgcaactctggtaggagtgcgcacaactgcg

SEQ ID NO: 91688 - DNA, 75 bp, synthetic construct
  source 1..75: mol_type = other DNA
gcatcaacgacgcggcggtactggccagtctcataaatctgtcactgaacccttcagaggtaagggggcgcaaat

SEQ ID NO: 91689 - DNA, 75 bp, synthetic construct
  source 1..75: mol_type = other DNA
atccccgctggcgcggggaacacagtgctggaccatttcaaattcacaatagattcggtttatccccgctggcgc

SEQ ID NO: 91690 - DNA, 75 bp, synthetic construct
  source 1..75: mol_type = other DNA
taaaaagagccgtaggtagtgcaactctggtaggagtgcgcacaactgcgtttcttaggatgatggcaatcttat

SEQ ID NO: 91691 - DNA, 75 bp, synthetic construct
  source 1..75: mol_type = other DNA
ccagatgcaaatgggaaaaatcacatcacggctgtaaaaggtgatgctaaaatacctgtcgataagattgaacta

SEQ ID NO: 91692 - DNA, 75 bp, synthetic construct
  source 1..75: mol_type = other DNA
gtgtcagacacactccatgagacaactcatcccgacgacaatcgcggccgcccctggtggggactgccctgtacc

SEQ ID NO: 91693 - DNA, 75 bp, synthetic construct
  source 1..75: mol_type = other DNA
cacacgggccggccggaaatccgttaccgttacgacagcgacgggcgggtgacagaacagctaaacccggcaggc

SEQ ID NO: 91694 - DNA, 75 bp, synthetic construct
  source 1..75: mol_type = other DNA
tgcgaagccgacaccctcggcagttgtggttacgtttatctggctgtttatccgacgcccgaaacgaaaaagtaa

SEQ ID NO: 91695 - DNA, 75 bp, synthetic construct
  source 1..75: mol_type = other DNA
gaattcaccttgctgaacaagtcagagatggagttgctggctgacgcctatgagatggcaaacatcatgcactaa

SEQ ID NO: 91696 - DNA, 75 bp, synthetic construct
  source 1..75: mol_type = other DNA
acatattgacggactttggccggtattaacgcgttctaccgaaaacaccgaaaaatgggattctctgttaccgct

SEQ ID NO: 91697 - DNA, 75 bp, synthetic construct
  source 1..75: mol_type = other DNA
tattccgctgaaaagtgaactggtaatgggagacggcaatacaggaagtgatattttcgatggtgttggatttcg

SEQ ID NO: 91698 - DNA, 75 bp, synthetic construct
  source 1..75: mol_type = other DNA
gttttttcatgcctctccctgtttgccatcagcttccagccgctgctgggggtcatctcagaccgtcttggcctg

SEQ ID NO: 91699 - DNA, 75 bp, synthetic construct
  source 1..75: mol_type = other DNA
tactacaaagctgaagcggttgattaccagaaagttctggatgatacgatggctgttgccgacatcctgacttct

SEQ ID NO: 91700 - DNA, 75 bp, synthetic construct
  source 1..75: mol_type = other DNA
tattttcgacggctttaactatatcggcagcagcgtcagcaccgatgaccagatgctgccgcccaacctgcgcgg

SEQ ID NO: 91701 - DNA, 75 bp, synthetic construct
  source 1..75: mol_type = other DNA
agtactgagagacggcgaagggtatcgcctttgtcgaaccaataccttcccggttccgatagcgcatttgttcac

SEQ ID NO: 91702 - DNA, 75 bp, synthetic construct
  source 1..75: mol_type = other DNA
aagaaaatcagccactcgacctggcaagtatctatcttgagcaccggctaaaacagaagggaaccagtatctgtg

SEQ ID NO: 91703 - DNA, 75 bp, synthetic construct
  source 1..75: mol_type = other DNA
cggggatccgggcatttggttttgccaccacggctggcgagatttgcaatgccatcatcatgttctgctccccct

SEQ ID NO: 91704 - DNA, 75 bp, synthetic construct
  source 1..75: mol_type = other DNA
ttcctgccgaacgcgagcctctgccaggtgtgaaatactcacaccggggttccaagatgcgaacaccacatcttg

SEQ ID NO: 91705 - DNA, 75 bp, synthetic construct
  source 1..75: mol_type = other DNA
ataatttcgatttcctggcgcgtagttttgccagaatgcacgcagaaggtcgcccggtcgatattctggccgtta

SEQ ID NO: 91706 - DNA, 75 bp, synthetic construct
  source 1..75: mol_type = other DNA
tcttctggccaataccagccttactcgggatcaggctatcgaggtgcttacagcggttaaagacggccgcattcc

SEQ ID NO: 91707 - DNA, 75 bp, synthetic construct
  source 1..75: mol_type = other DNA
gttgaaaaggcagctttgcagtcagcacaaagaattgaacgtaatttgaatagagcgtttaaggtcgataccaag

SEQ ID NO: 91708 - DNA, 75 bp, synthetic construct
  source 1..75: mol_type = other DNA
ccgctgagatgatgctgcgccatatgggctggactgaagccgcagacctgattgttaaaggtatggaaggcgcaa

SEQ ID NO: 91709 - DNA, 75 bp, synthetic construct
  source 1..75: mol_type = other DNA
ctgcaatcaaaaatcaaactcggcgccgtgctggtagccgacttcaaacaggtccgcaatccggctttccaccgc

SEQ ID NO: 91710 - DNA, 75 bp, synthetic construct
  source 1..75: mol_type = other DNA
aatgcacactacttttccagttcgtcggagctatgcaaaattatagatgaaatggaaattggtaatatcccaaaa

SEQ ID NO: 91711 - DNA, 75 bp, synthetic construct
  source 1..75: mol_type = other DNA
atgtcgtgatgatcgttattttggtgtggatggtaagcggagtggaaaaatcaatcaaaccaccacaaagatgtt

SEQ ID NO: 91712 - DNA, 75 bp, synthetic construct
  source 1..75: mol_type = other DNA
gtgattcttgcccggactgttttaccacgcagcgagaatgtatcgatattaatgaaaacagtaatatcgatgtgg

SEQ ID NO: 91713 - DNA, 75 bp, synthetic construct
  source 1..75: mol_type = other DNA
gttgtgcgctgttggtcagcagcatttctctttcgtatgctgcagaagttccgagcggcacagtactggcagaga

SEQ ID NO: 91714 - DNA, 75 bp, synthetic construct
  source 1..75: mol_type = other DNA
ccgccttatccgttgttttatcaggctgcagcagttttgaacgaatcagtgccacagaaaaaaaagcatccgatg

SEQ ID NO: 91715 - DNA, 75 bp, synthetic construct
  source 1..75: mol_type = other DNA
gcaagaaggcagatgaatgcagtggaagtatttgcctgccaaacgtagctatttacgcggcaggctaccggaaat

SEQ ID NO: 91716 - DNA, 75 bp, synthetic construct
  source 1..75: mol_type = other DNA
acccgaaagtagacaaccgtaacaaaggtccgcgcaggcagccggaaaagaacgttttctccgacgaacagatcg

SEQ ID NO: 91717 - DNA, 75 bp, synthetic construct
  source 1..75: mol_type = other DNA
tcgaaaaagtgatgaggcttttgtttctgtgtataaacttatcaacttagcttgtcatcagtgggtagaaaaatt

SEQ ID NO: 91718 - DNA, 75 bp, synthetic construct
  source 1..75: mol_type = other DNA
tctgactgttaccgtgatatcagctttcacgctgagttcttcccgcgggagcgtacacccttctgtagaaaaagc

SEQ ID NO: 91719 - DNA, 75 bp, synthetic construct
  source 1..75: mol_type = other DNA
gttcatcggactcattcaatgagcggatataagaccccattacttaatgatttctgtggtgagccattaaaacgg

SEQ ID NO: 91720 - DNA, 75 bp, synthetic construct
  source 1..75: mol_type = other DNA
gtggggaacagaaaacaagttacatcccgtatcatcagcacgcctgaacttattctctataacgacaatatcgtc

SEQ ID NO: 91721 - DNA, 75 bp, synthetic construct
  source 1..75: mol_type = other DNA
ccgtcatgttactgagcggatgcttaaccgccccgcctaaagaagccgccagaccgacattaatgcctcgtgctc

SEQ ID NO: 91722 - DNA, 75 bp, synthetic construct
  source 1..75: mol_type = other DNA
tcaggaatcttattgaacagagactcgctgtctttgacctcggtaatttattttggagtgagatcattgatagtg

SEQ ID NO: 91723 - DNA, 75 bp, synthetic construct
  source 1..75: mol_type = other DNA
aattgtcggtgccgttcacgaatgccttaatgcaaaactggattccttagcggcaattattgagaaattttgcga

SEQ ID NO: 91724 - DNA, 75 bp, synthetic construct
  source 1..75: mol_type = other DNA
gcgccgctctggtgtgcgctgctaaaaacgacgttcgttattacctgaacggtcttcacatcacgccaaaacata

SEQ ID NO: 91725 - DNA, 75 bp, synthetic construct
  source 1..75: mol_type = other DNA
tttgctggctgtgttgtgttgttgcccatagcgaaatgctgaatgtcgaacaatccgggctgtttcgcgcgtggt

SEQ ID NO: 91726 - DNA, 75 bp, synthetic construct
  source 1..75: mol_type = other DNA
ctctgctacgttcaactctggatggaaaaagcacaacaactcagtaagcagctataccccgtcatgagagaactg

SEQ ID NO: 91727 - DNA, 75 bp, synthetic construct
  source 1..75: mol_type = other DNA
cggccattatttttgaggtcattgcaacctctgcgctcaagtctagtgagggctttactaggttagtaccgtctt

SEQ ID NO: 91728 - DNA, 75 bp, synthetic construct
  source 1..75: mol_type = other DNA
tgggatgatgaacaagaacgactttatgtagcgaatcggcgaggaatacgtgtcgataagggggaaggaacactt

SEQ ID NO: 91729 - DNA, 75 bp, synthetic construct
  source 1..75: mol_type = other DNA
gttcacatggacataccatcaccgttaatgctgctggtaacgcggaaaacaccgttaaaaacatcgcatttaatt

SEQ ID NO: 91730 - DNA, 75 bp, synthetic construct
  source 1..75: mol_type = other DNA
ggtgtatgacatggcccgcaagggggcgcaggatgaactccggctgcagttgcgtgatggcggtatgttatcagg

SEQ ID NO: 91731 - DNA, 75 bp, synthetic construct
  source 1..75: mol_type = other DNA
cagcagctcttattgccgcaaagcataacatatcgttagataatcatgaggggcggcaattaacaagtgcaatgg

SEQ ID NO: 91732 - DNA, 75 bp, synthetic construct
  source 1..75: mol_type = other DNA
aataccagaacctgctgatgtgcgaatttattgacgatctggcgtcagtattcccgctcagcgagctgcaggcgt

SEQ ID NO: 91733 - DNA, 75 bp, synthetic construct
  source 1..75: mol_type = other DNA
gggctaaaaaatcaggctctcggagctacccggacttttgttgtatgtaggaaaggaacacaacaaatagtcggt

SEQ ID NO: 91734 - DNA, 75 bp, synthetic construct
  source 1..75: mol_type = other DNA
ggtttatgggcgaaagatggcaacaacttcgtctacattgagcgggttaaaggtgacgaagagttaggtggcatc

SEQ ID NO: 91735 - DNA, 75 bp, synthetic construct
  source 1..75: mol_type = other DNA
atttgatgatgttaagttgctatttaatgaagtgcctgtcagtattttagtaaatgatattttttttgaaggatt

SEQ ID NO: 91736 - DNA, 75 bp, synthetic construct
  source 1..75: mol_type = other DNA
ttttcttgtacctctgtgttaactgatatgctaacagaacatgcaagaaaatattttcctgaaatattttcattg

SEQ ID NO: 91737 - DNA, 75 bp, synthetic construct
  source 1..75: mol_type = other DNA
gttctctcccaggcacaggcgcaaaacagccagtacacgctggcgcgtactttcgccactcaaaaagtgtcactg

SEQ ID NO: 91738 - DNA, 75 bp, synthetic construct
  source 1..75: mol_type = other DNA
attacccggaacacaaaccctatggtgaggatgttcagtatttccagagtgaggacggaagggatttttatgaat

SEQ ID NO: 91739 - DNA, 75 bp, synthetic construct
  source 1..75: mol_type = other DNA
ctggtatgacttcggtgttcaatattgccaggatgtcaccgcagaaaaggatggcggttctggttgcctttgtcc

SEQ ID NO: 91740 - DNA, 75 bp, synthetic construct
  source 1..75: mol_type = other DNA
aaataatgatggcagtgaaataatgaattttgttatgaataatcctgaaggtgagcgtgcggattcatctaaggt

SEQ ID NO: 91741 - DNA, 75 bp, synthetic construct
  source 1..75: mol_type = other DNA
cttgcttgctggtcctggctggttgttcaaccccttctcagccagaagcacctaaaccgccgcagattggtatgg

SEQ ID NO: 91742 - DNA, 75 bp, synthetic construct
  source 1..75: mol_type = other DNA
gatcaggcctctgtatatcgtcaggctctcggtaatgaccaggttggccagtcaccaggtatcttaggcgaaagt

SEQ ID NO: 91743 - DNA, 75 bp, synthetic construct
  source 1..75: mol_type = other DNA
gcgcatcaactgtgctttgccactcagcgaaacttatcgcgaagcgctgaagcaaattggcgaggccgtgtatcg

SEQ ID NO: 91744 - DNA, 75 bp, synthetic construct
  source 1..75: mol_type = other DNA
agaacccgcatccagacgatttatcagccggggagcttcacgccactcatcagagttgaaaccgccaccggtgag

SEQ ID NO: 91745 - DNA, 75 bp, synthetic construct
  source 1..75: mol_type = other DNA
tcattaacagaaaaacacttctggaaatgatcccattgtcagcccgcactatttataaccttgaacagcgaggcg

SEQ ID NO: 91746 - DNA, 75 bp, synthetic construct
  source 1..75: mol_type = other DNA
gggcacgcgccggtatcgatgaggccatcagccgtgagcagcttatccccctcgatcgtgagaaggggctgttca

SEQ ID NO: 91747 - DNA, 75 bp, synthetic construct
  source 1..75: mol_type = other DNA
aatctgtcgccggagacacaaaaccggatcatgggtaaagagtttactcgtgtaagggctattgccgggtataac

SEQ ID NO: 91748 - DNA, 75 bp, synthetic construct
  source 1..75: mol_type = other DNA
ccgtttataccggcgaatgcgggcattctgctggtaccttgctgccgtggtggctctgcgttcaccaccggagcc

SEQ ID NO: 91749 - DNA, 75 bp, synthetic construct
  source 1..75: mol_type = other DNA
ggcactgaacttaatgcagtcccgccatatcacctccgtgatggttgccgatggcgaccatttactcggtgtgtt

SEQ ID NO: 91750 - DNA, 75 bp, synthetic construct
  source 1..75: mol_type = other DNA
ctttaacggtgatattcgctttaccgttaccggaaaagataacgtcaccgatagttgggtgctcatccagtgtat

SEQ ID NO: 91751 - DNA, 75 bp, synthetic construct
  source 1..75: mol_type = other DNA
gtcgatggtgttaatctcactgaactgattaacaaggttgctgaaaatggtcattcactccgcgtagtggatgaa

SEQ ID NO: 91752 - DNA, 75 bp, synthetic construct
  source 1..75: mol_type = other DNA
cctgttgaattaataaggggaatgttggattcgttggaggacttaaagcgccgtggtttacacgtcattgaagac

SEQ ID NO: 91753 - DNA, 75 bp, synthetic construct
  source 1..75: mol_type = other DNA
ggggaacgcaggcgacgctttttcatctacatccgttggtaactatggctttggtcactacgacttaaaccttcc

SEQ ID NO: 91754 - DNA, 75 bp, synthetic construct
  source 1..75: mol_type = other DNA
gcaatggtgggcagattttctggatgcaaacagggaggagtgtatcagtccgtttgaatatgcaaagattaacaa

SEQ ID NO: 91755 - DNA, 75 bp, synthetic construct
  source 1..75: mol_type = other DNA
acgcggctggccctatggttacggcggatggggttggtataatcctggccctgcaagagttgaaacaattgtaac

SEQ ID NO: 91756 - DNA, 75 bp, synthetic construct
  source 1..75: mol_type = other DNA
cctggtgttgataatgcctggcgggaatcccgtggtgatattggtaaaggaatggagagcgtaccttcgggtggt

SEQ ID NO: 91757 - DNA, 75 bp, synthetic construct
  source 1..75: mol_type = other DNA
cccgccatcagcataccgtcacgctgtatgcaaaagggctgacctgcgaagccgacaccctcggctcctgtggtt

SEQ ID NO: 91758 - DNA, 75 bp, synthetic construct
  source 1..75: mol_type = other DNA
cgatgactgcaaccatcgacgcatcaagcaccacaccttcaatggtgttccagcaattcgatcagatgcacactg

SEQ ID NO: 91759 - DNA, 75 bp, synthetic construct
  source 1..75: mol_type = other DNA
ccccgccgctggtttgaccgtggtgttctgcgggaggtggtccgggaagcccgggccgaaatccgcagcatggcg

SEQ ID NO: 91760 - DNA, 75 bp, synthetic construct
  source 1..75: mol_type = other DNA
ccaccacggcgatacgcgattaattcgccatgcttatggtgaaggcgaaaagtatgtcccgctggtcctccgcgc

SEQ ID NO: 91761 - DNA, 75 bp, synthetic construct
  source 1..75: mol_type = other DNA
cgctggtttgaccgggatattctgcgggaggtggtcctggaagcccggagtgaaatccgcagcatggcggatgca

SEQ ID NO: 91762 - DNA, 75 bp, synthetic construct
  source 1..75: mol_type = other DNA
tggaagtgtatgggatgcgcgttgtcgagccgcaccacgacggcacgccacactggcatatgatgcttttttgca

SEQ ID NO: 91763 - DNA, 75 bp, synthetic construct
  source 1..75: mol_type = other DNA
caccttatggcggaatgcaaattgcagaagattatcaggccttcaaccttggtattgggaaagatttaggacttt

SEQ ID NO: 91764 - DNA, 75 bp, synthetic construct
  source 1..75: mol_type = other DNA
gtgtcagacacactccccgggacaacgcatcccgacaacaacaacgaccgcccctggtgggggctcccctgcacc

SEQ ID NO: 91765 - DNA, 75 bp, synthetic construct
  source 1..75: mol_type = other DNA
caacttgacagcaatttaacggcttctttaaagtcaatggaaggaaaaattaataagacctttgaccgtctggaa

SEQ ID NO: 91766 - DNA, 75 bp, synthetic construct
  source 1..75: mol_type = other DNA
atggctgattttggttcaactaaatacaacgtcagttttgaagcatggcatgaactgttaatggactatgcagag

SEQ ID NO: 91767 - DNA, 75 bp, synthetic construct
  source 1..75: mol_type = other DNA
ctggtcagtgagtgtgtggagcatatcctggccagtggtctggtctgtgatgtgctgcgtataccggatgaaccg

SEQ ID NO: 91768 - DNA, 75 bp, synthetic construct
  source 1..75: mol_type = other DNA
gcattgaccacggtaaaacgccagcatcgccctgctcttgatctttcgcgcctgcctgaacttctgtcgcgtatt

SEQ ID NO: 91769 - DNA, 75 bp, synthetic construct
  source 1..75: mol_type = other DNA
gcattgaccacggtaaaacgccagcatcgccctgctcttgatctttcccgcctgcctgaacttgtgtcgcgtatt

SEQ ID NO: 91770 - DNA, 75 bp, synthetic construct
  source 1..75: mol_type = other DNA
ccagacattcaaaatgactttaaatctacagtagagaaaaacaaaaaagatatagatttattaaaagacattata

SEQ ID NO: 91771 - DNA, 75 bp, synthetic construct
  source 1..75: mol_type = other DNA
ttttttttcttgagtcaatgataggtatgcaagacaactattttacatattgtatatcaaacggaatatcaaata

SEQ ID NO: 91772 - DNA, 75 bp, synthetic construct
  source 1..75: mol_type = other DNA
tcgatttacaaaatgatttctgtgctggtggcgcgctcgccgtgccggaaggtgacagtacggtggatgtcgcta

SEQ ID NO: 91773 - DNA, 75 bp, synthetic construct
  source 1..75: mol_type = other DNA
ctgggcgtcatcaaaattattttctacatttttatctttgccggtttgatagggaaaatactccatctcttcggg

SEQ ID NO: 91774 - DNA, 75 bp, synthetic construct
  source 1..75: mol_type = other DNA
ggctattgcctgccgaaggatactaagcaactgctggcgaactaccagtcggtgcctaacaacattatctctgcc

SEQ ID NO: 91775 - DNA, 75 bp, synthetic construct
  source 1..75: mol_type = other DNA
tgtctggccggcgggttctatcagcacggcgactgaggcttatcaaaacgctgcgttttctaacggcttcgtcaa

SEQ ID NO: 91776 - DNA, 75 bp, synthetic construct
  source 1..75: mol_type = other DNA
ctcatcccgacgacaatcgcggccgcccctggtggggactgccctgtaccgtgacaccttgttttggcgcccgta

SEQ ID NO: 91777 - DNA, 75 bp, synthetic construct
  source 1..75: mol_type = other DNA
agatttattttgttccctttatgaccgatggtagcggagttaatacaccgacaaacaacccgtcagaagatcctg

SEQ ID NO: 91778 - DNA, 75 bp, synthetic construct
  source 1..75: mol_type = other DNA
ccttcggtgaatctgctccggcagagcaactctttgaagagttcggcttcaccgttgacaacgttgttgcgaaag

SEQ ID NO: 91779 - DNA, 75 bp, synthetic construct
  source 1..75: mol_type = other DNA
aactgatgagaatgaagcaaaacaagttgctactgaagcaaataccattattgctgaacaacgtacccgacaaat

SEQ ID NO: 91780 - DNA, 75 bp, synthetic construct
  source 1..75: mol_type = other DNA
attgaccacggtaaaacgccagcatcgccccgctcttgacctttcacgcctgcctgaacttctgtcgcgtattgg

SEQ ID NO: 91781 - DNA, 75 bp, synthetic construct
  source 1..75: mol_type = other DNA
atacgcgtaacgaaaaacttaattctctggaagacgtacgcaaaggcagtgaaaattatgcgctgaccactaatc

SEQ ID NO: 91782 - DNA, 75 bp, synthetic construct
  source 1..75: mol_type = other DNA
agcggatgtttatgattgttatcaacgaggccccgtgtctaacaatctcctgtgttaataagcaggggctggaaa

SEQ ID NO: 91783 - DNA, 75 bp, synthetic construct
  source 1..75: mol_type = other DNA
cggcgatacagggagaacgcttaatcatgaacgaaaacagcacgctgaacgcactgatttgtcgtcacgcccgta

SEQ ID NO: 91784 - DNA, 75 bp, synthetic construct
  source 1..75: mol_type = other DNA
cgcctatgactttgattcggataagttgaccccaacaagattaaatccaattaataccgatgccttacggcaggc

SEQ ID NO: 91785 - DNA, 75 bp, synthetic construct
  source 1..75: mol_type = other DNA
agcgtatgctgaactggtggcgaaagttgaaaacgcaacgctgctttttaatctttcccaggggcgtcgtgatta

SEQ ID NO: 91786 - DNA, 75 bp, synthetic construct
  source 1..75: mol_type = other DNA
ctgccgaaagcggttactgcacgcgttgctgtagaagcgggtattgctgactactggtacaagtatgttggcctg

SEQ ID NO: 91787 - DNA, 75 bp, synthetic construct
  source 1..75: mol_type = other DNA
tgaaccagctttctttactttcaatcaatcagctaatgaccagttcacgcaggatatgctcttaagttcaagcta

SEQ ID NO: 91788 - DNA, 75 bp, synthetic construct
  source 1..75: mol_type = other DNA
aaagcgttgcaaaagtaatcacgggcaaaacaccgcctaaagcagatcctaactgttttggcggaaatatccctt

SEQ ID NO: 91789 - DNA, 75 bp, synthetic construct
  source 1..75: mol_type = other DNA
gattagcagggcttttaagtatgcattggatggaatcacaaagaaaaaatccccggccgccaccgaggattttaa

SEQ ID NO: 91790 - DNA, 75 bp, synthetic construct
  source 1..75: mol_type = other DNA
tacgagtgcgtgctgccggaagatcgccagcatgccgaaaaagtgattcgttgcaatcacgctcgccctttaaac

SEQ ID NO: 91791 - DNA, 75 bp, synthetic construct
  source 1..75: mol_type = other DNA
ctgaaggtattgccctgacatttcgtgtcccggaaggaaatataaaacatcctttgattatcttatgccatgggt

SEQ ID NO: 91792 - DNA, 75 bp, synthetic construct
  source 1..75: mol_type = other DNA
gcacgccacaaggtgggataatttctcccttactggcaaatatatacctcgacaaactggaccgttttgtagaac

SEQ ID NO: 91793 - DNA, 75 bp, synthetic construct
  source 1..75: mol_type = other DNA
cccccacaaactattgctgaatacactggcagagaaaattaaggataagaatttcctgaaattaatcgaacagtg

SEQ ID NO: 91794 - DNA, 75 bp, synthetic construct
  source 1..75: mol_type = other DNA
gattagcagggcttttaagtatgcattggatggaatcacaaagaaaaaatccccggctgccaccgaggattctga

SEQ ID NO: 91795 - DNA, 75 bp, synthetic construct
  source 1..75: mol_type = other DNA
aaggacgggcttcagattatcccgttgtcagaagtcgcggcgaaggatgagtttctgaatatcaagaacgtgagc

SEQ ID NO: 91796 - DNA, 75 bp, synthetic construct
  source 1..75: mol_type = other DNA
aacgtggtggtgaccgacttcaccggtgaccttgatttgatattcgtgccggtgcaggcgtggctgcgtgaacat

SEQ ID NO: 91797 - DNA, 75 bp, synthetic construct
  source 1..75: mol_type = other DNA
cgaagcggcgcgttgtactgaaatgtggtttacagatggcttgaccaaagcaacgaaccgattgcacgcctttaa

SEQ ID NO: 91798 - DNA, 75 bp, synthetic construct
  source 1..75: mol_type = other DNA
gattagcagagcttttaagtatgcgcttgatgaaatcaccaataaaaaacgcccggtgtgcaagaccgagcgttc

SEQ ID NO: 91799 - DNA, 75 bp, synthetic construct
  source 1..75: mol_type = other DNA
gcgcggattggcgaactactacagtctggcgctggacatgaaatataaattatcaaaattatatttcatatggca

SEQ ID NO: 91800 - DNA, 75 bp, synthetic construct
  source 1..75: mol_type = other DNA
acgctgagctgcttcttaaagatgcagaccagactcattcacaacgcatggatttcgcgaatcttatgcgtcaag

SEQ ID NO: 91801 - DNA, 75 bp, synthetic construct
  source 1..75: mol_type = other DNA
atggcaaccaacaaccgtaaagcaaagattctgttagttcgcagaaacgatccaggcgtatggcagtgggtgaga

SEQ ID NO: 91802 - DNA, 75 bp, synthetic construct
  source 1..75: mol_type = other DNA
ccggtattgatacggatattttccgttgtgcatatatgaccttaaagatcaccgttgcatctgataattatggtt

SEQ ID NO: 91803 - DNA, 75 bp, synthetic construct
  source 1..75: mol_type = other DNA
aaagatgctctcaaacacacatacctcggttatgaaaccaaggacctggttgatgtcgtaaccggcgaaatcact

SEQ ID NO: 91804 - DNA, 75 bp, synthetic construct
  source 1..75: mol_type = other DNA
tcgcttccgcgagacgcaggactggcttgatgagtatctgaaacccttgctggaggcactccccactgatgcccg

SEQ ID NO: 91805 - DNA, 75 bp, synthetic construct
  source 1..75: mol_type = other DNA
cgatcgcctgctcaactgcaggtgcggtcggtaatgctgacgacggtacggcattaatcctggtcacgccggtga

SEQ ID NO: 91806 - DNA, 75 bp, synthetic construct
  source 1..75: mol_type = other DNA
tcggttatgaaaccaaagacctggttgatgtcgtaaccggtgatatcaccactatccagtcgttacgccatacct

SEQ ID NO: 91807 - DNA, 75 bp, synthetic construct
  source 1..75: mol_type = other DNA
atcttccgggaatgggaagtggtgtgcttgaagagattatgagtatttcagatagttcacttagaaaacgtcttg

SEQ ID NO: 91808 - DNA, 75 bp, synthetic construct
  source 1..75: mol_type = other DNA
ctacaacggcagcggtacagggactggccggcggtaatctgagtgcagccctggcaggtggtgcagcaccgtatc

SEQ ID NO: 91809 - DNA, 75 bp, synthetic construct
  source 1..75: mol_type = other DNA
tcccgcacaaaccgtaacgttgggagatgagacgtatcaggtgatgagcgcgtgcaaaccgcatgactgtggctc

SEQ ID NO: 91810 - DNA, 75 bp, synthetic construct
  source 1..75: mol_type = other DNA
gtctgaaaaagaacaacagcgatttacacgatttattagtagattattatgtatgtggtatgacattcatgtcac

SEQ ID NO: 91811 - DNA, 75 bp, synthetic construct
  source 1..75: mol_type = other DNA
gacaccgttgtcgaatgtgtgcttaacaaactctgcccgtcgcatacctacgtaatttttaaatatccggagtaa

SEQ ID NO: 91812 - DNA, 75 bp, synthetic construct
  source 1..75: mol_type = other DNA
tttctgtccacgctgaataaaatggcagaaaagaagaaaaataccgggaaagagatgtttgtgggggttacccgg

SEQ ID NO: 91813 - DNA, 75 bp, synthetic construct
  source 1..75: mol_type = other DNA
aatattttccctttggcggtttgcagcgcgattttatgcgtattgctcagacagtcgccgcccgaggtcatcatg

SEQ ID NO: 91814 - DNA, 75 bp, synthetic construct
  source 1..75: mol_type = other DNA
tcttgccgctcgcgtgcgtgatcgttatgacatgtacctgaaatccctgcctgtaccgcagctcgctgacggaaa

SEQ ID NO: 91815 - DNA, 75 bp, synthetic construct
  source 1..75: mol_type = other DNA
acatttcggcctttgcgaagatgagaatgaaattgccagcggcaatagtgcatatggtgctctgaacctggcttt

SEQ ID NO: 91816 - DNA, 75 bp, synthetic construct
  source 1..75: mol_type = other DNA
taaaatctcgcccgcaatgttgtgacgatgacgcgatgatcatttgcgggtgcatggcccgtctgaaaaagaaca

SEQ ID NO: 91817 - DNA, 75 bp, synthetic construct
  source 1..75: mol_type = other DNA
ggcaaacaaccatgttcatgtcgtacgaggaaaagaaagagttcattctagatttctatatcattatttatgcat

SEQ ID NO: 91818 - DNA, 75 bp, synthetic construct
  source 1..75: mol_type = other DNA
cgcgggcgataaaggtatttaccgtcactacatgcagaaagagatctatgaacagccaaacgcgatcaaaaacac

SEQ ID NO: 91819 - DNA, 75 bp, synthetic construct
  source 1..75: mol_type = other DNA
atttcagggatgcgtggcttgatgatttttttgaattttcaacaccacatagaaagatacctcctgatattcata

SEQ ID NO: 91820 - DNA, 75 bp, synthetic construct
  source 1..75: mol_type = other DNA
cgtccattaaggcagaggaggcagcagtcagtgccaccgccgccggaaaatcggcagaaagcgccgcatcatccg

SEQ ID NO: 91821 - DNA, 75 bp, synthetic construct
  source 1..75: mol_type = other DNA
tgcgcccgccagcaaagaaactcgtattccaaaatcgatatatgaaggtatccagaccattaatcgcaatctggt

SEQ ID NO: 91822 - DNA, 75 bp, synthetic construct
  source 1..75: mol_type = other DNA
tgcggcgcgttggtcgtggccgccgtcgccgtggtgtttgttattgcatggcactacccgatgttaaagaacgtg

SEQ ID NO: 91823 - DNA, 75 bp, synthetic construct
  source 1..75: mol_type = other DNA
cagtgaaatatcctggcgtcaggatgctgttgatgctggtatcgcaactgatgaagaaacttcaactctcaccca

SEQ ID NO: 91824 - DNA, 75 bp, synthetic construct
  source 1..75: mol_type = other DNA
aaaaacgcagcaccagaagctcaagcgcattatctgcaatgctcttaaccttgaaccttcaaaggtggggatcct

SEQ ID NO: 91825 - DNA, 75 bp, synthetic construct
  source 1..75: mol_type = other DNA
tcctgattgagttaagttttaactctcagaaagttttaaaaggcttggaaaaagccgagaaacaaacgatgcaaa

SEQ ID NO: 91826 - DNA, 75 bp, synthetic construct
  source 1..75: mol_type = other DNA
cgtttgacacctttatcggtggaacggatatccatgtgaaaagcatctcactggacatcagcgatgaaagcgccg

SEQ ID NO: 91827 - DNA, 75 bp, synthetic construct
  source 1..75: mol_type = other DNA
aggagcctgtgaaagtttcacttggtggtgaagttgccattaaaccagatgaaaccagctttatgacctttagca

SEQ ID NO: 91828 - DNA, 75 bp, synthetic construct
  source 1..75: mol_type = other DNA
acaaaaactgaagttgataataagctgaaaaacaaactggaagtgaacgatctggaaagcggtcgttatggtgga

SEQ ID NO: 91829 - DNA, 75 bp, synthetic construct
  source 1..75: mol_type = other DNA
cagaaagcggaaggagttattgatggcatgttgatgatgcttgatattcgactggagatggacagatacgtagaa

SEQ ID NO: 91830 - DNA, 75 bp, synthetic construct
  source 1..75: mol_type = other DNA
ccgtggttgaaggtatggcttacaacccggacgaaatcatctcaatcagcagtagcatggcactcaaagataaac

SEQ ID NO: 91831 - DNA, 75 bp, synthetic construct
  source 1..75: mol_type = other DNA
atgtgtggaattgttggcgcgatcgcgcaacgtgatgtagcagaaatccttcttgaaggtttacgtcgtctggaa

SEQ ID NO: 91832 - DNA, 75 bp, synthetic construct
  source 1..75: mol_type = other DNA
taccttcgtttctgaaacagacaccgaagtaattgcccatctggtgaactgggagctgaaacagggcggtactct

SEQ ID NO: 91833 - DNA, 75 bp, synthetic construct
  source 1..75: mol_type = other DNA
atggcaactatccccaaaaaatggttacaacgcaaaattgcagaccttgaatcgtgtcgtgaagacatcccgttt

SEQ ID NO: 91834 - DNA, 75 bp, synthetic construct
  source 1..75: mol_type = other DNA
tccggatgatgaagctgttcgcggggacaacgggcaagccgcacgtctgaacaaggacttcttcgctaacgccaa

SEQ ID NO: 91835 - DNA, 75 bp, synthetic construct
  source 1..75: mol_type = other DNA
cattaccgacagattttccggagaacgtggtgacggcagttgaaaccaatgtgttgaggttgcacggtcggttaa

SEQ ID NO: 91836 - DNA, 75 bp, synthetic construct
  source 1..75: mol_type = other DNA
cggattgaaacgcggattgcggaaaatttaacagcggatgttcgcgatcacctggacaaacttctgagtgaaatg

SEQ ID NO: 91837 - DNA, 75 bp, synthetic construct
  source 1..75: mol_type = other DNA
cagaatgaccgggcggatgtgctggtcagtatcagccgcgtatctgcacagtcgcttgaagccgcgattgctgac

SEQ ID NO: 91838 - DNA, 75 bp, synthetic construct
  source 1..75: mol_type = other DNA
agatattttaatcctgtaggcgcacattattctggtttaattggtgaggatcctaatggtgtaccaagcaacctt

SEQ ID NO: 91839 - DNA, 75 bp, synthetic construct
  source 1..75: mol_type = other DNA
gattgtaaggaacgttatgcatgattttttcagtgccggtattgattcgtggaaagctgacccggaattaaataa

SEQ ID NO: 91840 - DNA, 75 bp, synthetic construct
  source 1..75: mol_type = other DNA
cggtacggatgaaagcaccggagagattttccgcacatcgtcaaccacgtttgacaacggtcgggtaaaaatgac

SEQ ID NO: 91841 - DNA, 75 bp, synthetic construct
  source 1..75: mol_type = other DNA
accggcctgatgacccgcgataactacagaacggtaaataacattacccgggggaagcatccggaagcgaaacaa

SEQ ID NO: 91842 - DNA, 75 bp, synthetic construct
  source 1..75: mol_type = other DNA
ttaccgggtaaataaatttgatattgaaaaagcaatagagggcggaaagctggaactactggaaggtaaattgta

SEQ ID NO: 91843 - DNA, 75 bp, synthetic construct
  source 1..75: mol_type = other DNA
atgaaaaaaaatatagcgaactttgagacttttatcatagaacagaaagcttggttcgaagagaatctggcagca

SEQ ID NO: 91844 - DNA, 75 bp, synthetic construct
  source 1..75: mol_type = other DNA
acgaactcggtcacgccttgggggaagggtcgcccgtcgagcggttcgtccgccttggcgggaaggccctgctgt

SEQ ID NO: 91845 - DNA, 75 bp, synthetic construct
  source 1..75: mol_type = other DNA
ttacaccgttgatggtggtggcgtcggcgaactggagtttgaaaacttcaacgccgcgtcggtcaatatcaaaat

SEQ ID NO: 91846 - DNA, 75 bp, synthetic construct
  source 1..75: mol_type = other DNA
tagtgcaaggtccagtcagaaatgaaacaaaagatactttagaaagtattaggctaaattttaaagaagctaaaa

SEQ ID NO: 91847 - DNA, 75 bp, synthetic construct
  source 1..75: mol_type = other DNA
atggccgacagtttccagaatgaagttcccgccgctcgtgtaaatatcaagcttgatctgcatacaggcaatgca

SEQ ID NO: 91848 - DNA, 75 bp, synthetic construct
  source 1..75: mol_type = other DNA
cggaaagaaagggacaggcttcacgtattgcagcgaccattcgacataaccgggccaggggtaaacaccagataa

SEQ ID NO: 91849 - DNA, 75 bp, synthetic construct
  source 1..75: mol_type = other DNA
tgatattctccgggcacgccgggcaacaggtctgatgacccgcagcaactacagaacggtaaataacattaccca

SEQ ID NO: 91850 - DNA, 75 bp, synthetic construct
  source 1..75: mol_type = other DNA
tcttcaatgaagaagaagcgataccaattttttataaaacggtacgtgaattcgaagaattgaagtcatatgaag

SEQ ID NO: 91851 - DNA, 75 bp, synthetic construct
  source 1..75: mol_type = other DNA
tcgcccgagctatcatgccgcatctgcgaaagatggctggcagcgtatgctggaatggtttaagcagtatggtgg

SEQ ID NO: 91852 - DNA, 75 bp, synthetic construct
  source 1..75: mol_type = other DNA
tgtatttctgtactgccgtctgcgcgctgtatctgatcagcggcggttacagtgttatcagaaattattttcagc

SEQ ID NO: 91853 - DNA, 75 bp, synthetic construct
  source 1..75: mol_type = other DNA
gtattttctggcaacatgaaatgcctcttcctccattatatgagcaagagaggattgtttcagttctcgacaaat

SEQ ID NO: 91854 - DNA, 75 bp, synthetic construct
  source 1..75: mol_type = other DNA
ttacactcctggcaaatgccggggaatttcacggagaaaatccgctccgcgccctcccctctttgaaacgaaaat

SEQ ID NO: 91855 - DNA, 75 bp, synthetic construct
  source 1..75: mol_type = other DNA
gtggtaccgcgccgtatattgctgaaattatcaaacagaccaccccggacggtgcgggacgtgtggcagcccatg

SEQ ID NO: 91856 - DNA, 75 bp, synthetic construct
  source 1..75: mol_type = other DNA
ggattatgagcacaacaagcggtagtggccagactcgtaatgcagggaagacatcatcagatggtgctcataccc

SEQ ID NO: 91857 - DNA, 75 bp, synthetic construct
  source 1..75: mol_type = other DNA
tgccagttactgaaaatgcacctattgggatgactacaaatccttatggcacttctaaacttatgattgaaaaaa

SEQ ID NO: 91858 - DNA, 75 bp, synthetic construct
  source 1..75: mol_type = other DNA
ttaaccattacggaaattcgtcgtggactggcgggaaatctttgtcgctgcacggggtatcagatgattgtaaat

SEQ ID NO: 91859 - DNA, 75 bp, synthetic construct
  source 1..75: mol_type = other DNA
gatacatcttatcatggtcgatatattctcgacggagttgatgtgtctggtatagactataaaaggcaactatat

SEQ ID NO: 91860 - DNA, 75 bp, synthetic construct
  source 1..75: mol_type = other DNA
tgtagcggaacaatacaaagctattgcacaggctagagagatagcaaaacaatatgagcaaggggctatctcgct

SEQ ID NO: 91861 - DNA, 75 bp, synthetic construct
  source 1..75: mol_type = other DNA
tgaacgataaccaggggcgtttcgtatttccggatacctggtttggcccattactgggggagtttgaagaagtgc

SEQ ID NO: 91862 - DNA, 75 bp, synthetic construct
  source 1..75: mol_type = other DNA
gctgtgcggaaatctgcatccatttcctcttgctgtatggcataactattctgccgggccggatactgccgaaga

SEQ ID NO: 91863 - DNA, 75 bp, synthetic construct
  source 1..75: mol_type = other DNA
cgtcaggactgggctgggttaaatttcgtcagtcccggaagattgaaggcgtcattaaaaattgcaccatcagcc

SEQ ID NO: 91864 - DNA, 75 bp, synthetic construct
  source 1..75: mol_type = other DNA
atcatggtattgcagaataccttgaaaatggaagaaaagcggagcgtgagtatacccgtgatgagcttgaccata

SEQ ID NO: 91865 - DNA, 75 bp, synthetic construct
  source 1..75: mol_type = other DNA
atgttagaacttaacgtcagccgcttatcaaacgttgtcaccttccaggttgatcgaccatcattagagaaagca

SEQ ID NO: 91866 - DNA, 75 bp, synthetic construct
  source 1..75: mol_type = other DNA
ttgtcagatattctactgttgactatttgtgccgttatttctggtgcagaaaattgggaagatatagaggatttt

SEQ ID NO: 91867 - DNA, 75 bp, synthetic construct
  source 1..75: mol_type = other DNA
taccgttttctgatgtccgcgaggtgctgccgtgcggcacgtttgcttatacccgtgttccgacgatgattattc

SEQ ID NO: 91868 - DNA, 75 bp, synthetic construct
  source 1..75: mol_type = other DNA
aaccttacgaaagagcttcgctcagatgtggcaaaacctgtttggcacaattcacttcgattaccccagggagaa

SEQ ID NO: 91869 - DNA, 75 bp, synthetic construct
  source 1..75: mol_type = other DNA
atgatgcacttaaaaaacattactgctggcaaccctaaaacaaaagagcaataccagctaacgaaacaatttaac

SEQ ID NO: 91870 - DNA, 75 bp, synthetic construct
  source 1..75: mol_type = other DNA
ccacttgctgtatggcataacttttcaggcggtccggatactgccgaagattattatgccacataccacccgtta

SEQ ID NO: 91871 - DNA, 75 bp, synthetic construct
  source 1..75: mol_type = other DNA
agcatgatgaccgtgaacacggggagttacttacagcacaactgcgtctggggccggcagacatcctggagtcag

SEQ ID NO: 91872 - DNA, 75 bp, synthetic construct
  source 1..75: mol_type = other DNA
tgatgcaactggcggggcccggagcgcgctttacctggtggggtgaagatggcaatggtgacgccttccttacgg

SEQ ID NO: 91873 - DNA, 75 bp, synthetic construct
  source 1..75: mol_type = other DNA
ctcattggaattggcgtgcttggtgaatatataggaagaatttacatagagtgcaaagatagacctagattcatt

SEQ ID NO: 91874 - DNA, 75 bp, synthetic construct
  source 1..75: mol_type = other DNA
gcagtatatatcgtgaactgggcgcaacgctgagttacaacatgcgtctggggaacggcatggaagttgagccgt

SEQ ID NO: 91875 - DNA, 75 bp, synthetic construct
  source 1..75: mol_type = other DNA
atcagtccctctctctcccctgatgggccagaaaacacatcgtcttctcaaaaatcccgcaagactggtacacag

SEQ ID NO: 91876 - DNA, 75 bp, synthetic construct
  source 1..75: mol_type = other DNA
tacaaaggacgctgtgtcagtctgcaaaaactggttaatcaccagtcattcacactggtgacattgcaatatgta

SEQ ID NO: 91877 - DNA, 75 bp, synthetic construct
  source 1..75: mol_type = other DNA
ctttccttcgtcggtgctcagcttggagttccggctgatgcgcttctcacttatgccacacggcgccaaacccgt

SEQ ID NO: 91878 - DNA, 75 bp, synthetic construct
  source 1..75: mol_type = other DNA
tgggatcatgtccatcagaacctgctttacatcactgaaacccgtgacggaacggcaaagattgccgtcaatgcg

SEQ ID NO: 91879 - DNA, 75 bp, synthetic construct
  source 1..75: mol_type = other DNA
ccagggagttacgcaagttggtaggtggaaaagcccgggaggatcttatcgttgcgaactggcctgatattttcc

SEQ ID NO: 91880 - DNA, 75 bp, synthetic construct
  source 1..75: mol_type = other DNA
gcattctggatacagccatggccggaaagctggcggctgaccgggggcgagcaggcgcagtgtcgggcgcagatt

SEQ ID NO: 91881 - DNA, 75 bp, synthetic construct
  source 1..75: mol_type = other DNA
cggcagacattctggagtcagatgagaatggcattattccggagcaggacagggtaatcacgcaggtggtgatac

SEQ ID NO: 91882 - DNA, 75 bp, synthetic construct
  source 1..75: mol_type = other DNA
actgaaggcagcggatatgaagtgagcattaacgacgaccgtcaggggttacccgacgctattcaggcggaagtg

SEQ ID NO: 91883 - DNA, 75 bp, synthetic construct
  source 1..75: mol_type = other DNA
aagcatatcacacaacaggaaccggattttattgatgcgtatgcatacatggcatatgcctttctggagcaggag

SEQ ID NO: 91884 - DNA, 75 bp, synthetic construct
  source 1..75: mol_type = other DNA
ttaattacctatgccgatcaatttcacagcaatgatttaaaaccattacccacatttaatcagttttaccatcaa

SEQ ID NO: 91885 - DNA, 75 bp, synthetic construct
  source 1..75: mol_type = other DNA
tgcgccgaatctggttgagctggaaatactctgtgagcatccggtaaataacgtcgaagaagcggttctggcagc

SEQ ID NO: 91886 - DNA, 75 bp, synthetic construct
  source 1..75: mol_type = other DNA
taagcgatgccaaaccatgtagccgccatctgatcggcatgtccatcaatctgcagacaagcggcccgcattggg

SEQ ID NO: 91887 - DNA, 75 bp, synthetic construct
  source 1..75: mol_type = other DNA
gctggacagaaagcgtcaagcgccaggtggtgaaggatgctttttatattcatcagcataaagggaccaccagtg

SEQ ID NO: 91888 - DNA, 75 bp, synthetic construct
  source 1..75: mol_type = other DNA
gttcttcctcgacgctgcgtaagcattgggaatggatgacgttctccgcagatagcgtatcttcggtacatacgc

SEQ ID NO: 91889 - DNA, 75 bp, synthetic construct
  source 1..75: mol_type = other DNA
tttctggctggtgaaggtgaatccggggtaaccgaagaacagccagcacagtctgaagtaccggatgtgctgacc

SEQ ID NO: 91890 - DNA, 75 bp, synthetic construct
  source 1..75: mol_type = other DNA
gggcgagtctgtgccgctctgcgggaactgaacaaacacagggatattctccgggatattaccgccaccagagag

SEQ ID NO: 91891 - DNA, 75 bp, synthetic construct
  source 1..75: mol_type = other DNA
ggcattgtactgaagagatgatggaactgacccgtgatggcgaagccctgtacatgcactgcctgccagctgata

SEQ ID NO: 91892 - DNA, 75 bp, synthetic construct
  source 1..75: mol_type = other DNA
gattcagcggtgatttctcgtttttttgcatccctgaaagccaaaattcaggcttaccagcggaaaaaaagatgt

SEQ ID NO: 91893 - DNA, 75 bp, synthetic construct
  source 1..75: mol_type = other DNA
catcgatttcggtaaatcaaccgaacggtggtacacgcaagctcccttgctatcaaatcacacgagacggttttg

SEQ ID NO: 91894 - DNA, 75 bp, synthetic construct
  source 1..75: mol_type = other DNA
gcacgccgatattgtcgttaagtgcgtgatgattgggcttattttggcctccgtagtcacctgggcaatcttctt

SEQ ID NO: 91895 - DNA, 75 bp, synthetic construct
  source 1..75: mol_type = other DNA
agtatacacagaaaaagcacaaataaaactcttgacgtgggccacacctaaagaatatagtgggccacaccttga

SEQ ID NO: 91896 - DNA, 75 bp, synthetic construct
  source 1..75: mol_type = other DNA
tcgttgatagcgacaccgctctgatgattcaggctttcagtgattccggtgtatcaattgactttgataaattac

SEQ ID NO: 91897 - DNA, 75 bp, synthetic construct
  source 1..75: mol_type = other DNA
ttaccgaatgaacgcgattatctgaaattacaggcgttgtttgcccgggtggcagaagaaaagcatcaacgcggt

SEQ ID NO: 91898 - DNA, 75 bp, synthetic construct
  source 1..75: mol_type = other DNA
gtgagtcttgatatgaacgttgccgtggatgtgcgacgtattcagcttgcactggatgaactgggaaccgttaca

SEQ ID NO: 91899 - DNA, 75 bp, synthetic construct
  source 1..75: mol_type = other DNA
tggcagagatggttggcgctggcggctaacagtgacgttcccatgatgaaaaatgccgcgaaaacgataggaaaa

SEQ ID NO: 91900 - DNA, 75 bp, synthetic construct
  source 1..75: mol_type = other DNA
gaacgagcagcctatgaattatttatggagaagcgtttcggggaatctgtagatcgccgtagggcaaaaaatggc

SEQ ID NO: 91901 - DNA, 75 bp, synthetic construct
  source 1..75: mol_type = other DNA
gtggagtttaacgagcctcgaatgatgctaccaattacagacagcaacatgaaaagattggttatcgagcaaacg

SEQ ID NO: 91902 - DNA, 75 bp, synthetic construct
  source 1..75: mol_type = other DNA
ctgcaggtgccgctgcgtgacttgtggaaccctgcaacctgtccgatcagtttcctgccttatctcgcctgggcg

SEQ ID NO: 91903 - DNA, 75 bp, synthetic construct
  source 1..75: mol_type = other DNA
tgacggatattggcgcggcgaaactcgccagcgccgccgcgctcggtgtgcctttaaaaattacccatatggcgg

SEQ ID NO: 91904 - DNA, 75 bp, synthetic construct
  source 1..75: mol_type = other DNA
gctgaacgcttggctgatcagcaagcagagcagttcaaggccgttgtgtttgagacacttaaaaagatttatggc

SEQ ID NO: 91905 - DNA, 75 bp, synthetic construct
  source 1..75: mol_type = other DNA
aacttgagttaatggttgaatatgcactttttttcagtgtaatggctggcatcggttggcaattctcccgcagaa

SEQ ID NO: 91906 - DNA, 75 bp, synthetic construct
  source 1..75: mol_type = other DNA
tgctcgccgtactggattatggcggctttaccgaagccagtaagcgcctgtttatgacgcaatccgccgtaagcc

SEQ ID NO: 91907 - DNA, 75 bp, synthetic construct
  source 1..75: mol_type = other DNA
ttacgtggcaaccggaaaattgccgccccttatcgcggcgcggttgtactggttaattttgataccgatcagcgc

SEQ ID NO: 91908 - DNA, 75 bp, synthetic construct
  source 1..75: mol_type = other DNA
tgaaggtgtatgtggatgaccaaatggcaaaacaccttgccgcagcggacccacattcacagtatgcacccaaag

SEQ ID NO: 91909 - DNA, 75 bp, synthetic construct
  source 1..75: mol_type = other DNA
gccgtcgttcaccagaaagcatccggatggtctgattttaccatcgctgcatgtggctaaccgcgagctgcgccg

SEQ ID NO: 91910 - DNA, 75 bp, synthetic construct
  source 1..75: mol_type = other DNA
ggtcgaacaaaagcagcactgaagaagaacccgaaaaatgtgctgtttgccgtggtgtggatgcagggggaattt

SEQ ID NO: 91911 - DNA, 75 bp, synthetic construct
  source 1..75: mol_type = other DNA
ggccattgtgtttaaggatgataatgcggttagtttttatgagaatgttcaggaggggatagaggagtatgttgt

SEQ ID NO: 91912 - DNA, 75 bp, synthetic construct
  source 1..75: mol_type = other DNA
caatgggcaggacgcggcagcgaatgcggctaaagtgaccgtggtggctgatgcgttatcttcaggccagtcgac

SEQ ID NO: 91913 - DNA, 75 bp, synthetic construct
  source 1..75: mol_type = other DNA
tcacgatgaagatggcggtttgctgcacgttgccaaccaccatattgcgccaggtaaaaaacagtggagttgggg

SEQ ID NO: 91914 - DNA, 75 bp, synthetic construct
  source 1..75: mol_type = other DNA
cgcgtcatttcttgtggtgggccaacccggcagtgaaaggggggaagggcatcagagcgttttcccaccggatgt

SEQ ID NO: 91915 - DNA, 75 bp, synthetic construct
  source 1..75: mol_type = other DNA
ggaatccggctacctgtccggtcagtttcctgccttatctcgcctgggcgttctcggtggatcgctgggacgagg

SEQ ID NO: 91916 - DNA, 75 bp, synthetic construct
  source 1..75: mol_type = other DNA
tcatgtccagaagtgggagcgagtctgcgccgcgctgcgggagctgaacaagcaccgggatattgtacgacagat

SEQ ID NO: 91917 - DNA, 75 bp, synthetic construct
  source 1..75: mol_type = other DNA
cgtgtggctgataacaatgttcagcaggaacagccagcgcaggcagaactgccggaagaaatcaccacagcaaca

SEQ ID NO: 91918 - DNA, 75 bp, synthetic construct
  source 1..75: mol_type = other DNA
ggcaggcagcaacatctttatcgcaatttggcggtaattatccagaagggtccggccatgcgattaatagtcatg

SEQ ID NO: 91919 - DNA, 75 bp, synthetic construct
  source 1..75: mol_type = other DNA
cgcatttgtaatttcagaaaatggacagtgcaatttatttatggatgtcaacaatgcaatagaacaatataaaaa

SEQ ID NO: 91920 - DNA, 75 bp, synthetic construct
  source 1..75: mol_type = other DNA
tatatcaagcgtcaccagtggtggcaggcatgcgaccagctcacccgctgggtgtatgtcaacggcacaaaaaat

SEQ ID NO: 91921 - DNA, 75 bp, synthetic construct
  source 1..75: mol_type = other DNA
atgagtgattcgcgcctgctgccgaccggctcatcaccgcttgaagttgccgccgcaaaagcctgtgcggaaatt

SEQ ID NO: 91922 - DNA, 75 bp, synthetic construct
  source 1..75: mol_type = other DNA
acacacgtacaacgggcttttcgtccatggtgatgcacaagcctgggcagtctatcgcgtcatctttcaacaacc

SEQ ID NO: 91923 - DNA, 75 bp, synthetic construct
  source 1..75: mol_type = other DNA
cgacgttccgtggcagaaacggcgatgttccgtatcaaaaccttgctgggcggacacttgagcctgcgagactac

SEQ ID NO: 91924 - DNA, 75 bp, synthetic construct
  source 1..75: mol_type = other DNA
ctgtttccggcggcagtggtaaccaacctgaagacgccagagcaggaagttgctgcaaaacagcagtggattgct

SEQ ID NO: 91925 - DNA, 75 bp, synthetic construct
  source 1..75: mol_type = other DNA
ttccgtctgttccggcccgtacatccggttgtggccgtatcggcccgcaccggctgggaactggatacgctggtc

SEQ ID NO: 91926 - DNA, 75 bp, synthetic construct
  source 1..75: mol_type = other DNA
cttgatgttacccgagagcttggcacccagcctgcgcgagcagctgtcgcgtgcacgggcatggtggctgaagga

SEQ ID NO: 91927 - DNA, 75 bp, synthetic construct
  source 1..75: mol_type = other DNA
tcacgccggcacccgggaagtgcggcgcttccgtctgagtggccacggtcacagcatgattatcactgacctgcc

SEQ ID NO: 91928 - DNA, 75 bp, synthetic construct
  source 1..75: mol_type = other DNA
gtctgatctttacgggagcacatgacccacgtaaaccaatcagtgaaaacaccgtaaataaagccctgagggtta

SEQ ID NO: 91929 - DNA, 75 bp, synthetic construct
  source 1..75: mol_type = other DNA
caattgctgcatctgctgcatctggtatggcacatgcctggatgactggtgatttcaatggttcggtcgatatcg

SEQ ID NO: 91930 - DNA, 75 bp, synthetic construct
  source 1..75: mol_type = other DNA
atcggtggaattgataaacctgattgtggaaaaattatctctaacaaaacgatctcatggccagtagggctttct

SEQ ID NO: 91931 - DNA, 75 bp, synthetic construct
  source 1..75: mol_type = other DNA
ccgcaactgtttgtgattttgcgtttactgcttttgtcgccatgttgtgtaccccttacaaaaaacaaatgcagt

SEQ ID NO: 91932 - DNA, 75 bp, synthetic construct
  source 1..75: mol_type = other DNA
tgctatttatcttaacaaagaggggcaaggtaaattttataaaaatgttacggaagccattgctgattacaaaaa

SEQ ID NO: 91933 - DNA, 75 bp, synthetic construct
  source 1..75: mol_type = other DNA
tcactctgtaatgcgctgtttcagggggaggtcacaccggtcagtgatgttcacgccggcacccgggaagtgaag

SEQ ID NO: 91934 - DNA, 75 bp, synthetic construct
  source 1..75: mol_type = other DNA
cgtccttaatcaggggcgttgttcggacagtgtagggattttcccggaatttattgatggttccggttatctcat

SEQ ID NO: 91935 - DNA, 75 bp, synthetic construct
  source 1..75: mol_type = other DNA
atgcgttttatctggctggtaatgaggccgtataccgcgattccggcacatggcctgatgatgcaaaagatattg

SEQ ID NO: 91936 - DNA, 75 bp, synthetic construct
  source 1..75: mol_type = other DNA
tggagcgtaatggtcgcaaaaccaaaggcatgattgaggcggattccgcgcgtcatgcccgccagttgttgcgcg

SEQ ID NO: 91937 - DNA, 75 bp, synthetic construct
  source 1..75: mol_type = other DNA
cgggcttgctactgcggcagacaggtttccgtattttacggggaatgatgtcgccagcctggcaaccctgacaaa

SEQ ID NO: 91938 - DNA, 75 bp, synthetic construct
  source 1..75: mol_type = other DNA
gtttcgctacagcaaaattgcaccgtgcgtcaggttgctatccctgatttgcaaaacacgctgcaacagcagggc

SEQ ID NO: 91939 - DNA, 75 bp, synthetic construct
  source 1..75: mol_type = other DNA
ttgagttttacttgatcggcctgctggtgctaactgttgccgcgttcagcattactatgccggagattttctggt

SEQ ID NO: 91940 - DNA, 75 bp, synthetic construct
  source 1..75: mol_type = other DNA
tcatggctggattattcccgctgagcgcactctgcgccgcaagctagaacgtgaagttgatccgcgtatcgtcgt

SEQ ID NO: 91941 - DNA, 75 bp, synthetic construct
  source 1..75: mol_type = other DNA
atacgagggcttgatgtctatcaggcgcgttttgaccatcttcgtctgattattgagcaaaataatttatatgtg

SEQ ID NO: 91942 - DNA, 75 bp, synthetic construct
  source 1..75: mol_type = other DNA
acacagcccgttttacagaagtagtggaacaatatcgtacggaccttgcagatatggtgggacagtgcgctggtg

SEQ ID NO: 91943 - DNA, 75 bp, synthetic construct
  source 1..75: mol_type = other DNA
cctggtgacattttcccgtgtccgtggagctacagtaaaagaaatatcaaaatttgataatatttattgtgatca

SEQ ID NO: 91944 - DNA, 75 bp, synthetic construct
  source 1..75: mol_type = other DNA
taatggtcagattaccaatattgatactgatgttgcttatgatgcctacctggttggctggtatggcactggagt

SEQ ID NO: 91945 - DNA, 75 bp, synthetic construct
  source 1..75: mol_type = other DNA
attctttggtgagcaccctatcagagggacaaagaggcttaaggaggaaaaaccagaaacaggctatctcacaca

SEQ ID NO: 91946 - DNA, 75 bp, synthetic construct
  source 1..75: mol_type = other DNA
acgctggcaattgttgtgggttccccgacaggtgaaattgatacggcgttatggcgaagcggcgatgtgatcctc

SEQ ID NO: 91947 - DNA, 75 bp, synthetic construct
  source 1..75: mol_type = other DNA
gtacgacgcagtcgatatatcgaaagtggacaattttatgaagcttaaagaccagtcttctcttgaagagttaat

SEQ ID NO: 91948 - DNA, 75 bp, synthetic construct
  source 1..75: mol_type = other DNA
ttctcattatccgcctgtttactatcccggaaagcacctggccgctggtcaccatggtggtgattatggggccaa

SEQ ID NO: 91949 - DNA, 75 bp, synthetic construct
  source 1..75: mol_type = other DNA
accgcgtggatgctatatgcgcagaaagtagaatctacagatacctccatcctgccagtaacgtttcccgaacaa

SEQ ID NO: 91950 - DNA, 75 bp, synthetic construct
  source 1..75: mol_type = other DNA
ccggtggatgcgccacaggtacagaccatcacctccgggcgcgacctgctcgaccaggcgaaagtgctggcccgt

SEQ ID NO: 91951 - DNA, 75 bp, synthetic construct
  source 1..75: mol_type = other DNA
ggttgttactgtatgcgagaactttgacggtgaaattaacgttctgtatgacgggaaagcgctgggctgggaaaa

SEQ ID NO: 91952 - DNA, 75 bp, synthetic construct
  source 1..75: mol_type = other DNA
gtgccgcttcctcggcaacggcggcaggaaattccgcgaaggcggcaaaaacgtccgagacgaacgccaggtctt

SEQ ID NO: 91953 - DNA, 75 bp, synthetic construct
  source 1..75: mol_type = other DNA
aaatgatatttgtaatgagggacgtcatgcggattcaataggggtattccctgagtttatagatggaaatggtca

SEQ ID NO: 91954 - DNA, 75 bp, synthetic construct
  source 1..75: mol_type = other DNA
tgaaacgttgaattctacaaacagagaagaatggcagcgcattagcgataagttgctgcaaggtgaggtcgattg

SEQ ID NO: 91955 - DNA, 75 bp, synthetic construct
  source 1..75: mol_type = other DNA
tggacgccattgaagcccgctttaaagccctcggcgcaccggtggaattaatcaaagtacacaacacgccggacg

SEQ ID NO: 91956 - DNA, 75 bp, synthetic construct
  source 1..75: mol_type = other DNA
cgttcttcgaaatcaaaaatggcgtaccgacggtaggagtcatcgacacatccggaaaacctgtcgttgtagccc

SEQ ID NO: 91957 - DNA, 75 bp, synthetic construct
  source 1..75: mol_type = other DNA
gaagatgaagcccgtttaaaccgccggatgtgcgaagttgcggaacggatcatcgtggtcaccgattccagtaag

SEQ ID NO: 91958 - DNA, 75 bp, synthetic construct
  source 1..75: mol_type = other DNA
aaatggtggaagaagcggcacgcaacgccgaagccgcctctcagagcgcagcggcggcaaagaaatccgaaactg

SEQ ID NO: 91959 - DNA, 75 bp, synthetic construct
  source 1..75: mol_type = other DNA
gaagtcgataccgaagagcaatcccagcagacacagcaaccgaacctgatcgttgttgccaccctgccattccgc

SEQ ID NO: 91960 - DNA, 75 bp, synthetic construct
  source 1..75: mol_type = other DNA
gaagatgtccttccctggcaggaattcatcaacagcgtggaagaaacgcggtttctttcccgtaagggcaatttc

SEQ ID NO: 91961 - DNA, 75 bp, synthetic construct
  source 1..75: mol_type = other DNA
tgcaacagaagatgatgtttgtccggaggcactgtatcgttttgaaaagatggtggaagaggcggcacgcaacgc

SEQ ID NO: 91962 - DNA, 75 bp, synthetic construct
  source 1..75: mol_type = other DNA
ggttgagaatttacgtcgatgatcaggctgggcgtctggtggtggagcgccgctatccggaatattcgctggaag

SEQ ID NO: 91963 - DNA, 75 bp, synthetic construct
  source 1..75: mol_type = other DNA
ctgttagcccgcctggatggcgacgagcgcagcgccgttctagtttgtttgtcaaccggcggcaggtggggtgag

SEQ ID NO: 91964 - DNA, 75 bp, synthetic construct
  source 1..75: mol_type = other DNA
tcgttgatagcgacaccgctatgatggtgcaaagcttcactgatgcaggtgtgacaattgattttgacaggctgt

SEQ ID NO: 91965 - DNA, 75 bp, synthetic construct
  source 1..75: mol_type = other DNA
tcacgatgaagatggcggtttgctacacgttgccaaccaccatatcgcgccaggtaaaaaacagtggagctgggg

SEQ ID NO: 91966 - DNA, 75 bp, synthetic construct
  source 1..75: mol_type = other DNA
ggtagtggtgttcactggggaggtggctccggccatggcaatggcggggggaatggtaattccggtggtggcagc

SEQ ID NO: 91967 - DNA, 75 bp, synthetic construct
  source 1..75: mol_type = other DNA
acagcgaagccgcctgcgtgatgcgctgcgtgcacccggtgccggtgaactgatgcacccggattacggcacgtt

SEQ ID NO: 91968 - DNA, 75 bp, synthetic construct
  source 1..75: mol_type = other DNA
ggcaacaaataaccagaaactgggaacctttggtgtatttgataatgaatggcatacgctggccttccgttttgc

SEQ ID NO: 91969 - DNA, 75 bp, synthetic construct
  source 1..75: mol_type = other DNA
tggatgcagataaaaagcagatacagtgtgtggtaagaccgctgcaaatcctgcgtgctgacggggtgtgggaaa

SEQ ID NO: 91970 - DNA, 75 bp, synthetic construct
  source 1..75: mol_type = other DNA
gggtaaccactttgatatccacggcggcggttctgacctgatgttcccgcaccacgagaacgaaattgcccagtc

SEQ ID NO: 91971 - DNA, 75 bp, synthetic construct
  source 1..75: mol_type = other DNA
ttcagccactccgccaacaggctggctgaaatgcaatggtgcggctttttctgctgaagaatacccggaactggc

SEQ ID NO: 91972 - DNA, 75 bp, synthetic construct
  source 1..75: mol_type = other DNA
atggcaaagattgagatcaaccgcatcacgaatgccaacatctacctggatggtgctaacctgctggggcgtgcc

SEQ ID NO: 91973 - DNA, 75 bp, synthetic construct
  source 1..75: mol_type = other DNA
caagcagttattaccgtggttgctggtgctgtttgctgtcagcgtcattgcgacctgggctgcgggcttcattag

SEQ ID NO: 91974 - DNA, 75 bp, synthetic construct
  source 1..75: mol_type = other DNA
tgaagatttcgtgcaaaaggagcttggtgatcgccatgcctatcagtacgcgatccacaatccgccaggtgcaat

SEQ ID NO: 91975 - DNA, 75 bp, synthetic construct
  source 1..75: mol_type = other DNA
acgggattgaccgtgacccgcagcagtatttcaaacgggcaaactctaaagtaccggagcgcggcggagctaaaa

SEQ ID NO: 91976 - DNA, 75 bp, synthetic construct
  source 1..75: mol_type = other DNA
tggcgctaacctgctgggccgggccgaggaggtcaaactcccggacgtctccatgaccatgcaggagcataaggc

SEQ ID NO: 91977 - DNA, 75 bp, synthetic construct
  source 1..75: mol_type = other DNA
ggatcgctgtgcgtgcctatggtggcgcgttgatctgcgatagcacgacgccgtcagtcgcaatctttttacggt

SEQ ID NO: 91978 - DNA, 75 bp, synthetic construct
  source 1..75: mol_type = other DNA
cgtcgatcaccaataaatactcagccaaagatgtagcgccagacatacttgtattgcccgtcaacgtatatcatg

SEQ ID NO: 91979 - DNA, 75 bp, synthetic construct
  source 1..75: mol_type = other DNA
aaaagttcaacagtcaaatgatagcaatacaaataaaaaagctcgtactgcaagaggtcctcgttttactttaag

SEQ ID NO: 91980 - DNA, 75 bp, synthetic construct
  source 1..75: mol_type = other DNA
agttacgtccagaacttgctgttagctgctgagaactgcccggaagtgaagggttacgacaccaaagacctgtgg

SEQ ID NO: 91981 - DNA, 75 bp, synthetic construct
  source 1..75: mol_type = other DNA
tgatcgatgtgtttaaggaagcacagcattatggcgaagttccgccagggtataaccctgctcttgcgacgaagc

SEQ ID NO: 91982 - DNA, 75 bp, synthetic construct
  source 1..75: mol_type = other DNA
tcacacttatccggcgttatggcgtcagtctcattcatctggatgccagcgctgaatgcctgccgggtttaccca

SEQ ID NO: 91983 - DNA, 75 bp, synthetic construct
  source 1..75: mol_type = other DNA
catcggtgtgcggattgtcgaagcgttagagcaacgatacattctgccggattatgttgagatcctcgatggcgg

SEQ ID NO: 91984 - DNA, 75 bp, synthetic construct
  source 1..75: mol_type = other DNA
gtattgctaatgatatatctcggaaaatccttgctaatgcactggatgaaattgaattgctcaggaagcatgaga

SEQ ID NO: 91985 - DNA, 75 bp, synthetic construct
  source 1..75: mol_type = other DNA
ggtggaactcgtgcgccagagcggccgtgagacgttacggcaactggaagctaaaacaggtgcgactagatatct

SEQ ID NO: 91986 - DNA, 75 bp, synthetic construct
  source 1..75: mol_type = other DNA
gtgccggaagagcgaagttatgcagcgcattctggcattttatcagggaaatgttaggtattttagacgttacta

SEQ ID NO: 91987 - DNA, 75 bp, synthetic construct
  source 1..75: mol_type = other DNA
gcgggtaacaacggtactgcacgtttttacggcaccattgaagactcagtgtgttctatcgttccggacgatcac

SEQ ID NO: 91988 - DNA, 75 bp, synthetic construct
  source 1..75: mol_type = other DNA
caatgcgccggagttcctcacaccacggcgctgatagtgattattctgattctttggccttgcggcgctggcggc

SEQ ID NO: 91989 - DNA, 75 bp, synthetic construct
  source 1..75: mol_type = other DNA
accgaaagtctgacccagcagcgccgcagcaaagccaccggcggtggcggtgacgccctgatgacgaactgctga

SEQ ID NO: 91990 - DNA, 75 bp, synthetic construct
  source 1..75: mol_type = other DNA
ttctcaggcgttgggaacaggcggacatgatctcagtgaagagattggtggaatatcgatgctcttcgctttaga

SEQ ID NO: 91991 - DNA, 75 bp, synthetic construct
  source 1..75: mol_type = other DNA
tggaaatcgataagctaatatccgcttataattcacaagggacgctgtctgctgaagagactaaacaactggagg

SEQ ID NO: 91992 - DNA, 75 bp, synthetic construct
  source 1..75: mol_type = other DNA
tatctttctgcacagtagtgtttctcatctgctgatgaatatgtttgcattcctggtcgtgggaggcgtggcgga

SEQ ID NO: 91993 - DNA, 75 bp, synthetic construct
  source 1..75: mol_type = other DNA
gtcaacaaacataagcaagggcatgatagccgctatcaggctggtgggcaatgcaatcagtctggttcagtgcgt

SEQ ID NO: 91994 - DNA, 75 bp, synthetic construct
  source 1..75: mol_type = other DNA
gcaatggtgggccgattttcttgatgcgaaccgggagaagggtatcagtccgtttgaatacgcaaatgttaacaa

SEQ ID NO: 91995 - DNA, 75 bp, synthetic construct
  source 1..75: mol_type = other DNA
attggaggtatcgatagacctgatagcggcaagattataactaataaaacaatatcttggccggttggtttagct

SEQ ID NO: 91996 - DNA, 75 bp, synthetic construct
  source 1..75: mol_type = other DNA
gcggaagggcaaaagggggcgctgttaacggcggtgctgaaaatgctcgacccgctggtactggtgctgccaggg

SEQ ID NO: 91997 - DNA, 75 bp, synthetic construct
  source 1..75: mol_type = other DNA
ctggagtgatgggaaaaaacccgacagatgtgacgtacttcaggaactaattgattgtggtgatattagtgctaa

SEQ ID NO: 91998 - DNA, 75 bp, synthetic construct
  source 1..75: mol_type = other DNA
attactctggatcaggaagttgatctgtccatcactaataactctcacgttgcgggtattacgttgactcagggt

SEQ ID NO: 91999 - DNA, 75 bp, synthetic construct
  source 1..75: mol_type = other DNA
ggagtatgaacataatctgtcacgagtgccggaagagtgaggttatgcagcgagtgctggcgttttatcagggta

SEQ ID NO: 92000 - DNA, 75 bp, synthetic construct
  source 1..75: mol_type = other DNA
attcattgaaagagttttgtgatgtggccattgtgtttaaggatgataatgcggttagttttcatgaggatgttc

SEQ ID NO: 92001 - DNA, 75 bp, synthetic construct
  source 1..75: mol_type = other DNA
tatcaaccgcgagaatgcgccggtaattgttatcgagccatacatcattgccatggaagacaacgatgtgaaagg

SEQ ID NO: 92002 - DNA, 75 bp, synthetic construct
  source 1..75: mol_type = other DNA
gaggcaagaaagaattcaccctgctgaacaagtcagagatggagttactggctgacgcctatgagatggcaaaca

SEQ ID NO: 92003 - DNA, 75 bp, synthetic construct
  source 1..75: mol_type = other DNA
ggttatatatattaaaagttttaatgaagtaaaatactacagtgtagtaactgatgcgctggcagaatatattat

SEQ ID NO: 92004 - DNA, 75 bp, synthetic construct
  source 1..75: mol_type = other DNA
agtgaaataagaagaactctacagcctttacctgcgaccacatcggccaggaactggaagtcggttattattcat

SEQ ID NO: 92005 - DNA, 75 bp, synthetic construct
  source 1..75: mol_type = other DNA
catttactggacggcagcctgcaagcgatggttgcggataccttaggccagcttccggcgctgaacgcacgactt

SEQ ID NO: 92006 - DNA, 75 bp, synthetic construct
  source 1..75: mol_type = other DNA
gtggacaccattgacgcgtgatggtggacaaatgctgtcacgcaaataccagctctatccaatgacggcagagcg

SEQ ID NO: 92007 - DNA, 75 bp, synthetic construct
  source 1..75: mol_type = other DNA
cacaccttatattacaaggatatatcacttgccatagacaaatatagacatgatgaaaaaaacatatgtctccct

SEQ ID NO: 92008 - DNA, 75 bp, synthetic construct
  source 1..75: mol_type = other DNA
cgcgtctgcaatgcatgagtgctgccgtgattgcgctgacacgatgggaaccccgcattgccctggacgccatcg

SEQ ID NO: 92009 - DNA, 75 bp, synthetic construct
  source 1..75: mol_type = other DNA
acggcaacaaccgcgccatccgtctgccccgtgctctggattttgagggggtgagcgagctggagatcgtccgcg

SEQ ID NO: 92010 - DNA, 75 bp, synthetic construct
  source 1..75: mol_type = other DNA
gaagcctggcgtgatgactacgaagcaggaaaaacacctgtcgaagcatattgtgatgagtggggcgatgaatga

SEQ ID NO: 92011 - DNA, 75 bp, synthetic construct
  source 1..75: mol_type = other DNA
cagccgcaatatcagcagccgcaacaaccagttgcgccgcagccgcagtatcaacagccgcaacaaccggttgca

SEQ ID NO: 92012 - DNA, 75 bp, synthetic construct
  source 1..75: mol_type = other DNA
ccctcatcctaatagtctggcattcgacacggagaaaaaatatctatttctcacggtaaagaatgacgaaacgtt

SEQ ID NO: 92013 - DNA, 75 bp, synthetic construct
  source 1..75: mol_type = other DNA
atacagaaaattttaatactgattccaaacaaacaattgatgtcagattattgaatcaaaatatagacatgatat

SEQ ID NO: 92014 - DNA, 75 bp, synthetic construct
  source 1..75: mol_type = other DNA
ctcggcatcgagcgcgtcactctctaccgatatgtcggtcccaaaggcgagctcagagaccatggtggtcttgcc

SEQ ID NO: 92015 - DNA, 75 bp, synthetic construct
  source 1..75: mol_type = other DNA
agttgatggcgtttccagtgattgagagcggggaatttaatgctaagttcctttttactgatgatgatggtctac

SEQ ID NO: 92016 - DNA, 75 bp, synthetic construct
  source 1..75: mol_type = other DNA
cattgattgttttagatagttattctatacatgcatcagtgaacgttgatgagcagaataaaaaaattactaata

SEQ ID NO: 92017 - DNA, 75 bp, synthetic construct
  source 1..75: mol_type = other DNA
cgattaacatagtgaacggaacaccaattcacgaacgttcccgaaatatcgataacagacgctctctggggcatt

SEQ ID NO: 92018 - DNA, 75 bp, synthetic construct
  source 1..75: mol_type = other DNA
catcaatatggaaggtaaagagagccgtttcggcgtgctggtcagtagcctgtttgcggtcgtgactacggcggc

SEQ ID NO: 92019 - DNA, 75 bp, synthetic construct
  source 1..75: mol_type = other DNA
catcagacttgtctttatcagaatattaatgacgcaattaagttatatcaaaatgatgaaaatttgaacatttag

SEQ ID NO: 92020 - DNA, 75 bp, synthetic construct
  source 1..75: mol_type = other DNA
atgaacgacaatgtcacgctacgggtaaatggccgggagtggaatggctggacatcggtgcgcatcggtgccggt

SEQ ID NO: 92021 - DNA, 75 bp, synthetic construct
  source 1..75: mol_type = other DNA
caactcagggtgacagtggttcagcactttttgtatatgacaaccaaaagaaaaagtgggttgtcgttggaaccg

SEQ ID NO: 92022 - DNA, 75 bp, synthetic construct
  source 1..75: mol_type = other DNA
tgtcagaagccgtggtaaacccgcgtggattggggcgttatcgcggattgaagagacgctggcgggcgaagcggg

SEQ ID NO: 92023 - DNA, 75 bp, synthetic construct
  source 1..75: mol_type = other DNA
tttacgccttttaagaatgcctggctgaaacggctgcgggaagggatgccggagtgcgtcgctgcaccaaaagtt

SEQ ID NO: 92024 - DNA, 75 bp, synthetic construct
  source 1..75: mol_type = other DNA
aatctcccgtattccggttaactacgcaagaaaactggaagcaatgcgccagtcatatcttaatcaggcatatga

SEQ ID NO: 92025 - DNA, 75 bp, synthetic construct
  source 1..75: mol_type = other DNA
atcgcctgcgcgttcaggctgaacaggccgcccgcgagggcggcagcgttcgccacgcgtcgggctatgacctga

SEQ ID NO: 92026 - DNA, 75 bp, synthetic construct
  source 1..75: mol_type = other DNA
gcacgccaccatttgctacccttaccggcatacgctgcagtaccgcacatatcacggaaacggacaacgcctggt

SEQ ID NO: 92027 - DNA, 75 bp, synthetic construct
  source 1..75: mol_type = other DNA
tccggacacgctgagcatcgtccattgccacgaggtggcggccgatcagttactgaatatggtttatgaccgccg

SEQ ID NO: 92028 - DNA, 75 bp, synthetic construct
  source 1..75: mol_type = other DNA
cgacggcgaatcagaatggattcattttacaggcagcggctatctgttacgtaccgatgcgtggtcatacccggt

SEQ ID NO: 92029 - DNA, 75 bp, synthetic construct
  source 1..75: mol_type = other DNA
taattcaacgctcgctattaacaataagttcctgggagagtttacggcagagaataagagtaaggtttcggttaa

SEQ ID NO: 92030 - DNA, 75 bp, synthetic construct
  source 1..75: mol_type = other DNA
ctgagtgaaagtaacccggcttccgcccttaatcatctcaaccatgcattacagctcgatccccgctgtggcgtg

SEQ ID NO: 92031 - DNA, 75 bp, synthetic construct
  source 1..75: mol_type = other DNA
atgattactcgtattcctcgcagttctttctctgtaaatattaataatacagcccagacaaatgaacaccaaaac

SEQ ID NO: 92032 - DNA, 75 bp, synthetic construct
  source 1..75: mol_type = other DNA
atgtcaccgaggccacgaaaaaacagcactgacatagcatgtctttacgaaaagtttgatcgcagaactggcaag

SEQ ID NO: 92033 - DNA, 75 bp, synthetic construct
  source 1..75: mol_type = other DNA
gcgttgtcgcgttttggccttgatgttcagtatgtcgtgttgggaattcattcacctgaaacttataacgatgat

SEQ ID NO: 92034 - DNA, 75 bp, synthetic construct
  source 1..75: mol_type = other DNA
aacctgagcgactactttgctaaagcgcgggatctggcaggaataactccaccagcaggaaaaacaccaccaaca

SEQ ID NO: 92035 - DNA, 75 bp, synthetic construct
  source 1..75: mol_type = other DNA
gacaatggtttgggatagcaaaggtgatattaatcttcttatcatgccattggttggagttttgactctgtgggg

SEQ ID NO: 92036 - DNA, 75 bp, synthetic construct
  source 1..75: mol_type = other DNA
ttgacgtaaatgacgacaagtttgtcgcgtttatggaaaggtttcgcgagtaccagagcgcgctggatgatttac

SEQ ID NO: 92037 - DNA, 75 bp, synthetic construct
  source 1..75: mol_type = other DNA
ggcggaagatgactccggcctggttgtggcgcatcttggcaatggcgcgtcaatctgcgcagttcgcaacggtca

SEQ ID NO: 92038 - DNA, 75 bp, synthetic construct
  source 1..75: mol_type = other DNA
gcgcgacaaacccacccgctattccgcactggtggaagcgtcaaccgcttattcccaaccttctgtcacaggaac

SEQ ID NO: 92039 - DNA, 75 bp, synthetic construct
  source 1..75: mol_type = other DNA
gccgtttccttgacgagataaaaaaacaggggctgattgcaggggagcgccattacgtgcatctctctgctgatg

SEQ ID NO: 92040 - DNA, 75 bp, synthetic construct
  source 1..75: mol_type = other DNA
ccttttttactggacgcgaacctcagcgcgacaaacccacccgctattccgcactggtggaagcgtcaaccgctt

SEQ ID NO: 92041 - DNA, 75 bp, synthetic construct
  source 1..75: mol_type = other DNA
attgatggtcgaagccgatacgtgtctgtatcgctcgaagaaagatgggcgcaaccgtaccagcactatgcgtta

SEQ ID NO: 92042 - DNA, 75 bp, synthetic construct
  source 1..75: mol_type = other DNA
cagtctgtttcgtatgcgtcagatgtggatgttcgtgctttacatgattggggtggcctgcgtctatgacgtgtt

SEQ ID NO: 92043 - DNA, 75 bp, synthetic construct
  source 1..75: mol_type = other DNA
tagagttaaagacagtacctatcaagcatgatgagttgaagaagtatagtataatacgttgccccttcatacacc

SEQ ID NO: 92044 - DNA, 75 bp, synthetic construct
  source 1..75: mol_type = other DNA
gtgatgacaaacagttcacctggcgtggtggcgtaaactacctgttcgacaacggggtaacgccttacttcagct

SEQ ID NO: 92045 - DNA, 75 bp, synthetic construct
  source 1..75: mol_type = other DNA
tggcttccatgaagtgatcgcgcaaaccgggcgcttcaaggtgtatcgcgccattatgacccgccaggcgaagaa

SEQ ID NO: 92046 - DNA, 75 bp, synthetic construct
  source 1..75: mol_type = other DNA
aaaatgcctggtaaagagtttttgtattatttgcatcgcccggatgaatctcatctgcaaaatgctgctcaggtg

SEQ ID NO: 92047 - DNA, 75 bp, synthetic construct
  source 1..75: mol_type = other DNA
aattgctggatggggttgaggttgagtggaaaaccctgaaggatgtttgtgattttaaaaatggatttgcattta

SEQ ID NO: 92048 - DNA, 75 bp, synthetic construct
  source 1..75: mol_type = other DNA
aagaaaccggcagtaaaatccaactttcagcgcctgcaagaggcaaaacagcggaatgctcaggtggttgccgct

SEQ ID NO: 92049 - DNA, 75 bp, synthetic construct
  source 1..75: mol_type = other DNA
ttcaccctgagcagtacccgtaaaacggctgccccgtcagcagaaaccgctacagcacagacggaggttcgctta

SEQ ID NO: 92050 - DNA, 75 bp, synthetic construct
  source 1..75: mol_type = other DNA
tgtctgaagtcgatcctgtcgcgattgttgataacaaaagactgggccatgtattggatgttgcccgccaggtcc

SEQ ID NO: 92051 - DNA, 75 bp, synthetic construct
  source 1..75: mol_type = other DNA
ggtgcacttatcaatggtaccggttcgggtattggctatggccttggtaaaggactttcatggggtgttaatgca

SEQ ID NO: 92052 - DNA, 75 bp, synthetic construct
  source 1..75: mol_type = other DNA
tttagccaggcacagattcctgatgttgttcatcagttgctgctatggaatatggttgacagtctgattaaaaca

SEQ ID NO: 92053 - DNA, 75 bp, synthetic construct
  source 1..75: mol_type = other DNA
ataaaaattattttgcagatgaccagcaaaaaacatcagaatcaacaggcgataccagtgtatcaacagtgaata

SEQ ID NO: 92054 - DNA, 75 bp, synthetic construct
  source 1..75: mol_type = other DNA
atgtcgcgccagtgcacgcattatgggcgttggcctcaacacggttttacgtcacttaaaaaactcaggccgtag

SEQ ID NO: 92055 - DNA, 75 bp, synthetic construct
  source 1..75: mol_type = other DNA
acaggctcgtaaggactggcaaaatgcccgcaaaaaactatctagggcaaaggtgaagaaaccatctgtggttga

SEQ ID NO: 92056 - DNA, 75 bp, synthetic construct
  source 1..75: mol_type = other DNA
cagtacgatcccaaggtttatgacgaatatcgtaaggcaaagcgggcgggtaagggtattcatgaaaatcaggca

SEQ ID NO: 92057 - DNA, 75 bp, synthetic construct
  source 1..75: mol_type = other DNA
tgttgaacttgtacgtctgagcggccgcgagacgttacggcaactggaagagaaaacaggtgcgacaagatatct

SEQ ID NO: 92058 - DNA, 75 bp, synthetic construct
  source 1..75: mol_type = other DNA
tcaaaggtaaaacaaaatctgtgggggccggactctatgcttccgccatgtttgattccggtgcctatatcgacc

SEQ ID NO: 92059 - DNA, 75 bp, synthetic construct
  source 1..75: mol_type = other DNA
caccaccgggacgctgtatgacctggcctcaaacaccaaaatgtacgccacgaacttcgccctgcaaaagctgat

SEQ ID NO: 92060 - DNA, 75 bp, synthetic construct
  source 1..75: mol_type = other DNA
cgttatatgcctgggataacattgacaaaaaatgggtattaactggagttactctgcataattatggagtaaaag

SEQ ID NO: 92061 - DNA, 75 bp, synthetic construct
  source 1..75: mol_type = other DNA
gcactgacgtaaccggtctttacgaaaagtttgatcgcagaactggcagggtttactaccagtataaaaaccctg

SEQ ID NO: 92062 - DNA, 75 bp, synthetic construct
  source 1..75: mol_type = other DNA
acccacgttagtgtggccagttccacttctgcacggtttttccagctcttacggtgtattacctccgctttgtaa

SEQ ID NO: 92063 - DNA, 75 bp, synthetic construct
  source 1..75: mol_type = other DNA
ggatccattaggattatatgaatttaaatcaaaaaatatagatgatattggaatatttgcattggcaatgtgtaa

SEQ ID NO: 92064 - DNA, 75 bp, synthetic construct
  source 1..75: mol_type = other DNA
ataatgggaagtttacaacccttacagtggacaaccttactatagatgacagtgcatttgtgctgcgtgcaaatc

SEQ ID NO: 92065 - DNA, 75 bp, synthetic construct
  source 1..75: mol_type = other DNA
agctgtagttacacttaatggtgcaacctttctgaataatactcctataagtatagataaaggagcaaaagttat

SEQ ID NO: 92066 - DNA, 75 bp, synthetic construct
  source 1..75: mol_type = other DNA
aacagacaaaggtaaggcagaaaaaatcgcttccacagccaatcagcgaatagctgcagcagaagctgaatattt

SEQ ID NO: 92067 - DNA, 75 bp, synthetic construct
  source 1..75: mol_type = other DNA
atgagaaagggattaagaacgggatcatgaatccgaacgaagcccgcgaacgtgaggggatgccgccgcgcgaag

SEQ ID NO: 92068 - DNA, 75 bp, synthetic construct
  source 1..75: mol_type = other DNA
tatgcgtgaccgcctgctcggcagtggcaaacagttacctgaaaacgagcgcgagctgcgccagcagcgggtgat

SEQ ID NO: 92069 - DNA, 75 bp, synthetic construct
  source 1..75: mol_type = other DNA
agtggcgcgtgttttcaggagtcacggcgtacttacgttaatggtcagggagtatgaaaatgcgcttcttcatca

SEQ ID NO: 92070 - DNA, 75 bp, synthetic construct
  source 1..75: mol_type = other DNA
cgcggaaaacagcgttacccacctgttttataactatcagtatgaagtgaatgagcgggcgcgggatgtggaagt

SEQ ID NO: 92071 - DNA, 75 bp, synthetic construct
  source 1..75: mol_type = other DNA
acgacgtgatgccgccgttctgtttaggcgttggcgctacggcgatcggcgattttggtagcgcggcgggggaat

SEQ ID NO: 92072 - DNA, 75 bp, synthetic construct
  source 1..75: mol_type = other DNA
gcaatttcagcgaagcgagccgcgcctttcttaccatgacgatgcgcccgtggctggcgaacttcgaacaacaaa

SEQ ID NO: 92073 - DNA, 75 bp, synthetic construct
  source 1..75: mol_type = other DNA
gaattaccggaatggcgggatattttaccgctccgcccgtgatggctatggctttgaggcggactgggagcgtct

SEQ ID NO: 92074 - DNA, 75 bp, synthetic construct
  source 1..75: mol_type = other DNA
cccgataaaatcctgttcggtggtggctcatattcgccaggctaatcggggcgaggtggcgctggaaaatactca

SEQ ID NO: 92075 - DNA, 75 bp, synthetic construct
  source 1..75: mol_type = other DNA
gtcgccagtggtgatgtatacaactctggctacgggttatttccctctgaacaggctcgtaaggactggcaaaac

SEQ ID NO: 92076 - DNA, 75 bp, synthetic construct
  source 1..75: mol_type = other DNA
gaaagatggcatgatggcggcgggcgtcgtcactactgctgaatggctcgacagcgtgaagggtaagcaggctct

SEQ ID NO: 92077 - DNA, 75 bp, synthetic construct
  source 1..75: mol_type = other DNA
gacagcaaaggcgagcgtcacgtaatagttaacggcgtcctgatggtcaaacagggcaagaggggaagacgatga

SEQ ID NO: 92078 - DNA, 75 bp, synthetic construct
  source 1..75: mol_type = other DNA
ttgagtattttcaataaacacgcacaccaggaacgtccgtacatcgtcatagtagatattgatggaacgatatca

SEQ ID NO: 92079 - DNA, 75 bp, synthetic construct
  source 1..75: mol_type = other DNA
cagcccctgatagggtcgccaccatccgctacaagaagattatccgccgtctggctgataacagcacccgcaacg

SEQ ID NO: 92080 - DNA, 75 bp, synthetic construct
  source 1..75: mol_type = other DNA
tctacggcttccctgaaatagctgatgatttcattgatgaaatggctcatgggtataatcaattattatataaat

SEQ ID NO: 92081 - DNA, 75 bp, synthetic construct
  source 1..75: mol_type = other DNA
atgctggaaaaatctctggcaacacttttcgcgttgttaattttagcaacgctgataaaccgttttctggtatgg

SEQ ID NO: 92082 - DNA, 75 bp, synthetic construct
  source 1..75: mol_type = other DNA
ttaccaaactgaaaggtgtggtggtcactatcgccggtaagttgttggtgcatatgttgtataacttccgtctgg

SEQ ID NO: 92083 - DNA, 75 bp, synthetic construct
  source 1..75: mol_type = other DNA
cggcctaacaatacgctaaagcgtgagtatctgggttcgtatgcgccgaaaattgaattaatcggtaatgccaaa

SEQ ID NO: 92084 - DNA, 75 bp, synthetic construct
  source 1..75: mol_type = other DNA
atgaacatactaaaaaaacttatgcagcgtctgtgcggttgcggaaagcatgatgaccgtgaacacggggagtta

SEQ ID NO: 92085 - DNA, 75 bp, synthetic construct
  source 1..75: mol_type = other DNA
ggcatcggtgttcttccggttgatacgtacggcctgctgtcagcgttttgaggggtgggaaccatgtcaaggctg

SEQ ID NO: 92086 - DNA, 75 bp, synthetic construct
  source 1..75: mol_type = other DNA
gaattgaatatacggcggcctctctggatgatcttaaccgggcgatcaatgatgcggagtcagtgctggggacaa

SEQ ID NO: 92087 - DNA, 75 bp, synthetic construct
  source 1..75: mol_type = other DNA
tgaatatcatttctgtttcgtcatcccggactcactcgtcaattaagattgataaggaccgttatctctccggga

SEQ ID NO: 92088 - DNA, 75 bp, synthetic construct
  source 1..75: mol_type = other DNA
tggtgtcccgttgccgtttaccatgatttacctgctgctgtttccgtatccgtcaaaaacaacattctgggtgtg

SEQ ID NO: 92089 - DNA, 75 bp, synthetic construct
  source 1..75: mol_type = other DNA
cagtaaggcagaccgccttatcacggaacgtctggtacaggcactgggcctggtggatatccgggtgccggacca

SEQ ID NO: 92090 - DNA, 75 bp, synthetic construct
  source 1..75: mol_type = other DNA
atggcaaaccgcaaacaacagcgcgcatacgctgcgcgtcgtcacatccagactgaaatcaaccgcagactttcc

SEQ ID NO: 92091 - DNA, 75 bp, synthetic construct
  source 1..75: mol_type = other DNA
aacagtctggatgaactgcaaacgctggcgattgatgttgattatctcgatcccggtaacgggcctgacggcgat

SEQ ID NO: 92092 - DNA, 75 bp, synthetic construct
  source 1..75: mol_type = other DNA
tttccataacgaaaacccggtgcgtggaatacgtaagctcaaggtcaggaatacagaaatggcctttctttcaga

SEQ ID NO: 92093 - DNA, 75 bp, synthetic construct
  source 1..75: mol_type = other DNA
ggttcaggtggcggtggcgcatacgatgccggttatagcggaaccagtatgacaggcgggaaaggtgctgctggg

SEQ ID NO: 92094 - DNA, 75 bp, synthetic construct
  source 1..75: mol_type = other DNA
ttgccattctgtgtctttctactggtgcccgatggagtgaagcatcggaactacgtggagagcatatcgttggca

SEQ ID NO: 92095 - DNA, 75 bp, synthetic construct
  source 1..75: mol_type = other DNA
cggacttaccgaaagggcaggccacccatgtcatgcgtcatacattcgctacacatttcatgatgaatggcggaa

SEQ ID NO: 92096 - DNA, 75 bp, synthetic construct
  source 1..75: mol_type = other DNA
tgaatgaacgcaatctgatggtgacgcaaatgggccgcagtgcctttgcggtgctgctgttccaggatatcgcgg

SEQ ID NO: 92097 - DNA, 75 bp, synthetic construct
  source 1..75: mol_type = other DNA
gtttctgatacggtgctttcgttgataaaaacccgaaaaaccgggctattgtaccaggctgattacatccgtttt

SEQ ID NO: 92098 - DNA, 75 bp, synthetic construct
  source 1..75: mol_type = other DNA
gcaccaccgaaaattgcccgctggcagcgtaaacgtattcagcatcaggattttgagcggcggctacgtgagatg

SEQ ID NO: 92099 - DNA, 75 bp, synthetic construct
  source 1..75: mol_type = other DNA
caaaccgtccccaaaagatgagtatattgcatatgctattaacattcctgactatgagctggcagccgatgtata

SEQ ID NO: 92100 - DNA, 75 bp, synthetic construct
  source 1..75: mol_type = other DNA
tttttaccgcgctgatttatctcgtggcgtcgctgttcttccggctgatacgtacggcctgccgtcagcgttttg

SEQ ID NO: 92101 - DNA, 75 bp, synthetic construct
  source 1..75: mol_type = other DNA
gcgcacacccaaattatggtgggctggacgggggcaccgaaaggtgcgccggtttccgataacgccggttacgcc

SEQ ID NO: 92102 - DNA, 75 bp, synthetic construct
  source 1..75: mol_type = other DNA
ttgccaatagcccatcggcttattacttaatgggttatagtgcgattcccttttatatattttctgcattgttat

SEQ ID NO: 92103 - DNA, 75 bp, synthetic construct
  source 1..75: mol_type = other DNA
aactgacggagcgtgtgctggtcagtactgacggcagtgtgtcgagtgttgaagctgtagcggaacccgatgaac

SEQ ID NO: 92104 - DNA, 75 bp, synthetic construct
  source 1..75: mol_type = other DNA
gggcttgatatgcagataggggaaggaggtcaggggctgtcaggaggacagcgtcagatggtcgctctgacgaga

SEQ ID NO: 92105 - DNA, 75 bp, synthetic construct
  source 1..75: mol_type = other DNA
cgggtgccgggattggcctcccgcttaagtctaaggcgatacagacgccgctcgcgtcttttttttgtatcggcg

SEQ ID NO: 92106 - DNA, 75 bp, synthetic construct
  source 1..75: mol_type = other DNA
cgggcgagctgctgcaacattacggcactgacgagcagaaagatcactatctgccgcgtctggcgcgtggtcagg

SEQ ID NO: 92107 - DNA, 75 bp, synthetic construct
  source 1..75: mol_type = other DNA
tcaccgttcatccttagtgaaatgggctacagcccggcagttattggtttaagttatgtcccgcaaactatcgcg

SEQ ID NO: 92108 - DNA, 75 bp, synthetic construct
  source 1..75: mol_type = other DNA
cgtcgccacttcccgctgaacgtaccgttccagaacggaccgacgcgcggtaaagatgtcttcgtaccgatcgat

SEQ ID NO: 92109 - DNA, 75 bp, synthetic construct
  source 1..75: mol_type = other DNA
taagtctaaggcgatacagacgccgctcgcgtcttttttttgtatcggcgtacacgcacacctctacaatggtgg

SEQ ID NO: 92110 - DNA, 75 bp, synthetic construct
  source 1..75: mol_type = other DNA
aacacgtgcagtcgcttacagcacaactgcgactgggaccggcagacattctggagtcagatgagaatggcatta

SEQ ID NO: 92111 - DNA, 75 bp, synthetic construct
  source 1..75: mol_type = other DNA
cgctgcgtgagcgatgcccgcgttttgaggatcgtgttggtggcgcggcgcagtttaaggcgatccctgatgccg

SEQ ID NO: 92112 - DNA, 75 bp, synthetic construct
  source 1..75: mol_type = other DNA
gaccggttttacaaatcagtaagcaggtcagtgcgtacgcggctgacgattcgtttccagacggttctgcacacc

SEQ ID NO: 92113 - DNA, 75 bp, synthetic construct
  source 1..75: mol_type = other DNA
gcgtttctcgacggcccggtagaagaagcctgccggatggcgaatgatttccagattactcatgagctggcggat

SEQ ID NO: 92114 - DNA, 75 bp, synthetic construct
  source 1..75: mol_type = other DNA
cgcttccggcggagctggcggtgatgctggggaggctggagcgggaactgcgtgcgggtgcggtgagtgcggaga

SEQ ID NO: 92115 - DNA, 75 bp, synthetic construct
  source 1..75: mol_type = other DNA
cccgctgcaggggcgatatatcactcaggatccgattgggctgaaagggggatggaatttttatcagtatccgtt

SEQ ID NO: 92116 - DNA, 75 bp, synthetic construct
  source 1..75: mol_type = other DNA
gagaacccgcatcagctgcagcagcttatccgcctgccggggcagcagtatgatgaggagtccggcctgtattac

SEQ ID NO: 92117 - DNA, 75 bp, synthetic construct
  source 1..75: mol_type = other DNA
atgactggcagcgactggctaaggtgaaggatctgacgccgggcgagatgacggctgaaccctacgatgataact

SEQ ID NO: 92118 - DNA, 75 bp, synthetic construct
  source 1..75: mol_type = other DNA
tacttaagcgcccgtaacgtctccaacctgttacgccagaccgcgattaccggcatcctcgcggtaggaatggtg

SEQ ID NO: 92119 - DNA, 75 bp, synthetic construct
  source 1..75: mol_type = other DNA
ctgtcagggagtttatgaccagcgctacgttactggcttttgttgatctgccttttattctgcttttcatcagtg

SEQ ID NO: 92120 - DNA, 75 bp, synthetic construct
  source 1..75: mol_type = other DNA
tttgggaaattcctgctgaaagaatgaaaatgcgcaggtcacatcttgttccattgtcgactcaagcgttagatt

SEQ ID NO: 92121 - DNA, 75 bp, synthetic construct
  source 1..75: mol_type = other DNA
cctgtccgatcatgaaatcaggaccgtcctggcgcggctggaggacatcccggaagaccagcggattgagtccgg

SEQ ID NO: 92122 - DNA, 75 bp, synthetic construct
  source 1..75: mol_type = other DNA
ttggcagcattacctgacacctgtcagaataacaaagcagcatggctgcaacgcaaaaatgagctggctgcggcc

SEQ ID NO: 92123 - DNA, 75 bp, synthetic construct
  source 1..75: mol_type = other DNA
cgcctcggggatggcgtcgcagtcccacctgcgcaccacctacttttcaacaccctcaacgctggcacatggcgc

SEQ ID NO: 92124 - DNA, 75 bp, synthetic construct
  source 1..75: mol_type = other DNA
atatgaatatgatatccccgtaagcacaagtggtaacgtatattggaaagtaataacggattatggtggcaacag

SEQ ID NO: 92125 - DNA, 75 bp, synthetic construct
  source 1..75: mol_type = other DNA
taaaaacgccattccggctgcttctgcaatgaccattaaccgcgtggccacaacggcgattaatcagtcttcgtc

SEQ ID NO: 92126 - DNA, 75 bp, synthetic construct
  source 1..75: mol_type = other DNA
gggcatccagttgctgcagatcgccatggcccacagtaacgagatggcacgtgcacaggatcgcattaacgaaat

SEQ ID NO: 92127 - DNA, 75 bp, synthetic construct
  source 1..75: mol_type = other DNA
gtccgccgtccggtggagcgggaaagtcagacacattatctgacagtgaaggatatccagggagagtttcgtttc

SEQ ID NO: 92128 - DNA, 75 bp, synthetic construct
  source 1..75: mol_type = other DNA
ttcgatttctattcggaaaaaatgcctgatgcaaatattgctattgtgcctaatggtttttgttctgaatcgtat

SEQ ID NO: 92129 - DNA, 75 bp, synthetic construct
  source 1..75: mol_type = other DNA
accgggctatcccacatgtggtgcgcgagtccgttgatgccatccggcgctgggagcctcgctgccagcttatgt

SEQ ID NO: 92130 - DNA, 75 bp, synthetic construct
  source 1..75: mol_type = other DNA
aaggaatatgcttcgagggcagcgacgacggaaaaccagcttttacttctgcaaaatcaacttgatgccatttct

SEQ ID NO: 92131 - DNA, 75 bp, synthetic construct
  source 1..75: mol_type = other DNA
tgttgaacttgtacgtctgagcggtcgcgagacgttacgggctctggaggctaaaaccggtgcatcaaggtatta

SEQ ID NO: 92132 - DNA, 75 bp, synthetic construct
  source 1..75: mol_type = other DNA
ccgttgtaccaacagccgcaacctgttgaacagcagcctgttgtggagcctgaacccgttgtagaagagacaaaa

SEQ ID NO: 92133 - DNA, 75 bp, synthetic construct
  source 1..75: mol_type = other DNA
ttctttaaagagtttgaatcaattaacagtgtaatacttccattagtaatatttgattttatagaccgaaagccg

SEQ ID NO: 92134 - DNA, 75 bp, synthetic construct
  source 1..75: mol_type = other DNA
ctggaatgcctgccgcgccgccatgcttcagtccggaaactttcgggaaaacaagaattcgtcaaccaataattt

SEQ ID NO: 92135 - DNA, 75 bp, synthetic construct
  source 1..75: mol_type = other DNA
tgatagggttttccagtacatcatatttcatcaggcttttcggaaaacattttggtgttacaccaaaacagttcc

SEQ ID NO: 92136 - DNA, 75 bp, synthetic construct
  source 1..75: mol_type = other DNA
ggtaaaaccgctccttgaggaagtgagaacgtttgtccgtgaaaacccggagctcgttaagaccattgctaaaat

SEQ ID NO: 92137 - DNA, 75 bp, synthetic construct
  source 1..75: mol_type = other DNA
gtaaaaacggctgtggtaaatctaccctgctggcattgctgaaaaatgaaatcagcgccgacggcggcagctaca

SEQ ID NO: 92138 - DNA, 75 bp, synthetic construct
  source 1..75: mol_type = other DNA
gttaactcagatcagatgcaccgagtctgcttagaagctaatcgctatttagataaatatgacgcgatggcgaaa

SEQ ID NO: 92139 - DNA, 75 bp, synthetic construct
  source 1..75: mol_type = other DNA
aaatttcatcactttctgctggtgcaaatattaataatattaagccggcaagctttgatttgataaatataccaa

SEQ ID NO: 92140 - DNA, 75 bp, synthetic construct
  source 1..75: mol_type = other DNA
tgattggaatttccagtgcatcttattttattaggatttttaataaacattatggtgttacaccaaagcaatttt

SEQ ID NO: 92141 - DNA, 75 bp, synthetic construct
  source 1..75: mol_type = other DNA
gaatctgaccggaccgcaactgacagcatgccaccctccgctgccctgagcggtatacgctgcagcaccgcacat

SEQ ID NO: 92142 - DNA, 75 bp, synthetic construct
  source 1..75: mol_type = other DNA
atgcttaaagttgacgcaattactttttttggcagcaaaacaaagcttgccaatgccgcaggagtgaaactggca

SEQ ID NO: 92143 - DNA, 75 bp, synthetic construct
  source 1..75: mol_type = other DNA
ggccagtagtgcgcctaatgttttcaaaacattcttcagagcattaagcccttacgactacacactgtattgcag

SEQ ID NO: 92144 - DNA, 75 bp, synthetic construct
  source 1..75: mol_type = other DNA
atacactgtacaagggtaaacgcccggcagaggtcccccgaaatatggcttcgctgtgggcagattacactttcc

SEQ ID NO: 92145 - DNA, 75 bp, synthetic construct
  source 1..75: mol_type = other DNA
gatccggtctgtggtttcgacaataccgaactgcttgtctcggaagtcacgtttactcaggaccagaacggcacc

SEQ ID NO: 92146 - DNA, 75 bp, synthetic construct
  source 1..75: mol_type = other DNA
gatcaaaatttaccattgcgaaagcttgttctggaaaagctggagatgaaatggtctccagagcaaatatcagga

SEQ ID NO: 92147 - DNA, 75 bp, synthetic construct
  source 1..75: mol_type = other DNA
tcgccaacgcgtaaagccaatgccatcgagagaggaattgcttaagagaaatagtttcggttctgttaatgacaa

SEQ ID NO: 92148 - DNA, 75 bp, synthetic construct
  source 1..75: mol_type = other DNA
atggcaacaatggacagtaaatatattcagcacctcaggaaaataagtgctgtgctgctcaggctgataagcaga

SEQ ID NO: 92149 - DNA, 75 bp, synthetic construct
  source 1..75: mol_type = other DNA
aaagtttctttccagccaacaaactattgatcttgttcatgaattaatcaacacccagaatttgggtgttgaccc

SEQ ID NO: 92150 - DNA, 75 bp, synthetic construct
  source 1..75: mol_type = other DNA
atgagaggacttgcatacaatcccggcattcttccggcagaaatgattattcgccagcgcgtaaagccaatgcca

SEQ ID NO: 92151 - DNA, 75 bp, synthetic construct
  source 1..75: mol_type = other DNA
gcggaaggtatcgccgaaattgtggcggcgggtggtcaggctggtatcgcccgtgacgagctgatgcagtttact

SEQ ID NO: 92152 - DNA, 75 bp, synthetic construct
  source 1..75: mol_type = other DNA
ctgaatagtttgaatgaacagcctatacaatgtttagtgcagataaagtcttctgacggagaaaagaaaggtgta

SEQ ID NO: 92153 - DNA, 75 bp, synthetic construct
  source 1..75: mol_type = other DNA
taccccggcttgatattacgggtatgtgggtattttccctgggtgtctggtttcatatcgtcgcccgtcttgttt

SEQ ID NO: 92154 - DNA, 75 bp, synthetic construct
  source 1..75: mol_type = other DNA
gtttgtcgcaacagctggtggtcagtgtcgctgcacacctgttgttacggcatgaatgcagattaccaaatcacc

SEQ ID NO: 92155 - DNA, 75 bp, synthetic construct
  source 1..75: mol_type = other DNA
tcaccggggcgtattatcagttgaataatgacaactttgcccctggaaaaacggcggctgattatgagttttcaa

SEQ ID NO: 92156 - DNA, 75 bp, synthetic construct
  source 1..75: mol_type = other DNA
tcaccacccggccccggcgccgtgcaccgttatgggctgtgacggatgaaacgatgcggaactggctgaaacagg

SEQ ID NO: 92157 - DNA, 75 bp, synthetic construct
  source 1..75: mol_type = other DNA
gaacagcttttattccagaccccgacagggtgaaaacgattgagctaatttttaaactcaggatggaaaggcgat

SEQ ID NO: 92158 - DNA, 75 bp, synthetic construct
  source 1..75: mol_type = other DNA
tatcgcaacgctgatccctgtattgaatggtgttcatcaagctggtctgagtaccacaatacaattcactcgcgc

SEQ ID NO: 92159 - DNA, 75 bp, synthetic construct
  source 1..75: mol_type = other DNA
ggccgactcaataacgaaaaggcacggaatggcgaactcaaacgccgtcttaagcaactgaaagcaggaaattaa

SEQ ID NO: 92160 - DNA, 75 bp, synthetic construct
  source 1..75: mol_type = other DNA
cggcctagcaatacactaaaacgtgagtatctgggttcgtatgcaccgaaactagaattaattggtaatgcgaaa

SEQ ID NO: 92161 - DNA, 75 bp, synthetic construct
  source 1..75: mol_type = other DNA
atgctcaaacccgacagcctgcgcagggcgctgactgatgccgttacggtgctgaaaacaagccccgagatgctg

SEQ ID NO: 92162 - DNA, 75 bp, synthetic construct
  source 1..75: mol_type = other DNA
atgagcaccgataaacaagtttacccactgtattacgaagcaaaaaatgacaaagtaagaaaacgcctcggtatt

SEQ ID NO: 92163 - DNA, 75 bp, synthetic construct
  source 1..75: mol_type = other DNA
tgaacggctgaagtatgcactggaggcgggtttactggtgactgcactggacggcctgttctggtttggcagtca

SEQ ID NO: 92164 - DNA, 75 bp, synthetic construct
  source 1..75: mol_type = other DNA
tgacgtggtgcagacgggcggtgggtctggtggtgatggtggcgacgtttatctcgctggtcgctgccgggtgga

SEQ ID NO: 92165 - DNA, 75 bp, synthetic construct
  source 1..75: mol_type = other DNA
ctcattaccgcgatgtggcacatgcctggtcgctgggcgtgaagaaatatcctgccgtggtgtttgatgacagtg

SEQ ID NO: 92166 - DNA, 75 bp, synthetic construct
  source 1..75: mol_type = other DNA
atattttcgatggtgttggatttcgtggtgtacggctttattcttccgataatatgtatcctgatagccagcaag

SEQ ID NO: 92167 - DNA, 75 bp, synthetic construct
  source 1..75: mol_type = other DNA
tgcaggggcttatataggtgataaagtacattcatgggcaacgactgcgacggttagtccctccatgtctccctc

SEQ ID NO: 92168 - DNA, 75 bp, synthetic construct
  source 1..75: mol_type = other DNA
aggctttgagcggggatattgattcggctaagctggacgcatggattgctggattacctctgagtgcgctggagg

SEQ ID NO: 92169 - DNA, 75 bp, synthetic construct
  source 1..75: mol_type = other DNA
gttttggctctgtcctgctgctctggcttttttctgtaggtgtgggacaggtaataaagatggttcgtactgctt

SEQ ID NO: 92170 - DNA, 75 bp, synthetic construct
  source 1..75: mol_type = other DNA
gcgcgggctgaatacggcgcgtttttcccgcacattaagcatcctcaccgccagcagtgttccgctgctggaagg

SEQ ID NO: 92171 - DNA, 75 bp, synthetic construct
  source 1..75: mol_type = other DNA
acaggcgtcagaacataatctgtagcgagtgccgggaaagcgaagttatgcagcgtatactaacgttctattggg

SEQ ID NO: 92172 - DNA, 75 bp, synthetic construct
  source 1..75: mol_type = other DNA
aggcctgcggatgatcctgatgggcttgtgatatctgatgatgtgaagctggcgcttctgctacttgtcagccat

SEQ ID NO: 92173 - DNA, 75 bp, synthetic construct
  source 1..75: mol_type = other DNA
tactgaagcagttcaaaaatcagaataaggttctggttacaaaaggtaaatcttcgtttgttcctgaatcagagc

SEQ ID NO: 92174 - DNA, 75 bp, synthetic construct
  source 1..75: mol_type = other DNA
ggatattatggcttaggtgtttcattattcattgttacggttgcattctctgccttattaattttgttagttggt

SEQ ID NO: 92175 - DNA, 75 bp, synthetic construct
  source 1..75: mol_type = other DNA
taactttggccgtactgctgccacagtgctgaccgaagaaatctgcaacccggtactgacgcaggccgggacgga

SEQ ID NO: 92176 - DNA, 75 bp, synthetic construct
  source 1..75: mol_type = other DNA
ctgcaatttcgggacgttacactgtctctgcaccttataaagcgggtgccgggcgtggaaacccgaaattcaata

SEQ ID NO: 92177 - DNA, 75 bp, synthetic construct
  source 1..75: mol_type = other DNA
gcgcaaattatggcttttttgatggggtccagcgaggcgctgaaagatcgctatgattttatgaagtttcaggtc

SEQ ID NO: 92178 - DNA, 75 bp, synthetic construct
  source 1..75: mol_type = other DNA
atgaccggggccttttacttacagggagcaacagatatgccgggttgtacatcacgtttattgcccgaaggccct

SEQ ID NO: 92179 - DNA, 75 bp, synthetic construct
  source 1..75: mol_type = other DNA
cattactttattcccggaacatactcggaaaatgaaattgccagcattttccgaaacggtatcggtaagcttgaa

SEQ ID NO: 92180 - DNA, 75 bp, synthetic construct
  source 1..75: mol_type = other DNA
gcagcagggtgagagcctgaacggacagcttgaacagtatgaaatatttgattatccgggaaggtacaaggatga

SEQ ID NO: 92181 - DNA, 75 bp, synthetic construct
  source 1..75: mol_type = other DNA
gacggcacgctggcaggctctaacgtctctttatatgaagaagtgtgcgccagatatccgcaggtggcatttcag

SEQ ID NO: 92182 - DNA, 75 bp, synthetic construct
  source 1..75: mol_type = other DNA
tgaagatgacgaagagtatgaagatgaaaaccacggcaaacagcatgaatcacgccgtgcccgtattcttcgcgg

SEQ ID NO: 92183 - DNA, 75 bp, synthetic construct
  source 1..75: mol_type = other DNA
gtctataacgacggcaatgattttctttccaaatgtgtaagaacctcagattactattcgacaggaactgacctt

SEQ ID NO: 92184 - DNA, 75 bp, synthetic construct
  source 1..75: mol_type = other DNA
ggttctgcggcttaaacgcctgggcctgtcaaaaacgttccgccgtctggttgtcacactcatccgacgttatgg

SEQ ID NO: 92185 - DNA, 75 bp, synthetic construct
  source 1..75: mol_type = other DNA
tgggccgcagggtggcaaaacgggtatggcggcgtgaacgggacctgacgggctggatgtcgctgtcatggaaac

SEQ ID NO: 92186 - DNA, 75 bp, synthetic construct
  source 1..75: mol_type = other DNA
aacgacagaacccgcatccagacggtttatcagccggggagcttcacgccactcatcagagttgaaactgccacc

SEQ ID NO: 92187 - DNA, 75 bp, synthetic construct
  source 1..75: mol_type = other DNA
tccttcacatctggctctgtagacagggtggtgatcacttctggagtgaatccagattaaacatctcattgctga

SEQ ID NO: 92188 - DNA, 75 bp, synthetic construct
  source 1..75: mol_type = other DNA
tgaaaatactgaagacataacagaaagtgtgaaggcccctggtgcggatatagcaaccgaggtaatgactccaac

SEQ ID NO: 92189 - DNA, 75 bp, synthetic construct
  source 1..75: mol_type = other DNA
cgccaccatttgccgcccttaccggcatacgctgcagtaccgctcatatcacagaaagggacaacgcctggctgt

SEQ ID NO: 92190 - DNA, 75 bp, synthetic construct
  source 1..75: mol_type = other DNA
catcaccgttaacgctgctggtaacgcggaaaacactgtcaaaaacatcgcatttaactatattgtgaggcttgc

SEQ ID NO: 92191 - DNA, 75 bp, synthetic construct
  source 1..75: mol_type = other DNA
gcagtccgcatgccgtatcgggccttgggttctaacctgttgcgtagatttatgcagcggactgcctttctccca

SEQ ID NO: 92192 - DNA, 75 bp, synthetic construct
  source 1..75: mol_type = other DNA
tttacaggcagcggctatctgttacgtaccgatgcgtggtcatacccggttctgcggcttaagcgcctgggcctg

SEQ ID NO: 92193 - DNA, 75 bp, synthetic construct
  source 1..75: mol_type = other DNA
gagaatcagcgtttacgtctctcgcctgccgggcataactttttacgctatagccaacaaattctcgcgttagtg

SEQ ID NO: 92194 - DNA, 75 bp, synthetic construct
  source 1..75: mol_type = other DNA
tgcaatggctggctaacatttctggccgtgatgacattgacgatatagacggcggtgagattcgtgagctggcac

SEQ ID NO: 92195 - DNA, 75 bp, synthetic construct
  source 1..75: mol_type = other DNA
ttactcccttcgtgttgttgatgaatctgaccgggcatcagcagagcgcacgccaccatctgcggcccttaccgg

SEQ ID NO: 92196 - DNA, 75 bp, synthetic construct
  source 1..75: mol_type = other DNA
atgatgaaactggccctgacgctggaagctgacagcgttaacgtgcgggcgctgaacatggggcgcattgtcgtt

SEQ ID NO: 92197 - DNA, 75 bp, synthetic construct
  source 1..75: mol_type = other DNA
ggcatgccggaatatctcggcgcattactctcggccagcctgtctcattcggcggacatgttcagaaaactgtat

SEQ ID NO: 92198 - DNA, 75 bp, synthetic construct
  source 1..75: mol_type = other DNA
atgacctacaaatacaaccccttctggcagcgacgtattcgtgagacggtgcggcacgcgctggatgttcatccc

SEQ ID NO: 92199 - DNA, 75 bp, synthetic construct
  source 1..75: mol_type = other DNA
actggtggcaatggaaattttgtgattcgtcaacctgacgggctaatcattcagatggttactgtaagtataagc

SEQ ID NO: 92200 - DNA, 75 bp, synthetic construct
  source 1..75: mol_type = other DNA
cgttatggcgtcagtctcattcatctggacgccggcgcagaatgtctgccggggttccccactttcgactggtaa

SEQ ID NO: 92201 - DNA, 75 bp, synthetic construct
  source 1..75: mol_type = other DNA
atcgccagcaccaccgacaccgccggtggcaccgagcgtcagccgaaggacttctcgaagctggcgtcaaacaag

SEQ ID NO: 92202 - DNA, 75 bp, synthetic construct
  source 1..75: mol_type = other DNA
tacggatttaaaaaaggtgtggattttgaggctgtagaaaatttgtactttgattcccagaaacgggggagccaa

SEQ ID NO: 92203 - DNA, 75 bp, synthetic construct
  source 1..75: mol_type = other DNA
cctgtgtgccattaaccacaatggtccaggacgctactgcgcatctggatgttggtcagcagcgactgaacctga

SEQ ID NO: 92204 - DNA, 75 bp, synthetic construct
  source 1..75: mol_type = other DNA
tgcagaaagcctggggttgaacacccgtcaaatcattgaaggtgtttgtcttgatccgcgtatcggcaatcatta

SEQ ID NO: 92205 - DNA, 75 bp, synthetic construct
  source 1..75: mol_type = other DNA
cagtaccggggactatcgcgctgtttggctgtttcttaatcatgatcatcatcctcgccgtcctggcgctgattg

SEQ ID NO: 92206 - DNA, 75 bp, synthetic construct
  source 1..75: mol_type = other DNA
atcctcagaggtgaggatgcagtggttgccattgatgcaggagcagatgccatccaggtgtctaatcatggtggt

SEQ ID NO: 92207 - DNA, 75 bp, synthetic construct
  source 1..75: mol_type = other DNA
aaagctatcagcgatacccagggacgatttgctgtcgcgcatggatttcgttccagcttccgtgactggtgcagt

SEQ ID NO: 92208 - DNA, 75 bp, synthetic construct
  source 1..75: mol_type = other DNA
atggccttactcactgataccaaagcccgtcatatcaaacccgatgacaaaccgatttctcatggtggtgtcacc

SEQ ID NO: 92209 - DNA, 75 bp, synthetic construct
  source 1..75: mol_type = other DNA
cagcaatttttgcaatcagacaaaatacgttttaatgccacgttagataaaaaagaagcctaccggaatgctgat

SEQ ID NO: 92210 - DNA, 75 bp, synthetic construct
  source 1..75: mol_type = other DNA
tgaagcctgtcgccggaggctggcagcagacataaaatgtgcccgtcagttaactgtaacaaaaaatgatacacc

SEQ ID NO: 92211 - DNA, 75 bp, synthetic construct
  source 1..75: mol_type = other DNA
cgattcatacgtcaccagcatattctgctaataagccggaagggttaacggacggtacagtttattcactctata

SEQ ID NO: 92212 - DNA, 75 bp, synthetic construct
  source 1..75: mol_type = other DNA
aacgatacagccgtaccgcgattaacaacatcaaaaaattctggtcgctgacagcgaaaggctgcatgttcggca

SEQ ID NO: 92213 - DNA, 75 bp, synthetic construct
  source 1..75: mol_type = other DNA
ttagccagatgggccgggtactttacgaaacccaggttcccgccgggccattccgcattcaggatatcggcgact

SEQ ID NO: 92214 - DNA, 75 bp, synthetic construct
  source 1..75: mol_type = other DNA
tatggtttcccaccgctatataatgatttccgcaaatatctggctacgttgctggcaaataatggaatgcgtggt

SEQ ID NO: 92215 - DNA, 75 bp, synthetic construct
  source 1..75: mol_type = other DNA
ggaatgaatccaccgggatgtgggtcgttacctcagaactgacccgtaaaggcggtcgtcgcccccggcaaatca

SEQ ID NO: 92216 - DNA, 75 bp, synthetic construct
  source 1..75: mol_type = other DNA
gtccggcggtgaagacggcggcagtgtggtgttcccgccggtgctggtgcagatgctcgaccggctggaaagtga

SEQ ID NO: 92217 - DNA, 75 bp, synthetic construct
  source 1..75: mol_type = other DNA
ttgctgactcccttgtcaaaggctgggaaaccagaattccggcaatgacgtgcacggagtgggatcaattccggt

SEQ ID NO: 92218 - DNA, 75 bp, synthetic construct
  source 1..75: mol_type = other DNA
tgcgctctaccaactgagccatatcagcacgctaaatttgatgcctggcagttccctactctcgcatggggagac

SEQ ID NO: 92219 - DNA, 75 bp, synthetic construct
  source 1..75: mol_type = other DNA
tcgggatacggtactgaacggtgctcaggtcaacggcaacaggattatcgccgatgtgggccacgacctgctgat

SEQ ID NO: 92220 - DNA, 75 bp, synthetic construct
  source 1..75: mol_type = other DNA
ctgtgctggatggcactccgggccaggcattccagatggtgaaagatgcactttcccctgccaaagatacgctga

SEQ ID NO: 92221 - DNA, 75 bp, synthetic construct
  source 1..75: mol_type = other DNA
tgaaccagggagatattcgccctgagaaaatctctattcacggtgcgtcgccctaccagaatgcctatttgattg

SEQ ID NO: 92222 - DNA, 75 bp, synthetic construct
  source 1..75: mol_type = other DNA
gaggccagggcgatggaatggaatgagattgattttaaacgcaagatctggaccatcccaccgggtcgaatgaaa

SEQ ID NO: 92223 - DNA, 75 bp, synthetic construct
  source 1..75: mol_type = other DNA
tttgacatcatttttacgcaaaacaaaggctatcagcgatacccagggacgatttgcggtcgcacatggatttcg

SEQ ID NO: 92224 - DNA, 75 bp, synthetic construct
  source 1..75: mol_type = other DNA
ttcccgttcctgtttatcaccatcgcctgtggtgcggtgtctggcttccatgcgctgatctcttccggcaccacg

SEQ ID NO: 92225 - DNA, 75 bp, synthetic construct
  source 1..75: mol_type = other DNA
gtggcggaagaacgcagcaaaattacgccggtcactgcgattaaggtgacgccgacatccggtacggtggcaaaa

SEQ ID NO: 92226 - DNA, 75 bp, synthetic construct
  source 1..75: mol_type = other DNA
ctgttgtcgttggtaaacattcatgctgtgaatgaaaatggtgataattcagtcactatcgataaaattaatcag

SEQ ID NO: 92227 - DNA, 75 bp, synthetic construct
  source 1..75: mol_type = other DNA
tagcattgtccagggttcagccggggtacgcattggtgcccccaccggcgtggcctgttcggtgtgccccggcgg

SEQ ID NO: 92228 - DNA, 75 bp, synthetic construct
  source 1..75: mol_type = other DNA
tgactgtggagcgccggtatttgaagttttacgttgctccgggtgtggttcagcttatttgtctgccaaagagga

SEQ ID NO: 92229 - DNA, 75 bp, synthetic construct
  source 1..75: mol_type = other DNA
ctgacatgtgcaatgattggattagtttgtggtcgaatggtttcgttaattatttcatattattgtgcaaaagaa

SEQ ID NO: 92230 - DNA, 75 bp, synthetic construct
  source 1..75: mol_type = other DNA
caggctaaacgagtatggattcgtagaaaatttagactacattctattttcgccaaatttggcgaaaactccagg

SEQ ID NO: 92231 - DNA, 75 bp, synthetic construct
  source 1..75: mol_type = other DNA
cccgacatcagcataccgtcacgctgtatgccagagggctgacctgcgaagcagacaccctcggcagttgtggtt

SEQ ID NO: 92232 - DNA, 75 bp, synthetic construct
  source 1..75: mol_type = other DNA
aactcgaggcgaaaggcttttaccggagggcggcggcgcgatggggtgaagtcatgctgctggtggagacagaca

SEQ ID NO: 92233 - DNA, 75 bp, synthetic construct
  source 1..75: mol_type = other DNA
gtagacttcctgaacggcgacccggaccagccgataatcatggggcggacgtaccatgaggacaaccgttcgccg

SEQ ID NO: 92234 - DNA, 75 bp, synthetic construct
  source 1..75: mol_type = other DNA
cggcgaagagtttattggttcggatagtgtatgtttggtgctgggggataatattttctggggtcagggtttctc

SEQ ID NO: 92235 - DNA, 75 bp, synthetic construct
  source 1..75: mol_type = other DNA
ggctggggcagtaaaaaaagcgacaggagtgggtgataaccgtttctttgtcagtgacaatcctcagttcgatct

SEQ ID NO: 92236 - DNA, 75 bp, synthetic construct
  source 1..75: mol_type = other DNA
tggtgcagctcttttgtttatgaacattgataacctagtgtctttgttaaaggttagccctagatataaggatga

SEQ ID NO: 92237 - DNA, 75 bp, synthetic construct
  source 1..75: mol_type = other DNA
gcggtgtggctggcgcgtaatgatgacaccggctttcagcaagtgctggaacgtgctgactatctggcgaaggag

SEQ ID NO: 92238 - DNA, 75 bp, synthetic construct
  source 1..75: mol_type = other DNA
ctgatgacccggattgccagtgggtgtcgtgtggggcttccggcgtcaggtcgtccggtcattgcggtgcacggt

SEQ ID NO: 92239 - DNA, 75 bp, synthetic construct
  source 1..75: mol_type = other DNA
cctgttgagcacggctaacacatggagtgcgcgccagactttcaacggcgggatcaccggggcgctgacagggaa

SEQ ID NO: 92240 - DNA, 75 bp, synthetic construct
  source 1..75: mol_type = other DNA
taaaacttatcagagagtccgaacggatgaaaatgaaggaactatctgatttaattggaattaattactatacat

SEQ ID NO: 92241 - DNA, 75 bp, synthetic construct
  source 1..75: mol_type = other DNA
atgctcaccagcggtgaattgaatccccgccatcagcataccgtcacgctgtatgcaaaagggctgacctgcaaa

SEQ ID NO: 92242 - DNA, 75 bp, synthetic construct
  source 1..75: mol_type = other DNA
actggccgggatgattaaacaggcgtggtgcagtgccctgggggtggatgccggatgctatgccacgctggcgaa

SEQ ID NO: 92243 - DNA, 75 bp, synthetic construct
  source 1..75: mol_type = other DNA
aaattatccagccggacactgaccattgccctgaatgtgacgagccgctgcactatatccgtgatgcggtgagtg

SEQ ID NO: 92244 - DNA, 75 bp, synthetic construct
  source 1..75: mol_type = other DNA
gcatgggtcgaagttaaaggccagaaaatggcaccgccgcagatttctgctgaagtgctgaaaaaaatgaagaaa

SEQ ID NO: 92245 - DNA, 75 bp, synthetic construct
  source 1..75: mol_type = other DNA
aacaggcgttttccggtcttaatgagcagcaacgcaacgatatgggcgatttagccatgagggctaacgtcgctc

SEQ ID NO: 92246 - DNA, 75 bp, synthetic construct
  source 1..75: mol_type = other DNA
gtgaaaaaaggcgttacggactttcaggagaatctgtgggttggtgactggaaatatgtaccgacaaaagaggat

SEQ ID NO: 92247 - DNA, 75 bp, synthetic construct
  source 1..75: mol_type = other DNA
gtctgggagatcatgaagctctacggcgcggacgtaggtaacactctggaaccatcggcgggaaccggcgttttt

SEQ ID NO: 92248 - DNA, 75 bp, synthetic construct
  source 1..75: mol_type = other DNA
tcagacaaagtaaataaaataatacaaagcagcattgatattaataaagatattaatattgcaaaaagcgatata

SEQ ID NO: 92249 - DNA, 75 bp, synthetic construct
  source 1..75: mol_type = other DNA
agaggccggttcagcgatgcagatgcgtaccacctggaccaggcctttccgctgctgatgaaacaactggaactc

SEQ ID NO: 92250 - DNA, 75 bp, synthetic construct
  source 1..75: mol_type = other DNA
caaggtctcttccagaagaacatgcggcaccagctgaaaaattaggtgttcttattgcaaaaaaacttgaagaat

SEQ ID NO: 92251 - DNA, 75 bp, synthetic construct
  source 1..75: mol_type = other DNA
catggtgcagatagtcatggagaatattgggacgaaatattttcaggtaaagatgagaaaatagttaaaagtaaa

SEQ ID NO: 92252 - DNA, 75 bp, synthetic construct
  source 1..75: mol_type = other DNA
ggaacgtctggtgcgtcagacgctgtttcgcgcaaaccgcctcttactggaggcatataccgaaattctggaact

SEQ ID NO: 92253 - DNA, 75 bp, synthetic construct
  source 1..75: mol_type = other DNA
ctggtgaaagcgttagcaatagtagaggtacgggtgctggaccatcttattgtcggtatcggtgatgtactttca

SEQ ID NO: 92254 - DNA, 75 bp, synthetic construct
  source 1..75: mol_type = other DNA
aggggcagggcttcgttcagcctgaaatcagccagaacgatatattgattcgccacaaagcagagtcgcgtattg

SEQ ID NO: 92255 - DNA, 75 bp, synthetic construct
  source 1..75: mol_type = other DNA
gcgagcgtgaagtgacgattggcgcacgtaacgataccgatgttgagattgtcaaagggctggaagcgggcgatg

SEQ ID NO: 92256 - DNA, 75 bp, synthetic construct
  source 1..75: mol_type = other DNA
ggtcagcggtcagttgaaaacgctgtcggtggcgattggcgataaagtaaaaaaagaccagcttttaggggttat

SEQ ID NO: 92257 - DNA, 75 bp, synthetic construct
  source 1..75: mol_type = other DNA
agctggatacacgataccggctacgggtatttcatccggcttaatgcccgtttacatcccgtaaaggaactgaag

SEQ ID NO: 92258 - DNA, 75 bp, synthetic construct
  source 1..75: mol_type = other DNA
gatgaccatccggtcaaaaacctataaaggaagcggatttaacgagctgcggtttgaagacgccaccagtaatga

SEQ ID NO: 92259 - DNA, 75 bp, synthetic construct
  source 1..75: mol_type = other DNA
gagaacggcgtcacagagtggacgccgctgttttatgaggaccatccggcgcgggagttctgtgtgcagtacggg

SEQ ID NO: 92260 - DNA, 75 bp, synthetic construct
  source 1..75: mol_type = other DNA
tatttgtaaatgagatggcagacagagagttttgctcaatattaaaaactttgcgggaaaatgccataagcaata

SEQ ID NO: 92261 - DNA, 75 bp, synthetic construct
  source 1..75: mol_type = other DNA
ccagcgcaccggaaaaattatccgggcaggctgctgacaagatgcaggctggagtgattctgctggactttatgc

SEQ ID NO: 92262 - DNA, 75 bp, synthetic construct
  source 1..75: mol_type = other DNA
cgcaatgaagctgcagcgcgcgtgatgtcaaaaatcaccgacgaagacggcaaggttatttccgatgtgatccgc

SEQ ID NO: 92263 - DNA, 75 bp, synthetic construct
  source 1..75: mol_type = other DNA
tacgcttaccagaagttctcgaacgaactggctacggaaaagcctggatatatcgtctgatcaacgatggtaagt

SEQ ID NO: 92264 - DNA, 75 bp, synthetic construct
  source 1..75: mol_type = other DNA
gtatactctgtatctacatctgatgtaagcaatctgtcaatgtctctgcaggcattgttaaccagaaatggtgga

SEQ ID NO: 92265 - DNA, 75 bp, synthetic construct
  source 1..75: mol_type = other DNA
tcagcgatattcaacgtatctatcctgcgacgacggtagttgagctggtctacagtgatatgcaacaggcgttgt

SEQ ID NO: 92266 - DNA, 75 bp, synthetic construct
  source 1..75: mol_type = other DNA
cttggcgacatgacaaaactcgcccaaaaagtccaggctggagaaattgaagcccctgatgtgctggtgggaggg

SEQ ID NO: 92267 - DNA, 75 bp, synthetic construct
  source 1..75: mol_type = other DNA
aatatccggcattgtttctgcctttcctgtcatggccggttgattctgcagacagatgctcagggggcgtggttt

SEQ ID NO: 92268 - DNA, 75 bp, synthetic construct
  source 1..75: mol_type = other DNA
gccgacgcgtgtttgttgtcgcaagtgctcgaacagacctcgatcccgcaacggtactttttgagttcgaaggcg

SEQ ID NO: 92269 - DNA, 75 bp, synthetic construct
  source 1..75: mol_type = other DNA
tgcaaagcaaaccgaaggtggacgggccacagagcgccattgtcaccgggcctgcgggagaggaaatcttctgtg

SEQ ID NO: 92270 - DNA, 75 bp, synthetic construct
  source 1..75: mol_type = other DNA
gtttcactgggacaggtataacccggcaacggaggcgagttcgtgctgggtgtgcgtgtcacaggcgtgggcggg

SEQ ID NO: 92271 - DNA, 75 bp, synthetic construct
  source 1..75: mol_type = other DNA
gtttcactgggacaggtataacccggcaacggaggcgagttcgtgctgggtgagcgtgtctcaggcgtgggcggg

SEQ ID NO: 92272 - DNA, 75 bp, synthetic construct
  source 1..75: mol_type = other DNA
aatatccggcagtgtttctgcctttcctgtcgtggccggttgattttgcagacagatgctcagggggcgtggttt

SEQ ID NO: 92273 - DNA, 75 bp, synthetic construct
  source 1..75: mol_type = other DNA
gtttcactgggacaggtataacccggcaacggaggcgagttcgtgctgggtgggtgtgtcgcaggcgtgggcggg

SEQ ID NO: 92274 - DNA, 75 bp, synthetic construct
  source 1..75: mol_type = other DNA
ccaggcggcgactatgagggctatgtcgatgcccatgtgcgccggctggaggcgctacgccgggccggtatcgtc

SEQ ID NO: 92275 - DNA, 75 bp, synthetic construct
  source 1..75: mol_type = other DNA
ccgatatggcctttctaaaatcccggtttaataaaaacctggctgcaggcgaaaaacttattggttctgaatatt

SEQ ID NO: 92276 - DNA, 75 bp, synthetic construct
  source 1..75: mol_type = other DNA
cctgctctggcggtggattataataataatatcctgggggacgaaggaacgcccttcaccatgttgctgaatgcc

SEQ ID NO: 92277 - DNA, 75 bp, synthetic construct
  source 1..75: mol_type = other DNA
gggcaattaagccgcgcacaacaggtgctgggaattggctatttgtatgttgaggcgcagttacggcagatttga

SEQ ID NO: 92278 - DNA, 75 bp, synthetic construct
  source 1..75: mol_type = other DNA
atgaaagggctgaatctgccggtgaaaaagaaaaatggcctgcgggtgacgcctgcggatcagatagacattatc

SEQ ID NO: 92279 - DNA, 75 bp, synthetic construct
  source 1..75: mol_type = other DNA
tgcacgtaataaaattttaaaatggatttcggacaataaaaatatgctgatttactttctctttgatctcttcaa

SEQ ID NO: 92280 - DNA, 75 bp, synthetic construct
  source 1..75: mol_type = other DNA
cagaacgaaagaaagttgaaacaaggctaaagattatacttggtgcggaagtagctaaagctatgcattgcgata

SEQ ID NO: 92281 - DNA, 75 bp, synthetic construct
  source 1..75: mol_type = other DNA
ctctaggatggaattgtaaaaaactggttgattgtacaaaggagggaaatatctcttatggtattgttcaaccag

SEQ ID NO: 92282 - DNA, 75 bp, synthetic construct
  source 1..75: mol_type = other DNA
ttagcggcggggcacgccgttcttgcctgtggggagatggtgcagtcaggccgcccgttgaagcaggaacccacc

SEQ ID NO: 92283 - DNA, 75 bp, synthetic construct
  source 1..75: mol_type = other DNA
atggctgattttggttcaactaaatacaacgtcagttttgaagaatggcatgaactgttaatggattatgcagag

SEQ ID NO: 92284 - DNA, 75 bp, synthetic construct
  source 1..75: mol_type = other DNA
ctttatgatgcataccaccacctcgcccagttatcccattgttgcttcggttgagacggcggcggcgatgctgcg

SEQ ID NO: 92285 - DNA, 75 bp, synthetic construct
  source 1..75: mol_type = other DNA
atgcgaataaccactctggcttctgtcatcattccctgcctcggattctcagccagcagcatggctgctgcagag

SEQ ID NO: 92286 - DNA, 75 bp, synthetic construct
  source 1..75: mol_type = other DNA
gcctatggttcttgttgaataccatgcagtcaaatctggctgaaacagtaatccactggcataagttctttacta

SEQ ID NO: 92287 - DNA, 75 bp, synthetic construct
  source 1..75: mol_type = other DNA
gacggccaacctgacaacgggcgaagttcgctggcgtaagcgcccgcccagcgtcaccattcgcaaagttgaaga

SEQ ID NO: 92288 - DNA, 75 bp, synthetic construct
  source 1..75: mol_type = other DNA
atcgcgtgacccgcctgcctgttgttgtgcccgtaaccagcggaggcaattttgcccgcactgccggctttgcgg

SEQ ID NO: 92289 - DNA, 75 bp, synthetic construct
  source 1..75: mol_type = other DNA
cgggagctaagccgggtggtgcagcataatctgcaaaccgttctcggttatgacttgttagccggtcagcgagta

SEQ ID NO: 92290 - DNA, 75 bp, synthetic construct
  source 1..75: mol_type = other DNA
ccgctactagtcccgttcagttggttatattgtcttttgatcaatgtcttaatgtggaggtgttatttgattcaa

SEQ ID NO: 92291 - DNA, 75 bp, synthetic construct
  source 1..75: mol_type = other DNA
gagtgccggaatagtgaagttatgcagcgtgtactggctttctatcaggggaattttcaggaggcggcgcagtga

SEQ ID NO: 92292 - DNA, 75 bp, synthetic construct
  source 1..75: mol_type = other DNA
cttctgccgccgatccagagtttatcggtcagatgctcctgaccatggtcgatgaagatggcgctccctttgacg

SEQ ID NO: 92293 - DNA, 75 bp, synthetic construct
  source 1..75: mol_type = other DNA
ggcgctgaatatgtaagcggcggcgatgttcttgtggttgtgtctgatgcggtatccgctggcgacgctaaaacc

SEQ ID NO: 92294 - DNA, 75 bp, synthetic construct
  source 1..75: mol_type = other DNA
tccaaaccagatgattgaacaaattaacatcgctcttgaccagaaaggttcagaaaatttttctgcgtgggtcat

SEQ ID NO: 92295 - DNA, 75 bp, synthetic construct
  source 1..75: mol_type = other DNA
atggctgcaacaaggccggatatagagctgcaacctaccgtcaatgtcaaaactacgaaagccttgcaaacggga

SEQ ID NO: 92296 - DNA, 75 bp, synthetic construct
  source 1..75: mol_type = other DNA
gcggcacactatccgctatgataggtccagataaatttgattctatagatagcaccgcatatgacgccttaaata

SEQ ID NO: 92297 - DNA, 75 bp, synthetic construct
  source 1..75: mol_type = other DNA
gacaaaacagtggatggatatatttggcgagatcactgcggcgggtcacgcggttacggctggtttgatattgaa

SEQ ID NO: 92298 - DNA, 75 bp, synthetic construct
  source 1..75: mol_type = other DNA
tgttttacgcgtatgacaggatacggaggacagttgtggcgcacgttttcggtgaacgcactctggccacactgg

SEQ ID NO: 92299 - DNA, 75 bp, synthetic construct
  source 1..75: mol_type = other DNA
ggtttgaagacgccaccagtaatgagcaggtgtatatccatgcgcagaagaacatggatacggaagtgctcaacg

SEQ ID NO: 92300 - DNA, 75 bp, synthetic construct
  source 1..75: mol_type = other DNA
ttaccactgcgaccaccggggcctgccgctggcgctcatcagcgaagacggcaatacggcgtggcgcggggagta

SEQ ID NO: 92301 - DNA, 75 bp, synthetic construct
  source 1..75: mol_type = other DNA
ttgctgcctggctttttattgccatgctgttggttctggcggttattgactgtcgtacggctatgctgccggatg

SEQ ID NO: 92302 - DNA, 75 bp, synthetic construct
  source 1..75: mol_type = other DNA
actgtattgatctggtcaccagcctgcgcagttcatccatgtttacaaaaatcaacggcaatgtgacgaataaag

SEQ ID NO: 92303 - DNA, 75 bp, synthetic construct
  source 1..75: mol_type = other DNA
tacctgatccttctgagaaagaaaacgaatctaatgaaatattgaatgtttcagaaatcatcgttgaagaagaaa

SEQ ID NO: 92304 - DNA, 75 bp, synthetic construct
  source 1..75: mol_type = other DNA
aaattgtgaaacgaagcgaaggcatgacttccgttgcgaaagctgcctaccatgcccgtacacgtattacagatg

SEQ ID NO: 92305 - DNA, 75 bp, synthetic construct
  source 1..75: mol_type = other DNA
atcaggcgacctggcttgaaagtaatcaactttcggatttcctcactgcgccggtgcagggatcacagaatgcgt

SEQ ID NO: 92306 - DNA, 75 bp, synthetic construct
  source 1..75: mol_type = other DNA
gttgtcagtggcgctatattcgactcaggttatggtttattcccgtctgatcaggcgcgtaaggactggcaaaat

SEQ ID NO: 92307 - DNA, 75 bp, synthetic construct
  source 1..75: mol_type = other DNA
attgcgtggaactcattaacagcctgcgcagttcatccatgtttaccaaaatcatgaataccgccccggctactg

SEQ ID NO: 92308 - DNA, 75 bp, synthetic construct
  source 1..75: mol_type = other DNA
tttttggttcaaagacagccacagccaaggtgctgggtatatctcaagtggcggttactcgttggggggcaacag

SEQ ID NO: 92309 - DNA, 75 bp, synthetic construct
  source 1..75: mol_type = other DNA
tatcatctgcccgttccgtggcgagtatttccgccttgcgccggagcataaccagattgttaaccatctgattta

SEQ ID NO: 92310 - DNA, 75 bp, synthetic construct
  source 1..75: mol_type = other DNA
caaacaggccagcgatgacgcccgtctgaatgacgtgcatgaagcggtgaccgctgtcgctgaacatgtgcagga

SEQ ID NO: 92311 - DNA, 75 bp, synthetic construct
  source 1..75: mol_type = other DNA
aacgcgccgtgattctggtagccgcctggcttggcgacgctcgcctgatcgacaacaaaatggtcgagctggcgt

SEQ ID NO: 92312 - DNA, 75 bp, synthetic construct
  source 1..75: mol_type = other DNA
cagaacataatattcgtcaccttcagaacgatgataaaggcatgaccctgctggaagtcctcggtgttctggtcg

SEQ ID NO: 92313 - DNA, 75 bp, synthetic construct
  source 1..75: mol_type = other DNA
tcagatggcacagtctttgagcctgtaaacagttttcagaaaaaccagaagaagctggcgagacttcagcgacag

SEQ ID NO: 92314 - DNA, 75 bp, synthetic construct
  source 1..75: mol_type = other DNA
tcgacgccaccggtaacggcggctatctggccgaagccgcgctgctggcctttggcccggacatcatcgactgcg

SEQ ID NO: 92315 - DNA, 75 bp, synthetic construct
  source 1..75: mol_type = other DNA
gtttgccgggaatataggcggaggtgcgggacacgcaattaactttcatgatggcatcgccggaaatcagccagg

SEQ ID NO: 92316 - DNA, 75 bp, synthetic construct
  source 1..75: mol_type = other DNA
cgaccgcaatgttgctgattgaggctttatcgcgccatcttggcgaagacgaagtttttgatggcttttcggcaa

SEQ ID NO: 92317 - DNA, 75 bp, synthetic construct
  source 1..75: mol_type = other DNA
taaataatccagagcatgacagttacgcaattagtgaaaagagtcacggcagagaagaaacccgtcttcatattg

SEQ ID NO: 92318 - DNA, 75 bp, synthetic construct
  source 1..75: mol_type = other DNA
gcccggtcacaccggacgaactggcagaacgcctgcatgaaaaacaggaactgccgccagtacggttaaaaacac

SEQ ID NO: 92319 - DNA, 75 bp, synthetic construct
  source 1..75: mol_type = other DNA
ttggttttgggccgtgacctgtcagcagctcaaacaatatgctgattttgatcatgagcatcatcgtttcacttt

SEQ ID NO: 92320 - DNA, 75 bp, synthetic construct
  source 1..75: mol_type = other DNA
atgcatctaacgccagcaaaccatcctgacttatggacacaagagaatggtgaatggatctacttgcgaaactaa

SEQ ID NO: 92321 - DNA, 75 bp, synthetic construct
  source 1..75: mol_type = other DNA
gcgggagtaattcgtgacctgatggagaattccgttccccgccgctatcgtgcagggaacggcatctccgtggtt

SEQ ID NO: 92322 - DNA, 75 bp, synthetic construct
  source 1..75: mol_type = other DNA
atgacattaccaacaactatttattcattccccgcatatttacctcgtttttcgtccaccgacaaaccagcaaaa

SEQ ID NO: 92323 - DNA, 75 bp, synthetic construct
  source 1..75: mol_type = other DNA
tggaaatccgcattccattcattgcagaaacagggcagacactgaaagaaaaagctgaaggaaagaaaccagaaa

SEQ ID NO: 92324 - DNA, 75 bp, synthetic construct
  source 1..75: mol_type = other DNA
cgcgcactgcgctcttgcaacaccgctggctcaaccgcctgcagaccgggctgttggtcctgaccctggtcggga

SEQ ID NO: 92325 - DNA, 75 bp, synthetic construct
  source 1..75: mol_type = other DNA
agatcataattgcgatggcagacatactgttgagatccacaaactagatctctcagactggcaagcattcaataa

SEQ ID NO: 92326 - DNA, 75 bp, synthetic construct
  source 1..75: mol_type = other DNA
ctgccgttataccgacatctataaggtggcggtcgtgggcggggatgccggttatctcgttacaaatatagtgaa

SEQ ID NO: 92327 - DNA, 75 bp, synthetic construct
  source 1..75: mol_type = other DNA
accgcctttgtggaatatgacaccgagcgtgccgtcggggcggacagcaatgttctggtccgtgagaaaaccggc

SEQ ID NO: 92328 - DNA, 75 bp, synthetic construct
  source 1..75: mol_type = other DNA
atgttacagccccccgacgcagccactggtggtggacggtgccgggatgcctggcaatggtgttactgaacgcag

SEQ ID NO: 92329 - DNA, 75 bp, synthetic construct
  source 1..75: mol_type = other DNA
agccagagtttcgcatgatcgctcccgatggcactacgtttgttactcgtttctccagtgctgaactaaattatg

SEQ ID NO: 92330 - DNA, 75 bp, synthetic construct
  source 1..75: mol_type = other DNA
caatcagtatgattctggcgatcagtataacgatgatgaaatcgatgcgatgcagcaggatgaactggcacgtca

SEQ ID NO: 92331 - DNA, 75 bp, synthetic construct
  source 1..75: mol_type = other DNA
cctgcgtattgagccgccgttatggcggtgcgggctgcggcagaacttccgtatcttccagcagcaggatatccg

SEQ ID NO: 92332 - DNA, 75 bp, synthetic construct
  source 1..75: mol_type = other DNA
tatggctggattatctggacgcactggaactggttgatatctccagtgctccagatattgaatggcctacgcctc

SEQ ID NO: 92333 - DNA, 75 bp, synthetic construct
  source 1..75: mol_type = other DNA
gtttcactgggacaggtataacccggcaacggaggcgagttcgtgctgggtgtgggtgtctcaggcgtgggcggg

SEQ ID NO: 92334 - DNA, 75 bp, synthetic construct
  source 1..75: mol_type = other DNA
cggcctgttagcgaccctgttttacattacctacggcgtgtcgaagtttgtctccggcattgtcagcgatcgctc

SEQ ID NO: 92335 - DNA, 75 bp, synthetic construct
  source 1..75: mol_type = other DNA
gtttcactgggacaggtataacccggcaacggaggcgagttcgtgctgggtgagagtgtcacaggcgtgggcggg

SEQ ID NO: 92336 - DNA, 75 bp, synthetic construct
  source 1..75: mol_type = other DNA
gtttcactgggacaggtataacccggcaacggaggcgagttcgtgctgggtgagcgtgtcccaggcgtgggcggg

SEQ ID NO: 92337 - DNA, 75 bp, synthetic construct
  source 1..75: mol_type = other DNA
tggcgggcatgaagctgggcgggacgccgctggtcgagtatacgcgggacaggctgcaccgtgagacggtgcgca

SEQ ID NO: 92338 - DNA, 75 bp, synthetic construct
  source 1..75: mol_type = other DNA
ccgctgtttctccgctggcatctggcgtgaaaaaagcgacactggcgacgggggctgccgcaaccgttgccgcgc

SEQ ID NO: 92339 - DNA, 75 bp, synthetic construct
  source 1..75: mol_type = other DNA
gttattactggtctgattaaagcgaatattccgacccgtatcgcctttaccgtatccagtaagattgactcacgt

SEQ ID NO: 92340 - DNA, 75 bp, synthetic construct
  source 1..75: mol_type = other DNA
gctgaagcggatgatgccggattgctgggaaaattatccgtcgatatgaaagttgctcaatggcgctggctgtat

SEQ ID NO: 92341 - DNA, 75 bp, synthetic construct
  source 1..75: mol_type = other DNA
ccatggtgcttttgttcgcgatcaggaagttcatgccgtggtgcaggactggaaagcgcgtggtcgcccacagta

SEQ ID NO: 92342 - DNA, 75 bp, synthetic construct
  source 1..75: mol_type = other DNA
tgatgttggtaaagcgcttgtttatctaggtaaagaacaagctgttactggtggtcatgccactattttcaaacc

SEQ ID NO: 92343 - DNA, 75 bp, synthetic construct
  source 1..75: mol_type = other DNA
atggaagctgtagaaccatatcataagcgtgcaatagataactggtacgatacaaccgtagactgttcagaagat

SEQ ID NO: 92344 - DNA, 75 bp, synthetic construct
  source 1..75: mol_type = other DNA
gagatgctgctggagaagaacgcaacgctgactatctggcagggtgtcatcccgctgcgttatgtcaccggcgtg

SEQ ID NO: 92345 - DNA, 75 bp, synthetic construct
  source 1..75: mol_type = other DNA
gggcaatcagttagaggtgataccggcggaccggacgtggcgtccacggcagcaaagcaaaccgaaggtggacgg

SEQ ID NO: 92346 - DNA, 75 bp, synthetic construct
  source 1..75: mol_type = other DNA
tcaagtcgccctacgctgtcgctgagtgcactgctgaaacagtatggtatccgcctgacggctaatcaggcatat

SEQ ID NO: 92347 - DNA, 75 bp, synthetic construct
  source 1..75: mol_type = other DNA
gtgccagtccgacatcgtccggtactgtactaagagcatttcgctgtagtgcaaaaacaccaggagcaatggtta

SEQ ID NO: 92348 - DNA, 75 bp, synthetic construct
  source 1..75: mol_type = other DNA
attacagcgtaacgtctacctctgcgggtaccaaaatgcagatgactcaacgtgatattcctcagtcggtcacta

SEQ ID NO: 92349 - DNA, 75 bp, synthetic construct
  source 1..75: mol_type = other DNA
gcggaccggacgtggcgtccacggctgcaaagcaaaccgaaggtggacgggccacagagcgccattgtcaccggt

SEQ ID NO: 92350 - DNA, 75 bp, synthetic construct
  source 1..75: mol_type = other DNA
atggcgttcggcgtttacccggatgtttcgctggcggatgccaggaagaaaagggaagaggccagaaagctggta

SEQ ID NO: 92351 - DNA, 75 bp, synthetic construct
  source 1..75: mol_type = other DNA
agtcaattattgacgatttgtgtaatcagattatcagccggatggtaaaaaatgacgcagtgaatgaggatgtaa

SEQ ID NO: 92352 - DNA, 75 bp, synthetic construct
  source 1..75: mol_type = other DNA
tcctcggatcgccgggcgatggaaatcgttcgtcgctggcaggaagatggcatcccggaaaaactctacccgctg

SEQ ID NO: 92353 - DNA, 75 bp, synthetic construct
  source 1..75: mol_type = other DNA
agagggaagaactgaataaacaaattgtggaactcgtgcgcctgaatggacgaggaacggttaggcaacttgcgg

SEQ ID NO: 92354 - DNA, 75 bp, synthetic construct
  source 1..75: mol_type = other DNA
ggcgtcagaacataatctgtagcgagtgccggaagagcgaagttatgcagcgcgtgctggcgttctatcggcgac

SEQ ID NO: 92355 - DNA, 75 bp, synthetic construct
  source 1..75: mol_type = other DNA
tctactggcatctgcaaaaaaaatagatgcagaggcaagtgggactacatttaaagaagtctctggggcaattgt

SEQ ID NO: 92356 - DNA, 75 bp, synthetic construct
  source 1..75: mol_type = other DNA
atgaataatctgatggtcattgatggtattgaagttcgtcgtgatgcttatggtcgttacagcctgaacgatctg

SEQ ID NO: 92357 - DNA, 75 bp, synthetic construct
  source 1..75: mol_type = other DNA
gagacacaaaaattgttggagtggtttttaacgccgcagggacagagtttggtggaagatgtaggttatgtcccg

SEQ ID NO: 92358 - DNA, 75 bp, synthetic construct
  source 1..75: mol_type = other DNA
atggcaaaagtatttacacaagaagagcgggaaaaaattaaggggaaggttgttgaacttgtacgtctgagcggt

SEQ ID NO: 92359 - DNA, 75 bp, synthetic construct
  source 1..75: mol_type = other DNA
taattctgatattagcgatcccatgtattattggctttatgccagctccggcaggattaagcgaactggcgtggg

SEQ ID NO: 92360 - DNA, 75 bp, synthetic construct
  source 1..75: mol_type = other DNA
gaaagagcacgaaccggaacgctacgcgcaaattggctgcgtgatgatgacgcacgactacctgcgctggtgttt

SEQ ID NO: 92361 - DNA, 75 bp, synthetic construct
  source 1..75: mol_type = other DNA
gcaggcgcgtaaagactggcaaaacgcccgcaaaaaactctcaagggcaaatctgaagaaaccatctgtggttga

SEQ ID NO: 92362 - DNA, 75 bp, synthetic construct
  source 1..75: mol_type = other DNA
gagacgatgaagctcatcaccccacagccgcgttcgggttattttgtcgcacaacgtaaagcccagccgccagtg

SEQ ID NO: 92363 - DNA, 75 bp, synthetic construct
  source 1..75: mol_type = other DNA
atgttgccgtttctgaaagcgccagctgacgcgccgttgattagcgataaacaagaaattgatgcccgttaccgt

SEQ ID NO: 92364 - DNA, 75 bp, synthetic construct
  source 1..75: mol_type = other DNA
cgtctggtacaggcactgggtctggtggatatccgggtgccggaccatctgatagtcggtggcaaccaggttttc

SEQ ID NO: 92365 - DNA, 75 bp, synthetic construct
  source 1..75: mol_type = other DNA
gtttcactgggacaggtataacccggcaacggaggcgagttcgtgctgggtgagcgtgtcacaggcgtgggcggg

SEQ ID NO: 92366 - DNA, 75 bp, synthetic construct
  source 1..75: mol_type = other DNA
tcctggtggtttgtaccggcaacatttgccgttcgcccattggcgagcgcttgctgcgtaaacgtctgccgggcg

SEQ ID NO: 92367 - DNA, 75 bp, synthetic construct
  source 1..75: mol_type = other DNA
gtttcactgggacaggtataacccggcaacggaggcgagttcgtgctgggtgcgcgtgtcacaggcgtgggcggg

SEQ ID NO: 92368 - DNA, 75 bp, synthetic construct
  source 1..75: mol_type = other DNA
atctggtcacggcgaatacggcagtgacgatgtttgaactgggcggatttatcggtgcgctggtagccggttggg

SEQ ID NO: 92369 - DNA, 75 bp, synthetic construct
  source 1..75: mol_type = other DNA
gtttcactgggacaggtataacccggcaacggaggcgagttcgtgctgggtgggggtgtcacaggcgtgggcggg

SEQ ID NO: 92370 - DNA, 75 bp, synthetic construct
  source 1..75: mol_type = other DNA
caggacgcatttgaacatgtctacggtatgttggagcgcgccagtcaggaatgggcgaagcgcctcagccggtaa

SEQ ID NO: 92371 - DNA, 75 bp, synthetic construct
  source 1..75: mol_type = other DNA
aaccgctttgaacgcggcctggagcaggttaccgccacctacggcaagcgcagcgacggcggcatcagcgtgctt

SEQ ID NO: 92372 - DNA, 75 bp, synthetic construct
  source 1..75: mol_type = other DNA
gtttcactgggacaggtataacccggcaacggaggcgagttcgtgctgggtgtgtgtgtcgcaggcgtgggcggg

SEQ ID NO: 92373 - DNA, 75 bp, synthetic construct
  source 1..75: mol_type = other DNA
gtttcactgggacaggtataacccggcaacggaggcgagttcgtgctgggtgcgggtgtcccaggcgtgggcggg

SEQ ID NO: 92374 - DNA, 75 bp, synthetic construct
  source 1..75: mol_type = other DNA
gtttcactgggacaggtataacccggcaacggaggcgagttcgtgctgggtgggtgtgtctcaggcgtgggcggg

SEQ ID NO: 92375 - DNA, 75 bp, synthetic construct
  source 1..75: mol_type = other DNA
ggtcggtctacctgatcaaaagtgacaagggctattggttgcccggtggctttggttatacgtcaaacaaggccg

SEQ ID NO: 92376 - DNA, 75 bp, synthetic construct
  source 1..75: mol_type = other DNA
ggagaagataacggcattaaaatcccgctttcactgatttcctcgctgcttcacgaggacagcgacaacgatcgt

SEQ ID NO: 92377 - DNA, 75 bp, synthetic construct
  source 1..75: mol_type = other DNA
tactggttgcggaaaaagcgccattgccggggaaatagaaatcgcgatgaaggctattggtgtaccggttcagtg

SEQ ID NO: 92378 - DNA, 75 bp, synthetic construct
  source 1..75: mol_type = other DNA
tcacgatgattaccaaacggtaatggcatacaaagtttctgaagtcatcgctgcaatccgcgccgcaggcattcg

SEQ ID NO: 92379 - DNA, 75 bp, synthetic construct
  source 1..75: mol_type = other DNA
gcatgtagtgcgttaatagaatcaggtttgtggtcccgcgatgcagttgaacgtcagatgagccatcaggaacgt

SEQ ID NO: 92380 - DNA, 75 bp, synthetic construct
  source 1..75: mol_type = other DNA
ggcagatgtaccagttatgacatcggatgtagttcctccaaaaacaaaacttggcaatcaactgcagggttactc

SEQ ID NO: 92381 - DNA, 75 bp, synthetic construct
  source 1..75: mol_type = other DNA
gccggagttaaccttgccgctcagggggttctttccgcagcagcaaagggaatagggcgtggaattactgctgtt

SEQ ID NO: 92382 - DNA, 75 bp, synthetic construct
  source 1..75: mol_type = other DNA
tgggatcaaaccaggttgaaaaggtggggatcattcgtgcgctgacggtgggtgtggcttaccagacgacggtag

SEQ ID NO: 92383 - DNA, 75 bp, synthetic construct
  source 1..75: mol_type = other DNA
ggcaataacccattgctggttcagagttggttagatactggagatgataacgctgaaccaggcagtattactgtc

SEQ ID NO: 92384 - DNA, 75 bp, synthetic construct
  source 1..75: mol_type = other DNA
catgcagcgacgacagactgggtaaagccgacaatcaaccagtacgcggcaaccaggctgccgaatccaatcgcg

SEQ ID NO: 92385 - DNA, 75 bp, synthetic construct
  source 1..75: mol_type = other DNA
atgagccggaaatcttaccccaacgtaaatgctgccaatcagtatgcccgggatgtcgtgcgcggaaagattgtt

SEQ ID NO: 92386 - DNA, 75 bp, synthetic construct
  source 1..75: mol_type = other DNA
gccgcgatatctctttcaacgaattaacggcggaatatgatgctgttttcctcggcgtggggacttacgggatga

SEQ ID NO: 92387 - DNA, 75 bp, synthetic construct
  source 1..75: mol_type = other DNA
ggaactgtggtgccacacaacctgtaccggatgcgcctgtgccgaaagatttaccccccggaatgccggatatgc

SEQ ID NO: 92388 - DNA, 75 bp, synthetic construct
  source 1..75: mol_type = other DNA
ttcaaatttctgaccggaccagaaaccgtgctggcgctgctggatgaacgggaaagaaaccagcaatacataaaa

SEQ ID NO: 92389 - DNA, 75 bp, synthetic construct
  source 1..75: mol_type = other DNA
gggttaaaagctggctgcgtttttctggccgtctgaccagtcgttctctggcagaaaaaatgaatatgccgctat

SEQ ID NO: 92390 - DNA, 75 bp, synthetic construct
  source 1..75: mol_type = other DNA
tcgtggtgattatggggcgcaacctgtttaactcgctgcgtctgcccgtgctgaacagcatcagcggccagaatc

SEQ ID NO: 92391 - DNA, 75 bp, synthetic construct
  source 1..75: mol_type = other DNA
agattacagctatcccagaacttcttaacatgctggatattaaaggaaaaatcatcacaactgatgcgatgggtt

SEQ ID NO: 92392 - DNA, 75 bp, synthetic construct
  source 1..75: mol_type = other DNA
tgacctccattctgccattggggatcatcgctggcttgctgattggcaaaccgctggggattagtctgttctgct

SEQ ID NO: 92393 - DNA, 75 bp, synthetic construct
  source 1..75: mol_type = other DNA
ggtcttgacagccggatcacgaccctggaaggccagagaagagaaatgctttctgcgtcagaactcgcgcccctg

SEQ ID NO: 92394 - DNA, 75 bp, synthetic construct
  source 1..75: mol_type = other DNA
ggaaatcgcaggaaataacattctgcttgctggcaggtatcctgatgttcatggcaatggtggttgccggacgcg

SEQ ID NO: 92395 - DNA, 75 bp, synthetic construct
  source 1..75: mol_type = other DNA
ttaaccgcaccagacatctggctgcttaccgatctgactgaggactcaacactggtagatggttttctggcacag

SEQ ID NO: 92396 - DNA, 75 bp, synthetic construct
  source 1..75: mol_type = other DNA
gattggtgcgggcaacgaagtgaccgtggtgttccaggacggcttccagctgaaaaccgtggaagaaatggcgct

SEQ ID NO: 92397 - DNA, 75 bp, synthetic construct
  source 1..75: mol_type = other DNA
gctgcttcaggacgttaacgtgggctggctggagcacatcagaaccgacgccagcgagcgcgttatgaatgacgt

SEQ ID NO: 92398 - DNA, 75 bp, synthetic construct
  source 1..75: mol_type = other DNA
ttaaccgcaccagaaatttggttgcttactgatctgacagaagactcaacactggtagatggttttctggcacag

SEQ ID NO: 92399 - DNA, 75 bp, synthetic construct
  source 1..75: mol_type = other DNA
agggtgggacgctgcaactgttccgtaccgaacaacagtatgaaaatgcgacccgcgatatcgccgtgctggaag

SEQ ID NO: 92400 - DNA, 75 bp, synthetic construct
  source 1..75: mol_type = other DNA
tcaaatggaatgccatttttagctcaggcgcaaaaaccagcgacaaaatccagtacacaggaatattctgtgcct

SEQ ID NO: 92401 - DNA, 75 bp, synthetic construct
  source 1..75: mol_type = other DNA
gccaataccaatatccaacaaaaacaaattgcagatgaagtaaaatcacttacatatttgattccttcagaaaaa

SEQ ID NO: 92402 - DNA, 75 bp, synthetic construct
  source 1..75: mol_type = other DNA
cctgaagttgtgcgtgagctggcacgaattgcactggcatcactgggagcagaaccagttgcttatattttcaaa

SEQ ID NO: 92403 - DNA, 75 bp, synthetic construct
  source 1..75: mol_type = other DNA
agccgatgattcaatacattgtcgacgaaattgtagctgcaggtatcaaagaaatcgtgctggtgactcatgcgt

SEQ ID NO: 92404 - DNA, 75 bp, synthetic construct
  source 1..75: mol_type = other DNA
ttcttgatggcgcatccgccgacccactgcgttataaccttgctgcaatggtcgctcgttttaacgaaacaggcc

SEQ ID NO: 92405 - DNA, 75 bp, synthetic construct
  source 1..75: mol_type = other DNA
gttattaagaccaaagagcagctgactgtagaaggtaaggtgagccgcattgtcgagtttatcgaaaaacccggc

SEQ ID NO: 92406 - DNA, 75 bp, synthetic construct
  source 1..75: mol_type = other DNA
acgtggagttgagcgacggcactttatcgtggttagggaacgtcttgttctggatgacgttgccagaacctccga

SEQ ID NO: 92407 - DNA, 75 bp, synthetic construct
  source 1..75: mol_type = other DNA
caggattacgccatttatttgggcatgtgaggaattttcgtctctggcataaagagctaacagatgcgcagcttg

SEQ ID NO: 92408 - DNA, 75 bp, synthetic construct
  source 1..75: mol_type = other DNA
ccgaaggcaaagacgccggagtacaaaagtacggataacggtaaacagaacacgtatttttcgtcactggacaac

SEQ ID NO: 92409 - DNA, 75 bp, synthetic construct
  source 1..75: mol_type = other DNA
aattaagaataatctttataatcttccttttacggttctttgtgaggtacataagaactggtataaaacgccaaa

SEQ ID NO: 92410 - DNA, 75 bp, synthetic construct
  source 1..75: mol_type = other DNA
gcgtccgtgaaagaagcaccaattgggatcgaggtcatccccgcacacgtcactgaatatctgaacaaagtactg

SEQ ID NO: 92411 - DNA, 75 bp, synthetic construct
  source 1..75: mol_type = other DNA
agaaagaagcctttaatctggctagcctgttaacaaatgttaacccttacaacctgtcaaaacctgacattcatc

SEQ ID NO: 92412 - DNA, 75 bp, synthetic construct
  source 1..75: mol_type = other DNA
ccagaaagatttcgatcgcacgatggtaatcgacgaacgcacagaactggttgccagaaccattaccgactacct

SEQ ID NO: 92413 - DNA, 75 bp, synthetic construct
  source 1..75: mol_type = other DNA
ggaggaccaagttcaactgccgatatagagttgattaaagttgtcggtgttcatggccctgtatatgcagcctat

SEQ ID NO: 92414 - DNA, 75 bp, synthetic construct
  source 1..75: mol_type = other DNA
aggctgacggagcagcgcggctttgatggcaggacgcaacgttaccagtatgacctgaccggaaaactcacgcag

SEQ ID NO: 92415 - DNA, 75 bp, synthetic construct
  source 1..75: mol_type = other DNA
taccagtaagtcggcgatgccagcttggatgacggctaatctggttgccgatgaacggacaaattcagtgttaat

SEQ ID NO: 92416 - DNA, 75 bp, synthetic construct
  source 1..75: mol_type = other DNA
tggcgtcaccgccactggcacgtatctgccttcacggggatttacaacgatttggccgccgcctcagcctgtatg

SEQ ID NO: 92417 - DNA, 75 bp, synthetic construct
  source 1..75: mol_type = other DNA
tataacaaagatggcaacaaagtagatctgtacggtaaagctgttggtctgcattatttttccaagggtaacggt

SEQ ID NO: 92418 - DNA, 75 bp, synthetic construct
  source 1..75: mol_type = other DNA
gttgtttccggcattcgccaaaattcaggacgacaccgaaaagctgcgcgttaacttctacaagctgctgtcggt

SEQ ID NO: 92419 - DNA, 75 bp, synthetic construct
  source 1..75: mol_type = other DNA
ttcgtcacctacgggatgcgcaaccggaaagaaggcaccaaattccgcgaaagcattaaaaaactgctggcctga

SEQ ID NO: 92420 - DNA, 75 bp, synthetic construct
  source 1..75: mol_type = other DNA
ggaattgcacctgaagtaatgtgggatgatggtatcgatgcatttgtagtgaattggcaggcggaagcgagtcgt

SEQ ID NO: 92421 - DNA, 75 bp, synthetic construct
  source 1..75: mol_type = other DNA
ttatcgcgaccacttcagagctgatgaccaccggtgtggatgctaaaacctgcaaactggtagtactggaccaga

SEQ ID NO: 92422 - DNA, 75 bp, synthetic construct
  source 1..75: mol_type = other DNA
acgcatgccgggcgatctctcggaatactccgtcatccagaccaaagagccaatggtggctgaaggccaggtggc

SEQ ID NO: 92423 - DNA, 75 bp, synthetic construct
  source 1..75: mol_type = other DNA
aaccatatcatctgggcgaagccgtccggacgttggaatgggtgtaataaagaaagtctgcgcgcatattttcct

SEQ ID NO: 92424 - DNA, 75 bp, synthetic construct
  source 1..75: mol_type = other DNA
atctgtccgcaacttataggccgcgatgcccatcgtatcgaagatatctggcagtttttctataaaggcgcttac

SEQ ID NO: 92425 - DNA, 75 bp, synthetic construct
  source 1..75: mol_type = other DNA
gaaggcaacttaacgccaccagtcatgttgattgcgctgacagaaggccattgggaatacgccgctgacactgca

SEQ ID NO: 92426 - DNA, 75 bp, synthetic construct
  source 1..75: mol_type = other DNA
tacacaaatccccgctcaagatgattggattttaatttattcaaagcacggcgagtatatggcaggacaggtaca

SEQ ID NO: 92427 - DNA, 75 bp, synthetic construct
  source 1..75: mol_type = other DNA
agacgatctccgtcattatttagcggcacgctaccagcctgatggcattactgaagaagagattcagcgactgat

SEQ ID NO: 92428 - DNA, 75 bp, synthetic construct
  source 1..75: mol_type = other DNA
gctgtgggacattaaagccaaagccgcaaacatgccgctttaccaactgttaggtggggcttcccgtgaaggcgt

SEQ ID NO: 92429 - DNA, 75 bp, synthetic construct
  source 1..75: mol_type = other DNA
cgcgccctggtggcactcggtgagcgcccggactacctgctgattgtgcggtatgtgaacaacatagccgatctc

SEQ ID NO: 92430 - DNA, 75 bp, synthetic construct
  source 1..75: mol_type = other DNA
tgccgaaccggtttcatccagctttgccgtgcgaaaacgcgccaatgacatcgcgctcaaatgcaaatactgtga

SEQ ID NO: 92431 - DNA, 75 bp, synthetic construct
  source 1..75: mol_type = other DNA
agtgttattcgtatttcactggttaacttattaagtgttcctgtatcaaatatgggtttctacgcgacatggggg

SEQ ID NO: 92432 - DNA, 75 bp, synthetic construct
  source 1..75: mol_type = other DNA
cgctgaaaacggcaccgttttccgtgagaacttactcttcacccatcgcggcttgtctggaccggcggtgttgca

SEQ ID NO: 92433 - DNA, 75 bp, synthetic construct
  source 1..75: mol_type = other DNA
aaatttacgatccgatcctggacgggcttcgcagtgcggtccgctatgaccgtacctattttgacaaaatcgtgg

SEQ ID NO: 92434 - DNA, 75 bp, synthetic construct
  source 1..75: mol_type = other DNA
atctagcagaacgagcaacactaatgcaatggtggggtgattatgttcagacgcagaaatttaaggctctagcgg

SEQ ID NO: 92435 - DNA, 75 bp, synthetic construct
  source 1..75: mol_type = other DNA
gacaggcaagcaagtgcgcttaactgccaaagagtgccgttttggctatcgcgacagtatttttaaacatgaata

SEQ ID NO: 92436 - DNA, 75 bp, synthetic construct
  source 1..75: mol_type = other DNA
ttaccggatgaaccaacagatgcacagatagcgaaatacaacgagcaaatggctctgtatgacgcctatatcgcg

SEQ ID NO: 92437 - DNA, 75 bp, synthetic construct
  source 1..75: mol_type = other DNA
gcactggatgtggctgcacggcaccgggtgcagtttgcgatgcctgagtccgatgcagtgtctatgctcaaaaga

SEQ ID NO: 92438 - DNA, 75 bp, synthetic construct
  source 1..75: mol_type = other DNA
gcctggtttgctttccgtggtgcaattaagctggatggcactatttctgacgagctgacaggaaaactggttacg

SEQ ID NO: 92439 - DNA, 75 bp, synthetic construct
  source 1..75: mol_type = other DNA
tttatcgcgacgggtatcaatcgccatgcgtacaaccgctggcgcgtttcatgaaggagttcgcggaggttaacc

SEQ ID NO: 92440 - DNA, 75 bp, synthetic construct
  source 1..75: mol_type = other DNA
tcgtggcaataactgtccccatgatgaaaaaacagacaccggagagggtaaaaccccaccaccggaaaccaggaa

SEQ ID NO: 92441 - DNA, 75 bp, synthetic construct
  source 1..75: mol_type = other DNA
agtatccaattgttctcattattattgttgccatagttgtaggcggcattgttagcgccattgaagcacttagta

SEQ ID NO: 92442 - DNA, 75 bp, synthetic construct
  source 1..75: mol_type = other DNA
aaagcgagagtgccgcagctggttctgcaagtgcggcggcttcttctgccactgcatcagccaacagtcaaaaag

SEQ ID NO: 92443 - DNA, 75 bp, synthetic construct
  source 1..75: mol_type = other DNA
cagacaccggtttattctgcggtgccgctgccggtacctatggccgggaatgactctggcatgttccagttcccg

SEQ ID NO: 92444 - DNA, 75 bp, synthetic construct
  source 1..75: mol_type = other DNA
tactggtatatgccgacctcactgctgagggggatttttcatgatgtacccgactcatgctaccgccagtggatt

SEQ ID NO: 92445 - DNA, 75 bp, synthetic construct
  source 1..75: mol_type = other DNA
cgttgaaggagctgcactgtccgtggtggcctttacggctaagattgcctccggcctggataatctttactgggc

SEQ ID NO: 92446 - DNA, 75 bp, synthetic construct
  source 1..75: mol_type = other DNA
atgtgtggataccgtttaacgattcactggatatgattgcgggtttttctccgggctataaaaaaatagctattg

SEQ ID NO: 92447 - DNA, 75 bp, synthetic construct
  source 1..75: mol_type = other DNA
aggtatatcactcaggatccgattgggctgaaggggggatggaatttttatcagtatccgctgaatccggttcag

SEQ ID NO: 92448 - DNA, 75 bp, synthetic construct
  source 1..75: mol_type = other DNA
tgtcgaagcgaaaaccaaagacattatgccagtggcatttgaatttaaatgcgttccgtttgaaggcctgaaaga

SEQ ID NO: 92449 - DNA, 75 bp, synthetic construct
  source 1..75: mol_type = other DNA
tattgagtgtcaggttgctaatgcttgtttaagtccgaaaggcgagtttgagtatttacagattgatgcaccgac

SEQ ID NO: 92450 - DNA, 75 bp, synthetic construct
  source 1..75: mol_type = other DNA
gggcgatttattactgggtaaatctcagacacgcactgaactgttttctgattttaatttttatggtgcagcatt

SEQ ID NO: 92451 - DNA, 75 bp, synthetic construct
  source 1..75: mol_type = other DNA
gatgtatcgctacctcgccattgccaactatgaagaccgttttgtcattccaaccagtcatcgggaaatggcggg

SEQ ID NO: 92452 - DNA, 75 bp, synthetic construct
  source 1..75: mol_type = other DNA
atgtttgattacaaaatttccaaacatccgcattttgatgaagcctgtagaacttttgcactacgtcacaatatg

SEQ ID NO: 92453 - DNA, 75 bp, synthetic construct
  source 1..75: mol_type = other DNA
tgcgtgaggcggcgcaactggcaacacagggtgaatgggtcgcatttatttcgtctggtactggtacatatgcgg

SEQ ID NO: 92454 - DNA, 75 bp, synthetic construct
  source 1..75: mol_type = other DNA
atgtttgattttcaggtttccaaacatccccactatgacgaagcatgccgcattttcgcacagcgtcacaacatg

SEQ ID NO: 92455 - DNA, 75 bp, synthetic construct
  source 1..75: mol_type = other DNA
gcagtgatgcctcgggaggcattattcttatcattgccgctatcctggcgatgattatggccaatagcggcgcaa

SEQ ID NO: 92456 - DNA, 75 bp, synthetic construct
  source 1..75: mol_type = other DNA
tcacgaggacagcgacaacgatcgtgatgaaggaatgctaaaggcaacggactacccgttagcaatggcttttct

SEQ ID NO: 92457 - DNA, 75 bp, synthetic construct
  source 1..75: mol_type = other DNA
gcgaagctggcagaacgcgcgggaatgaacgtccagacgctgcgtaacaagcttaacccggaacaatcacatcag

SEQ ID NO: 92458 - DNA, 75 bp, synthetic construct
  source 1..75: mol_type = other DNA
gctgctggataacgctggcagccgcgccctttattatcattctggcggcgtggggagcagataaactctggcctc

SEQ ID NO: 92459 - DNA, 75 bp, synthetic construct
  source 1..75: mol_type = other DNA
gcatgcgcgtctgcaaactaatcccgctatgtcgagcgtggtcgataccatgagcggtattggtgcatccttcgg

SEQ ID NO: 92460 - DNA, 75 bp, synthetic construct
  source 1..75: mol_type = other DNA
ctgtatgtatcagactttcccaatgcaggaagtggatctccatgggttaattttgatctgtctctcaccggatgc

SEQ ID NO: 92461 - DNA, 75 bp, synthetic construct
  source 1..75: mol_type = other DNA
tccgttccgatgttgttacaacagcggtttgatgagatccattttaagggtactgaacgccctataaaccagaca

SEQ ID NO: 92462 - DNA, 75 bp, synthetic construct
  source 1..75: mol_type = other DNA
gcaacgccgggcggcactattgtgaaagcaacgcctacgtttgatcgcacccgcgcagatgatttgctgttggat

SEQ ID NO: 92463 - DNA, 75 bp, synthetic construct
  source 1..75: mol_type = other DNA
gacggtgataccatcgaggtcatggactcacggaaggcagtgcggatcaggctggtaaatattgatgcgccggaa

SEQ ID NO: 92464 - DNA, 75 bp, synthetic construct
  source 1..75: mol_type = other DNA
ctcacggaaggcggtgcggatcaggctggtaaatattgatgcaccggaaaagaaacaggattatggccggtggtc

SEQ ID NO: 92465 - DNA, 75 bp, synthetic construct
  source 1..75: mol_type = other DNA
gcggaaaaagcgccattgccggggaaatagaaatcgcgatgaaagctattggtgtaccggttaagtggactaatg

SEQ ID NO: 92466 - DNA, 75 bp, synthetic construct
  source 1..75: mol_type = other DNA
ctgacgagcattcagctggcgatatcattgcgcgcatcggcagcctgacgcgtatgctgcgcgacagtttgcggg

SEQ ID NO: 92467 - DNA, 75 bp, synthetic construct
  source 1..75: mol_type = other DNA
acagtacccatgtcattaaaccgaaaaaatctgtggcactttctggcgttccggcgggcaatacggcgctctgca

SEQ ID NO: 92468 - DNA, 75 bp, synthetic construct
  source 1..75: mol_type = other DNA
cagaaacctgcgtgggtcgcatccggtatctgggcgtgctgctttacgacgccgaccgcatcgaggaagcggcga

SEQ ID NO: 92469 - DNA, 75 bp, synthetic construct
  source 1..75: mol_type = other DNA
tacggaccgttcccctggagcgttgattttacggaagattcacttatcgttgatgggaaaagtatcgcggtttac

SEQ ID NO: 92470 - DNA, 75 bp, synthetic construct
  source 1..75: mol_type = other DNA
tactttaagtaactcacaaacgcctgtttcccccaaaacccgctccctcatcctctggacagaacgaggcgcagc

SEQ ID NO: 92471 - DNA, 75 bp, synthetic construct
  source 1..75: mol_type = other DNA
ttgccgatatggcgaacattggcggtcgtcctggtggggcgattaccgcaggttgcttcctgtcgcgctttaccc

SEQ ID NO: 92472 - DNA, 75 bp, synthetic construct
  source 1..75: mol_type = other DNA
gtggatcactattgcaccgttcgtgacagcagtgaagccctgaagtttgctgaacgcatcggtgttgctgccgca

SEQ ID NO: 92473 - DNA, 75 bp, synthetic construct
  source 1..75: mol_type = other DNA
gtggttcaggtactagactttggccattatcaagagaactttatcctaaacagttcctaaagttagatggtgatt

SEQ ID NO: 92474 - DNA, 75 bp, synthetic construct
  source 1..75: mol_type = other DNA
ggtgataaaatctggcaaagcagtgaatattttatgaatgttttctgtaataatgcactaccaggcccatctcca

SEQ ID NO: 92475 - DNA, 75 bp, synthetic construct
  source 1..75: mol_type = other DNA
tgctagacaagcaccattatataatgatggcaagaaaaaatgggggcatggagactcttacacatactgggcaag

SEQ ID NO: 92476 - DNA, 75 bp, synthetic construct
  source 1..75: mol_type = other DNA
tgggggctgacagcgcaaaaggtcgtgaggaagaggcaagaaaattactgcgttgggggcaacaaaactttacta

SEQ ID NO: 92477 - DNA, 75 bp, synthetic construct
  source 1..75: mol_type = other DNA
atttttacgcaagctttaccgctacaaaagccggggtttatcaagtgacggcaaccctcgaaaatggcgattcga

SEQ ID NO: 92478 - DNA, 75 bp, synthetic construct
  source 1..75: mol_type = other DNA
tattcagaaaaccattaatacgctgaatgatactggctcaatggaagcggtctgctttctgactgaactgcacgt

SEQ ID NO: 92479 - DNA, 75 bp, synthetic construct
  source 1..75: mol_type = other DNA
tctctgcaaggggaaacttatgctgatggtacagtgagttttgccagtaacagacgttttttgctggctgcgggt

SEQ ID NO: 92480 - DNA, 75 bp, synthetic construct
  source 1..75: mol_type = other DNA
gtgtggtgtcagccctgttcccgtatcttcaggaaaaacgaatcgttatcgacttaaccggggtggagatcgtgc

SEQ ID NO: 92481 - DNA, 75 bp, synthetic construct
  source 1..75: mol_type = other DNA
ggcctgatgccagtgaataccgcaatgttaccaacgtttatcgtatttcattaaagtcccttgcccgacgctatc

SEQ ID NO: 92482 - DNA, 75 bp, synthetic construct
  source 1..75: mol_type = other DNA
aagtcagggatatcatcgaaaaagacctgtcaagaaaatggactctggctataattgcagatgtatttaatgtat

SEQ ID NO: 92483 - DNA, 75 bp, synthetic construct
  source 1..75: mol_type = other DNA
tatgggtaaaccgttttgtaaactggtacaactttgaacataagcaccgcgggatcaaatatgtcacgccagccg

SEQ ID NO: 92484 - DNA, 75 bp, synthetic construct
  source 1..75: mol_type = other DNA
gcctggatgtcgaaatcgcggcagttattggtaaccacgatactttacgttctctggttgagcgttttgatattc

SEQ ID NO: 92485 - DNA, 75 bp, synthetic construct
  source 1..75: mol_type = other DNA
ttcgtttacctggcggagctgttcactgcgcattacgttgagctgcgtggtcgcgcgctggcgggcgcctctggc

SEQ ID NO: 92486 - DNA, 75 bp, synthetic construct
  source 1..75: mol_type = other DNA
gaagtgacgctcatttttctgagtatcctctggcgtcgcccagtaataatgaaattgatttacttaatctaatcg

SEQ ID NO: 92487 - DNA, 75 bp, synthetic construct
  source 1..75: mol_type = other DNA
ggtttgaagacgccacgggcggtgaacaggtctatatccacgcgcagaagaacatggatacggaggtgctgaata

SEQ ID NO: 92488 - DNA, 75 bp, synthetic construct
  source 1..75: mol_type = other DNA
agcaccagcaccgggcattaccccggaactgcgtcgctacatcggcgaacgttgtgctaaagcgtgtgttgatat

SEQ ID NO: 92489 - DNA, 75 bp, synthetic construct
  source 1..75: mol_type = other DNA
ctgcgcactttctaattcgctaccacagctggttgtcttccgggttattcaggggataggcggcgcaatgatgat

SEQ ID NO: 92490 - DNA, 75 bp, synthetic construct
  source 1..75: mol_type = other DNA
gaaatgcattacaaaatgtaaatgctcaaaaattatccactcttatagtaccaattcctccacttgccgaacaaa

SEQ ID NO: 92491 - DNA, 75 bp, synthetic construct
  source 1..75: mol_type = other DNA
ctcaggcccgtgaacagtttaccggtgcggtggaccggatatttgacacagcggagagcgtctgtgttgcctctg

SEQ ID NO: 92492 - DNA, 75 bp, synthetic construct
  source 1..75: mol_type = other DNA
gccacaccactttttaccaactccatccatgcaacaaatccactacactggataaaattactaaattttacttaa

SEQ ID NO: 92493 - DNA, 75 bp, synthetic construct
  source 1..75: mol_type = other DNA
tacaacacgacagaacagtggctggagcagttcccgttctggtctgagtcgaccctgaagcgtaccttcacccgc

SEQ ID NO: 92494 - DNA, 75 bp, synthetic construct
  source 1..75: mol_type = other DNA
gtgttgcactggctgactatattgccggtgggcaacggcagtttgttgaaatgatgaacaactatgccgagaagc

SEQ ID NO: 92495 - DNA, 75 bp, synthetic construct
  source 1..75: mol_type = other DNA
gaactggaaggaaaaccggggcagaccctgttgctgcaccatgtgccaaatgtgctctccgagcgcatcctcctt

SEQ ID NO: 92496 - DNA, 75 bp, synthetic construct
  source 1..75: mol_type = other DNA
ttaacagtcagtcagcgtcgtactttatttatgcatgcgggattgacagaaaaagaattcaatcagccgtactgg

SEQ ID NO: 92497 - DNA, 75 bp, synthetic construct
  source 1..75: mol_type = other DNA
aacatggcgagacttcatcgtctgctttggttcatcgacgattgaatatttctccctgactggcgcaaccaccgt

SEQ ID NO: 92498 - DNA, 75 bp, synthetic construct
  source 1..75: mol_type = other DNA
atgaaacgaacgcctgtcctgattgatgtgaacggtgttccgcttcgtgagagtctcagctacaacggtggcggc

SEQ ID NO: 92499 - DNA, 75 bp, synthetic construct
  source 1..75: mol_type = other DNA
aaactgcctgttaccatgacggggcattcagaacctgtcacggtggatacctgtttatttgatgggaccggggct

SEQ ID NO: 92500 - DNA, 75 bp, synthetic construct
  source 1..75: mol_type = other DNA
ggctttgtaatgggggctcaatagtatttgacacaaacctgactaaaaccgagctaatgaagttgccctacgggg

SEQ ID NO: 92501 - DNA, 75 bp, synthetic construct
  source 1..75: mol_type = other DNA
tcctggctgaagtacgggcgcagggggtagagatgttctcagaaaaattcggaggtggcactccgctatccaata

SEQ ID NO: 92502 - DNA, 75 bp, synthetic construct
  source 1..75: mol_type = other DNA
cgaacagttgtcccgtgattactcgaaggtcagttattcaagtgcccgcgcatccgccaatgagtcgtggcgcta

SEQ ID NO: 92503 - DNA, 75 bp, synthetic construct
  source 1..75: mol_type = other DNA
cgcagctggcaatgctcctcgataaactggactggcgtcaacccaaaacatcccgccttaatgcactgacaatgt

SEQ ID NO: 92504 - DNA, 75 bp, synthetic construct
  source 1..75: mol_type = other DNA
ttgacctgctaggccgtgaagagaaaacagattgtctggatgtagtcaccatcaacaataaatatctcattaaga

SEQ ID NO: 92505 - DNA, 75 bp, synthetic construct
  source 1..75: mol_type = other DNA
caatgacacggtgtatgcgtttaaggtgcagtttccgtccggtaagggctttaagttcctggcggaagtgcgtca

SEQ ID NO: 92506 - DNA, 75 bp, synthetic construct
  source 1..75: mol_type = other DNA
atgaatccgtctgatgccattgaggcaattgaaaaaccactttcttccctgccttattcactttcccgtcacatc

SEQ ID NO: 92507 - DNA, 75 bp, synthetic construct
  source 1..75: mol_type = other DNA
aatgaaggcaacaggaaatatgccagccaccgatgctttcctgtctgaagtgcgggcgcagggggtagagatgat

SEQ ID NO: 92508 - DNA, 75 bp, synthetic construct
  source 1..75: mol_type = other DNA
acgccaggacacggtatggggaaccgttttctgcgggccggtgtggaggtcgatcgatatggccgtgccgttgcg

SEQ ID NO: 92509 - DNA, 75 bp, synthetic construct
  source 1..75: mol_type = other DNA
gttgcatttaatgttgacgcctttgtcgaaaaacccgatctggaaaaagccaaagagtatatctccggtggtgat

SEQ ID NO: 92510 - DNA, 75 bp, synthetic construct
  source 1..75: mol_type = other DNA
ggaaagtttcgcacagtatgtggctgatacgcacacaccagaaatacaggccaagagaggccggaaaggtggcat

SEQ ID NO: 92511 - DNA, 75 bp, synthetic construct
  source 1..75: mol_type = other DNA
caacggataacggtaaacagaacacgtacttttcgtcgctggataacatgattgcccaggggaacccgatgccgg

SEQ ID NO: 92512 - DNA, 75 bp, synthetic construct
  source 1..75: mol_type = other DNA
cgctgaaaatgcccgcctgaagcgccagctggcagagcgtgacgaggagctggctatcctccaaaaggccgcgac

SEQ ID NO: 92513 - DNA, 75 bp, synthetic construct
  source 1..75: mol_type = other DNA
ctggcgaagctgaagtaccagactgcgcagggcgaactgaaaaccctgacggagatgcagaagcaggaactgctg

SEQ ID NO: 92514 - DNA, 75 bp, synthetic construct
  source 1..75: mol_type = other DNA
cattaacagcgcaaatgaaacgtgaagggatccgccgcttgctggtgttgagcggggaagagggttggtgttttg

SEQ ID NO: 92515 - DNA, 75 bp, synthetic construct
  source 1..75: mol_type = other DNA
attcagaacctgtcacggtggatacctgtttatttgatgggaccggggctggtgatagcagtcgatacgaactgc

SEQ ID NO: 92516 - DNA, 75 bp, synthetic construct
  source 1..75: mol_type = other DNA
ctggacataaaactgctaaacagattcattaccatcgtactgagcattggattgttgtttctggaacagcaaaag

SEQ ID NO: 92517 - DNA, 75 bp, synthetic construct
  source 1..75: mol_type = other DNA
cgcggcattgttaattacgacccgaccgaactggtgatcaccgctcgcgccggaacgccgctggtggcgattgaa

SEQ ID NO: 92518 - DNA, 75 bp, synthetic construct
  source 1..75: mol_type = other DNA
gtgacggctgcacgtaatgaagttgcactggcggaagcacagttcaggggaacgcagattgccacggcgcgggca

SEQ ID NO: 92519 - DNA, 75 bp, synthetic construct
  source 1..75: mol_type = other DNA
agcacaatgagaacctagaatggtataaagaaaatactcccataattaacaccgctgcacaaaaagctaaagagg

SEQ ID NO: 92520 - DNA, 75 bp, synthetic construct
  source 1..75: mol_type = other DNA
gtgcaaataaccgaagccttactttcagcgccgggggaaatccggcgttttgttcagcagggggtggaccactgg

SEQ ID NO: 92521 - DNA, 75 bp, synthetic construct
  source 1..75: mol_type = other DNA
acaacgaggccagactcacagaacaggaacgcaaacttctccatgtactggcaacggcggaaaaaaacgacttac

SEQ ID NO: 92522 - DNA, 75 bp, synthetic construct
  source 1..75: mol_type = other DNA
gaccgacgaataaatgaaaatgccgggctggaaaaaatgcttattggtatgcgggtaaagtccgaacggtccaca

SEQ ID NO: 92523 - DNA, 75 bp, synthetic construct
  source 1..75: mol_type = other DNA
ttctgccgatatttggccggaacttgaacgcactcagcctggtgcatgggggcgtattcagctgactgatgccat

SEQ ID NO: 92524 - DNA, 75 bp, synthetic construct
  source 1..75: mol_type = other DNA
aatgagattcttccatcggtgggaggggaacaggcgacagtaatcaatagctggctacaaaaagttacctccctg

SEQ ID NO: 92525 - DNA, 75 bp, synthetic construct
  source 1..75: mol_type = other DNA
gtttatgcaagtattctccagtatcacagtcctgaaattattcagtttctctcagcggaatttcaggcatctgta

SEQ ID NO: 92526 - DNA, 75 bp, synthetic construct
  source 1..75: mol_type = other DNA
gttgtttccggcgtttgccaaaattcaggacgacaccgaaaagctgcgtgttaacttctacaagctgctgtcggt

SEQ ID NO: 92527 - DNA, 75 bp, synthetic construct
  source 1..75: mol_type = other DNA
ctgtcggcatcctcaaccatgttgtggaagtggaagaactggaagatttcaccttacaaatggcgcaccacatct

SEQ ID NO: 92528 - DNA, 75 bp, synthetic construct
  source 1..75: mol_type = other DNA
gccgcgaaatttaccagtgtcttaaaacaaattgcatttgatttagcatgcagaactatacagcagaatactcca

SEQ ID NO: 92529 - DNA, 75 bp, synthetic construct
  source 1..75: mol_type = other DNA
aaggagcaacaatacgatgcctgttgctgctcagccaggcgagtagtatttgccatccgcgaaccagtgccacgg

SEQ ID NO: 92530 - DNA, 75 bp, synthetic construct
  source 1..75: mol_type = other DNA
gatgcaccgggcaacacgggcctgcaaaacaatctggcgctattgctgtttagtagcgatcggcgtgacgaaggc

SEQ ID NO: 92531 - DNA, 75 bp, synthetic construct
  source 1..75: mol_type = other DNA
ccgccacgcaaaaatgctggaaaccgatcaggcatgggaggtattcgaaaaactggaagattgttatttcagcca

SEQ ID NO: 92532 - DNA, 75 bp, synthetic construct
  source 1..75: mol_type = other DNA
aataagaatggtaacactttaactgttaaaggtgatggagatattgcagttactgttaatgataaaggaatgacg

SEQ ID NO: 92533 - DNA, 75 bp, synthetic construct
  source 1..75: mol_type = other DNA
attcgcgtaattcgtggtgtgaaagtaccaggcggaaggcttggaataaaaatcaccgaactggagaacgtatga

SEQ ID NO: 92534 - DNA, 75 bp, synthetic construct
  source 1..75: mol_type = other DNA
tcacctatgcttcagcttctcaggcgcatttgcaggcaagttctcttgagcctctgtttaagcgagtgaaggatg

SEQ ID NO: 92535 - DNA, 75 bp, synthetic construct
  source 1..75: mol_type = other DNA
gttgcctgccactaaggcgattcccaaagagatgctaccgatcgtcgacaagccaatgattcagtacattgttga

SEQ ID NO: 92536 - DNA, 75 bp, synthetic construct
  source 1..75: mol_type = other DNA
caaccctgatccggaaatcgtggatattgcctgcggtcgctcctctgccccgatgccgcagcgagtaacagaaga

SEQ ID NO: 92537 - DNA, 75 bp, synthetic construct
  source 1..75: mol_type = other DNA
gggttatatgcaagcgtttgtgaagtatgggctgcgtaacctgaaggaaggcgctaagttccgcaaaggcattga

SEQ ID NO: 92538 - DNA, 75 bp, synthetic construct
  source 1..75: mol_type = other DNA
tatctggtcaacagcgcagtgcgtacgctgctgtttggctactttggccgcaaaatttatcgcccggggctgcat

SEQ ID NO: 92539 - DNA, 75 bp, synthetic construct
  source 1..75: mol_type = other DNA
agcaggcggtactggtacacatctattttacgcaagacaaagatatggaagacctccaggagtttgaatctctgg

SEQ ID NO: 92540 - DNA, 75 bp, synthetic construct
  source 1..75: mol_type = other DNA
atgactctcaataaaaccgatcgcatcgttattacgctgggtaaacagatcgttcacggcaaatacgtgccaggc

SEQ ID NO: 92541 - DNA, 75 bp, synthetic construct
  source 1..75: mol_type = other DNA
gcagccaggtgctggcaaaacgtatgccgggtgacctctctgaatactccgtcattcagaccaaagaaccgctgg

SEQ ID NO: 92542 - DNA, 75 bp, synthetic construct
  source 1..75: mol_type = other DNA
cgttctgctggagtcacgattgataaccttgaggccaagtgcgcggcgctggcggcggagaatgcggggatgaag

SEQ ID NO: 92543 - DNA, 75 bp, synthetic construct
  source 1..75: mol_type = other DNA
tatcaggtaatataagcataaatcatattatcaatactacccagaaacataacaataataccaatctgatctttg

SEQ ID NO: 92544 - DNA, 75 bp, synthetic construct
  source 1..75: mol_type = other DNA
ccattgtgtcaggcgtgtcataaccagaaaacgaaatggcttgatccggcaacaaaaagcaagcgtgccgcaggt

SEQ ID NO: 92545 - DNA, 75 bp, synthetic construct
  source 1..75: mol_type = other DNA
agtccatgggcaaaaaaccgaatgcccctattgtctccattggtgccgtattcttcgatccgcaaagcggtgaac

SEQ ID NO: 92546 - DNA, 75 bp, synthetic construct
  source 1..75: mol_type = other DNA
caacggtatcaccggacggtaaacgcagcaccatcgaatatgataaacgcgggcgtccggtgagtgtgacggaag

SEQ ID NO: 92547 - DNA, 75 bp, synthetic construct
  source 1..75: mol_type = other DNA
ctggcgcagttgcgccatctggctacgcgcctggtgcgtggctggacccaccttgaaagacagaaaggcgggatc

SEQ ID NO: 92548 - DNA, 75 bp, synthetic construct
  source 1..75: mol_type = other DNA
gcatacattgcgtctgccgccgcaggaagggcgtctgagaagtcgtttttatcagcttcaggcaatagaaaaaga

SEQ ID NO: 92549 - DNA, 75 bp, synthetic construct
  source 1..75: mol_type = other DNA
gcgtctgcattgcctctgttgcacgcacggttctgcgcgccgtccgtgactcggtggtctctgttgcccgcgcgg

SEQ ID NO: 92550 - DNA, 75 bp, synthetic construct
  source 1..75: mol_type = other DNA
ctggaggataaacacgatcagcaccagaccctgactgcggcggtactggcgcgagataccgcgcgcgccagtgag

SEQ ID NO: 92551 - DNA, 75 bp, synthetic construct
  source 1..75: mol_type = other DNA
tcaaagaacagctgcgtatcgctgccggtcaaccgctgtcgatcaagcaagaagaagttcacgttcgcggccatg

SEQ ID NO: 92552 - DNA, 75 bp, synthetic construct
  source 1..75: mol_type = other DNA
tattcaggtagaacacccggttactgaaatgatcactggcgttgacctgatcaaagaacagctgcgtatcgctgc

SEQ ID NO: 92553 - DNA, 75 bp, synthetic construct
  source 1..75: mol_type = other DNA
gactggcagacgctggagctggtgttcaccgccggcagtgccacggttactccgaaactgaatggagtggctggc

SEQ ID NO: 92554 - DNA, 75 bp, synthetic construct
  source 1..75: mol_type = other DNA
atgacagtgatgacgctcaatctcgttgaaaaacagccagcaactatgcgccggataattggtaagcatcttgcc

SEQ ID NO: 92555 - DNA, 75 bp, synthetic construct
  source 1..75: mol_type = other DNA
cgaggattaccgaatggtatttcggaagcgaaaggtgcagcttcgagtgcaggaagtattgctaatcgaggtata

SEQ ID NO: 92556 - DNA, 75 bp, synthetic construct
  source 1..75: mol_type = other DNA
gcaaaaagttttgtcgatgaggtggaggcggcctggtcggaatacgcagaagggatgtttggcgagatcgacgtg

SEQ ID NO: 92557 - DNA, 75 bp, synthetic construct
  source 1..75: mol_type = other DNA
aaaaaaatatccattaactttgatactgtattttattacaaaagagaaaatttgaagattggtgagagattagct

SEQ ID NO: 92558 - DNA, 75 bp, synthetic construct
  source 1..75: mol_type = other DNA
caacccaggatgtctgtggtcatggattccgggcgatggcatgtagtgcattaatagaatcaggtttgtggtccc

SEQ ID NO: 92559 - DNA, 75 bp, synthetic construct
  source 1..75: mol_type = other DNA
atgggactgaatgaatatcagccggatttcagtctgacagcggaaggtcaggatatcacgaaggcaataaaacgt

SEQ ID NO: 92560 - DNA, 75 bp, synthetic construct
  source 1..75: mol_type = other DNA
gaccgtgccctgtctgtggatgagtatttctggcgacacatactgcaccggggacatcagcaggtgctgtttgtg

SEQ ID NO: 92561 - DNA, 75 bp, synthetic construct
  source 1..75: mol_type = other DNA
cgggtgttgctgggtgagaataaagtgtgtggcctgactcgcccacaagatgccagagccgcttatgacgctggt

SEQ ID NO: 92562 - DNA, 75 bp, synthetic construct
  source 1..75: mol_type = other DNA
ctgcttatccgtgtggacgggctgaatgccagctgcgtctctgaaatcctgctgattcctagtaaggaagatgct

SEQ ID NO: 92563 - DNA, 75 bp, synthetic construct
  source 1..75: mol_type = other DNA
cccgtattgataaccgtctggttcacggtcaggttggcgtgacctggacatccaccatcggtgcgaatctgctgg

SEQ ID NO: 92564 - DNA, 75 bp, synthetic construct
  source 1..75: mol_type = other DNA
gtttgatcgcagccgggctcagacctgtggtgtgtggacgccgaaagcccccggggacaccggttatcaggggat

SEQ ID NO: 92565 - DNA, 75 bp, synthetic construct
  source 1..75: mol_type = other DNA
ttagtgaaaagaaatctaacacggctgcactttttaaaacaaaaagcgcaaaagtgattttgtttgttctgctga

SEQ ID NO: 92566 - DNA, 75 bp, synthetic construct
  source 1..75: mol_type = other DNA
tgcaggactgactggtgccctgaatatgagtctgcatgagctggaaaaaatgctggagcgtctgctggctcagaa

SEQ ID NO: 92567 - DNA, 75 bp, synthetic construct
  source 1..75: mol_type = other DNA
tggtgtcactatcagtaacccagtatttactgaagatgccattaacaagagaaaacaagaacgggagctattaaa

SEQ ID NO: 92568 - DNA, 75 bp, synthetic construct
  source 1..75: mol_type = other DNA
ttttgctgatttaaacgcgcaggttgagcaaattagtcagcaatgtctgactgcatttaaccataagttcagcca

SEQ ID NO: 92569 - DNA, 75 bp, synthetic construct
  source 1..75: mol_type = other DNA
gatacgttgttccttttggggagcgaagcgctggagtcgatgattaagcatgaggcgacccgtccgttggtgttc

SEQ ID NO: 92570 - DNA, 75 bp, synthetic construct
  source 1..75: mol_type = other DNA
ttgacgttttgcggggacctgccttttgttccctctggtattcaccatcacctgtttgagaaccctcgccgcaag

SEQ ID NO: 92571 - DNA, 75 bp, synthetic construct
  source 1..75: mol_type = other DNA
atttccgtcgcacgcttaaccgagaaaaaaggcctgcatgtggcgatcgaagcctgccgtcagttgaaagagcag

SEQ ID NO: 92572 - DNA, 75 bp, synthetic construct
  source 1..75: mol_type = other DNA
caatattttcataacaattctaaataatttgagctatgcttcagaagcagcgcaagaaagatatacaatgaatga

SEQ ID NO: 92573 - DNA, 75 bp, synthetic construct
  source 1..75: mol_type = other DNA
aggtgcgcagaaacagctggcgaagtatatccagcaagttgacgaccaggtaaatgaagaactggaaaaagacct

SEQ ID NO: 92574 - DNA, 75 bp, synthetic construct
  source 1..75: mol_type = other DNA
gtggattttggtgatgtgtcggcggcagatgtggcaaatgaccggaaccgccgtaaagtgacagtcccggtgaag

SEQ ID NO: 92575 - DNA, 75 bp, synthetic construct
  source 1..75: mol_type = other DNA
gccctgtttaaggaccttatctgggcgttcagtgatttcgcccgcgatcgccgtggagtgtgcgatccggaagcc

SEQ ID NO: 92576 - DNA, 75 bp, synthetic construct
  source 1..75: mol_type = other DNA
ttgctgggccaatgcaagcctgggggcagccgacctttgaaggaacgcgacctaccggaagatttccgacccgaa

SEQ ID NO: 92577 - DNA, 75 bp, synthetic construct
  source 1..75: mol_type = other DNA
atgaaaacattacccgacacacacgtacgggcggcatcgcgctgcccgtctcccgtcaccatctggcagacactg

SEQ ID NO: 92578 - DNA, 75 bp, synthetic construct
  source 1..75: mol_type = other DNA
cgttcagtgatttcgcccgcgatcgtcgtggtgtgcacgatccggaagcccgttacctcgccggtaatccctggt

SEQ ID NO: 92579 - DNA, 75 bp, synthetic construct
  source 1..75: mol_type = other DNA
gaccagccgggattcagcgcaggaacttcgtcgcagttaatcaacagcattgatatcctccgggcacgccgggca

SEQ ID NO: 92580 - DNA, 75 bp, synthetic construct
  source 1..75: mol_type = other DNA
gatgcagtggtggtcggactatctggatatatgcagaaaagcatatgtgtcgccttatatgatggttcaggagaa

SEQ ID NO: 92581 - DNA, 75 bp, synthetic construct
  source 1..75: mol_type = other DNA
tattggagtgcgttattccggccgcggggccaaaatgcgaatgccgcatatcgtacccctctcagaacagtccat

SEQ ID NO: 92582 - DNA, 75 bp, synthetic construct
  source 1..75: mol_type = other DNA
gggctcagagacatcgacactctctgaatttaatcctaatccggaactgaccgacctgatgtttgataaatataa

SEQ ID NO: 92583 - DNA, 75 bp, synthetic construct
  source 1..75: mol_type = other DNA
gccgatgaaagcaggccagcgtttaacgcttaaacgcccgcagcacgggatgcgcagttatctggcggtcgcggg

SEQ ID NO: 92584 - DNA, 75 bp, synthetic construct
  source 1..75: mol_type = other DNA
atgaaaaagatagctgctatatcattagttagtgtttttcttatgtctggttgtgctgtacataatgatgaaaca

SEQ ID NO: 92585 - DNA, 75 bp, synthetic construct
  source 1..75: mol_type = other DNA
agcatctggatgaacgcaggttaatgctgcaatggtgggcagattttttagataaaagccaaaaagaaaaaattt

SEQ ID NO: 92586 - DNA, 75 bp, synthetic construct
  source 1..75: mol_type = other DNA
gaataaagaggtttggaattctctcaagaccggctttaaagatgcaagcattggaacattagttgacgtttcaag

SEQ ID NO: 92587 - DNA, 75 bp, synthetic construct
  source 1..75: mol_type = other DNA
atgaaggtcggcttctttttactgaaatttccgctgtcgtcggaaaccttcgttctcaaccaaatcactgcgttt

SEQ ID NO: 92588 - DNA, 75 bp, synthetic construct
  source 1..75: mol_type = other DNA
atttacgggatctggtcaccactcatcggggaatcctcccgtgtgtgcacgcatccggataactggaagctggta

SEQ ID NO: 92589 - DNA, 75 bp, synthetic construct
  source 1..75: mol_type = other DNA
tgacccgtcatcctgaaaagccggaataccacgtggtgctgtgcgtcagacaggagtatttcgacggccctgaac

SEQ ID NO: 92590 - DNA, 75 bp, synthetic construct
  source 1..75: mol_type = other DNA
ctaccgtgacgcttgctcaggcaagggcaaagcgtgatgaagctaaaaagctgttagtgcagggcatcgacccaa

SEQ ID NO: 92591 - DNA, 75 bp, synthetic construct
  source 1..75: mol_type = other DNA
tcgtgccgccgacgctggttgaagagcaaaccgtgctgcaaaaggtcaccgaagtcagccgccattatggtgaag

SEQ ID NO: 92592 - DNA, 75 bp, synthetic construct
  source 1..75: mol_type = other DNA
cagatggacggctggcgaaacaacgcagaaaccgcgcggggaatgagccgctcgccggagatatggccgggacgg

SEQ ID NO: 92593 - DNA, 75 bp, synthetic construct
  source 1..75: mol_type = other DNA
gatgggaacgctcgccggggtgctgcgcggcgtgtttaacgtgccaagttttgttgccacgctgggtttatggag

SEQ ID NO: 92594 - DNA, 75 bp, synthetic construct
  source 1..75: mol_type = other DNA
tgatgcactgaacacgctgaacgagctggctgcggcgttgggcaacgacccgaattttgcgaccaccatgactaa

SEQ ID NO: 92595 - DNA, 75 bp, synthetic construct
  source 1..75: mol_type = other DNA
tccggcactttccactccaggagctggcggtctggcggtcagtatttcagcgggagcattatcggcagctattgc

SEQ ID NO: 92596 - DNA, 75 bp, synthetic construct
  source 1..75: mol_type = other DNA
cgtggcactgcgatttcgtcgcgccagatggatcaagagttagacgctctcttgaaacatcggacaaaaggcaag

SEQ ID NO: 92597 - DNA, 75 bp, synthetic construct
  source 1..75: mol_type = other DNA
gcatggtggaataacgatccggttactacagcccgtaacattcatattaactggggtgggattcattatgatggc

SEQ ID NO: 92598 - DNA, 75 bp, synthetic construct
  source 1..75: mol_type = other DNA
tcccgtcaccatctggcagacactgctctcccgactactggaccagcactacggccttacgctgaatgacacacc

SEQ ID NO: 92599 - DNA, 75 bp, synthetic construct
  source 1..75: mol_type = other DNA
gccacgcctttgccgcccactggggcgacggcacgacctcatcctccgatggccagcgcttccgcgcgggtggcc

SEQ ID NO: 92600 - DNA, 75 bp, synthetic construct
  source 1..75: mol_type = other DNA
caggaacaggacggcattaaatcgcacacccacagcgccagcgcatccagtacggatttggggacgaaaaccaca

SEQ ID NO: 92601 - DNA, 75 bp, synthetic construct
  source 1..75: mol_type = other DNA
atcagcgcctgcaaggcgctttcacatcgacgtatgcactggcggcaaaattagaccagctgctgcaacaaacta

SEQ ID NO: 92602 - DNA, 75 bp, synthetic construct
  source 1..75: mol_type = other DNA
ttatcaagtccgtcaatggccagccctatcgaatcaacaccaccgagctgaataaagttcgcgctcagctcgata

SEQ ID NO: 92603 - DNA, 75 bp, synthetic construct
  source 1..75: mol_type = other DNA
gcgtcgccgggccattgatgcgctgctgcaggggctctgttttcactatgatccgctggccaaccgcgtccagtg

SEQ ID NO: 92604 - DNA, 75 bp, synthetic construct
  source 1..75: mol_type = other DNA
acataaaaatgaccatgcgctatgctcatctggctcctgaccacctagaaacagcgctacgttttaatccattag

SEQ ID NO: 92605 - DNA, 75 bp, synthetic construct
  source 1..75: mol_type = other DNA
tcgcaccgcctacgacctcgcagatgagctgaacgattacggcgaacagagcgtacagatttacgggatctggtc

SEQ ID NO: 92606 - DNA, 75 bp, synthetic construct
  source 1..75: mol_type = other DNA
gacagcagtctggcaaaagccaaatcggatgcacaggcggcgtttacgaaacaacaggggcgagcttctcttgtt

SEQ ID NO: 92607 - DNA, 75 bp, synthetic construct
  source 1..75: mol_type = other DNA
cggatcggaaaaccgatcccggtcctgcatttgattgggcacggtttcgtgcgctggtcagcaaggagacaacat

SEQ ID NO: 92608 - DNA, 75 bp, synthetic construct
  source 1..75: mol_type = other DNA
gttggtaattattctcttaatattcttggacaaaatatttcaagaaccatgacaggaaaaaaaccttatgacata

SEQ ID NO: 92609 - DNA, 75 bp, synthetic construct
  source 1..75: mol_type = other DNA
gatcaacaataaaaatgcaaccggcggcgacggcgatacccagtttggccgtgcgatgcatgaactgaacattca

SEQ ID NO: 92610 - DNA, 75 bp, synthetic construct
  source 1..75: mol_type = other DNA
cgccaggcgtttgatgttcatcgggaactggatgtcgatgacgatcttgatatggtatttaactggcgtgaagct

SEQ ID NO: 92611 - DNA, 75 bp, synthetic construct
  source 1..75: mol_type = other DNA
caccgaacccttgtcgtacagctgctaaatatctttttgctcgcgccttttttaagaacgtaaggcccggcattc

SEQ ID NO: 92612 - DNA, 75 bp, synthetic construct
  source 1..75: mol_type = other DNA
cgatattgtccccagtcagattatcagcgtgctgtccgttgccggagtgtatcaggtcgaactggtgacaccagt

SEQ ID NO: 92613 - DNA, 75 bp, synthetic construct
  source 1..75: mol_type = other DNA
ttcaatattattctgtctatctggttcttcgtctccagtctgaatgtcctggatgagagcaaacgcgatcgacta

SEQ ID NO: 92614 - DNA, 75 bp, synthetic construct
  source 1..75: mol_type = other DNA
atgggcggaagtaaaggcggtggtgataccgaagtaaaaccaacagcagcgcaaatagcacaggaagaggtggca

SEQ ID NO: 92615 - DNA, 75 bp, synthetic construct
  source 1..75: mol_type = other DNA
ccacatctccccgggcgtttacgctcgtgctttcctggaaggtcgtctgactcaggagcagctggataacttccg

SEQ ID NO: 92616 - DNA, 75 bp, synthetic construct
  source 1..75: mol_type = other DNA
caaacgacggtggagagagcgtaacgtacacgctgcggaacattcccgccgacatcgaccgggtgatcaccgacc

SEQ ID NO: 92617 - DNA, 75 bp, synthetic construct
  source 1..75: mol_type = other DNA
ggtaatccctatctgaggacggagaccagaaacacgtatacatcgcgctttacagaagtggcaatggcgttcgcc

SEQ ID NO: 92618 - DNA, 75 bp, synthetic construct
  source 1..75: mol_type = other DNA
cgccctgtgcctggtcattgtgggctggtgcagttattctctgcagacggtcttcgccgccagagcggcggaatc

SEQ ID NO: 92619 - DNA, 75 bp, synthetic construct
  source 1..75: mol_type = other DNA
aaacagacaacgcctggttgtactcgctgtcacaccagaccagtgacttcggcgaatcagaatggattcatttta

SEQ ID NO: 92620 - DNA, 75 bp, synthetic construct
  source 1..75: mol_type = other DNA
acaggcctggcaggaatatcccaaacgtgctggtggtaattccaagtcagcagccttcaaagcctggaaagcccg

SEQ ID NO: 92621 - DNA, 75 bp, synthetic construct
  source 1..75: mol_type = other DNA
ggagtatgctttagtaagggtcccttatttaacaaatcaacaaatcacaaacttttccatttctgaaaaattcag

SEQ ID NO: 92622 - DNA, 75 bp, synthetic construct
  source 1..75: mol_type = other DNA
ccatcgggaaaaataacgccgtctgtaatgaatatccgtccccaatcctgcccaaagaacgctggcgttaccaga

SEQ ID NO: 92623 - DNA, 75 bp, synthetic construct
  source 1..75: mol_type = other DNA
aatggaagaaaaaatagacgccgtaatccgtgagaaatacgggttacccccagttatgagtacgcccgtgaaata

SEQ ID NO: 92624 - DNA, 75 bp, synthetic construct
  source 1..75: mol_type = other DNA
gggattgtggaaacgcgattactcataatacagtgtgttgcccgtattgtggttctgtcgaccccttcggctact

SEQ ID NO: 92625 - DNA, 75 bp, synthetic construct
  source 1..75: mol_type = other DNA
atctggaagaacgccgcttgatgctacaatggtgggccgattttctggatgcaaacagagaaaaatttatcagtc

SEQ ID NO: 92626 - DNA, 75 bp, synthetic construct
  source 1..75: mol_type = other DNA
cagatatttatcgccgcaccacaactgtcagcagtggctctcccctgggccgaatggtgtgaggagccacaggcg

SEQ ID NO: 92627 - DNA, 75 bp, synthetic construct
  source 1..75: mol_type = other DNA
gtgaacaaaccacgatccctgcgccacgccctcaataaagcagtgccttatgtccgtaataacccggacaaactg

SEQ ID NO: 92628 - DNA, 75 bp, synthetic construct
  source 1..75: mol_type = other DNA
gtacgctgaatgattttctcggtgccatgtcggaggatgacgtccggccggaggcactgcgtcgttttgaactga

SEQ ID NO: 92629 - DNA, 75 bp, synthetic construct
  source 1..75: mol_type = other DNA
tgtgcgtgccggtttccgtctgggcagccacaacgatatgacctttggcgaaggcacctcatcccgtgcccccct

SEQ ID NO: 92630 - DNA, 75 bp, synthetic construct
  source 1..75: mol_type = other DNA
acgtcagctgcctgctgaacattggcggccgactgcaacgggaaggccagccggtcaaagtgatgcatattgctg

SEQ ID NO: 92631 - DNA, 75 bp, synthetic construct
  source 1..75: mol_type = other DNA
gcaaaaactggaagaagagctggatgtggtgctgtttgaccgctcgggccatcgcaccaaattcaccaatgtcgg

SEQ ID NO: 92632 - DNA, 75 bp, synthetic construct
  source 1..75: mol_type = other DNA
caaagcctggaaagcccgaatcagggaaggtgtgacaccagaaaccatgctcaacggtgtgaaacgctatgctgc

SEQ ID NO: 92633 - DNA, 75 bp, synthetic construct
  source 1..75: mol_type = other DNA
cagaaaagccacagacagagcaagtatctactgttaaagctgttcctgaacagcttccccctacggaagataaaa

SEQ ID NO: 92634 - DNA, 75 bp, synthetic construct
  source 1..75: mol_type = other DNA
tgtggccctgggaacccgccacagcatgaaagcgtcaacggacaataacgacttccgcgcccggggttggggctg

SEQ ID NO: 92635 - DNA, 75 bp, synthetic construct
  source 1..75: mol_type = other DNA
ttctgattatttcggtggcctgcgcaatcgggattatgcgaattattcattcagtgaaaaagattgagcgttttt

SEQ ID NO: 92636 - DNA, 75 bp, synthetic construct
  source 1..75: mol_type = other DNA
cacaggagctctgttatggcaggtaaagttacggaaaccgctgttgtgggtggcgtggatatacataaagatctg

SEQ ID NO: 92637 - DNA, 75 bp, synthetic construct
  source 1..75: mol_type = other DNA
gtcattcgaaaagcgttacacgctcaatgtcattgtgaccgactttaccggtgattttgacctgctcatcgtgcc

SEQ ID NO: 92638 - DNA, 75 bp, synthetic construct
  source 1..75: mol_type = other DNA
gttaccggttaaaagagaaacgtaaagctggggtgcagaccaaaaacacaacgccaatcattgatgatgaaatgg

SEQ ID NO: 92639 - DNA, 75 bp, synthetic construct
  source 1..75: mol_type = other DNA
cctcaaccaaagaataaacggatccgctggctggagccccatgaagcacaaaggctgattgatgaatgtccggag

SEQ ID NO: 92640 - DNA, 75 bp, synthetic construct
  source 1..75: mol_type = other DNA
atcctgtaactcagccaacataataaaaaacaaagacttctctcctgatgaaatagaaaaatccgcaaatatgaa

SEQ ID NO: 92641 - DNA, 75 bp, synthetic construct
  source 1..75: mol_type = other DNA
gacagtatcacggggcgaggtcgtctcaattctgtttgttgagccggtcatgagcaacgatatcagtcccacctc

SEQ ID NO: 92642 - DNA, 75 bp, synthetic construct
  source 1..75: mol_type = other DNA
ttctgattatttcggtggcctgcgccattgggattatgcgaattattaattcagtgaaaaagattgaacgctttt

SEQ ID NO: 92643 - DNA, 75 bp, synthetic construct
  source 1..75: mol_type = other DNA
gaatgagcgcgataaagcaatcgaagcgtggttaacgcattcagccgccccctctcttgattctatccgcgaaaa

SEQ ID NO: 92644 - DNA, 75 bp, synthetic construct
  source 1..75: mol_type = other DNA
atggcctcacactgaatgacacaccgttcgccgatgaacgtgtgattgagcagcatattgaagctggcatttcac

SEQ ID NO: 92645 - DNA, 75 bp, synthetic construct
  source 1..75: mol_type = other DNA
tggtgaatgaagtggcacgtcatgccggagcgtcatcacagagtgcagcggcggcaaagaaatccgaaacggcag

SEQ ID NO: 92646 - DNA, 75 bp, synthetic construct
  source 1..75: mol_type = other DNA
ttacattaactaacgagatggctgacatggtgcgcgcccgtgtggcttccggtgcctatgcttcagaaagcgagg

SEQ ID NO: 92647 - DNA, 75 bp, synthetic construct
  source 1..75: mol_type = other DNA
ttgcaggacgtcaggcggctatggcaatgctggaagagtacgacacggatatcaacgcacgtgaaagtgccttgt

SEQ ID NO: 92648 - DNA, 75 bp, synthetic construct
  source 1..75: mol_type = other DNA
caaagacgagcgaaaccaacgcaaagtccagccagacggcagcgaagaccagcgaaacgaatgctaaagccagtg

SEQ ID NO: 92649 - DNA, 75 bp, synthetic construct
  source 1..75: mol_type = other DNA
gagaaagacgagatgaaccgggtgttcatcttcggtaaggttattgggagcatgccgcagacatataggaagcat

SEQ ID NO: 92650 - DNA, 75 bp, synthetic construct
  source 1..75: mol_type = other DNA
acctgattcgcaccgcctacgacctcgcagatgagctgaacgattacggcgaacagagtgtacagatttacggga

SEQ ID NO: 92651 - DNA, 75 bp, synthetic construct
  source 1..75: mol_type = other DNA
atctgacccgccatataatgtttttcgccaccaccggtggcggtaaaacggaaaccatctttgcctgggcgatta

SEQ ID NO: 92652 - DNA, 75 bp, synthetic construct
  source 1..75: mol_type = other DNA
tggaagatgagaaccggcgtttaaagcagatgtttgccgacctgagccttgaatgccgggcactgaaagacgtca

SEQ ID NO: 92653 - DNA, 75 bp, synthetic construct
  source 1..75: mol_type = other DNA
tgaaaaatacgcgctggtacgtaccgaccagccgggattcagcgcaggagccccgtcgcagttaatcaacagcat

SEQ ID NO: 92654 - DNA, 75 bp, synthetic construct
  source 1..75: mol_type = other DNA
tacctgcagaacgtgaagaactacaaggagtgaaacactccagccgtggctctaagatgaaaacccctcaccttg

SEQ ID NO: 92655 - DNA, 75 bp, synthetic construct
  source 1..75: mol_type = other DNA
atgagattgagagtcaggaggatttttatcgtgactttagccaaacctttggtctggcgaaagataaggtacgcg

SEQ ID NO: 92656 - DNA, 75 bp, synthetic construct
  source 1..75: mol_type = other DNA
gaaatgccaagcccgccgacaagcctgtaaagctcactgacggcaacggcatgcatcttcttattcatcccaatg

SEQ ID NO: 92657 - DNA, 75 bp, synthetic construct
  source 1..75: mol_type = other DNA
gctggatgaacgatccgcgcgttgagtatttctgggagcaaagtggctcactggaggtacagatcgcctatctgg

SEQ ID NO: 92658 - DNA, 75 bp, synthetic construct
  source 1..75: mol_type = other DNA
tcgatgctctgttctggtgtgccggttcgcagggaagtatgtacccgttcaatggctgggtgagtaatgagtcca

SEQ ID NO: 92659 - DNA, 75 bp, synthetic construct
  source 1..75: mol_type = other DNA
accggcctgatgacccgcgacaattacagaacggtaaataacattaccctgggtaagcatcaggagtcgaaacga

SEQ ID NO: 92660 - DNA, 75 bp, synthetic construct
  source 1..75: mol_type = other DNA
ggaagcggagtattgatagttttagtacgcgcgatctccttgtccctatcaaagtagttgaggctacagggcgtc

SEQ ID NO: 92661 - DNA, 75 bp, synthetic construct
  source 1..75: mol_type = other DNA
gctgctggaatcgaccctcgcgagcataaacgtgctgtgaaagaagaacaggcgaaagaggctattaccttcgag

SEQ ID NO: 92662 - DNA, 75 bp, synthetic construct
  source 1..75: mol_type = other DNA
ccgccgccggagccggtcacccgcccggtggagctttatatcaatggcgaactggtgagcaagtgggatgaatga

SEQ ID NO: 92663 - DNA, 75 bp, synthetic construct
  source 1..75: mol_type = other DNA
gcacactgacgcagaaataatccgactcagtgactgcgtgattgacgtccttcttgacggtcacggcaaccctat

SEQ ID NO: 92664 - DNA, 75 bp, synthetic construct
  source 1..75: mol_type = other DNA
gtacttttcctccctggataacatgattgcccagggtaacccgatgccggtgccttacggggaaatgctggttgg

SEQ ID NO: 92665 - DNA, 75 bp, synthetic construct
  source 1..75: mol_type = other DNA
tggttgctacgggggccagctccatgtcatgggagtaccgttacaccctgaacgtggtgattgaggatttcagcg

SEQ ID NO: 92666 - DNA, 75 bp, synthetic construct
  source 1..75: mol_type = other DNA
ctcagtagcgccaccaacagcgattcagaaacgctggcggcaacaccaaaggcggtaaaggcagcatatgacctt

SEQ ID NO: 92667 - DNA, 75 bp, synthetic construct
  source 1..75: mol_type = other DNA
gacaagggcgaccgccgggcggacgcactggatatacagacatcggatttgtggcgcgatgtgagctgggccatc

SEQ ID NO: 92668 - DNA, 75 bp, synthetic construct
  source 1..75: mol_type = other DNA
caggcagcagagccgtataaatatgtcttacagccgctgcctgatgtgtggataccatttaacgattcgctggat

SEQ ID NO: 92669 - DNA, 75 bp, synthetic construct
  source 1..75: mol_type = other DNA
tgatggctatccttaccttcttgctaacgaagcctcgttacgtgatctccaacaacgttgtccggccagtgtaaa

SEQ ID NO: 92670 - DNA, 75 bp, synthetic construct
  source 1..75: mol_type = other DNA
tttgaaaatagtaaagcagctattttttctggcttaaaaaacggcattggtgtaggaacaaccgaattacatgtt

SEQ ID NO: 92671 - DNA, 75 bp, synthetic construct
  source 1..75: mol_type = other DNA
gaacagcaggcagccggacacgaaacactggccgatgtcccggcgccattaattaacggagaaagcgtcaatctc

SEQ ID NO: 92672 - DNA, 75 bp, synthetic construct
  source 1..75: mol_type = other DNA
gcgaagaacagcgatttcccgggtaactggtggattatcgagacaaaacacaacgtggcggacgttctggccgtc

SEQ ID NO: 92673 - DNA, 75 bp, synthetic construct
  source 1..75: mol_type = other DNA
atgtttcaactgtaaaagggtatcccattccttgccctccaattgaggagcaaaatcagataattcgaaagctca

SEQ ID NO: 92674 - DNA, 75 bp, synthetic construct
  source 1..75: mol_type = other DNA
tagtgaggaagagaagccgtttgaattgccggagggatgggagtgggtgcgtattagtgaaattggacatgactg

SEQ ID NO: 92675 - DNA, 75 bp, synthetic construct
  source 1..75: mol_type = other DNA
atgatggttgcactggtcagttccactctggccctttcagggtgtggtgcgatgagcacagcaatcaagaagcgt

SEQ ID NO: 92676 - DNA, 75 bp, synthetic construct
  source 1..75: mol_type = other DNA
gcaaccggcctgggtaaatatggcgcacaaataattattaatgatattactgccgaacgcgcagaacttgctgta

SEQ ID NO: 92677 - DNA, 75 bp, synthetic construct
  source 1..75: mol_type = other DNA
aatcacagcactaggcgactatcccgaaaatacaaccactatcgccccgttaacgccatacgataaatgggatgg

SEQ ID NO: 92678 - DNA, 75 bp, synthetic construct
  source 1..75: mol_type = other DNA
aaagcgagagtgccgcagctggttctgcaacagcggcagctaatagccaaaaagctgcaaaaaccagtgaaacta

SEQ ID NO: 92679 - DNA, 75 bp, synthetic construct
  source 1..75: mol_type = other DNA
atgaaaaagaccttgagaatacagtttggcgagcgggtaaaagaactccgcatagccaccggattgagccaggaa

SEQ ID NO: 92680 - DNA, 75 bp, synthetic construct
  source 1..75: mol_type = other DNA
cgcgttacttccgtccggctgaagttgaaacgctgctcggtgacccgaccaaagcgcacgaaaaactgggctgga

SEQ ID NO: 92681 - DNA, 75 bp, synthetic construct
  source 1..75: mol_type = other DNA
tcagaagctggtggagcaaaacgcacacactgggttattactcggcgaactgaaaaaagataccacggtggcgca

SEQ ID NO: 92682 - DNA, 75 bp, synthetic construct
  source 1..75: mol_type = other DNA
atcttgcagaacgagtggttctcatgcagtggtggagtgattatgtgcaagctcaaaggctaaaagccattgcag

SEQ ID NO: 92683 - DNA, 75 bp, synthetic construct
  source 1..75: mol_type = other DNA
gttagatgagaaggtaaagacatcaggtatctcacaagaccatgcagcagacatctggcgcagcttagagagaaa

SEQ ID NO: 92684 - DNA, 75 bp, synthetic construct
  source 1..75: mol_type = other DNA
agtctgattcagctgaaattacaggccggacggaaactgacgcaggcagaaacaacccagcttaacgctgtgctg

SEQ ID NO: 92685 - DNA, 75 bp, synthetic construct
  source 1..75: mol_type = other DNA
tggcatcgctggaagcagatccagttaaacgagttaactcagatcagatgcgccgagtctgcttagaagctaatc

SEQ ID NO: 92686 - DNA, 75 bp, synthetic construct
  source 1..75: mol_type = other DNA
aagttgaattaatcaattctttggctgccgagtggtcattgcccaacttcacgtatttggcctctgtcaatcagg

SEQ ID NO: 92687 - DNA, 75 bp, synthetic construct
  source 1..75: mol_type = other DNA
ttcgactttggtctgcgtccatcgctgggttatgtcttatcgaaagggaaagatattgagggcatcggtgatgaa

SEQ ID NO: 92688 - DNA, 75 bp, synthetic construct
  source 1..75: mol_type = other DNA
ggtttatcaggagttaagtctggtggaagggctgacagtggcggaaaacctctgcctcggtcagtggccccgccg

SEQ ID NO: 92689 - DNA, 75 bp, synthetic construct
  source 1..75: mol_type = other DNA
ttctgctccgtccttgcaggtctgctcggcgcgtgggtgcttcccgcgcgtgccgctcggacgatgaccacgacg

SEQ ID NO: 92690 - DNA, 75 bp, synthetic construct
  source 1..75: mol_type = other DNA
agtctttcgttgatgccaacaactatccggtagaaatatgcaaggtaactctgactcaggtgatctaccgaaggc

SEQ ID NO: 92691 - DNA, 75 bp, synthetic construct
  source 1..75: mol_type = other DNA
gctgggaggctcttcagcgtaacctgactacaacagaaggccgtctcggtatgacatttacccagatggcaaatg

SEQ ID NO: 92692 - DNA, 75 bp, synthetic construct
  source 1..75: mol_type = other DNA
atccaacccgccatgacgctggttcaggaggaacttaacaagcagggaacgataagccacatcagtgacgccgcc

SEQ ID NO: 92693 - DNA, 75 bp, synthetic construct
  source 1..75: mol_type = other DNA
cacccgccagagcagaaaatattggggcagcggcgcgggcaatgaaaacgatggggtttagcgaactgcggattg

SEQ ID NO: 92694 - DNA, 75 bp, synthetic construct
  source 1..75: mol_type = other DNA
ggaaaaagctactgatgtcaaattaacagacctggcatttaataacgttaataaaaaagctcaggataactcctg

SEQ ID NO: 92695 - DNA, 75 bp, synthetic construct
  source 1..75: mol_type = other DNA
ttaactggaaagccaagtatgatcttgaggaaatgttacaagacgtttggaattggcaatcaaaaaacccgaatg

SEQ ID NO: 92696 - DNA, 75 bp, synthetic construct
  source 1..75: mol_type = other DNA
atggatatcccgactctgaatttcgaccactcacaccacaagctcaaaattcgcggcctgcaaagtccggtggat

SEQ ID NO: 92697 - DNA, 75 bp, synthetic construct
  source 1..75: mol_type = other DNA
gtaaattttgtacacggcgatatcaataatcgtgctatcatcgatagagtttttggtgatcataaaataaaagcc

SEQ ID NO: 92698 - DNA, 75 bp, synthetic construct
  source 1..75: mol_type = other DNA
tggtatcccgttacgattctctgcgtaacccactgacttctctggggattacctcgaccccgaactcatctctcg

SEQ ID NO: 92699 - DNA, 75 bp, synthetic construct
  source 1..75: mol_type = other DNA
tactggcaaatggtgttgatccccaagtccataacaataataaggcgaaggcattaaagagtgctattgaacaca

SEQ ID NO: 92700 - DNA, 75 bp, synthetic construct
  source 1..75: mol_type = other DNA
tcagaagaacagcgcagagcctggctgcatgtgaagcatcattacaaaagttaaatgcagaaaaagaaaagttag

SEQ ID NO: 92701 - DNA, 75 bp, synthetic construct
  source 1..75: mol_type = other DNA
aacaccacctacggcgaagcctaccactacgctgacaacttcctgcaaaaaggcgataaagaggcagcggaaagc

SEQ ID NO: 92702 - DNA, 75 bp, synthetic construct
  source 1..75: mol_type = other DNA
ataaagacgttattgcaattgatggaaaaacgctccggcattcttatgacaagagtcgccgcaggggagcgattc

SEQ ID NO: 92703 - DNA, 75 bp, synthetic construct
  source 1..75: mol_type = other DNA
atgaactccatcgtatcgcggatgccctgcaggcggtgcagaaacgtaacttctggcaactgcaggctgaaatcc

SEQ ID NO: 92704 - DNA, 75 bp, synthetic construct
  source 1..75: mol_type = other DNA
ttgatatgggtactgtcagaatccatcggcgctctggcactggtgccgctgggattgttatttaaaccacactat

SEQ ID NO: 92705 - DNA, 75 bp, synthetic construct
  source 1..75: mol_type = other DNA
ctgggcaggattggttatcagcctgcaatatttcgccaccttgctgagccgtcctcatgccggacgttacgccga

SEQ ID NO: 92706 - DNA, 75 bp, synthetic construct
  source 1..75: mol_type = other DNA
acggcatgtcgaaaggtaaaggtctggcttatgaacccgcaaccaaaggacagtggccggaagagcagctgtggt

SEQ ID NO: 92707 - DNA, 75 bp, synthetic construct
  source 1..75: mol_type = other DNA
ttgatgaacagggaaatccgatagaaatcagtgacccactgttacctgttattcagaaggctgtacaaagtagtg

SEQ ID NO: 92708 - DNA, 75 bp, synthetic construct
  source 1..75: mol_type = other DNA
gggccatcaattatcaaaataccggatcacctacaccaaaactaaaggcaagaaaaaccgaaccgtaccgatatc

SEQ ID NO: 92709 - DNA, 75 bp, synthetic construct
  source 1..75: mol_type = other DNA
ggcgaaagccgcgcaacgcgctcgccagaaagaacaggctactatcgaccttcagaactacatcaaggcgcagca

SEQ ID NO: 92710 - DNA, 75 bp, synthetic construct
  source 1..75: mol_type = other DNA
tccattagaatattatatcaacaatgttgttggtagtttaaatttaattcaggcaatgagtcatgcaaatattaa

SEQ ID NO: 92711 - DNA, 75 bp, synthetic construct
  source 1..75: mol_type = other DNA
gctatgttggatcgcatactgttttagctttgctaaatcaggggattaatgtgaccgttattgacaatcttagta

SEQ ID NO: 92712 - DNA, 75 bp, synthetic construct
  source 1..75: mol_type = other DNA
atggctccggaggactggctgcaggcagagatgcagggtgagattgtggcactggtccacagtcatccctgtggt

SEQ ID NO: 92713 - DNA, 75 bp, synthetic construct
  source 1..75: mol_type = other DNA
ccctgaagctaaataaccttgtcgataaaggcctggttgatcgtctgtatgcggcctccagctccggcgtaccgg

SEQ ID NO: 92714 - DNA, 75 bp, synthetic construct
  source 1..75: mol_type = other DNA
ccaccgaagccagcgtggatacgttaaaacagaccattctgcaactggccgtaatgggtaaacttgtgccgcagg

SEQ ID NO: 92715 - DNA, 75 bp, synthetic construct
  source 1..75: mol_type = other DNA
gcgccggaatcggtgctgatgcaggacggcgcattcagcctgacggcaccgcccgtacagggaatgccggtacag

SEQ ID NO: 92716 - DNA, 75 bp, synthetic construct
  source 1..75: mol_type = other DNA
taatggcgggattaaaagcaacgcatgccgccacgctgtttttcccgatggcgttgattttgtatgattttgccg

SEQ ID NO: 92717 - DNA, 75 bp, synthetic construct
  source 1..75: mol_type = other DNA
gaaaatgacgcatgcccaacgtgttaattctgattacaagcttgagcggaaaatcaaccggattaccgcgagaag

SEQ ID NO: 92718 - DNA, 75 bp, synthetic construct
  source 1..75: mol_type = other DNA
cttcctcatctggcgcaaaacgagcatacagaaagggtaaacctttgagtgaagcagagcggcagagagctgctt

SEQ ID NO: 92719 - DNA, 75 bp, synthetic construct
  source 1..75: mol_type = other DNA
tgaaggaagactacatcgcgttcatgccgaaaccgaatataagaacggcattgcataatcttgcagtggcgatcg

SEQ ID NO: 92720 - DNA, 75 bp, synthetic construct
  source 1..75: mol_type = other DNA
cgcagcctggcggagaagctgcagcaggaagggagcgaggacgggcacggcgtggtatttccggctgaactggtg

SEQ ID NO: 92721 - DNA, 75 bp, synthetic construct
  source 1..75: mol_type = other DNA
ccgggcgttttgaacaaacagttggtgaaatattggtgctgaacgataaattgcgaaatgcacaattagataaga

SEQ ID NO: 92722 - DNA, 75 bp, synthetic construct
  source 1..75: mol_type = other DNA
gcgttaaaagctcaattgcaggtgatgtgtgaagcagagggagttacccaggctgagatgattgctgaactgata

SEQ ID NO: 92723 - DNA, 75 bp, synthetic construct
  source 1..75: mol_type = other DNA
gacacacttatgcctgctggtcgttaacagcaggagctaacccggcattcattgcaaaccagatgggccatgcag

SEQ ID NO: 92724 - DNA, 75 bp, synthetic construct
  source 1..75: mol_type = other DNA
actaacgctcaattcacttatattaatcatggtgatgcttacgctcctggctggcgacgagactacaacacgaaa

SEQ ID NO: 92725 - DNA, 75 bp, synthetic construct
  source 1..75: mol_type = other DNA
ccagagggccagtgcacgcatgtattgcgccatacattcgctagtcactttatgatgaatggcggaaatattctt

SEQ ID NO: 92726 - DNA, 75 bp, synthetic construct
  source 1..75: mol_type = other DNA
aacagacacagaactacgggcgttatgccgcagagccaaacgagatccaactggcacggtattttcatcttgatg

SEQ ID NO: 92727 - DNA, 75 bp, synthetic construct
  source 1..75: mol_type = other DNA
cagcagaagcacagcgccagtcactgattgatactgcaatggcttcaatcagtctgattcagctgaaattgcagg

SEQ ID NO: 92728 - DNA, 75 bp, synthetic construct
  source 1..75: mol_type = other DNA
atatttcgctgacgcagaacattcagcaatctggcttgttaagtgcagaactgcaacaaaatgggcaagtgcagg

SEQ ID NO: 92729 - DNA, 75 bp, synthetic construct
  source 1..75: mol_type = other DNA
tccacccctgctatcaggagttcaagaaaatgctcgctctgaccgatatagagttagctgaagggcaaaaaacgc

SEQ ID NO: 92730 - DNA, 75 bp, synthetic construct
  source 1..75: mol_type = other DNA
cgcaccacaagctcaaaattcgcggccagcaaagtccggtggatgtgctgacctttgaaggccgcgagcaactga

SEQ ID NO: 92731 - DNA, 75 bp, synthetic construct
  source 1..75: mol_type = other DNA
ctgcaggggctctgttttcactatgatccgctggccaaccgcgtccagtgctccatcaccacgctggccattgag

SEQ ID NO: 92732 - DNA, 75 bp, synthetic construct
  source 1..75: mol_type = other DNA
atcggcctgatgacccgcgataactacagaacggtaaataacattacccaggggaagcatccggaggcgaaacaa

SEQ ID NO: 92733 - DNA, 75 bp, synthetic construct
  source 1..75: mol_type = other DNA
gcgtgacgatggtaaacagcgtgagttccagccttacattgaagcgaattggatcaacaacagcaaagtctacgc

SEQ ID NO: 92734 - DNA, 75 bp, synthetic construct
  source 1..75: mol_type = other DNA
cctggtacggctgggacggcgaccggctgaccacgatacagaacgacaggagccgcatccagacgatttatcagc

SEQ ID NO: 92735 - DNA, 75 bp, synthetic construct
  source 1..75: mol_type = other DNA
atccctgcacaacaggtggtgacgaataacagcgacagcgtgcagctgacggcgacggtgaaagatccgtcgaat

SEQ ID NO: 92736 - DNA, 75 bp, synthetic construct
  source 1..75: mol_type = other DNA
cgtaccacaaactcaaaatccgcggcctgcaaagtccggtggatgtgctgaccttcgaaggccgcgaacaactga

SEQ ID NO: 92737 - DNA, 75 bp, synthetic construct
  source 1..75: mol_type = other DNA
cgatttatcagccggggagcttcacgccactcatcagggtcgaaactgccaccggtgagctggcgaaaacgcagc

SEQ ID NO: 92738 - DNA, 75 bp, synthetic construct
  source 1..75: mol_type = other DNA
ttgccgaacgaggctgattacaaaaaacttcaggcgctgttcgcgcgtgttgcagcagaaaaacaccagcgcggg

SEQ ID NO: 92739 - DNA, 75 bp, synthetic construct
  source 1..75: mol_type = other DNA
cctttccttacggttatggagacgttgcaatataaaccggcagagagcgcagccaaagtacagtgcccagttttg

SEQ ID NO: 92740 - DNA, 75 bp, synthetic construct
  source 1..75: mol_type = other DNA
ggccgactcgccaggaaacattgcacaccacgctgattgtggctgcggttaccgcagtaatgtcactgatcctgt

SEQ ID NO: 92741 - DNA, 75 bp, synthetic construct
  source 1..75: mol_type = other DNA
aggcccgcaggggccgaaaggcgacaggggagagcggggagagaccggtctgacgggaaatgcaggtccacaggg

SEQ ID NO: 92742 - DNA, 75 bp, synthetic construct
  source 1..75: mol_type = other DNA
tccacactttctggaacatttaggtaacaaccatctggatattggtgttggaactgggttttaccttactcacgt

SEQ ID NO: 92743 - DNA, 75 bp, synthetic construct
  source 1..75: mol_type = other DNA
gaacaaggtaaacctgaaatttgaagaagcgaaaccggttctcgaagaccagctggccaaatcaattgctaatat

SEQ ID NO: 92744 - DNA, 75 bp, synthetic construct
  source 1..75: mol_type = other DNA
acctgagagtagtctgatatctttaatggatttgaacgaagctagcctgaacgcggcatctacaagggctgggga

SEQ ID NO: 92745 - DNA, 75 bp, synthetic construct
  source 1..75: mol_type = other DNA
agaaaaaaaattgccacaggcctgcctgacatcagatatggtcagactgatggggttaacagcagaatctctgga

SEQ ID NO: 92746 - DNA, 75 bp, synthetic construct
  source 1..75: mol_type = other DNA
gcctccaccaaagcatttaccacccagctcaccgtgctgctaatgctggtggcaaaactgtctcgactgaaaggt

SEQ ID NO: 92747 - DNA, 75 bp, synthetic construct
  source 1..75: mol_type = other DNA
tgcgggcgaaacagctttactggcaggggtataccccggcggatatcgctcagctgatgggaataaaccagaaca

SEQ ID NO: 92748 - DNA, 75 bp, synthetic construct
  source 1..75: mol_type = other DNA
agttttcagaagtatggaagctttttagtgagattcctgatgacgcgacacttaatgttgagttggcatctctgt

SEQ ID NO: 92749 - DNA, 75 bp, synthetic construct
  source 1..75: mol_type = other DNA
tacgggaggcatcgcgctgcctgtctccggttgaaatctggcagacactgctcacccggttactggaccagcact

SEQ ID NO: 92750 - DNA, 75 bp, synthetic construct
  source 1..75: mol_type = other DNA
cgctggaagtctgccgtcgtgccggtgttgatattcgcatcattgtgaaatcccgacagataggcgcgacctggt

SEQ ID NO: 92751 - DNA, 75 bp, synthetic construct
  source 1..75: mol_type = other DNA
gaccgtcgctcgcagatgaacctgaagcaggatgaacggctgtccggtgagctgataaccggacgtcgtcagctg

SEQ ID NO: 92752 - DNA, 75 bp, synthetic construct
  source 1..75: mol_type = other DNA
gcacgattacgacaaaacatccccagaaatgagaaaataccttcagagcatcaacgagtctatgttccttatgaa

SEQ ID NO: 92753 - DNA, 75 bp, synthetic construct
  source 1..75: mol_type = other DNA
tgaccagtgccgcctggtcatcacgggttcgcatgctgcgggttgaattcagtgccgagtttaagcaggtggtga

SEQ ID NO: 92754 - DNA, 75 bp, synthetic construct
  source 1..75: mol_type = other DNA
tatcgcccgccgcgatgttacgccacagccaccacaaacgccgcaagccttactggagtttgctaaagccaatcc

SEQ ID NO: 92755 - DNA, 75 bp, synthetic construct
  source 1..75: mol_type = other DNA
gaaggagcgcatcctgaaagcggtttcgatgaagatttccaaatggaacagcaggccaatgctgaattcatcgct

SEQ ID NO: 92756 - DNA, 75 bp, synthetic construct
  source 1..75: mol_type = other DNA
cgtaagcaatttgctaccaaaggcgaagctattgcatttgaaagcttcacaatggaagaagtgaacaaaaaacca

SEQ ID NO: 92757 - DNA, 75 bp, synthetic construct
  source 1..75: mol_type = other DNA
actggccgcaacgccgaaagcggtcaaggcagcctatgaccttgctaacgggaaatataccgcacaggacgccac

SEQ ID NO: 92758 - DNA, 75 bp, synthetic construct
  source 1..75: mol_type = other DNA
gaacggcggtattttttatcgttcagcgcgtgatggttatggatttgaggctgactggtcagagttttacaccac

SEQ ID NO: 92759 - DNA, 75 bp, synthetic construct
  source 1..75: mol_type = other DNA
tcgctaagggtactattttttccgcgtttcctgtcttaaataataaagccatgtggagatggtatcagaatgagg

SEQ ID NO: 92760 - DNA, 75 bp, synthetic construct
  source 1..75: mol_type = other DNA
atgctcgaatgacagcacatctcccgaacaaagatgagtcttacgaatgtttaataaagatacagcatgaactaa

SEQ ID NO: 92761 - DNA, 75 bp, synthetic construct
  source 1..75: mol_type = other DNA
ttttcagaagccggctatgttctgccggggcaatatcttctggatgtgattgttaacgggcaaagtatttctccc

SEQ ID NO: 92762 - DNA, 75 bp, synthetic construct
  source 1..75: mol_type = other DNA
ctgattgtgcttggtggtctgatggacgatcaggcgggagaaagcgtggcgaaagtgccgctgctgggcgatatc

SEQ ID NO: 92763 - DNA, 75 bp, synthetic construct
  source 1..75: mol_type = other DNA
ggcagatccccatggacgcgggggtggttctgcgcgacaggcggttaaaaacccgcgacgggctgtacgtttgcc

SEQ ID NO: 92764 - DNA, 75 bp, synthetic construct
  source 1..75: mol_type = other DNA
ctcaattcacttatattaatcatggtgatgcttacgctcctggctggcgacgagactacaacacgaaaaatcaac

SEQ ID NO: 92765 - DNA, 75 bp, synthetic construct
  source 1..75: mol_type = other DNA
attaatattttgacgaatgataaggtattcaaggcagggttaagacgtaagatgcgaaaagcagccatggacaga

SEQ ID NO: 92766 - DNA, 75 bp, synthetic construct
  source 1..75: mol_type = other DNA
gtttacaacggggcttgctgtgcttatttcaactaaagataatgaaactcgaattcagccaaatgctacttgtcc

SEQ ID NO: 92767 - DNA, 75 bp, synthetic construct
  source 1..75: mol_type = other DNA
gggtgctgtagctggcggtactggtggtgcggctcttggtgcagcggctggttctttggttagtgataaaacaat

SEQ ID NO: 92768 - DNA, 75 bp, synthetic construct
  source 1..75: mol_type = other DNA
atgccaatgcgcttcttgattatcttgatgggttttctacattcccgcatcggggcaataaacgcgatgatattc

SEQ ID NO: 92769 - DNA, 75 bp, synthetic construct
  source 1..75: mol_type = other DNA
ccgccacagaacgatcattgcttttgccgttgatggcaataaagtctttatcgctggcgtttaccatggagggca

SEQ ID NO: 92770 - DNA, 75 bp, synthetic construct
  source 1..75: mol_type = other DNA
gcagaaggggataaatataaatcagaggctgacgttaaaagtcacgacatcatgtttggtgtgacttataacttc

SEQ ID NO: 92771 - DNA, 75 bp, synthetic construct
  source 1..75: mol_type = other DNA
gtatagctctggcggataacctgacaacaccccggatcacccgtcttcagataaccggagggccaacggcagata

SEQ ID NO: 92772 - DNA, 75 bp, synthetic construct
  source 1..75: mol_type = other DNA
gcgagtgggattttaccgaaatgctctggaccgttccgaaggagcacagcaaaacgaaggtagccatattccggc

SEQ ID NO: 92773 - DNA, 75 bp, synthetic construct
  source 1..75: mol_type = other DNA
acaagcctggaaagtagaacataaattgtcagatattctactgttgactatttgtgccgttatttctggtgcaga

SEQ ID NO: 92774 - DNA, 75 bp, synthetic construct
  source 1..75: mol_type = other DNA
tcggcagaaagcgccgcatcgtctgcttcaacagccacaacgaaggctggcgaagccactgaacaggccagcgca

SEQ ID NO: 92775 - DNA, 75 bp, synthetic construct
  source 1..75: mol_type = other DNA
tgagattacagctatcccagaacttcttaacatgctggatattaaaggaaaaatcatcacaactgatgcgatggg

SEQ ID NO: 92776 - DNA, 75 bp, synthetic construct
  source 1..75: mol_type = other DNA
gaagaatacttcgaaggccttgccgaaggcgaagaagctctcagcttcagtgagtttaaacaggcactcagaata

SEQ ID NO: 92777 - DNA, 75 bp, synthetic construct
  source 1..75: mol_type = other DNA
ataataaatgtgaaatggccaattattgaagagcctattttatcaccgaaagatagaaaagggataagatttgag

SEQ ID NO: 92778 - DNA, 75 bp, synthetic construct
  source 1..75: mol_type = other DNA
ccttatcaaggttggcgcatcagaagatgttgctaaaaatatcataacagccatcgtaaaaggcgaagtattcgc

SEQ ID NO: 92779 - DNA, 75 bp, synthetic construct
  source 1..75: mol_type = other DNA
tcggtaacgcctcttatagggcaagctgcatcaaataaattaagctaccttggtattgggaaaaagatatccttt

SEQ ID NO: 92780 - DNA, 75 bp, synthetic construct
  source 1..75: mol_type = other DNA
ttctacatcacctgtatcctgtttgtggtgctggtattgggttcaatcgctaaagcgactggtttcagtatcttc

SEQ ID NO: 92781 - DNA, 75 bp, synthetic construct
  source 1..75: mol_type = other DNA
tgaaacatttggtcattatgtatcctttgaattgtcggcagaaaataaaaaaatattgtggattcctgaaggctt

SEQ ID NO: 92782 - DNA, 75 bp, synthetic construct
  source 1..75: mol_type = other DNA
attatggcacatgtttatggactcccctgcatttacagaactggccccccgaacccaaaaagattatcggcaaca

SEQ ID NO: 92783 - DNA, 75 bp, synthetic construct
  source 1..75: mol_type = other DNA
cagcatattgaggcaggcatttcactgtgtgatgcggtgaactttctcgttgaaaaatacgcactggtgcgtacc

SEQ ID NO: 92784 - DNA, 75 bp, synthetic construct
  source 1..75: mol_type = other DNA
ttgaatggtaaagtcaaatttatatcagaaaaatataatacccgatatagtattaactatgaattaaaagacaag

SEQ ID NO: 92785 - DNA, 75 bp, synthetic construct
  source 1..75: mol_type = other DNA
gccgtcgtcgtttactgcaaggcgcgggtgccatgtggctattgagcgtaagtcaggtcagtctggctgcggtca

SEQ ID NO: 92786 - DNA, 75 bp, synthetic construct
  source 1..75: mol_type = other DNA
taccctgcttcatccgctgttgatgcgtaatggcgacagccgtccgttgcataaaccgacgacgccgctgccttc

SEQ ID NO: 92787 - DNA, 75 bp, synthetic construct
  source 1..75: mol_type = other DNA
ttatgtcgtaacgctgacctcccgtggtcaggatgtggcggaaggccgtgcccgcattgccggtgtcaagcgtcc

SEQ ID NO: 92788 - DNA, 75 bp, synthetic construct
  source 1..75: mol_type = other DNA
atgatggagatattctggaccatactggccagccaggacaggaagtgcattcgtggatacattacggagcagaac

SEQ ID NO: 92789 - DNA, 75 bp, synthetic construct
  source 1..75: mol_type = other DNA
gatgctgctgaccatatctatctgtcgcaagatctggggatgcgcaaacctgaagcacgaatttaccagcatgtt

SEQ ID NO: 92790 - DNA, 75 bp, synthetic construct
  source 1..75: mol_type = other DNA
aatacaattgacattgattggcccgaattgaatataaatgttatcctttccactaaagataaatgtgcatctcac

SEQ ID NO: 92791 - DNA, 75 bp, synthetic construct
  source 1..75: mol_type = other DNA
accaccctgcattacgcctgggcccgggagttcggggtactcaggggcaaaaaacactatcacctcctgctgctg

SEQ ID NO: 92792 - DNA, 75 bp, synthetic construct
  source 1..75: mol_type = other DNA
gggcagctgtccgggggcggacgcaaaattttttgccgggttcatggctaaaaattttgtggccggtgcatctca

SEQ ID NO: 92793 - DNA, 75 bp, synthetic construct
  source 1..75: mol_type = other DNA
ttgctgatgcggtgaatttcctggtcgaaaagtacgaactggttcgtatcgaccgaaagggattttcgtggcaag

SEQ ID NO: 92794 - DNA, 75 bp, synthetic construct
  source 1..75: mol_type = other DNA
gtgcctgctgccgctgctgagcggttgcggaagtacgcggacagtttacgtgagcactccggctacaacattacc

SEQ ID NO: 92795 - DNA, 75 bp, synthetic construct
  source 1..75: mol_type = other DNA
gctgcgtgaggtgatcctgccgttgctggacgagtccgatgaaccgttcgatgacgacaacctgatcgactacgg

SEQ ID NO: 92796 - DNA, 75 bp, synthetic construct
  source 1..75: mol_type = other DNA
caccaaaaccaggcgtccagggtggcaaagcccgactggttcacgtcaatgaacaggttcgtgaatatattcgca

SEQ ID NO: 92797 - DNA, 75 bp, synthetic construct
  source 1..75: mol_type = other DNA
ggaaataaagtaacaaaagaaaatgatgtttatgatagtctaaatttttcaagcaaagatttaacgaattcttat

SEQ ID NO: 92798 - DNA, 75 bp, synthetic construct
  source 1..75: mol_type = other DNA
tatccgtcatggcgataccgtgcgggtatttaacaataatggagaaatgctgattgccgcaaaagtgactccgcg

SEQ ID NO: 92799 - DNA, 75 bp, synthetic construct
  source 1..75: mol_type = other DNA
tgcaaatcatcaatacagttatagaggctaaccagcatgcaaaacagcagatcgcactggagtcacagagaaccc

SEQ ID NO: 92800 - DNA, 75 bp, synthetic construct
  source 1..75: mol_type = other DNA
ttgctgccagcctcctgccttcctgtgtactggcctggaacacgccgggagaagatttcagcggagagcttaagc

SEQ ID NO: 92801 - DNA, 75 bp, synthetic construct
  source 1..75: mol_type = other DNA
caagaacaagagcaagaacattacattaggggatatcatgaattacttactttttctcaaacaggaatatggaat

SEQ ID NO: 92802 - DNA, 75 bp, synthetic construct
  source 1..75: mol_type = other DNA
aaactgaatggcggctggcagtctgtaccgaaggatatttttactcaggttgtaccacaaagtcgctttagtggg

SEQ ID NO: 92803 - DNA, 75 bp, synthetic construct
  source 1..75: mol_type = other DNA
agcgtaaagcttactgggcatggtgggagagggttgaatcgatcgttacttgtactgacttaatctccaacggac

SEQ ID NO: 92804 - DNA, 75 bp, synthetic construct
  source 1..75: mol_type = other DNA
tcagctcagtcatcagcggtaaaaccgtacaactggaaagcgtgagtggcaacatcagcaatatcacccggcgtc

SEQ ID NO: 92805 - DNA, 75 bp, synthetic construct
  source 1..75: mol_type = other DNA
ggacgctcgaatgttcggtgtcgcaatattccaatacgacggcaaggcttaacgcaaaccagggctttcctttgt

SEQ ID NO: 92806 - DNA, 75 bp, synthetic construct
  source 1..75: mol_type = other DNA
tctcagtgggcggcaataggcgtgctggggagtctgctgtttggtctgctgacgtacctgacgaacctgtatttc

SEQ ID NO: 92807 - DNA, 75 bp, synthetic construct
  source 1..75: mol_type = other DNA
cacgttcatttaatcttgggctggaggtttttcgtgcccgaattgcagccaatgggcgcggagatattacagtag

SEQ ID NO: 92808 - DNA, 75 bp, synthetic construct
  source 1..75: mol_type = other DNA
attttttacgacgtggctattccgtatgaaccatacggagatttaaccatgacctacaaatacaaccccttctgg

SEQ ID NO: 92809 - DNA, 75 bp, synthetic construct
  source 1..75: mol_type = other DNA
ggtcgctatcagcagctttacctgttctggccgcactaccgcaaacagcttgccctgccggatttcagtccgttg

SEQ ID NO: 92810 - DNA, 75 bp, synthetic construct
  source 1..75: mol_type = other DNA
caagatctcttccagaagaacatgcggcaccagctgaaaaattgggtgttcttactgcaaaaaagctagaagaat

SEQ ID NO: 92811 - DNA, 75 bp, synthetic construct
  source 1..75: mol_type = other DNA
aaagcggcagaagtgttagtggtcgatacccgtaatggcaatattctggcgaaggttgcggcaccggaatcactg

SEQ ID NO: 92812 - DNA, 75 bp, synthetic construct
  source 1..75: mol_type = other DNA
cggttcttttatctggtctgccgggcattactacagcaaatatcagcacgaaaaggagcgtgctgatgaggctgt

SEQ ID NO: 92813 - DNA, 75 bp, synthetic construct
  source 1..75: mol_type = other DNA
gaacctgtaagccaaacttacaggttgccacaaacgcagtttgaacaggttgctgacctctacgaaatgcaattt

SEQ ID NO: 92814 - DNA, 75 bp, synthetic construct
  source 1..75: mol_type = other DNA
cagaatggttatctcattcatactgttagtgtggctccgggggcttttgaaatctctgacctacctgtcacaggc

SEQ ID NO: 92815 - DNA, 75 bp, synthetic construct
  source 1..75: mol_type = other DNA
gccgatggtatgcagctggcggttaccgattatatgactggtggtccgcgtccggtaaagagttaccaggtgaaa

SEQ ID NO: 92816 - DNA, 75 bp, synthetic construct
  source 1..75: mol_type = other DNA
gaggtgcgtcaggacatgcagcagcgcattgatgcggcgcaccggatgtttgccgaaaaagtggcgatgtatacc

SEQ ID NO: 92817 - DNA, 75 bp, synthetic construct
  source 1..75: mol_type = other DNA
ctattaaaaatgctctttcatgggttttttattgccttacgttctggtatgtatttacttctttaacttcattgc

SEQ ID NO: 92818 - DNA, 75 bp, synthetic construct
  source 1..75: mol_type = other DNA
gggaaagtacctaccagaccgtggttgacagcttcagtaactttggcgagctctggctgaacagggataaactcc

SEQ ID NO: 92819 - DNA, 75 bp, synthetic construct
  source 1..75: mol_type = other DNA
ctgcagatgaaattagcgcactacgtaaagctgaacaaaataactctgaggctcgtaaaaaggccaatgacgccg

SEQ ID NO: 92820 - DNA, 75 bp, synthetic construct
  source 1..75: mol_type = other DNA
cattttaatctgaatagttcacttatttactacataaacaattggaatttatttccattgttctgtttattcagt

SEQ ID NO: 92821 - DNA, 75 bp, synthetic construct
  source 1..75: mol_type = other DNA
atgcataccgtacaaggggaaattgtcatggctttaaaactaaaccgtccgaacatcgatgaatctcagcaacca

SEQ ID NO: 92822 - DNA, 75 bp, synthetic construct
  source 1..75: mol_type = other DNA
agacccggtggcccgtgcttttgccacactgaaggtgcttcccgtttatctgcgtgaacctctgagccgccacct

SEQ ID NO: 92823 - DNA, 75 bp, synthetic construct
  source 1..75: mol_type = other DNA
agatattatatcagttctgctgatttaaccgcagagaagttcgccacagcaatccgaaaccactggcacgtggag

SEQ ID NO: 92824 - DNA, 75 bp, synthetic construct
  source 1..75: mol_type = other DNA
gctgtggctaaacagatccaacagtatcagacgcagttgcaacaatatgaaaacatgctgagaaacacagtcgca

SEQ ID NO: 92825 - DNA, 75 bp, synthetic construct
  source 1..75: mol_type = other DNA
atgtcttctattaattttttaaatatgcgttctgttttatcttctttttctgcacatcgtagaaaagaaaaagaa

SEQ ID NO: 92826 - DNA, 75 bp, synthetic construct
  source 1..75: mol_type = other DNA
cttttcgaaatacgtacaatgggggcagatatcgcccgcggaatctgggtatatcagagtggtgaacgtattttt

SEQ ID NO: 92827 - DNA, 75 bp, synthetic construct
  source 1..75: mol_type = other DNA
gcattttccaccgaactggaacgcatatgtgatgaagttactgagcggacaggaaaaggcgacgataacctgttt

SEQ ID NO: 92828 - DNA, 75 bp, synthetic construct
  source 1..75: mol_type = other DNA
atggccggagtctttctgtcttggagaagaccgccagccagccatgccatcactggcagcaaggaaggtggattt

SEQ ID NO: 92829 - DNA, 75 bp, synthetic construct
  source 1..75: mol_type = other DNA
atgattaattttgacgggatcggtaatgaccgccgtataccgctgattgaggttgagtttaataactccatggct

SEQ ID NO: 92830 - DNA, 75 bp, synthetic construct
  source 1..75: mol_type = other DNA
aggctgaaaaagagtttacggctctgcctgctgccattcgtgcaaaaatggccaggctactcatgaagctggaag

SEQ ID NO: 92831 - DNA, 75 bp, synthetic construct
  source 1..75: mol_type = other DNA
ggtacaggccggagaatcactcaccctgaccagtgaggatgcagtggcgggtctgcgcatggtcagtgaactggt

SEQ ID NO: 92832 - DNA, 75 bp, synthetic construct
  source 1..75: mol_type = other DNA
tcagccgcacagggtacgtctcactcatgatgcttttgttctggaaaatcgcagagggcggacatctcatgagca

SEQ ID NO: 92833 - DNA, 75 bp, synthetic construct
  source 1..75: mol_type = other DNA
ggaacaaaacggattagggtcacaataacgggcggcggtggcggagggggcggctgcaaggctatatccaataat

SEQ ID NO: 92834 - DNA, 75 bp, synthetic construct
  source 1..75: mol_type = other DNA
gaacagaggccgccgtttttgaaggtcagtccggcattgaggccgggctggcggatgaattaatcaatgcgtcgg

SEQ ID NO: 92835 - DNA, 75 bp, synthetic construct
  source 1..75: mol_type = other DNA
atttaatcacccggatacagcgatcagttttattcgacagggattaggcatcgccttattaccagagttaacgct

SEQ ID NO: 92836 - DNA, 75 bp, synthetic construct
  source 1..75: mol_type = other DNA
tgtacgccagctattccccggaggggctcaatggtatgagtcagcagtaccaccgttttctgcgcgatgaaatca

SEQ ID NO: 92837 - DNA, 75 bp, synthetic construct
  source 1..75: mol_type = other DNA
tggagcagtacgggcgcgttcgtcgtttcctgccccatctgctgaataccgttaaattttcatccgcacctgccg

SEQ ID NO: 92838 - DNA, 75 bp, synthetic construct
  source 1..75: mol_type = other DNA
cctgcccgccagtcatcaggcgatatttttcccggtatccggcttgaaaaaatggcgttatgacctggaatataa

SEQ ID NO: 92839 - DNA, 75 bp, synthetic construct
  source 1..75: mol_type = other DNA
tccagagcatgacagttacgcaattagtgaaaagagtcacggcagagaagaaatccgtcttcacattgtttgcga

SEQ ID NO: 92840 - DNA, 75 bp, synthetic construct
  source 1..75: mol_type = other DNA
tcagagtcattcgttgggagccggaaacacaacgggttatctacctccgcgaaggctatgagcatgaatgcttca

SEQ ID NO: 92841 - DNA, 75 bp, synthetic construct
  source 1..75: mol_type = other DNA
cacacagattggcgatgttcgtgatcaacaggcactcgaccaggcgttagccggttttgacactgttgtactact

SEQ ID NO: 92842 - DNA, 75 bp, synthetic construct
  source 1..75: mol_type = other DNA
tgggatttcagtcacttcgtcgtgctggtcagcgtaaagcgtaaccgttatgtactgcatgatccggccagaggc

SEQ ID NO: 92843 - DNA, 75 bp, synthetic construct
  source 1..75: mol_type = other DNA
gcacagagctacagaccacgattgataacatgaggcgtaaggcttcactcactgataaggaactaccccagctta

SEQ ID NO: 92844 - DNA, 75 bp, synthetic construct
  source 1..75: mol_type = other DNA
actggcggcaggcggcgggctacaccattctggccccgaccgtggaggtggcggctaacgccttcaaccctgcca

SEQ ID NO: 92845 - DNA, 75 bp, synthetic construct
  source 1..75: mol_type = other DNA
tttccactcaccgcttatcgacggaactgaagtggccattgtatttgacggcggagatccggatcgtccctacat

SEQ ID NO: 92846 - DNA, 75 bp, synthetic construct
  source 1..75: mol_type = other DNA
atgtcgcccgcagatctggaccgtatgttgggcagcatgaaagccaacggtatggtccccgatatggttgtggtc

SEQ ID NO: 92847 - DNA, 75 bp, synthetic construct
  source 1..75: mol_type = other DNA
gaaggtggcgcgattgatcagcgagcgcttggcgttaatcgagtgaagatatttgaacgctggaaggctatcgac

SEQ ID NO: 92848 - DNA, 75 bp, synthetic construct
  source 1..75: mol_type = other DNA
cctggccgggcagccgtataaaggccgcaacggtcgtgtggaaggtacccgggaactggttattcacccgcattt

SEQ ID NO: 92849 - DNA, 75 bp, synthetic construct
  source 1..75: mol_type = other DNA
tggccagccaggacaggaagcgcattcgtgagtacattgcggagcagaacctgatggctgccattgaactggacg

SEQ ID NO: 92850 - DNA, 75 bp, synthetic construct
  source 1..75: mol_type = other DNA
acggatgatgagcgcacccaccggtaccattacgacagtcagcaccggctggtgcactacacgcggacacaatat

SEQ ID NO: 92851 - DNA, 75 bp, synthetic construct
  source 1..75: mol_type = other DNA
cccgtagagacggtggttattgaccttgcttatgaaggttccggcagtggcgactggcgcactgacgggttcatc

SEQ ID NO: 92852 - DNA, 75 bp, synthetic construct
  source 1..75: mol_type = other DNA
caggggatacagaccaacctgacactgaaagaggaaagctacggcgactggctgccaaaatgtgacgaccctgca

SEQ ID NO: 92853 - DNA, 75 bp, synthetic construct
  source 1..75: mol_type = other DNA
atgtggtggtggctaatgtcacgcagcataacggcgaatggaagacactgagcagtgacaaagtggggaaaaccg

SEQ ID NO: 92854 - DNA, 75 bp, synthetic construct
  source 1..75: mol_type = other DNA
tgcagaagagattcagatgctggcgcagcagtatgccgacgataaagaaaaagtggcgctgttaaaagcgctttg

SEQ ID NO: 92855 - DNA, 75 bp, synthetic construct
  source 1..75: mol_type = other DNA
agataacaaccgaaaaaataataatgcttctaatttagagtggtgtactcaaaaggagaatatgaagcattgctc

SEQ ID NO: 92856 - DNA, 75 bp, synthetic construct
  source 1..75: mol_type = other DNA
tggcagagcgatacaagctggtgctaacggttttgtcagtaaatgcaatgatcagaatgatatttttcatgccgt

SEQ ID NO: 92857 - DNA, 75 bp, synthetic construct
  source 1..75: mol_type = other DNA
ggtacgcggtatcgcaaacagtagtgcaatcgtgactatcaggcaaaatggttatgtgatctatcaaagcaacgt

SEQ ID NO: 92858 - DNA, 75 bp, synthetic construct
  source 1..75: mol_type = other DNA
accggtgccgtttggatcactggtacgggaaaacagtatcggaataaccagtatgtgggtgatgacgggcaagtt

SEQ ID NO: 92859 - DNA, 75 bp, synthetic construct
  source 1..75: mol_type = other DNA
caggaaaccgaagtggcaagcatgatggagggaatgattaaagtcgttgccgaataccgtaatacaaacaacgca

SEQ ID NO: 92860 - DNA, 75 bp, synthetic construct
  source 1..75: mol_type = other DNA
gcggcaactgtcctgactgtggtgcggtgatggggaacgcaacctacctggaaacattcgatgaagagaatcagg

SEQ ID NO: 92861 - DNA, 75 bp, synthetic construct
  source 1..75: mol_type = other DNA
cattaaagcgattgaaatcattgctggggcgctgcgaggatcggttgctggtgataaggatgccggagaagaaat

SEQ ID NO: 92862 - DNA, 75 bp, synthetic construct
  source 1..75: mol_type = other DNA
tcgggaaggtaaacgcgtgcattcctcgaccctgcattacgcctgggcccgggagttcggggagcttaaaggcaa

SEQ ID NO: 92863 - DNA, 75 bp, synthetic construct
  source 1..75: mol_type = other DNA
agcgcgacttaatgttattgctggagcaactggtcacgctgattgacgaagggtacactagcggaagtcagttag

SEQ ID NO: 92864 - DNA, 75 bp, synthetic construct
  source 1..75: mol_type = other DNA
gtgtatcacgacaagaaaaccgatggcgtaagcgctgactgggcaggcgatctgcaacaactgctgagcgatgcg

SEQ ID NO: 92865 - DNA, 75 bp, synthetic construct
  source 1..75: mol_type = other DNA
atctggaatatatccgcgaatggagcgtctggtttgatatcaggatcgtttttttgacggtgtttaaaggctttg

SEQ ID NO: 92866 - DNA, 75 bp, synthetic construct
  source 1..75: mol_type = other DNA
ggtttccgacgctttcgcgttcgtctcggatgtcttcgctgcggaagcagacctcgctgctgcgctggcctgtac

SEQ ID NO: 92867 - DNA, 75 bp, synthetic construct
  source 1..75: mol_type = other DNA
cgcctctttggaggccgccgcatctctggctgaagtggcggcttctgacgctttcgtcgtcgcagtggatgcaga

SEQ ID NO: 92868 - DNA, 75 bp, synthetic construct
  source 1..75: mol_type = other DNA
gcccaaaaaccaaattggttttgaattttcttaccgctgcatttttagcgtcgagtcccgttgcgaatagtgccg

SEQ ID NO: 92869 - DNA, 75 bp, synthetic construct
  source 1..75: mol_type = other DNA
tgcgatgatggcgaaaaactgcgtgttacgttcgtcctggactgttgcgatcgtgaagccatagactgggccgca

SEQ ID NO: 92870 - DNA, 75 bp, synthetic construct
  source 1..75: mol_type = other DNA
cagccagctttgacatggtttgaacaagagtctgtactcagtaataaccagattgctgactggctacagattgcc

SEQ ID NO: 92871 - DNA, 75 bp, synthetic construct
  source 1..75: mol_type = other DNA
ggaagataaggatgaggctgttgaaaacctcggattaaaacctacggtggataaggcaaaaaatgccgttcagcg

SEQ ID NO: 92872 - DNA, 75 bp, synthetic construct
  source 1..75: mol_type = other DNA
cggttgcgcacaacgagcagtatcgccagttgattgagggctacatgctgcgccataaggtgaaaccggggatca

SEQ ID NO: 92873 - DNA, 75 bp, synthetic construct
  source 1..75: mol_type = other DNA
tcagggtattgccaacgcagtcggtatggcgattgcagaaaaaacgctggcggcgcagtttaaccgtccgggcca

SEQ ID NO: 92874 - DNA, 75 bp, synthetic construct
  source 1..75: mol_type = other DNA
gagcgaaaaccaatgcatcgttaatttcaatggtgcaacgtttttctgatatcaccataatgtttggcggactgt

SEQ ID NO: 92875 - DNA, 75 bp, synthetic construct
  source 1..75: mol_type = other DNA
gttttagcgaattaaacgacgcagaagatcaggctgaacgtttccaggaacaggttaacgctaaagctgcaggtg

SEQ ID NO: 92876 - DNA, 75 bp, synthetic construct
  source 1..75: mol_type = other DNA
gccgtctcagaagacttagcgttcgtctcggacgtttttgccgccttcgcggaatttcctgccgccgttgccgag

SEQ ID NO: 92877 - DNA, 75 bp, synthetic construct
  source 1..75: mol_type = other DNA
actgaaacggcacgaacgccgggcgctgatgcgttcgcttcgtgacaaacaggcaaaaaacagcagtgatgaaat

SEQ ID NO: 92878 - DNA, 75 bp, synthetic construct
  source 1..75: mol_type = other DNA
gctgaaaaactgttcggcgaaagttatctacgcaaggagtgcatagggacacttgttcatctgatgatcactagc

SEQ ID NO: 92879 - DNA, 75 bp, synthetic construct
  source 1..75: mol_type = other DNA
atcttgaagacgcaatttctctgaagatgatcgacaaaaaaatgtgggaggagcacttcgaggacaaatcccatt

SEQ ID NO: 92880 - DNA, 75 bp, synthetic construct
  source 1..75: mol_type = other DNA
tggaactgctgccgaaatacgccgcctgggcagagggtgtcctggctggcggaggcgcgcaacaggatgacgtgc

SEQ ID NO: 92881 - DNA, 75 bp, synthetic construct
  source 1..75: mol_type = other DNA
tggcgatgatgaagccatcttcagaccaatacaaaaatacatcaatggcacatggtataacgtcgcacaggtata

SEQ ID NO: 92882 - DNA, 75 bp, synthetic construct
  source 1..75: mol_type = other DNA
cctcagcccgggatgcggcggcctcaaaagaggcagcgaaatcatcagaaacgaacgcatcatcaagcgccagta

SEQ ID NO: 92883 - DNA, 75 bp, synthetic construct
  source 1..75: mol_type = other DNA
aagcatcccggaatcagaaatctggagtgaacatcctgagcgaaacagacacgctgtcgttcttgtggctgaatc

SEQ ID NO: 92884 - DNA, 75 bp, synthetic construct
  source 1..75: mol_type = other DNA
tggcgatgaactgtcgacccggctggcctggcgtttacatggtgcaagcatctgccaggtgacttcgttagatat

SEQ ID NO: 92885 - DNA, 75 bp, synthetic construct
  source 1..75: mol_type = other DNA
tcccgaacggagcagaatttccaggcacagagatatcaagccttgaagatacgccaccaacgacagaatcttcat

SEQ ID NO: 92886 - DNA, 75 bp, synthetic construct
  source 1..75: mol_type = other DNA
tgcgtgaacctctgagccgccacctctctttcctgcgcaaaaaacaggaagccgatcgccagaaaggcaaaaaga

SEQ ID NO: 92887 - DNA, 75 bp, synthetic construct
  source 1..75: mol_type = other DNA
tcaccagcaattacccgcgcgcgcttatgcggcgactgccatcgcttatcgtaacacgcagcaatggcaaaactc

SEQ ID NO: 92888 - DNA, 75 bp, synthetic construct
  source 1..75: mol_type = other DNA
aggcagccgctgtttttgagtctgctgctgcggaggcactctgtgctgctgccgtctcagaagacttagcgttcg

SEQ ID NO: 92889 - DNA, 75 bp, synthetic construct
  source 1..75: mol_type = other DNA
ccatcattgcatctgctgtattattttcctttaacgctgcagcagcgacatcatattttgaagcacgtaacgatg

SEQ ID NO: 92890 - DNA, 75 bp, synthetic construct
  source 1..75: mol_type = other DNA
tacctatcaatgaaaaatgtcgtataggtgaaacaacgaatccatacgggaccagtaaatattactccgaggtta

SEQ ID NO: 92891 - DNA, 75 bp, synthetic construct
  source 1..75: mol_type = other DNA
atgaaaacattacctgatacacacgtacggaaggtatcgcgctgcccgtctcccgtcaccatctggcagacactg

SEQ ID NO: 92892 - DNA, 75 bp, synthetic construct
  source 1..75: mol_type = other DNA
attttgttgatgtgttcgctctctaccgtcgtattggtatggctggatccgcgtctgaagggttaacgaacgtag

SEQ ID NO: 92893 - DNA, 75 bp, synthetic construct
  source 1..75: mol_type = other DNA
atgaacacattacccgatacacacgtacgggaggcatcgcattgccagtctcccgtcaccatctggcagactctg

SEQ ID NO: 92894 - DNA, 75 bp, synthetic construct
  source 1..75: mol_type = other DNA
accgccggtgtatcctggcataatgacctgtttaccactgctcttgacattgatctgactcctgccagtggcttc

SEQ ID NO: 92895 - DNA, 75 bp, synthetic construct
  source 1..75: mol_type = other DNA
tctgacccttctttagcattaaaggagttacagtggcaggcgaaactttctttagaggatatgttgcgagatgct

SEQ ID NO: 92896 - DNA, 75 bp, synthetic construct
  source 1..75: mol_type = other DNA
gcccttaaggagtatgaggatgcggaactcactgcggcgcgtattgccgcggcgctgggactgtatatccgtaaa

SEQ ID NO: 92897 - DNA, 75 bp, synthetic construct
  source 1..75: mol_type = other DNA
agatgactggaactttgctggggctggagcttcgtaaacgtaaaactcctcaggaaaaaattgccattattcagc

SEQ ID NO: 92898 - DNA, 75 bp, synthetic construct
  source 1..75: mol_type = other DNA
aaggttgctaaaaatcatgggctgtctctggaggggcatcactccaggcagtttacatcatctcttgggcgccag

SEQ ID NO: 92899 - DNA, 75 bp, synthetic construct
  source 1..75: mol_type = other DNA
cagaaattctgacaaatctccgcctgatagaacgctctcaagttgtattcattgatgacgcgcaatgtgccgtat

SEQ ID NO: 92900 - DNA, 75 bp, synthetic construct
  source 1..75: mol_type = other DNA
gctaacgcaaaatataccgctcaggacgctacgacggcacaaaaagggatagtccagctcagtagtgccaccaac

SEQ ID NO: 92901 - DNA, 75 bp, synthetic construct
  source 1..75: mol_type = other DNA
tcctgatgttcgtggaatacgcacgtaacgccgtacgtatggctgcgctgatgaaacagcgtcaggtgatggttt

SEQ ID NO: 92902 - DNA, 75 bp, synthetic construct
  source 1..75: mol_type = other DNA
agtaacgcccgcgagtgtgcagctccgggcgtcgtggcgtcgattgcttctggttgtggagaaactaacgcatga

SEQ ID NO: 92903 - DNA, 75 bp, synthetic construct
  source 1..75: mol_type = other DNA
ttcgctgtataccgaattgcagactgtgttccgatgcgtgagaaacgccctctgacgagtaaacaacagctggct

SEQ ID NO: 92904 - DNA, 75 bp, synthetic construct
  source 1..75: mol_type = other DNA
tactgacagtcatgatccgtcagtatttctgtcagcacctgtcagaagaagagacaattaatgcgctgaatcatc

SEQ ID NO: 92905 - DNA, 75 bp, synthetic construct
  source 1..75: mol_type = other DNA
ggtttgaaacaggcgacaacggcaatgaatatttcaaatggagaagcaaacaaagcaccacaacaaaagacctga

SEQ ID NO: 92906 - DNA, 75 bp, synthetic construct
  source 1..75: mol_type = other DNA
cgaatgcttcagcgtcacaacaatcagcagccacatctgcatccaccgcgaccacgaaggcatcagaagctgcga

SEQ ID NO: 92907 - DNA, 75 bp, synthetic construct
  source 1..75: mol_type = other DNA
cgaagccactgaacaggccagcgcagcagcgaggtctgcttccgcagcgaagacatccgagacgaacgcgaaagc

SEQ ID NO: 92908 - DNA, 75 bp, synthetic construct
  source 1..75: mol_type = other DNA
tctcggacgtttttgccgccttcgcggaatttcctgccgccgttgccgaggaagctgcactactggcgcttgatg

SEQ ID NO: 92909 - DNA, 75 bp, synthetic construct
  source 1..75: mol_type = other DNA
gtacaggaaatatttgtcgttcaccaattggtgaacgctatttacaaaagttgctgccaaataagattgtggcgt

SEQ ID NO: 92910 - DNA, 75 bp, synthetic construct
  source 1..75: mol_type = other DNA
gattgcacctgaagctagagggaaaacaatgttattcggacattggctaaatcaaagagaaattccggatccgta

SEQ ID NO: 92911 - DNA, 75 bp, synthetic construct
  source 1..75: mol_type = other DNA
aggggcaaacatcagataacctcaatgtctgatattgtcagggacctttcacgcctgggctggccagatgaacgg

SEQ ID NO: 92912 - DNA, 75 bp, synthetic construct
  source 1..75: mol_type = other DNA
gctaacacgacatcaagtagtaatgaatcgtaatatggcaaggagtcgaggttatccagagcgtgaaaaatgttt

SEQ ID NO: 92913 - DNA, 75 bp, synthetic construct
  source 1..75: mol_type = other DNA
ctgcgtgaagaatgggacatcagccagaaaaatgtgatgttcaacgataaacgctttggctgcgtgtacagcctg

SEQ ID NO: 92914 - DNA, 75 bp, synthetic construct
  source 1..75: mol_type = other DNA
gttatccagagcgagcagcttgcttcaatgaagcactcaagattattgatgaactgcgtaaggcagaagcagaga

SEQ ID NO: 92915 - DNA, 75 bp, synthetic construct
  source 1..75: mol_type = other DNA
agtttgttataagaagtattgggaaaatgataggtaatgctgttcctgtggaactaggaaaagcaattgggcaat

SEQ ID NO: 92916 - DNA, 75 bp, synthetic construct
  source 1..75: mol_type = other DNA
ccgcaagtgacctggtacggctgggacggcgaccggctgaccacgatacagaacgacaggagccgcatccagacg

SEQ ID NO: 92917 - DNA, 75 bp, synthetic construct
  source 1..75: mol_type = other DNA
cagggttaagacgtaagatgcgaaaagcagccatggacagaaactacctggcgtcagtccttgcggggagcgggc

SEQ ID NO: 92918 - DNA, 75 bp, synthetic construct
  source 1..75: mol_type = other DNA
taccgtgaactgggtatccccctgccgaaagtccgcactctggttaactgtatggattatacggcgctggccaga

SEQ ID NO: 92919 - DNA, 75 bp, synthetic construct
  source 1..75: mol_type = other DNA
ggaggccggacaggaagtggaattaccggagcaggaagagaaaaaaacacgggagacggtgcagttatgggatta

SEQ ID NO: 92920 - DNA, 75 bp, synthetic construct
  source 1..75: mol_type = other DNA
atgaaatggtttacacctgagcacgtcatccaggcatttaaaaaaggtgagcttacacgacatcaaatagtaatg

SEQ ID NO: 92921 - DNA, 75 bp, synthetic construct
  source 1..75: mol_type = other DNA
ggatccggaaagctggttgcgtgaggtcatcagctgtatcagtgaatggccgtcaaaccgggtggaagagttgtt

SEQ ID NO: 92922 - DNA, 75 bp, synthetic construct
  source 1..75: mol_type = other DNA
ctcagccacgggtaaaaaaacgacagaaacacagtctgtttcaattaaacagaaagctgtttttatagaaaatga

SEQ ID NO: 92923 - DNA, 75 bp, synthetic construct
  source 1..75: mol_type = other DNA
ttccggtaatgctgggggcagtgttaatgtctcagcatgcacatgcagctgataatctgacctttaaaggaaaac

SEQ ID NO: 92924 - DNA, 75 bp, synthetic construct
  source 1..75: mol_type = other DNA
tcgaaacagacaacggcgagcgggagaaagcgcagcgccgcagcctggcggagaagctgcagcaggaagggagcg

SEQ ID NO: 92925 - DNA, 75 bp, synthetic construct
  source 1..75: mol_type = other DNA
ctgaccacgatacagaacgacaggagccgcatccagacgatttatcagccggggagcttcacaccactcatcaga

SEQ ID NO: 92926 - DNA, 75 bp, synthetic construct
  source 1..75: mol_type = other DNA
gccgtttcagaagacctggcgttcgtctcggacgtttttgccgccttcgcggaatttcctgccgccgttgccgag

SEQ ID NO: 92927 - DNA, 75 bp, synthetic construct
  source 1..75: mol_type = other DNA
atgagccgtcgcggtaactgccatgataatgcggttgcagaaagctttttccagttgttgaaacgcgaacggata

SEQ ID NO: 92928 - DNA, 75 bp, synthetic construct
  source 1..75: mol_type = other DNA
tactgcagcagacaggtttccgtattttacggggaatgatgttgccagtctggcaaccctgacagaagtcgggcg

SEQ ID NO: 92929 - DNA, 75 bp, synthetic construct
  source 1..75: mol_type = other DNA
gtgaaacctggatgatggcgaatgcctggcaggcagatgaaccgaaaaacgacggcggcgaaatttcgctggtac

SEQ ID NO: 92930 - DNA, 75 bp, synthetic construct
  source 1..75: mol_type = other DNA
caacaacagcgacaaccgccgccgattcagccaagacatacagagacgaggcccacgaatacgccaatcagacag

SEQ ID NO: 92931 - DNA, 75 bp, synthetic construct
  source 1..75: mol_type = other DNA
caacgaattattatcatccagatagtgaaagggggattatttggaatgaccctacattgaacattaaatggccag

SEQ ID NO: 92932 - DNA, 75 bp, synthetic construct
  source 1..75: mol_type = other DNA
ggatttcggggaaacacatctcgatttcttgaagcaatatggtgattttgaaaatggtattcctgttcacgatac

SEQ ID NO: 92933 - DNA, 75 bp, synthetic construct
  source 1..75: mol_type = other DNA
gcggctaacagtcttgatacgtctggtgacgagaaatatgtaacggcatcatgccgattccgatccgacaaggat

SEQ ID NO: 92934 - DNA, 75 bp, synthetic construct
  source 1..75: mol_type = other DNA
aggttgcaaggacggaataatgcattttcatgcactgcggttttagctgatatattaacaagccatgcaaaggga

SEQ ID NO: 92935 - DNA, 75 bp, synthetic construct
  source 1..75: mol_type = other DNA
ttatggctggaaaggtaaaccacgtgccgcaaagctggaatgcaaaattccgggcggtggtgatatcggtctgga

SEQ ID NO: 92936 - DNA, 75 bp, synthetic construct
  source 1..75: mol_type = other DNA
cgtagcgtaccgatgggcgtgcgtgtggtcaccggtatcagcttcggttttgtcttctacgtactggaccagatc

SEQ ID NO: 92937 - DNA, 75 bp, synthetic construct
  source 1..75: mol_type = other DNA
tgctggcactcattcgccagaagcacccgaccattcccatcggccttttgatgtatgccaacctggtgtttaaca

SEQ ID NO: 92938 - DNA, 75 bp, synthetic construct
  source 1..75: mol_type = other DNA
ctctctggcgggtacgctgaagctgggtaaactgattgcgttctacgatgacaacggtatttctatcgatggtca

SEQ ID NO: 92939 - DNA, 75 bp, synthetic construct
  source 1..75: mol_type = other DNA
ggtctttccacaacatatgatttaggcatgggctttagcgctggtgcggcatacacctcttctgaccgcaccaat

SEQ ID NO: 92940 - DNA, 75 bp, synthetic construct
  source 1..75: mol_type = other DNA
ccagctcattgaaggctacatgctgcgccataaggtgaaaccgggcattaccggctgggcgcagattaacggctg

SEQ ID NO: 92941 - DNA, 75 bp, synthetic construct
  source 1..75: mol_type = other DNA
aacggacggtacagtttattcactctatacgccatcagagcagttttatccgcctggcgcaccaatcccgtggcc

SEQ ID NO: 92942 - DNA, 75 bp, synthetic construct
  source 1..75: mol_type = other DNA
tcatggagaaatctatcaaataaggatggaaaatgtttcattttataatgaagaatctgttgttctatggcaaat

SEQ ID NO: 92943 - DNA, 75 bp, synthetic construct
  source 1..75: mol_type = other DNA
ggcactggctgaggcctgcccggcacttgttgacgcggcactggcagatgatgcagccgctgtttttgagcctgc

SEQ ID NO: 92944 - DNA, 75 bp, synthetic construct
  source 1..75: mol_type = other DNA
aaaaagagctggcaggctgaacgctacgcgcgcggaaccctgcgcaaaatattcgaacgtctggaccgcaccgac

SEQ ID NO: 92945 - DNA, 75 bp, synthetic construct
  source 1..75: mol_type = other DNA
gaggtgatgcgtgcactacgcaaaggccaggcctcagcattttattatggtgatcccctgggcgaaatgcgcctg

SEQ ID NO: 92946 - DNA, 75 bp, synthetic construct
  source 1..75: mol_type = other DNA
atgtttcattgtcctttatgccagcatgccgcacatgcgcgtacaagtcgctatatcactgacacgacaaaagag

SEQ ID NO: 92947 - DNA, 75 bp, synthetic construct
  source 1..75: mol_type = other DNA
atgccgcacatgcgcgtacaagtcgctatatcactgacacgacaaaagagcgttatcaccagtgccagaacgtga

SEQ ID NO: 92948 - DNA, 75 bp, synthetic construct
  source 1..75: mol_type = other DNA
tctcggacgtttttgccgccttcgcggaatttcctgccgccgttgccgaggaagctgcgctactggcgctcgagg

SEQ ID NO: 92949 - DNA, 75 bp, synthetic construct
  source 1..75: mol_type = other DNA
tttatcaatgccctgaaagcccgaatcaacgcttaccagaagcgtaagcgccgtgaaggtaaacgcgtgcatccc

SEQ ID NO: 92950 - DNA, 75 bp, synthetic construct
  source 1..75: mol_type = other DNA
aatgtaatagatctacgtggaaaagatatgggaacatatattgatgctaatggagcatgctgggctccggatact

SEQ ID NO: 92951 - DNA, 75 bp, synthetic construct
  source 1..75: mol_type = other DNA
gtcttaccgctgataaaggctacaccgtcgccgatccgaaccttgacgagctgtatcaagtgtatagtcagcctg

SEQ ID NO: 92952 - DNA, 75 bp, synthetic construct
  source 1..75: mol_type = other DNA
gacccaaattattgctggtgggaggttgatccggttgatgctgcaaatgaagccatgagttaccacaacgattaa

SEQ ID NO: 92953 - DNA, 75 bp, synthetic construct
  source 1..75: mol_type = other DNA
gcattgtcattagctgctttcactgctttcggtgtcgcagcaagcgtttcagatgtgctgttggttgcactactg

SEQ ID NO: 92954 - DNA, 75 bp, synthetic construct
  source 1..75: mol_type = other DNA
ctttccggcgggatgaatgagaccgcggactgggtaagacagcgttacgggcagacctttgatgccatttatgtg

SEQ ID NO: 92955 - DNA, 75 bp, synthetic construct
  source 1..75: mol_type = other DNA
gtcggaaaccagcgcagaatcctcaaaaacggctgccgcatcgtcagccagttcggcggcgtcatcggcatcatc

SEQ ID NO: 92956 - DNA, 75 bp, synthetic construct
  source 1..75: mol_type = other DNA
cggggttaaccgcctgctaaaacgtgcggaagacattgtgctggcgacgcttatcctgctgctgatctccccggt

SEQ ID NO: 92957 - DNA, 75 bp, synthetic construct
  source 1..75: mol_type = other DNA
gagctgcgtgcgctgggcgtggaaggggacacgccggaggataccctgcggaccctggttgcccgcctgaaccag

SEQ ID NO: 92958 - DNA, 75 bp, synthetic construct
  source 1..75: mol_type = other DNA
cctgttgttgttatgcgttctgctggctcagtaagcgaactggcatcaagggtcattatcaccacggcaacgcga

SEQ ID NO: 92959 - DNA, 75 bp, synthetic construct
  source 1..75: mol_type = other DNA
tcggcgttaatgaaggtgaaaactatgctgtaatggatccatggtctgcacagcgacttgctgatgcgcagactg

SEQ ID NO: 92960 - DNA, 75 bp, synthetic construct
  source 1..75: mol_type = other DNA
ctgtcacagggtagcaccgttcagtacagcgggattcgagtcggtgaggtgacgcaattacgcctggaccgagac

SEQ ID NO: 92961 - DNA, 75 bp, synthetic construct
  source 1..75: mol_type = other DNA
actataaccggaaccggtactacgatccgttgcagggacgctatatcacccaggatcccattgggctgaaggggg

SEQ ID NO: 92962 - DNA, 75 bp, synthetic construct
  source 1..75: mol_type = other DNA
gtgagtggctggaagaagtggcgctgggcggaaattatgatactccggcagtgtgcgggaacgatgacagtcgaa

SEQ ID NO: 92963 - DNA, 75 bp, synthetic construct
  source 1..75: mol_type = other DNA
ggctgaacaggggacgggcggcacggcctggcagctgaatgttgtgcagccggaaactgccgcagagcctgtggt

SEQ ID NO: 92964 - DNA, 75 bp, synthetic construct
  source 1..75: mol_type = other DNA
tgtcggcgttttttatcactgcttgcgacccaaaaaccgatcccaaccaggttgattgcaataagtcagtatcaa

SEQ ID NO: 92965 - DNA, 75 bp, synthetic construct
  source 1..75: mol_type = other DNA
aatcagcaaagaaaaatattcgattcccacatgagcttatagatgggattgatgccagcgttgaacaagaaaaat

SEQ ID NO: 92966 - DNA, 75 bp, synthetic construct
  source 1..75: mol_type = other DNA
attgaccacggtaaaacgccagcatcgccctgcactggatctttcacgcctgcctgaacttctgtcgcgtattga

SEQ ID NO: 92967 - DNA, 75 bp, synthetic construct
  source 1..75: mol_type = other DNA
agcagtaccgatgagcaagggctggaatacttccatcagctgaaaaaatctggcaaaccagtgattgccattgat

SEQ ID NO: 92968 - DNA, 75 bp, synthetic construct
  source 1..75: mol_type = other DNA
gctggcggagatggcgatttccagcgcccagcgccgtatgcgtgcggctaaaaaagtggtgcgcaaaaagctgac

SEQ ID NO: 92969 - DNA, 75 bp, synthetic construct
  source 1..75: mol_type = other DNA
aaccacaaataaccggaaacattaaaacgcatatcattaatttgccctgtatcgaagagcaacaaaagatcgcca

SEQ ID NO: 92970 - DNA, 75 bp, synthetic construct
  source 1..75: mol_type = other DNA
tacacaccggcgcgaaaagctcatctttatcactgcgaccaccggggactgccgctggcgcttatcagcgaagac

SEQ ID NO: 92971 - DNA, 75 bp, synthetic construct
  source 1..75: mol_type = other DNA
aggggaaacggcgtggtgcggggagtatgacgaatggggaaacctgctgggcgaaaccagtgcgcagcaccttca

SEQ ID NO: 92972 - DNA, 75 bp, synthetic construct
  source 1..75: mol_type = other DNA
ttacgacgaaacgtttccaaaacccgtgagactcggtgctgcctccgttggatggcgttccacttccattgatga

SEQ ID NO: 92973 - DNA, 75 bp, synthetic construct
  source 1..75: mol_type = other DNA
gttgccgttgctctgcaataccggtggtaatgatccggaggaactgctgaatgatacagaaaccaccgccagtgc

SEQ ID NO: 92974 - DNA, 75 bp, synthetic construct
  source 1..75: mol_type = other DNA
aacatcatgcccttttcctgatggtgatttttctgctggtactggtagtgacgtttattatctgggcatggaaca

SEQ ID NO: 92975 - DNA, 75 bp, synthetic construct
  source 1..75: mol_type = other DNA
cgaagacagtgatgaggctgttgaaaacctcggattaaaacccacggtggataaggcaaaaaatgccgttcagcg

SEQ ID NO: 92976 - DNA, 75 bp, synthetic construct
  source 1..75: mol_type = other DNA
atctggaagaacgtcggcttatgctgcaatggtgggcagattttctggatgcaaacagggaggagtgtatcagtc

SEQ ID NO: 92977 - DNA, 75 bp, synthetic construct
  source 1..75: mol_type = other DNA
ggctgctgcggcagccagggagcagcgccgggctctggctgagctgcacagccagttgacggaaatccgcgcttc

SEQ ID NO: 92978 - DNA, 75 bp, synthetic construct
  source 1..75: mol_type = other DNA
ggcgtaccccgacgggaaattgccgaaaagtttgggatgaagttgggcgcagtgaataactacgtttatttcgac

SEQ ID NO: 92979 - DNA, 75 bp, synthetic construct
  source 1..75: mol_type = other DNA
ttgctaccccttcgccgatgagccagttactggctaacggtgagaatttcatgaccaatgcgaatgaagtgttgg

SEQ ID NO: 92980 - DNA, 75 bp, synthetic construct
  source 1..75: mol_type = other DNA
tcttgcaggcagtattgccggtggtgcgctgggggcggcagccggacctgtggggattgccattggttctacggt

SEQ ID NO: 92981 - DNA, 75 bp, synthetic construct
  source 1..75: mol_type = other DNA
atctggtcgagcgtaaagatctgattcagatcccggtgtatccgttcgaacgcgaatggacgcacttcaccagca

SEQ ID NO: 92982 - DNA, 75 bp, synthetic construct
  source 1..75: mol_type = other DNA
aagttccgcctgtcaggcgcactgaccaacaatcagttcgggctggggatttatctgtatacggatgctcccgtt

SEQ ID NO: 92983 - DNA, 75 bp, synthetic construct
  source 1..75: mol_type = other DNA
attccctgcaggcaacacagcttcagtcggccattgtgaaagccatgtatgcagcgacgattgaaagtgaccttg

SEQ ID NO: 92984 - DNA, 75 bp, synthetic construct
  source 1..75: mol_type = other DNA
ctcgtcatagaaaaacattcgacgatgtaatgacggagccgccaaaatctggaattaaatgggatgatgttgttg

SEQ ID NO: 92985 - DNA, 75 bp, synthetic construct
  source 1..75: mol_type = other DNA
gcgtgatagtgggcgtaatgctggctgtcggctgccatgaccgtagggctggcgtgaagacgctgttgggcgacg

SEQ ID NO: 92986 - DNA, 75 bp, synthetic construct
  source 1..75: mol_type = other DNA
atgcctaacatcattctgtctgacatcagtgcaagtgtcagtgaactgaaaaaaaatccgatggcgacagtcggt

SEQ ID NO: 92987 - DNA, 75 bp, synthetic construct
  source 1..75: mol_type = other DNA
cgaagtcgttggctttaacggtcaacggctgtttttaatgccgctggaggaagtggaaggtgtcctgcccggcgc

SEQ ID NO: 92988 - DNA, 75 bp, synthetic construct
  source 1..75: mol_type = other DNA
ctgctgacatttttctggaaaaaagcagagctggtgaatgacagccagatcagagttaatttcgcacttggctat

SEQ ID NO: 92989 - DNA, 75 bp, synthetic construct
  source 1..75: mol_type = other DNA
gtgcactacacgcggacacaatatgcagagccgctggtcgaaagccgctatctttacgacccgctgggccgcagg

SEQ ID NO: 92990 - DNA, 75 bp, synthetic construct
  source 1..75: mol_type = other DNA
ctgaaggcgccttctgtccgttttatctctgtcacacgacaactggagaacggtcgtttccactatcaatttaca

SEQ ID NO: 92991 - DNA, 75 bp, synthetic construct
  source 1..75: mol_type = other DNA
gatgcccacaaagaatctggacgacgaagagacgttgtcgaggcttaccggcgacgtgatacacggcgtcctgct

SEQ ID NO: 92992 - DNA, 75 bp, synthetic construct
  source 1..75: mol_type = other DNA
gaacgtccggcacgaaacgagtacttaaaacggatattgcgttgcctctgctttgttgggtgttcaccagtccat

SEQ ID NO: 92993 - DNA, 75 bp, synthetic construct
  source 1..75: mol_type = other DNA
ctgcgtaataaagatgccctggtgttgcagagtgtttcaaccatcgaactgccttatgaagcagttaatcctatc

SEQ ID NO: 92994 - DNA, 75 bp, synthetic construct
  source 1..75: mol_type = other DNA
accaatgcctaaccctcttaaaatgtacgcggttgatgctgttgccgctattgcagaggtgagaggctggaacgc

SEQ ID NO: 92995 - DNA, 75 bp, synthetic construct
  source 1..75: mol_type = other DNA
gatagaagagctgcgcgttagttacttcgctcaacaacttggcacgccttatccgatttcggataagcgtatttt

SEQ ID NO: 92996 - DNA, 75 bp, synthetic construct
  source 1..75: mol_type = other DNA
tggttcacgacggatatcccaggacatcagcacccgtgatgagggcggtgacgggaaagtggtggttatcgggcg

SEQ ID NO: 92997 - DNA, 75 bp, synthetic construct
  source 1..75: mol_type = other DNA
tttacggtaagttgtataattccttagagaaagaattaagctcgtttttctcatttatcaatgttgaggtgcacg

SEQ ID NO: 92998 - DNA, 75 bp, synthetic construct
  source 1..75: mol_type = other DNA
atcgaggttgtgaaaaaccagcatgcaagccgcatagcgttagtaccggtaatggctgcagagcccactggcatc

SEQ ID NO: 92999 - DNA, 75 bp, synthetic construct
  source 1..75: mol_type = other DNA
gaaaacgccctccgggtatccggcatatcctgcgggctttttccctgttgcgtccgggtggcgtgctggttgccg

SEQ ID NO: 93000 - DNA, 75 bp, synthetic construct
  source 1..75: mol_type = other DNA
tctgtagaggtaaagcagagggaatatgggagaagtactgtgcataaatgcacttttgtttttagtcctcaggta

SEQ ID NO: 93001 - DNA, 75 bp, synthetic construct
  source 1..75: mol_type = other DNA
gcattaagatggcggcaaacagtatgtccggtgcaggaggatttttcggcagtataggcaactggctgggtggcg

SEQ ID NO: 93002 - DNA, 75 bp, synthetic construct
  source 1..75: mol_type = other DNA
tggctgagcgaggccgaccggcggctgcagataaagagtgcactgtcctggtggctggtctgccggggggaaatt

SEQ ID NO: 93003 - DNA, 75 bp, synthetic construct
  source 1..75: mol_type = other DNA
agatgagaaaaaagccctgatgcaacagctactgactggcaaacgtcgtgttaaggtcgatgaggcggttgccga

SEQ ID NO: 93004 - DNA, 75 bp, synthetic construct
  source 1..75: mol_type = other DNA
ccggcgcgaaaaatccacctgtaccactgcgaccatcgcggcctgccgctggcccttatcagcaaggaagggaca

SEQ ID NO: 93005 - DNA, 75 bp, synthetic construct
  source 1..75: mol_type = other DNA
gtcagcaatgtctgggttgtcatgcttgtgaaatcgcctgtgtcatggctcacaatgatgagcaacatgtcctga

SEQ ID NO: 93006 - DNA, 75 bp, synthetic construct
  source 1..75: mol_type = other DNA
aatggctgcggctatcgccgtcagtctggcggataagggttttgatgtgcatctcaccacctcagatcctgctgc

SEQ ID NO: 93007 - DNA, 75 bp, synthetic construct
  source 1..75: mol_type = other DNA
cgcgattctcatcgtgacaactgagcggctgacgcaggggcagactggccgtgacgccgatatcgtgacgtacca

SEQ ID NO: 93008 - DNA, 75 bp, synthetic construct
  source 1..75: mol_type = other DNA
aacattggtttcaaattgcgcgttatcacgaagtcacctgtcactctgtctggcgctcagataaggattgagtaa

SEQ ID NO: 93009 - DNA, 75 bp, synthetic construct
  source 1..75: mol_type = other DNA
actgtctctccgtcaggatgcggaacgcatctgggggcagtttgcagtcgcggcggaaaacgatgtggattttga

SEQ ID NO: 93010 - DNA, 75 bp, synthetic construct
  source 1..75: mol_type = other DNA
gtcgaagcgtctgcgaattcccgggcagcagaaccagcaaggcaaagccatcacagactatgatccttttgcata

SEQ ID NO: 93011 - DNA, 75 bp, synthetic construct
  source 1..75: mol_type = other DNA
gcgccggaagagatgacggacagtgacgggaaaatcgtgtgggagacggggtatcaggtctggggtaacacgata

SEQ ID NO: 93012 - DNA, 75 bp, synthetic construct
  source 1..75: mol_type = other DNA
ctggacgtcagcgacacgctccggcgcatggatgaagacgtgcgggcaaaggtgtatgcggcggcgctgcatacg

SEQ ID NO: 93013 - DNA, 75 bp, synthetic construct
  source 1..75: mol_type = other DNA
cgtggatctatgacgtcatcagggccatcactctgttcattattttcgtcaacattgttgtcattccggcgctgt

SEQ ID NO: 93014 - DNA, 75 bp, synthetic construct
  source 1..75: mol_type = other DNA
acgggcagccactgcggcagagtatggggtattccggagggggtaccggatttggcgggcagcttgcggaatggc

SEQ ID NO: 93015 - DNA, 75 bp, synthetic construct
  source 1..75: mol_type = other DNA
cctgccatgaatgggatatggccggcattcagccttctcccgcacaggcacagaacattcgcgaaaaaacggagg

SEQ ID NO: 93016 - DNA, 75 bp, synthetic construct
  source 1..75: mol_type = other DNA
gctcatcattagaggttataaattgcagcatacctgaaaatgtcattaatttatctttatgccattgtagttctt

SEQ ID NO: 93017 - DNA, 75 bp, synthetic construct
  source 1..75: mol_type = other DNA
ttatccgtgaaggtgtgggcgttcatgcgtttaacggcgaaatctttgtgcagccggtctgggatacggagagca

SEQ ID NO: 93018 - DNA, 75 bp, synthetic construct
  source 1..75: mol_type = other DNA
ttttttaatgacagcctgacgctgacacctgaaacgctccacgggatgatacagaatacgccctgtgttgaatca

SEQ ID NO: 93019 - DNA, 75 bp, synthetic construct
  source 1..75: mol_type = other DNA
tgatccgagaaggtgtggccatgcacgcgtttaacggtgaattatgcacgcaggcgacctgggacagcgattcaa

SEQ ID NO: 93020 - DNA, 75 bp, synthetic construct
  source 1..75: mol_type = other DNA
gtgattaccttgaatcagatgatatagtgcgttttactgacagatataacagtaaacaattcctaaagcgagatt

SEQ ID NO: 93021 - DNA, 75 bp, synthetic construct
  source 1..75: mol_type = other DNA
ccgttgattacggctcatctttcgcaaagaagtattgccgatattatgtggttcgataccgccatcgctgccatc

SEQ ID NO: 93022 - DNA, 75 bp, synthetic construct
  source 1..75: mol_type = other DNA
actatatgggctgctcgacattcagcgaatataccgttgtggcggaagtatcactggcgaaaatcaatccgcagg

SEQ ID NO: 93023 - DNA, 75 bp, synthetic construct
  source 1..75: mol_type = other DNA
cgtattggcgaccgctgccagaatatttgtgagtttatcttctactacgtgaaggggcaggatttccgtcatgta

SEQ ID NO: 93024 - DNA, 75 bp, synthetic construct
  source 1..75: mol_type = other DNA
tcctgtgagaactgcgccggatgcatcggcttcggcgctcagatacgctgccgctattgagcgtgcgttgtgtga

SEQ ID NO: 93025 - DNA, 75 bp, synthetic construct
  source 1..75: mol_type = other DNA
gtttcgactatgcagcacagttccctgagtcccctaacctgaaacactttggtctggggaaaagagagataacca

SEQ ID NO: 93026 - DNA, 75 bp, synthetic construct
  source 1..75: mol_type = other DNA
gcgatcaacgcaaaaatatcacaatcaaagctgtgctactccctgcaggacaacgacattgtatttaataaaggt

SEQ ID NO: 93027 - DNA, 75 bp, synthetic construct
  source 1..75: mol_type = other DNA
gcagtaagcggtgatgcccggcggattacgctactttgtctcagtactggtgcgagatggggagaagcgaaaaat

SEQ ID NO: 93028 - DNA, 75 bp, synthetic construct
  source 1..75: mol_type = other DNA
tggtgctgctttgtatgtcgcacagccatcgctgatggtgcagaaaggcattgccgggacttactgcaaaacgcc

SEQ ID NO: 93029 - DNA, 75 bp, synthetic construct
  source 1..75: mol_type = other DNA
gaccggatatttgacacggcggagagcgtctgtgttgcctctgtggctcgtacggttctgcgtgccgtccgtgac

SEQ ID NO: 93030 - DNA, 75 bp, synthetic construct
  source 1..75: mol_type = other DNA
atgcactggtactcaacgacaacggcgggcggagcattcactttgagccgctgctgccgggggaggcggtgtaca

SEQ ID NO: 93031 - DNA, 75 bp, synthetic construct
  source 1..75: mol_type = other DNA
atggataagaaaataaaatgtgcttaccacctttgcaaaaaagacgttgaagaaagcaaaactattgaaagaatg

SEQ ID NO: 93032 - DNA, 75 bp, synthetic construct
  source 1..75: mol_type = other DNA
gcaacgggcggcgcggacggatgaaaccacctatgtggtgcagggctggcgacagggtaacggtacgctgtggca

SEQ ID NO: 93033 - DNA, 75 bp, synthetic construct
  source 1..75: mol_type = other DNA
gtccggtggccataaccccttatactctgatgcaggcgattacagcagaaggtgatgtggtggtcagtggtgcaa

SEQ ID NO: 93034 - DNA, 75 bp, synthetic construct
  source 1..75: mol_type = other DNA
tatgtatacgaaatccgtgtgaagagttggtgggtgaactccggcgatgctttcatgatatacagccttgctgaa

SEQ ID NO: 93035 - DNA, 75 bp, synthetic construct
  source 1..75: mol_type = other DNA
gatcctgagcatgctttataaagcacagccagaagatgtgcgtttcatcatgatcgacccgaaaatgctggagct

SEQ ID NO: 93036 - DNA, 75 bp, synthetic construct
  source 1..75: mol_type = other DNA
cagcgcggttcaggacgtcaaaaaagtcgtcgagcaaattaaagccgaggggcgtcatgagcatcatattcaccg

SEQ ID NO: 93037 - DNA, 75 bp, synthetic construct
  source 1..75: mol_type = other DNA
ctggcagaaaaatacgggaatgcatccgtgtgggacgatccgcaggccatgctgctggcggtgaaacctgatgtg

SEQ ID NO: 93038 - DNA, 75 bp, synthetic construct
  source 1..75: mol_type = other DNA
gaagagtcggtggattacgcggtcatggaacgtacggcagatgccgttgtggtgccgatggatgcgggctggagc

SEQ ID NO: 93039 - DNA, 75 bp, synthetic construct
  source 1..75: mol_type = other DNA
cgcactataaggttgactccatcagggagtcatggacaagtatcttaaaacgcgcaggtctgagacacagaaaat

SEQ ID NO: 93040 - DNA, 75 bp, synthetic construct
  source 1..75: mol_type = other DNA
ggtcagtccacacagattccggtatctccggagttcaaaacacctcctcgctttaaaagagtgttagttgtaggg

SEQ ID NO: 93041 - DNA, 75 bp, synthetic construct
  source 1..75: mol_type = other DNA
ggcaatatttcgcaaaccgcaaaatctcctgcagagcgcaagagggcgcagcgagagagggaaagaaagcgggaa

SEQ ID NO: 93042 - DNA, 75 bp, synthetic construct
  source 1..75: mol_type = other DNA
gcagctgacgcgctggcggcagaacgtgcctggcaactggcacaggctgaacttgcactggccagaaatagcagt

SEQ ID NO: 93043 - DNA, 75 bp, synthetic construct
  source 1..75: mol_type = other DNA
cggccattccttacgctgaaagcggcaagctggtgaccttcggcatcgtcccggatctgccagaaaccggctatg

SEQ ID NO: 93044 - DNA, 75 bp, synthetic construct
  source 1..75: mol_type = other DNA
caagaagtggcaacgctgcgttgaagcgattgaaaatatcgacaacattcagcctggcgtcgcccactccatcgg

SEQ ID NO: 93045 - DNA, 75 bp, synthetic construct
  source 1..75: mol_type = other DNA
gtcggccattgtgaaggcgatgtatgcagccacaatcgaaagtgaacttgataccgaaaaggcatttgaatatat

SEQ ID NO: 93046 - DNA, 75 bp, synthetic construct
  source 1..75: mol_type = other DNA
gcaaaagtatcgtccggatatcctgagcgcctgcgaaaaagccatgaacgtggtggatccggatctcgactttat

SEQ ID NO: 93047 - DNA, 75 bp, synthetic construct
  source 1..75: mol_type = other DNA
gaagcggatattatcgctgatttgctggatggactggaagaagcaaaatcacaactcaacgagcagcgtgagtat

SEQ ID NO: 93048 - DNA, 75 bp, synthetic construct
  source 1..75: mol_type = other DNA
acgcagagctgctggggtacgggcagggtgagcggatccgtgaacggatgagggagctgcagcagattcgtgaca

SEQ ID NO: 93049 - DNA, 75 bp, synthetic construct
  source 1..75: mol_type = other DNA
tatcgcggtaacgcgcgagcagacgatctcgttcgtaataacggcgtcgcgtcgaacgccgtgcagctgcatcag

SEQ ID NO: 93050 - DNA, 75 bp, synthetic construct
  source 1..75: mol_type = other DNA
tgtcagcgcctggattggcggcatctggtatcgcaaagatgtgctggcaaaagcggggctggaggagccgaaaaa

SEQ ID NO: 93051 - DNA, 75 bp, synthetic construct
  source 1..75: mol_type = other DNA
ttattcgtgaaggtgtgggcgttcatgcgtttaacggcgaaatctttgtgcagccggtctgggatacggagagca

SEQ ID NO: 93052 - DNA, 75 bp, synthetic construct
  source 1..75: mol_type = other DNA
cgtttttgcaaaaaaatcaggatttacaaagacagtatcagtccggggatattacggaggaactgttccgtcagg

SEQ ID NO: 93053 - DNA, 75 bp, synthetic construct
  source 1..75: mol_type = other DNA
cagataaaggcggtgtaggtaaaagcacaacaactgcaaatctggctgcaatgctcgtgaacaagggaaaatcag

SEQ ID NO: 93054 - DNA, 75 bp, synthetic construct
  source 1..75: mol_type = other DNA
cgacctggtgatctggttgctgatttctttatgggatccggttccacaataaaagcagcaatggcgctggggcgt

SEQ ID NO: 93055 - DNA, 75 bp, synthetic construct
  source 1..75: mol_type = other DNA
gcgtcatccgtccatccgaaaacgattcgcatgtgcttaccgccatgctgccctcgtcctgcccgcaaaaccacg

SEQ ID NO: 93056 - DNA, 75 bp, synthetic construct
  source 1..75: mol_type = other DNA
gaaaatacgaacgggagctattaaataaaatatgcattctttcaatgctggcccgtttacgcccgatgcaaaaag

SEQ ID NO: 93057 - DNA, 75 bp, synthetic construct
  source 1..75: mol_type = other DNA
ctgctgcccaaacacaacacggtggcacgtgaatatgccgaacgcacgctcgataaagagaacgtgttacgtcaa

SEQ ID NO: 93058 - DNA, 75 bp, synthetic construct
  source 1..75: mol_type = other DNA
gttgttgggagattcactgacgctgcgtgactacgatggtcaggtagcggaagctatggccatggtgcgtgcgtt

SEQ ID NO: 93059 - DNA, 75 bp, synthetic construct
  source 1..75: mol_type = other DNA
gaatccacccggaaggcaattcttgaggctttgaagccacataacgccagtcctttcgacacaatgagtgaagca

SEQ ID NO: 93060 - DNA, 75 bp, synthetic construct
  source 1..75: mol_type = other DNA
tccatttctgatgatgacctgtgcacctggtgtacccgtctgctttaccgtcccggagaactcagtctgtgcaga

SEQ ID NO: 93061 - DNA, 75 bp, synthetic construct
  source 1..75: mol_type = other DNA
cctgcgaccaggtttttttaagtgatgccgacacctatgttccgcccgatcaagacggaatgggctatatgctgg

SEQ ID NO: 93062 - DNA, 75 bp, synthetic construct
  source 1..75: mol_type = other DNA
aatctactgcgtaacccttatttttgccgggtaatttgcgttaacgacggctccacggacaataccgaagcggtc

SEQ ID NO: 93063 - DNA, 75 bp, synthetic construct
  source 1..75: mol_type = other DNA
ggcgatccccgacgcgcctgggtgaataccattctcgcggcatccggaggctccggcccggttcccctgtatccc

SEQ ID NO: 93064 - DNA, 75 bp, synthetic construct
  source 1..75: mol_type = other DNA
tggtattgcggaaatcagccctgtccctggtgctggcgacactcccgcttatctttccgctgacaccctccggtc

SEQ ID NO: 93065 - DNA, 75 bp, synthetic construct
  source 1..75: mol_type = other DNA
cgccgttttgtgaataactcctacctgcatctgggcgtattcagcggacgtgatctggttggcgttcttcagtgg

SEQ ID NO: 93066 - DNA, 75 bp, synthetic construct
  source 1..75: mol_type = other DNA
ggatttctcgacatcatcccgctaagtcagccgctggagtttcggcgggaagggttgcaacatggggtgctggat

SEQ ID NO: 93067 - DNA, 75 bp, synthetic construct
  source 1..75: mol_type = other DNA
cagagaatcaatgaaaccactgaacgcgcacgtcacaaggcgggtctgttgcaggacaaaggcaatagcgagaag

SEQ ID NO: 93068 - DNA, 75 bp, synthetic construct
  source 1..75: mol_type = other DNA
ttccccgggttaatccggcaaacccaccggaaaatcaggtcagccgccgccgatggcgcttacgatacccggctc

SEQ ID NO: 93069 - DNA, 75 bp, synthetic construct
  source 1..75: mol_type = other DNA
aggcccgcgtcgtcagccggaaaagaacgttttcaccgatgaacagattgagaagctggaagaaatcttccattc

SEQ ID NO: 93070 - DNA, 75 bp, synthetic construct
  source 1..75: mol_type = other DNA
ttaatccgaacgtcgctaaccgcaacaaaggcgggcgtcgcaaaccgaaaaagaattttttcagtgacgaggcca

SEQ ID NO: 93071 - DNA, 75 bp, synthetic construct
  source 1..75: mol_type = other DNA
tggctgttttattatcgagttataatggggagaagtatattagcgaacaattggactcaataacaaaatgctata

SEQ ID NO: 93072 - DNA, 75 bp, synthetic construct
  source 1..75: mol_type = other DNA
agcaaagcgcgatgaagccaaaaagctattagtgcagggcattgatccaaaagccgaacagaaagaggctcaggc

SEQ ID NO: 93073 - DNA, 75 bp, synthetic construct
  source 1..75: mol_type = other DNA
taatgatattatctgttatgagtggttcaacactggctgataatcatacgctatcggctggttatgctcagagta

SEQ ID NO: 93074 - DNA, 75 bp, synthetic construct
  source 1..75: mol_type = other DNA
gctcgtatcagtctggaaaagaaacttgaaaccagatctccgcgcctcgtaagcctcgctaaaaaagcctcggtc

SEQ ID NO: 93075 - DNA, 75 bp, synthetic construct
  source 1..75: mol_type = other DNA
gctgaaatttacggtgattatgatgcatctgatgcagggtatgacgccggagatgatgatatcgcgatagaaccg

SEQ ID NO: 93076 - DNA, 75 bp, synthetic construct
  source 1..75: mol_type = other DNA
tatgattcagtggtgggctgattatttgcaagagtgttataaagggccaataacgccatacgaatttgcaaagaa

SEQ ID NO: 93077 - DNA, 75 bp, synthetic construct
  source 1..75: mol_type = other DNA
gtaagaacctggacgccagcgccttcatggggaatgacccgaaaaccggcaaaccttacgtcgataaggaatcag

SEQ ID NO: 93078 - DNA, 75 bp, synthetic construct
  source 1..75: mol_type = other DNA
tgttaccgttcagaatggattttgcttaccgaaaaaacaccctcagctacagatgtgcctgcaggtacgccatgt

SEQ ID NO: 93079 - DNA, 75 bp, synthetic construct
  source 1..75: mol_type = other DNA
tcgcctttgcccggctggttgacgttgacctgaccggtgacccgattgtcctgggcaataacggcgcaaaactga

SEQ ID NO: 93080 - DNA, 75 bp, synthetic construct
  source 1..75: mol_type = other DNA
taacgtcagtcggtcgcgatattctggctaaaacaagcacactggccgttatccaataccttggtttaagagaac

SEQ ID NO: 93081 - DNA, 75 bp, synthetic construct
  source 1..75: mol_type = other DNA
gcgtcgaattttgattttattggcagccatgaaagcacgttctacgagctggatggtgagtggtatcacgagata

SEQ ID NO: 93082 - DNA, 75 bp, synthetic construct
  source 1..75: mol_type = other DNA
gttgattactgtaaaagcccatcagacgcagagccgattatcgtagagaacagaattggcattattccagcgcca

SEQ ID NO: 93083 - DNA, 75 bp, synthetic construct
  source 1..75: mol_type = other DNA
tttattcacggcagccaaccggtacaactgctgctggttggggcggaggtcatggtatcgctgctgtttgtcctc

SEQ ID NO: 93084 - DNA, 75 bp, synthetic construct
  source 1..75: mol_type = other DNA
tacaggtctttttctgcattgcgcttctttccggtgttctctggagtcgaaacgatcctccctctttacgtccgc

SEQ ID NO: 93085 - DNA, 75 bp, synthetic construct
  source 1..75: mol_type = other DNA
gaccttccttaatgtggtcattggttatggcatcatcgcttccgtcatgaccaccgatatcgacctgtcaaaaga

SEQ ID NO: 93086 - DNA, 75 bp, synthetic construct
  source 1..75: mol_type = other DNA
cgggcaatttccctggcatgattttctttgaaatcattccggtgctgatcgtccagatgctgttcaccctcggcc

SEQ ID NO: 93087 - DNA, 75 bp, synthetic construct
  source 1..75: mol_type = other DNA
atgacttatgcgcatttttcaccggactttttacaggacgcaatcaactttaatccgctggctgaaagtgtccat

SEQ ID NO: 93088 - DNA, 75 bp, synthetic construct
  source 1..75: mol_type = other DNA
tcccgtggcgagcgataacccagtgcactatgcggatgccattcgttataatgctcgaacgcctctgcaaggttc

SEQ ID NO: 93089 - DNA, 75 bp, synthetic construct
  source 1..75: mol_type = other DNA
gctgaaaggcgatccgatggtgcttcctaatggggccacgctttacttcctcggaaccaatgcccgcacggccca

SEQ ID NO: 93090 - DNA, 75 bp, synthetic construct
  source 1..75: mol_type = other DNA
aatggcggcaacgaagccgacttaaatcctaacgtcgccaaccgcaacaaaggcccgcgccgtcagccggaaaaa

SEQ ID NO: 93091 - DNA, 75 bp, synthetic construct
  source 1..75: mol_type = other DNA
ctggtgcgatgcgtggttatggcgcgccacaagtcgtatttgccgttgagtctatgcttgatgacgccgcgacag

SEQ ID NO: 93092 - DNA, 75 bp, synthetic construct
  source 1..75: mol_type = other DNA
tcggtcgtggtcagcgtgaattgatcatcggtgaccgtcagacaggtaaaaccgcactggctatcgatgccatca

SEQ ID NO: 93093 - DNA, 75 bp, synthetic construct
  source 1..75: mol_type = other DNA
ctgtccgtcattctgtttttatttgcctggcgtttatttaaaaaacatgccgctgatattgtggacgagatttaa

SEQ ID NO: 93094 - DNA, 75 bp, synthetic construct
  source 1..75: mol_type = other DNA
acagaaaaatcagggcagcatcggcagacggcgcttacgacacccaactctgtcacgatgaactgcggcgtaaga

SEQ ID NO: 93095 - DNA, 75 bp, synthetic construct
  source 1..75: mol_type = other DNA
caactgttacctataacgcagttaaagactcataccagttcactgtaacattgaccggagcgacaaccagcgtta

SEQ ID NO: 93096 - DNA, 75 bp, synthetic construct
  source 1..75: mol_type = other DNA
aagagatcaaccagaccggtggctacaacgacgaaatcgaaggcaagctgaaaggcatcctcgattccttcaaag

SEQ ID NO: 93097 - DNA, 75 bp, synthetic construct
  source 1..75: mol_type = other DNA
tcgaattgttcattaaatccccgcttgaaaacgggcttacccgtggtgaacaaatggaactggcacggattgcgc

SEQ ID NO: 93098 - DNA, 75 bp, synthetic construct
  source 1..75: mol_type = other DNA
gaactgactcgatggctaatgttgataaatatgaaaacccatttcgtaaagagttgggcttgccagcaagaatga

SEQ ID NO: 93099 - DNA, 75 bp, synthetic construct
  source 1..75: mol_type = other DNA
ttgcgcatggagtacagcccggatgaataccagaacctgctgatgtgcgagttcgtggacgatctcgcgtccgtg

SEQ ID NO: 93100 - DNA, 75 bp, synthetic construct
  source 1..75: mol_type = other DNA
acccgaaaaatctgctgctggtgctggacgaaggtcatcacctgccggatgtggcgcgggatgcgctggagatga

SEQ ID NO: 93101 - DNA, 75 bp, synthetic construct
  source 1..75: mol_type = other DNA
ccgtttccgctttgacgataaagaagggcgcgggacgtggttctgcaatcagtgtggcgcaggtgacgggcttaa

SEQ ID NO: 93102 - DNA, 75 bp, synthetic construct
  source 1..75: mol_type = other DNA
ccagaagccgctgtttattgtcgaaaacggttttggcgcttacgacaaagtggaagatgatggcagcatcaatga

SEQ ID NO: 93103 - DNA, 75 bp, synthetic construct
  source 1..75: mol_type = other DNA
cgtaattgatattgttaataagaactctgcaatcaacaccagtatcggcgttatttttattgctttgggcggcat

SEQ ID NO: 93104 - DNA, 75 bp, synthetic construct
  source 1..75: mol_type = other DNA
ctgtaacctgttcgacctcgaccagctacgcatggagtacagcccggacgaatatcagaacctgctgatgtgcga

SEQ ID NO: 93105 - DNA, 75 bp, synthetic construct
  source 1..75: mol_type = other DNA
aggctcatggctgccttcactgctactgggcggaactcaggttggctggtttggcgtcggtgtggcgatgtttgc

SEQ ID NO: 93106 - DNA, 75 bp, synthetic construct
  source 1..75: mol_type = other DNA
cttgcagttatgctgaatttactggtttttattcgttccagtgaactcagataagcccgttggtctgaaattgat

SEQ ID NO: 93107 - DNA, 75 bp, synthetic construct
  source 1..75: mol_type = other DNA
tcaaaaccggcacggcgacctcgtcttatccgctggagccgattgcggttgataaaaacttccgtggtaagccag

SEQ ID NO: 93108 - DNA, 75 bp, synthetic construct
  source 1..75: mol_type = other DNA
ggtgatgtcaccacaccggtggtggtgcaaccgtcgggtgatggtggcgctgttatcagcaccaccagcgaaccg

SEQ ID NO: 93109 - DNA, 75 bp, synthetic construct
  source 1..75: mol_type = other DNA
tttcactggatcccaccactggccatgaacaaagtggaaaacgtccggtactcatcgtatcgaaggcatcgttta

SEQ ID NO: 93110 - DNA, 75 bp, synthetic construct
  source 1..75: mol_type = other DNA
ttgcatccgaccttgacgatgcaacacgtaagcagcttgaccacggtcaaaaagtgaccgaactgctgaaacaga

SEQ ID NO: 93111 - DNA, 75 bp, synthetic construct
  source 1..75: mol_type = other DNA
tgctgacaatccagcagtggcgcgaaacatacggacctggcagcaacgttgtactgccagcagaagaagcggaag

SEQ ID NO: 93112 - DNA, 75 bp, synthetic construct
  source 1..75: mol_type = other DNA
gacgacaagtcaccccacgaagtccacgttaaagaacccaagcgcagcaaagcgcagaatgaccgtatgtggccg

SEQ ID NO: 93113 - DNA, 75 bp, synthetic construct
  source 1..75: mol_type = other DNA
cagagccgggagacatccggcgttttattcagcaggcggtggaccactggccgcatttgctggcattttacttca

SEQ ID NO: 93114 - DNA, 75 bp, synthetic construct
  source 1..75: mol_type = other DNA
gaaacggcaaagccattctcaacgcacagtggttgcaagccagcatggattcgccgcgtcagtatgcaacatacg

SEQ ID NO: 93115 - DNA, 75 bp, synthetic construct
  source 1..75: mol_type = other DNA
cagagccgggagatatccggcgttttattcagcaggcggtggaccactggccacatctgttggcatttcacttca

SEQ ID NO: 93116 - DNA, 75 bp, synthetic construct
  source 1..75: mol_type = other DNA
cagagccgggagacatccggcgttttattcagcaggccgtagactactggccgcgtctgctggcagttcacttca

SEQ ID NO: 93117 - DNA, 75 bp, synthetic construct
  source 1..75: mol_type = other DNA
cgcttgattcggctgaagggaatattgacgaggggcagattcatgcattctgtactgccttttaccgacaggtgc

SEQ ID NO: 93118 - DNA, 75 bp, synthetic construct
  source 1..75: mol_type = other DNA
acttccagcgttgcaccttgattggaggaatatcatttcatattgtcgagaacatggtgggttttcgcttagtac

SEQ ID NO: 93119 - DNA, 75 bp, synthetic construct
  source 1..75: mol_type = other DNA
ctgaaagcaggaaatcacggccctgtatctgaataccaggaaaacgacactgacagggaaaacgccagacgcctg

SEQ ID NO: 93120 - DNA, 75 bp, synthetic construct
  source 1..75: mol_type = other DNA
atataatgagccgctgcaacaaccagtacagccgcagcagccgtattatgcacctgcagctgaacaacctgcgca

SEQ ID NO: 93121 - DNA, 75 bp, synthetic construct
  source 1..75: mol_type = other DNA
ggttacactgttgattaatggtgatcaagataaattatcgaacttgatggacactgcatttgagataataattga

SEQ ID NO: 93122 - DNA, 75 bp, synthetic construct
  source 1..75: mol_type = other DNA
gcagtgccacggttactccgaaactgaatggagtggctggcccggcattccaggtcataaaagacagtctgacac

SEQ ID NO: 93123 - DNA, 75 bp, synthetic construct
  source 1..75: mol_type = other DNA
acctctacgaaatgcaatttgatgacggtcgcacttgtgcctttcacactgatgcgcaaaaggctgcgcaatggc

SEQ ID NO: 93124 - DNA, 75 bp, synthetic construct
  source 1..75: mol_type = other DNA
ttactgacaatgaggaagaacaggcatcgaaagtaacccactggatgccactaccggagccgccgcaggaggtga

SEQ ID NO: 93125 - DNA, 75 bp, synthetic construct
  source 1..75: mol_type = other DNA
ttattgcaggacgtatcacgtcaggtgctttggcatggacagagacttgcgccggaggactggaaagacctgttc

SEQ ID NO: 93126 - DNA, 75 bp, synthetic construct
  source 1..75: mol_type = other DNA
atggcaaaacatggtagctatgatgttgacaggtgaactgacctcttcaacggaatggcaaggccagcgcgtggt

SEQ ID NO: 93127 - DNA, 75 bp, synthetic construct
  source 1..75: mol_type = other DNA
ggagtgggtaagccgttatatcaggatctgcttttccgcacgaaggcagcattgcagaaaaacccgaaaaacgtt

SEQ ID NO: 93128 - DNA, 75 bp, synthetic construct
  source 1..75: mol_type = other DNA
agtggttgccaccggcgcagagtgccgatgcggccctgttgcccgcgttgcgtctgggcaatgcccgtgcagatg

SEQ ID NO: 93129 - DNA, 75 bp, synthetic construct
  source 1..75: mol_type = other DNA
gcattgaccacggtaaaacgccagcatcgccctgctcttgatctttcccgcctgcctgaacttctgtcgcgtatt

SEQ ID NO: 93130 - DNA, 75 bp, synthetic construct
  source 1..75: mol_type = other DNA
tgaaattaacgggaatggtgcgtccagaccagcggaacgcattgaaaaggtgcgcccggacaaccgttatttcac

SEQ ID NO: 93131 - DNA, 75 bp, synthetic construct
  source 1..75: mol_type = other DNA
tgaagaacaacagtttcaggcaatacgagaagtcattcgcccacaacaggaagtgacgccggaagcacagtcaca

SEQ ID NO: 93132 - DNA, 75 bp, synthetic construct
  source 1..75: mol_type = other DNA
ctctgccgacggatgtccgccgctggctggagcgggcgctgacggagaataatttcaccggctatgctgaacttg

SEQ ID NO: 93133 - DNA, 75 bp, synthetic construct
  source 1..75: mol_type = other DNA
tggaaaaataaccggtaataccagtgtggaaatacccaaactggcaggcaatgatattttaacgcttgatggctc

SEQ ID NO: 93134 - DNA, 75 bp, synthetic construct
  source 1..75: mol_type = other DNA
tggaagactgctatttcagccagggaaaaacaacacaaaccgaacagcagccgcagattcagccacaattcacag

SEQ ID NO: 93135 - DNA, 75 bp, synthetic construct
  source 1..75: mol_type = other DNA
agatcaaggcacatctgcgtgtcgaccatgacgcggatgatgacatgctgatggacaaggttcgtcaggctaccg

SEQ ID NO: 93136 - DNA, 75 bp, synthetic construct
  source 1..75: mol_type = other DNA
gcatataaactgaccagcacatacacccccgcaggccagttacagagccagcacctgaacagcctggtgtatgac

SEQ ID NO: 93137 - DNA, 75 bp, synthetic construct
  source 1..75: mol_type = other DNA
acggcggcagcacagagcaaaagtacggcggaatccgcggcaacgcgcgccgagacagcggcaaaacgggcagag

SEQ ID NO: 93138 - DNA, 75 bp, synthetic construct
  source 1..75: mol_type = other DNA
taaccatccggctgaggattttactgccacgccatcacctgctgatgaagtggcctatttccagctttccggcgg

SEQ ID NO: 93139 - DNA, 75 bp, synthetic construct
  source 1..75: mol_type = other DNA
cttttggcaactggcgcagcgaaggccgttattaccgcccgatcccggagtggatcgccggattcggctccctga

SEQ ID NO: 93140 - DNA, 75 bp, synthetic construct
  source 1..75: mol_type = other DNA
cgacccggcacaggctgtgctcgacgaggttaatggcgtgatcgccagcgctcgggcacgtattgcggcgttcga

SEQ ID NO: 93141 - DNA, 75 bp, synthetic construct
  source 1..75: mol_type = other DNA
atgtcactgtcaattgttcatacccgcgcagccctgggagtaaatgcgcccccaatcactgttgaggtacatatc

SEQ ID NO: 93142 - DNA, 75 bp, synthetic construct
  source 1..75: mol_type = other DNA
tccgtgccacaaatcgccgacacgctgcaggtcaagcgcccgaccgtgcagagctggaaacaacgtgacggctgg

SEQ ID NO: 93143 - DNA, 75 bp, synthetic construct
  source 1..75: mol_type = other DNA
taaacacccaagatttacacctgatgaagataagtttattcgaaaaaatgccagaacaatgacctgccagcaaat

SEQ ID NO: 93144 - DNA, 75 bp, synthetic construct
  source 1..75: mol_type = other DNA
tgtcggtgtattcgtcagcgaccgttacgccaggatcgttgaacctcgcgccgatcgccattgccgatatggatc

SEQ ID NO: 93145 - DNA, 75 bp, synthetic construct
  source 1..75: mol_type = other DNA
ttttgcacgacccgcgacgacaggcgcgcctgctgttctggcaggggttttccgtgccacaaatcgccgacacgc

SEQ ID NO: 93146 - DNA, 75 bp, synthetic construct
  source 1..75: mol_type = other DNA
aacagcgccggaagcgggacaaatcgcaccggctctcgcgcacagtgggccagagtcaacagaatccaaccactc

SEQ ID NO: 93147 - DNA, 75 bp, synthetic construct
  source 1..75: mol_type = other DNA
accgacatcacacagtcatttatggctatccgtaaaaccatgaccagcagcgggcgcagctccacctatgaggcc

SEQ ID NO: 93148 - DNA, 75 bp, synthetic construct
  source 1..75: mol_type = other DNA
atggtttcaggcagtgatgaccagggaggcaccattatcaccccgacatccgacagcgaaccggagtggtattac

SEQ ID NO: 93149 - DNA, 75 bp, synthetic construct
  source 1..75: mol_type = other DNA
ctggcgcagcaggcggcgatggtgaaatcggtagagcgggatatgaaggttgccgtggatcggtttaaccgcgag

SEQ ID NO: 93150 - DNA, 75 bp, synthetic construct
  source 1..75: mol_type = other DNA
cggcaatagttttatcgctcaacgatgttacatgcggaaaactcgatgaaatcgatgccacgggttatggcatcc

SEQ ID NO: 93151 - DNA, 75 bp, synthetic construct
  source 1..75: mol_type = other DNA
gacgagtgtttgccatccgcgggccagtgttacagttgatgaagcatgttcgcaagtggcggatttactgcaaca

SEQ ID NO: 93152 - DNA, 75 bp, synthetic construct
  source 1..75: mol_type = other DNA
ggccatgtttgtattaattaacaacgtttttctaagctttggggaggggtcgtttttttattccttaggtattcg

SEQ ID NO: 93153 - DNA, 75 bp, synthetic construct
  source 1..75: mol_type = other DNA
gataccccgaacggtctggttgttccggtattcaaagacgtcaacaagaaaggcatcatcgagctgtctcgcgag

SEQ ID NO: 93154 - DNA, 75 bp, synthetic construct
  source 1..75: mol_type = other DNA
tggatgacttcgtttggggcattaaagcgaattggtgttgagtgtactggcacctatggatcaggtctgcttcgc

SEQ ID NO: 93155 - DNA, 75 bp, synthetic construct
  source 1..75: mol_type = other DNA
gttcttctgactcgttcaatgagtggatataagaccccattgcttaatgatttctgtggggagccattaaagcgt

SEQ ID NO: 93156 - DNA, 75 bp, synthetic construct
  source 1..75: mol_type = other DNA
ctgctcgatagcatttcaggcgagtgcagctgaaaaattcaaggtcattacaacttttaccatcatcgcagatat

SEQ ID NO: 93157 - DNA, 75 bp, synthetic construct
  source 1..75: mol_type = other DNA
gttctgatctctccgcacgtcaacaaagacgcgcgcgatcagtacgaaatccgtactcacttgcgtctggttgac

SEQ ID NO: 93158 - DNA, 75 bp, synthetic construct
  source 1..75: mol_type = other DNA
ccagacccgtgtgcgcgacccgggccgccggggatacacaaaacacatgctgcgtctgcggcgggccggagagat

SEQ ID NO: 93159 - DNA, 75 bp, synthetic construct
  source 1..75: mol_type = other DNA
atcagtggcgctggggcaatggcaatgagcgctacagctcaagtcagtggtggtgcttccgctctaaaagcagca

SEQ ID NO: 93160 - DNA, 75 bp, synthetic construct
  source 1..75: mol_type = other DNA
ggtcgtggtaccgttgttactggtcgtgtagaacgcggtatcatcaaagttggtgaagaagttgaaatcgttggt

SEQ ID NO: 93161 - DNA, 75 bp, synthetic construct
  source 1..75: mol_type = other DNA
tgggattttttgcaaaaaccggtcgatcccggcaaattgctttctctggttgaagaggcactacgccagcgtcaa

SEQ ID NO: 93162 - DNA, 75 bp, synthetic construct
  source 1..75: mol_type = other DNA
ttgcgttataacgcgcaatactacgcaacgggtgtggctactgcaggcgatgttacttctacagttaattacacc

SEQ ID NO: 93163 - DNA, 75 bp, synthetic construct
  source 1..75: mol_type = other DNA
tggtcccaggcagatacgctatacaatgaagcacgccagcagaacacattaagcgcggcagaacgccgtcagtgg

SEQ ID NO: 93164 - DNA, 75 bp, synthetic construct
  source 1..75: mol_type = other DNA
atatttctattatccccgattacagacaagcctggaaagtggaacataaattatcggatattctactgttgatta

SEQ ID NO: 93165 - DNA, 75 bp, synthetic construct
  source 1..75: mol_type = other DNA
ctgagggcagcatggaaacaacagggcgaagatggacgccgcgagctgactgagcgttatgctgctctctgtcag

SEQ ID NO: 93166 - DNA, 75 bp, synthetic construct
  source 1..75: mol_type = other DNA
tgttgacatgtacgtacgtaactcctattatcatcaatattacgtacgtacattaacagtaagtgcaacaaaaaa

SEQ ID NO: 93167 - DNA, 75 bp, synthetic construct
  source 1..75: mol_type = other DNA
gtgatttgttttgatttggcgattgatcagatcgcacaatccgggctaagttccctcaaagtgatctactattcc

SEQ ID NO: 93168 - DNA, 75 bp, synthetic construct
  source 1..75: mol_type = other DNA
atgaaagagatgatcactgaaatggcctttaatggtgccggggttcgcgataccgccaggacactgaaaattggt

SEQ ID NO: 93169 - DNA, 75 bp, synthetic construct
  source 1..75: mol_type = other DNA
ttgccgatgctgaggccagattgcagcgtctgaaggcgaagagcaggagcctggacacagcgcagaaggtcattg

SEQ ID NO: 93170 - DNA, 75 bp, synthetic construct
  source 1..75: mol_type = other DNA
cgccggcgataaaaccgatgagtggctgcaaccggcctgtaatgaaatgttccgcgtactgaaaaaagacgcgtt

SEQ ID NO: 93171 - DNA, 75 bp, synthetic construct
  source 1..75: mol_type = other DNA
tgcgtactggacgctgcagtttgcttatccactatgtgtattattaatgcttagtggcgttgtcgcactttattt

SEQ ID NO: 93172 - DNA, 75 bp, synthetic construct
  source 1..75: mol_type = other DNA
tgccggcgataaaaccgacgaatggttgcaaccggcctgtaatgagatgtaccgcgtactcaaaaaagacgcgtt

SEQ ID NO: 93173 - DNA, 75 bp, synthetic construct
  source 1..75: mol_type = other DNA
tgataacgccattgatttcatactgactgacccgccgtacctcgtcggtttccgtgaccgttccgggcgcaccat

SEQ ID NO: 93174 - DNA, 75 bp, synthetic construct
  source 1..75: mol_type = other DNA
acccggtatcttctgcgccatccacacgtatggccgtcgtctcaactggcatccgcatgtacatgtgtctgtaac

SEQ ID NO: 93175 - DNA, 75 bp, synthetic construct
  source 1..75: mol_type = other DNA
cagtggaaaaagctgagcttcctgaaagacgcgatacgttcgcggtggatgtggaatatgcggcaacggcttctg

SEQ ID NO: 93176 - DNA, 75 bp, synthetic construct
  source 1..75: mol_type = other DNA
ctttcaacggtgccggagttcgcgatactgcccgtacgctgaaaatcggcatcaataccgtcatacggacattaa

SEQ ID NO: 93177 - DNA, 75 bp, synthetic construct
  source 1..75: mol_type = other DNA
cccgttgtcagtctgctcaggtttatcgtcatggacagaatccgaaaggacatgcccggtttcgttgccgtgact

SEQ ID NO: 93178 - DNA, 75 bp, synthetic construct
  source 1..75: mol_type = other DNA
ctcataacggctcaggggttcgtgataccgccagaacactgaaaatcggcatcaatgccgtcatacggacattaa

SEQ ID NO: 93179 - DNA, 75 bp, synthetic construct
  source 1..75: mol_type = other DNA
cttgaggtctttcgggttaacaacaaaggttatccttgtgaggttttgcgtaactgggcttctctcacgccgacg

SEQ ID NO: 93180 - DNA, 75 bp, synthetic construct
  source 1..75: mol_type = other DNA
ctgcggcgacgaatcagctcaagcataaaaaccagacttcagccgaagcattcagcttcggcgatcccgttccgg

SEQ ID NO: 93181 - DNA, 75 bp, synthetic construct
  source 1..75: mol_type = other DNA
tttacaaaaaaggatggaggaggtcaatgattggctaggtgaagatttaattacattcaattcatattgctttga

SEQ ID NO: 93182 - DNA, 75 bp, synthetic construct
  source 1..75: mol_type = other DNA
gcatcgatgttatggcccgtatccctgataacgccattgatttcatcctcaccgacccgccgtatctcgtcggtt

SEQ ID NO: 93183 - DNA, 75 bp, synthetic construct
  source 1..75: mol_type = other DNA
cgcattctgcatctggagcagacgtggatgtttctggtcgggcggggcgcgtttccgctgtttgcgctggtctgg

SEQ ID NO: 93184 - DNA, 75 bp, synthetic construct
  source 1..75: mol_type = other DNA
tcatagtgcttggatagataaagatcgtattcattgcaaacgaaccaacgatgccgcagagaggaatgatgacac

SEQ ID NO: 93185 - DNA, 75 bp, synthetic construct
  source 1..75: mol_type = other DNA
tcatcatgtacatgaccgacgccgcgcagaaccaggaggatataaacaacctccgtaatgccatgaaaagcgcca

SEQ ID NO: 93186 - DNA, 75 bp, synthetic construct
  source 1..75: mol_type = other DNA
gacaggccgagtgatctacctgcccgcagaagacccaccagttgccatccatcaccgcctgcacgcccttggggc

SEQ ID NO: 93187 - DNA, 75 bp, synthetic construct
  source 1..75: mol_type = other DNA
tacatgatcttgcagcagatttttctaagccgtgcgtaatgattaactgccatgatcgacgtatgcgtcttccca

SEQ ID NO: 93188 - DNA, 75 bp, synthetic construct
  source 1..75: mol_type = other DNA
cttttgtatgggaaactggtaatacgagaatctgttcgccgtatacggccagggaaagagccaactccgattaaa

SEQ ID NO: 93189 - DNA, 75 bp, synthetic construct
  source 1..75: mol_type = other DNA
ggaaaaatgcgggattcagcgtggttggccacctggtgtttaccaaaacctacacatcgaaggccgcatatgtgg

SEQ ID NO: 93190 - DNA, 75 bp, synthetic construct
  source 1..75: mol_type = other DNA
gtgcaaacccttcagcaagttgaaaactatacggcgttaagtgaacgtgccagcgaatatttattggccgtgatc

SEQ ID NO: 93191 - DNA, 75 bp, synthetic construct
  source 1..75: mol_type = other DNA
aagagctactatcaccgttaaaaataaaaagtaaaaatatttttataattagtaacctggggcaattaaaaaaag

SEQ ID NO: 93192 - DNA, 75 bp, synthetic construct
  source 1..75: mol_type = other DNA
gaaaagagaaactcttctaatcaactttcgctttttgatatagcgccttggccagactctatgagagccttgccg

SEQ ID NO: 93193 - DNA, 75 bp, synthetic construct
  source 1..75: mol_type = other DNA
ccggatccgcaccgttaatctgattaaatcggcgcgcgttggttacaccaaaatgctgttgggggtggaggctta

SEQ ID NO: 93194 - DNA, 75 bp, synthetic construct
  source 1..75: mol_type = other DNA
atggaaaccagactcaacctgctttgcgaggcaggcgttattgataaggacatctgcaaaggcatgatgcaggtc

SEQ ID NO: 93195 - DNA, 75 bp, synthetic construct
  source 1..75: mol_type = other DNA
ccagataaaaaaagagacttttgatggggtagtttattactcaccctccattttctgggggcacttagtcaagaa

SEQ ID NO: 93196 - DNA, 75 bp, synthetic construct
  source 1..75: mol_type = other DNA
atgaagggaaaaacagccgcaggaggcggtgcaatttgcgctatcgcggtgatgattaccatcgtgatgggtaat

SEQ ID NO: 93197 - DNA, 75 bp, synthetic construct
  source 1..75: mol_type = other DNA
acgttgtattacgtacacccgggcagatgaatcaggagcatctcttcgcgcagctggttttgttcgtgtgaaaga

SEQ ID NO: 93198 - DNA, 75 bp, synthetic construct
  source 1..75: mol_type = other DNA
tgaggattacatttcctatccctttccctaaaaaagcggatatcgccattcttacccattctggcgatggcggtg

SEQ ID NO: 93199 - DNA, 75 bp, synthetic construct
  source 1..75: mol_type = other DNA
atctttccgctgacaccctccggtcagccaactgttagtcatcatttcctgactgattcgtcattccattcttat

SEQ ID NO: 93200 - DNA, 75 bp, synthetic construct
  source 1..75: mol_type = other DNA
gcggcggtggccggtcttgtaatgacggtgctgaccgttggtctggtgtcgtgtgcaggaaaatcattaccccgt

SEQ ID NO: 93201 - DNA, 75 bp, synthetic construct
  source 1..75: mol_type = other DNA
gagcatggaaagacgctgttgactgggttctcgaagaggcttgtcaggctgtaaacattcgcatcaaaggagagt

SEQ ID NO: 93202 - DNA, 75 bp, synthetic construct
  source 1..75: mol_type = other DNA
gcaaagaatcattctgtgcataattttccgggcaaacttctaggatatatggcaaataaattaccaattttaggt

SEQ ID NO: 93203 - DNA, 75 bp, synthetic construct
  source 1..75: mol_type = other DNA
ttctgacaaaaccctgcgttattgagtatgaaggccggattgtcggctatggttcaaaggagttgcgcgttgaaa

SEQ ID NO: 93204 - DNA, 75 bp, synthetic construct
  source 1..75: mol_type = other DNA
cgggatctgctctcgtctgggggcaccgaaccggaaagcagatatcattgttgaccagcagtcacagttcaacac

SEQ ID NO: 93205 - DNA, 75 bp, synthetic construct
  source 1..75: mol_type = other DNA
aggaacagccagcgccggcagaactgccggaagaaactaccacggcaacagtcgcgaaaatttcagagagcgatt

SEQ ID NO: 93206 - DNA, 75 bp, synthetic construct
  source 1..75: mol_type = other DNA
ggaaactgccttatccctgtcctggcgagcatgaactggtttcagaagtggtggaggcggggcagcctgcaccgg

SEQ ID NO: 93207 - DNA, 75 bp, synthetic construct
  source 1..75: mol_type = other DNA
aaatcgcgctcaccctgtctgttgttgctgtggcttttatgtgggtacagcgacataacgtgatggatttgctgg

SEQ ID NO: 93208 - DNA, 75 bp, synthetic construct
  source 1..75: mol_type = other DNA
tacctcgatggtaaccaatatatttgcacttcaggcttacatgccagattatattatagctttcctcggaggcag

SEQ ID NO: 93209 - DNA, 75 bp, synthetic construct
  source 1..75: mol_type = other DNA
cgatacatggaacggaaggaactgaccaaacccctttcccgcctcgtctacaccaatcttaaaacagcgagaact

SEQ ID NO: 93210 - DNA, 75 bp, synthetic construct
  source 1..75: mol_type = other DNA
aagtaagttctcgattagcaacggaggaaaaggcatgacggatagtaacggggttgcaatcgcctccctgaccgg

SEQ ID NO: 93211 - DNA, 75 bp, synthetic construct
  source 1..75: mol_type = other DNA
tttacctaccatttataccattcattttctggatgacaggcattgggaactggatagtaagcgtattaataggat

SEQ ID NO: 93212 - DNA, 75 bp, synthetic construct
  source 1..75: mol_type = other DNA
tgaggaactggcgggtaagttcggtgtcagtactcgcaaggttgcttccacgctggcggtggtaaccgcaacggg

SEQ ID NO: 93213 - DNA, 75 bp, synthetic construct
  source 1..75: mol_type = other DNA
tttgcgaagagtgtgacgcgccaatacctgctgcccgtcgtgcggcttacccgtcagccacgcgttgtgtttcct

SEQ ID NO: 93214 - DNA, 75 bp, synthetic construct
  source 1..75: mol_type = other DNA
gcggttctttgcagccagctggtaccgcaggaatttgcttttgaagcgttaatgcatgatgcaacagaagcgtat

SEQ ID NO: 93215 - DNA, 75 bp, synthetic construct
  source 1..75: mol_type = other DNA
aaagtgattccactggctccaggccatgcctacgggatgtttatggaacgttttaacgagttatcggagttacgc

SEQ ID NO: 93216 - DNA, 75 bp, synthetic construct
  source 1..75: mol_type = other DNA
aaagtgattccagtggcaccagggcatgcctacgggatgtttatggaacgttttaaagagctgcataagatacat

SEQ ID NO: 93217 - DNA, 75 bp, synthetic construct
  source 1..75: mol_type = other DNA
ctttaagctcgaactcagccataaaacggtacatgtacatcgcgccaacgtgctgggaaaactgaactgtcatag

SEQ ID NO: 93218 - DNA, 75 bp, synthetic construct
  source 1..75: mol_type = other DNA
ccctgcttggcggtcgcttaaaacaacgcgaggcaccgtggtacgcgttgtttgatgctctgctgcaactggcgg

SEQ ID NO: 93219 - DNA, 75 bp, synthetic construct
  source 1..75: mol_type = other DNA
aaaaaatatagaaaagctaatccagattgagcgtaatgcgaaagcgcggatacgcagggtgacaaaatatagccc

SEQ ID NO: 93220 - DNA, 75 bp, synthetic construct
  source 1..75: mol_type = other DNA
tcttacagataatagcagcatgggggggctaaagtcggctattcttgaactagaaaataatggtggattatcccc

SEQ ID NO: 93221 - DNA, 75 bp, synthetic construct
  source 1..75: mol_type = other DNA
ataaggcgccggaaaacatgaaagaccaggtgatgcgtaataagaatctgatgtgggagattctgaagaagaacg

SEQ ID NO: 93222 - DNA, 75 bp, synthetic construct
  source 1..75: mol_type = other DNA
tctacaagatgccactcggcaagctgatgtgctgggtatgtatggcgttctttgtgtttgttctggtgttgttga

SEQ ID NO: 93223 - DNA, 75 bp, synthetic construct
  source 1..75: mol_type = other DNA
caataccggtgccggatttgaacacgatctgatagaaaaactggtcggtgagcgtctggctcccgtacgagagaa

SEQ ID NO: 93224 - DNA, 75 bp, synthetic construct
  source 1..75: mol_type = other DNA
aggcatcccggcaacagagatgttcaacgtgattccactggcaccgggccatgcctacgggatgtttatggaacg

SEQ ID NO: 93225 - DNA, 75 bp, synthetic construct
  source 1..75: mol_type = other DNA
cacctgctcctgcgcgctaatcacgaacagacactggtatcgactgatgtcggcgatgtgatctgcgaacgcgga

SEQ ID NO: 93226 - DNA, 75 bp, synthetic construct
  source 1..75: mol_type = other DNA
atgaaacctgacagtacaggtattgccacccgcatgatgctctccctggacagagagcgaatttgcgaatgcctg

SEQ ID NO: 93227 - DNA, 75 bp, synthetic construct
  source 1..75: mol_type = other DNA
gttttgtataccagtcgtcatggcgaactggagcgcaattaccgcattgttcatgcactggcaaccgaacaggcg

SEQ ID NO: 93228 - DNA, 75 bp, synthetic construct
  source 1..75: mol_type = other DNA
gttcacagcaatacgcgggtacgatttccaatggtgcgcaaaggctttctcgcgtcaccggaaaacccgcaaggc

SEQ ID NO: 93229 - DNA, 75 bp, synthetic construct
  source 1..75: mol_type = other DNA
gccagcggtaacatgcgcgacatggccgctatctttacgggcgtcggccagaagctcagcagcatgccgtattac

SEQ ID NO: 93230 - DNA, 75 bp, synthetic construct
  source 1..75: mol_type = other DNA
ggacagcaacgtctggccgccgtccggcgcgccatgcagtacccggccgctaacgacgagttcccggaggccgcg

SEQ ID NO: 93231 - DNA, 75 bp, synthetic construct
  source 1..75: mol_type = other DNA
acgccacgacgccgggaggattacggtaaggacctgtggagtgcttatcagaccattcaggagaatatgctgaaa

SEQ ID NO: 93232 - DNA, 75 bp, synthetic construct
  source 1..75: mol_type = other DNA
actgctgggataacagtcctatggaacgcttcttccgcagtctgaaaacagaatgggtgccgacggatggttacg

SEQ ID NO: 93233 - DNA, 75 bp, synthetic construct
  source 1..75: mol_type = other DNA
tgaaatcgtctttacctctggtgcaaccgaatctgacaacctggcgatcaaaggtgcagccaacttttatcagaa

SEQ ID NO: 93234 - DNA, 75 bp, synthetic construct
  source 1..75: mol_type = other DNA
caatcccctgcccggataatccggaaaaatccctttccatccaatctgaaattgttcggattctggataaattta

SEQ ID NO: 93235 - DNA, 75 bp, synthetic construct
  source 1..75: mol_type = other DNA
gttggcctgtttcaggatatgacaccagaagagcaagccgcaattcagtctctacagcagaagttagcggcaaaa

SEQ ID NO: 93236 - DNA, 75 bp, synthetic construct
  source 1..75: mol_type = other DNA
cgcgatgccagcggaaagatgcgtgatactgcggccatctttactggcgttgggcaaaagctcaacaacatgccg

SEQ ID NO: 93237 - DNA, 75 bp, synthetic construct
  source 1..75: mol_type = other DNA
gtattgatatttactgagagctcagatcaactttccagggcaacagatcgcgtacccggtttgccggccagtcct

SEQ ID NO: 93238 - DNA, 75 bp, synthetic construct
  source 1..75: mol_type = other DNA
atggtgttcaacgttcccgttcgggcgttacgctggtgtgcgctgcttggcgcgattggtcatggttcacgaatg

SEQ ID NO: 93239 - DNA, 75 bp, synthetic construct
  source 1..75: mol_type = other DNA
gtgatatcgtgatcgaaatgtatcagcgtggcgaactgcagcagctgatcaaagaaactgccgctaaatacaagt

SEQ ID NO: 93240 - DNA, 75 bp, synthetic construct
  source 1..75: mol_type = other DNA
ccgacagcgttaacgtacaggcactgaacatggggcgaatcgtcgttgacgtcgatggcattgagctcgctgaac

SEQ ID NO: 93241 - DNA, 75 bp, synthetic construct
  source 1..75: mol_type = other DNA
aatcacagctgatcccgcagttcagttttatcatcagatggttttttgattatctgcaaagctcgtcaagtttct

SEQ ID NO: 93242 - DNA, 75 bp, synthetic construct
  source 1..75: mol_type = other DNA
ccgccgttggtgctgtcactggcgttctgaccggcaatggcctcgaaggggcgattaaaggtgccgtgattggcg

SEQ ID NO: 93243 - DNA, 75 bp, synthetic construct
  source 1..75: mol_type = other DNA
acgaactggcccgctacggaattaagccggaacatctgacaacagatccctgcatgaacatttataccggtgctt

SEQ ID NO: 93244 - DNA, 75 bp, synthetic construct
  source 1..75: mol_type = other DNA
atgattctgtcagcgaaagaagagttggctaatgaaccgcacccgattgatggcctgtccggtgaatatgcggag

SEQ ID NO: 93245 - DNA, 75 bp, synthetic construct
  source 1..75: mol_type = other DNA
cccgtgctgacacgcgtccgggtatgaccacggaacaactccgccagcgcctgcatggccgttatcaggaactgc

SEQ ID NO: 93246 - DNA, 75 bp, synthetic construct
  source 1..75: mol_type = other DNA
agtcgtgctcgaaagcttaggttcgattaagcgtgcgggtgcggatctgattttcagctactttgcgctggattt

SEQ ID NO: 93247 - DNA, 75 bp, synthetic construct
  source 1..75: mol_type = other DNA
gttactcaacctgcgcccgtcaccggagtttgaacgctggctggaaagcatgggcattatggcaaacggtcgcct

SEQ ID NO: 93248 - DNA, 75 bp, synthetic construct
  source 1..75: mol_type = other DNA
atgcacgccctgttaaacgaaccgctttctgccggtagcggcatgcagcctaaatctattctggagttcaactaa

SEQ ID NO: 93249 - DNA, 75 bp, synthetic construct
  source 1..75: mol_type = other DNA
aatgcgttgaaggctgcgcaggataaatatgggcctgttccggcggatgcgacggaagaacagcggcaggcatat

SEQ ID NO: 93250 - DNA, 75 bp, synthetic construct
  source 1..75: mol_type = other DNA
ctgccctgttatgctgcatggtctgtttttattagccccattttgcgacgtcgccttgatgataagttttcacgg

SEQ ID NO: 93251 - DNA, 75 bp, synthetic construct
  source 1..75: mol_type = other DNA
cgtagcacacgctgccgaagtctataacaaggatggtaataaactcgacctttatggcaaggttaccgctctacg

SEQ ID NO: 93252 - DNA, 75 bp, synthetic construct
  source 1..75: mol_type = other DNA
tggctaacccccttttatgtctctccccaggtcgataacggttacgacgtagcgaactatacggcgattgatccc

SEQ ID NO: 93253 - DNA, 75 bp, synthetic construct
  source 1..75: mol_type = other DNA
gttatacctatctggcggcatggggcgcagcggataaagctgacggtggcgacaaagccaaaaccgaacagttta

SEQ ID NO: 93254 - DNA, 75 bp, synthetic construct
  source 1..75: mol_type = other DNA
ctccctacaaagccctgcatttcggcacgttgaccatcgatcccatcaaccgcgtagtcaccctggctaacactg

SEQ ID NO: 93255 - DNA, 75 bp, synthetic construct
  source 1..75: mol_type = other DNA
taaaatggtgttaaacctagatagatctcgtattccaactgagtgtatagagagaattgaagccattcttaagga

SEQ ID NO: 93256 - DNA, 75 bp, synthetic construct
  source 1..75: mol_type = other DNA
gggcaatgtggcgcaacatggcaattcgtagacggtcagcgccagatggtggcgaataatgaatatgttcacgaa

SEQ ID NO: 93257 - DNA, 75 bp, synthetic construct
  source 1..75: mol_type = other DNA
ataaattagattttcagcacgagaccaggatattaaacggtatatggctcattaccgctttaggtttggtggcaa

SEQ ID NO: 93258 - DNA, 75 bp, synthetic construct
  source 1..75: mol_type = other DNA
tgaagatactccgtcatcggcaccagctgcaccgatggtggattcgttaattgcgcgcgtaggagctatggctcg

SEQ ID NO: 93259 - DNA, 75 bp, synthetic construct
  source 1..75: mol_type = other DNA
accgtctgccggggcagcagcatgatgaggaatcagggctgtactataaccggaaccggtactatgacccgctac

SEQ ID NO: 93260 - DNA, 75 bp, synthetic construct
  source 1..75: mol_type = other DNA
gccttcacctccacccgtgcagcacgggaatggctgattctgaacatggcgggactggagcgtgaagaattccgg

SEQ ID NO: 93261 - DNA, 75 bp, synthetic construct
  source 1..75: mol_type = other DNA
taaactactcacgatatggttttgaatcgcttgcattagctcatcccgaaatagatataaagggattatggcatt

SEQ ID NO: 93262 - DNA, 75 bp, synthetic construct
  source 1..75: mol_type = other DNA
actccatttacgcccggaaaaatcacaggtaataatgcagataaaactatatcacttcatgccaaacttggatat

SEQ ID NO: 93263 - DNA, 75 bp, synthetic construct
  source 1..75: mol_type = other DNA
tgactatcgaacgtaatttaattggcgcgtactgcacctcactggatatgaccggtttctcaatcaccttactga

SEQ ID NO: 93264 - DNA, 75 bp, synthetic construct
  source 1..75: mol_type = other DNA
gcgacgcgttctccggcgttaccactaaccccgcgctgtcggctacgactctgacctgctggtgcgctgcggcgc

SEQ ID NO: 93265 - DNA, 75 bp, synthetic construct
  source 1..75: mol_type = other DNA
accggacatcaaccaggagatctacggcttgcccggctatctttctgccattccatccgccctgctcaacgaatc

SEQ ID NO: 93266 - DNA, 75 bp, synthetic construct
  source 1..75: mol_type = other DNA
tgcttacggcagaatgacggtcagtataagggacggctgaacctggcctgggcgtatggtgtggtgtttacccgc

SEQ ID NO: 93267 - DNA, 75 bp, synthetic construct
  source 1..75: mol_type = other DNA
cgccacgctgttccgccggaagtattacattaacggtagtcatgctggcttcatcatgtacatgaccgatgccgc

SEQ ID NO: 93268 - DNA, 75 bp, synthetic construct
  source 1..75: mol_type = other DNA
gaacgccattgccgcctttatggggacccggacgtgggattccattgaaaaaattgcgctcacattgtctgttct

SEQ ID NO: 93269 - DNA, 75 bp, synthetic construct
  source 1..75: mol_type = other DNA
cgccttccgctgaatatggctatacaggtggctgaagatgaaatattcagtcgtcgctgggtgctgtctgatgag

SEQ ID NO: 93270 - DNA, 75 bp, synthetic construct
  source 1..75: mol_type = other DNA
ttgcacttcttgaaattctgggaggactggttgtcatcagcctgctcatgccgctgttctggtcttacattgaag

SEQ ID NO: 93271 - DNA, 75 bp, synthetic construct
  source 1..75: mol_type = other DNA
taacctgtttatgtattcgcccaacggcaaaaaagacggtatccagatcatcccgctgtcggaagttgcggcaaa

SEQ ID NO: 93272 - DNA, 75 bp, synthetic construct
  source 1..75: mol_type = other DNA
agggggcaggcgtggtacatggatatgatgtgtgaagcacgtggcgcggctgatctactttcgtcctcagcgcag

SEQ ID NO: 93273 - DNA, 75 bp, synthetic construct
  source 1..75: mol_type = other DNA
tgatattatggctgccctgaaaggaccgtttaaatttggtctttggggggtggctttatatggtgtattgccatc

SEQ ID NO: 93274 - DNA, 75 bp, synthetic construct
  source 1..75: mol_type = other DNA
ccttcgcgctgattggctatgcgtttgtttccgcactgctgccagtgtggctgatcctcgcaccgcgcgactatt

SEQ ID NO: 93275 - DNA, 75 bp, synthetic construct
  source 1..75: mol_type = other DNA
gtgggcagatcactgaccagaacacggacggaaacatcacgctcagcggcaccacggcgcagcctgccagcatcg

SEQ ID NO: 93276 - DNA, 75 bp, synthetic construct
  source 1..75: mol_type = other DNA
taaacatccggtaccggggatacgaatggaatgacgaatacgccagaaaagggataacaaccttcctcataatgg

SEQ ID NO: 93277 - DNA, 75 bp, synthetic construct
  source 1..75: mol_type = other DNA
ttacttcaggttcgtctgccagaacggatgcgtctgtggtcagtctctgggggaagtgcgtgttccacaccgggg

SEQ ID NO: 93278 - DNA, 75 bp, synthetic construct
  source 1..75: mol_type = other DNA
tattaccggtaaacaggtgtgtggtgttattgattcgcttcattcgtatttagctgattgtgaaaaggtaatgaa

SEQ ID NO: 93279 - DNA, 75 bp, synthetic construct
  source 1..75: mol_type = other DNA
atatagtgattagagaaaagagaattgtcaaaaacaggctcgcatgcacttcaggagcaatgacagaaacaacct

SEQ ID NO: 93280 - DNA, 75 bp, synthetic construct
  source 1..75: mol_type = other DNA
agtgtgcgagtttatcaccgggcaactgaacatccgtatcgctgcccatgggatacatgcctccctgattgaaac

SEQ ID NO: 93281 - DNA, 75 bp, synthetic construct
  source 1..75: mol_type = other DNA
gattttttgtcccttactaatgtcatttctaataacacaaaagacaagtgaaacactcactgctgtgttagccgg

SEQ ID NO: 93282 - DNA, 75 bp, synthetic construct
  source 1..75: mol_type = other DNA
cgagttactgcacgatagcggcgtaaaagtgaccactgtggtcattgatgacgacgttgcagtaaaagacagtct

SEQ ID NO: 93283 - DNA, 75 bp, synthetic construct
  source 1..75: mol_type = other DNA
tatcaggccttgtattatccctccagtgcagagaaaatcggccagttttctctgcctgcagtccgcatgccgtat

SEQ ID NO: 93284 - DNA, 75 bp, synthetic construct
  source 1..75: mol_type = other DNA
gctacaaaacagaatagaagaactcaataaatggctcaaagatgacataataaaattcatgccatacagtttcat

SEQ ID NO: 93285 - DNA, 75 bp, synthetic construct
  source 1..75: mol_type = other DNA
cagtgacattctcttttctatgggggcagcgatgacgcttggtggtgttgcacagatgctggcccctaaacccaa

SEQ ID NO: 93286 - DNA, 75 bp, synthetic construct
  source 1..75: mol_type = other DNA
tggtagtcgctgcccgctacgtatgcacgtcgtggacggtgaaatcaaatatgtcgaaacggacaataccggcga

SEQ ID NO: 93287 - DNA, 75 bp, synthetic construct
  source 1..75: mol_type = other DNA
gaagacatggagctttaccagtcgtttactgatgaattctttggtcccgcatttgcggtgctgggaggtgcctga

SEQ ID NO: 93288 - DNA, 75 bp, synthetic construct
  source 1..75: mol_type = other DNA
ataaagtgacgaccattattcagggcggcacgtcgtcggttaccgcgctgaccggctccaccgaagaatcgcagt

SEQ ID NO: 93289 - DNA, 75 bp, synthetic construct
  source 1..75: mol_type = other DNA
cgggccacacgacaacttccacccgagtaattcgcatgtgatcccagcattgctgcgtcgcttccacgaggcgac

SEQ ID NO: 93290 - DNA, 75 bp, synthetic construct
  source 1..75: mol_type = other DNA
atgagcaaccctaccaggggcctgcagcgggagattacactgcgcctgggagcccgtctggtgcaggaaggcaac

SEQ ID NO: 93291 - DNA, 75 bp, synthetic construct
  source 1..75: mol_type = other DNA
attacaaattcgcataaaagagattaataaatggcttggcgcgacagttgttaattttatagattatcaattggc

SEQ ID NO: 93292 - DNA, 75 bp, synthetic construct
  source 1..75: mol_type = other DNA
gatgacttaaaggaatttgaaaagatacaagaagagcatcgtattattggtagccctaaattattactaacacaa

SEQ ID NO: 93293 - DNA, 75 bp, synthetic construct
  source 1..75: mol_type = other DNA
tgctctttcttttggcgcaccatacacagattctgagttagaaaacatactttatcaatatataaataaaaaatt

SEQ ID NO: 93294 - DNA, 75 bp, synthetic construct
  source 1..75: mol_type = other DNA
cattcccaagaaaattgagtgatgatgaaaagtcagaaataggaacaacattatacagcgtcggtattaaatatg

SEQ ID NO: 93295 - DNA, 75 bp, synthetic construct
  source 1..75: mol_type = other DNA
ccaggaggatgtgaacaacatccgcaaggcaatgaaaagtgctaaaggaccgggcaacttccgcaacctgtttat

SEQ ID NO: 93296 - DNA, 75 bp, synthetic construct
  source 1..75: mol_type = other DNA
catcggctggcctatgtcgaggctgtcagtaaattaccgtcagattctcctgagtttccgctatgggaatattat

SEQ ID NO: 93297 - DNA, 75 bp, synthetic construct
  source 1..75: mol_type = other DNA
ggcggcggcgagcattcatgtcatggagctggcgcacgaagtctggctggagaacacccagccgatgctgtcgca

SEQ ID NO: 93298 - DNA, 75 bp, synthetic construct
  source 1..75: mol_type = other DNA
cgcggccggttacgggggacactacgccatacgaccagcgacccgctgagctgcacaatccacggataacacaag

SEQ ID NO: 93299 - DNA, 75 bp, synthetic construct
  source 1..75: mol_type = other DNA
attgccctgtaccacaatggttttacctgcgaagccgatactcttggcagttgcggctacgtatacatcgccatt

SEQ ID NO: 93300 - DNA, 75 bp, synthetic construct
  source 1..75: mol_type = other DNA
ccgaggaaatcatcctcctttgctacatgcagctctggatggaaaaagcccaggacctcagcaaacacctgtatc

SEQ ID NO: 93301 - DNA, 75 bp, synthetic construct
  source 1..75: mol_type = other DNA
ctttctaatctcgatatcgatcatcttatgcctcaaagttggtattcctgttggcctctcgaaaatggtcatatg

SEQ ID NO: 93302 - DNA, 75 bp, synthetic construct
  source 1..75: mol_type = other DNA
aaggcagcatttttcatctgatggaaccagatattaatcaggagatctacggcctgcccggctatctttctgcca

SEQ ID NO: 93303 - DNA, 75 bp, synthetic construct
  source 1..75: mol_type = other DNA
caatcacaaccaggtgccggaaattattctgctcaacagccatgacggttccagttcttatcagatgctgccagg

SEQ ID NO: 93304 - DNA, 75 bp, synthetic construct
  source 1..75: mol_type = other DNA
cacagcttcacaacgtggcacagagtatttatcacacagaccgggcgttctggtctgcctgccgggaaatccaca

SEQ ID NO: 93305 - DNA, 75 bp, synthetic construct
  source 1..75: mol_type = other DNA
atgggaaagagtaagaaaaaccgcgctgcggcgacgaaacagatccagcttaaaagccagactacagccgaagca

SEQ ID NO: 93306 - DNA, 75 bp, synthetic construct
  source 1..75: mol_type = other DNA
atgcgtacacgaattgattatctggcgaataaatacagttttacagagctgaatgaatccccccgtcttcgctgg

SEQ ID NO: 93307 - DNA, 75 bp, synthetic construct
  source 1..75: mol_type = other DNA
aggcatcattctggtgccaaactgtaataatccgctgggatttattatgccggacgcgcgcaaacgggccgttct

SEQ ID NO: 93308 - DNA, 75 bp, synthetic construct
  source 1..75: mol_type = other DNA
gtagataccatacatattattgacggccagcaacgtttaaccactcttcaatatattctggcatccattcgatta

SEQ ID NO: 93309 - DNA, 75 bp, synthetic construct
  source 1..75: mol_type = other DNA
atatgttctggcatccatccgattagcattacgtgctacggatctttccagcttagaggctctcatttcgccttg

SEQ ID NO: 93310 - DNA, 75 bp, synthetic construct
  source 1..75: mol_type = other DNA
ccgggagagactgacagctatgatgtgtttttctccgatcccaatcgctggaaggacaacagcacgtcgttcagc

SEQ ID NO: 93311 - DNA, 75 bp, synthetic construct
  source 1..75: mol_type = other DNA
tcaacctgcgtcgccgccctccagtccggacgccggtatatcggtatcgagctgcttgagcagtatcaccgtgcc

SEQ ID NO: 93312 - DNA, 75 bp, synthetic construct
  source 1..75: mol_type = other DNA
gaaccggttcggtgaaattatcgctcttgagcctgccctggcaaaatatacccgacgcgggttagacctggatac

SEQ ID NO: 93313 - DNA, 75 bp, synthetic construct
  source 1..75: mol_type = other DNA
accgacccgccatatctcgtcggtttccgtgaccgttccgggcgcaccatcgccggcgataaaaccgatgagtgg

SEQ ID NO: 93314 - DNA, 75 bp, synthetic construct
  source 1..75: mol_type = other DNA
tgataacgccattgatttcatactgactgacccgccgtacctcgtcggttttcgtgaccgtttcgggcgcaccat

SEQ ID NO: 93315 - DNA, 75 bp, synthetic construct
  source 1..75: mol_type = other DNA
atgaaagaacatatcgcgccaggcgaaaccgtaactgcagaagaaactaaaaaacccgttgcggaggctttcagc

SEQ ID NO: 93316 - DNA, 75 bp, synthetic construct
  source 1..75: mol_type = other DNA
tgcagagggatatgccgcaatgggcgaatgacccgttactggcatgggatgccaccgcgtttgcggcaatgtcgg

SEQ ID NO: 93317 - DNA, 75 bp, synthetic construct
  source 1..75: mol_type = other DNA
ggttagtaaggatgaggcagaagagctaaaaaatcagacacagcagagcgccgaagctgcagccggaaacgcaca

SEQ ID NO: 93318 - DNA, 75 bp, synthetic construct
  source 1..75: mol_type = other DNA
tgttgctgtgcacagcgcccgttttcgctaaacccgttctgactgtttatacctacgattccttcgccgccgact

SEQ ID NO: 93319 - DNA, 75 bp, synthetic construct
  source 1..75: mol_type = other DNA
agaagagacgacccggccaacccttaaagaactggcagcgaagctgtccggaggagtgaatggttacagtcgctg

SEQ ID NO: 93320 - DNA, 75 bp, synthetic construct
  source 1..75: mol_type = other DNA
atgtggcatcgttcttggttgcagcaggcttcctgaaaaaagtcaccgggggcggccgcgactggacagcaccct

SEQ ID NO: 93321 - DNA, 75 bp, synthetic construct
  source 1..75: mol_type = other DNA
agaaaaattttttcactcactccggagcacaacagcctttgctggcagaaaatacacaaacagcgatatgccttc

SEQ ID NO: 93322 - DNA, 75 bp, synthetic construct
  source 1..75: mol_type = other DNA
taccccatgattacgctcctttttttcgtattcttcacatcattgtggcatttctaatattatcacaaattatta

SEQ ID NO: 93323 - DNA, 75 bp, synthetic construct
  source 1..75: mol_type = other DNA
taatcgaagaagctaaattaaaaatagcgattgagaaatgccaccccaattcagggatggcacgggtagagggcg

SEQ ID NO: 93324 - DNA, 75 bp, synthetic construct
  source 1..75: mol_type = other DNA
tgcagtggaaagctatgcgaaggcgcataatatcagtaatgagcaggcgactcaggaactggcatccagaagtac

SEQ ID NO: 93325 - DNA, 75 bp, synthetic construct
  source 1..75: mol_type = other DNA
cgtccggtccgtcgctttttctccattatttttctcattattctattagtttgcattcattcactgataacaact

SEQ ID NO: 93326 - DNA, 75 bp, synthetic construct
  source 1..75: mol_type = other DNA
ttgcagcggtaatggtaatgggtgcgttcgcgtcaacttcttccatcgctgccggtaacaacggtaccgcgcgtt

SEQ ID NO: 93327 - DNA, 75 bp, synthetic construct
  source 1..75: mol_type = other DNA
gcgaatgcggccgagaaaattgcccgtaagggcggattgtcaagcgacgcagtacaggcacttcgtcgcgagatt

SEQ ID NO: 93328 - DNA, 75 bp, synthetic construct
  source 1..75: mol_type = other DNA
attaccgtgcaacagagtcaggtggtttactgaatccgcagggatggggagctgaaggagggcgtgcattggtag

SEQ ID NO: 93329 - DNA, 75 bp, synthetic construct
  source 1..75: mol_type = other DNA
atggatactaaaaagatattcaagcacataccttgggtgattctcggaatcatcggtgcattctgcctcgcggta

SEQ ID NO: 93330 - DNA, 75 bp, synthetic construct
  source 1..75: mol_type = other DNA
gcggtcactggagtgatatggctgttctgtgtccggcagagttttcagtgaaacaactgaaagaggttatgacac

SEQ ID NO: 93331 - DNA, 75 bp, synthetic construct
  source 1..75: mol_type = other DNA
aatgtttacggtaatggaaatcatatgtcagaaatcgcacttcgcagatatcaatggtcagcaatcagcaaacag

SEQ ID NO: 93332 - DNA, 75 bp, synthetic construct
  source 1..75: mol_type = other DNA
cgtccatcatcgaaccgggtctttacttcgcgatgaacaccccgcctgctggccttggcatcaccatgcctaacc

SEQ ID NO: 93333 - DNA, 75 bp, synthetic construct
  source 1..75: mol_type = other DNA
cctttgcgcctaacatcactttttcggtgctgtatacccgtaacggtcagtacagttttcagaacgccgggatca

SEQ ID NO: 93334 - DNA, 75 bp, synthetic construct
  source 1..75: mol_type = other DNA
tcaggttgagttcacggaaaaggtgcccgccgatgcgatggtatgcactctggaacggtttaaattttatctgga

SEQ ID NO: 93335 - DNA, 75 bp, synthetic construct
  source 1..75: mol_type = other DNA
cgtgcaccacagctccccgatcagtgttaagcgtgacattatcagcagtacctatattccacatcgccttctcag

SEQ ID NO: 93336 - DNA, 75 bp, synthetic construct
  source 1..75: mol_type = other DNA
gataaatccgagctggtcattcgccaggcagatttagtgagcgatgcagcagaacgctatcaggggcaagtttgc

SEQ ID NO: 93337 - DNA, 75 bp, synthetic construct
  source 1..75: mol_type = other DNA
gtgaatgaagtttatgtgattgccggtggtgagtggttgcggaataacctgaatgccattgccgcctttatggga

SEQ ID NO: 93338 - DNA, 75 bp, synthetic construct
  source 1..75: mol_type = other DNA
agccctttaccgacgccgccggcaggtcactcattagtgacgccctctgctgctgaggatgtccttagtaaattg

SEQ ID NO: 93339 - DNA, 75 bp, synthetic construct
  source 1..75: mol_type = other DNA
ctgaactggctcgtcagtttgcgcaaactcaacaacaacgttattccggcgaacaaccggctggggcgaatccgt

SEQ ID NO: 93340 - DNA, 75 bp, synthetic construct
  source 1..75: mol_type = other DNA
ggggcttacgaagtgctcggggtgtttgaccgggtggaggagaagcgcgatgcaatgcagtcactggcgctgcca

SEQ ID NO: 93341 - DNA, 75 bp, synthetic construct
  source 1..75: mol_type = other DNA
gcctggcggaggtgttgcaggaggacacgggtgtgacgctaccggcggagctggcggtgatgctggggaggctgg

SEQ ID NO: 93342 - DNA, 75 bp, synthetic construct
  source 1..75: mol_type = other DNA
gccatctgtactgcattctggctggcatatgacagtgacagatttaagaaactatcactgccaaagcaaattatt

SEQ ID NO: 93343 - DNA, 75 bp, synthetic construct
  source 1..75: mol_type = other DNA
atgcagcagctttcctttctgccaggagagatgacgcccggcgagcgcagcctcattcagcgggccctgaaaact

SEQ ID NO: 93344 - DNA, 75 bp, synthetic construct
  source 1..75: mol_type = other DNA
atgtgtggacgtataaaccggtgcagtactatccagggaaacatccgtgcgaaaaaccggcagaaatgttgcagc

SEQ ID NO: 93345 - DNA, 75 bp, synthetic construct
  source 1..75: mol_type = other DNA
agtctatgaggtctggggccagcgctgctacggctacttcaggtattaatcagcctgaagtgacttccgcgctgg

SEQ ID NO: 93346 - DNA, 75 bp, synthetic construct
  source 1..75: mol_type = other DNA
ggcttgcgcagtgcgggctgacggcggaacagatggccgcgcaactggaggcggaatacatcccggagaggaaac

SEQ ID NO: 93347 - DNA, 75 bp, synthetic construct
  source 1..75: mol_type = other DNA
attttcgtatcattgccagaagactatcaattaacagacattgaaaagtcgatgtttaatgatattgaagttata

SEQ ID NO: 93348 - DNA, 75 bp, synthetic construct
  source 1..75: mol_type = other DNA
gtggtgaacaaattgttgatggtgggtcaacagagaaaacacacatcaatggtggcacgcaaaccgttcagaatt

SEQ ID NO: 93349 - DNA, 75 bp, synthetic construct
  source 1..75: mol_type = other DNA
gacgcatcattgagcccgtgtgatgggtcattgctggtttgcgctgacggaggagagttccgcattaaaagatat

SEQ ID NO: 93350 - DNA, 75 bp, synthetic construct
  source 1..75: mol_type = other DNA
ggacattacgttcctgtctggcgttttgcgctacctgatcgaaaacaacaaaatcaacgccgaatacgttaagca

SEQ ID NO: 93351 - DNA, 75 bp, synthetic construct
  source 1..75: mol_type = other DNA
aaccgggggattattactctgtgcaggctgtttctatgtttacgacaaaccagtttattctcctttgtcctaagg

SEQ ID NO: 93352 - DNA, 75 bp, synthetic construct
  source 1..75: mol_type = other DNA
aaaaaccgtttgaacttccggaagggtgggaatggtgtcgtattggtaatatagttaatattaaatctgaattag

SEQ ID NO: 93353 - DNA, 75 bp, synthetic construct
  source 1..75: mol_type = other DNA
cctttatatatgtgttatactgtgcatttgattttgatcagaatgttaaagataactctggctggttatctattg

SEQ ID NO: 93354 - DNA, 75 bp, synthetic construct
  source 1..75: mol_type = other DNA
agtgaacttgcaaaactggaaaagctaaagaatcagtattcaaaggaagaatataataatcttatcgctcaaata

SEQ ID NO: 93355 - DNA, 75 bp, synthetic construct
  source 1..75: mol_type = other DNA
atgaatcttttccctggtttatcaaacgtgcgcacagtccatccagagggctttacagtgtacatatcaacccat

SEQ ID NO: 93356 - DNA, 75 bp, synthetic construct
  source 1..75: mol_type = other DNA
atgtgtgatgcggtggagattaacagcgggctggtccggtatctgcgggaaaattttaacggtgtcagggttcag

SEQ ID NO: 93357 - DNA, 75 bp, synthetic construct
  source 1..75: mol_type = other DNA
actcagtctgttctgaccatcacttctaacgttgtgtatggtaagaaaactggtaacaccccagacggtcgtcgt

SEQ ID NO: 93358 - DNA, 75 bp, synthetic construct
  source 1..75: mol_type = other DNA
tgccttgcactgagtgtggcgtgtgcagctcctgtctgagcggtcgtcctaacgcctgtaaaaacaaccaaactc

SEQ ID NO: 93359 - DNA, 75 bp, synthetic construct
  source 1..75: mol_type = other DNA
tatatggcattaagaaattacgtgagctgattctggaactggctgtgcgcggtaaactggtgccgcaggacccga

SEQ ID NO: 93360 - DNA, 75 bp, synthetic construct
  source 1..75: mol_type = other DNA
cagacgaagaatccgtttaactataaagataacagctatgttttcgtgcttgaacgtggtggtgcctggtgttac

SEQ ID NO: 93361 - DNA, 75 bp, synthetic construct
  source 1..75: mol_type = other DNA
ttaacgagatggagcgtcggtataaactgatgtctgcgctgggtgtgcgtaatctggcgggttataacgaaaaaa

SEQ ID NO: 93362 - DNA, 75 bp, synthetic construct
  source 1..75: mol_type = other DNA
tgcagagaaaaagcaatatccagatgaagcatcgcaaggtgtaggtattgttagtgttagtggttttgaattcct

SEQ ID NO: 93363 - DNA, 75 bp, synthetic construct
  source 1..75: mol_type = other DNA
aaactgccaaataacatcaaatacgttaatactacagaagcgttttcctgtactgagattgacggtatgaattgc

SEQ ID NO: 93364 - DNA, 75 bp, synthetic construct
  source 1..75: mol_type = other DNA
gaaataaagacaggtatgcgaagtgtaatcagttatcttcttagtcctttagaagagtcagtaacagaaagttta

SEQ ID NO: 93365 - DNA, 75 bp, synthetic construct
  source 1..75: mol_type = other DNA
agggcagcggtagaggcactaaaaagtttatcaaaaacagagatatccagattaatcgcagaagcgaaacaacga

SEQ ID NO: 93366 - DNA, 75 bp, synthetic construct
  source 1..75: mol_type = other DNA
tcgttgctgtaactattctgttctctgtcttcgctacggcgaaacaagtaaaactgccaaacaacatcaaatacg

SEQ ID NO: 93367 - DNA, 75 bp, synthetic construct
  source 1..75: mol_type = other DNA
atctgattcccttcttcatcgggttacagaaccggtttacgcagttccggctcagtgaaacaaaagagattacca

SEQ ID NO: 93368 - DNA, 75 bp, synthetic construct
  source 1..75: mol_type = other DNA
aacccatgcggctgatgctgcggactcagcacgcgcagccagcacgtcagccggacaggccgcgtcgtcggctca

SEQ ID NO: 93369 - DNA, 75 bp, synthetic construct
  source 1..75: mol_type = other DNA
tgctttctgctactgctttcggtgctgatgctgcgtcctttgattgcactaaggctactaccaaatcagagaagt

SEQ ID NO: 93370 - DNA, 75 bp, synthetic construct
  source 1..75: mol_type = other DNA
ggtgacgctggcggaaatcagcaaccgtgatcacattctggaaccctctgccggcaccggggccatactgcgggc

SEQ ID NO: 93371 - DNA, 75 bp, synthetic construct
  source 1..75: mol_type = other DNA
cgttaccctgggcgaaggcggcgattatgtcggtcttgatgccatggcctcagacctgatccgcacttacatccc

SEQ ID NO: 93372 - DNA, 75 bp, synthetic construct
  source 1..75: mol_type = other DNA
atggcacaagtagttcgctccgtcctgattgatgttttcaaagaggcgcagcactacggagaagtacctcctggc

SEQ ID NO: 93373 - DNA, 75 bp, synthetic construct
  source 1..75: mol_type = other DNA
ctgccgagttgtcttgtcgataagctcggtgcgctcgactatctgttcgtcagctcaaaaccgtttgccgaaaaa

SEQ ID NO: 93374 - DNA, 75 bp, synthetic construct
  source 1..75: mol_type = other DNA
aacagtattatggcgatgaagtcgggctgtttggtaaagataaacgccagaaagatccacatgcgattaccgctg

SEQ ID NO: 93375 - DNA, 75 bp, synthetic construct
  source 1..75: mol_type = other DNA
ccttttccctgttgcgtcctgtctcttatacacaaatccccacccggggatttgtgatgtctgtcagtctgcttt

SEQ ID NO: 93376 - DNA, 75 bp, synthetic construct
  source 1..75: mol_type = other DNA
aaatacatcttcactagaaactctcaattttgctgtgtggtgtctgtcttttttcaaagggataagattaacaac

SEQ ID NO: 93377 - DNA, 75 bp, synthetic construct
  source 1..75: mol_type = other DNA
cgttgtgacctcgttgaaaccgataatagttgtgtggagaactgtttaaaagggaagtttaaagaggtaaggccg

SEQ ID NO: 93378 - DNA, 75 bp, synthetic construct
  source 1..75: mol_type = other DNA
atgacctgttcaacttcattaagcggcaaaaacaggattgtccttatcgctggcattctgatgattgccacaaca

SEQ ID NO: 93379 - DNA, 75 bp, synthetic construct
  source 1..75: mol_type = other DNA
tggcaaccgctgcctgaatatcatcgggaagattttaccatcggcattttgggcgcaggcgtactgggcagtaaa

SEQ ID NO: 93380 - DNA, 75 bp, synthetic construct
  source 1..75: mol_type = other DNA
ccgcaatatctgccttggtacaggaaaacaaccttatttaccaccctgtgtgaagcatgtgacacaatcctgttt

SEQ ID NO: 93381 - DNA, 75 bp, synthetic construct
  source 1..75: mol_type = other DNA
gcccgcccccgcgcaggccgtgctgacctgctttcaccgtgtcctgctgctgggatttcgcgggcgttatcagga

SEQ ID NO: 93382 - DNA, 75 bp, synthetic construct
  source 1..75: mol_type = other DNA
cgcttaccccggagcatgtcacgcattacaattccctgcaggtggagttcgcggagcagtacgtgttctgcggtg

SEQ ID NO: 93383 - DNA, 75 bp, synthetic construct
  source 1..75: mol_type = other DNA
cttggtcataaaacacaacaacaaaccgatcgttatcatgatgatcgaggtaaaggatggagcaaagtagcgttg

SEQ ID NO: 93384 - DNA, 75 bp, synthetic construct
  source 1..75: mol_type = other DNA
tacaaatccctacagctttgttaactatctggtgaagcacaaaaagttctatcgcttccttacaagcagactacg

SEQ ID NO: 93385 - DNA, 75 bp, synthetic construct
  source 1..75: mol_type = other DNA
attcattgttaaagttgggctattatgtttgggcgtcgaaggttgattgtgtcgaatatggaatcccacaaaacc

SEQ ID NO: 93386 - DNA, 75 bp, synthetic construct
  source 1..75: mol_type = other DNA
atatcaaaatcaaaagtatcacaaataaatacacaattatcatcttttgaatttgatcctattctatgggaaaaa

SEQ ID NO: 93387 - DNA, 75 bp, synthetic construct
  source 1..75: mol_type = other DNA
gcgtcgcttcgattttgaaaccgtctttccgattatggatttcgcccaggagctggaactggtcgccagtgcttc

SEQ ID NO: 93388 - DNA, 75 bp, synthetic construct
  source 1..75: mol_type = other DNA
tgtgctacccgccgcagacccgcaccctgaaggtcgcgttgccgggcgaagcgggcgctggcggcttcggctgta

SEQ ID NO: 93389 - DNA, 75 bp, synthetic construct
  source 1..75: mol_type = other DNA
cttgggcataaaacacaacaacaaaccgatcgttaccatgatgaccgagggaaaggttggagcaaagtagctttg

SEQ ID NO: 93390 - DNA, 75 bp, synthetic construct
  source 1..75: mol_type = other DNA
taatcatgaggatgtgacctggtcgtccattgctgccggttttaagggattaattccttcaaaagtaaaatctcg

SEQ ID NO: 93391 - DNA, 75 bp, synthetic construct
  source 1..75: mol_type = other DNA
ccatccgcagaaaacggggtcaccgtcaatgaatgaggccgtgatgcagattgagcaggaagtcctgaccacctg

SEQ ID NO: 93392 - DNA, 75 bp, synthetic construct
  source 1..75: mol_type = other DNA
atgcttattactggagtgtttttaaaatcgctgaggcctttgggcttcaccgggacacagtaaaaaaacggctcc

SEQ ID NO: 93393 - DNA, 75 bp, synthetic construct
  source 1..75: mol_type = other DNA
cgcgtacattgtcgatattgcggctcagattggttgctctgaacggacggtcagacgctacctcaaataccctga

SEQ ID NO: 93394 - DNA, 75 bp, synthetic construct
  source 1..75: mol_type = other DNA
caggatatccggcatatcctgcgggctttttccctgttgcgtccggggggcgtgctggttgccgtctgtctgaac

SEQ ID NO: 93395 - DNA, 75 bp, synthetic construct
  source 1..75: mol_type = other DNA
tgcgtgaaaaggcagagaaagcaacgtgtggtgtgtggtcgctcgaatatggagagagccgatttgattgtgatg

SEQ ID NO: 93396 - DNA, 75 bp, synthetic construct
  source 1..75: mol_type = other DNA
ggccatcaatatgggtggtgtctgcgaagtggtcgatcttagccaggtaagccagcaaatgttggcaaaaattag

SEQ ID NO: 93397 - DNA, 75 bp, synthetic construct
  source 1..75: mol_type = other DNA
gctgattgtgatcgatcctcgctttacgcgtacggcggcggtagctgactactatgcccctattcgttccggtac

SEQ ID NO: 93398 - DNA, 75 bp, synthetic construct
  source 1..75: mol_type = other DNA
atgccgggttgtacatctcgtttattgcccgaaggccctttctcacgcgaacaggctgttgccgtcaaaacagct

SEQ ID NO: 93399 - DNA, 75 bp, synthetic construct
  source 1..75: mol_type = other DNA
gaagtgggataaaggctacgacgtcctgcaatacttcgagatgatgaaagagggcaaggtcaatggctatatctg

SEQ ID NO: 93400 - DNA, 75 bp, synthetic construct
  source 1..75: mol_type = other DNA
ttatgcagacatcaacaatgacagcagctttgatatcagtatcagcctgatgctgaccgagcgcacgctggtcag

SEQ ID NO: 93401 - DNA, 75 bp, synthetic construct
  source 1..75: mol_type = other DNA
gtgattttcacggcaggcatcacgctgttcccctttgtcatgccgtcaagcgtgagtccaatctccagcctgacg

SEQ ID NO: 93402 - DNA, 75 bp, synthetic construct
  source 1..75: mol_type = other DNA
gcagtatggattgatcttgtcgaaccggatgacgacgagcgactgcgcgtacaatctgaacttggccagagcctg

SEQ ID NO: 93403 - DNA, 75 bp, synthetic construct
  source 1..75: mol_type = other DNA
aacggtctgaacatgcagtcggttgatatcagctacaaccttaaggtaacaggcaaacccagcccgaagaaagag

SEQ ID NO: 93404 - DNA, 75 bp, synthetic construct
  source 1..75: mol_type = other DNA
aacaggaaaaaagcaagctggccgaacaggtggaaagcctgaacgggcaaatcagcgagctggaaaacctgaaaa

SEQ ID NO: 93405 - DNA, 75 bp, synthetic construct
  source 1..75: mol_type = other DNA
cctacctggatgatatcgccgtgaagcagtggcgggaaaaatcgcggcagcttgcggaacggggagaccttaccc

SEQ ID NO: 93406 - DNA, 75 bp, synthetic construct
  source 1..75: mol_type = other DNA
tcatgaacagttaaaaacagcgatgcttcatgccccggacgggcgtcttcgcctccggaatgttctgcaacatcc

SEQ ID NO: 93407 - DNA, 75 bp, synthetic construct
  source 1..75: mol_type = other DNA
cgtgaaaagctggcacagagcatcatcagtaagcgccgggcaacagaacaagacccggtagcccgtgcctttgcc

SEQ ID NO: 93408 - DNA, 75 bp, synthetic construct
  source 1..75: mol_type = other DNA
tcatgagcagttaaaaactgcgatgcttcacgccccggatggtcgtctgcgcctccggaatgtcctgcagcatcc

SEQ ID NO: 93409 - DNA, 75 bp, synthetic construct
  source 1..75: mol_type = other DNA
cgccggagagatccttaagcgggcagaggctgcaactgtcagtgctgaagaggccagacgtatggctgaaaatgc

SEQ ID NO: 93410 - DNA, 75 bp, synthetic construct
  source 1..75: mol_type = other DNA
gtatcggcacccgcattctgcgtgacccgtacaccaataaaccgtttgtcggtttttataccaccaagcgcaccg

SEQ ID NO: 93411 - DNA, 75 bp, synthetic construct
  source 1..75: mol_type = other DNA
tctgggatcgcgatacgattcggattactcatcctggccctataagtcagtcaaaatgggcggtgtgagcttgtg

SEQ ID NO: 93412 - DNA, 75 bp, synthetic construct
  source 1..75: mol_type = other DNA
tgttaaccatttgaggtttcctatagttttaagggaagggtgcaaaatcgaaagaggagaagtctattcaatttc

SEQ ID NO: 93413 - DNA, 75 bp, synthetic construct
  source 1..75: mol_type = other DNA
catctgactatgcgaaagttatgtcagatagagaaatgcatgccagagatgatcttaaggcgttttgcagtgtct

SEQ ID NO: 93414 - DNA, 75 bp, synthetic construct
  source 1..75: mol_type = other DNA
tcttgttgaggtgagcatacccggagaactgctgacagatttccggcagatacagaacaatgttgcggatgacct

SEQ ID NO: 93415 - DNA, 75 bp, synthetic construct
  source 1..75: mol_type = other DNA
cgagggctacgccactgccgcctccctgcacgaagccacaggccttccggtactgatgacagtggatgcgggcaa

SEQ ID NO: 93416 - DNA, 75 bp, synthetic construct
  source 1..75: mol_type = other DNA
caatctgaacttggccagagcctggcaacccgcccggaactggaagacatcgaagcatcggcacgtttctttgaa

SEQ ID NO: 93417 - DNA, 75 bp, synthetic construct
  source 1..75: mol_type = other DNA
aacctgtctgtggccattatcttgtggatctcgctttttctcggcgacacgattctacaactttttggtatatca

SEQ ID NO: 93418 - DNA, 75 bp, synthetic construct
  source 1..75: mol_type = other DNA
ctcgtcctgctggggctggtgtggtttgctaaaccgccatttggcgcaggtggcggcggaggcggtgcgcactaa

SEQ ID NO: 93419 - DNA, 75 bp, synthetic construct
  source 1..75: mol_type = other DNA
cgcgccatggtggatggtcgtgctgggtacggtgtttgcggtgatcatcgctaaacagttgtatggcggtctggg

SEQ ID NO: 93420 - DNA, 75 bp, synthetic construct
  source 1..75: mol_type = other DNA
gaactcccttggccaaatgatgagcggctacagcagctttgtgagaatttgctaaacaaccaagggtatctgcca

SEQ ID NO: 93421 - DNA, 75 bp, synthetic construct
  source 1..75: mol_type = other DNA
cttgctcggttttgacccgataagccgccgtaaaaacccaccggaaacagaagaagaggacgagcttgaccgcct

SEQ ID NO: 93422 - DNA, 75 bp, synthetic construct
  source 1..75: mol_type = other DNA
agatggtactgaatgccctgaccttcctatacccgggcatgcgggattacgtgtatttcccggatctgtgcttcc

SEQ ID NO: 93423 - DNA, 75 bp, synthetic construct
  source 1..75: mol_type = other DNA
ttcggcgattgtgaataccagcggtaacggcgattgccatatcattctgcgcggcggtaaagagcctaactacag

SEQ ID NO: 93424 - DNA, 75 bp, synthetic construct
  source 1..75: mol_type = other DNA
cgtttttccacgatatgcaggttgagtggccctgccctaactgcaatcagaaaaccctacagatcattaaagaaa

SEQ ID NO: 93425 - DNA, 75 bp, synthetic construct
  source 1..75: mol_type = other DNA
tggtggcgatgtccctgtggcataaccatccacagaaaacggagtcaccgtcaatgaatgaggccgtgatgaaga

SEQ ID NO: 93426 - DNA, 75 bp, synthetic construct
  source 1..75: mol_type = other DNA
tctttacgatgatgaaggtatcctgattgctgtcgccaactgcccggaaacctataaaccgttactggctgaggg

SEQ ID NO: 93427 - DNA, 75 bp, synthetic construct
  source 1..75: mol_type = other DNA
gcatcaaagaaatcaaagagttacttcctcctgtcgcattgctggaaaaattccccgctactgaaaatgccgcga

SEQ ID NO: 93428 - DNA, 75 bp, synthetic construct
  source 1..75: mol_type = other DNA
acaattcttttggtgtttttggttcgactgcagaagaagctctcagcaaagaaattaatgaacttgaaattattg

SEQ ID NO: 93429 - DNA, 75 bp, synthetic construct
  source 1..75: mol_type = other DNA
tcatggagcttgactcggtcagttatctgacatcatcccgtcatactcatgcagttgagcacaaacatcctgttc

SEQ ID NO: 93430 - DNA, 75 bp, synthetic construct
  source 1..75: mol_type = other DNA
agaacagaataaaaatgccaaaacttaattctgacagtttttacaatattattgttgcgattcccccctataatg

SEQ ID NO: 93431 - DNA, 75 bp, synthetic construct
  source 1..75: mol_type = other DNA
ggaagacgtggcgatcctttgtcatctggatcccaaaattccttatcagcatccgtcgctcatgaatgccagtca

SEQ ID NO: 93432 - DNA, 75 bp, synthetic construct
  source 1..75: mol_type = other DNA
tctcaatcgacaggtgagcgtggaagatctcgtcagaaccggtgcttttctggtggcgatgtccctgtggcatag

SEQ ID NO: 93433 - DNA, 75 bp, synthetic construct
  source 1..75: mol_type = other DNA
agtggctgtcagtgaggacaatcatgtgctgcggcagttgcgttatttttaccagaaaaagggccggtttgttgc

SEQ ID NO: 93434 - DNA, 75 bp, synthetic construct
  source 1..75: mol_type = other DNA
acaggctgttgccgtcaaaacagcttaccgcaatgtgtttactgaagatgaccagggaacatattcccggctggt

SEQ ID NO: 93435 - DNA, 75 bp, synthetic construct
  source 1..75: mol_type = other DNA
ttaaattcctatcttacagcatacaatggaagccatcatctgtatgataggatgagttttttatgtttgtcttct

SEQ ID NO: 93436 - DNA, 75 bp, synthetic construct
  source 1..75: mol_type = other DNA
gaagcctgctggagccggctgtcggattacccggagcaggcgcagccctgtgacatgctgatggtcataccctcc

SEQ ID NO: 93437 - DNA, 75 bp, synthetic construct
  source 1..75: mol_type = other DNA
atgtcgcgccagtgcacgcattatgggcgttggcctcaacacggttttacgtcacttaaaaaactcaggccggag

SEQ ID NO: 93438 - DNA, 75 bp, synthetic construct
  source 1..75: mol_type = other DNA
ttacgcttaagctgtttgactctaaaacgaatcgacttaatccgttgtttatcaaagatatgcaagcactggaag

SEQ ID NO: 93439 - DNA, 75 bp, synthetic construct
  source 1..75: mol_type = other DNA
taattgcaggtggacatacgttcggtaaagcacacggtgctgcctcacctgaaaaatgccttggtcctgcacctg

SEQ ID NO: 93440 - DNA, 75 bp, synthetic construct
  source 1..75: mol_type = other DNA
aaagacagcttgggcttctgcctcaacattccgtggaacagattaccgtggcggaagtaatggtgcccgtattcg

SEQ ID NO: 93441 - DNA, 75 bp, synthetic construct
  source 1..75: mol_type = other DNA
gggccacatggtgtggtgttggcaatgttcccgcttatctgggtcggcgtagtttgtgttattggtgcatttagc

SEQ ID NO: 93442 - DNA, 75 bp, synthetic construct
  source 1..75: mol_type = other DNA
gaacagtgtgctgtacgtgatccgagtcgcgatggcacccggggaccggggcatgtgctgaatggcgacaataca

SEQ ID NO: 93443 - DNA, 75 bp, synthetic construct
  source 1..75: mol_type = other DNA
actgggagtcggacctggtatactgggggcctgacaacaagcctcttgcagataaccgggataaaaacgggaaac

SEQ ID NO: 93444 - DNA, 75 bp, synthetic construct
  source 1..75: mol_type = other DNA
ttctgaactgtctgcgctgcagcgtatcgagcatcttgccctcctgaaacggcgggcagaagagtctgaagccag

SEQ ID NO: 93445 - DNA, 75 bp, synthetic construct
  source 1..75: mol_type = other DNA
taccgggcatcaggtaccggaaatcattctgcttaacagccacgacggctcatcaagctaccagatgctgccggg

SEQ ID NO: 93446 - DNA, 75 bp, synthetic construct
  source 1..75: mol_type = other DNA
gtttgcgggagtccagaaaggacaaaaaacctggacggagtttggggccattgtggtggtgggggtgatcctgct

SEQ ID NO: 93447 - DNA, 75 bp, synthetic construct
  source 1..75: mol_type = other DNA
accacaaaacgggagaaacggcgacggaaacgctgacacagcgggagctggtcgcgaggctgaaacagcacatcc

SEQ ID NO: 93448 - DNA, 75 bp, synthetic construct
  source 1..75: mol_type = other DNA
caatcctgaaggtcgccaggcttcgtgcagatttcgatgcttctgaagtggacaggcgaggtatcggtagttgtc

SEQ ID NO: 93449 - DNA, 75 bp, synthetic construct
  source 1..75: mol_type = other DNA
acagctgaatcgtcttcctgactgcgactgggtgcacctggtcttcaccctgccggacacgctgtggccggtgtt

SEQ ID NO: 93450 - DNA, 75 bp, synthetic construct
  source 1..75: mol_type = other DNA
aagagcataaaaagaagggcttatctcaatctcaggttgctaaagtccttggactgagtgtaagaacggtttcaa

SEQ ID NO: 93451 - DNA, 75 bp, synthetic construct
  source 1..75: mol_type = other DNA
gtgtactttattctgtacaatctcatttttctggtgcacaaacaatacaactcaatggtaatggaatctctgaaa

SEQ ID NO: 93452 - DNA, 75 bp, synthetic construct
  source 1..75: mol_type = other DNA
tatcggccacgttgaccatggtaaaactacactgaccgctgcaatcactaccgtactggctaaaacctacggcgg

SEQ ID NO: 93453 - DNA, 75 bp, synthetic construct
  source 1..75: mol_type = other DNA
caagaatgactaactggacagccacttatctgagcggtacaggtaccacaactaatcaactaaatccgttgataa

SEQ ID NO: 93454 - DNA, 75 bp, synthetic construct
  source 1..75: mol_type = other DNA
acagaaaaatgaagtggcagggacgggcaatattacttcccggaataccactgtggttaatcatgctgggaagca

SEQ ID NO: 93455 - DNA, 75 bp, synthetic construct
  source 1..75: mol_type = other DNA
atgccatcacggatcccccgcgcatgccgtaagcgaggctgcgcaggcacaacgacagacagttctggctactgc

SEQ ID NO: 93456 - DNA, 75 bp, synthetic construct
  source 1..75: mol_type = other DNA
aaatacgtcaagctatttatcattactcgataataccggtgaaatgctggttgctataaatgacatgaatattag

SEQ ID NO: 93457 - DNA, 75 bp, synthetic construct
  source 1..75: mol_type = other DNA
tcattccgaaagcgcatggcggtacggatgcagacggtaatctgcagagcctgtgctggccatgccacaaggcga

SEQ ID NO: 93458 - DNA, 75 bp, synthetic construct
  source 1..75: mol_type = other DNA
acttattcttgaaaactcatatcaaatagcacaaatatcaaacatggtggggatatccagtacttcatattttat

SEQ ID NO: 93459 - DNA, 75 bp, synthetic construct
  source 1..75: mol_type = other DNA
aatggtggtgttgtgggaatgataacaccagaagtagcattccgggctgatgcaggcattcaacttggagaacat

SEQ ID NO: 93460 - DNA, 75 bp, synthetic construct
  source 1..75: mol_type = other DNA
atgtcaaccggattacgtttcacacttgaagtggacggcctgccaccggacgcgtttgcggtggtttcctttcat

SEQ ID NO: 93461 - DNA, 75 bp, synthetic construct
  source 1..75: mol_type = other DNA
atgtgtatacaacatcaggttgagttactcgcttttttcgaaagatttatcaatcttaataaaagaaagattttc

SEQ ID NO: 93462 - DNA, 75 bp, synthetic construct
  source 1..75: mol_type = other DNA
tgaaagttatgtttatacgtctttaaatgacgacgataacaaactgatatccatgctgagatggaataatacaaa

SEQ ID NO: 93463 - DNA, 75 bp, synthetic construct
  source 1..75: mol_type = other DNA
atatcgaggttgaggctgtcacaaaaatgctggcctgcggcacgcggatactgggtgtgaaggaatacaactgcg

SEQ ID NO: 93464 - DNA, 75 bp, synthetic construct
  source 1..75: mol_type = other DNA
tgatgctgacagtaatctgcagagtctgtgttggccgtgccataaggcgaagacggcccgtgaacggttaaagtg

SEQ ID NO: 93465 - DNA, 75 bp, synthetic construct
  source 1..75: mol_type = other DNA
atgaagagaacccgcatcagctgcagcagcttatccggctgccggggcagcagtatgatgaggagtccggcctgt

SEQ ID NO: 93466 - DNA, 75 bp, synthetic construct
  source 1..75: mol_type = other DNA
acattgtgcagtcgctgccatcgttcaccgaaacgcgagcggatgacctgattttaccatcgctgcatatggcaa

SEQ ID NO: 93467 - DNA, 75 bp, synthetic construct
  source 1..75: mol_type = other DNA
gaaaaaatcgtttcttttatggataaagaatgtgacaaacgggatatgccagaaattattatggatgacatgatt

SEQ ID NO: 93468 - DNA, 75 bp, synthetic construct
  source 1..75: mol_type = other DNA
acggttgcgttatcgcccgaaacgctgaggcaaaggcgctgggtgttaaaatgggcgatccctggttcaaacaaa

SEQ ID NO: 93469 - DNA, 75 bp, synthetic construct
  source 1..75: mol_type = other DNA
atgccagcactgatacctagagcctgccgtgttcgcggctgccaccataccactactgacccgtcaggctattgt

SEQ ID NO: 93470 - DNA, 75 bp, synthetic construct
  source 1..75: mol_type = other DNA
agtatcgtactgtggtgttccacgacaccagtgttgatgagtactttaaaatcggctcgactatcaaaacagacc

SEQ ID NO: 93471 - DNA, 75 bp, synthetic construct
  source 1..75: mol_type = other DNA
gaactggcgggtaagttcggtgtcagcactcgcaaggttgcttccacgctggcggtggtaaccgcaacgggacgc

SEQ ID NO: 93472 - DNA, 75 bp, synthetic construct
  source 1..75: mol_type = other DNA
gcatcggtagcggacactgatggtaaagcctttcctcagccagcgggggttgcgttaccagtacaggaggttgca

SEQ ID NO: 93473 - DNA, 75 bp, synthetic construct
  source 1..75: mol_type = other DNA
tgaatgtcggcgtccgcgattccacctatgtgctcgacggcctgctgtaccacgagtccgacctgcggatcgagg

SEQ ID NO: 93474 - DNA, 75 bp, synthetic construct
  source 1..75: mol_type = other DNA
accctgaacggtctggcccgcagtggtcgtgatgtccggctgtattcctcgctggatgaaccccgtactgcggaa

SEQ ID NO: 93475 - DNA, 75 bp, synthetic construct
  source 1..75: mol_type = other DNA
gaaacggctgatgcattccgtatccgtgtgcgtgaggcatttcgccgtcgtgttgcggagactgaacagcatggc

SEQ ID NO: 93476 - DNA, 75 bp, synthetic construct
  source 1..75: mol_type = other DNA
atgagtgagaaaattgccgttgtctatatcggcccaaaacccgtgaaaaaggacaccattaccggaagtcgcacg

SEQ ID NO: 93477 - DNA, 75 bp, synthetic construct
  source 1..75: mol_type = other DNA
ccgggaatatgacgaggaaacaacagaaaccgctgattttggctcttacgaagtaaaaggcaataaggttgagtt

SEQ ID NO: 93478 - DNA, 75 bp, synthetic construct
  source 1..75: mol_type = other DNA
gctctctgtggcgaaaagagaaactaggctggcagatgatgtaaagctattgcgccaggaggaacaggaaaggcg

SEQ ID NO: 93479 - DNA, 75 bp, synthetic construct
  source 1..75: mol_type = other DNA
gccgttgttgccgtaggaacaatactaaacaagattttcggtattgccctaacgaatatccaagcaatttctctg

SEQ ID NO: 93480 - DNA, 75 bp, synthetic construct
  source 1..75: mol_type = other DNA
cgcttcaaccaactttggctttggtattcctggcggtattccaggcgtagcgctgcgcgaaggcgttccttacca

SEQ ID NO: 93481 - DNA, 75 bp, synthetic construct
  source 1..75: mol_type = other DNA
gccgggccattgcggggctgaatgtatcagggctgaagaaaaacgcgcgggatatcagtctgctgaggtatatgc

SEQ ID NO: 93482 - DNA, 75 bp, synthetic construct
  source 1..75: mol_type = other DNA
gcgaaaagatgcttgctgaggaacgccgtaagaaatggaatcagcagcaattaaacgcaccagaaataatgttta

SEQ ID NO: 93483 - DNA, 75 bp, synthetic construct
  source 1..75: mol_type = other DNA
ggcggtggtaaccgcaacggggcggctggcacgcgttaatcagagcggtaaatttcgttactgcatgccgggcgg

SEQ ID NO: 93484 - DNA, 75 bp, synthetic construct
  source 1..75: mol_type = other DNA
ctggctatggtcataataataacagtacgaatgccctgagcaccggataccattcggaaggaagaatgaatggat

SEQ ID NO: 93485 - DNA, 75 bp, synthetic construct
  source 1..75: mol_type = other DNA
ttttctgaataacattattaatccagcccgggcagaagccggagaagtccctcatgaaccgcgtaagtttcttgc

SEQ ID NO: 93486 - DNA, 75 bp, synthetic construct
  source 1..75: mol_type = other DNA
gccgtgttcgcggttgccgccataccaccacagatccgtcaggctattgtgaaagccacaaaagcgaaggctgga

SEQ ID NO: 93487 - DNA, 75 bp, synthetic construct
  source 1..75: mol_type = other DNA
tatcggccacgttgaccatggtaaaacgactctgaccgctgcaatcactaccgtactggctaaaacctacggcgg

SEQ ID NO: 93488 - DNA, 75 bp, synthetic construct
  source 1..75: mol_type = other DNA
aacgtcttgtttctctgccgcacacaatgctgttacgcctgtggcaggccgtgttctcactgtgtctgctgctct

SEQ ID NO: 93489 - DNA, 75 bp, synthetic construct
  source 1..75: mol_type = other DNA
cacgcatcggcattagcagcaatcaaagcctcgatgacaggccaccttctgttgacgaccttacacgccaacgat

SEQ ID NO: 93490 - DNA, 75 bp, synthetic construct
  source 1..75: mol_type = other DNA
agataaagacagcttgaaaaaagcgaaagactctattacaggcttaaaggaattcgcagaaaatatcaagccagc

SEQ ID NO: 93491 - DNA, 75 bp, synthetic construct
  source 1..75: mol_type = other DNA
ctggaagcctttaactctgccgttgacaactggctggcagaactgacaatgaacaaactttacgatcgcgcgccg

SEQ ID NO: 93492 - DNA, 75 bp, synthetic construct
  source 1..75: mol_type = other DNA
ggcagcaacaggaggaaaaagtactgcgtatacagcgatcctgggccaggggggcatcccgtagtaacgaacgtg

SEQ ID NO: 93493 - DNA, 75 bp, synthetic construct
  source 1..75: mol_type = other DNA
cattaccagccgctggtcgatctgcgcgatcaccggatcgctggcgcggaagcgttgatgcgctggcggcatccg

SEQ ID NO: 93494 - DNA, 75 bp, synthetic construct
  source 1..75: mol_type = other DNA
atgcacgatgaaggcccatcactggcaagcctgcttaagcacgggtgccaggttacacacttcaaaaactcacgc

SEQ ID NO: 93495 - DNA, 75 bp, synthetic construct
  source 1..75: mol_type = other DNA
tcaatgaatttattacacttcaaagaggttttgacttacctcaagataaaagaataaaaggtgatattccagtca

SEQ ID NO: 93496 - DNA, 75 bp, synthetic construct
  source 1..75: mol_type = other DNA
aggcctgtggtacggggatttattgcagagcggtatgtacgaagtctgtttacagctaccagccagacttgtttg

SEQ ID NO: 93497 - DNA, 75 bp, synthetic construct
  source 1..75: mol_type = other DNA
tatcgccattaccagtcgtgctggagtggcattgtgtgatgtgcgacaagttttttcccgggaagaagttctgtg

SEQ ID NO: 93498 - DNA, 75 bp, synthetic construct
  source 1..75: mol_type = other DNA
gaaatagatgagaaagactctttaaagtatttattgcaagatggtgatatcgtaatcgcaagaaccggaaacagt

SEQ ID NO: 93499 - DNA, 75 bp, synthetic construct
  source 1..75: mol_type = other DNA
cggcgcggggaccgcgttgtttatgacggacaacaatggacggtcacacggcatgaacgctttaacggtaaaccc

SEQ ID NO: 93500 - DNA, 75 bp, synthetic construct
  source 1..75: mol_type = other DNA
atgcgccaggaaacccgctttaaatttaatgcttacctgtcccgtgttgccgaactgaacggcatcgacgccggt

SEQ ID NO: 93501 - DNA, 75 bp, synthetic construct
  source 1..75: mol_type = other DNA
gtctgaaaaataacaacagcgatttgcatgatttgttagtggactattatgtcggcggcatgacttttatggcgc

SEQ ID NO: 93502 - DNA, 75 bp, synthetic construct
  source 1..75: mol_type = other DNA
ttgctaacctgctgctggatccgtacttcaagaatatcgctgatgagtatcagcaggcgttacgtgatgttgttg

SEQ ID NO: 93503 - DNA, 75 bp, synthetic construct
  source 1..75: mol_type = other DNA
attgtggtggtttcggctcattggtttacccgtggaacaggagtgaccgcgatggagacgccgcccacgattcat

SEQ ID NO: 93504 - DNA, 75 bp, synthetic construct
  source 1..75: mol_type = other DNA
attgaaaaaaataattatcaaaaccaaacactcgaaaaaatgtcccaaaccctgttcaaatcctggtttgtagat

SEQ ID NO: 93505 - DNA, 75 bp, synthetic construct
  source 1..75: mol_type = other DNA
aagatttttttattttgaaaacaaccaaataactacaatcccgacaaatctttttcgtttagatcctcatataac

SEQ ID NO: 93506 - DNA, 75 bp, synthetic construct
  source 1..75: mol_type = other DNA
tggaagccgacattcgcagttgttttgatgagatttcacatgaatggctaatcgccaatatcccaacggatacgg

SEQ ID NO: 93507 - DNA, 75 bp, synthetic construct
  source 1..75: mol_type = other DNA
gaagccgacggtggcagatgcgatgcgttatgccctgaaacagtcgggctacacgctctgtgccaccggaccggc

SEQ ID NO: 93508 - DNA, 75 bp, synthetic construct
  source 1..75: mol_type = other DNA
actctcttcaaatcctggtttgtggattttgatccggtgatttataacgctctggatgcaggaaatccaatcccg

SEQ ID NO: 93509 - DNA, 75 bp, synthetic construct
  source 1..75: mol_type = other DNA
tacaaacctgtaataaactgaaatatattatcaaaaccgccaaacaaacccaactgcaccttgcagacgcactca

SEQ ID NO: 93510 - DNA, 75 bp, synthetic construct
  source 1..75: mol_type = other DNA
ggatcacgccgggtgaacacattatcagtgcggcctcagcccttagcagaaatatcaggcattgtttctgccttt

SEQ ID NO: 93511 - DNA, 75 bp, synthetic construct
  source 1..75: mol_type = other DNA
ggaacctgttgcagaaacaacggctgacccaaattcgtttgggttcaggccctgtcgctcaacagccgatgccat

SEQ ID NO: 93512 - DNA, 75 bp, synthetic construct
  source 1..75: mol_type = other DNA
gctgcgcaacgggataatgctggcgcacaacgggatgtcgccgcggcacagggacagcgttatgtggatgcgctc

SEQ ID NO: 93513 - DNA, 75 bp, synthetic construct
  source 1..75: mol_type = other DNA
tgccggatgggtgggagtggtgtcgtatcgttgatttagcaattgtaggtacaggcgcaacaccttctcgtgatg

SEQ ID NO: 93514 - DNA, 75 bp, synthetic construct
  source 1..75: mol_type = other DNA
aacagtgccgaatctatcatcctctacaaagaacaaaaataaaaccgcgcaaaacaactctatcctcagtagcct

SEQ ID NO: 93515 - DNA, 75 bp, synthetic construct
  source 1..75: mol_type = other DNA
aatatagctattattgaaaacgaaatactacctgaaccgatcgctagtactgccttcgctattattcatccatat

SEQ ID NO: 93516 - DNA, 75 bp, synthetic construct
  source 1..75: mol_type = other DNA
tagaacgcggtatcatcaaagttggtgaagaagttgaaatcgttggtatcaaagagactcagaagtctacctgta

SEQ ID NO: 93517 - DNA, 75 bp, synthetic construct
  source 1..75: mol_type = other DNA
atgtttgttccgtttctcattatgttgcgcgaaggacttgaagccgcgctgattgtcagtttgattgccagctat

SEQ ID NO: 93518 - DNA, 75 bp, synthetic construct
  source 1..75: mol_type = other DNA
cgccatcaaagaggcgtttatcaaagcatttaattggatgcgtgacaggctgatggagatggctcactcatacca

SEQ ID NO: 93519 - DNA, 75 bp, synthetic construct
  source 1..75: mol_type = other DNA
aaccacagacccgtcaggctactgcgaaagccacaaaagcgaaggctggaagcagtacaaacctggacagtcccg

SEQ ID NO: 93520 - DNA, 75 bp, synthetic construct
  source 1..75: mol_type = other DNA
tgatatggatatgatgcttacaggtaagcttggtgtaatgcgtgctccagatggaattgcagtacatgttgatcg

SEQ ID NO: 93521 - DNA, 75 bp, synthetic construct
  source 1..75: mol_type = other DNA
ggcgtggaagcggtgcgtgaagaccatccgctggcatcactgctgccatgcgataacgtctttgccatcgaaagc

SEQ ID NO: 93522 - DNA, 75 bp, synthetic construct
  source 1..75: mol_type = other DNA
tttggattgatgctgcgtgcaacgatttatttggctatgtcactaatggagggattattactgatgttcatatcg

SEQ ID NO: 93523 - DNA, 75 bp, synthetic construct
  source 1..75: mol_type = other DNA
cgggtaataatcgtaatttttccggtgtttttaccgtgaataagggggctcatttggctgtatccacggctgata

SEQ ID NO: 93524 - DNA, 75 bp, synthetic construct
  source 1..75: mol_type = other DNA
caatggccgcgacatgccacaacgccactttgaggcaatgacggatgctgcctttaatctggggtgcaaaggcct

SEQ ID NO: 93525 - DNA, 75 bp, synthetic construct
  source 1..75: mol_type = other DNA
caccaactatgccatgagtgtagctggtggacaaggctatcagccaggcggtcggtttttagtggcttttaaccg

SEQ ID NO: 93526 - DNA, 75 bp, synthetic construct
  source 1..75: mol_type = other DNA
acaccagcgcggttatggttcgaaatgggatgttatccgtgaacgtgtgctcaagcgtgacaaaggcctgtgcca

SEQ ID NO: 93527 - DNA, 75 bp, synthetic construct
  source 1..75: mol_type = other DNA
ggatgcagacggtaatctgcagagcctgtgctggccatgccacaaggagaaaacagcgcgtgaacgcatcaactg

SEQ ID NO: 93528 - DNA, 75 bp, synthetic construct
  source 1..75: mol_type = other DNA
gtggtgatcgtcacgccggaatataactactcggtaccgggtgggctgaaaaatgccatcgactggctttcccgc

SEQ ID NO: 93529 - DNA, 75 bp, synthetic construct
  source 1..75: mol_type = other DNA
ccgctgttgctgaacatgtgcaggaaaagctgagcgccactgagcagcgactcgctgagatggaaaccgcctttt

SEQ ID NO: 93530 - DNA, 75 bp, synthetic construct
  source 1..75: mol_type = other DNA
gccgtgttcgcggctgccgccataccactactgacccgtcaggctactgcgaaagccacaaaagcgaaggctgga

SEQ ID NO: 93531 - DNA, 75 bp, synthetic construct
  source 1..75: mol_type = other DNA
agctcagtggagcctgaatggtaccgatcgctggcatacaggtatgatggctggctatggtcataataataacag

SEQ ID NO: 93532 - DNA, 75 bp, synthetic construct
  source 1..75: mol_type = other DNA
tgtcgctattgtacgttttgttaacaaatcacgcctgtgctgaaacagcgacactgactaccacaacattttctt

SEQ ID NO: 93533 - DNA, 75 bp, synthetic construct
  source 1..75: mol_type = other DNA
aattgctggatggggttgaggttgagtggaaaactcttgaggatataactttacgaactagtaatattaaatggc

SEQ ID NO: 93534 - DNA, 75 bp, synthetic construct
  source 1..75: mol_type = other DNA
gaacaactcatccaggctgctgaaaatgagcgacagcgattactgtccgccgctgatgcaattatgctcgactgg

SEQ ID NO: 93535 - DNA, 75 bp, synthetic construct
  source 1..75: mol_type = other DNA
gcgacaaaaaaaataactgagacaacagaaattacaaaaaataatgcaccgagcagagctcaaaaacttgtagat

SEQ ID NO: 93536 - DNA, 75 bp, synthetic construct
  source 1..75: mol_type = other DNA
gtcattgctgtgtgagtccgtcgctaaagcgttggatgtacccggcggagtgaaatatgaaattacgactgagcc

SEQ ID NO: 93537 - DNA, 75 bp, synthetic construct
  source 1..75: mol_type = other DNA
ccgttgccgccatcgtggcgctgggtttttcgctggcccccggggagctgagaacctcacaggaggcacaggaaa

SEQ ID NO: 93538 - DNA, 75 bp, synthetic construct
  source 1..75: mol_type = other DNA
ctggcgtagtccttgattctgttccgcagtcggaagccgacgaaacccgtaataaagcccgcgctgtactgcgcg

SEQ ID NO: 93539 - DNA, 75 bp, synthetic construct
  source 1..75: mol_type = other DNA
gatctggatgcacttaacgaactttccgagctgatctgtgccgcagaatgcggggaacacattgaaccgtataag

SEQ ID NO: 93540 - DNA, 75 bp, synthetic construct
  source 1..75: mol_type = other DNA
gagttcttggcaacagcaattcagaatttgcgcgaatgcttgaaagcgatggcgatgtgaaaacctttactctca

SEQ ID NO: 93541 - DNA, 75 bp, synthetic construct
  source 1..75: mol_type = other DNA
tgacgctggacggtgcgacatttagtgcacaaacaaccctgaataacggtaccaacaccattccgttccaggcgc

SEQ ID NO: 93542 - DNA, 75 bp, synthetic construct
  source 1..75: mol_type = other DNA
accaacaccattccgttccaggcgcgttattatgccattggtgccgcaacccctggcgcagctaatgcggatgcg

SEQ ID NO: 93543 - DNA, 75 bp, synthetic construct
  source 1..75: mol_type = other DNA
gcgagtgggggcaataacagtttgctttctggattattacttacagggcttaatggtggtcctgaagcgctcagg

SEQ ID NO: 93544 - DNA, 75 bp, synthetic construct
  source 1..75: mol_type = other DNA
atggtttttctgttaggcgcaccgccgataaagattcagctaaaacttttgttcaggaaactctgaaagatactt

SEQ ID NO: 93545 - DNA, 75 bp, synthetic construct
  source 1..75: mol_type = other DNA
taaaggaagaattaacccaatacattggcgagcattatgacgatgtggagatgatcgtaaaagccaccagcaacg

SEQ ID NO: 93546 - DNA, 75 bp, synthetic construct
  source 1..75: mol_type = other DNA
gggttatatgcaggcgtttgtaaagtatggattgcgcaatctgaaagaaggggcgaagttcagagaaagtatagt

SEQ ID NO: 93547 - DNA, 75 bp, synthetic construct
  source 1..75: mol_type = other DNA
cacattcatttaatcttggggtggaggttgttcgtgcccgaattgtagccaatgggcgcggagatattacagtcg

SEQ ID NO: 93548 - DNA, 75 bp, synthetic construct
  source 1..75: mol_type = other DNA
aatgggtttgtggattcagggatgaattaaaagtatcacaaaatattatacgctcagggattctttttttactat

SEQ ID NO: 93549 - DNA, 75 bp, synthetic construct
  source 1..75: mol_type = other DNA
acgtatggagaatttcacgacgaacctgaatcagcttgcgcgcgtgggcggaatcgacccactgattggtcgtga

SEQ ID NO: 93550 - DNA, 75 bp, synthetic construct
  source 1..75: mol_type = other DNA
ttagcagaaagtgaagggcagggacgggtttatgcagaattattgaatattgcttttaatgatggagttaatgtg

SEQ ID NO: 93551 - DNA, 75 bp, synthetic construct
  source 1..75: mol_type = other DNA
cgtgacagcgatgaagactggtacctgcgcagtgaaaatgcttatcgtgcagaagtccccctgtatgcctccatg

SEQ ID NO: 93552 - DNA, 75 bp, synthetic construct
  source 1..75: mol_type = other DNA
tacttcaaaggcgtggatgacgtgacattttacagtgctacacgcgaagaactaatcgacttcctgaatcacggg

SEQ ID NO: 93553 - DNA, 75 bp, synthetic construct
  source 1..75: mol_type = other DNA
ggcgtcagaacataatctgtagcgagtgccggaagagcgaagttatgcagcgcgcactggcgttttatcagggta

SEQ ID NO: 93554 - DNA, 75 bp, synthetic construct
  source 1..75: mol_type = other DNA
aaaaggaatcccaaagcgaccatcaaatccccctgtcagataagttcctgaaaaggaaaaaacgatctcctgtag

SEQ ID NO: 93555 - DNA, 75 bp, synthetic construct
  source 1..75: mol_type = other DNA
aaaatattcatgccatatgggttgcgggttccccacctgaaagcatttcggactatattaagacttttctcaaaa

SEQ ID NO: 93556 - DNA, 75 bp, synthetic construct
  source 1..75: mol_type = other DNA
gtgctgcacgctggcgtggtgttcgtccgaccgttcgcggtaccgcgatgaacccggtagaccacccacatggtg

SEQ ID NO: 93557 - DNA, 75 bp, synthetic construct
  source 1..75: mol_type = other DNA
agctgaagaaaccatctgtggttgatccggaccttatctggctattaccagacggcgaaatacgccgctacgaca

SEQ ID NO: 93558 - DNA, 75 bp, synthetic construct
  source 1..75: mol_type = other DNA
ggcggtgtactgctggccgattccggtgccgctgtcagtggtacccggagcgacggaaaggcattcagtatcgga

SEQ ID NO: 93559 - DNA, 75 bp, synthetic construct
  source 1..75: mol_type = other DNA
gacaacgcgatggctgagagcatcaatggtctttacaaagcggaggtaatacaccgtaagagctggaaaaaccgt

SEQ ID NO: 93560 - DNA, 75 bp, synthetic construct
  source 1..75: mol_type = other DNA
ttacacggcgacgcacgttatctggtttatggcggcatcctgtttgccgcgtgggggaaatcggcccagctaccg

SEQ ID NO: 93561 - DNA, 75 bp, synthetic construct
  source 1..75: mol_type = other DNA
atgcgtattgaaatctgcatagccaaagagaaaatgactaaaatgccaaacggtgctgtggatgcgttaaaggaa

SEQ ID NO: 93562 - DNA, 75 bp, synthetic construct
  source 1..75: mol_type = other DNA
gccgggagctggcagcgcagtatccgggagacacgccgctgatgctggttgtctggtccccggaagagattcagg

SEQ ID NO: 93563 - DNA, 75 bp, synthetic construct
  source 1..75: mol_type = other DNA
ttgatttgtcgcgcctcagcgccgatgagctgaaggtctaccagctgattcgccagcattatttcgcccagttcc

SEQ ID NO: 93564 - DNA, 75 bp, synthetic construct
  source 1..75: mol_type = other DNA
accgtaccgccgtactatgactcaatgatcggtaagctgatttgctacggtgaaaaccgtgacgtggcgattgct

SEQ ID NO: 93565 - DNA, 75 bp, synthetic construct
  source 1..75: mol_type = other DNA
aagctttacgccttcatttcgaagaacatttaccacgggttgtggccggacgtcgcctgggcgtaccaaaatcaa

SEQ ID NO: 93566 - DNA, 75 bp, synthetic construct
  source 1..75: mol_type = other DNA
acacctgatggacgatttgaggcgcttaataataaaggagaatatatttttatcagaaatagtgtcccgggattg

SEQ ID NO: 93567 - DNA, 75 bp, synthetic construct
  source 1..75: mol_type = other DNA
caccgtcgtgatggtgtcgtccaccatcgcctccgccgatgctcaggccattgccgaggcgctggcggagtacca

SEQ ID NO: 93568 - DNA, 75 bp, synthetic construct
  source 1..75: mol_type = other DNA
catttaatgcacaaatcggcgggaaagtattaatgacgttgaagtacggtaataagagtgttccattcggtgcaa

SEQ ID NO: 93569 - DNA, 75 bp, synthetic construct
  source 1..75: mol_type = other DNA
cgctggcgtacgcctggtaccagggcgacgccacgctttcagaatttaataaaacgctggtcctttccggcaatc

SEQ ID NO: 93570 - DNA, 75 bp, synthetic construct
  source 1..75: mol_type = other DNA
tggatacaaaagattaccggactttcggcagagcaaatacaggcattagagcagcccttgcctgagcgtgagcct

SEQ ID NO: 93571 - DNA, 75 bp, synthetic construct
  source 1..75: mol_type = other DNA
atgacacggaacaccatactcacacgcactgccctctatcgtctggctctgcagcgtttcgggccggatgcacag

SEQ ID NO: 93572 - DNA, 75 bp, synthetic construct
  source 1..75: mol_type = other DNA
atgcatgagctggaagtcctgctgagtcgcctgaaaatggagcatctgagttatcacgttgaaagcctgctggaa

SEQ ID NO: 93573 - DNA, 75 bp, synthetic construct
  source 1..75: mol_type = other DNA
gcaaaatcgggggcatgtactaatggtctttgcggcacactatccgctatgataggtccagataaatttgattct

SEQ ID NO: 93574 - DNA, 75 bp, synthetic construct
  source 1..75: mol_type = other DNA
acggttaatgatgacctgagcgtcagtttatttacccaggagcatctgctggcacatcatcccatgctggaaggt

SEQ ID NO: 93575 - DNA, 75 bp, synthetic construct
  source 1..75: mol_type = other DNA
gtaattcttcatttgtcattgtctgtacccgtaaagcggtgcgctgtagtacctcatatcacagcgcaggtattt

SEQ ID NO: 93576 - DNA, 75 bp, synthetic construct
  source 1..75: mol_type = other DNA
gtgctcaggcttatgttcgctggtatcaaaatgagcggcgtaagtacggtgtctcctgggctttcactgattttt

SEQ ID NO: 93577 - DNA, 75 bp, synthetic construct
  source 1..75: mol_type = other DNA
atcaggtggtggataaattcatcgtcgagttgcaggttcagttggatcagaaaggtgtttctctggaagtgagcc

SEQ ID NO: 93578 - DNA, 75 bp, synthetic construct
  source 1..75: mol_type = other DNA
cctgggcgttcaggccggttatgcccacagcgtcagcggcagcagcgctgaaggttataacggtcaggccacgct

SEQ ID NO: 93579 - DNA, 75 bp, synthetic construct
  source 1..75: mol_type = other DNA
gttaatgttgggcgcattgatggataagctgcgtccagtaaccatgtcgctactgatttatagcggcatgttagc

SEQ ID NO: 93580 - DNA, 75 bp, synthetic construct
  source 1..75: mol_type = other DNA
ggtcatcaaaagatagttccttttgccgcgttaataaaagctgatgaatgcatcatttcaaaaattgcttcatat

SEQ ID NO: 93581 - DNA, 75 bp, synthetic construct
  source 1..75: mol_type = other DNA
cggtgaatttattcgtggctgggatgacggacgtggagtggatgccgggcgacaattattatcttcacaggggga

SEQ ID NO: 93582 - DNA, 75 bp, synthetic construct
  source 1..75: mol_type = other DNA
ctggcccgctcacggggaaaatgcgccggtgtggcggttgcactgtctcttactgctgtcacgtcagtccaggcg

SEQ ID NO: 93583 - DNA, 75 bp, synthetic construct
  source 1..75: mol_type = other DNA
gtcggggcatatctcccttaattgcaacctcctgggagagatgcaataagctgatgaaacgggagacatggaacg

SEQ ID NO: 93584 - DNA, 75 bp, synthetic construct
  source 1..75: mol_type = other DNA
actgaaaaaacatcttcctgctggcccgcgactggttgaacctttcgcgggttcctgtgctgtgatgatggagac

SEQ ID NO: 93585 - DNA, 75 bp, synthetic construct
  source 1..75: mol_type = other DNA
gccacgaacaccgtttacatcagtggtattggtaaagagagcgtgatttgggtcgttgatggcgagaatatcaaa

SEQ ID NO: 93586 - DNA, 75 bp, synthetic construct
  source 1..75: mol_type = other DNA
agcgggaaaaaattaaagggcaggtggtggaactcgtgcgccagagcggtcgtgagacgctacggcaactggaag

SEQ ID NO: 93587 - DNA, 75 bp, synthetic construct
  source 1..75: mol_type = other DNA
ctgttccattaagccccggtgaacgcctgaatggacttaatcatattgcggagttaagggcgaaagtttttggtc

SEQ ID NO: 93588 - DNA, 75 bp, synthetic construct
  source 1..75: mol_type = other DNA
gtaaaaagctgattgcccttgttctggccggagccgggacgttcaccattgccacgcactacaccggctactggg

SEQ ID NO: 93589 - DNA, 75 bp, synthetic construct
  source 1..75: mol_type = other DNA
cagcttagcgcgctctatgatgccaataacggtgacggtgtacagacagtacacggctggccaacgcagcgtcag

SEQ ID NO: 93590 - DNA, 75 bp, synthetic construct
  source 1..75: mol_type = other DNA
agacgtggtggcgatcactgcttatgctcagttctggttccccgatctctccgactgggtcgcctcgctggcggt

SEQ ID NO: 93591 - DNA, 75 bp, synthetic construct
  source 1..75: mol_type = other DNA
gtcttcgccaccgctggatgcgcctgcgcttatatcgtttccccggttctgttttgaccgattaccgaatactga

SEQ ID NO: 93592 - DNA, 75 bp, synthetic construct
  source 1..75: mol_type = other DNA
ttaggcagaaatacactcaggctgaaataggtcgttatatgggggtcgctcaacagactgtttggcaatggttta

SEQ ID NO: 93593 - DNA, 75 bp, synthetic construct
  source 1..75: mol_type = other DNA
atgcttaaaactgacgctcttttgtatttcggttcaaaaacaaaacttgcacaagcagcaggtattcgtttggct

SEQ ID NO: 93594 - DNA, 75 bp, synthetic construct
  source 1..75: mol_type = other DNA
atggaaaagctattagacgcgtacaaacggatattgcaggaagttaacgcccagtcatttaacctgaatgaggat

SEQ ID NO: 93595 - DNA, 75 bp, synthetic construct
  source 1..75: mol_type = other DNA
ttactggacccacagccagtcgcagatcgctcattttgcgcacagggccttgccgggcgttcgctgatcgcctgg

SEQ ID NO: 93596 - DNA, 75 bp, synthetic construct
  source 1..75: mol_type = other DNA
ccacggcacatggttttcgctcaacattcagggactggtgtagcgaacaggggtattcgcgggatctggcggaaa

SEQ ID NO: 93597 - DNA, 75 bp, synthetic construct
  source 1..75: mol_type = other DNA
attgaaaacaaaagtcaggaacgttatttgcacattactctgtcttttcatgaaagtcatgtgtcgaatgaagtg

SEQ ID NO: 93598 - DNA, 75 bp, synthetic construct
  source 1..75: mol_type = other DNA
gggaagtacgacaggaacgcgatcaactttttgttggtgatgacgccatccgcgtattgcatgaacgttcactgc

SEQ ID NO: 93599 - DNA, 75 bp, synthetic construct
  source 1..75: mol_type = other DNA
attccgttgctcagaagccacgatgccagaaaactgctgcagatgaccggagaatggctgaatacaacaggggct

SEQ ID NO: 93600 - DNA, 75 bp, synthetic construct
  source 1..75: mol_type = other DNA
tggcgaaaatcgaacaacttaccggtgtgcgcgatcctgcgggcgttgcctgtgaacctttccgccagtgggtaa

SEQ ID NO: 93601 - DNA, 75 bp, synthetic construct
  source 1..75: mol_type = other DNA
taccgttacgacagcgcgggtaacgtatcaggcgtcaccagccgggaagattacggacgggaaacacagcgggag

SEQ ID NO: 93602 - DNA, 75 bp, synthetic construct
  source 1..75: mol_type = other DNA
tgcccgtcttaatgagccgctggaaaatggtgccgtgatccacatcgtaccgcgtccggcgggtgctaaaagtgg

SEQ ID NO: 93603 - DNA, 75 bp, synthetic construct
  source 1..75: mol_type = other DNA
acatgtgcgtgccggtttccgtctgggcagccacaacgatatgacctttggtgaaggcacctcatcccgtgacac

SEQ ID NO: 93604 - DNA, 75 bp, synthetic construct
  source 1..75: mol_type = other DNA
ttgcgtatttcatgcgacaagcattggcctggctggaagggcattcatgcagcgacgacagactgggtaaagccg

SEQ ID NO: 93605 - DNA, 75 bp, synthetic construct
  source 1..75: mol_type = other DNA
gtggtgtgtttttgtgtgaggtgggctccgataccgtcaaggaaatgctgtacgcccgttttgccctgccggtgg

SEQ ID NO: 93606 - DNA, 75 bp, synthetic construct
  source 1..75: mol_type = other DNA
caggcagaaacaccactgtcaccgcaaatggtcgtcagattgtgcaggcaggaggaactgccagtgatacggtta

SEQ ID NO: 93607 - DNA, 75 bp, synthetic construct
  source 1..75: mol_type = other DNA
ctgtcagatgaacacctgaaagatattaccggttatcagattattgatgatagccgtcagtgtgtgcgtgtttac

SEQ ID NO: 93608 - DNA, 75 bp, synthetic construct
  source 1..75: mol_type = other DNA
gcccagatatttatcctaacccaaccgacggtttacctgttggatgtaaggttaacacatcaaatgcgccggagt

SEQ ID NO: 93609 - DNA, 75 bp, synthetic construct
  source 1..75: mol_type = other DNA
aaatttctggccggaccagaaaccgtgctggcactactggatgagatcaacgcattagaggaaacgcgtatcaac

SEQ ID NO: 93610 - DNA, 75 bp, synthetic construct
  source 1..75: mol_type = other DNA
atctgaacttgttttgcgtgcaggtaatggtaatccgaaggggattactggtgctttatggcagcgcacatcggc

SEQ ID NO: 93611 - DNA, 75 bp, synthetic construct
  source 1..75: mol_type = other DNA
cgctggggccgtatatcggcgcacaaatttcgggtgccgacctgacgcgcccgttaagcgataatcagtttgaac

SEQ ID NO: 93612 - DNA, 75 bp, synthetic construct
  source 1..75: mol_type = other DNA
ggacgcagcgttcgagcagggactcgcggtgattgtcgatggattggcgaaaaggaggctcgttgtcaggaacgt

SEQ ID NO: 93613 - DNA, 75 bp, synthetic construct
  source 1..75: mol_type = other DNA
taatggatggcgaaacgctggatagtgagctgcttaacgaactggctcataacccagaaatgcagaaaacctggg

SEQ ID NO: 93614 - DNA, 75 bp, synthetic construct
  source 1..75: mol_type = other DNA
atgaggggaagactaatcaatactttgctgtgcgccttaaagatgacaaaaaatatactaattttaaaaacccat

SEQ ID NO: 93615 - DNA, 75 bp, synthetic construct
  source 1..75: mol_type = other DNA
ctggtgtggcggttgcgctgtctcttgctgctgtcacatcagtcccggcactggctgctgacaaggttgtacagg

SEQ ID NO: 93616 - DNA, 75 bp, synthetic construct
  source 1..75: mol_type = other DNA
gccgggcgctggcagcaaagtatccgggagacacgccgctgatgctggttatctggtccccggaagagattcagg

SEQ ID NO: 93617 - DNA, 75 bp, synthetic construct
  source 1..75: mol_type = other DNA
gccggaaagcagcggcagctatggcttcgtccgtctggagggtgacctgctcagaacagaggttgccggtatgtc

SEQ ID NO: 93618 - DNA, 75 bp, synthetic construct
  source 1..75: mol_type = other DNA
tctcggtcacgataacaacggcggtattgcccgtggggccacgccggaaagcagcggcagctatggcttcgtccg

SEQ ID NO: 93619 - DNA, 75 bp, synthetic construct
  source 1..75: mol_type = other DNA
gaggcatatgtaaagatgactggacagagtatgaccgggaaagataatgttctggcgacaaatattgatggactt

SEQ ID NO: 93620 - DNA, 75 bp, synthetic construct
  source 1..75: mol_type = other DNA
cccaagaaaaagccttcaacatactcgaacgactagagacgctcgctacggaggaggagatatccccggagaaac

SEQ ID NO: 93621 - DNA, 75 bp, synthetic construct
  source 1..75: mol_type = other DNA
ggaaaagcagaaacagtggcttaaccacctggtggccggtgcaaggcagcagcaactgcagatcacggcaccggt

SEQ ID NO: 93622 - DNA, 75 bp, synthetic construct
  source 1..75: mol_type = other DNA
cgattgaaggtccggtgaaggggctgcagagtatcctggtgaacaaaaccccgctgacggacacggacggtaatc

SEQ ID NO: 93623 - DNA, 75 bp, synthetic construct
  source 1..75: mol_type = other DNA
gacggagaaatacgtcgctacgacaggagtatgaacataatctgtcacgagtgccggaagagtgaggttatgcag

SEQ ID NO: 93624 - DNA, 75 bp, synthetic construct
  source 1..75: mol_type = other DNA
gtgccggaagactgaagttatgcagcgcatactcgcattctatcagggaaatgctcgatatctattgaagcgacg

SEQ ID NO: 93625 - DNA, 75 bp, synthetic construct
  source 1..75: mol_type = other DNA
gggcgcggtttgatgttggtgggggaacctggcaccgcaaaatctctcctgtctgaattactggcaaccgctatt

SEQ ID NO: 93626 - DNA, 75 bp, synthetic construct
  source 1..75: mol_type = other DNA
taatgccagcgtgactattcatacgtcaccagcatattctgctaataagccggaagggttaacggacggtacagt

SEQ ID NO: 93627 - DNA, 75 bp, synthetic construct
  source 1..75: mol_type = other DNA
acaggctcgtaaggattggaaaaacgcccgcaaaaaactatccagggcaaaggtgaaaaaaacggttgtggttga

SEQ ID NO: 93628 - DNA, 75 bp, synthetic construct
  source 1..75: mol_type = other DNA
gacggagaaatacgtcgctacgacagtcgtctaaacataatttgtagcgagtgccggaggagtgaagttatgcag

SEQ ID NO: 93629 - DNA, 75 bp, synthetic construct
  source 1..75: mol_type = other DNA
aaacgcgggcgtccggtgagtgtgacggaaggcggtctgacgcgcagcatggggtatgacgctgccgggcgcatc

SEQ ID NO: 93630 - DNA, 75 bp, synthetic construct
  source 1..75: mol_type = other DNA
catcccggcgggtgtgatacggacggacgacgagcgcacccatcactaccattacgacagcctgcaccgcctggt

SEQ ID NO: 93631 - DNA, 75 bp, synthetic construct
  source 1..75: mol_type = other DNA
gaatcaggttaaaacacagttgccaattctgagtgctgtcatggtgaaagaaacctgtagtgcgggttgtgttta

SEQ ID NO: 93632 - DNA, 75 bp, synthetic construct
  source 1..75: mol_type = other DNA
tttgttctgcgggcatgtctacctctttactggtatcaaaaatgcgcgcacaggcagaaaaatatgaagttccgg

SEQ ID NO: 93633 - DNA, 75 bp, synthetic construct
  source 1..75: mol_type = other DNA
tcaatgaaatgagtgctgcgctaaagcgtcgcttcgattttgaaactgtctttccgattatggatttcgcccagg

SEQ ID NO: 93634 - DNA, 75 bp, synthetic construct
  source 1..75: mol_type = other DNA
tagcgcaacaaacgttggtgtgcaaattctggacagaaccggtgctgcgctggcgctggacggtgcgacatttag

SEQ ID NO: 93635 - DNA, 75 bp, synthetic construct
  source 1..75: mol_type = other DNA
cacagcgccagcgcatccagtacggatttggggacgaaaaccacatcgtcgtttgattacggcactaaatccacg

SEQ ID NO: 93636 - DNA, 75 bp, synthetic construct
  source 1..75: mol_type = other DNA
cgacctgacccgtgatgtcgacggcttctactgccgtgaagttgtgaaacgaatgtttgacgtgtggtgccactg

SEQ ID NO: 93637 - DNA, 75 bp, synthetic construct
  source 1..75: mol_type = other DNA
gcgagagaacgacaaaaagcgtctcttgcaagaaggagtgccactcataaagcgtttcatgccgtcattcagctt

SEQ ID NO: 93638 - DNA, 75 bp, synthetic construct
  source 1..75: mol_type = other DNA
caatgggccatgtcattttaaaagagtttcatctcgataatcccagcgattattttatcaactactgccgccgct

SEQ ID NO: 93639 - DNA, 75 bp, synthetic construct
  source 1..75: mol_type = other DNA
gaaggcacttaacagctttaaaattgatattgcccgtctattgagcatcaagattcgcaaactgtctctggaggt

SEQ ID NO: 93640 - DNA, 75 bp, synthetic construct
  source 1..75: mol_type = other DNA
tcaaactggtctggctttgctggcttgatttaatgaccggaaacagccttgaagactggaaagagaacctgaaac

SEQ ID NO: 93641 - DNA, 75 bp, synthetic construct
  source 1..75: mol_type = other DNA
gagcgatatcatggaaagaatcccgttaccgggttaatgccatcggtattaatccggtaacgggatatggcagcg

SEQ ID NO: 93642 - DNA, 75 bp, synthetic construct
  source 1..75: mol_type = other DNA
gaatcagttgattgccggtgaaaccctcttcaccggcaccatcaaccgcacggaagtccatccccgggaagtgat

SEQ ID NO: 93643 - DNA, 75 bp, synthetic construct
  source 1..75: mol_type = other DNA
aaataacagcgtccgtctcagcattcagggcggtcatctcggtcacgataacaacggcggtattgcccgtggagc

SEQ ID NO: 93644 - DNA, 75 bp, synthetic construct
  source 1..75: mol_type = other DNA
gcgtgatcgtcaagcgtaaagaagttgaaactaaatctgctggcggcatcgttctgaccggctctgcagcggcta

SEQ ID NO: 93645 - DNA, 75 bp, synthetic construct
  source 1..75: mol_type = other DNA
ttcgacttctgtgccattgccagaatgggcaacgcagaggatgcccactactgccaggtagttgagagcccagca

SEQ ID NO: 93646 - DNA, 75 bp, synthetic construct
  source 1..75: mol_type = other DNA
tctgctggcttgatgaatttgccgagcctgcgattgcccgcaaaatttattcatcggcttttccgctggtggata

SEQ ID NO: 93647 - DNA, 75 bp, synthetic construct
  source 1..75: mol_type = other DNA
cgcaggatctcgcttgcgcgacctcttccgccagttcaaaactcattcacggtggcctgcgctaccttgagcact

SEQ ID NO: 93648 - DNA, 75 bp, synthetic construct
  source 1..75: mol_type = other DNA
gaagcgttggcagtaaacagtgtggcaccggttgcgccgcgcaaaattgccgttgccgatagcggggataactgg

SEQ ID NO: 93649 - DNA, 75 bp, synthetic construct
  source 1..75: mol_type = other DNA
ccagtgtactactggttttggccattttcggccttttacaactaacatcaggcggtctgttctttaataccttaa

SEQ ID NO: 93650 - DNA, 75 bp, synthetic construct
  source 1..75: mol_type = other DNA
gtcgacccgtatacagcttatggggccggattcgttcaggcgcattgtgagttgctgccgtttgatgggggaatt

SEQ ID NO: 93651 - DNA, 75 bp, synthetic construct
  source 1..75: mol_type = other DNA
tgacaacagatccctgcatgaacatttatacaggtgcctattatctggcaatagcatttaaaaaatggggcgtat

SEQ ID NO: 93652 - DNA, 75 bp, synthetic construct
  source 1..75: mol_type = other DNA
gctgggcggaattagcaggggaacgttttattcgtggcgtaagaaatgggaacagaacggaactccattccccga

SEQ ID NO: 93653 - DNA, 75 bp, synthetic construct
  source 1..75: mol_type = other DNA
ttctgccgatatttggccggaactggaacgcactcagccaggtgcatggggacgtatccaacttactgatgctat

SEQ ID NO: 93654 - DNA, 75 bp, synthetic construct
  source 1..75: mol_type = other DNA
actggtaaaccatgacaaccagtttgtatccggaacagctgatggcgtgactgtcagtaccgggcttgagctggg

SEQ ID NO: 93655 - DNA, 75 bp, synthetic construct
  source 1..75: mol_type = other DNA
gcagaagctctgaccagtatttctcagactacgctgcaaaacttaagcaatctggaaaaaggcgaaacctgcccg

SEQ ID NO: 93656 - DNA, 75 bp, synthetic construct
  source 1..75: mol_type = other DNA
gtggctgcatcgtcgccattacggcgaggtgctaagccccattcgctggtgggggcggatcccgtttatctttta

SEQ ID NO: 93657 - DNA, 75 bp, synthetic construct
  source 1..75: mol_type = other DNA
aaaaatgagtggagccgtgaaaccattaaccgctggattaatggcaagtgtttaccaaaatcgttgacttcagta

SEQ ID NO: 93658 - DNA, 75 bp, synthetic construct
  source 1..75: mol_type = other DNA
tgcctgtgttgcgccccggacagactggcagcagtttgcccgaaaaagggccgaacactgctaccggcactgctg

SEQ ID NO: 93659 - DNA, 75 bp, synthetic construct
  source 1..75: mol_type = other DNA
tgtggcgttaagcctgataactggtgccataactacgctgattactggcgggctatgtgcgccatttttaagcgg

SEQ ID NO: 93660 - DNA, 75 bp, synthetic construct
  source 1..75: mol_type = other DNA
ctcgatagcggtacgcttatctcagtaacgcgatcacgttcacaacaaaaggcgacaaatttagatgcaagtctt

SEQ ID NO: 93661 - DNA, 75 bp, synthetic construct
  source 1..75: mol_type = other DNA
tggagagtctcgaacatgtgtcgatgctgtagatgatgaagttagtgattctaacagttacgaagttattagccg

SEQ ID NO: 93662 - DNA, 75 bp, synthetic construct
  source 1..75: mol_type = other DNA
tgcaatgaaacacatttttcaccggctggataatgaggctttattgttcgtgacgataacacgtttaaaacaaaa

SEQ ID NO: 93663 - DNA, 75 bp, synthetic construct
  source 1..75: mol_type = other DNA
tccagcggccagcgtctgggggaatgtgggcgtgcagctgggtgataatggctacaatgacaccgcagtgatggt

SEQ ID NO: 93664 - DNA, 75 bp, synthetic construct
  source 1..75: mol_type = other DNA
tatctatgcccatatcgacaaggacgggcgctaccgagtcaaccttgactttgaccgcgatacgtggaaaccggg

SEQ ID NO: 93665 - DNA, 75 bp, synthetic construct
  source 1..75: mol_type = other DNA
aacgcgtgaccgcgtattgcaggcaatccagaccctgaattatgttcctgatctttccgcccgtaagatgcgcgc

SEQ ID NO: 93666 - DNA, 75 bp, synthetic construct
  source 1..75: mol_type = other DNA
tttgctttagcggatgctctgaagtgctcacctacgtggctaatgtttggtgacgaagacaaaacaccattgcca

SEQ ID NO: 93667 - DNA, 75 bp, synthetic construct
  source 1..75: mol_type = other DNA
cggatatgccatcgcaactggctgcccggctggatgaggcctgggcggccattaagaccgggctggtcagggggc

SEQ ID NO: 93668 - DNA, 75 bp, synthetic construct
  source 1..75: mol_type = other DNA
taatatttatattgtgggctaattttacctgggctgggtgtcgtactactgcatcattaaatattacagatggta

SEQ ID NO: 93669 - DNA, 75 bp, synthetic construct
  source 1..75: mol_type = other DNA
ccgtgcggcacgagaatggctgattctgaacatggcgggactggagcgtgaagagttccgggtgctgtatctgaa

SEQ ID NO: 93670 - DNA, 75 bp, synthetic construct
  source 1..75: mol_type = other DNA
cgcagagtttaaacgcgaatccgctcaactggttgttgaccagaactacacggtggcagatgccgccaaagctat

SEQ ID NO: 93671 - DNA, 75 bp, synthetic construct
  source 1..75: mol_type = other DNA
cttcatccggcacacgctaaacgcattgaggaaattatcgctgaaaataaaccacccttttctgttttccgcgac

SEQ ID NO: 93672 - DNA, 75 bp, synthetic construct
  source 1..75: mol_type = other DNA
aatgggcgtctgaatggcaatgcctgtattgtggttccgatttcaaccacaaaagatccagctaaacttaataat

SEQ ID NO: 93673 - DNA, 75 bp, synthetic construct
  source 1..75: mol_type = other DNA
tgaagcactacgcaaggcaatgcgtgactcaaaaggactcggcaatttcaagaacctatttttttatgcaccgaa

SEQ ID NO: 93674 - DNA, 75 bp, synthetic construct
  source 1..75: mol_type = other DNA
atgagcgataagcagactgaaaagaccattctactggatacccccatcatgcgtggtaaaacagaaattaccgaa

SEQ ID NO: 93675 - DNA, 75 bp, synthetic construct
  source 1..75: mol_type = other DNA
tctctgtcggcgtggctacgccactcaagtagggcgaatgactaacccactactctcatcctgtgatgaggatga

SEQ ID NO: 93676 - DNA, 75 bp, synthetic construct
  source 1..75: mol_type = other DNA
acgttacaccttgatgaattatcaggagtacttaccgttgagttgcagacatttgatccccaatacggtcagcga

SEQ ID NO: 93677 - DNA, 75 bp, synthetic construct
  source 1..75: mol_type = other DNA
ggaataagatcatccaattagtgaatgaacagggaaccgtgcttgttcaggatctggcgggagtatttgctgcct

SEQ ID NO: 93678 - DNA, 75 bp, synthetic construct
  source 1..75: mol_type = other DNA
caccagatggacttgtaggccgcgacagcaaagggacaatactttcgtgccaatccggtacgtggcggacaatag

SEQ ID NO: 93679 - DNA, 75 bp, synthetic construct
  source 1..75: mol_type = other DNA
gtcaggggcttaatgcgcgtcttggtcacgaacgggccgaacgcggtaatccttacgccatgatgagccttttcg

SEQ ID NO: 93680 - DNA, 75 bp, synthetic construct
  source 1..75: mol_type = other DNA
ggctaccagacccgctatgaatacgaccgcttcggccagatgacggcggttcaccgcgaggaaggtatcagcctt

SEQ ID NO: 93681 - DNA, 75 bp, synthetic construct
  source 1..75: mol_type = other DNA
taatggcgatattattggtattagaatggataaaataaatggagaatcgcttttaaatatttcgtccttgccggc

SEQ ID NO: 93682 - DNA, 75 bp, synthetic construct
  source 1..75: mol_type = other DNA
ccggtggagctggtttccatgttccagacaggcagcgtggccatccgtgcggagcgctggatcaactggcgtcgt

SEQ ID NO: 93683 - DNA, 75 bp, synthetic construct
  source 1..75: mol_type = other DNA
gtgaaaaaattcagacacgatgacgataaaggttttattctgcttgaaattctggcaggcctgatagtaattggt

SEQ ID NO: 93684 - DNA, 75 bp, synthetic construct
  source 1..75: mol_type = other DNA
ggcgtgtgtaggagtggtgttgatgatttggctgtatcaggcgctgaaattcagaaaccgcgcgctggcgctgga

SEQ ID NO: 93685 - DNA, 75 bp, synthetic construct
  source 1..75: mol_type = other DNA
gagaaatgacgcccggcgagcgcagtctcattctgcgggccctgaaaaccctggaccgccatcttcatgaacccg

SEQ ID NO: 93686 - DNA, 75 bp, synthetic construct
  source 1..75: mol_type = other DNA
gccgatatccccaacaaacggtgggtgacgtatgagatgccgatgcttggaagagacggtgaagtcgcctggaaa

SEQ ID NO: 93687 - DNA, 75 bp, synthetic construct
  source 1..75: mol_type = other DNA
ccggaaccatcgtcaacaccggtgcagaaggtggtccggagtctgaaaatgtgtccagcggtcagatggtcggag

SEQ ID NO: 93688 - DNA, 75 bp, synthetic construct
  source 1..75: mol_type = other DNA
tttatcagtatccgttgaatccgatctcaaatatagatccattaggattagaaacactaaaatgcattaagccac

SEQ ID NO: 93689 - DNA, 75 bp, synthetic construct
  source 1..75: mol_type = other DNA
cgctggcgtatgcctggtatcagggtgactcaaccctgtccaatttcaataaaacgctggtcctttccggtaatc

SEQ ID NO: 93690 - DNA, 75 bp, synthetic construct
  source 1..75: mol_type = other DNA
atgacaaactttacgaccagcacgccgcatgacgcattatttaaatcctttctcacacactctgacaccgcgcgg

SEQ ID NO: 93691 - DNA, 75 bp, synthetic construct
  source 1..75: mol_type = other DNA
tcagctatgagcaactaacccgaatagcggaaaaaaatatccgtgaatgtgggctggacaaccagagcgccaggt

SEQ ID NO: 93692 - DNA, 75 bp, synthetic construct
  source 1..75: mol_type = other DNA
actgctggcgatagcagaaaactgcgatcttatcgcccaccagccgccgcagactttctggcaggcgctgcaact

SEQ ID NO: 93693 - DNA, 75 bp, synthetic construct
  source 1..75: mol_type = other DNA
acaacgtgtctacaacgaaaacggcaaacgggttgatgccgttgtgatgatggatggtaacgttggtcagcagta

SEQ ID NO: 93694 - DNA, 75 bp, synthetic construct
  source 1..75: mol_type = other DNA
agaacacccagccgatgctgtcgcacattaacgtcggtacgggcgttgactgcactatccgcgagctggcgcaaa

SEQ ID NO: 93695 - DNA, 75 bp, synthetic construct
  source 1..75: mol_type = other DNA
tgtcattatctgcggtttaagcggctggaatatcacctcgcgcgttctgcgttacctgattgttgaccggacggc

SEQ ID NO: 93696 - DNA, 75 bp, synthetic construct
  source 1..75: mol_type = other DNA
gcctgttgtttataaatgtgacctgcgaggctggtgattgctttgatctggctggcagagattataaaattgacc

SEQ ID NO: 93697 - DNA, 75 bp, synthetic construct
  source 1..75: mol_type = other DNA
gcacaacatgtgcgtgccggtttccgtctgggcagccacaacgatatgacctttggtgaaggcacctcatcccgt

SEQ ID NO: 93698 - DNA, 75 bp, synthetic construct
  source 1..75: mol_type = other DNA
catagaacaaaaggttgattttattaatgatattcaaggttttccttatcctgagatttattcaggcttggcaaa

SEQ ID NO: 93699 - DNA, 75 bp, synthetic construct
  source 1..75: mol_type = other DNA
aactggaaccgatgtgaaatctcgtttagcaccaactcttgcagcagaaatgtatgcatacaaaaaaggtgcaga

SEQ ID NO: 93700 - DNA, 75 bp, synthetic construct
  source 1..75: mol_type = other DNA
cggcggaatccgcggcaacgcgcgccgagacagcagcaaaacgggcagaggatattgcatccgccgtggcgcttg

SEQ ID NO: 93701 - DNA, 75 bp, synthetic construct
  source 1..75: mol_type = other DNA
ctggtgggtacagccttctgttatccgcaccttcagctcccggggagacatgagcatgggtacagccgcagccgg

SEQ ID NO: 93702 - DNA, 75 bp, synthetic construct
  source 1..75: mol_type = other DNA
cactacccgcaagttccgctggtgccgcaggaagaaccggcccgcaacaaggtgctggaaattgtctatgccatc

SEQ ID NO: 93703 - DNA, 75 bp, synthetic construct
  source 1..75: mol_type = other DNA
atgaaaataatctctaaaatgttagtcggtgcgttagcgtttgccgttaccaatgtctatgccgcagaattaatg

SEQ ID NO: 93704 - DNA, 75 bp, synthetic construct
  source 1..75: mol_type = other DNA
actggatttcacctctctgcgtgatgctgtaaccgagttcgaacagcatcgcgacgagcacgcctggaaaatcta

SEQ ID NO: 93705 - DNA, 75 bp, synthetic construct
  source 1..75: mol_type = other DNA
gcggtgtactgctggccgattccggtgccgctgtcagtggtacccggagcgacggaaaggcattcagtatcggag

SEQ ID NO: 93706 - DNA, 75 bp, synthetic construct
  source 1..75: mol_type = other DNA
cagcggctgcgcggacccgcatgttatgccgggagcggcaacgctcgaccagcatggggaacaaattcgccagga

SEQ ID NO: 93707 - DNA, 75 bp, synthetic construct
  source 1..75: mol_type = other DNA
tattgaggggtatctcaatgaagccgacaagctggcagaagaacgttctgtgctgattgagcaggttgaagacgc

SEQ ID NO: 93708 - DNA, 75 bp, synthetic construct
  source 1..75: mol_type = other DNA
gcgagagctgacagaaacagaaccggtgattattttcgaaggtatcgaagcgccggcaacgctgggtttaaaagc

SEQ ID NO: 93709 - DNA, 75 bp, synthetic construct
  source 1..75: mol_type = other DNA
ttttcgagaatgggtgaaaaaatggtttctgttccccatacggtgaatgacttcatttccagaagtgctttgttt

SEQ ID NO: 93710 - DNA, 75 bp, synthetic construct
  source 1..75: mol_type = other DNA
cagagtgatattgaactggcgcgacagctgcatcagcgtggcgtacccaggagagaaatcgccagaaaatttgga

SEQ ID NO: 93711 - DNA, 75 bp, synthetic construct
  source 1..75: mol_type = other DNA
ctgctaagaagggctcacagtaataatgccgatgtcagtctttaccaccacttagtttgccgtttaaccagattg

SEQ ID NO: 93712 - DNA, 75 bp, synthetic construct
  source 1..75: mol_type = other DNA
ggcttaggtattccggcaataacgaggagtaaaaacattgctgacagttggttatcaaagggttggtatgttcag

SEQ ID NO: 93713 - DNA, 75 bp, synthetic construct
  source 1..75: mol_type = other DNA
attgataacagtggctttaccacgcagcttgagcttgaagcaaaaatcccggaatggatagcagaaacagagtga

SEQ ID NO: 93714 - DNA, 75 bp, synthetic construct
  source 1..75: mol_type = other DNA
tgcttcaaccaatattatggtgccgggagtgcagaaaaaatatatggcgataatggcgatattattggtattaga

SEQ ID NO: 93715 - DNA, 75 bp, synthetic construct
  source 1..75: mol_type = other DNA
ccgtactttatcgagaaaaaactgtacccgaacgtcgatttctactctggtatcatcctgaaagcgatgggtatt

SEQ ID NO: 93716 - DNA, 75 bp, synthetic construct
  source 1..75: mol_type = other DNA
tttgatggacagaacaacgcagagaacaacgctcgttatatcgcagctttcaaccctgaagtagtgcaggcgctg

SEQ ID NO: 93717 - DNA, 75 bp, synthetic construct
  source 1..75: mol_type = other DNA
acggaactggctggggaatgtctctgatgttttttggaattcttatcgtcggatacggtctgctttattggtggc

SEQ ID NO: 93718 - DNA, 75 bp, synthetic construct
  source 1..75: mol_type = other DNA
cagttggaaatttcgactcgtgctggccagtaccatccggttgagcttatcgaatgcgaaacgttcgaagctgtg

SEQ ID NO: 93719 - DNA, 75 bp, synthetic construct
  source 1..75: mol_type = other DNA
cagccgggcacatgccgggatgggattacatcagcccaatggtaaggcattcaggaaataccctggatcgaaaaa

SEQ ID NO: 93720 - DNA, 75 bp, synthetic construct
  source 1..75: mol_type = other DNA
gtttgtgcagctggccactctgaagcagcggacagaaaaagccgccaggacggcaggaagaatgcccgccggtca

SEQ ID NO: 93721 - DNA, 75 bp, synthetic construct
  source 1..75: mol_type = other DNA
tatcagcaaaaatggaacggcaacaggcgcattcggagcctggacagataaaccgggagactacggacttacctg

SEQ ID NO: 93722 - DNA, 75 bp, synthetic construct
  source 1..75: mol_type = other DNA
attctcttttgtggcaaagtgctctcaactcaaaaatttgaataattactcagtgatgctttgtggaaaagtgtc

SEQ ID NO: 93723 - DNA, 75 bp, synthetic construct
  source 1..75: mol_type = other DNA
atgccatgtttgatacagggcgttacaggcgtaaaaaaatccggtaccgagatgaagtgaccggaaaaatgatta

SEQ ID NO: 93724 - DNA, 75 bp, synthetic construct
  source 1..75: mol_type = other DNA
caggccataatggcatggtaggttcggctcttgttcgtaatcttgaaacgagaaatgatgttgaacttattttaa

SEQ ID NO: 93725 - DNA, 75 bp, synthetic construct
  source 1..75: mol_type = other DNA
catcatactgacgtcaaacaaagggttcgcagactggggagaaatgttcggagatcacgtgctggcaacagcgat

SEQ ID NO: 93726 - DNA, 75 bp, synthetic construct
  source 1..75: mol_type = other DNA
gggcagttgatggcgtggcttgaaaacgcgcagttcgatacgggaacgtttaaacgtaaaaagcctcgagtgctg

SEQ ID NO: 93727 - DNA, 75 bp, synthetic construct
  source 1..75: mol_type = other DNA
tgagatgcgcagcatcttcctgcgactggatagcggggctttattgcaggttacgcgatcacgttcacaacaaaa

SEQ ID NO: 93728 - DNA, 75 bp, synthetic construct
  source 1..75: mol_type = other DNA
atgaatgcaaaagtttgggttctgggcgacgcggtggtggacctgctgccggagagcgaagggcgcctgctgcag

SEQ ID NO: 93729 - DNA, 75 bp, synthetic construct
  source 1..75: mol_type = other DNA
tgggatgttcatggaattctttaaccagaaacctgacttcgcctgataatcgtgttttatcctctgtaagggatg

SEQ ID NO: 93730 - DNA, 75 bp, synthetic construct
  source 1..75: mol_type = other DNA
aggagggtatgttagcgatgaaggggaaacatacattaagtatcttgcttcatcattaactatggattacaagat

SEQ ID NO: 93731 - DNA, 75 bp, synthetic construct
  source 1..75: mol_type = other DNA
cttcaacagccacaacgaaggctggcgaagccgctgtacaggccagtgcagcagcgaggtctgcttccgcagcga

SEQ ID NO: 93732 - DNA, 75 bp, synthetic construct
  source 1..75: mol_type = other DNA
atgaataaccagtatttacagtttgtgcgtgagcagctcacgatcgccaccgctgatttgagtggagcaacaaaa

SEQ ID NO: 93733 - DNA, 75 bp, synthetic construct
  source 1..75: mol_type = other DNA
aggcgatgaagagttaggtggcatcagtatttatgccttcaacgagaatcgtcgtctgcaatccgttcgctatgc

SEQ ID NO: 93734 - DNA, 75 bp, synthetic construct
  source 1..75: mol_type = other DNA
cagccgccgccgcgctcactacgctgatgcacgcgcttattgatatttctgttattgctgacagggcgcataagc

SEQ ID NO: 93735 - DNA, 75 bp, synthetic construct
  source 1..75: mol_type = other DNA
tgcaaactgtcggcgcgtaaacaaaggcaggtgcaggattttattggggtgattagtagcaaaacgccacgctaa

SEQ ID NO: 93736 - DNA, 75 bp, synthetic construct
  source 1..75: mol_type = other DNA
accggttggccactgaagaagaaatttcaggcaggaagagcaccaatcagatttttaacgagtgtcggcaaagcc

SEQ ID NO: 93737 - DNA, 75 bp, synthetic construct
  source 1..75: mol_type = other DNA
atggacaaaagccccaggcgatatttctatcaacctgaggcttacgttcgaacccaaacaattcgaatgttagtc

SEQ ID NO: 93738 - DNA, 75 bp, synthetic construct
  source 1..75: mol_type = other DNA
ccaatggcgcgatctaccctattgttgtcgcccaggcgctgcgtcccttcccacacgcaactggtcgcgccgcag

SEQ ID NO: 93739 - DNA, 75 bp, synthetic construct
  source 1..75: mol_type = other DNA
tgcaagctgtcggcgcgtaaacaaaagcaggtgcaggattttattggggtgattagtagcaaaacgccacgctaa

SEQ ID NO: 93740 - DNA, 75 bp, synthetic construct
  source 1..75: mol_type = other DNA
aaaaagattatctgcaacatcaaaaaaagttgcttgccgtattcggtaaggtaccagcggattccataaaaccag

SEQ ID NO: 93741 - DNA, 75 bp, synthetic construct
  source 1..75: mol_type = other DNA
gttgcgtcattctcgctacaactggcagaagggcgggcagatctctacacggaaatgccagtgaaagtcagtggc

SEQ ID NO: 93742 - DNA, 75 bp, synthetic construct
  source 1..75: mol_type = other DNA
ttacttcaggttcgtctgccagaacggatgcgtctgtggtcagtctctgggggaagtacgtgttccgcaccgggg

SEQ ID NO: 93743 - DNA, 75 bp, synthetic construct
  source 1..75: mol_type = other DNA
gacgatccagaaacgaatcgagggaaaaaaacaacgacgggaacgcaatcaccggctctttctcgcggctgggct

SEQ ID NO: 93744 - DNA, 75 bp, synthetic construct
  source 1..75: mol_type = other DNA
ctggaccgccatcttcatgagtccggcgtggccttcacctccacgcatgcggcacgggaatggctgattctgaac

SEQ ID NO: 93745 - DNA, 75 bp, synthetic construct
  source 1..75: mol_type = other DNA
tgatgcgctttcgtcaatgccagaacttattagagcggcttttttcttactttccacgagagaatataaatcaac

SEQ ID NO: 93746 - DNA, 75 bp, synthetic construct
  source 1..75: mol_type = other DNA
ccggatctgcgtcgtgaactgatgcgccagcgcggctatttcgcttacgccactaaccactaccagacgcatcag

SEQ ID NO: 93747 - DNA, 75 bp, synthetic construct
  source 1..75: mol_type = other DNA
tacaaaatcaaacttcgagcctctggctttcgtctggtctatcaggtgattgatgatcaattaattatcgctgtt

SEQ ID NO: 93748 - DNA, 75 bp, synthetic construct
  source 1..75: mol_type = other DNA
tccgggttatgctgaagaaacttttgatacgcacttcatgattggcggcatgagaggagaaaaagtttccgaata

SEQ ID NO: 93749 - DNA, 75 bp, synthetic construct
  source 1..75: mol_type = other DNA
gtaacgcctacctggagaaacgcacgaatcgattcggtgaagttatcgcccttgagcctgcgctggcaaaataca

SEQ ID NO: 93750 - DNA, 75 bp, synthetic construct
  source 1..75: mol_type = other DNA
tatcagaatgtcctgacgcgggagccaactaacgccgatgccattcttggtctgacggaagtggatattgctgcc

SEQ ID NO: 93751 - DNA, 75 bp, synthetic construct
  source 1..75: mol_type = other DNA
ctattcgttagtcttgccctatccgcttatctttttggtggtatggctgctgatgttgctggcgtggtatcttgt

SEQ ID NO: 93752 - DNA, 75 bp, synthetic construct
  source 1..75: mol_type = other DNA
aacatcagagacgaatgcaggtaacagcgcgaaagcggcagcttcttcaaaaacagccgcacaaaacgcagcaac

SEQ ID NO: 93753 - DNA, 75 bp, synthetic construct
  source 1..75: mol_type = other DNA
cgtaagattgtctccgggcatgacagccgtaactatgctttgttcggtcaggaagcgattggctccacgtggtcg

SEQ ID NO: 93754 - DNA, 75 bp, synthetic construct
  source 1..75: mol_type = other DNA
aaatgtagtggagaaagttgtcgaaggggcttacgaggtggtgggcgtgtttgaccggatagaggagaagcgtga

SEQ ID NO: 93755 - DNA, 75 bp, synthetic construct
  source 1..75: mol_type = other DNA
atgatgcgcttaaagaatggctgaaactggataagaccattcaacggcagtttgcgaaaaaactaaaaaaatgca

SEQ ID NO: 93756 - DNA, 75 bp, synthetic construct
  source 1..75: mol_type = other DNA
cagagacagatcattgacctgctcgacaacgaggccagactcacagaacaggaacgcaaacttctccatgtactg

SEQ ID NO: 93757 - DNA, 75 bp, synthetic construct
  source 1..75: mol_type = other DNA
ggataaccgcatcgcggaagatgcgcactatgtctaccgctacgatgaatacggcaggctggcggagaagacgga

SEQ ID NO: 93758 - DNA, 75 bp, synthetic construct
  source 1..75: mol_type = other DNA
ccggtcgtgtagaacgcggtatcatcaaagttggcgaagaagttgaaatcgttggtatcaaagagactcagaagt

SEQ ID NO: 93759 - DNA, 75 bp, synthetic construct
  source 1..75: mol_type = other DNA
gataaccggacaacatgtccctgaaatcattctgctcaactcccatgacggtacctccagctaccagatgctgcc

SEQ ID NO: 93760 - DNA, 75 bp, synthetic construct
  source 1..75: mol_type = other DNA
tgaagaaacggatcggattcatcaggaagctcggagaacagaccgcacgacagagacagattattgacctgctcg

SEQ ID NO: 93761 - DNA, 75 bp, synthetic construct
  source 1..75: mol_type = other DNA
ctgtcggaagtgggtatctggttccgctttgccaccgacgcccggctgaaaattgaggttatcgagttttacgac

SEQ ID NO: 93762 - DNA, 75 bp, synthetic construct
  source 1..75: mol_type = other DNA
ttctgagtggatcaacgccgctgcggatccggttgtgagccgggaatttcgcttgctggaaggaattattgaaca

SEQ ID NO: 93763 - DNA, 75 bp, synthetic construct
  source 1..75: mol_type = other DNA
gcttgaacgggatagcattgtgaatggtcgaaatgttagctcgttaattggcatcaacgtcatagaccgggcaac

SEQ ID NO: 93764 - DNA, 75 bp, synthetic construct
  source 1..75: mol_type = other DNA
gcacaggccatgcgtgccgctcaggcgaagtgggataaactgcaacggggcgttgcggagttctccatcagcctg

SEQ ID NO: 93765 - DNA, 75 bp, synthetic construct
  source 1..75: mol_type = other DNA
atgcagcagctttcctttctgcctggagagatgacgcccggcgagcgcagtctcattctgcgggccctgaaaacc

SEQ ID NO: 93766 - DNA, 75 bp, synthetic construct
  source 1..75: mol_type = other DNA
ctgaagcgcagccgttttacgttaactctccgtatggcattacgcttgcccacaacggcaatctgaccaacgctc

SEQ ID NO: 93767 - DNA, 75 bp, synthetic construct
  source 1..75: mol_type = other DNA
tggttttggcgtgcattttttcgagcaatccacagcaggcaagaccacaacgcagagcatcgcgtcgagcttgtg

SEQ ID NO: 93768 - DNA, 75 bp, synthetic construct
  source 1..75: mol_type = other DNA
attgtttacgatgcaaataatattattgtcgccatcaccaaagatgcctccacgcttaaccctgaaggttatagc

SEQ ID NO: 93769 - DNA, 75 bp, synthetic construct
  source 1..75: mol_type = other DNA
cgttgatgcaaggaactttatatggtgatccatcactcagggttgataccattcggccaatccatagtcctttag

SEQ ID NO: 93770 - DNA, 75 bp, synthetic construct
  source 1..75: mol_type = other DNA
gggcaaaagcgctagcggtaaaccactgccggtgattactatcacacgtaaggacggcgacagtcaccgctttac

SEQ ID NO: 93771 - DNA, 75 bp, synthetic construct
  source 1..75: mol_type = other DNA
gggaaatacagtctaaatccagatgatcacaaacactccctcgaagagtattgtgatgacttaagaaagtccatt

SEQ ID NO: 93772 - DNA, 75 bp, synthetic construct
  source 1..75: mol_type = other DNA
gggcgtttcacacatgattcccttcgtggtatcgggcggtattttgctggcggtttccgtcatgttgtatggcaa

SEQ ID NO: 93773 - DNA, 75 bp, synthetic construct
  source 1..75: mol_type = other DNA
taagtatcgtttgtttgagcaagaaaacacttcaacgatacctgatgtatacattggtaaacactgccagatagg

SEQ ID NO: 93774 - DNA, 75 bp, synthetic construct
  source 1..75: mol_type = other DNA
ccatcggtgtgttgatcactgacgaatggggtagttacactagagagttaccgaaggagaagcatctgactggta

SEQ ID NO: 93775 - DNA, 75 bp, synthetic construct
  source 1..75: mol_type = other DNA
ttgaacgaggtcggcgtagacggtctgacgacacgcaaactggcggaacggttgggggttcagcagccggcgctt

SEQ ID NO: 93776 - DNA, 75 bp, synthetic construct
  source 1..75: mol_type = other DNA
ttccctatatcttcctgctgtcccgtattgcgcattacctgaagatcattcagcgggaaaatatcggtaccacca

SEQ ID NO: 93777 - DNA, 75 bp, synthetic construct
  source 1..75: mol_type = other DNA
tccattgtttgccgatctagccagctgcggttttcccagccctgccgctgactatgtcgagtccgatctggatct

SEQ ID NO: 93778 - DNA, 75 bp, synthetic construct
  source 1..75: mol_type = other DNA
gttggggccgtgcttgaggagcaggccggcgacagcgatgccggcgagcgcggcggcaccgttgaacaggctccg

SEQ ID NO: 93779 - DNA, 75 bp, synthetic construct
  source 1..75: mol_type = other DNA
cagtgtggggtatggctctgcctgagccggaatttacacctgctgagcttgccgcattccgggattactggatgg

SEQ ID NO: 93780 - DNA, 75 bp, synthetic construct
  source 1..75: mol_type = other DNA
gagtaatctgctgttttctctcggtgccagtatgacgcttggcggtgttgcacagatgctggcaccgaaagccag

SEQ ID NO: 93781 - DNA, 75 bp, synthetic construct
  source 1..75: mol_type = other DNA
aatggtgcagtgatccacatagtaccgcgtctggtgggagctaaaagtggcggtgtgtttcaggcggtgctgggg

SEQ ID NO: 93782 - DNA, 75 bp, synthetic construct
  source 1..75: mol_type = other DNA
ccggcaaagctcactattgtcattcacaaagataaaattgataaaataaatttattggacattaaatcagcaaga

SEQ ID NO: 93783 - DNA, 75 bp, synthetic construct
  source 1..75: mol_type = other DNA
tgatgttaatcgtcatctgtgtgacgattctgtgttttgtctggatggtgagggattcgctttgcgtactccggc

SEQ ID NO: 93784 - DNA, 75 bp, synthetic construct
  source 1..75: mol_type = other DNA
atgtcaatcgaatctctcaatgcgttctcaatggattttttctcactgaaaggtaaaaccgcaattgttaccggt

SEQ ID NO: 93785 - DNA, 75 bp, synthetic construct
  source 1..75: mol_type = other DNA
ccggatccgcaccgttaatctgattaaatcggcgcgtgttggttacaccaaaatgctgttgggggtggaggctta

SEQ ID NO: 93786 - DNA, 75 bp, synthetic construct
  source 1..75: mol_type = other DNA
ccacacccgtgccattcacagcatcgacacggacattaagctcaatcgcgcattgtgggtgatggcagaaacgct

SEQ ID NO: 93787 - DNA, 75 bp, synthetic construct
  source 1..75: mol_type = other DNA
agaggaagcctttctggtggataaaatcatcattatgggacgtcccgatgaggaagagacgctgttacgtgtgga

SEQ ID NO: 93788 - DNA, 75 bp, synthetic construct
  source 1..75: mol_type = other DNA
ggcgattgtttttaaagacgataatagggttagtttttatgaggatgttcaggagggggtggaggagtatagaaa

SEQ ID NO: 93789 - DNA, 75 bp, synthetic construct
  source 1..75: mol_type = other DNA
cgcgccagactttcaacggcgggatcaccggggcgctgacagggaacgccgacaccgcgacgaaattgaaaacag

SEQ ID NO: 93790 - DNA, 75 bp, synthetic construct
  source 1..75: mol_type = other DNA
agggaaggtggctggcacctgaagcgatgcagacatctggcaacgggcgaagatcatttctggtttatcgcattc

SEQ ID NO: 93791 - DNA, 75 bp, synthetic construct
  source 1..75: mol_type = other DNA
atggataaaaacaccactgcttactggaatctgtcacttgataccgaatgcccaaaatgcggtcacaatttcgat

SEQ ID NO: 93792 - DNA, 75 bp, synthetic construct
  source 1..75: mol_type = other DNA
tttcttatggtatcccatagtatgaacacacttaaagaatattgcgatttaggaataacaattcatcgtaatgga

SEQ ID NO: 93793 - DNA, 75 bp, synthetic construct
  source 1..75: mol_type = other DNA
ttgttaaagatattgaggtttttggcgtatccttgtctctgttgatttccagagcgaatgagaagtctgttacaa

SEQ ID NO: 93794 - DNA, 75 bp, synthetic construct
  source 1..75: mol_type = other DNA
aatcgtacaaaacatcaaacggaaggcattatgtatttaagaaccttagtattgatttccctgaaaaaaaaagca

SEQ ID NO: 93795 - DNA, 75 bp, synthetic construct
  source 1..75: mol_type = other DNA
tcgccgcaacgccgaaagcggtaaaggcagcatatgaccttgctaacgggaaatacactgcacaggatgccacaa

SEQ ID NO: 93796 - DNA, 75 bp, synthetic construct
  source 1..75: mol_type = other DNA
tcgtgttgttatcgctggcggtggcggggctgtttctggcgaagcatgaaaacgccagactgcgcgcctcactgg

SEQ ID NO: 93797 - DNA, 75 bp, synthetic construct
  source 1..75: mol_type = other DNA
aggaataacaattcatcgtaatggacaaatttatattcatgacaatgtttcaaacgcaataaaatattatttgtc

SEQ ID NO: 93798 - DNA, 75 bp, synthetic construct
  source 1..75: mol_type = other DNA
ggcgctaaatatgaatcaggagatgatatctatgttgttatgagtgaatttgtaacggctggagaaaacaagcct

SEQ ID NO: 93799 - DNA, 75 bp, synthetic construct
  source 1..75: mol_type = other DNA
atgattaagattgagaatttgacgaagtcctatcgcacgccaacaggtcgacactatgtgtttaaggatttaaac

SEQ ID NO: 93800 - DNA, 75 bp, synthetic construct
  source 1..75: mol_type = other DNA
gcgactgattcgctatgcgatgggtgattactctttggataatcttgccaatggcgaatggcgagaagtgacaga

SEQ ID NO: 93801 - DNA, 75 bp, synthetic construct
  source 1..75: mol_type = other DNA
caggtacaaccgagcgttgatgcatcatattcagcagctaaaggaaatgttggccatggtatgggggccatttct

SEQ ID NO: 93802 - DNA, 75 bp, synthetic construct
  source 1..75: mol_type = other DNA
tgttgattattccattttttgggcaggcgaaatgtacccctaagggaacttggacagcaactcaaccaattacac

SEQ ID NO: 93803 - DNA, 75 bp, synthetic construct
  source 1..75: mol_type = other DNA
tttgcactgatgagcacagagatacagggctaaatattcttgatattgccgctaactatgctgatttcgtgacag

SEQ ID NO: 93804 - DNA, 75 bp, synthetic construct
  source 1..75: mol_type = other DNA
catcatggctgcgtgatccatcagtctgaactggaccagagcaacgggcggtggatctgtgaaaacacgggcatg

SEQ ID NO: 93805 - DNA, 75 bp, synthetic construct
  source 1..75: mol_type = other DNA
aagaccggcatacctcccgcagtgaacggtattcgtacatccccaccatcacagtgctggaaagcctgcagcggg

SEQ ID NO: 93806 - DNA, 75 bp, synthetic construct
  source 1..75: mol_type = other DNA
gcaacggtttcggtcaaggccgggaaattgttattcctgaaagccggtagcgcgatgacggccagtggtaaggcc

SEQ ID NO: 93807 - DNA, 75 bp, synthetic construct
  source 1..75: mol_type = other DNA
gtactcgcctaacggcaaaaaagacgggcttcagattatcccgttatcagaagtcgcagcgaaggatgagtttct

SEQ ID NO: 93808 - DNA, 75 bp, synthetic construct
  source 1..75: mol_type = other DNA
gcccgtcttaatgagccgctggcaaatggtgccgtgatccacattgtgccgcgtctggcgggtgccaaaagtggc

SEQ ID NO: 93809 - DNA, 75 bp, synthetic construct
  source 1..75: mol_type = other DNA
attggcatttcgtcggtaacccctggcgcactggtgaccgcgtcgcaggatacagcgttaacgactattcgtggt

SEQ ID NO: 93810 - DNA, 75 bp, synthetic construct
  source 1..75: mol_type = other DNA
tgtcagaagtcgcggcgaaggatgaatttctgaatatcaaaaatgtcagccgcgacgacatgatggctgcgcacc

SEQ ID NO: 93811 - DNA, 75 bp, synthetic construct
  source 1..75: mol_type = other DNA
ccaataaacattattaccttcctaaagagtcgtcttatacccccgggcggtgggaaacactgccgtttcaggttg

SEQ ID NO: 93812 - DNA, 75 bp, synthetic construct
  source 1..75: mol_type = other DNA
atacattttacggtgaaggttcgacgagtcatgcaatccatacacgaactcaattagagaattacattcagacaa

SEQ ID NO: 93813 - DNA, 75 bp, synthetic construct
  source 1..75: mol_type = other DNA
tgaccgtagctttatggcgattgctgccgcagttgacggcttgggagttgtgcttgaatcaaaactactggctga

SEQ ID NO: 93814 - DNA, 75 bp, synthetic construct
  source 1..75: mol_type = other DNA
cggctaaagaaaccagaggatctctatgcgttgacattgattcagtgcgatgtgcagttgtaccagtggaaagga

SEQ ID NO: 93815 - DNA, 75 bp, synthetic construct
  source 1..75: mol_type = other DNA
atgcaaaatattattcttttatttatatatttattacttatagtcgttaaccatttccgctacaaattccttttg

SEQ ID NO: 93816 - DNA, 75 bp, synthetic construct
  source 1..75: mol_type = other DNA
gtttatgtactcgcctaacggcaaaaaagacgggcttcagattatcccgttgtcagaggtcgcggcgaaggatga

SEQ ID NO: 93817 - DNA, 75 bp, synthetic construct
  source 1..75: mol_type = other DNA
gcgcatacccatagtttaagtggcagcacgaatgcagctggtaatcacagccatagagatggccgtcgatttaac

SEQ ID NO: 93818 - DNA, 75 bp, synthetic construct
  source 1..75: mol_type = other DNA
ttcttaatggtttcccataatttaaatgtcctgagtgaatattgtgatgcagccttattatttacaaaagataag

SEQ ID NO: 93819 - DNA, 75 bp, synthetic construct
  source 1..75: mol_type = other DNA
gtagccgaacgccgggtagaagcaacgaaagaggccagcaatgtacagcagactgttaaccacttgcctgataac

SEQ ID NO: 93820 - DNA, 75 bp, synthetic construct
  source 1..75: mol_type = other DNA
ttaataatggtgtcacatagtgaacgagctttaaaggagtattgtgatgttgctatttatcttaacaaagagggg

SEQ ID NO: 93821 - DNA, 75 bp, synthetic construct
  source 1..75: mol_type = other DNA
ggagaaggaaactgtccggccaacccttgaagaactggcagcaaaactgtccggaggagtgaatggtaactattg

SEQ ID NO: 93822 - DNA, 75 bp, synthetic construct
  source 1..75: mol_type = other DNA
gccgcgaacgaatctgcacattttatgcggttttatgtgccatgccctcattgtggtgaagcccagtatctgaag

SEQ ID NO: 93823 - DNA, 75 bp, synthetic construct
  source 1..75: mol_type = other DNA
catcatggctgcgtgatccatcagtctgaactggaccagagtaacgggcggtggatctgtgaaaacacgggcatg

SEQ ID NO: 93824 - DNA, 75 bp, synthetic construct
  source 1..75: mol_type = other DNA
ggcacgggagtggctgattctgaacatggcgggactggagcgggaagagttccgggtgctgtatctgaacaacca

SEQ ID NO: 93825 - DNA, 75 bp, synthetic construct
  source 1..75: mol_type = other DNA
gatgagcaggttgtaaaggcgatggcaaaatggcgatttgagaaggacaggccgcgtaaaggcgtgaagaaaacg

SEQ ID NO: 93826 - DNA, 75 bp, synthetic construct
  source 1..75: mol_type = other DNA
cctgaagccattatgcccctgacccgggcggcggatggctcgctgggtgtgcgagcggtgggcagtatgaacggc

SEQ ID NO: 93827 - DNA, 75 bp, synthetic construct
  source 1..75: mol_type = other DNA
ctggggtaaattcggtgccattattgtggtcggtgtgatcctgattgtggcggtcgtctggctggccggaaaagc

SEQ ID NO: 93828 - DNA, 75 bp, synthetic construct
  source 1..75: mol_type = other DNA
aaaacggtaaggctgacggcgttgttctggagtccggcggtcgcctggatgtactggaaggccattcagcgcaga

SEQ ID NO: 93829 - DNA, 75 bp, synthetic construct
  source 1..75: mol_type = other DNA
gaggacgtactgccagcgccgctgccgccgtaccgggtgcttaccgggctggcagaccgtttcgggcggacgctg

SEQ ID NO: 93830 - DNA, 75 bp, synthetic construct
  source 1..75: mol_type = other DNA
ttcatcaatgccctgaaagcccgaatcgacgcttaccagaagcgtaagcgccgtgaaggtaaacgcgtacatacc

SEQ ID NO: 93831 - DNA, 75 bp, synthetic construct
  source 1..75: mol_type = other DNA
caccttccgttttcctgataaccccgacattttttcggaagaagaggcgcgtcagatcgtggcggaagagctggt

SEQ ID NO: 93832 - DNA, 75 bp, synthetic construct
  source 1..75: mol_type = other DNA
tacagggatgaaatctctggtgccgaccagcagctcatctgtaattcaaaagatagccgattttgcgaggggata

SEQ ID NO: 93833 - DNA, 75 bp, synthetic construct
  source 1..75: mol_type = other DNA
gcgcgaacacccatcaatcaaactttgctctttgacgcacatatgtgatgagttagccgcccagcttcgcaaagg

SEQ ID NO: 93834 - DNA, 75 bp, synthetic construct
  source 1..75: mol_type = other DNA
caaaaagcttaatcctcacgagcatcctgttctgcactctgaccagggatggcagtatcgtatgagaagatatca

SEQ ID NO: 93835 - DNA, 75 bp, synthetic construct
  source 1..75: mol_type = other DNA
cggcaaagtaatcctcatgccataaccgctggacttaactatacccccttcccgctgatgaccttcagcgcgtag

SEQ ID NO: 93836 - DNA, 75 bp, synthetic construct
  source 1..75: mol_type = other DNA
cacaggcggcactgacttaccgttatggtgacgaacatcagcccgtcaccaccgccgacattctgacgccacgac

SEQ ID NO: 93837 - DNA, 75 bp, synthetic construct
  source 1..75: mol_type = other DNA
gtgaatttcagctctgagctgcttaacaaaggcaacaaaactccggcattcagcatcagtattgagggcagggat

SEQ ID NO: 93838 - DNA, 75 bp, synthetic construct
  source 1..75: mol_type = other DNA
ccggtgaactggatgaagacccgggccggattgttcgcagccttccggcagcctgggtgacgttcggcggcatcg

SEQ ID NO: 93839 - DNA, 75 bp, synthetic construct
  source 1..75: mol_type = other DNA
acactgtccgcagtgcggacaacccataaccaaccagaccggatggaatatacatcaccggatcaggaaagttat

SEQ ID NO: 93840 - DNA, 75 bp, synthetic construct
  source 1..75: mol_type = other DNA
cgggcaatccaaaaacaaaagaacagtacctgttaactaaaaactccggcgttgtctggttattcgctgaagatg

SEQ ID NO: 93841 - DNA, 75 bp, synthetic construct
  source 1..75: mol_type = other DNA
gagtggcgcagatgctggcaccgaaagccaggacgcccacggcagccagtacagataacggcaaacagaacacct

SEQ ID NO: 93842 - DNA, 75 bp, synthetic construct
  source 1..75: mol_type = other DNA
gggggtgacggccagcggtaaaaaaatcccgcagattaccatcacccgcagcgacggtgaccgtcatcattttgc

SEQ ID NO: 93843 - DNA, 75 bp, synthetic construct
  source 1..75: mol_type = other DNA
gtgaggtttgatattggtgctgatggtactgtcacccgaattgagtttattcgttcagagccgcaccatctgttt

SEQ ID NO: 93844 - DNA, 75 bp, synthetic construct
  source 1..75: mol_type = other DNA
cgacgagcgtgatttaccgattaaagaccttgccggatacagaaaggggagtatcagaaacgaagatgacgagtt

SEQ ID NO: 93845 - DNA, 75 bp, synthetic construct
  source 1..75: mol_type = other DNA
aaagagaaacacctgcgcgcactggagcacccgaaagcgaaaccggtcaggcagaagaaagcgcctaaagtaccg

SEQ ID NO: 93846 - DNA, 75 bp, synthetic construct
  source 1..75: mol_type = other DNA
ttgttacatataatccagaaattaaaatacttctcagtgcattggagtcatcgacaaaacagttagactatattt

SEQ ID NO: 93847 - DNA, 75 bp, synthetic construct
  source 1..75: mol_type = other DNA
tactgacggcagtgtgtcgagcgttgaagctgtagcagaacccgatgaacctgaagaaatgtggacggtgaaacg

SEQ ID NO: 93848 - DNA, 75 bp, synthetic construct
  source 1..75: mol_type = other DNA
cataactttaatgcctgggtgaaggagttcggcacgggtaacaaggaacacaggcagattattgaacaggcagag

SEQ ID NO: 93849 - DNA, 75 bp, synthetic construct
  source 1..75: mol_type = other DNA
ggaagttcgtgacgcgcagctgcgtgagcaggttgtacaaacgctgaataacagccgggagcgccagcttgcttt

SEQ ID NO: 93850 - DNA, 75 bp, synthetic construct
  source 1..75: mol_type = other DNA
tcaccgtgtgggggaaagattcgccgtactggaggccgcgcttgtgctttccggtcatgttacaggctgggatgt

SEQ ID NO: 93851 - DNA, 75 bp, synthetic construct
  source 1..75: mol_type = other DNA
gtttaacggttccgggaaattacagggggcgaaggacggcggcaacagggagataaaacactggcgcacggtggc

SEQ ID NO: 93852 - DNA, 75 bp, synthetic construct
  source 1..75: mol_type = other DNA
gacggagaaatacgccgctacaacaggcgtctgaacataatttgccgtgagtgccggaagagtgaggttatgcag

SEQ ID NO: 93853 - DNA, 75 bp, synthetic construct
  source 1..75: mol_type = other DNA
gcgtagccgttgcccgtccggttgtgttgctgtattcgccgcccgtattcgtcaggaggtgtgccatgtgcaata

SEQ ID NO: 93854 - DNA, 75 bp, synthetic construct
  source 1..75: mol_type = other DNA
tacaacacatgtcagttatcaatacagcaccaccaatctgcttgccatacatcatgcactgctgacatccggcct

SEQ ID NO: 93855 - DNA, 75 bp, synthetic construct
  source 1..75: mol_type = other DNA
ctggttacgggttattcccatctgaacaggctcgtaaggactggcaaaacgcccgcaaaaaactatcgagggcaa

SEQ ID NO: 93856 - DNA, 75 bp, synthetic construct
  source 1..75: mol_type = other DNA
ccaagaaagaaaacccgcatcgagccaaagaaagaaaaagttaaagtcagatgtgtttatgctggaggaatgttt

SEQ ID NO: 93857 - DNA, 75 bp, synthetic construct
  source 1..75: mol_type = other DNA
gccaacgatgagcaacccgatcccaccatggagcaagcctttattcagttgatccacgactgggataaggagcat

SEQ ID NO: 93858 - DNA, 75 bp, synthetic construct
  source 1..75: mol_type = other DNA
atgatttcagccgcgcggtactggaggcagaagttcagatgtacggcgagctgcgcgatgagctgcgggtgacgg

SEQ ID NO: 93859 - DNA, 75 bp, synthetic construct
  source 1..75: mol_type = other DNA
ttctggctgtggtgctttgtgcgggtacggtacaggctgacggaaactttttgtccctgccgaaagtgaatgaca

SEQ ID NO: 93860 - DNA, 75 bp, synthetic construct
  source 1..75: mol_type = other DNA
atgccgccacgcttccctcaaaagaggcggtggcatacttccgcgccaaaggggcgcatatcagctggaactggt

SEQ ID NO: 93861 - DNA, 75 bp, synthetic construct
  source 1..75: mol_type = other DNA
gcatgaaataccgtaatgcagaggaagctgcccgggcggtggtgaaggttctgggggataaatccatgcggacct

SEQ ID NO: 93862 - DNA, 75 bp, synthetic construct
  source 1..75: mol_type = other DNA
atggagctgaagcgggatctggcgcgtaacagtgttctgaccatcattgaacgggataacgagcgtgtggggaat

SEQ ID NO: 93863 - DNA, 75 bp, synthetic construct
  source 1..75: mol_type = other DNA
taatcgggctggtgggcgctgacggtttcggtgtgcatcttttcgaacaatcatcggcaggtaagaccaccacgc

SEQ ID NO: 93864 - DNA, 75 bp, synthetic construct
  source 1..75: mol_type = other DNA
tgtggcttacctgaccgccggtatcgactcccagctggaccgctacgaaatgcgcgtatcgaagcctacgcgctg

SEQ ID NO: 93865 - DNA, 75 bp, synthetic construct
  source 1..75: mol_type = other DNA
agattgtcaccgaccaggacatgccggacgaagtacgcgccaaattatgcaaggcgtgcgcctttgcccgtcgtg

SEQ ID NO: 93866 - DNA, 75 bp, synthetic construct
  source 1..75: mol_type = other DNA
ccgtctggccggtgaactggcgatggctgatacggtggaaacggcactggtgatgcgcagaatgctgctcacagg

SEQ ID NO: 93867 - DNA, 75 bp, synthetic construct
  source 1..75: mol_type = other DNA
caccacggtgaagcgtaagcgcaggactaagaagcagaagaaagagccggaagcgaagcagggcgattacctggt

SEQ ID NO: 93868 - DNA, 75 bp, synthetic construct
  source 1..75: mol_type = other DNA
cactgagtgtgatgctgtgctgcagtactccggtgatggctgatcttctttctctgccgaaactgaatgacagca

SEQ ID NO: 93869 - DNA, 75 bp, synthetic construct
  source 1..75: mol_type = other DNA
tccgcaatgagcttactcctattcaatctcgctttattgcccttaatgaatgggttggcgaagaaataattagat

SEQ ID NO: 93870 - DNA, 75 bp, synthetic construct
  source 1..75: mol_type = other DNA
gccctgattatgactgaatcaggggctaatccatatgtaatagcgaatgtttctgacggaacaagtaagtatttt

SEQ ID NO: 93871 - DNA, 75 bp, synthetic construct
  source 1..75: mol_type = other DNA
ttgtacgcagcgtgatggcgtcaatgggacaaacggcccccgcgccgtcagaagcaaagtgcgccaccaccaact

SEQ ID NO: 93872 - DNA, 75 bp, synthetic construct
  source 1..75: mol_type = other DNA
ggtacacggagaggcacataacacccgactggagggagggaaccagtatgtgcacaagtatggacttgcactgaa

SEQ ID NO: 93873 - DNA, 75 bp, synthetic construct
  source 1..75: mol_type = other DNA
aacgccggtgatacggccacggataccacggtaaatggcggactgttcactgccagagggggctcgctggcgggc

SEQ ID NO: 93874 - DNA, 75 bp, synthetic construct
  source 1..75: mol_type = other DNA
tggtatcaggtacggattgccgggcgtgatgcaggcgaaaacgaattatcagcccgtcttaatgagccgctggaa

SEQ ID NO: 93875 - DNA, 75 bp, synthetic construct
  source 1..75: mol_type = other DNA
gtgaagtcggtgatgttgccggaagtggtcgcgtatcaatggcgcatggtcggacatcacaggcggtaggcgtta

SEQ ID NO: 93876 - DNA, 75 bp, synthetic construct
  source 1..75: mol_type = other DNA
aatgggatttgagagcgcatggattgagattcagctcgcacatgttgataagaatactatccgaggcacatataa

SEQ ID NO: 93877 - DNA, 75 bp, synthetic construct
  source 1..75: mol_type = other DNA
ctgaatacaatccagcacctgatttagctatcgctctggccgttcctaagcaaaaacaccacccatttttatctg

SEQ ID NO: 93878 - DNA, 75 bp, synthetic construct
  source 1..75: mol_type = other DNA
attttctgaataatagcggcttcacgacgtccctggagcttgaggtcaggctttctgatgtggagtacgaaaccg

SEQ ID NO: 93879 - DNA, 75 bp, synthetic construct
  source 1..75: mol_type = other DNA
agaaagtgttttctacctttgtgagcatcatggctgtgtgatccatcagtctgagcttgaccagagtaacgggcg

SEQ ID NO: 93880 - DNA, 75 bp, synthetic construct
  source 1..75: mol_type = other DNA
caacttgacagcaatttaacggcttctttaaagtcaatggaggggaagattaataaaacttttgaccgtctggaa

SEQ ID NO: 93881 - DNA, 75 bp, synthetic construct
  source 1..75: mol_type = other DNA
tttaaagacgccgacggcagcgtgctcgatcaggggattgcgctatggttccctggcccgaactcgttcaccggc

SEQ ID NO: 93882 - DNA, 75 bp, synthetic construct
  source 1..75: mol_type = other DNA
ggcatttcaggtcgcgagatagcggaaaaattcgaaatgccgctgcgcacggtgaataactatgtttatttcgac

SEQ ID NO: 93883 - DNA, 75 bp, synthetic construct
  source 1..75: mol_type = other DNA
atgaactgctgggaaatattagctttacaaccaggtgcggaagaacgagatattaagcgtcgttatgcgcaactg

SEQ ID NO: 93884 - DNA, 75 bp, synthetic construct
  source 1..75: mol_type = other DNA
cgccatgcaggctgtggctgtcacagaacaacgtcgtcgtcagggacgcacactttcagcatggccttatgccag

SEQ ID NO: 93885 - DNA, 75 bp, synthetic construct
  source 1..75: mol_type = other DNA
atgatgcacttaaaaaacattactgctggcaatcctaaaacaaaagagcaataccagctaacaaagcaatttaac

SEQ ID NO: 93886 - DNA, 75 bp, synthetic construct
  source 1..75: mol_type = other DNA
tgtacatggtcacgcactggataccacgctgaatggggggtaccagtatgtgcacaacggcggtacggcgtctgg

SEQ ID NO: 93887 - DNA, 75 bp, synthetic construct
  source 1..75: mol_type = other DNA
agatccatttgcttctcagtttgacaaaaatatgtttgctacttatcgggaaagaaggctatcaggagaatggaa

SEQ ID NO: 93888 - DNA, 75 bp, synthetic construct
  source 1..75: mol_type = other DNA
atcctgattgcaatattcgcctttaaaatgccgattgatatggcttttgctgctgcgggctatggctttatttat

SEQ ID NO: 93889 - DNA, 75 bp, synthetic construct
  source 1..75: mol_type = other DNA
ccgcaatccctgcaactggctatatccgccgctatcgcctggctgaattgctgggtaccagcttatcaacgctcg

SEQ ID NO: 93890 - DNA, 75 bp, synthetic construct
  source 1..75: mol_type = other DNA
ttgtggttgccacatcaggccccaccatcgacggtcgggaaattgatccgaagtggctgacagatgccgccgagg

SEQ ID NO: 93891 - DNA, 75 bp, synthetic construct
  source 1..75: mol_type = other DNA
gaatcagctgattgctggtgaaaccctcttcaccggcaccatcaaccgcacggaagtccatccccgggaagtgat

SEQ ID NO: 93892 - DNA, 75 bp, synthetic construct
  source 1..75: mol_type = other DNA
ctgagtggcagaacacagctcagtaaaggcgccagtatggtactgaatggtgatgtggtcagtaccggcgatatt

SEQ ID NO: 93893 - DNA, 75 bp, synthetic construct
  source 1..75: mol_type = other DNA
ttatctttgtattattcgggtaacgaatcaacaggatttattaaagaaaagaaatttaacaacacttcttatctg

SEQ ID NO: 93894 - DNA, 75 bp, synthetic construct
  source 1..75: mol_type = other DNA
attgcggtggcatggtggaaccctgtgggctggctgggtgccgcggctgtatcgggcatgtatgcggcaggggcc

SEQ ID NO: 93895 - DNA, 75 bp, synthetic construct
  source 1..75: mol_type = other DNA
gacgtatgttgctcaactggccctcaccgccaggtgccacgcgagaaattctcgaacaattgctgacggcgctcg

SEQ ID NO: 93896 - DNA, 75 bp, synthetic construct
  source 1..75: mol_type = other DNA
ctttttcttaattaaaaaatctaatctttctggtctctatatgtatcaccacggttcatgcagtctgaacactct

SEQ ID NO: 93897 - DNA, 75 bp, synthetic construct
  source 1..75: mol_type = other DNA
atattcaggcgcataaggtgatacacccgaaaaccaacagcctgttaaagccactggcagcaaaagcggcaacca

SEQ ID NO: 93898 - DNA, 75 bp, synthetic construct
  source 1..75: mol_type = other DNA
ccgcgagcagaaagagagtctggagaagctgaacgcgaagacatggggcgtgcgttatcacgaggacagcaacgg

SEQ ID NO: 93899 - DNA, 75 bp, synthetic construct
  source 1..75: mol_type = other DNA
attatgaacacagccccgaacacggtggatcccgttaccgtctgcagtagcgataaaaacaatatcaagctggaa

SEQ ID NO: 93900 - DNA, 75 bp, synthetic construct
  source 1..75: mol_type = other DNA
tatctaaagaaagtgtgacacaggtgattgagttattaggctacaaaggtcgtgcaacaggtcatgggttcaggc

SEQ ID NO: 93901 - DNA, 75 bp, synthetic construct
  source 1..75: mol_type = other DNA
catgtgcgtgccggtttccgtctgggcagccacaacgatatgagctttggtgaaggcacctcatcccgtgacacc

SEQ ID NO: 93902 - DNA, 75 bp, synthetic construct
  source 1..75: mol_type = other DNA
ttccgacgagaataaacaaaaattaaccgagtggatgctctatgcgcagaaagtcgaatccacagacacctccag

SEQ ID NO: 93903 - DNA, 75 bp, synthetic construct
  source 1..75: mol_type = other DNA
ccagtgaatatgttggctacacccaaagaaatcctcaacagcagcggatatcttcgctcattcccgggcattgcc

SEQ ID NO: 93904 - DNA, 75 bp, synthetic construct
  source 1..75: mol_type = other DNA
cacgccaaaaaactgactgccaataaaaaaaatttcagtgctggcctgggtcagataaacagccgtaatttccag

SEQ ID NO: 93905 - DNA, 75 bp, synthetic construct
  source 1..75: mol_type = other DNA
gcattgtgaatgaactaaggcaggaatggccattgtcccgattgttaattgtttccgggctgccccgaagtacat

SEQ ID NO: 93906 - DNA, 75 bp, synthetic construct
  source 1..75: mol_type = other DNA
atcagcggggcgtgtatctgtgtgaagtggggacggacaccgcaaaagaaattctctatgcccgtatgaaagccg

SEQ ID NO: 93907 - DNA, 75 bp, synthetic construct
  source 1..75: mol_type = other DNA
agtcatttcacgagttgcattttgcacagcgccaccagcaaacaatggtgatgctggcggggctaccgaaaggta

SEQ ID NO: 93908 - DNA, 75 bp, synthetic construct
  source 1..75: mol_type = other DNA
agggtaatccggaagaagtccgggaactcatcgatgccacgccatttgcgaagaaatacacgtcaggtgttctgt

SEQ ID NO: 93909 - DNA, 75 bp, synthetic construct
  source 1..75: mol_type = other DNA
aatgaaattgagtctacctgttatggggggagcggacagaaatcttattgggttcagtaacggtgtttttgatat

SEQ ID NO: 93910 - DNA, 75 bp, synthetic construct
  source 1..75: mol_type = other DNA
gcggaaaaagcgccattgccggggaaatagaaatcgcgatgaaggctattggtgtgccggttctatggactaatg

SEQ ID NO: 93911 - DNA, 75 bp, synthetic construct
  source 1..75: mol_type = other DNA
agaacagcattcgcggtgtatacaatcatgcacaatatcttaatggccgatctcgtatgcttcagttttatgcag

SEQ ID NO: 93912 - DNA, 75 bp, synthetic construct
  source 1..75: mol_type = other DNA
tattacaaccgccaccgctattatgacccgctgcaggggcgatatatcactcaggatccgattgggctgaaaggg

SEQ ID NO: 93913 - DNA, 75 bp, synthetic construct
  source 1..75: mol_type = other DNA
gaacagagtgttcaggaaaaaggtaatcaaagttttgtttcacactcccaggactgggatgtttttggagattat

SEQ ID NO: 93914 - DNA, 75 bp, synthetic construct
  source 1..75: mol_type = other DNA
atgaaaaaagcgccaaatttaaaacaccagccacgtgacaaaatgacggaagtcatcatttttgcgggtagtgat

SEQ ID NO: 93915 - DNA, 75 bp, synthetic construct
  source 1..75: mol_type = other DNA
ggttgacgatccggcgatgtggataaaggcgaatcccaatatcgatgtttccgtcgatcgtgaaaaactggcctc

SEQ ID NO: 93916 - DNA, 75 bp, synthetic construct
  source 1..75: mol_type = other DNA
agattcgccaccataacaaatgcgtgattctggaactgctgtaccggcaaaagcgcgccaataaatcaacgctgg

SEQ ID NO: 93917 - DNA, 75 bp, synthetic construct
  source 1..75: mol_type = other DNA
tttggttcatcgacgattgagtatttttccctgactggtgcaaccaccgttggtgctgctttgtatgtcgcccag

SEQ ID NO: 93918 - DNA, 75 bp, synthetic construct
  source 1..75: mol_type = other DNA
ttcggtgttactgctggcaacatggattcgatgatcaaccgttataccgccgatcgccgtttacgtcatgacgat

SEQ ID NO: 93919 - DNA, 75 bp, synthetic construct
  source 1..75: mol_type = other DNA
gcgatggtcgccagccagatgaaacgggcagccaacgacaaagccattgcacagatgctggcatcaaaaaagtct

SEQ ID NO: 93920 - DNA, 75 bp, synthetic construct
  source 1..75: mol_type = other DNA
ccctgttctggtattgttttgccggttggtgtactgctgaactgcaccgccgttcagggttttattcacgttaca

SEQ ID NO: 93921 - DNA, 75 bp, synthetic construct
  source 1..75: mol_type = other DNA
ctttagaaacatgtaagatgaagtgctccggaaataacattggacgttttattagatttgtattcaccggagtga

SEQ ID NO: 93922 - DNA, 75 bp, synthetic construct
  source 1..75: mol_type = other DNA
ccagatttaagcgaagaagaggccgcgatgcttgcagctgacggaccgcgttacaaagcgatcggcaatagtatg

SEQ ID NO: 93923 - DNA, 75 bp, synthetic construct
  source 1..75: mol_type = other DNA
aatggaataactggctgacaacccgaacgggtattgcctttgcggataatacgccggtctttgcccgccaggatt

SEQ ID NO: 93924 - DNA, 75 bp, synthetic construct
  source 1..75: mol_type = other DNA
atatcgccgataacaaatttttcaacggcgaaacatcaccgcttttttcgcaaagccaggcaaaactggcacgcc

SEQ ID NO: 93925 - DNA, 75 bp, synthetic construct
  source 1..75: mol_type = other DNA
gtggacttcagcgtgggtgcggaagggcttcgccatgtaccgggggatgtcattgaaatctgcgatgatgactat

SEQ ID NO: 93926 - DNA, 75 bp, synthetic construct
  source 1..75: mol_type = other DNA
atgtttggtaacttaggacaggcaaaaaaatatctcggccaggcggcgaagatgttgattggcattccagactac

SEQ ID NO: 93927 - DNA, 75 bp, synthetic construct
  source 1..75: mol_type = other DNA
tcaggcccgtgaacagtttaccggtgcggtggaccggatatttgacacggcggagagcgtctgtgttgcctctgt

SEQ ID NO: 93928 - DNA, 75 bp, synthetic construct
  source 1..75: mol_type = other DNA
ctgaagttcgtcaacgcgctattcgtatggttctggaaaaccagaatacctacaactcacaatgggccgctatct

SEQ ID NO: 93929 - DNA, 75 bp, synthetic construct
  source 1..75: mol_type = other DNA
tggttactgatgatcatcagcgagaaaacccgctacaacaactgctggacagtaatctgcgccagcgggtgatgg

SEQ ID NO: 93930 - DNA, 75 bp, synthetic construct
  source 1..75: mol_type = other DNA
atgacctggaaggcgctgtcattggcgcgttttttctgcgaggggcagatcatgaagtgatggatattctggcca

SEQ ID NO: 93931 - DNA, 75 bp, synthetic construct
  source 1..75: mol_type = other DNA
aacggcggaaaaggcatgacggatagtaacggggttgcaatcgcctccctgaccggcacgttagcgggcacgcat

SEQ ID NO: 93932 - DNA, 75 bp, synthetic construct
  source 1..75: mol_type = other DNA
agtgggagcgagtctgcgccgcgctgcgggagctgaataaacaccgggatattttcagttcgattgctgatattc

SEQ ID NO: 93933 - DNA, 75 bp, synthetic construct
  source 1..75: mol_type = other DNA
atcctgtttcagaatcttcatcagtcggcaccgcaacaaatccttatggaaaatccaagatttttttagagcaaa

SEQ ID NO: 93934 - DNA, 75 bp, synthetic construct
  source 1..75: mol_type = other DNA
gttctggtacaaggttatatccaataaccatgggagtatctaaacagttacttcctatttacgataaacctatga

SEQ ID NO: 93935 - DNA, 75 bp, synthetic construct
  source 1..75: mol_type = other DNA
ggcacaccctatatccagtcggttctgggaaagcaaaggcctgaggtttataaccttgcgatcagggatcgcatc

SEQ ID NO: 93936 - DNA, 75 bp, synthetic construct
  source 1..75: mol_type = other DNA
tctgcgaaaaactgatggaaaaggcggtgggcttcacctcccgttttgatttcgccattcatgtggcgcatgccc

SEQ ID NO: 93937 - DNA, 75 bp, synthetic construct
  source 1..75: mol_type = other DNA
tgcgttaccagtccgggaagccgcaacacaggaagaaattaaaacagaaactgtggcggacattgtgcagccgtt

SEQ ID NO: 93938 - DNA, 75 bp, synthetic construct
  source 1..75: mol_type = other DNA
aagtggcagatcccgcgattcatcaacacggataaagcgcccgcctatggtcgcgcgcttgctctgctcaaacgc

SEQ ID NO: 93939 - DNA, 75 bp, synthetic construct
  source 1..75: mol_type = other DNA
aaacactgaatgaggcgctgcagaaattacgtgatgcgcatacctgtgaagcagctgaagatgctctgaaggatg

SEQ ID NO: 93940 - DNA, 75 bp, synthetic construct
  source 1..75: mol_type = other DNA
gcgggagctgaacaagcaccgggatattgttcgacagattgtcgattcctccagtcgtattgtgtcggaaaagtg

SEQ ID NO: 93941 - DNA, 75 bp, synthetic construct
  source 1..75: mol_type = other DNA
tctggatggagtaaggggccggatggggtaattacacaatggggtattttcggtttccccgttggacagacaggg

SEQ ID NO: 93942 - DNA, 75 bp, synthetic construct
  source 1..75: mol_type = other DNA
ggggccgatccggaagtgatggatattctggccacacttccggcggatgtattttttgtgcgtcagtaccgggat

SEQ ID NO: 93943 - DNA, 75 bp, synthetic construct
  source 1..75: mol_type = other DNA
gagaccaccaccgccagtgatggtcatactgcgcgtcatctgtcgccggcctggaatgccgggattcagttcagt

SEQ ID NO: 93944 - DNA, 75 bp, synthetic construct
  source 1..75: mol_type = other DNA
cggtctgatacacctcggtattcgatatgcagatgttgaggtcatgaaaattgctggagatgcccagctttctac

SEQ ID NO: 93945 - DNA, 75 bp, synthetic construct
  source 1..75: mol_type = other DNA
agatgatggtggccaccctgaaaattcccctcgaaagacgaaacaaacgcaccggcagaatggagaaggcgcgta

SEQ ID NO: 93946 - DNA, 75 bp, synthetic construct
  source 1..75: mol_type = other DNA
ggatgaacgcggaagacctggtgataatcgctgctcgtcctggtatggggaaaaccgaactggcgctgaagattg

SEQ ID NO: 93947 - DNA, 75 bp, synthetic construct
  source 1..75: mol_type = other DNA
acggctattaccggcaaatatcggaagaaactcttgtcaggggggcccgggccagctcctattttatggaaagcc

SEQ ID NO: 93948 - DNA, 75 bp, synthetic construct
  source 1..75: mol_type = other DNA
ctggcaccggcactggcgcagcgaccgggcaacctgaaaccgctgacgcccggttacgcaattcgggtgtctccc

SEQ ID NO: 93949 - DNA, 75 bp, synthetic construct
  source 1..75: mol_type = other DNA
gtgaggcggcagagcgtgcaattccggcaatggaacgcctgttaatgttgccagttgatgatgctctgataagcg

SEQ ID NO: 93950 - DNA, 75 bp, synthetic construct
  source 1..75: mol_type = other DNA
gaggcattaatccgctgcttcattacattatgtatgggaagtttgagcagcgcagttgcctgcctgtcaataagg

SEQ ID NO: 93951 - DNA, 75 bp, synthetic construct
  source 1..75: mol_type = other DNA
ccctggctattcacgatgctaacaacacggccattgctgtttacaacagcttttcgcctgccaccgcttatggcg

SEQ ID NO: 93952 - DNA, 75 bp, synthetic construct
  source 1..75: mol_type = other DNA
caggcggattttgacggataccgggcagaacaggcccggcgtgaggtggcggcgttgcgcgcatggtctgagcgt

SEQ ID NO: 93953 - DNA, 75 bp, synthetic construct
  source 1..75: mol_type = other DNA
atgtcgatggttcatgatgaactgccaaaatatctgctggctccagaagtgagtgccctgctccattacgtccct

SEQ ID NO: 93954 - DNA, 75 bp, synthetic construct
  source 1..75: mol_type = other DNA
tggcaagtaagcattgctgctcggatggttatatcgggaaaaggttacagaaggctgagggcataattgaaggga

SEQ ID NO: 93955 - DNA, 75 bp, synthetic construct
  source 1..75: mol_type = other DNA
ggtatgctgcgcgcgctggatttaagcgctgaagagaaagcggctgttcgttacctgagcttcctgacgctaaaa

SEQ ID NO: 93956 - DNA, 75 bp, synthetic construct
  source 1..75: mol_type = other DNA
ttgatggcaccaacctatcgcagaacatcatgtctgcgatggaagccgtagcgcagacactcaagcagattcagg

SEQ ID NO: 93957 - DNA, 75 bp, synthetic construct
  source 1..75: mol_type = other DNA
gcgcagatatcaggacggatgcgcatggcatggcagaggttgatctgagcagtaccgtagcggatgccagcactg

SEQ ID NO: 93958 - DNA, 75 bp, synthetic construct
  source 1..75: mol_type = other DNA
gagctatctgatgaagcattaaaagcccgtagtaattgctctaaaaatgtcacggtgaaagatggtgtaagcacc

SEQ ID NO: 93959 - DNA, 75 bp, synthetic construct
  source 1..75: mol_type = other DNA
ggacgccgggcaggacgtggagatgccggagccggagaagaagaaacgagaaatgattcagttgtggggggagta

SEQ ID NO: 93960 - DNA, 75 bp, synthetic construct
  source 1..75: mol_type = other DNA
tgggggctgaactgtcaaatgctgcgcgtcaggcccgaaccagtttcggtggtcaggcagcggtacaactcgcgg

SEQ ID NO: 93961 - DNA, 75 bp, synthetic construct
  source 1..75: mol_type = other DNA
caattgagtatggggctgacggagctggctccaggtaacttgtggaacaccatgccgtgtcacacccacgagcgc

SEQ ID NO: 93962 - DNA, 75 bp, synthetic construct
  source 1..75: mol_type = other DNA
ttttcattctgggaggcccgttccggatggtgtcgtgccgagtggattggtgccggtcgcatggcgattgatggc

SEQ ID NO: 93963 - DNA, 75 bp, synthetic construct
  source 1..75: mol_type = other DNA
cccgtttacgccggtattccagtagttgatggcaccaatctgacgcaaaacatcatgtctgctttggaagcggtc

SEQ ID NO: 93964 - DNA, 75 bp, synthetic construct
  source 1..75: mol_type = other DNA
cgcaccgaaaaagcggccaggacagccggccgagctcccgccggtagccaggctcatcgtctggttccgctttcc

SEQ ID NO: 93965 - DNA, 75 bp, synthetic construct
  source 1..75: mol_type = other DNA
agctgactggctgacagcgattgagatgtacaaaccaaatgtgcgcatcgtggaagttaatgtgccacgcgtcgc

SEQ ID NO: 93966 - DNA, 75 bp, synthetic construct
  source 1..75: mol_type = other DNA
cacaaatccgcgatgagctgttgcgtgatattaaaaaccagctgcaactgactgacgataaactgggtgaagaca

SEQ ID NO: 93967 - DNA, 75 bp, synthetic construct
  source 1..75: mol_type = other DNA
ctggcgacacccgagggcaggcgtggtatatggacctgctttgcctggctaaaggtggcaaagaactattggcaa

SEQ ID NO: 93968 - DNA, 75 bp, synthetic construct
  source 1..75: mol_type = other DNA
gccatcgtttaccgaaacgcaagcagatgagctgatttttccgtccctgcgcagggcaaacctggcgctgcgcag

SEQ ID NO: 93969 - DNA, 75 bp, synthetic construct
  source 1..75: mol_type = other DNA
tgagtcgttgcggttctacccgttcccgacggtaaatgcgaataaacaggcgacggctttctcctcgtcacagca

SEQ ID NO: 93970 - DNA, 75 bp, synthetic construct
  source 1..75: mol_type = other DNA
cagagttgtgaaaatggagaattaataacccgaacacgaggcactccgcagggcggggtcattagtccgctactt

SEQ ID NO: 93971 - DNA, 75 bp, synthetic construct
  source 1..75: mol_type = other DNA
atgacggcgcaactggcctgcgatgccctgcagatggcgctgtggcggcgtaagaggccccggaacgttatcgtt

SEQ ID NO: 93972 - DNA, 75 bp, synthetic construct
  source 1..75: mol_type = other DNA
ctgttacgcccagtgtgaagaaaagaaggctaagtatggtagaatttccatacgcacagaccttgttatccgact

SEQ ID NO: 93973 - DNA, 75 bp, synthetic construct
  source 1..75: mol_type = other DNA
tggtgtcactatcagtaaccctgtatttactgaagatgccattaacaagagaaaacacgaacgggagctattaaa

SEQ ID NO: 93974 - DNA, 75 bp, synthetic construct
  source 1..75: mol_type = other DNA
gacggggccggacggcaggacggtacggtatggctataacagccagcggcaggtgacgtcggtgacgtacccgga

SEQ ID NO: 93975 - DNA, 75 bp, synthetic construct
  source 1..75: mol_type = other DNA
gaaaacaagaacgggagctattaaataaagtatgcattgtttcaatgctggcccgtttacgtctgcagccaaaag

SEQ ID NO: 93976 - DNA, 75 bp, synthetic construct
  source 1..75: mol_type = other DNA
gtcgcgctgcgggagctgaataaatatcgcgatattgtcgcccagctttgccaggaggcaaccagtgagcaagat

SEQ ID NO: 93977 - DNA, 75 bp, synthetic construct
  source 1..75: mol_type = other DNA
atggctgatgcaatggatctcgtccagcagcgagttgaagaagaacgccaacgtcatatccgtgctgcccgtgcc

SEQ ID NO: 93978 - DNA, 75 bp, synthetic construct
  source 1..75: mol_type = other DNA
cggctggtcttatgcaccgggggcagcataccgtcccgacctggcccgctatcagggtacgcttcagccactggc

SEQ ID NO: 93979 - DNA, 75 bp, synthetic construct
  source 1..75: mol_type = other DNA
agaggcggaagaacaatccgtcagcggcggagtaaagccagtccaattaatgcgtaaagctttctggacaaagat

SEQ ID NO: 93980 - DNA, 75 bp, synthetic construct
  source 1..75: mol_type = other DNA
catcgacagcatgccacctggacgccagagcgtcttctggaatgggcggggcacataggcagtgaaactcatagt

SEQ ID NO: 93981 - DNA, 75 bp, synthetic construct
  source 1..75: mol_type = other DNA
gaaaatctctgccaccaatacgttccatgccctcgctacggaatggcaccagcataaatctttatcatggtctga

SEQ ID NO: 93982 - DNA, 75 bp, synthetic construct
  source 1..75: mol_type = other DNA
agatattctggcactcgcaaggcaggtttctgcattaagttcatacacttacagtactaaaatgtttatgaaaaa

SEQ ID NO: 93983 - DNA, 75 bp, synthetic construct
  source 1..75: mol_type = other DNA
ccggcagcttcagttgatcacacagtactataaaagccagggcgacgacgattacgggcttaatctcgggaaagg

SEQ ID NO: 93984 - DNA, 75 bp, synthetic construct
  source 1..75: mol_type = other DNA
caattgccgaataacgggcaaaacaaaggccacccgctacggtggcccctcgacacaagctacacgttatcccca

SEQ ID NO: 93985 - DNA, 75 bp, synthetic construct
  source 1..75: mol_type = other DNA
cgttgctggtaacccgcgcgttgtgaaagccatgctggcgaacatgcgtgacgagttaagcgacgctctgaagcg

SEQ ID NO: 93986 - DNA, 75 bp, synthetic construct
  source 1..75: mol_type = other DNA
gccaggcaaaatatacgcggcgcggcatagacccggcgcaattctggtttgttccgcgctacgttgacgatcacg

SEQ ID NO: 93987 - DNA, 75 bp, synthetic construct
  source 1..75: mol_type = other DNA
aagttgcttcaacgctggcaatggcaatcagcaaaggacgcctgattcgcgtaaaccagaacggtaaatttcgtt

SEQ ID NO: 93988 - DNA, 75 bp, synthetic construct
  source 1..75: mol_type = other DNA
gatatcgtcaccctgccaaaggggcaggcatttgccctgctggaaggcggacagttgtggaaaatccggatgccg

SEQ ID NO: 93989 - DNA, 75 bp, synthetic construct
  source 1..75: mol_type = other DNA
tatcaatgtaaagatacgattaataacgttggttatctggctaaaacaaaagttttaactctgtatattgagcaa

SEQ ID NO: 93990 - DNA, 75 bp, synthetic construct
  source 1..75: mol_type = other DNA
actcaatcggccattctgaatgcaacacccgttgaagctccggcacgccctcgcgttgtctggcctggcgcaatc

SEQ ID NO: 93991 - DNA, 75 bp, synthetic construct
  source 1..75: mol_type = other DNA
tcactgacctgcccggggtgggcgagagccgggacagggatgcagagtatgaagccctgtaccgtgacattctgc

SEQ ID NO: 93992 - DNA, 75 bp, synthetic construct
  source 1..75: mol_type = other DNA
tggcagggaatgatgagaatgcggtggaaaagattttcccttcagcacagacaatctgtcaggatgaaatgacgc

SEQ ID NO: 93993 - DNA, 75 bp, synthetic construct
  source 1..75: mol_type = other DNA
aagtggcttcaacgctggcaatggctatcagcaaaggtcgtctgattcgcattaatcagaacggtaaatttcgtt

SEQ ID NO: 93994 - DNA, 75 bp, synthetic construct
  source 1..75: mol_type = other DNA
ataaaagcgcgctgaacaccgcgatgaaacgcagcgttgcgaaagctgccgttgagttgattcagccaggtcatc

SEQ ID NO: 93995 - DNA, 75 bp, synthetic construct
  source 1..75: mol_type = other DNA
ttaatcgatttgcttttcctcatcgctctcgccccagagagatcaattatctgcacaaagatggtcaaatatggc

SEQ ID NO: 93996 - DNA, 75 bp, synthetic construct
  source 1..75: mol_type = other DNA
ccggtaccagcaacaacggacggcctgggccgaacagtatgcaaactggaagtttgaagctgaagaacatgaaaa

SEQ ID NO: 93997 - DNA, 75 bp, synthetic construct
  source 1..75: mol_type = other DNA
gcgtgagttgaccgtgcaggcaaccactggtaccaactctgattccgatctctcttctattcaggatgaaattaa

SEQ ID NO: 93998 - DNA, 75 bp, synthetic construct
  source 1..75: mol_type = other DNA
tgcgccgcgctgcgggagctgaataaacaccgggatattttcagttcgattgctgatattccggttcattcaccg

SEQ ID NO: 93999 - DNA, 75 bp, synthetic construct
  source 1..75: mol_type = other DNA
tccgcgtgcatatctggtctgggacgtgaccgatgcctggacgctgaaaggcggtgtgaccacgggatataaagc

SEQ ID NO: 94000 - DNA, 75 bp, synthetic construct
  source 1..75: mol_type = other DNA
ggaactttggtggatacattattccaaccattgtcgctttgcctgcattaggatatatagctcgtgaattgggag

SEQ ID NO: 94001 - DNA, 75 bp, synthetic construct
  source 1..75: mol_type = other DNA
agcttctcgtggaaatgttgcagacacagggataactgatcgtgtcaatgacataataaatgacagattctggag

SEQ ID NO: 94002 - DNA, 75 bp, synthetic construct
  source 1..75: mol_type = other DNA
gcgaagaagacgtggcggcgttactggaagcaggcgttgcgcgcgtggtggtcggctccaccgcggtgaaatcac

SEQ ID NO: 94003 - DNA, 75 bp, synthetic construct
  source 1..75: mol_type = other DNA
tccgccagcaagacgccgcgtcattccgggagtgcagctttgcattacctgccaggaaatcgcagagctgaaagg

SEQ ID NO: 94004 - DNA, 75 bp, synthetic construct
  source 1..75: mol_type = other DNA
taactacgtaacttacaatggttttgtttactataacaatgccaatggcgatttcgataccgtctttaaaggcga

SEQ ID NO: 94005 - DNA, 75 bp, synthetic construct
  source 1..75: mol_type = other DNA
agagatgtcagattctctctcctatcacttctggaacagtggcgtagtgattcgtcacaacgaagagtacgagaa

SEQ ID NO: 94006 - DNA, 75 bp, synthetic construct
  source 1..75: mol_type = other DNA
gttacttctctatctatcgtcagggagggaccaccaccgacgagggagaacgcattgattaccgggtcaaaatgt

SEQ ID NO: 94007 - DNA, 75 bp, synthetic construct
  source 1..75: mol_type = other DNA
atctgaagcacaggatatgctgaccggggaggtcgaacaaaaagttaccgcagacatgatgattgagtttatcgg

SEQ ID NO: 94008 - DNA, 75 bp, synthetic construct
  source 1..75: mol_type = other DNA
ttgaaaccggccagcgcccggaaagcgcgttcggcaacacaagctacgtacagcgtattggctacgttgtgccct

SEQ ID NO: 94009 - DNA, 75 bp, synthetic construct
  source 1..75: mol_type = other DNA
ttaaacaggtgtatggcaccggacacaacaacgggcagggacccgccgcaacgacgaagagcgcgtgcgcgaaac

SEQ ID NO: 94010 - DNA, 75 bp, synthetic construct
  source 1..75: mol_type = other DNA
tagccgctaaaattgctctggctgtcgctatgacgacttgcaccttgcagcccgtttacgccggtattccagtag

SEQ ID NO: 94011 - DNA, 75 bp, synthetic construct
  source 1..75: mol_type = other DNA
gatcacgatgaacgcattgccggagctgtctccggcggaaatgagcatatctccggacgtctttccgtggcatat

SEQ ID NO: 94012 - DNA, 75 bp, synthetic construct
  source 1..75: mol_type = other DNA
agtaaattcaatcgttccagtttacataagatcattgatactcaacgtatcgacatgatcattgttgatgaaggc

SEQ ID NO: 94013 - DNA, 75 bp, synthetic construct
  source 1..75: mol_type = other DNA
gaaaacaaacaacgcaaaaagcaggggctggataccctgggcatggatgaactgatagcgaaagcctggcgtttt

SEQ ID NO: 94014 - DNA, 75 bp, synthetic construct
  source 1..75: mol_type = other DNA
cgttacgggaaaaactatttacctttgaggtggatattctgcgtaacgatgtctgtgatatcagccttaacctgc

SEQ ID NO: 94015 - DNA, 75 bp, synthetic construct
  source 1..75: mol_type = other DNA
aggtcgttcaggtcgtggaacaggtcaaagactggcgggaagccgtggcgatttcatgccgaccgttgattgaaa

SEQ ID NO: 94016 - DNA, 75 bp, synthetic construct
  source 1..75: mol_type = other DNA
gtctgtgatatcagcctgaacctgcagctgacggagcgtgtgctggtcagcactgacggaagtgtgtcgagcgtt

SEQ ID NO: 94017 - DNA, 75 bp, synthetic construct
  source 1..75: mol_type = other DNA
gcataaaaaatcccgacaacagcggccaggcgcttccgctcacgtatgtctgttgccgggagcaggcagaggacg

SEQ ID NO: 94018 - DNA, 75 bp, synthetic construct
  source 1..75: mol_type = other DNA
atgagctttttcgacaaagttaaaggtgccattaactcaggccgtgacgaactgacccgccaggttggccgtttc

SEQ ID NO: 94019 - DNA, 75 bp, synthetic construct
  source 1..75: mol_type = other DNA
aaaaaatttatggtgtgtttctgtttatactggcgttcgccctggtgagctgtgtgcacttggatgggaggacat

SEQ ID NO: 94020 - DNA, 75 bp, synthetic construct
  source 1..75: mol_type = other DNA
atgttaaagcgttatttagtactctcggtagcaacggcagcattttcattaccttctttggtttatgccgcacaa

SEQ ID NO: 94021 - DNA, 75 bp, synthetic construct
  source 1..75: mol_type = other DNA
caaaacattcttagcgtgcacattttgaaccagcaaacaggaaaacccgctgccgacgtgacagtcactcttgaa

SEQ ID NO: 94022 - DNA, 75 bp, synthetic construct
  source 1..75: mol_type = other DNA
atgagctttttcgacaaggtaaaaggtgccattaactctggccgggacgaactgacccgccaggttggtcgtttc

SEQ ID NO: 94023 - DNA, 75 bp, synthetic construct
  source 1..75: mol_type = other DNA
atgtcgcagacagaaaatgcagtgacttcctcatctggtgcaaaacgagcatacagaaagggtaaacctttgagt

SEQ ID NO: 94024 - DNA, 75 bp, synthetic construct
  source 1..75: mol_type = other DNA
cagggtaaaccttattactttatctggggctatgcggacatcgccaaaaagcagcccgtcacacagcaaacgttg

SEQ ID NO: 94025 - DNA, 75 bp, synthetic construct
  source 1..75: mol_type = other DNA
tggttgctacgggggccagctctatgtcatgggagtaccgttacaccctgaacgtggtgattgaggatttcagcg

SEQ ID NO: 94026 - DNA, 75 bp, synthetic construct
  source 1..75: mol_type = other DNA
agaacacagcattgaagaaattcgtgaaatgtatggtacagcgggtaaacgtaaggcgtcaggctggacacgtgt

SEQ ID NO: 94027 - DNA, 75 bp, synthetic construct
  source 1..75: mol_type = other DNA
acgagtgggtcatgaccatgattgcccgcaatcatctgactcctgtcatcactcaggaagaacaaaataacgtag

SEQ ID NO: 94028 - DNA, 75 bp, synthetic construct
  source 1..75: mol_type = other DNA
gcgcataccagcaaaactcagcagcggcagacacgcattcattcacatattcgagccgctcgaggacggacaaac

SEQ ID NO: 94029 - DNA, 75 bp, synthetic construct
  source 1..75: mol_type = other DNA
acgccatgagcttaattactccatacaggaagcactaaagccggtaacggtgggtgatgcgatcagctactggct

SEQ ID NO: 94030 - DNA, 75 bp, synthetic construct
  source 1..75: mol_type = other DNA
gctctacgccgaagcagaacagaccagtgcactgctgagacaacgacaacaccggattgaggaactgaaacgtga

SEQ ID NO: 94031 - DNA, 75 bp, synthetic construct
  source 1..75: mol_type = other DNA
aaaccaacaaccgggagcaggcgcggctctatgccgacgcagaacagaccagcgcactgctgagacaacgacaac

SEQ ID NO: 94032 - DNA, 75 bp, synthetic construct
  source 1..75: mol_type = other DNA
gacgaaaaacctgtggtcattggctgtgtacacaggaatgcgtcacggtgaactggtctccctggcctgggaaga

SEQ ID NO: 94033 - DNA, 75 bp, synthetic construct
  source 1..75: mol_type = other DNA
ttcgttttattgaggcttgccgtcatcaacaaacaaaaaacctgtggattctcgctgtatacacgggtattcgtc

SEQ ID NO: 94034 - DNA, 75 bp, synthetic construct
  source 1..75: mol_type = other DNA
gggtcaactttgaaaggcatagacgccaattcgaaagacatatttatcctttcatcggcgaattgccacttgaac

SEQ ID NO: 94035 - DNA, 75 bp, synthetic construct
  source 1..75: mol_type = other DNA
gatcacggttacttagaagcaaatcccttccagggaattaagcctcttaaaagagccagggcagagccagatccg

SEQ ID NO: 94036 - DNA, 75 bp, synthetic construct
  source 1..75: mol_type = other DNA
caaaagccaaaagcctctactggcaggcgtttagcatcactcagatttctaaggaaatcggggtgagcattaaca

SEQ ID NO: 94037 - DNA, 75 bp, synthetic construct
  source 1..75: mol_type = other DNA
ccggtaccgcaggttcgacagcttcactcatgtcaatcaacaactggagcaatggatagccgatgtggctgacaa

SEQ ID NO: 94038 - DNA, 75 bp, synthetic construct
  source 1..75: mol_type = other DNA
cgggatgaaccagttcaaggatgtgttccttgggctcgacaagcgtaattattcccgcgctaccacttcccaacg

SEQ ID NO: 94039 - DNA, 75 bp, synthetic construct
  source 1..75: mol_type = other DNA
ccagcgacctgaatttatcggttacgaccgtgcgactggtgctaaatggaaaagcggaacaatatcgaatcagcg

SEQ ID NO: 94040 - DNA, 75 bp, synthetic construct
  source 1..75: mol_type = other DNA
acacgctcaaaaatgcagggtatgaagtaggagagaaggcacttcgtgacattattcgggaagcagaatcgaaaa

SEQ ID NO: 94041 - DNA, 75 bp, synthetic construct
  source 1..75: mol_type = other DNA
atgacgattgcagaacgtcttgagcaaaaaggtcgccaggagggcaggatggaaggtgcgcttgaaaaagccctg

SEQ ID NO: 94042 - DNA, 75 bp, synthetic construct
  source 1..75: mol_type = other DNA
cccgctctcagttaataaacagtattgatatcctccgggcacgccgggcaaccggcctgatgacccgcgacaatt

SEQ ID NO: 94043 - DNA, 75 bp, synthetic construct
  source 1..75: mol_type = other DNA
cggtggtaacgtttacggtgcgacgaaagcgtttgttcgtcagtttagcctgaatctgcgtacggacctgcatgg

SEQ ID NO: 94044 - DNA, 75 bp, synthetic construct
  source 1..75: mol_type = other DNA
ggaaggtccggtaaatactccggaaggcggctatgtcattatggaaaaactcattgaagagcagggatgtccgca

SEQ ID NO: 94045 - DNA, 75 bp, synthetic construct
  source 1..75: mol_type = other DNA
ccagaaggcgttgcctatggcgtgtacaagcaacacagtcgtatgcttcaaacagaaaagttagatttagtcagt

SEQ ID NO: 94046 - DNA, 75 bp, synthetic construct
  source 1..75: mol_type = other DNA
atgactggaaaaaatagagtggttttacctgccttgctggcgttaggattaatatcaacaaatgctaatgcatct

SEQ ID NO: 94047 - DNA, 75 bp, synthetic construct
  source 1..75: mol_type = other DNA
gccagaaaaatgtggtgttcaacgataaacgctttggctgcgtgtacagcctgaaggccagtctttccagtgtgc

SEQ ID NO: 94048 - DNA, 75 bp, synthetic construct
  source 1..75: mol_type = other DNA
cagcagactcaccggctggttccgctctctgactcctggtacgtcagccagctgcagacgatggtggcaacactg

SEQ ID NO: 94049 - DNA, 75 bp, synthetic construct
  source 1..75: mol_type = other DNA
atttcacccgcaatattgtggtactcaccgataacgccgggcataccggcattggtgaagcgccgggcggagagg

SEQ ID NO: 94050 - DNA, 75 bp, synthetic construct
  source 1..75: mol_type = other DNA
cgtttgctggatatccagcagaagaaagtggagagggcgaccggcgttgatttgccgagttatggcggtgtcgta

SEQ ID NO: 94051 - DNA, 75 bp, synthetic construct
  source 1..75: mol_type = other DNA
tctgacagatattttgatttgtttattgttttccttgttgccggaattgttttatgggcagttatgcacgttatt

SEQ ID NO: 94052 - DNA, 75 bp, synthetic construct
  source 1..75: mol_type = other DNA
cattcagccttctcccgcacaggcacagaacattcgcgaaaaaacagatgcggtattccggctgttccggcccgt

SEQ ID NO: 94053 - DNA, 75 bp, synthetic construct
  source 1..75: mol_type = other DNA
tcaggcgcggcgggaagtgattatcgccaacgcctacttcttccccggctatcgatttttacacgccttgcgtaa

SEQ ID NO: 94054 - DNA, 75 bp, synthetic construct
  source 1..75: mol_type = other DNA
cgccccggttgggtagtcatgtgggatggctggttcagacttcaggatatggttgagggttacctggtgatgaag

SEQ ID NO: 94055 - DNA, 75 bp, synthetic construct
  source 1..75: mol_type = other DNA
ataacaaaggtgcgccatacgcatctgacaacttctggcagatgggtgacactggtccgtgcggcccgtgcaccg

SEQ ID NO: 94056 - DNA, 75 bp, synthetic construct
  source 1..75: mol_type = other DNA
atgatctgaaactacagactgcgcaggattcagacaatggattttcggcgcttgaacaggcgctgctgcggtata

SEQ ID NO: 94057 - DNA, 75 bp, synthetic construct
  source 1..75: mol_type = other DNA
atggtgtcacaggaaattctcttaaatggttcttttgataagtggagtgacagggtgcattcagcttatgaaaat

SEQ ID NO: 94058 - DNA, 75 bp, synthetic construct
  source 1..75: mol_type = other DNA
cggataacgtaagcctcgataaagcgcgtcgcctgttgtggccaatcaaacagaaatatggtcagaaaatctcct

SEQ ID NO: 94059 - DNA, 75 bp, synthetic construct
  source 1..75: mol_type = other DNA
gttcgtgccggtcagaatatcgtgacgccggagatcatgaagcttcagttaatttcgctgggtgaagagtgggtg

SEQ ID NO: 94060 - DNA, 75 bp, synthetic construct
  source 1..75: mol_type = other DNA
tcactctgtaatgcactgtttcagggggaggtcaccccggtcagtgatgttcacgccggtacccgggaagtgcag

SEQ ID NO: 94061 - DNA, 75 bp, synthetic construct
  source 1..75: mol_type = other DNA
agaagtgggatgatgaagccatcaccaaactgaatccaggcttaaaactgccgtcacagaacattgctgtagtac

SEQ ID NO: 94062 - DNA, 75 bp, synthetic construct
  source 1..75: mol_type = other DNA
atgtacctgcatattgttcctaaactttatcaccggatggctaataaatgtagccttaaaaccatttccatacct

SEQ ID NO: 94063 - DNA, 75 bp, synthetic construct
  source 1..75: mol_type = other DNA
gaaaatatcactattcattttgatatgacgaaatgtcatttctttgatgcagaaacggaaatagcaattcgctaa

SEQ ID NO: 94064 - DNA, 75 bp, synthetic construct
  source 1..75: mol_type = other DNA
attccctgcaggcaacacagcttcagtcggccatagtgaaagccatgtatgcagcgacgattgaaagtgaacttg

SEQ ID NO: 94065 - DNA, 75 bp, synthetic construct
  source 1..75: mol_type = other DNA
tgtataacggagccacaccaattagcttcactgcaacggttactgctgatgctaattcagacagcagtggcgatg

SEQ ID NO: 94066 - DNA, 75 bp, synthetic construct
  source 1..75: mol_type = other DNA
ctcccgttttgatttcgccattcatgtggcgcatgcccgttcccgtggtctgcgtcggcgcatgccaccggtgct

SEQ ID NO: 94067 - DNA, 75 bp, synthetic construct
  source 1..75: mol_type = other DNA
tgcggcgttgttatgcgcgcggataaatggcagtcctgcttgttttgccacctgtatggattcatcaaatgaata

SEQ ID NO: 94068 - DNA, 75 bp, synthetic construct
  source 1..75: mol_type = other DNA
tataccgccagcaatgcagggcgtttttacggcatctgggatagagccagagggagacagcgtcacgctgtttta

SEQ ID NO: 94069 - DNA, 75 bp, synthetic construct
  source 1..75: mol_type = other DNA
gcaacggaggaagaaagatcgttgctggaggcatggaataaatatcgggtattgttgaaccgtgttgatacatca

SEQ ID NO: 94070 - DNA, 75 bp, synthetic construct
  source 1..75: mol_type = other DNA
tgcgtgaaaaggcagagaaagcaacgtgtggtgagtggtcgctcgaatatggagagagccgatttgatggtgatg

SEQ ID NO: 94071 - DNA, 75 bp, synthetic construct
  source 1..75: mol_type = other DNA
gtgactgatcttcaccaaacgtattaccgccaggtaaagaacccgaatccggtgttcactccccgtgaaggtgcc

SEQ ID NO: 94072 - DNA, 75 bp, synthetic construct
  source 1..75: mol_type = other DNA
tcaggctgcgtgaacgtccggcccttgccggaggtgcagcttaccgtgaatggctgtcccagagtgacgcagtgc

SEQ ID NO: 94073 - DNA, 75 bp, synthetic construct
  source 1..75: mol_type = other DNA
gttcgtgcagctggccacgctcaagcagcgcaccgagaaagcggccaggacggcaggtcgtgcccccgcaggcag

SEQ ID NO: 94074 - DNA, 75 bp, synthetic construct
  source 1..75: mol_type = other DNA
gacgctcgatcttagccaaagcgttgataatgagtattactgtttgctgctggcgaaagaactcgggttgaatgt

SEQ ID NO: 94075 - DNA, 75 bp, synthetic construct
  source 1..75: mol_type = other DNA
cggaactgcttatccagacacgaggtaatatgaccgaagtttcacgaatgctgaactgtaatcgcgccacggtaa

SEQ ID NO: 94076 - DNA, 75 bp, synthetic construct
  source 1..75: mol_type = other DNA
gaccatcgcggcctgccgctggcccttatcagcaaggaagggacaacagaatggtgcgcagaatacgatgaatgg

SEQ ID NO: 94077 - DNA, 75 bp, synthetic construct
  source 1..75: mol_type = other DNA
cgcttccgtctgagtggccacggtcacagcatgattatcactgacctgcccggggtgggcgagagccgggacagg

SEQ ID NO: 94078 - DNA, 75 bp, synthetic construct
  source 1..75: mol_type = other DNA
atggatagtcaaaaaattagtcagttagtagagaatcgtgagttatatcccatcactgatattggcagggaattg

SEQ ID NO: 94079 - DNA, 75 bp, synthetic construct
  source 1..75: mol_type = other DNA
ggtgccggtaaagcagagcggagtgcagttaacgccatcggaatttaacgccagtctgaccatggtggtggatta

SEQ ID NO: 94080 - DNA, 75 bp, synthetic construct
  source 1..75: mol_type = other DNA
tctgcgtcggggtcttggcaccgttgatattgtgatcacctctgccggtggtctgccgtctcaggatgttattga

SEQ ID NO: 94081 - DNA, 75 bp, synthetic construct
  source 1..75: mol_type = other DNA
cgagcagcgtgaatattacgaaggtgttatctctgatgggagtaagcgtattgctgaactggaagcacgggaaat

SEQ ID NO: 94082 - DNA, 75 bp, synthetic construct
  source 1..75: mol_type = other DNA
cgggctgaatctcagctttttgtgactcctgccccggtctgtgatcgcctggtgacgctggcggagatcagcaac

SEQ ID NO: 94083 - DNA, 75 bp, synthetic construct
  source 1..75: mol_type = other DNA
taccgttttctgacgtccgcgaggagctgccgtgcggcacgtttgcttatacccgtgttccgacgatgattattc

SEQ ID NO: 94084 - DNA, 75 bp, synthetic construct
  source 1..75: mol_type = other DNA
cctacggagcctggagcaatccaccacaaggtgttatagacactttaatctcagccccaggcgtaaccattactt

SEQ ID NO: 94085 - DNA, 75 bp, synthetic construct
  source 1..75: mol_type = other DNA
gggagcttcacgccactcatcagagttgaaaccgccaccggtgagctggcgaaaacgcagcgccgcagcctggcg

SEQ ID NO: 94086 - DNA, 75 bp, synthetic construct
  source 1..75: mol_type = other DNA
atgtgtctgaggatgcagtggttgctgcgcgccgcagtcgtgttgaatgggaaaacagacagcgcaaaaagcagg

SEQ ID NO: 94087 - DNA, 75 bp, synthetic construct
  source 1..75: mol_type = other DNA
ggtatggaagatgaacggcttcaggggagggagtctgaatgacgggaaagatatcacctttgggggtaagggcac

SEQ ID NO: 94088 - DNA, 75 bp, synthetic construct
  source 1..75: mol_type = other DNA
cggccagcagctttacggacatatggactggaacaggaaaatactgactgtcacgacctctgcaacaccgccggt

SEQ ID NO: 94089 - DNA, 75 bp, synthetic construct
  source 1..75: mol_type = other DNA
tccccctgtttcgccagagcctgccgcgcatagagaaagtcgcagcagttagcgtaaacagcgggcatgaaatca

SEQ ID NO: 94090 - DNA, 75 bp, synthetic construct
  source 1..75: mol_type = other DNA
gaacgaggatttacgccgctgggctaatactcctttgcctgctgatattatccggctgcgggaacgtccggcact

SEQ ID NO: 94091 - DNA, 75 bp, synthetic construct
  source 1..75: mol_type = other DNA
aatccgaataatatcggtgatacccggaactgtcgcgccggtgtgaaaataaatgatagcggtgctgcgctggga

SEQ ID NO: 94092 - DNA, 75 bp, synthetic construct
  source 1..75: mol_type = other DNA
atgaatacattacccgacactcacgtacgggagacatcgggctgcccgtctccggttgaaatctggcagacactg

SEQ ID NO: 94093 - DNA, 75 bp, synthetic construct
  source 1..75: mol_type = other DNA
gcttggccttgagacactgaaaaagcatctggctgccccgctaagccagaaaaaaatcgcggaatatattgcacg

SEQ ID NO: 94094 - DNA, 75 bp, synthetic construct
  source 1..75: mol_type = other DNA
gatactcctttgcctgctgatattatccggctgcgggaacgccccacactcaccggaggtgcagcttaccgtcag

SEQ ID NO: 94095 - DNA, 75 bp, synthetic construct
  source 1..75: mol_type = other DNA
tacgggcggcatcgcgctgcccgtctcccgtcaccatctggcagacactgctcacccgactgctggaccagcact

SEQ ID NO: 94096 - DNA, 75 bp, synthetic construct
  source 1..75: mol_type = other DNA
actctccggtgtttttgaaggcgttactactggcaccagcattggcttgttgatcgaaaataccgaccagcgttc

SEQ ID NO: 94097 - DNA, 75 bp, synthetic construct
  source 1..75: mol_type = other DNA
ggcttgaccagtcgagtttcgtagttcagcgggccagaccaatgctgaaaagcctgcgggcaaggcaattcgaat

SEQ ID NO: 94098 - DNA, 75 bp, synthetic construct
  source 1..75: mol_type = other DNA
accatcgtgtcccacgtctgcgatattgccattcaggaagaccgccacgagctgggcgatgacataactccgcgt

SEQ ID NO: 94099 - DNA, 75 bp, synthetic construct
  source 1..75: mol_type = other DNA
aaagaagggggacgatatgatttacctatcgccattgcgttgctggcggcctcagaacagcttacagccaataag

SEQ ID NO: 94100 - DNA, 75 bp, synthetic construct
  source 1..75: mol_type = other DNA
gataatccgcttattaatattctggataagttctccacctggtatgacacgaataacgtgacactgggcggtgtc

SEQ ID NO: 94101 - DNA, 75 bp, synthetic construct
  source 1..75: mol_type = other DNA
tctgcatttccagtcatgggttaaagaagcgacaggcaaaaaagctgctgaaggtgacttcaccgctgttgctaa

SEQ ID NO: 94102 - DNA, 75 bp, synthetic construct
  source 1..75: mol_type = other DNA
gcgtctgtgttgcctctgttgtccgtacggccctgcgcgctgttcgtaacacggtggtctctgttgcccgtgcgg

SEQ ID NO: 94103 - DNA, 75 bp, synthetic construct
  source 1..75: mol_type = other DNA
ctgaacgctttgtcagcaatccaccgggctggcgtgactggcttctccgggggctttcaacaacagccactccgg

SEQ ID NO: 94104 - DNA, 75 bp, synthetic construct
  source 1..75: mol_type = other DNA
cggcacgattaaatgagctttacgccgcacgcttacagcgttccccgtctatcgccgttgatgcggcccatttcg

SEQ ID NO: 94105 - DNA, 75 bp, synthetic construct
  source 1..75: mol_type = other DNA
gtggcgcatgcccgttcgcgtggtctgcgtcggcgcatgccaccggtactgcgtcgccgggccattgatgcgctg

SEQ ID NO: 94106 - DNA, 75 bp, synthetic construct
  source 1..75: mol_type = other DNA
tgcgagttacgtcactggctggcctgttttgaccggatacgcaaaaaatcccctgtaacgtctggtcacatgatg

SEQ ID NO: 94107 - DNA, 75 bp, synthetic construct
  source 1..75: mol_type = other DNA
ccagagtatgcctgaaggtccacgtcaaggtattgagaatcaggacagacaggcgagggagcagcagcaggccgc

SEQ ID NO: 94108 - DNA, 75 bp, synthetic construct
  source 1..75: mol_type = other DNA
gtggggaatggttacggaacaacctgaatgccatcgctgcctttatgagtacccggacgtgggattccatcgaaa

SEQ ID NO: 94109 - DNA, 75 bp, synthetic construct
  source 1..75: mol_type = other DNA
gtcacctacagcaagacaggcatgctgttcggggcgaatctgattgtgaaaagcaccgatttcctgtcccggaat

SEQ ID NO: 94110 - DNA, 75 bp, synthetic construct
  source 1..75: mol_type = other DNA
ggaattccgccgtggttgctggttgatggaaaaaccagaaacagcgatgaaagccattacccgtaatctcgatcg

SEQ ID NO: 94111 - DNA, 75 bp, synthetic construct
  source 1..75: mol_type = other DNA
tgtggacaatccctgaaagccgcatgaaaatgcgacgtaaacatgtcgtaccactgtcacaacaggccactgaca

SEQ ID NO: 94112 - DNA, 75 bp, synthetic construct
  source 1..75: mol_type = other DNA
agctggaaaaaacgtctctcgcgcctgatgaattatccgggcacgcgttacactaaacagctaccgtgtttagtc

SEQ ID NO: 94113 - DNA, 75 bp, synthetic construct
  source 1..75: mol_type = other DNA
cgcccgtttggctggcgcgaagtatggatcggttatgaccccgcaaaaggtactcagaacggcgacagtgccgga

SEQ ID NO: 94114 - DNA, 75 bp, synthetic construct
  source 1..75: mol_type = other DNA
gccggtgccggatgccggtcagacgaaactggtgcatgaagtctggcgtcacgctctgaataaagtcagtgtgga

SEQ ID NO: 94115 - DNA, 75 bp, synthetic construct
  source 1..75: mol_type = other DNA
ctggagccccgtatcttcgcatggacggaccgcctgtgcgcgggctacggcggtggtatctggcagttttacacg

SEQ ID NO: 94116 - DNA, 75 bp, synthetic construct
  source 1..75: mol_type = other DNA
cgcctcgctgaccgcaaaaggttttactcagttaagcagtgcgaccaacagtgaatccgaaatactggccgcaac

SEQ ID NO: 94117 - DNA, 75 bp, synthetic construct
  source 1..75: mol_type = other DNA
ttttgtttactctaaaaatgaaattgtgagtggaaaagaaataactgtgcatctgtgcccactttgttattccaa

SEQ ID NO: 94118 - DNA, 75 bp, synthetic construct
  source 1..75: mol_type = other DNA
ttgacgaagaagacgtagaagttctgcgctttgatagttttgacgatgcagttgagtgctgcgcagacctgggta

SEQ ID NO: 94119 - DNA, 75 bp, synthetic construct
  source 1..75: mol_type = other DNA
atggcccgttcagctaaaccccgtaaacgaaaaccttccccacaacacagcaaacttccccgctatgtcgtgacg

SEQ ID NO: 94120 - DNA, 75 bp, synthetic construct
  source 1..75: mol_type = other DNA
tgcgtttgagcaactccgccggaaaagaaaccgccgcaaacctgtgccctatgaactcattccgggttcgctggc

SEQ ID NO: 94121 - DNA, 75 bp, synthetic construct
  source 1..75: mol_type = other DNA
gggttttgcgtcagggatggaagcccgccagggcggagacagctccgctggctccgttcacgacagcccgccccg

SEQ ID NO: 94122 - DNA, 75 bp, synthetic construct
  source 1..75: mol_type = other DNA
gatcatcaaaaaagagtacggcgggctggagttctcggcttatgcccagtctcgcgtgctgcaaaaactctccgg

SEQ ID NO: 94123 - DNA, 75 bp, synthetic construct
  source 1..75: mol_type = other DNA
cgctggaatctgcaaccgttactgcaaagtgctcagttgacaggaatgactgtcacaatcaaatccagtacctgt

SEQ ID NO: 94124 - DNA, 75 bp, synthetic construct
  source 1..75: mol_type = other DNA
ctgacaccgcgagttatgagacaccgccggttctgttgccttaccagcagcgctgggtggcagatacctctccgc

SEQ ID NO: 94125 - DNA, 75 bp, synthetic construct
  source 1..75: mol_type = other DNA
gggtctatacgacgacaccggcacgctgattgcggtcggtaacatggcggagagctacaagcccgaactggcgga

SEQ ID NO: 94126 - DNA, 75 bp, synthetic construct
  source 1..75: mol_type = other DNA
cggccggtgagcccaaggctcagctcgcccgcgaattaaacatcagccgacagaccctctaccagtacctgaaaa

SEQ ID NO: 94127 - DNA, 75 bp, synthetic construct
  source 1..75: mol_type = other DNA
cctgatacgacgcgtgccattcgtactggagttgcgtaacgtgccgttcaggcagcaggagcaaatcacctggta

SEQ ID NO: 94128 - DNA, 75 bp, synthetic construct
  source 1..75: mol_type = other DNA
agccgcgggcaggcgctggaaattctggaggcagactactggtacggaccgaatttcgacaaggtggcaaacctg

SEQ ID NO: 94129 - DNA, 75 bp, synthetic construct
  source 1..75: mol_type = other DNA
tggtcggaggcatccgagcaggcctggatggcgtcagtgtacaaattctacggtgccggtgcatccgaagagctt

SEQ ID NO: 94130 - DNA, 75 bp, synthetic construct
  source 1..75: mol_type = other DNA
tgtttattttctctaatgtttcttttgcaaacgaagcaacagcatcattgcatacagaagtaaataaagaagaac

SEQ ID NO: 94131 - DNA, 75 bp, synthetic construct
  source 1..75: mol_type = other DNA
ggatgagtaaccaggatgcggaatggctggcctcccgtcgcttctccattgaagacatcgcccggatgttcaacg

SEQ ID NO: 94132 - DNA, 75 bp, synthetic construct
  source 1..75: mol_type = other DNA
gcgcagcgcaagtggattatgacgcaagtgtcccctggagttattaaagctcgctatcaaacacgaaatcacgtt

SEQ ID NO: 94133 - DNA, 75 bp, synthetic construct
  source 1..75: mol_type = other DNA
aaacaggaagcactgtcggaaatgataaagctgttggctggaactggaatagcggggtctatcaagcaaatattg

SEQ ID NO: 94134 - DNA, 75 bp, synthetic construct
  source 1..75: mol_type = other DNA
attaaccggtaaacgggtggtgtctgtccagaaagatggtcgcagaattgaatatacggcagcttctctggatga

SEQ ID NO: 94135 - DNA, 75 bp, synthetic construct
  source 1..75: mol_type = other DNA
tcggtgcctgtcgtgcttatagcggcgctttgagcactgaagccggaaactggacaaccgctcagtttattgaat

SEQ ID NO: 94136 - DNA, 75 bp, synthetic construct
  source 1..75: mol_type = other DNA
ttactggtggtactggatcatttgggaatactgtgctgaagcgctttcttaatacagatgtaaaacgaattattg

SEQ ID NO: 94137 - DNA, 75 bp, synthetic construct
  source 1..75: mol_type = other DNA
tgacggatggtgccgggcgtcacttccggctggtactgaccacgcaggcgcagcgggcagaagaagcccggcagc

SEQ ID NO: 94138 - DNA, 75 bp, synthetic construct
  source 1..75: mol_type = other DNA
agtctgagctgataaacccacgcaaaggaacgccgacaagctacatcgcaaaatacatcagtaagaacattgacg

SEQ ID NO: 94139 - DNA, 75 bp, synthetic construct
  source 1..75: mol_type = other DNA
acgactggcacgggtcaaccgctacagtcagaccggcaacgaggcagaccttaatccgaacgtcgctaaccgcaa

SEQ ID NO: 94140 - DNA, 75 bp, synthetic construct
  source 1..75: mol_type = other DNA
atgaaaaaaacagaaaataaaccggttgcaattggtgccgctgttgttccgtttaagtttgagttgtctcaactg

SEQ ID NO: 94141 - DNA, 75 bp, synthetic construct
  source 1..75: mol_type = other DNA
gttttctacaccatcacatgtccgtcacgtttccattccacgctcaataacggcaggcccaacccgacctggaca

SEQ ID NO: 94142 - DNA, 75 bp, synthetic construct
  source 1..75: mol_type = other DNA
atcatcgctcacgccgcagtcatgctacatcagtcagcgatgaatctgaccctgataaaaggccatatcgtgctg

SEQ ID NO: 94143 - DNA, 75 bp, synthetic construct
  source 1..75: mol_type = other DNA
atgttgacctcaatagcaggccacgacagcgtattgctgcgtaccgacgatcccctgatcgacatgaattacatc

SEQ ID NO: 94144 - DNA, 75 bp, synthetic construct
  source 1..75: mol_type = other DNA
gacccggaatacccggagaatttacctgccgcgccgctggtgcgctatggctggacgccacgcggcgaactggcg

SEQ ID NO: 94145 - DNA, 75 bp, synthetic construct
  source 1..75: mol_type = other DNA
tgattgccggtgaaaccctcttcaccggcaccatcaaccgcacggaagtccatccccgggaagtgattaaacgcg

SEQ ID NO: 94146 - DNA, 75 bp, synthetic construct
  source 1..75: mol_type = other DNA
ataaggggaagactaaatacaaaccgactatgatttgggaaagtaacggtgagattagttttctaatcttaccat

SEQ ID NO: 94147 - DNA, 75 bp, synthetic construct
  source 1..75: mol_type = other DNA
ctagcgccagtgtcagcgaactgaaaaaaaacccgatggcgacagtcagtgccggtgatggttacccagtcgcga

SEQ ID NO: 94148 - DNA, 75 bp, synthetic construct
  source 1..75: mol_type = other DNA
tccacaggcgcaggtgaccacgacagcactttcagcatgaagacggttcatgattcggtccggcagcagggaaca

SEQ ID NO: 94149 - DNA, 75 bp, synthetic construct
  source 1..75: mol_type = other DNA
ggtaaacgccagcagcagcaacccggcgcatcgccgcaatgagatgatggcctgcgttaaaggtctggagcttat

SEQ ID NO: 94150 - DNA, 75 bp, synthetic construct
  source 1..75: mol_type = other DNA
atgttaaagaggcgagaatttccgcaggtttaacgcttaaggaagctgccgaaatttttggctatcagttaaata

SEQ ID NO: 94151 - DNA, 75 bp, synthetic construct
  source 1..75: mol_type = other DNA
ccggtactggataacccgcgccttgatgccattctggctgcagctgatgctggttgctttgccacctacatcatg

SEQ ID NO: 94152 - DNA, 75 bp, synthetic construct
  source 1..75: mol_type = other DNA
atgaactatgccggacacgaaaaacttcgcgctgaagtggcggaggtgaccaatgccatgtgtgaccttcgggca

SEQ ID NO: 94153 - DNA, 75 bp, synthetic construct
  source 1..75: mol_type = other DNA
ggaatcacagcacacagaagtgggacgtggtttcagaacttacgggcagtaagaaaaaatgtaagtctgcacgtc

SEQ ID NO: 94154 - DNA, 75 bp, synthetic construct
  source 1..75: mol_type = other DNA
atgctggcgctgaatatcaacccggtacagcagcgggctgctgtacgtggctcacgaacaccggagaaagttttt

SEQ ID NO: 94155 - DNA, 75 bp, synthetic construct
  source 1..75: mol_type = other DNA
tggctgagccgcatcatgacggcacagttcactggcacctgttgtgtttcatgcgcaaaaaagaccgccgcgcca

SEQ ID NO: 94156 - DNA, 75 bp, synthetic construct
  source 1..75: mol_type = other DNA
tctcatgaactggtgaacgaagacggagacacgctggatatggaagatgtggtaaacgccagcagcagcaacccg

SEQ ID NO: 94157 - DNA, 75 bp, synthetic construct
  source 1..75: mol_type = other DNA
ttgtaattggtgctgatgctgctccgtttaagtttgagttgtctcaactggtggagatgcgcatcagtgatgaat

SEQ ID NO: 94158 - DNA, 75 bp, synthetic construct
  source 1..75: mol_type = other DNA
cgtgaaatcgagttgcgccagaaacaatacgagtactatcgtgatttactgttcagtttcccaaaacctgaaact

SEQ ID NO: 94159 - DNA, 75 bp, synthetic construct
  source 1..75: mol_type = other DNA
gtgcggcgacgggcttcgatatcaggagacgatgatggaaaaacagaaaacaaaccgattgtaattggtgctgat

SEQ ID NO: 94160 - DNA, 75 bp, synthetic construct
  source 1..75: mol_type = other DNA
tgcgtttgagcaactccgccggaaaagaaaccgccgtaaacccgtaccctatgaactcattccgggttcgctggc

SEQ ID NO: 94161 - DNA, 75 bp, synthetic construct
  source 1..75: mol_type = other DNA
cagaagtccatccccgggaagtgattaaacgcgccctgtatcacaatgccgcagccgtggtgctggcacacaatc

SEQ ID NO: 94162 - DNA, 75 bp, synthetic construct
  source 1..75: mol_type = other DNA
atgtacggaacatgcgaaacgctctgccgggagttggcagcgcagtatccgggagacacgccgctgatgctggtt

SEQ ID NO: 94163 - DNA, 75 bp, synthetic construct
  source 1..75: mol_type = other DNA
ggacgcctcgctgaccgcaaaaggttttactcagttaagcagtgcgaccaacagcacgtctgaaacactggctgc

SEQ ID NO: 94164 - DNA, 75 bp, synthetic construct
  source 1..75: mol_type = other DNA
attatggtatatatgttaatcagcaacaacaaaataatgatacctcgcttggtacgaatttaagctggagaactc

SEQ ID NO: 94165 - DNA, 75 bp, synthetic construct
  source 1..75: mol_type = other DNA
gcatcatcacgctgtcctcggtttccggcgtaatgggcaatcgcggccaggtgaattacagcgcagccaaagccg

SEQ ID NO: 94166 - DNA, 75 bp, synthetic construct
  source 1..75: mol_type = other DNA
gccgggagctggcagcaaagtattcgggagacacgccactgatgctggttatctggtccccggaagaaattcagg

SEQ ID NO: 94167 - DNA, 75 bp, synthetic construct
  source 1..75: mol_type = other DNA
taccgtggataacaccatggtaatggccacagtggattacgtggatgacaaactgaaagagcatgaacagtcacg

SEQ ID NO: 94168 - DNA, 75 bp, synthetic construct
  source 1..75: mol_type = other DNA
tagcaatgatgaactcgcaaaagtgttctcaatgctggctgatgaagaagaaatgcaaaatataacactgatcgg

SEQ ID NO: 94169 - DNA, 75 bp, synthetic construct
  source 1..75: mol_type = other DNA
gtacataaggaccgtaaacttctcaccggcgacagtcctttcgcagcgaatgcgttgggtaaactggcggcgcag

SEQ ID NO: 94170 - DNA, 75 bp, synthetic construct
  source 1..75: mol_type = other DNA
ctgaaatcgacatccagaggaagaaaggggcaaatggtctctatggatgcctctgctgaactcaaacagctgtct

SEQ ID NO: 94171 - DNA, 75 bp, synthetic construct
  source 1..75: mol_type = other DNA
atgaaactcagtcgtcgtagctttatgaaagctaacgccgttgcggccgctgcggcggctgccggtctcagcgtg

SEQ ID NO: 94172 - DNA, 75 bp, synthetic construct
  source 1..75: mol_type = other DNA
atccgacaacaacatgtcagggagtggcgacgggaggtcctgaaaaaccagaaacgttcaactcatacatggaac

SEQ ID NO: 94173 - DNA, 75 bp, synthetic construct
  source 1..75: mol_type = other DNA
gttcaactcagtagcgccaccaacagcacgtctgaagcactggccgcaacgccgaaagcggtcaaggcagcctat

SEQ ID NO: 94174 - DNA, 75 bp, synthetic construct
  source 1..75: mol_type = other DNA
aatccacctgtaccactgcgaccatcgcggcctgccgctggcgctcatcagcacggaaggggcaacagaatggtg

SEQ ID NO: 94175 - DNA, 75 bp, synthetic construct
  source 1..75: mol_type = other DNA
atgtctgtatatacaaccgcagaattactggcatcgacccagcatcactttaagttcgatccgctgtttctgcgc

SEQ ID NO: 94176 - DNA, 75 bp, synthetic construct
  source 1..75: mol_type = other DNA
gccgttactgaatggcctgtttttatcaatcagcgatgaagttgtgttgattggtgatcggtattatgtgaaagc

SEQ ID NO: 94177 - DNA, 75 bp, synthetic construct
  source 1..75: mol_type = other DNA
atgcctgagtacagatcttcttgtcagtcttggtataaaaaaatagcgttattagacaataaagaacattcggca

SEQ ID NO: 94178 - DNA, 75 bp, synthetic construct
  source 1..75: mol_type = other DNA
tgagtcggtacagcgatacatcgtgaagccgggagaagtccacgccgtaaggccgcacccgttgccatcagggca

SEQ ID NO: 94179 - DNA, 75 bp, synthetic construct
  source 1..75: mol_type = other DNA
acgttcgccggatgttattggcgatggtcgatgattttcgctgcgtagtcatcaaactggcggagcgtattgctc

SEQ ID NO: 94180 - DNA, 75 bp, synthetic construct
  source 1..75: mol_type = other DNA
ttgcgatcgccagaaagcttggcagagcagtaaaacacactcccgaagcaatgccggaacctgtaaatacgctgg

SEQ ID NO: 94181 - DNA, 75 bp, synthetic construct
  source 1..75: mol_type = other DNA
atgagtcgttcagttctggttactggtgccagcaaaggcattggtcgcgccatcgcctgcaagcttgcggcagac

SEQ ID NO: 94182 - DNA, 75 bp, synthetic construct
  source 1..75: mol_type = other DNA
cgtgagccagcattatggaaaaaccgttgcgctgaacaatatcacactcgatattccggcccgttgcatggtcgg

SEQ ID NO: 94183 - DNA, 75 bp, synthetic construct
  source 1..75: mol_type = other DNA
tcgaaagcgctggatctgactgatttgtggcaactttttatcccgttgctgatagccatcccgctggtgatgggc

SEQ ID NO: 94184 - DNA, 75 bp, synthetic construct
  source 1..75: mol_type = other DNA
tcaagtatctgaatcatttaatgattcttctattggctgcccttctcttttaaatatgcgggatcagtacattct

SEQ ID NO: 94185 - DNA, 75 bp, synthetic construct
  source 1..75: mol_type = other DNA
aaattctgcgtaattacagggccgtgattaatgcgcggcgtcgtgaaatggggcagaaaccgctcaccactgcgc

SEQ ID NO: 94186 - DNA, 75 bp, synthetic construct
  source 1..75: mol_type = other DNA
gcatgcttacgttcagcacacctttggcggcggcggtagcttcctgctggcggcgttaatcttcatcgcctgcct

SEQ ID NO: 94187 - DNA, 75 bp, synthetic construct
  source 1..75: mol_type = other DNA
atgagaatgaccagccgcaaaaaagagatactcagctactttgaacctgatagcctcgattgggttactggtgag

SEQ ID NO: 94188 - DNA, 75 bp, synthetic construct
  source 1..75: mol_type = other DNA
atggatacacacaaccctgagttcgctgagcaggcagcaattactgcctcggtggtccctgacgagctacgcatc

SEQ ID NO: 94189 - DNA, 75 bp, synthetic construct
  source 1..75: mol_type = other DNA
gctttttgatgactctgcagcagcagcactttttgctgcttcacgggtctttgtcgatgccgttcctgcgctgga

SEQ ID NO: 94190 - DNA, 75 bp, synthetic construct
  source 1..75: mol_type = other DNA
ttggtaacactctcatttttaatcaccaccccggaggcatgggtacccgcattgggtgacgctcatcatggtttc

SEQ ID NO: 94191 - DNA, 75 bp, synthetic construct
  source 1..75: mol_type = other DNA
ctacgcatggagtacagcccggacgaataccaaaacctgctgatgtgcgagttcgtggacgatctcgcgtccgtg

SEQ ID NO: 94192 - DNA, 75 bp, synthetic construct
  source 1..75: mol_type = other DNA
tgtacgcagggtgagcgttatctggcgctggcagagaaacgcgaggctaacgagtcgtttgtctatggctggatg

SEQ ID NO: 94193 - DNA, 75 bp, synthetic construct
  source 1..75: mol_type = other DNA
ggttcgcttccgcgagacgcaggactggcttgatgagcatctgaaaccattactggaggcgctccccgctggtgc

SEQ ID NO: 94194 - DNA, 75 bp, synthetic construct
  source 1..75: mol_type = other DNA
aggcgagtatgtgtctgcgggtactgcggaatctctgccggcggtcatgaacgccgtatcagttatcagtgaggc

SEQ ID NO: 94195 - DNA, 75 bp, synthetic construct
  source 1..75: mol_type = other DNA
atgcaacaactttcctttctgcccggagcgatgacgcccggcgagcgcaacctcattcagcgggccctgaaaacc

SEQ ID NO: 94196 - DNA, 75 bp, synthetic construct
  source 1..75: mol_type = other DNA
ttctctgtgttgatgagtttgattatacaaaccaggaatttctcccggaggttataaaagcaatagatgttgccg

SEQ ID NO: 94197 - DNA, 75 bp, synthetic construct
  source 1..75: mol_type = other DNA
aacacggagccggtggtgcgtctgaacgtggagtccagagcggatactgggttaatgaatgcaaaaaccgaagag

SEQ ID NO: 94198 - DNA, 75 bp, synthetic construct
  source 1..75: mol_type = other DNA
tgaaaagaaccgcagctggacacgctattttctggcgcgggaattgcgtaaatcactgaagccggagcgacgacg

SEQ ID NO: 94199 - DNA, 75 bp, synthetic construct
  source 1..75: mol_type = other DNA
tcgactttaaacaaccaaaggagctggagtttaatcgtgcccgtctgcggcgggcatttgtgcagatcgggcgcg

SEQ ID NO: 94200 - DNA, 75 bp, synthetic construct
  source 1..75: mol_type = other DNA
cctgtctggtcgcctcatcttttgaagcagacgccgatgaggccgatgacgccgccgaactggcggacgatgccg

SEQ ID NO: 94201 - DNA, 75 bp, synthetic construct
  source 1..75: mol_type = other DNA
agcgagtcgttgaagctggcgctggcccgcgggttaatggacgccggtaccgatgtgctggacatcggactgagc

SEQ ID NO: 94202 - DNA, 75 bp, synthetic construct
  source 1..75: mol_type = other DNA
tccgggtgctgtatctgaataaccagaatcaactgattgccggtgaaaccctctttaccggcaccatcaaccgca

SEQ ID NO: 94203 - DNA, 75 bp, synthetic construct
  source 1..75: mol_type = other DNA
cccttttttttgatgtcgcccggatcatccgagccaaacagcctgccattttcgttcttgagaacgtaaaaaatc

SEQ ID NO: 94204 - DNA, 75 bp, synthetic construct
  source 1..75: mol_type = other DNA
gtctgctgaagtctttgcatttgtttcagaggtttttgctgcagaagcagacctcgctgctgcagtggcttgctc

SEQ ID NO: 94205 - DNA, 75 bp, synthetic construct
  source 1..75: mol_type = other DNA
agcagcgtggagcataccggggtcgtaaaaaggccctgtctgacaagcagacagctgccctaagaatgcgggttg

SEQ ID NO: 94206 - DNA, 75 bp, synthetic construct
  source 1..75: mol_type = other DNA
cgggattgatggccgtgtgaagattgatggccagacctggcttatccaggccaaacgctataccagctatattgc

SEQ ID NO: 94207 - DNA, 75 bp, synthetic construct
  source 1..75: mol_type = other DNA
aagcattgggcgaaccgatgctttccacttcgctaatgctgccaggcagcgaatttaccgaatcggacccggaag

SEQ ID NO: 94208 - DNA, 75 bp, synthetic construct
  source 1..75: mol_type = other DNA
caataacagcattgcttaatgatgagacgccttcctctatccataaattactggtgcaggttgcaagtatctatg

SEQ ID NO: 94209 - DNA, 75 bp, synthetic construct
  source 1..75: mol_type = other DNA
ccaacctcgccctgctttctgatgtctcgatggcggtgctgggcggcagcctgaaacgtcgtgagcgtatctcgg

SEQ ID NO: 94210 - DNA, 75 bp, synthetic construct
  source 1..75: mol_type = other DNA
ttaagcctgatggtcgtctgaaaaaatattttcatgatgaatgtgatttttatataaaatcgggaatagtagagg

SEQ ID NO: 94211 - DNA, 75 bp, synthetic construct
  source 1..75: mol_type = other DNA
atcaggtctgggtcaccgacattacttatagtgtgcccggagttcagggcgggcatggatgcttaaatgaaccgc

SEQ ID NO: 94212 - DNA, 75 bp, synthetic construct
  source 1..75: mol_type = other DNA
taattttctgatgactagaaagaggttacatagttgcgatgtaatttactcagaattatctgtaatagacgagtc

SEQ ID NO: 94213 - DNA, 75 bp, synthetic construct
  source 1..75: mol_type = other DNA
tatgtggacttatactcagtcttgtgttgcgatggtggattgcaagcttcgagatgcctcccgttcttttaacga

SEQ ID NO: 94214 - DNA, 75 bp, synthetic construct
  source 1..75: mol_type = other DNA
tagaacccactctggcagctatcagagctcgctggtgtattaattcaagtaaaacaactcaatcctttaacgatc

SEQ ID NO: 94215 - DNA, 75 bp, synthetic construct
  source 1..75: mol_type = other DNA
gtcgacaggagtttagtggagcattttattatgaagacagtcagctaacaggaagtcataaaactagctttacga

SEQ ID NO: 94216 - DNA, 75 bp, synthetic construct
  source 1..75: mol_type = other DNA
gccgtattcaccctggatgaaatccatctggttcagcccttgcaagagacttttcgccgcaacgacagtctgtgc

SEQ ID NO: 94217 - DNA, 75 bp, synthetic construct
  source 1..75: mol_type = other DNA
ttaccggaacgtatccgcgtctccatgacatctatttttggtctggcatcgctggggattggtattttactggtg

SEQ ID NO: 94218 - DNA, 75 bp, synthetic construct
  source 1..75: mol_type = other DNA
gtggcttacgccatctaccgcaccgcgcgtccggaaaatcggccggtcattaaggggttgctgctttccggcgtg

SEQ ID NO: 94219 - DNA, 75 bp, synthetic construct
  source 1..75: mol_type = other DNA
ccgatgcggtatttaccatcgcatctgatgacctgtggatcgagagtttagcgatccaacaattacacaccacgg

SEQ ID NO: 94220 - DNA, 75 bp, synthetic construct
  source 1..75: mol_type = other DNA
agcggcaaaacgggacgtgggaacaggggaaaatcagataccggatatggtttcatttagtggtgtgagggattt

SEQ ID NO: 94221 - DNA, 75 bp, synthetic construct
  source 1..75: mol_type = other DNA
cagaattatctgtaatagacgagtccttaaatcaaattgcggatatatatcaagagcttaatttttctaaattag

SEQ ID NO: 94222 - DNA, 75 bp, synthetic construct
  source 1..75: mol_type = other DNA
ttttgtgctgaatgagctgaaagccaaaggcctgtgccgcgattttctcgcccagcagaaagaccggggagacaa

SEQ ID NO: 94223 - DNA, 75 bp, synthetic construct
  source 1..75: mol_type = other DNA
atggttgccgtaaatcataccccacgactagcacacacacaaacggcctttgtgtggcgttttctggcactgagt

SEQ ID NO: 94224 - DNA, 75 bp, synthetic construct
  source 1..75: mol_type = other DNA
atacgtctgaaggttgttttgaaattggtgtcactatcagtaacccagtatttactgaagatgccattaacaaga

SEQ ID NO: 94225 - DNA, 75 bp, synthetic construct
  source 1..75: mol_type = other DNA
atcgcggcctctcccgatctgtcagaagctgccgtacgcctggaggcgctctgggatcatctggggaataatcag

SEQ ID NO: 94226 - DNA, 75 bp, synthetic construct
  source 1..75: mol_type = other DNA
aattaccgaaccaaaattctcttcgtatagctggtacgacaaaagcaggaaattagtcactctttacgggcacag

SEQ ID NO: 94227 - DNA, 75 bp, synthetic construct
  source 1..75: mol_type = other DNA
tatgccgtaagtattaatgatgaacaagccagaagtttaccgggcgtactggcgatttttacctgggaagatgtg

SEQ ID NO: 94228 - DNA, 75 bp, synthetic construct
  source 1..75: mol_type = other DNA
catcagctctacattccgcatattttcagttacctgaatgaagatattgattttgtgctgaatgagctgaaagcc

SEQ ID NO: 94229 - DNA, 75 bp, synthetic construct
  source 1..75: mol_type = other DNA
atgcacactgctttttcttccccgtcttctgcccctgccgcgccgctgatgccggtctctgatgccgttcaggag

SEQ ID NO: 94230 - DNA, 75 bp, synthetic construct
  source 1..75: mol_type = other DNA
gagatttattgcaaaatactctggatatttatatctttcaaaaaaaatgttatcagtggcgatcgctagtttatt

SEQ ID NO: 94231 - DNA, 75 bp, synthetic construct
  source 1..75: mol_type = other DNA
ggtttcatggggcagccttaacagttatgccgcatgtcctgatggctggcagcatcattccggtatcgaaacgtc

SEQ ID NO: 94232 - DNA, 75 bp, synthetic construct
  source 1..75: mol_type = other DNA
ttaagtcagatggtcgtctgaaaaaatattttcatgatgaatgtgatttttatacaaactcgggaatagttgagg

SEQ ID NO: 94233 - DNA, 75 bp, synthetic construct
  source 1..75: mol_type = other DNA
gcctgcccggtgcgccactggcgcggtacacgtatacggaagccggtgaactgctggcggtatatgaccgcagca

SEQ ID NO: 94234 - DNA, 75 bp, synthetic construct
  source 1..75: mol_type = other DNA
ctgttccgccatcggctgaaagtcatcttaacggctttaatactgaccagatgctgaagcagctgggcaacctga

SEQ ID NO: 94235 - DNA, 75 bp, synthetic construct
  source 1..75: mol_type = other DNA
acagccgggagcgtcagcttgctttttccctctggcttaaacgtctggcgaaatcacgccgggccggacatgagg

SEQ ID NO: 94236 - DNA, 75 bp, synthetic construct
  source 1..75: mol_type = other DNA
atgcatacgcggaaggcaataacggaggcaattcgaaaattaggagtccaaaccggtgacctgttgatggtgcat

SEQ ID NO: 94237 - DNA, 75 bp, synthetic construct
  source 1..75: mol_type = other DNA
tgttctccggggtaaaaaggtccgtacgaccatcagccggaaagccgttgccgcaggcgaccgcgtaaaccgtca

SEQ ID NO: 94238 - DNA, 75 bp, synthetic construct
  source 1..75: mol_type = other DNA
tgatgaggggatttcacagaaagcatttatccgcacgctgacaccccgcctgcaaaagctgggatggtggggaaa

SEQ ID NO: 94239 - DNA, 75 bp, synthetic construct
  source 1..75: mol_type = other DNA
gtgggcgcaggtatataccgctaaggattcaatccctggtgtgaatacaaccggtaatcagaacactactggtaa

SEQ ID NO: 94240 - DNA, 75 bp, synthetic construct
  source 1..75: mol_type = other DNA
agatattatgcagtctttacagaaggttattgaacaacttgatgttcgtcgtgctcaggtacatgttgaggcgtt

SEQ ID NO: 94241 - DNA, 75 bp, synthetic construct
  source 1..75: mol_type = other DNA
gagcgtgtctgcgccgcgctgcgggaactgaacaagcaccgggatattgttcggcagattgtcgattcatccggt

SEQ ID NO: 94242 - DNA, 75 bp, synthetic construct
  source 1..75: mol_type = other DNA
atgaccactctcggtcttgaactgggcaaaggcggtgaaggcgcggtttatgatatcaatgagtttgtcgatagc

SEQ ID NO: 94243 - DNA, 75 bp, synthetic construct
  source 1..75: mol_type = other DNA
attctcaacacattacatcagccgacaattttaaaccaaaaaatgaagtcttaaatacctggtatgtgggaatga

SEQ ID NO: 94244 - DNA, 75 bp, synthetic construct
  source 1..75: mol_type = other DNA
ctgattttacttacgtcagcacatggcaaggcttcgtttatgtggcgttcatcattgatgtgttcgccggataca

SEQ ID NO: 94245 - DNA, 75 bp, synthetic construct
  source 1..75: mol_type = other DNA
aattaccggagcgggtattggtgcggtcattccgttaagtgctgatgttgccggtactgctgaaccgtcagactg

SEQ ID NO: 94246 - DNA, 75 bp, synthetic construct
  source 1..75: mol_type = other DNA
gttaccctcattgtgcgtgggattttctactctatgttgcgcgcaatattgcttcatcttttgctacggttcacg

SEQ ID NO: 94247 - DNA, 75 bp, synthetic construct
  source 1..75: mol_type = other DNA
ttttaatcgccaagtcatttcttgatttctttacggcgatgatcttcgcctgctcgctgggtattgcggtatcgg

SEQ ID NO: 94248 - DNA, 75 bp, synthetic construct
  source 1..75: mol_type = other DNA
tgacgtaccagtctgtgccggtgccgaaccggatacagcgtaaaacgttcagctatgatgctggcacaaagcaag

SEQ ID NO: 94249 - DNA, 75 bp, synthetic construct
  source 1..75: mol_type = other DNA
atcgctaaacagaaagagcgcccaccagccagcaaaacgcggaaaagtgcggtaaaaataaaatctcgtggcttg

SEQ ID NO: 94250 - DNA, 75 bp, synthetic construct
  source 1..75: mol_type = other DNA
tctttcaatgcaggtagtaaaaggtttgtgatttatcaatcagcacaagataagaatcttcaggttgatattgta

SEQ ID NO: 94251 - DNA, 75 bp, synthetic construct
  source 1..75: mol_type = other DNA
tcatgcccaatatctcgatggtcgccgtgaaatgatgcaatggtacgcagattacattgattcgctttccaggca

SEQ ID NO: 94252 - DNA, 75 bp, synthetic construct
  source 1..75: mol_type = other DNA
gtatgaagtttctatccaccttcccgaaagggaaagtgaaactggttctggaactgacagaacgaaaccagctat

SEQ ID NO: 94253 - DNA, 75 bp, synthetic construct
  source 1..75: mol_type = other DNA
atgaacatcagcacggaaacccgcgaaattctgcgtaattacagggccgtgattaatgcacgacgtcgtgagatg

SEQ ID NO: 94254 - DNA, 75 bp, synthetic construct
  source 1..75: mol_type = other DNA
ccgaagtggacgtgatgagccgctatccggtcagttcttcctggctgctcaaccgcccggtaatgggcgatccgc

SEQ ID NO: 94255 - DNA, 75 bp, synthetic construct
  source 1..75: mol_type = other DNA
gggcttatcaccctctggcactacgatgcgtcggaccgcatcacgcaccggacggtgaacggcgacccggcagag

SEQ ID NO: 94256 - DNA, 75 bp, synthetic construct
  source 1..75: mol_type = other DNA
ccctgcggcatttattgaaaccaatattgtgggtacttatgttcttttagaagcggcgcgcaattattggtctgg

SEQ ID NO: 94257 - DNA, 75 bp, synthetic construct
  source 1..75: mol_type = other DNA
acttccggcgctgaacgcgcgacttaacgaagccgtcagtcgcgaacgtcagacgggaatgcagatggtgcagtc

SEQ ID NO: 94258 - DNA, 75 bp, synthetic construct
  source 1..75: mol_type = other DNA
atgtaccccaggctggcaaaggcttatccgaccaataaattaccggatttacggggcgaatttatccgtggctgg

SEQ ID NO: 94259 - DNA, 75 bp, synthetic construct
  source 1..75: mol_type = other DNA
aaggacgatgtcacttatgcaataaagcccacttgctggcctgggcttgacattattccttcctgtctggctctg

SEQ ID NO: 94260 - DNA, 75 bp, synthetic construct
  source 1..75: mol_type = other DNA
ggaaaatatcattctcccggcctttggagcaatacctcttgtacacatcccttcccgggagaatcgaatttatct

SEQ ID NO: 94261 - DNA, 75 bp, synthetic construct
  source 1..75: mol_type = other DNA
actttaaagcctggctggtcggcgcagctgatgcgccagatctgggtaatttcgaagcaaataccaccttccaga

SEQ ID NO: 94262 - DNA, 75 bp, synthetic construct
  source 1..75: mol_type = other DNA
accaggagctggtgaaactggttactgaacgcagcaatcagccactacatgatgtggacctggacagttatttat

SEQ ID NO: 94263 - DNA, 75 bp, synthetic construct
  source 1..75: mol_type = other DNA
tacgctttggtttacaggcgtttgccagtctggacggtcaatttacgttgtgtggaagtatgttgctggtatggc

SEQ ID NO: 94264 - DNA, 75 bp, synthetic construct
  source 1..75: mol_type = other DNA
ctggacggcctgctgatcttgcctgaaatgagtcaggatcaggtgaagcgcctgtctacccttgttgccgcgcat

SEQ ID NO: 94265 - DNA, 75 bp, synthetic construct
  source 1..75: mol_type = other DNA
gtgtgatttggcgtattggtctgttttacgtcggctccgtggtgttgctggttatgttattgccgtggagcgcgt

SEQ ID NO: 94266 - DNA, 75 bp, synthetic construct
  source 1..75: mol_type = other DNA
tggtggaaatatatgaccgacgttatgcccgctaatgcggataacagcccagtcagtagcgaactgcaagaagtg

SEQ ID NO: 94267 - DNA, 75 bp, synthetic construct
  source 1..75: mol_type = other DNA
caaggaaacggggaaatccctgcgtgataatgctgaatacgttaatgcttgggcgtctctgcatcgtgttcagca

SEQ ID NO: 94268 - DNA, 75 bp, synthetic construct
  source 1..75: mol_type = other DNA
aattaccgcgtcagtatgccgcttatagcctttcgctccggaaaaaacatgaagcatctcggaggtgcagcatga

SEQ ID NO: 94269 - DNA, 75 bp, synthetic construct
  source 1..75: mol_type = other DNA
gttatgagagtgatcctctgctagtgacattgcagtatcaggacgaggattatggctatggttatcgctcagaaa

SEQ ID NO: 94270 - DNA, 75 bp, synthetic construct
  source 1..75: mol_type = other DNA
aaacgcccaacgctaactgtgcgccagcgtactggaattatcaggagatccgcccgctgctgctggagagcggca

SEQ ID NO: 94271 - DNA, 75 bp, synthetic construct
  source 1..75: mol_type = other DNA
acggggtgagtttattcgtggctgggatgatgggcggggaattgattcagggcgttccttgcttaatgcacaatc

SEQ ID NO: 94272 - DNA, 75 bp, synthetic construct
  source 1..75: mol_type = other DNA
gttttgacccgtcagaatctggtggggatccgtcagtaaaatcaactactgatccatcagatataaatccttctt

SEQ ID NO: 94273 - DNA, 75 bp, synthetic construct
  source 1..75: mol_type = other DNA
ttagatctgaattattatcacgatccccatgcgacggaaattgaagaagatggcagcactatcagtgacgatgcg

SEQ ID NO: 94274 - DNA, 75 bp, synthetic construct
  source 1..75: mol_type = other DNA
atcgtaccgctctcccgccaggcgattgcccttctgaaacagatacaggagctttccggccatctggatctggtg

SEQ ID NO: 94275 - DNA, 75 bp, synthetic construct
  source 1..75: mol_type = other DNA
cttacaacttgccagaattaatcgaaggcatggaagtttccattgatgtaagcacttgtgatgctgatttaggta

SEQ ID NO: 94276 - DNA, 75 bp, synthetic construct
  source 1..75: mol_type = other DNA
ttgcagcagcaatggtaatgggtgcgttcacttcaacatcttctttcgcagaaggtaacaacggtactgcccgtt

SEQ ID NO: 94277 - DNA, 75 bp, synthetic construct
  source 1..75: mol_type = other DNA
gctgcggctttaacgaggctgccgcagcgttctcatggaacagcccgaaaaaggccattaacccttatctggacc

SEQ ID NO: 94278 - DNA, 75 bp, synthetic construct
  source 1..75: mol_type = other DNA
atttttaacacatagttgtttaaacgctttcggtccgtctttaggacctcgattctgttccgagggttgtataac

SEQ ID NO: 94279 - DNA, 75 bp, synthetic construct
  source 1..75: mol_type = other DNA
cattttgcctggcgactggtgaatccggcaacgctgaaatattttgatgcgccgcacaggccgatgtatatgcag

SEQ ID NO: 94280 - DNA, 75 bp, synthetic construct
  source 1..75: mol_type = other DNA
tgggacaggggaaggggtgtaagtggatgctggtaaaagaaaccggggaaaatttaccagcagagccgaaagttg

SEQ ID NO: 94281 - DNA, 75 bp, synthetic construct
  source 1..75: mol_type = other DNA
actggcttatgaaagccgccctaaagagattcgtgacggctggttgatgtggttaggtctcggtgaaccacgtta

SEQ ID NO: 94282 - DNA, 75 bp, synthetic construct
  source 1..75: mol_type = other DNA
ttatttgctgaatgagctacagcttgactatctgttacgcgttatccgtgggcgtgacgcagaacgtatcaacca

SEQ ID NO: 94283 - DNA, 75 bp, synthetic construct
  source 1..75: mol_type = other DNA
ctgggcgacgggctgaacaatacgctgacctggctgtgggataactggtacggcaaatctcgccgcgtgatgcag

SEQ ID NO: 94284 - DNA, 75 bp, synthetic construct
  source 1..75: mol_type = other DNA
tagatattgcagggggcgtaaatgcattagctcgcgccgttggggtcaaacagccatctgtttcccgatggagaa

SEQ ID NO: 94285 - DNA, 75 bp, synthetic construct
  source 1..75: mol_type = other DNA
ggtgggcgcgggcctggggctggtgggcgtgctgtttcagcaagtgctgcgtaacccgctggcggaaccgacgac

SEQ ID NO: 94286 - DNA, 75 bp, synthetic construct
  source 1..75: mol_type = other DNA
tagattcaatctgtcaatgcaacacccctttcaattatctctttcggtgttttgaacttcagtgtctttctcggt

SEQ ID NO: 94287 - DNA, 75 bp, synthetic construct
  source 1..75: mol_type = other DNA
aatgcttatctgacaggtggtactgtcggcactccctattatggacgtgtcagcaatcaaactgttctcattagt

SEQ ID NO: 94288 - DNA, 75 bp, synthetic construct
  source 1..75: mol_type = other DNA
tcgggtctgtttaaccatcttctcagactgccgctggcgttttttgaacgccgtaaattaggtgatatccagtcg

SEQ ID NO: 94289 - DNA, 75 bp, synthetic construct
  source 1..75: mol_type = other DNA
gatttcactgcaatgtcttacaattgggcgatagccggaatacttttatcattattatctataagtgccgccttt

SEQ ID NO: 94290 - DNA, 75 bp, synthetic construct
  source 1..75: mol_type = other DNA
gcagctttacttacgatgataaataccggggccggatggtggcgcaccgtcacacgggccgaccggaaatccgtt

SEQ ID NO: 94291 - DNA, 75 bp, synthetic construct
  source 1..75: mol_type = other DNA
gcacagataattttggactttaaaaatggacgaggttattactgttcacatccatttatttcaagtctttcagga

SEQ ID NO: 94292 - DNA, 75 bp, synthetic construct
  source 1..75: mol_type = other DNA
aggggaatacgtggagttgagcgacggcactttatcgtggttagggaacgccttattctggatgccgctgccaga

SEQ ID NO: 94293 - DNA, 75 bp, synthetic construct
  source 1..75: mol_type = other DNA
atgaatatcagcacagaaacccgcgaaattctgcgcaattacaaagccgtgattaatgcacgacgtcgtgagatg

SEQ ID NO: 94294 - DNA, 75 bp, synthetic construct
  source 1..75: mol_type = other DNA
atccccactatgacgaagcatgccgcattttcgcacagcgtcacaacatggcgaagctggccgagcgtgcaggta

SEQ ID NO: 94295 - DNA, 75 bp, synthetic construct
  source 1..75: mol_type = other DNA
tataaaactgctagcgattaacggtattgcaccgactgtggaaaatattcgcaacgacaaatatccctatatagt

SEQ ID NO: 94296 - DNA, 75 bp, synthetic construct
  source 1..75: mol_type = other DNA
tgagcctttcagccttacccgcagaggcatcaacggtcagcgctgaaataccatatcagacttttcgtgactttg

SEQ ID NO: 94297 - DNA, 75 bp, synthetic construct
  source 1..75: mol_type = other DNA
ccggaagttgtgcgtgagctggcgcgtatcgtgctggcatcgctggaagcagaaccagttgcttatattttcaaa

SEQ ID NO: 94298 - DNA, 75 bp, synthetic construct
  source 1..75: mol_type = other DNA
ggtgtaatatacgaaaatggtgaaggtgtgagtcagaactatcaacaggcaaaggcttggtatgaaaaggcagcc

SEQ ID NO: 94299 - DNA, 75 bp, synthetic construct
  source 1..75: mol_type = other DNA
ctttatgactggtcgtgccaatggcgtcgcgacttatcgtaatactgatttcttcggtctggtaaatggtctgaa

SEQ ID NO: 94300 - DNA, 75 bp, synthetic construct
  source 1..75: mol_type = other DNA
ttccgtgggtggttttcagcctgatttcatcggtgtcggcggacgtgatgggcgggcaggcggagtcctcagtgt

SEQ ID NO: 94301 - DNA, 75 bp, synthetic construct
  source 1..75: mol_type = other DNA
cggagattaaatcattcatcactggtttcctgagcgacccggcgcacgataaccaatcttcagacagcctgcttg

SEQ ID NO: 94302 - DNA, 75 bp, synthetic construct
  source 1..75: mol_type = other DNA
caaattgaccgtgaatataacacgttcactggtatgtattctgacaaagcagaagtcgaacggtgggtgcggctg

SEQ ID NO: 94303 - DNA, 75 bp, synthetic construct
  source 1..75: mol_type = other DNA
ccgctgtacaaatcgacacagcgaaaaaaacacaggcacaggtttataagacaggtgttttaaatgttgatgctc

SEQ ID NO: 94304 - DNA, 75 bp, synthetic construct
  source 1..75: mol_type = other DNA
ctgtcctcagggctccatattgtccccgatacttgcaaatatctaccttcaccatgtgatagacgaatggtttgc

SEQ ID NO: 94305 - DNA, 75 bp, synthetic construct
  source 1..75: mol_type = other DNA
ttttaaaaattgaagaaaactgcgttgacatgaaaatgtacaggaaaatggttgcagagaaaaaggaacgcgaac

SEQ ID NO: 94306 - DNA, 75 bp, synthetic construct
  source 1..75: mol_type = other DNA
cgctcgaacatcatcaaccttgaatggcaacaaatagatatgcagcgccgggtggcatggataaacccggaagag

SEQ ID NO: 94307 - DNA, 75 bp, synthetic construct
  source 1..75: mol_type = other DNA
atgccttcgacaagcaccaaaaaagaaatggcggttagtgatgtgctttacgcgctttcgactatatgtgacgga

SEQ ID NO: 94308 - DNA, 75 bp, synthetic construct
  source 1..75: mol_type = other DNA
ttatgctgtccggaatattgtgcacactggttttttcccgattatttggaatgtctgtcttatgggaatctttac

SEQ ID NO: 94309 - DNA, 75 bp, synthetic construct
  source 1..75: mol_type = other DNA
ccgttcgccgtctgctgaacccggcaaccggtgaggaagatacgctgaaaaaagagaggctcgatgaagtacagg

SEQ ID NO: 94310 - DNA, 75 bp, synthetic construct
  source 1..75: mol_type = other DNA
caggcacagctcgcggcaatctctgtaattcgccccggcgtgcgctgccagcaggttgacgatgccgcgcgccgc

SEQ ID NO: 94311 - DNA, 75 bp, synthetic construct
  source 1..75: mol_type = other DNA
ttaatcgagggcatggaagtttccattgatgtaagcacttgtgatgctgatttaggtaatcgctatttcggcacc

SEQ ID NO: 94312 - DNA, 75 bp, synthetic construct
  source 1..75: mol_type = other DNA
gtgagcggcacctggaaaaccaacctcacgccagacaaactgggcgtggtggcgctggacccggatgcactctct

SEQ ID NO: 94313 - DNA, 75 bp, synthetic construct
  source 1..75: mol_type = other DNA
acgccaggtgcttaaagaggacaacggcaatatttcgcaaaccgcaaaatctccggcagagcgcaagagggcgca

SEQ ID NO: 94314 - DNA, 75 bp, synthetic construct
  source 1..75: mol_type = other DNA
ttaacgtggtgcagccacaatcagcaccatgatgacacgctatatgttcgagctgaccttgtgaatggcaactat

SEQ ID NO: 94315 - DNA, 75 bp, synthetic construct
  source 1..75: mol_type = other DNA
tcctatctgcgcgatccgcttattcgccacctctccttcctgcgcaaaaaacaggaagccgatcgtcagaaaggc

SEQ ID NO: 94316 - DNA, 75 bp, synthetic construct
  source 1..75: mol_type = other DNA
cctggcagcctgtaccgggtccacaaacgggagagccggttattgctcctgcaccggaaggttacccacagcagt

SEQ ID NO: 94317 - DNA, 75 bp, synthetic construct
  source 1..75: mol_type = other DNA
gaaatagtcgtcacgcgttctcctgaacaggtatttcatcccgccacgcttgcctcattcgaagggatgagcatc

SEQ ID NO: 94318 - DNA, 75 bp, synthetic construct
  source 1..75: mol_type = other DNA
tggctggcacataatgattattccgccaacacaccatgcccggtgggatgaggcagaaaaggctttccatgtccg

SEQ ID NO: 94319 - DNA, 75 bp, synthetic construct
  source 1..75: mol_type = other DNA
atggataatgaaagtaaaaaaacaagaacagaaaaaacattaaagcaaaaggttgcgtttgctcagcttgaactt

SEQ ID NO: 94320 - DNA, 75 bp, synthetic construct
  source 1..75: mol_type = other DNA
tggctggtacagatggctgccagctacaatccgacggtctataccgcgctgatcaacatggaacacatcaagtct

SEQ ID NO: 94321 - DNA, 75 bp, synthetic construct
  source 1..75: mol_type = other DNA
cctttcggcgcggagatgcaacgattaagccgggtaatggtattgagcaggcaacccactggatgaaattaccgg

SEQ ID NO: 94322 - DNA, 75 bp, synthetic construct
  source 1..75: mol_type = other DNA
cgaactggaagaaatccagaatgacaaaccgtccctgtttgcccgagtcacggcgttgtttaccaaaaaagagca

SEQ ID NO: 94323 - DNA, 75 bp, synthetic construct
  source 1..75: mol_type = other DNA
tttgttgaaatgctgatgcacggcggacttatggcaacaatgagacgtgtaatggaagaccagagaaaagaacct

SEQ ID NO: 94324 - DNA, 75 bp, synthetic construct
  source 1..75: mol_type = other DNA
caaagagaaagcacggtgaatggttcgccctgtccaaggatgacattgagggattgaaatctgtagcgattactt

SEQ ID NO: 94325 - DNA, 75 bp, synthetic construct
  source 1..75: mol_type = other DNA
atctggaaacagaattatttgatggcaacactaacggtttcttcatggtatcaggccttgagaaagactgggatg

SEQ ID NO: 94326 - DNA, 75 bp, synthetic construct
  source 1..75: mol_type = other DNA
gcttcaaaaattaatgcggaggctaaaacaaggattaaattacgaggaaaaaaatttcttgaagatatagttggt

SEQ ID NO: 94327 - DNA, 75 bp, synthetic construct
  source 1..75: mol_type = other DNA
acgctattggcacattctgtgcctgagtccgggccggcctttaacctgatgataccgcagtctcattgtccctgc

SEQ ID NO: 94328 - DNA, 75 bp, synthetic construct
  source 1..75: mol_type = other DNA
acctgccagccattataggcatgatgttaatttgtgccggtgtgttggttattaatctattgtcacgaagcacac

SEQ ID NO: 94329 - DNA, 75 bp, synthetic construct
  source 1..75: mol_type = other DNA
tcgacaccatcgcgcgtaacttttccctttccgccagttcggcaggctttattgttaccgccgcgcagttgggct

SEQ ID NO: 94330 - DNA, 75 bp, synthetic construct
  source 1..75: mol_type = other DNA
ggtgtctgaggaaaagaaccattacctggtggtggatggttttcatcgccaggtgctgggcagggaagcaggtac

SEQ ID NO: 94331 - DNA, 75 bp, synthetic construct
  source 1..75: mol_type = other DNA
caaacccatttaacggcctgacaccattaaagagatccagaacagaaccagatccgctcacacgtgacgaattta

SEQ ID NO: 94332 - DNA, 75 bp, synthetic construct
  source 1..75: mol_type = other DNA
gggacgtcttgacgaagcgattgtcagtaaattttttaagggagaaaaagacgatgtcgaaacggtcgatgtcat

SEQ ID NO: 94333 - DNA, 75 bp, synthetic construct
  source 1..75: mol_type = other DNA
cgatgaatgtcggttctaccacgcttgagagctgggtacgtcagctcaggcgagagcgccaaggtattgcgccct

SEQ ID NO: 94334 - DNA, 75 bp, synthetic construct
  source 1..75: mol_type = other DNA
gatgtttacctccctcctgaactttttgctcaggcttacaagttaaaaaataaggaaatgaatgcgcaactcgac

SEQ ID NO: 94335 - DNA, 75 bp, synthetic construct
  source 1..75: mol_type = other DNA
atactcagagtgcagttgatgcattgtaccggttcaggtcagataaactgtgtgccgatatagccagtgatgtgt

SEQ ID NO: 94336 - DNA, 75 bp, synthetic construct
  source 1..75: mol_type = other DNA
ctgtggtggtgaagccgtcggatggagaaggcacagtaatcagcgccaccagcgacccggagtattactttgttg

SEQ ID NO: 94337 - DNA, 75 bp, synthetic construct
  source 1..75: mol_type = other DNA
gttcgtatcgcaaaatattacttttttgggcgataaagcaagcggtatcggcacactgaacctgatggatgcgac

SEQ ID NO: 94338 - DNA, 75 bp, synthetic construct
  source 1..75: mol_type = other DNA
tctgcacatttttacgtatgcagccggggatcggaaatacctgcatcatgccacccgtgaacaacgcaaacacat

SEQ ID NO: 94339 - DNA, 75 bp, synthetic construct
  source 1..75: mol_type = other DNA
gcaacgtatccgcgagctggaaaagcaagttcgccgtctggaggaacaaaatacgatattaaaaaaggctaccgc

SEQ ID NO: 94340 - DNA, 75 bp, synthetic construct
  source 1..75: mol_type = other DNA
ggaaaacaggatgatgaagaaaaaccgcagccatctggcgcaatggcagatgaacaggcaacgactgaagcagtg

SEQ ID NO: 94341 - DNA, 75 bp, synthetic construct
  source 1..75: mol_type = other DNA
tatcactcaactgaccggcttaaccgataagtggttttataagctcatcaaagatggtgcctttccggcccccat

SEQ ID NO: 94342 - DNA, 75 bp, synthetic construct
  source 1..75: mol_type = other DNA
ccgtcagctatggcgcacaaaccgtgctggatggactttctctcgccctgcctgccggaaaaatcacggccctgc

SEQ ID NO: 94343 - DNA, 75 bp, synthetic construct
  source 1..75: mol_type = other DNA
ctgttaacaccagactctggcgagatattgcttgatgaaaaacccatagccggtttttccgcccgccagctggct

SEQ ID NO: 94344 - DNA, 75 bp, synthetic construct
  source 1..75: mol_type = other DNA
ttcagggtagccaacctgtaagccaaacttacaagtttccagttaatacaccttgccaggatgcgccagcccata

SEQ ID NO: 94345 - DNA, 75 bp, synthetic construct
  source 1..75: mol_type = other DNA
tcgatgcgttaagtcctgatggcaacgtgaataactggctaatgaatggcggacaatggttcttcatgctggaca

SEQ ID NO: 94346 - DNA, 75 bp, synthetic construct
  source 1..75: mol_type = other DNA
gacatcaccgaacacacctgagttcctcagcaacgctaaaggcacttattcaaagcgagatcggtgatttcttcg

SEQ ID NO: 94347 - DNA, 75 bp, synthetic construct
  source 1..75: mol_type = other DNA
gccagcatttaacgaaggcatgcgcaaagcgttttttgagcaaccgaaagaacgccgcgacgcatggttgttgtg

SEQ ID NO: 94348 - DNA, 75 bp, synthetic construct
  source 1..75: mol_type = other DNA
atgatgacctgtcagagtgcgatggcttccctggcggcagaccagacccgctatatctttcgcggggacaaggat

SEQ ID NO: 94349 - DNA, 75 bp, synthetic construct
  source 1..75: mol_type = other DNA
tttttatcatggcatttgttgccatcattgaccgtttcatttttcgtcgcaagagtgttgagattttgagtattg

SEQ ID NO: 94350 - DNA, 75 bp, synthetic construct
  source 1..75: mol_type = other DNA
cagtaagctgtttaagtatgtaatgctttttttctttttgctatcattttcattgctttttatattgttaatgcc

SEQ ID NO: 94351 - DNA, 75 bp, synthetic construct
  source 1..75: mol_type = other DNA
aacactgggggcacctggtgaaccggaaacaccggaagcaatacagcgcgagctattacaacgcatcgacaacgt

SEQ ID NO: 94352 - DNA, 75 bp, synthetic construct
  source 1..75: mol_type = other DNA
atgaccagatggtcgacatggcatttatcactcaactgaccggcttaaccgataagtggttttataagctcatca

SEQ ID NO: 94353 - DNA, 75 bp, synthetic construct
  source 1..75: mol_type = other DNA
cgcaacagttatgtgaaaacatggggttgcggaggttttttgaatgagacgaacatttacagcagaggaaaaagc

SEQ ID NO: 94354 - DNA, 75 bp, synthetic construct
  source 1..75: mol_type = other DNA
agccctgatggagccacttttatcgttcgcaaaagtatctgtggcgaaaatatctacaagcgtattggacgatat

SEQ ID NO: 94355 - DNA, 75 bp, synthetic construct
  source 1..75: mol_type = other DNA
gggggacacaaaagacactattacaaaagaaaaaagaaaagattattcgtccgagaattctggcgaatcctctga

SEQ ID NO: 94356 - DNA, 75 bp, synthetic construct
  source 1..75: mol_type = other DNA
ttgggtatattgcaaatggtataggtgatgatatatcaagtattgccaggacaatgctcggtgaagttgtggaaa

SEQ ID NO: 94357 - DNA, 75 bp, synthetic construct
  source 1..75: mol_type = other DNA
gtgccattctggtaagtgctgtatgggcggttattttgctctcatggtttgaatccagccttaccttaagcgatt

SEQ ID NO: 94358 - DNA, 75 bp, synthetic construct
  source 1..75: mol_type = other DNA
gaatcacaacgggccaactggaactactcaaagcacagtccgcagtagcaggttgctcaatgattcaggtgttaa

SEQ ID NO: 94359 - DNA, 75 bp, synthetic construct
  source 1..75: mol_type = other DNA
tggaaggcaaccttcacgcaaattgaccatgaatataatacgttcaccgctatgtattctgacaaagcagaagcc

SEQ ID NO: 94360 - DNA, 75 bp, synthetic construct
  source 1..75: mol_type = other DNA
gttcagactgctgaacattatcaggctgcagcactaggggttggtttgtcgctaggaaatatgggtgcagcatca

SEQ ID NO: 94361 - DNA, 75 bp, synthetic construct
  source 1..75: mol_type = other DNA
ggttttcatttaaccagggacggacaacggctgttcactgaacgttatatcagaaaccttaatgagctgtttgag

SEQ ID NO: 94362 - DNA, 75 bp, synthetic construct
  source 1..75: mol_type = other DNA
aatgctgcggaaagagcgcttcgtgcagtctgtctcggaaagaaaaactttatgttctttggcagcgatcacggc

SEQ ID NO: 94363 - DNA, 75 bp, synthetic construct
  source 1..75: mol_type = other DNA
aaggtttagatgataatttaagttattatattaataataaaaatgacgtttctgttatagtttatgccattctta

SEQ ID NO: 94364 - DNA, 75 bp, synthetic construct
  source 1..75: mol_type = other DNA
atcagccggggagcttcgcgccgctcatccgcatcgaaacagacaacggcgagcgggagaaagcgcagcgccgca

SEQ ID NO: 94365 - DNA, 75 bp, synthetic construct
  source 1..75: mol_type = other DNA
atatattgaccagccgctggaaaaaatagtgggtctgcaaacggatgcgccattaaagcgtgcgctgcatccgtt

SEQ ID NO: 94366 - DNA, 75 bp, synthetic construct
  source 1..75: mol_type = other DNA
catagacaaaagacgagaagaaggacgtatcgagtgggaacaggtcagaacaggcaaacagaagggcaaagaaca

SEQ ID NO: 94367 - DNA, 75 bp, synthetic construct
  source 1..75: mol_type = other DNA
atgctgtgcctgaaatatccggagccggaagaggtgtcacaggtgcacccagccggaagtgtgtttgtgctgccg

SEQ ID NO: 94368 - DNA, 75 bp, synthetic construct
  source 1..75: mol_type = other DNA
catctgagatggtatatccaggttgtggatgcggccgatttgttctatctgctgttgtggctgaatggtatggag

SEQ ID NO: 94369 - DNA, 75 bp, synthetic construct
  source 1..75: mol_type = other DNA
catcgctgattgcccgtacagaacagaatattgaacagcgcctgccgggtagctggcctcaggcccgtgaaaaaa

SEQ ID NO: 94370 - DNA, 75 bp, synthetic construct
  source 1..75: mol_type = other DNA
caggaaaaccgcacccccggcagcctgccgggaacaaagacgcagatgaccatccgctccaaaacgtacatgggc

SEQ ID NO: 94371 - DNA, 75 bp, synthetic construct
  source 1..75: mol_type = other DNA
agtgaccaacgtgggcaaaccttccgtggcggaagaacgcagcgaaattacgccggccactgcaattaaggtgac

SEQ ID NO: 94372 - DNA, 75 bp, synthetic construct
  source 1..75: mol_type = other DNA
cggggcttgccgaatacggcccctttttacctcacgggctgcaggtggagctgccggacattccgacaaccacca

SEQ ID NO: 94373 - DNA, 75 bp, synthetic construct
  source 1..75: mol_type = other DNA
attttgaagtccgcagccccctcaaatcggttatggctggtgatgctgaattgctgacggtgggagaaattacat

SEQ ID NO: 94374 - DNA, 75 bp, synthetic construct
  source 1..75: mol_type = other DNA
tcagtttctcgccgggctgaatcagttgctgccacaagagctggatgggcagtatccgtctcactggcgcgttaa

SEQ ID NO: 94375 - DNA, 75 bp, synthetic construct
  source 1..75: mol_type = other DNA
ggcatccgtgccgttcacaagatgaattgctggcagaactatcaacgaaaaaacgggggaacaaatggctattga

SEQ ID NO: 94376 - DNA, 75 bp, synthetic construct
  source 1..75: mol_type = other DNA
atgaacgaccagcaaatcgaaaaagaaatcgttgagaaaggcaaaaccgctccgagaatcactccgcagcacatc

SEQ ID NO: 94377 - DNA, 75 bp, synthetic construct
  source 1..75: mol_type = other DNA
tcaccggtactacgatccgttgcaggggcggtatattactcaggacccgatggggttgaaagggggatggaattt

SEQ ID NO: 94378 - DNA, 75 bp, synthetic construct
  source 1..75: mol_type = other DNA
tgcccatcttgcgccggattacctgcaggatgcggtgagatttaatccccttggagatgccttatatgaagcctc

SEQ ID NO: 94379 - DNA, 75 bp, synthetic construct
  source 1..75: mol_type = other DNA
gagcgggaaaaagcgcagcggcgcagcctggcagagacgctccagcaggaagggagtgagaacggccacggcgtg

SEQ ID NO: 94380 - DNA, 75 bp, synthetic construct
  source 1..75: mol_type = other DNA
acctttcacgtgaacgctgccagttaatactgactcagcttgttatggcgggtctggcagattatcagttcggtt

SEQ ID NO: 94381 - DNA, 75 bp, synthetic construct
  source 1..75: mol_type = other DNA
cgatagcggcatcaatactttaatgaatgaaggattcttaactaaaaaggatctaaaagactttgctgataatcc

SEQ ID NO: 94382 - DNA, 75 bp, synthetic construct
  source 1..75: mol_type = other DNA
gaaatagtcgtcacgcgttctcctgagcaggtattccatcccgccacgcttgcctcattcgaaggaatgagtatc

SEQ ID NO: 94383 - DNA, 75 bp, synthetic construct
  source 1..75: mol_type = other DNA
gctatcgccaacgcggtgtataacgccaccggtattcgggtacgggattatcccatcactctggataagctgctc

SEQ ID NO: 94384 - DNA, 75 bp, synthetic construct
  source 1..75: mol_type = other DNA
taatagagataattaagcgcaatataacggttatggatcgttatcctgatttagtaactgcacaaatggatctgg

SEQ ID NO: 94385 - DNA, 75 bp, synthetic construct
  source 1..75: mol_type = other DNA
ccaatcacacgaccacaacgtcaaaacatcgccagacgtccaaatagaggccgtagctgggtaacatcgttctaa

SEQ ID NO: 94386 - DNA, 75 bp, synthetic construct
  source 1..75: mol_type = other DNA
gtgatgtgtgacgaagattatgaaggagaaaagtgctgcccgcgttgtggtaccggggtatacagcagggcgtgg

SEQ ID NO: 94387 - DNA, 75 bp, synthetic construct
  source 1..75: mol_type = other DNA
ggcatcactggcagcagtatcggatgaacgagcagcctatgaattatttatggagaagcgtttcggggaatctgt

SEQ ID NO: 94388 - DNA, 75 bp, synthetic construct
  source 1..75: mol_type = other DNA
aaatcagttgcagagctgtaatgatatctccgggagtgctgcgttggtaggggcatcccgggatagagaaatttt

SEQ ID NO: 94389 - DNA, 75 bp, synthetic construct
  source 1..75: mol_type = other DNA
tatggtaccggaaccgcattaattttatgttataagagtttatttttaatgtccagatggtttaatagtatttat

SEQ ID NO: 94390 - DNA, 75 bp, synthetic construct
  source 1..75: mol_type = other DNA
cttgttctgtatgtatataaacactatcgacatattatgaccgggaacattccttaccccctctgcgctcgcaga

SEQ ID NO: 94391 - DNA, 75 bp, synthetic construct
  source 1..75: mol_type = other DNA
tttaggtaatcgctatttcggtaccgtcaccgaggcgttagaacttgatactgccaagaatggttacatcctcct

SEQ ID NO: 94392 - DNA, 75 bp, synthetic construct
  source 1..75: mol_type = other DNA
gttctggtgatgatgcgaaagaggaacaggaggatttgaacgttgcgcgtagtatggtgacatcaggagatatca

SEQ ID NO: 94393 - DNA, 75 bp, synthetic construct
  source 1..75: mol_type = other DNA
gatggctgggtggaaatcgacaacaacatcgctgaaaatgccctgcgggcggtcagtctgggtcgtaaaaacttc

SEQ ID NO: 94394 - DNA, 75 bp, synthetic construct
  source 1..75: mol_type = other DNA
tcgcaacctggcttgttgatggggaaccattcgaaagccagactcatgatgcactggaaatgctcaccactcatt

SEQ ID NO: 94395 - DNA, 75 bp, synthetic construct
  source 1..75: mol_type = other DNA
caatggcaaatcaaaagaaaaactggtggaaccgcatgcgtgcagccatcaagacaggagatgccgacaccatga

SEQ ID NO: 94396 - DNA, 75 bp, synthetic construct
  source 1..75: mol_type = other DNA
aaaattgctgaactcgaactacgactcaaagaagacagaagaaacgaaatcgtagaaaagattcttcaaaaaaac

SEQ ID NO: 94397 - DNA, 75 bp, synthetic construct
  source 1..75: mol_type = other DNA
atgcacctggcttgacccggcagagaaagaggcccgtcgtttgcatctgcagggcatgacggttccggattatac

SEQ ID NO: 94398 - DNA, 75 bp, synthetic construct
  source 1..75: mol_type = other DNA
cctcatactggcgcaactcgcttgcggatgctgagtcaggaaagggcagttttaaacggaaagacgcccaaaatt

SEQ ID NO: 94399 - DNA, 75 bp, synthetic construct
  source 1..75: mol_type = other DNA
atgctgaaacagcaggatatgacagaaaccgccagggcagtgtttaatgaattaagcgtcaccgaaccggcgaca

SEQ ID NO: 94400 - DNA, 75 bp, synthetic construct
  source 1..75: mol_type = other DNA
tataaatggcttttataatccacgccgaagacattcaacactcggctggaaatcgccggtggcatttgagaaaaa

SEQ ID NO: 94401 - DNA, 75 bp, synthetic construct
  source 1..75: mol_type = other DNA
tcaagctgcaggcgtcgggacggttaatgttgagggagaggactcggttttgacgaccgaattattcgaaatagg

SEQ ID NO: 94402 - DNA, 75 bp, synthetic construct
  source 1..75: mol_type = other DNA
gcccattgcgaaggcggcagcatcgaccatttctttgaaaatggcgatgaacttaacgagcagatggtgcaacga

SEQ ID NO: 94403 - DNA, 75 bp, synthetic construct
  source 1..75: mol_type = other DNA
tgaaggataaaaatattgtgactttctttgatttctggggaaaaacccgacgcggcgagaaagaagggggcgacg

SEQ ID NO: 94404 - DNA, 75 bp, synthetic construct
  source 1..75: mol_type = other DNA
tacattgaaaaacagggtggcgtacttgttccacgcaaggactacctgattcgcaccgcctacgacctcgcagat

SEQ ID NO: 94405 - DNA, 75 bp, synthetic construct
  source 1..75: mol_type = other DNA
ccgtctgggatggtcggatgaaagaattggtacagagctgggtatggaccaggatgaggtgctgaggctgaaaca

SEQ ID NO: 94406 - DNA, 75 bp, synthetic construct
  source 1..75: mol_type = other DNA
gaaggaaaaccgcttctgttacagacgccgacactgaaatgggcctgtttgaaactggctaaactggggctatgg

SEQ ID NO: 94407 - DNA, 75 bp, synthetic construct
  source 1..75: mol_type = other DNA
aagcagacccgtctggtgcatgaggtgtggcgacacactgttaatcgcgtcttcctggacgcaacacatcagaac

SEQ ID NO: 94408 - DNA, 75 bp, synthetic construct
  source 1..75: mol_type = other DNA
tttgcgggaacagttaataatgaacttggctatcagttatttcgtgattttgctgagaataaaggtatgttccgc

SEQ ID NO: 94409 - DNA, 75 bp, synthetic construct
  source 1..75: mol_type = other DNA
cggctcagatcgctgacgcagaaaggctgaaagccctctatgaagccaagaaaaaagagcttgggataacacagc

SEQ ID NO: 94410 - DNA, 75 bp, synthetic construct
  source 1..75: mol_type = other DNA
gcaggtgcagacacttcgcactcttctacttccctcaactttttggagtaatacaaatgaaaggtatgcagaaaa

SEQ ID NO: 94411 - DNA, 75 bp, synthetic construct
  source 1..75: mol_type = other DNA
gattcttatatcgatccgctgccacctctcgctcaacttgaaggaagcataatcggcatcgccaacggtaagccc

SEQ ID NO: 94412 - DNA, 75 bp, synthetic construct
  source 1..75: mol_type = other DNA
ccgcaattacgcgtggagtatctcggcagcttctggcaactgctgacgccattccctttattgtgcggattgctc

SEQ ID NO: 94413 - DNA, 75 bp, synthetic construct
  source 1..75: mol_type = other DNA
tatctcaagagtttttcacagacattgaatgaaaatggtattggagttagcaaggtatttccgaagaatacaatt

SEQ ID NO: 94414 - DNA, 75 bp, synthetic construct
  source 1..75: mol_type = other DNA
gtgaaaacggtgctggttgataaccagaaggctgcggtgctgaagaataacaacgggaaagtcgtgttcaactcc

SEQ ID NO: 94415 - DNA, 75 bp, synthetic construct
  source 1..75: mol_type = other DNA
cagctaaggctgcacggcatcccgtttgtaatcggacctaaaaacgaaccaatagttcttcgccgggatgttccg

SEQ ID NO: 94416 - DNA, 75 bp, synthetic construct
  source 1..75: mol_type = other DNA
tggcgtgattactggctggcggcaaagtgtaacgaatggcctgatggcgtttccttattcgtttttgatgctgcc

SEQ ID NO: 94417 - DNA, 75 bp, synthetic construct
  source 1..75: mol_type = other DNA
ggaaaaatacgcactggtacgaactgaccagccgggattcagcgcctgtacccactctcagttaataaacagcat

SEQ ID NO: 94418 - DNA, 75 bp, synthetic construct
  source 1..75: mol_type = other DNA
ttgtgcagctgattgaccagcgggtgcaggcggtgatgctgtccatgcgacgtgacggaggaatgctgagtggct

SEQ ID NO: 94419 - DNA, 75 bp, synthetic construct
  source 1..75: mol_type = other DNA
tgagcttacaaagacagagatcttcgcagtgaagcgccaaatttctgagcttcgcttctgtcttacatcctccaa

SEQ ID NO: 94420 - DNA, 75 bp, synthetic construct
  source 1..75: mol_type = other DNA
ttggctattttaattaacctcttaacggcgttactgttccattgctccccaaacccctttatagcggtacgggtg

SEQ ID NO: 94421 - DNA, 75 bp, synthetic construct
  source 1..75: mol_type = other DNA
tgtgtgatgcggtgaactttctcgtggaaaaatacgcactggtgcgtaccgaccagccgggattcagcgcctgta

SEQ ID NO: 94422 - DNA, 75 bp, synthetic construct
  source 1..75: mol_type = other DNA
tccctttatctggttgttgttattccattggggattcttgcgggatttcgtttcttgttgcagtttttaggcggt

SEQ ID NO: 94423 - DNA, 75 bp, synthetic construct
  source 1..75: mol_type = other DNA
aaaagaatgaggaccagacgctggccatcgcgcaggtgagtcagcaggtggaccgggtgagcagtgaaatcacac

SEQ ID NO: 94424 - DNA, 75 bp, synthetic construct
  source 1..75: mol_type = other DNA
gcccggcactgaccggaacgccaacaacaccaactgcacgacagggaacgaataatacccaaatcgcaagcacgg

SEQ ID NO: 94425 - DNA, 75 bp, synthetic construct
  source 1..75: mol_type = other DNA
taaaggccgtgaagacggtctgcgcgatctggagcgcaaggcattgcaggtgggcaccgatgaagacggtggcta

SEQ ID NO: 94426 - DNA, 75 bp, synthetic construct
  source 1..75: mol_type = other DNA
agccaaagcggcggacgcgcatggtattccgtttactctctcgacggtttccgtttgcccgattgaagaagtcgc

SEQ ID NO: 94427 - DNA, 75 bp, synthetic construct
  source 1..75: mol_type = other DNA
aacgcggcaatgcgccgctacttgcaagcggtgacacatccgcaatgggcgtgggatgtgggcctgaacggtcgt

SEQ ID NO: 94428 - DNA, 75 bp, synthetic construct
  source 1..75: mol_type = other DNA
ggaagattacatcggctggctggggaataacttcgatccgtccatctcatggaaagaccttgaatggatccgcga

SEQ ID NO: 94429 - DNA, 75 bp, synthetic construct
  source 1..75: mol_type = other DNA
aatttctggccttgtctcaatctctcatgcaaaaatatttatatgagcagtgtgaagcaaataacgatgattatc

SEQ ID NO: 94430 - DNA, 75 bp, synthetic construct
  source 1..75: mol_type = other DNA
gggagaagccagccgcctgcgacttgttccgcaagacactaatggtgtaaccgttggtgccatttcggaaataaa

SEQ ID NO: 94431 - DNA, 75 bp, synthetic construct
  source 1..75: mol_type = other DNA
gggtgtagctaacctgctaaatctgatcgaaaaagagatgaaagtggcgatgacgctgactggcgcgaaatcgat

SEQ ID NO: 94432 - DNA, 75 bp, synthetic construct
  source 1..75: mol_type = other DNA
tcttgcattgggaagttcatcttctgcaggagggaataattccgtcgcgattggtgcaagctctactgcagatga

SEQ ID NO: 94433 - DNA, 75 bp, synthetic construct
  source 1..75: mol_type = other DNA
aaaatatcagggaataatccatggcgaccttgcacaagatcataacgtgagaaaaatggttccagtatcagcaag

SEQ ID NO: 94434 - DNA, 75 bp, synthetic construct
  source 1..75: mol_type = other DNA
aaggatcgcggttcgcagggaccaatgtatcacaaaaggtaacggccttcgccgtggcgactatagcggcatagg

SEQ ID NO: 94435 - DNA, 75 bp, synthetic construct
  source 1..75: mol_type = other DNA
gcagggcgttttgatcaggaaggccagtaccaggattaccagcgcacacagtatgaagtgtatgactaccccgga

SEQ ID NO: 94436 - DNA, 75 bp, synthetic construct
  source 1..75: mol_type = other DNA
gtccgggcgttcggcaaacttcagcatattgtatccggcgaagcgacggcggtgaccgcagacgccattatcaaa

SEQ ID NO: 94437 - DNA, 75 bp, synthetic construct
  source 1..75: mol_type = other DNA
accaacgtcaaagacggtgacctgacggctggcagcaccgacgcggttaacggctctcagctcaaaaccactaac

SEQ ID NO: 94438 - DNA, 75 bp, synthetic construct
  source 1..75: mol_type = other DNA
atgggggattctgtgacaccggagatacttggcaacatgattcgtcagtatttcagtcaggtacgaactgaaaaa

SEQ ID NO: 94439 - DNA, 75 bp, synthetic construct
  source 1..75: mol_type = other DNA
tagctggttttcttctttggatgaagaatggcaggggtggatcaggctaggaaaggaaaaacaagttaattttga

SEQ ID NO: 94440 - DNA, 75 bp, synthetic construct
  source 1..75: mol_type = other DNA
cctgtgtagtgtttctgatgataggaggactgtctcaggctgcagagattacgttagtaagccacaggagtacgg

SEQ ID NO: 94441 - DNA, 75 bp, synthetic construct
  source 1..75: mol_type = other DNA
aaatacccagcagcatacaacctataataaaaacaaattcaaatctcactaacctaattagcaatcatctcagaa

SEQ ID NO: 94442 - DNA, 75 bp, synthetic construct
  source 1..75: mol_type = other DNA
atgacggcagagtacatcagggactggcaacaaccgcgccacgcagtggggcgtgaaggaacggggatccccgct

SEQ ID NO: 94443 - DNA, 75 bp, synthetic construct
  source 1..75: mol_type = other DNA
cgcccgtttggctggcgcgaagtctggatcggatacgacccggcgaaaggcacgcagaacggtgacagcgccggg

SEQ ID NO: 94444 - DNA, 75 bp, synthetic construct
  source 1..75: mol_type = other DNA
atgacaaatatccttttcatcgcgacttatggcgaaaaccgactgcgtcgaatggctggagctgcacaccgcgca

SEQ ID NO: 94445 - DNA, 75 bp, synthetic construct
  source 1..75: mol_type = other DNA
ctaccgctgtgcatcgataccgatccgctcaatcctacattctctaattatgaaaaactgaacgtccgacagctg

SEQ ID NO: 94446 - DNA, 75 bp, synthetic construct
  source 1..75: mol_type = other DNA
aaatgggagatgcatattcctggctgaccggcgggactgtcggtagcctgtcatcctatcagaatggagaaatga

SEQ ID NO: 94447 - DNA, 75 bp, synthetic construct
  source 1..75: mol_type = other DNA
agaagccgaaagggttcctggcgtatgagtccacggatgaaacagacaaggtccgggcgttcggcaaacttcagc

SEQ ID NO: 94448 - DNA, 75 bp, synthetic construct
  source 1..75: mol_type = other DNA
ggttctgcgttgacgatgtgatttaccttgagtgcggcgtaaaacccgcaaatcagaaaatgaccgaaattctgt

SEQ ID NO: 94449 - DNA, 75 bp, synthetic construct
  source 1..75: mol_type = other DNA
aggatgaagtgctgaggctgaaacagattagtgggctgacggagctgtttcaggaagaggatttcagtccggcat

SEQ ID NO: 94450 - DNA, 75 bp, synthetic construct
  source 1..75: mol_type = other DNA
tattctggttaacttctataccggagtcggaagttgcccgaccttgcagatgaaggcgcattacagaaatggtgg

SEQ ID NO: 94451 - DNA, 75 bp, synthetic construct
  source 1..75: mol_type = other DNA
gtccaatgaccgggtataaaaatttcaaccgtgaggcgtttcacaatgcggaagaggaactgaaacgggaagggc

SEQ ID NO: 94452 - DNA, 75 bp, synthetic construct
  source 1..75: mol_type = other DNA
ttttacagtcagagaaatacagataacagcatcacttttgctgttaacgggcaggtatcaccatctaactatggc

SEQ ID NO: 94453 - DNA, 75 bp, synthetic construct
  source 1..75: mol_type = other DNA
gcatacccgaaacttgcagcggcttatccgtcaggcgttattcctgatatgcgtggctggacgattaagggcaag

SEQ ID NO: 94454 - DNA, 75 bp, synthetic construct
  source 1..75: mol_type = other DNA
tgccttacaacatcagtggcacgaaagagcaattaaccgaaatcgcacggaaaattcgcccggaactggtgacac

SEQ ID NO: 94455 - DNA, 75 bp, synthetic construct
  source 1..75: mol_type = other DNA
tcgcgatgtacgcacaatcgttgagctggggaaagccatagacttcgatgccagaacggctattccattcgaagg

SEQ ID NO: 94456 - DNA, 75 bp, synthetic construct
  source 1..75: mol_type = other DNA
aaagtcgcgcaatttttgtcacgtgaaggaattcgcaatttcctcgcccgtctcgatattgacgaatcagcataa

SEQ ID NO: 94457 - DNA, 75 bp, synthetic construct
  source 1..75: mol_type = other DNA
atctgctgcaggagcgtctgcagcagatggagcgggatatggttcgtgacctgcagaaagagaaaaccctgggcg

SEQ ID NO: 94458 - DNA, 75 bp, synthetic construct
  source 1..75: mol_type = other DNA
ggattattggtgaagttgatggcgatgatgaagctatcttcaggccgatacaaaaatacatcaatggcatatggt

SEQ ID NO: 94459 - DNA, 75 bp, synthetic construct
  source 1..75: mol_type = other DNA
agagagcccgttatctcgtgaagtatgagacgaagcagcatgacggttctggtcaacgtaattatggttgcagcc

SEQ ID NO: 94460 - DNA, 75 bp, synthetic construct
  source 1..75: mol_type = other DNA
aggctggcagcggtcggcaggcgctaaggcagaactggcgctggcggagaaactgggacatgcggttatttttca

SEQ ID NO: 94461 - DNA, 75 bp, synthetic construct
  source 1..75: mol_type = other DNA
cgggacgacttacaaccctgatatctattccgctgttgataccggcgcaagactggacgagcggccagtcagtgt

SEQ ID NO: 94462 - DNA, 75 bp, synthetic construct
  source 1..75: mol_type = other DNA
ggtaatccgaaggggattactggtgctttatggcagcgcacatcggcagggtttacaaattttgcctgggtcaat

SEQ ID NO: 94463 - DNA, 75 bp, synthetic construct
  source 1..75: mol_type = other DNA
gaccagccgggattcagcgcctgtacccgctctcagttaataaacagcatcgatatcctccgggctcgcagggcg

SEQ ID NO: 94464 - DNA, 75 bp, synthetic construct
  source 1..75: mol_type = other DNA
cgttgttgatgacctcccgccagaaggcgtatttgatacggaattctgcaaccgttacgaaaaaggcggggaaga

SEQ ID NO: 94465 - DNA, 75 bp, synthetic construct
  source 1..75: mol_type = other DNA
cagggcaaaacaccaaaaacctctccgataacaccagaacaaatcgaaatacgtgagctgaggaaaaagctacaa

SEQ ID NO: 94466 - DNA, 75 bp, synthetic construct
  source 1..75: mol_type = other DNA
aagcagaatattgccgggctcagccgggacccggaaaatgccaacggcagcattgcaccgatatttgacagggag

SEQ ID NO: 94467 - DNA, 75 bp, synthetic construct
  source 1..75: mol_type = other DNA
tgaaacgaagctgcatgacggttccgggcaacgtaattatggttgcagtcgtgggccggggcgtcttctggatgg

SEQ ID NO: 94468 - DNA, 75 bp, synthetic construct
  source 1..75: mol_type = other DNA
ccgaggacagccagttcctggaaacccgcaagtttcagcttgaagaaatctgtcgtctgttccgggtgccgttgc

SEQ ID NO: 94469 - DNA, 75 bp, synthetic construct
  source 1..75: mol_type = other DNA
atatcagttctgctgatttaaccgctgagaagtttgcgacagcgattcgaaatcactggcatgtggagaataagc

SEQ ID NO: 94470 - DNA, 75 bp, synthetic construct
  source 1..75: mol_type = other DNA
ccgcacaggacgccaccacagcgcgaaaagggcttgtccagctcagtagcgccaccaatagcgattctgaaacgc

SEQ ID NO: 94471 - DNA, 75 bp, synthetic construct
  source 1..75: mol_type = other DNA
atgaaattattacccgacacacatgtacgggaggcatcgtgctgcccgtctcccgtcaccatctggcagacactg

SEQ ID NO: 94472 - DNA, 75 bp, synthetic construct
  source 1..75: mol_type = other DNA
gagcagcatattgaggcaggcatttcactgtgtgatgcggtgaactttctcgtggaaaaatacgcgctggtgcgt

SEQ ID NO: 94473 - DNA, 75 bp, synthetic construct
  source 1..75: mol_type = other DNA
cgcaaaaagtggagaaccttttggtcgccggtcgctgtatttccgcaggcgtagttgcacatacttctatgcgta

SEQ ID NO: 94474 - DNA, 75 bp, synthetic construct
  source 1..75: mol_type = other DNA
tgcattcagaagaaggtgacgcgcgaacattgacgctgggtcaactgacgccgcgcattatgagcggtgcagaag

SEQ ID NO: 94475 - DNA, 75 bp, synthetic construct
  source 1..75: mol_type = other DNA
atggcaagcgggatgtccgtctgcgcgaatttgaactgccagaaattaccgataatgaactgttagtgagtgtaa

SEQ ID NO: 94476 - DNA, 75 bp, synthetic construct
  source 1..75: mol_type = other DNA
atggcctcacgctgaatgacacaccgttcgctgatgaacgtgtgattgagcagcatattgaggcagggatttcac

SEQ ID NO: 94477 - DNA, 75 bp, synthetic construct
  source 1..75: mol_type = other DNA
gctgcttcaggacgttaacgtggggtggctggagcacatcagaaccaatgccagcgcgcgcgtaatgaatgacgt

SEQ ID NO: 94478 - DNA, 75 bp, synthetic construct
  source 1..75: mol_type = other DNA
accaccgggccgattgcgcgcacgaataccagttatgacggcacaaaacgccgtaacccgaataacgtggttgat

SEQ ID NO: 94479 - DNA, 75 bp, synthetic construct
  source 1..75: mol_type = other DNA
gaatctggatcatcgctggcgtcaccgatatgcgttgtggcttcaacggtctggcctcgaaggtgcaaaacacgc

SEQ ID NO: 94480 - DNA, 75 bp, synthetic construct
  source 1..75: mol_type = other DNA
gctgtatttcgctcctgctgatgtgaagcgagtgcagttcacgccagtgcaggcagagcagaccgagcagtcatt

SEQ ID NO: 94481 - DNA, 75 bp, synthetic construct
  source 1..75: mol_type = other DNA
tgaaaaatacgcactggtacgtaccgaccagccaggattcagcgcttgtacccgttctcagttaataaacagtat

SEQ ID NO: 94482 - DNA, 75 bp, synthetic construct
  source 1..75: mol_type = other DNA
gaaattatcgtcagccagggcggcaccatgcaaatgatcggcgctcgccgcgacgattcacagtcctcaaatggc

SEQ ID NO: 94483 - DNA, 75 bp, synthetic construct
  source 1..75: mol_type = other DNA
tatcgcccgtgacgcgcactatctttaccggtatgaccgtcacggcaggctgacagagaaaaccgacctcatccc

SEQ ID NO: 94484 - DNA, 75 bp, synthetic construct
  source 1..75: mol_type = other DNA
gatgacgctcgttaccaggcaaaatacgtttcagctatctggcaaaaactgatcccgagtcaggctgatttttaa

SEQ ID NO: 94485 - DNA, 75 bp, synthetic construct
  source 1..75: mol_type = other DNA
ggtgctggtgagagcacggttcgtacagccatatctcagctggaaaaagatggttggttaacccgccagcagcgc

SEQ ID NO: 94486 - DNA, 75 bp, synthetic construct
  source 1..75: mol_type = other DNA
ttaagtttcttaaatgtgaatggttttgatcaaaaatattttatgtattgtgaagatattgacctttgtatgcgt

SEQ ID NO: 94487 - DNA, 75 bp, synthetic construct
  source 1..75: mol_type = other DNA
aaagccgcttttgacgcactcaccaaagcaggtttctggctggatgatgctcaggtcgttgattaccgcgttgtg

SEQ ID NO: 94488 - DNA, 75 bp, synthetic construct
  source 1..75: mol_type = other DNA
agaaaataaaaactggtcttatgatgttcatgaatcttgtcgcgatatgtttagcccttatctgggtaaagtctt

SEQ ID NO: 94489 - DNA, 75 bp, synthetic construct
  source 1..75: mol_type = other DNA
agggattaccgcagcgcagacgattcgccggtcacctggactttctccggcggagagcagacagatccccgcgca

SEQ ID NO: 94490 - DNA, 75 bp, synthetic construct
  source 1..75: mol_type = other DNA
gctgtgagtatacgtagtgagttggttcgtcgtggggtaattaaaatccaggctgataaaattgtctggttaacg

SEQ ID NO: 94491 - DNA, 75 bp, synthetic construct
  source 1..75: mol_type = other DNA
gagagttatcccggtcagttgacgttactggatacccccgggccaaatgaagccgggcaaccgcatctgcaaaaa

SEQ ID NO: 94492 - DNA, 75 bp, synthetic construct
  source 1..75: mol_type = other DNA
gcgcacacagacgttccaccacgaagccgccggtgaattcagcggcgaaatcaccggcgtgacggatggtgccgg

SEQ ID NO: 94493 - DNA, 75 bp, synthetic construct
  source 1..75: mol_type = other DNA
tgaagtaagacgtgcatataatcgttctacctatttagaacaacgtcatgagttaatgaattggtggggttgtaa

SEQ ID NO: 94494 - DNA, 75 bp, synthetic construct
  source 1..75: mol_type = other DNA
tatggttatgtgtggctgaacatggaaacggcacatcagcttgagttgctatcgaatctgatttgccgggccttg

SEQ ID NO: 94495 - DNA, 75 bp, synthetic construct
  source 1..75: mol_type = other DNA
attacagacaagcctggaaagtggaacataaattatcggatattctactgttgactatttgtgctgttatttcgg

SEQ ID NO: 94496 - DNA, 75 bp, synthetic construct
  source 1..75: mol_type = other DNA
acgaacagtccgcaggggccgtggtgggtactcggctggagtgagcgggtgccgggggggaatgaggtgctgcct

SEQ ID NO: 94497 - DNA, 75 bp, synthetic construct
  source 1..75: mol_type = other DNA
gaattactggcggaagatggctgcctgaacttctttgccgggccgacggataaaaacttcaaagtgccgtttaat

SEQ ID NO: 94498 - DNA, 75 bp, synthetic construct
  source 1..75: mol_type = other DNA
agcattcgtgcgatagctactgcgctgaatcgcagtccttcgacgatctcacgtgaagttcagcgtaatcggggc

SEQ ID NO: 94499 - DNA, 75 bp, synthetic construct
  source 1..75: mol_type = other DNA
gacaatggggaagaaccggcatcgaaagtaacccactggatgccgctaccggagccgccgcaggaggtgaagtaa

SEQ ID NO: 94500 - DNA, 75 bp, synthetic construct
  source 1..75: mol_type = other DNA
caccggtattgctcatactcgctgggcgacccacggtgaaccttcagaagtgaacgcgcatccgcatgtttctga

SEQ ID NO: 94501 - DNA, 75 bp, synthetic construct
  source 1..75: mol_type = other DNA
acgaacgcatcatcaagcgccagtagtgccgcttcctcggcaacggcggcaggaaattccgcgaaggcggcaaag

SEQ ID NO: 94502 - DNA, 75 bp, synthetic construct
  source 1..75: mol_type = other DNA
ttatgatgatgctattgcagatatagcaaaaacatttgaaagtacagggtgtgatgctatttatggcgatttgga

SEQ ID NO: 94503 - DNA, 75 bp, synthetic construct
  source 1..75: mol_type = other DNA
gcagccatggaaagatgcttacattgagggtgcggttagccaagaaatcacacttgattctatgaaaggtttttt

SEQ ID NO: 94504 - DNA, 75 bp, synthetic construct
  source 1..75: mol_type = other DNA
cacttacgcgaatgcggcgtcttaacgcaggttggaaacgactatgttattgcgcgtaaacctgaccatgatgac

SEQ ID NO: 94505 - DNA, 75 bp, synthetic construct
  source 1..75: mol_type = other DNA
ttcaaatcgaaagatggtgcgtacgttcgtgaacacttcttcggtaaatatcctgaaaccgcagcactggttgca

SEQ ID NO: 94506 - DNA, 75 bp, synthetic construct
  source 1..75: mol_type = other DNA
tggtttcctttattgctggattgcttttatggcatggtatgcatgctatttttagcgccggtattgattcgtgga

SEQ ID NO: 94507 - DNA, 75 bp, synthetic construct
  source 1..75: mol_type = other DNA
gtggcgcgtttttgatttttccgttctgaacggatcgtttgggcaactgcctggtgcgaatggagccaccacctc

SEQ ID NO: 94508 - DNA, 75 bp, synthetic construct
  source 1..75: mol_type = other DNA
cgttaccgccgcacaatggacaataatttccgcctggtgaatgtgtatatcaccgacatgaagattacggaaatc

SEQ ID NO: 94509 - DNA, 75 bp, synthetic construct
  source 1..75: mol_type = other DNA
agaacaaccggagtatccgggtaatctggaactggaacgccgtattcgttcagctatccgctggaacgccatcat

SEQ ID NO: 94510 - DNA, 75 bp, synthetic construct
  source 1..75: mol_type = other DNA
accttgccatccttgggctggtggatcttaacgaggttacgccggaattgctcagcatgcgcaagaatcatgtgg

SEQ ID NO: 94511 - DNA, 75 bp, synthetic construct
  source 1..75: mol_type = other DNA
gcgaaggaagaagcctttttcgcacaatccgccatgggtaaaaaactcatggcatcccttgaggaagccggacag

SEQ ID NO: 94512 - DNA, 75 bp, synthetic construct
  source 1..75: mol_type = other DNA
aacatattaatatgctatgggataaatatatatcaaagaatgcagaaaaaattaaagaactatatagtgtattaa

SEQ ID NO: 94513 - DNA, 75 bp, synthetic construct
  source 1..75: mol_type = other DNA
gggctggtcccacggcgatcaggaaatcttcactcgtgaagagatgattaaatacttcactctgaatgccgtcag

SEQ ID NO: 94514 - DNA, 75 bp, synthetic construct
  source 1..75: mol_type = other DNA
ttcctgccggagtacgccgatgcggtgcagcagctggcggacagtttgcctaaacaagccaccagcgaagacgac

SEQ ID NO: 94515 - DNA, 75 bp, synthetic construct
  source 1..75: mol_type = other DNA
gtggcggcatcgatgcctatctcggctcgttcagttttattaatggcgagcagctgcagcgttttgttaagcaga

SEQ ID NO: 94516 - DNA, 75 bp, synthetic construct
  source 1..75: mol_type = other DNA
cacggatatcaccaggcttgctgaacttagtgtgatggctcttagtgtgaatcttttcacctgggaggaaggaaa

SEQ ID NO: 94517 - DNA, 75 bp, synthetic construct
  source 1..75: mol_type = other DNA
tgcaacgccaaaactggctgggtgcgtatagcaccgatttcatcacctgccgatgcagaacctgaatcaccagaa

SEQ ID NO: 94518 - DNA, 75 bp, synthetic construct
  source 1..75: mol_type = other DNA
acagcggtgaaagtaaaagtgctgaagaggtattcgggcgactgacgcacaaatacaaaaagatggcagaaggtg

SEQ ID NO: 94519 - DNA, 75 bp, synthetic construct
  source 1..75: mol_type = other DNA
aaggctcgccggtttccgtacccggttacgccaaccctgcacagttcgccaccagttcgattggcgtcgtcggtg

SEQ ID NO: 94520 - DNA, 75 bp, synthetic construct
  source 1..75: mol_type = other DNA
tggggcaattccccttgataagtgtgatacaaggcagtggatcgcatgttttgaccgcgtacgaaaaaaagcacc

SEQ ID NO: 94521 - DNA, 75 bp, synthetic construct
  source 1..75: mol_type = other DNA
gcggacacaatttgctgggaaccgccgcctttgccgctgcaatagccgtcaagaaatggctggaacaatatgggc

SEQ ID NO: 94522 - DNA, 75 bp, synthetic construct
  source 1..75: mol_type = other DNA
ccgtgctagaagaggtgagtttaataagatgaaaagatgtttgaatgttatgtttaacttcaaacgaaacaaagg

SEQ ID NO: 94523 - DNA, 75 bp, synthetic construct
  source 1..75: mol_type = other DNA
attacctccagacgtgacagccatttccccggagggggattatcagaaatggaacggaaatgcgtgggtgaatga

SEQ ID NO: 94524 - DNA, 75 bp, synthetic construct
  source 1..75: mol_type = other DNA
ccgttggggagcgatgaacgtagaagtgaaggacggcaagattgtttcttcgacaggcgcgctggcgaaaaccat

SEQ ID NO: 94525 - DNA, 75 bp, synthetic construct
  source 1..75: mol_type = other DNA
cgctaccgccgcacaatggacaataatttccgtctggtgaatgtgtatatcaccgacatgaaaattacggaaatc

SEQ ID NO: 94526 - DNA, 75 bp, synthetic construct
  source 1..75: mol_type = other DNA
gaaacggaagcccgttaaaaccatatgaaatggcaccatcggccagactgaccaggtcggaacgaatgcaaatta

SEQ ID NO: 94527 - DNA, 75 bp, synthetic construct
  source 1..75: mol_type = other DNA
tacaggcatttatcggggagctggacggcggcgtatttgaaaccaaaatcggcgcagttctcagtgaagtcgctt

SEQ ID NO: 94528 - DNA, 75 bp, synthetic construct
  source 1..75: mol_type = other DNA
ttgatgaagaatgttcgcaagtggtggatttactgcaacagagctggcaggtgataagtgctggcggacaatgcc

SEQ ID NO: 94529 - DNA, 75 bp, synthetic construct
  source 1..75: mol_type = other DNA
gggaaatacaacttcctccaatttcagaacaaaaaatcatcgctgaaaaactcgatacgctgctggcgcaggtag

SEQ ID NO: 94530 - DNA, 75 bp, synthetic construct
  source 1..75: mol_type = other DNA
gaacggtatcaggccgcagcgatgggagcttgaggcgctggcgcgtggcgcgaccgtaaattatgacgggaaaaa

SEQ ID NO: 94531 - DNA, 75 bp, synthetic construct
  source 1..75: mol_type = other DNA
cgacaccatagaaaaacaggtcaacaacgccttagcccgcgtcaacaacctgacgcaatccatcctggcaaaagc

SEQ ID NO: 94532 - DNA, 75 bp, synthetic construct
  source 1..75: mol_type = other DNA
ggtgggttatcgccccagtatctacggtcacaactctaatccgaggagtaacgtataaaaaagagcaggcaataa

SEQ ID NO: 94533 - DNA, 75 bp, synthetic construct
  source 1..75: mol_type = other DNA
gcgcttcgtaaaatgggctatgacaccaaaacagaagtttgtgggcatggtttccgctctatggcctgtagtgcc

SEQ ID NO: 94534 - DNA, 75 bp, synthetic construct
  source 1..75: mol_type = other DNA
gctcaggggcgcattaaaacacgggctgagaacaccaaatcgtcagcagagaaacggaagcccgttaaaacagta

SEQ ID NO: 94535 - DNA, 75 bp, synthetic construct
  source 1..75: mol_type = other DNA
acggaatttatccgtgaaggtgtgggcgttcatgcgtttaacggcgaaatctttgtgcagccggtctgggatacg

SEQ ID NO: 94536 - DNA, 75 bp, synthetic construct
  source 1..75: mol_type = other DNA
gttttcgggttacccggcctgatacatcagagcaatacgttgcgttaaaaacggctgttcagtctctgatgccac

SEQ ID NO: 94537 - DNA, 75 bp, synthetic construct
  source 1..75: mol_type = other DNA
ggtgtttatatatcacatcgtttttcggtgcattcgtcattacacgatggctgtgccggaaagttatcagtattt

SEQ ID NO: 94538 - DNA, 75 bp, synthetic construct
  source 1..75: mol_type = other DNA
ggaatggagagccattcgacagggttatcgaagcagaggacatcaacgactgctataaccactggatgatatggg

SEQ ID NO: 94539 - DNA, 75 bp, synthetic construct
  source 1..75: mol_type = other DNA
tcaacagccgtatcctccgctttactttggcggatcgtcagatgtcgcccaggagctggcggcagaacaagttga

SEQ ID NO: 94540 - DNA, 75 bp, synthetic construct
  source 1..75: mol_type = other DNA
gttgcagtggtgggccgattaccttgacctccttagaatacgacaagtttcaccatttgattttaaaaagactta

SEQ ID NO: 94541 - DNA, 75 bp, synthetic construct
  source 1..75: mol_type = other DNA
tcgcgggtttacttatgatgcggagcacgccgggcggatggtggcacaccattatgcggggaggccggagagccg

SEQ ID NO: 94542 - DNA, 75 bp, synthetic construct
  source 1..75: mol_type = other DNA
cagcgataaccagggcgacagccgctcgaatatgaccggaactcgcgccgataaccagaaccacggttatgccgt

SEQ ID NO: 94543 - DNA, 75 bp, synthetic construct
  source 1..75: mol_type = other DNA
cttttgctgcttgagaatgtacgaggacttgaactgcttccgtttcacgctcaggaaacgtgttgcggatttggc

SEQ ID NO: 94544 - DNA, 75 bp, synthetic construct
  source 1..75: mol_type = other DNA
acggtgcagactgacaccacacgtatccagacggtatacgagccgggaagcttcacgccgctcatccgggtcgag

SEQ ID NO: 94545 - DNA, 75 bp, synthetic construct
  source 1..75: mol_type = other DNA
atggctggcttaccgaacagcagtaacgcactgcaacagtggcatcatttgtttgaagctgaaggggcgaaacgc

SEQ ID NO: 94546 - DNA, 75 bp, synthetic construct
  source 1..75: mol_type = other DNA
cggcggcggatgtcacggcgcttggcagcggcccgcaaactgtcaccgccacggttaccgatgcggcaggcaaca

SEQ ID NO: 94547 - DNA, 75 bp, synthetic construct
  source 1..75: mol_type = other DNA
tgatagaaaagtaaagatctcacccacactggatgtaccattaccccagaatattccaacaaaatattccaagta

SEQ ID NO: 94548 - DNA, 75 bp, synthetic construct
  source 1..75: mol_type = other DNA
gatacggtggcgggcgatgatgtggtcaatatcatcgagcatgggcaggcgctggtgattaccggcagcagctcg

SEQ ID NO: 94549 - DNA, 75 bp, synthetic construct
  source 1..75: mol_type = other DNA
tttttcagagcctggggaaggcatttatgtatcccattgctctgctaagtgtatgtggcatgatgctagggctgg

SEQ ID NO: 94550 - DNA, 75 bp, synthetic construct
  source 1..75: mol_type = other DNA
tcaacatggcgggattcataaaaagccagagcctgacgctgctcgaaaaactggacgcactcgatgctgacgagc

SEQ ID NO: 94551 - DNA, 75 bp, synthetic construct
  source 1..75: mol_type = other DNA
gcggcaattaatatggttcgaaaacacgcgaccagtcgtgaatttaaaggcgatgtctcggcggaatacggtagc

SEQ ID NO: 94552 - DNA, 75 bp, synthetic construct
  source 1..75: mol_type = other DNA
atgacttttataaaacataaggcatcacacaaaacagcctgtcttattgcacaacacggtgaaaattacatgcat

SEQ ID NO: 94553 - DNA, 75 bp, synthetic construct
  source 1..75: mol_type = other DNA
tcagcagttacaaacgctgggcgaagtgatggaaaacacgctggggatcagcaaaagtcaggcggattccgatcg

SEQ ID NO: 94554 - DNA, 75 bp, synthetic construct
  source 1..75: mol_type = other DNA
gttgtttttcttgactcatttgcagagttgtttgttgtgataataagtttaatttgtgtcgcttaccagttggta

SEQ ID NO: 94555 - DNA, 75 bp, synthetic construct
  source 1..75: mol_type = other DNA
tatggctgtggcagtcactatcgccagcgccattctggcttttccaatggcgtggtatatggcgcgctataccag

SEQ ID NO: 94556 - DNA, 75 bp, synthetic construct
  source 1..75: mol_type = other DNA
agcgtcattccggtttccgtggacggtatcgtgaatccactcctgccggatacccgaatggacggtggacaggcc

SEQ ID NO: 94557 - DNA, 75 bp, synthetic construct
  source 1..75: mol_type = other DNA
tgacgttctcagtaccggtgaccccccatacgttccgtcactcctacgcgatgcacatgctgtacgccggtattc

SEQ ID NO: 94558 - DNA, 75 bp, synthetic construct
  source 1..75: mol_type = other DNA
aaaaaatacttccggcgctggaggcagttcccgggctcagtgcattactgctgaagatgaatcttcaggggtatg

SEQ ID NO: 94559 - DNA, 75 bp, synthetic construct
  source 1..75: mol_type = other DNA
gggaagccatcagtgagcgggacactctgatgctaaaacagacgcagaaatctgatcccgaacaggacgccgttt

SEQ ID NO: 94560 - DNA, 75 bp, synthetic construct
  source 1..75: mol_type = other DNA
tttgtgtacaaggaaagctgtaccaaaccagacggaacgaaagcgccaacagtaaggaagatgcggtatgacgca

SEQ ID NO: 94561 - DNA, 75 bp, synthetic construct
  source 1..75: mol_type = other DNA
tggatgcggataaaaagcagatacagtgcgtggtaagaccgctgcaaattctgcgtgctgacgggaggtgggaaa

SEQ ID NO: 94562 - DNA, 75 bp, synthetic construct
  source 1..75: mol_type = other DNA
ccgtcacctttggcgggaaaaattacactgccagcgtagcgagcgatggtagctggactgccaccgtacccgccg

SEQ ID NO: 94563 - DNA, 75 bp, synthetic construct
  source 1..75: mol_type = other DNA
agtggttaatgacaacatcctgccattgcaggcatttcctaacggctcgccgcgtgcgccggtcgcgggtgcgct

SEQ ID NO: 94564 - DNA, 75 bp, synthetic construct
  source 1..75: mol_type = other DNA
aacacctgagcagactgtaagaagaagcgattacagattcacccttggcagaactcaacccacagatattgacta

SEQ ID NO: 94565 - DNA, 75 bp, synthetic construct
  source 1..75: mol_type = other DNA
aaacaattgctaacaatcgggcgtacagaattcgtggacaaaatgttttcgctagccaacaaaaatgcaacaaag

SEQ ID NO: 94566 - DNA, 75 bp, synthetic construct
  source 1..75: mol_type = other DNA
agcatcattgaccttaaaacgaccttgaaggaagcgttagctgaacgggataacataccaccaagcctggatgag

SEQ ID NO: 94567 - DNA, 75 bp, synthetic construct
  source 1..75: mol_type = other DNA
gaagaagtattaacggcttataaagcagatatcccgctaggcatgattagagaagaaaatgactttcgcatctcg

SEQ ID NO: 94568 - DNA, 75 bp, synthetic construct
  source 1..75: mol_type = other DNA
atgagtcagatgagtcagatgagtcgtatgagtcagatggcgacttcatttactcctactcgcccggcaccaccg

SEQ ID NO: 94569 - DNA, 75 bp, synthetic construct
  source 1..75: mol_type = other DNA
aatataaaaaaggccagcgttttgtattgcaaccggcgatggggttaccaagcggatattcagcgggctacagct

SEQ ID NO: 94570 - DNA, 75 bp, synthetic construct
  source 1..75: mol_type = other DNA
acgcctttaaatgattctctcaaggtcatggaaagaaatgtcgataagactgtttccaagattgagcagcgtctt

SEQ ID NO: 94571 - DNA, 75 bp, synthetic construct
  source 1..75: mol_type = other DNA
cgttactgatagctgtcggggaggtcaataaagaccgttctccttatgccagtaaacatgccattcgtgatgtgc

SEQ ID NO: 94572 - DNA, 75 bp, synthetic construct
  source 1..75: mol_type = other DNA
cattgtgcatacccactcacgccaccatctggtcgcaggccgggctggatctccccgcctggggcaccacgcacg

SEQ ID NO: 94573 - DNA, 75 bp, synthetic construct
  source 1..75: mol_type = other DNA
ttctgattatttcggtggcctgcgccattgggattatgcgaattattaattcagtgaaaaagatcgagcgttttt

SEQ ID NO: 94574 - DNA, 75 bp, synthetic construct
  source 1..75: mol_type = other DNA
tcctccgagcaggaagccttactgtctgaaatgcgcgcaagagtagagaatttcaataaactcttcgaagaaatg

SEQ ID NO: 94575 - DNA, 75 bp, synthetic construct
  source 1..75: mol_type = other DNA
agcaagcgttacactcagcgcattgagcgacataatctgaatctgagacaacatctggcaaggctgggacggaag

SEQ ID NO: 94576 - DNA, 75 bp, synthetic construct
  source 1..75: mol_type = other DNA
ggatgatctgattatccgccgtaccgatggttccccaacctataacttctgtgtggttgtcgatgactgggatat

SEQ ID NO: 94577 - DNA, 75 bp, synthetic construct
  source 1..75: mol_type = other DNA
tgtggaaagttcaccggcagtgatacttcgttaacggctcccacaccttctgaacatgccgcagccgtgcttaat

SEQ ID NO: 94578 - DNA, 75 bp, synthetic construct
  source 1..75: mol_type = other DNA
gatattttcgctcgcgataacctcgactggcaaagccgtgaactggcaacagttggagcattagccgctacgcca

SEQ ID NO: 94579 - DNA, 75 bp, synthetic construct
  source 1..75: mol_type = other DNA
aggacagggtaatcacgcaggtggtgatactggatgcggataaaaagcagatacagtgtgtggtaagaccgctgc

SEQ ID NO: 94580 - DNA, 75 bp, synthetic construct
  source 1..75: mol_type = other DNA
agatcaaaaatggtgtcccgactgtaggtattatcgacacctctgaaaaacctgtcattgtagctcaggacaaac

SEQ ID NO: 94581 - DNA, 75 bp, synthetic construct
  source 1..75: mol_type = other DNA
tgatatcctccgggcccgccgggcaaccggcctgatgacccgcagcaactacagaatggtgaacgacatcatccg

SEQ ID NO: 94582 - DNA, 75 bp, synthetic construct
  source 1..75: mol_type = other DNA
aacttttacaccctggctgatctgatgaagcaaacgccatcatttacctacgaggggaataaccctaaagcagaa

SEQ ID NO: 94583 - DNA, 75 bp, synthetic construct
  source 1..75: mol_type = other DNA
gtagatttggatattgcgacggaggaagaggcatcgttactggctgcatggaagacatatcgggtattgttgaat

SEQ ID NO: 94584 - DNA, 75 bp, synthetic construct
  source 1..75: mol_type = other DNA
tacattgaagagttctgcaacaaaatgacggaaaagtatctgatatccgcagccaggagacactaccaaaagaag

SEQ ID NO: 94585 - DNA, 75 bp, synthetic construct
  source 1..75: mol_type = other DNA
gggtaggtttaagaaaacattgacagtgagggccagggaacaagtggcgaaaatcgtatcaaagaatgatccaga

SEQ ID NO: 94586 - DNA, 75 bp, synthetic construct
  source 1..75: mol_type = other DNA
cggggccaccatgcgcgactccagcgattacctggttaacacgttttttgcggcggtccgcaagaaactgaaccg

SEQ ID NO: 94587 - DNA, 75 bp, synthetic construct
  source 1..75: mol_type = other DNA
gaaggctctaaatgcctttggactggatttagcaagattactaagtatcaaaattcacaaattagcaatggaggt

SEQ ID NO: 94588 - DNA, 75 bp, synthetic construct
  source 1..75: mol_type = other DNA
gcggcgaaatactgtaccggttggtggggcaaggcaagaagctgttccgctggcggctacccgaaggtaatccct

SEQ ID NO: 94589 - DNA, 75 bp, synthetic construct
  source 1..75: mol_type = other DNA
ataaaaggggaaaagtactcaattaaacatgatagtttagatgaaaaaacacgtaatcagttaaataccatattg

SEQ ID NO: 94590 - DNA, 75 bp, synthetic construct
  source 1..75: mol_type = other DNA
tcagcgtcgtttatggccgcgcattgagcgtgtgaatcagcgccatgaaatgaacaccgacgcgtcgttgctgtt

SEQ ID NO: 94591 - DNA, 75 bp, synthetic construct
  source 1..75: mol_type = other DNA
gtgaaaggcggtcgtgccagacttattctggtcgatacgcaagtttgcgagtttattcagaacacgccagccttc

SEQ ID NO: 94592 - DNA, 75 bp, synthetic construct
  source 1..75: mol_type = other DNA
gacgaccaggactatgagtttgagtcttacgatttggaagttgaagccttggcacaggctggagagaaaacttga

SEQ ID NO: 94593 - DNA, 75 bp, synthetic construct
  source 1..75: mol_type = other DNA
tggagcgttagcgtgccggcggcggatattcaggccatcggcaatggtaatctcacagtaaacgcctcggtcact

SEQ ID NO: 94594 - DNA, 75 bp, synthetic construct
  source 1..75: mol_type = other DNA
cggaagaaaatgttctttcagcggccatacagcgtattgaatgggtattttcagcgttttcttcagtttgccttt

SEQ ID NO: 94595 - DNA, 75 bp, synthetic construct
  source 1..75: mol_type = other DNA
gctggcgtggaagaaatcggggccggagatggcttcgctggaggcctggctggaagaacatgagaaatacaggag

SEQ ID NO: 94596 - DNA, 75 bp, synthetic construct
  source 1..75: mol_type = other DNA
caacggaccgaaaaagccgccaggacggcaggaagaatgcccgccggtcagcagactcaccggctggttccgctc

SEQ ID NO: 94597 - DNA, 75 bp, synthetic construct
  source 1..75: mol_type = other DNA
gaggatatcgttgagatcaaggctgaacctaagctgtttgagctttaccacatggacagaagggtactgctgcgg

SEQ ID NO: 94598 - DNA, 75 bp, synthetic construct
  source 1..75: mol_type = other DNA
ttctgaaccttcaggaagttgataagacaaccggtgaagttgttaagctggatgtcaacagcaccagtaccgtgc

SEQ ID NO: 94599 - DNA, 75 bp, synthetic construct
  source 1..75: mol_type = other DNA
ttcatggttcccgggatatcaacagggtacttgcagagccagacgacaaaccatcagatcatttctggcagccat

SEQ ID NO: 94600 - DNA, 75 bp, synthetic construct
  source 1..75: mol_type = other DNA
agaatattatccgcgtctggccgcacaaacgcatattcccattgcggccggtgagcgaatgttcactcgctttga

SEQ ID NO: 94601 - DNA, 75 bp, synthetic construct
  source 1..75: mol_type = other DNA
gcgggtgaatattctgaagggtgaacagcgtcgtgtcagtggcagtgcacgtgtttccctcaagcgtcatatctg

SEQ ID NO: 94602 - DNA, 75 bp, synthetic construct
  source 1..75: mol_type = other DNA
tcggatgtcatcgctgcggatgcagacctcgctgctgcgctggcctgttcagcggcttcgccagccttcgttgtg

SEQ ID NO: 94603 - DNA, 75 bp, synthetic construct
  source 1..75: mol_type = other DNA
ctccagagattctgcagaaaattcagatctaaaaatttgtcacaatgatggtcgcaagcttttcaatttgacaaa

SEQ ID NO: 94604 - DNA, 75 bp, synthetic construct
  source 1..75: mol_type = other DNA
aagtggtgcttattttgcgcttcgaaaacgtatatcaaagcctgaccatcatacctggcgcagctatgcgatgtt

SEQ ID NO: 94605 - DNA, 75 bp, synthetic construct
  source 1..75: mol_type = other DNA
acccggtagtgcagatgccgtttcgtaagcaactgctttcccagttcaccgccgacgaactgcgccaccacgtaa

SEQ ID NO: 94606 - DNA, 75 bp, synthetic construct
  source 1..75: mol_type = other DNA
gtgcttttccatcttgtggctgatgtggcccgcaggaagaaccgtcgtttctctgtattgttcattgactgggaa

SEQ ID NO: 94607 - DNA, 75 bp, synthetic construct
  source 1..75: mol_type = other DNA
actttatgccaacgaaagcggtgcctattttgccctgcgtaaacgtatatcaaaaccagcccatcatacctggcg

SEQ ID NO: 94608 - DNA, 75 bp, synthetic construct
  source 1..75: mol_type = other DNA
attcaaatttccaattgatgatcgattttatgatgatgttaactctttgaatttatggagtattgagtctcgtgt

SEQ ID NO: 94609 - DNA, 75 bp, synthetic construct
  source 1..75: mol_type = other DNA
attcctgttcgtgtcgtctatgcaatctggttacgcacgccaatggctgtggatttatctgaggtcattatcaac

SEQ ID NO: 94610 - DNA, 75 bp, synthetic construct
  source 1..75: mol_type = other DNA
gctgcctatccattgccatctgtgcagccagtggagacacaacaaccagtagcacagcaacaaccacagcaaagt

SEQ ID NO: 94611 - DNA, 75 bp, synthetic construct
  source 1..75: mol_type = other DNA
gggttctacctgaacgcaacacaagcgccgtggaatgaacatttcaaaatgtatgactacatccgcagcgagcta

SEQ ID NO: 94612 - DNA, 75 bp, synthetic construct
  source 1..75: mol_type = other DNA
ggggcagaacttaaagaaagtaacggagacgtcgatcatgtccacatgctgatcgaatacccaccaacagtgcag

SEQ ID NO: 94613 - DNA, 75 bp, synthetic construct
  source 1..75: mol_type = other DNA
gttttctgcgggccggtgtggaggttgatcgatatggccgtgccgttgcgtaccatatctgtgaggatgattttc

SEQ ID NO: 94614 - DNA, 75 bp, synthetic construct
  source 1..75: mol_type = other DNA
cagtacccaatcgcgctggaaggcgcattgaagctgaaagagatctcttacattcacgctgaagcctacgctgca

SEQ ID NO: 94615 - DNA, 75 bp, synthetic construct
  source 1..75: mol_type = other DNA
tatggttctgacagccaggtacttaaagattctgtacagtggtttaacatcgttggtaacggctatgttcaactg

SEQ ID NO: 94616 - DNA, 75 bp, synthetic construct
  source 1..75: mol_type = other DNA
atgctgaagtggatgccattctggatgagctgctggggggatccgttcctgatgtcgtacttcactcagaccact

SEQ ID NO: 94617 - DNA, 75 bp, synthetic construct
  source 1..75: mol_type = other DNA
acgatcatcgtgcgggagggcaagggctccaaggatcgggccttgatgttacccgagaggcactgttgcaaatag

SEQ ID NO: 94618 - DNA, 75 bp, synthetic construct
  source 1..75: mol_type = other DNA
ccactggatgatgaaaagagtgtccatgaacgagtggataatgcccgtattgatttacgctcaaaatactatgtt

SEQ ID NO: 94619 - DNA, 75 bp, synthetic construct
  source 1..75: mol_type = other DNA
cggcaccgggatgcgactgtggggcaaccgtaccgccgcctggccgaccgttacccatatgcgcaactttgaaaa

SEQ ID NO: 94620 - DNA, 75 bp, synthetic construct
  source 1..75: mol_type = other DNA
gcccggactgggcagagcgcctgaaaaaggggctgtcgattattccggatccgatttatccggacgaggccgcac

SEQ ID NO: 94621 - DNA, 75 bp, synthetic construct
  source 1..75: mol_type = other DNA
tgcgccggacacagcagcagaacatcaggatgcagcgtaatcctgatggcagcagctatgaaccgcgaagggtaa

SEQ ID NO: 94622 - DNA, 75 bp, synthetic construct
  source 1..75: mol_type = other DNA
tggaagcgattcacgattgattgcagcggcgtacgccgtgggcagaccgtgctggatctggctggtggcaccggc

SEQ ID NO: 94623 - DNA, 75 bp, synthetic construct
  source 1..75: mol_type = other DNA
tgccgtccactatggctatgacgataaaggccgcctgaccggcgaatgccagacggtggagaacccggagacggg

SEQ ID NO: 94624 - DNA, 75 bp, synthetic construct
  source 1..75: mol_type = other DNA
tcatctcttacttataataaagaggatgatttcctgtatgccacccagaatagccctgcacagctacttaaaata

SEQ ID NO: 94625 - DNA, 75 bp, synthetic construct
  source 1..75: mol_type = other DNA
tcagtttatttcccccagccagcatgtggctgacgctttcaatagtctgtacggtccagggcgttgccggattat

SEQ ID NO: 94626 - DNA, 75 bp, synthetic construct
  source 1..75: mol_type = other DNA
tccgattattttgatcagctccacgcctatgcgatcgaactgatcaataaaggcctggcgtacgttgatgaactg

SEQ ID NO: 94627 - DNA, 75 bp, synthetic construct
  source 1..75: mol_type = other DNA
atttgcgcccgcgcatgccgtaaaactaaccacgtccccgctcagggaagccgtttatcgatagcacacattcca

SEQ ID NO: 94628 - DNA, 75 bp, synthetic construct
  source 1..75: mol_type = other DNA
ccttcgctctacctgccgctggatattccggaagatatgcgcaccgcgcgtctgacctccagcgaaaaacaccgt

SEQ ID NO: 94629 - DNA, 75 bp, synthetic construct
  source 1..75: mol_type = other DNA
cttcaccgcgcttgagtccaacaagtacgagtgcgaccaaattaattttgacttccatctgaaatataaaaccct

SEQ ID NO: 94630 - DNA, 75 bp, synthetic construct
  source 1..75: mol_type = other DNA
gtactgaatgccatcgccagaagtcagcgagtgaagcggcgagtggtatgcctgatccgacgttgcctgagcttc

SEQ ID NO: 94631 - DNA, 75 bp, synthetic construct
  source 1..75: mol_type = other DNA
caacgtgccgagaaggctgccagaacagcaggacgtctgcccgccggcagtcaggcccatcgtctggttccgcta

SEQ ID NO: 94632 - DNA, 75 bp, synthetic construct
  source 1..75: mol_type = other DNA
gatatcgcagaaaagtttgctccctattttcgcccggtctacgacgtgctggtccggcgcttaggggcttccttt

SEQ ID NO: 94633 - DNA, 75 bp, synthetic construct
  source 1..75: mol_type = other DNA
caatgggcaacagattcatgcattctgtacttccttttatcgacaggtgcatgaacgtattactgagcgtaatca

SEQ ID NO: 94634 - DNA, 75 bp, synthetic construct
  source 1..75: mol_type = other DNA
ctggcgttggctatggcggtgaccatgctttgcggtggcattaacttgtcaattatagccactgctaacgcctgt

SEQ ID NO: 94635 - DNA, 75 bp, synthetic construct
  source 1..75: mol_type = other DNA
atctgcaaattacaaatgctggcgtcatgctcgctacaaatcaggatttacccagcgagacgtttgatttagcgg

SEQ ID NO: 94636 - DNA, 75 bp, synthetic construct
  source 1..75: mol_type = other DNA
gccgcaaatgccgggacatttttaagcagtcagccagatagcgatgcgacacgtaactttattaccggaatggcc

SEQ ID NO: 94637 - DNA, 75 bp, synthetic construct
  source 1..75: mol_type = other DNA
gcagaatcaaaactctgaacacccggcgggtgaatgtcctgaagggtgaacagcgtcgggtcagtggcagtgccc

SEQ ID NO: 94638 - DNA, 75 bp, synthetic construct
  source 1..75: mol_type = other DNA
tgttcctgctactgctactgctactgctactgctactgctactgctactgctactgctcttctttttcctgccgc

SEQ ID NO: 94639 - DNA, 75 bp, synthetic construct
  source 1..75: mol_type = other DNA
gctgctcagccagacgagtatttgccatccgcgagtcggcgtcatggctgatgaagaatgtgcgcaactggtgga

SEQ ID NO: 94640 - DNA, 75 bp, synthetic construct
  source 1..75: mol_type = other DNA
ttcactacaacggctggaggaaatacagctgcttcgttagataatttaattgctaacagtaaggatgctacctta

SEQ ID NO: 94641 - DNA, 75 bp, synthetic construct
  source 1..75: mol_type = other DNA
tgctagggaaacgtcctgtggctgatattcgccccttggaaatattgaatgcactgagggttatagaaaagaatg

SEQ ID NO: 94642 - DNA, 75 bp, synthetic construct
  source 1..75: mol_type = other DNA
ctgagcgtaatcacacgaccagtccatcatcgccggtggtattacgctggttgcgggaacaacatggaggagcaa

SEQ ID NO: 94643 - DNA, 75 bp, synthetic construct
  source 1..75: mol_type = other DNA
tgctgcggaggcactctgtgctgctgccgtctcagaagacttagcgttcgtctcggacgtttttgccgccttcgc

SEQ ID NO: 94644 - DNA, 75 bp, synthetic construct
  source 1..75: mol_type = other DNA
ggaactggcatagcgtcgccatttatttgctggctggatgcctgatttccgcaatgaccgctttgttgatgaaag

SEQ ID NO: 94645 - DNA, 75 bp, synthetic construct
  source 1..75: mol_type = other DNA
cctgaacaacaccaccaccaacctgtctgaagcgcagtcccgtattcaggacgccgactatgcgaccgaagtgtc

SEQ ID NO: 94646 - DNA, 75 bp, synthetic construct
  source 1..75: mol_type = other DNA
aacgggcctgtcgcgatgcattgcgcgccattaaaaaggagaatgttggcgaattttctctgcggggcgtttgtg

SEQ ID NO: 94647 - DNA, 75 bp, synthetic construct
  source 1..75: mol_type = other DNA
gaatctaccgtagctgacgtgtttgctggcttaggtgatactgccgtagttaatgctaatattaccagtggtttc

SEQ ID NO: 94648 - DNA, 75 bp, synthetic construct
  source 1..75: mol_type = other DNA
atccgctgttgatgcgtaatggcgacagccgtccgttgcataaaccgacgacgccgctgccttctctggatttgc

SEQ ID NO: 94649 - DNA, 75 bp, synthetic construct
  source 1..75: mol_type = other DNA
agaaaaagtggcgagtgccgccgatgcgcgacgtatcgtcagccattacgagcgacgctggttgatagaggaata

SEQ ID NO: 94650 - DNA, 75 bp, synthetic construct
  source 1..75: mol_type = other DNA
aattggctggcttttcaggagtaaagctgacagtaatgagcaacgcattatgtatgtcctgctgactgctcatat

SEQ ID NO: 94651 - DNA, 75 bp, synthetic construct
  source 1..75: mol_type = other DNA
gtgaccgaagatacttacgaatatttgctgttaaatggtgaggaatcttttaacgatctcggcgagccagagtgg

SEQ ID NO: 94652 - DNA, 75 bp, synthetic construct
  source 1..75: mol_type = other DNA
ttacgctggttgcgggaacaacatgaaggagcacagatacgatgtctgttgctgctcagccagacgagtatttgc

SEQ ID NO: 94653 - DNA, 75 bp, synthetic construct
  source 1..75: mol_type = other DNA
atcaggatctctgccctgatggcgctgttctggaagctaatagcggtgaaaccattctcgacgcagctctgcgta

SEQ ID NO: 94654 - DNA, 75 bp, synthetic construct
  source 1..75: mol_type = other DNA
cgcaggcggcgaagctatgtctgtcgcccgtggcagtgtggcaaatgctgcttgcacgcctgctggaacaacatt

SEQ ID NO: 94655 - DNA, 75 bp, synthetic construct
  source 1..75: mol_type = other DNA
ccggggccagggagattgaagccgcctggcaggccggtaaaacggttgttctgtcagatgtggtactgggtgacg

SEQ ID NO: 94656 - DNA, 75 bp, synthetic construct
  source 1..75: mol_type = other DNA
cgaccgcattcgtaaaatgaacggctatacatacacgcttaaagaaaacggtatgccttacgctggtgttattgc

SEQ ID NO: 94657 - DNA, 75 bp, synthetic construct
  source 1..75: mol_type = other DNA
cagcgccgggggaaatccggcgttttgttcagcagggggtggaccactggccacatctgttggcatttcacttca

SEQ ID NO: 94658 - DNA, 75 bp, synthetic construct
  source 1..75: mol_type = other DNA
ttgcacgtctggaaatgcgcgtcggaaagattgtggaagtgaaacgccatgaaaacgccgacaagctgtacatcg

SEQ ID NO: 94659 - DNA, 75 bp, synthetic construct
  source 1..75: mol_type = other DNA
atgaaatatacaccggttggcgttgatatggcaaaacatgtcattcagattcacttcatcaatgagcacatgtca

SEQ ID NO: 94660 - DNA, 75 bp, synthetic construct
  source 1..75: mol_type = other DNA
ttgagggcgcatacaaaaacaacatggcgatggattccagtcccgcgaatgagttaaagcgcagattgtccagac

SEQ ID NO: 94661 - DNA, 75 bp, synthetic construct
  source 1..75: mol_type = other DNA
tatcgggtgttgctgaaccgtgttaatacaacaactgcaccggatattgaatggccagtagcacctatagggtaa

SEQ ID NO: 94662 - DNA, 75 bp, synthetic construct
  source 1..75: mol_type = other DNA
tcatgcaatagcgcatgggtattacctgccagaaaaatgcagcacagaatgatccctcacatccaggaaagcacc

SEQ ID NO: 94663 - DNA, 75 bp, synthetic construct
  source 1..75: mol_type = other DNA
aacgctttatgcatatgacttttatgccgataaaactgtcgtagaaattggtcgcgtcgaaaatgtgatggaaga

SEQ ID NO: 94664 - DNA, 75 bp, synthetic construct
  source 1..75: mol_type = other DNA
gtggcagaggctgctcgcaggaaaagacgtcgtttctctgtactgttcattgactgggaggctcagtatcagtgc

SEQ ID NO: 94665 - DNA, 75 bp, synthetic construct
  source 1..75: mol_type = other DNA
aatggtgctggctctgttgataatgccaaggcgactggcaaagatcttactgatgctggttttacggcaagcgca

SEQ ID NO: 94666 - DNA, 75 bp, synthetic construct
  source 1..75: mol_type = other DNA
cgacaaagcgacagcggctgatgtattgggcaaagcggctgctggcgatagcattacctatgcgggcactgatac

SEQ ID NO: 94667 - DNA, 75 bp, synthetic construct
  source 1..75: mol_type = other DNA
tatcgcaccggaagcacgtgggaaagtaatgttgctaggccattggataggtgaaagagagattcctgatcccta

SEQ ID NO: 94668 - DNA, 75 bp, synthetic construct
  source 1..75: mol_type = other DNA
caagacatgctgccttccttttgcatgttcatcttgtctttgtaacaaaataccgtcgaaagatactgggagagt

SEQ ID NO: 94669 - DNA, 75 bp, synthetic construct
  source 1..75: mol_type = other DNA
tatgacgggaaaaaattcacgtatccggtcgctgatgagtggccgggattctcaacagtaatggagtggacataa

SEQ ID NO: 94670 - DNA, 75 bp, synthetic construct
  source 1..75: mol_type = other DNA
cgatgataagccctggaccacggcatcgcctgaagggttttactacactatgtatccgctgtatgactggaaaac

SEQ ID NO: 94671 - DNA, 75 bp, synthetic construct
  source 1..75: mol_type = other DNA
caatgccggtactgaaattggcgtggcatctaccaaagccttcaccactcagttaactgtgctgttgatgctggt

SEQ ID NO: 94672 - DNA, 75 bp, synthetic construct
  source 1..75: mol_type = other DNA
ggatggtactgctgttgaaacaaccatcaagacagaggctggtgtaacagttacagctgaaggtaatacaggtac

SEQ ID NO: 94673 - DNA, 75 bp, synthetic construct
  source 1..75: mol_type = other DNA
aaaattgcattgtgtcatggtatttcgttggaaggacatcaatctaaacaatttacttcctcattaggccgtcaa

SEQ ID NO: 94674 - DNA, 75 bp, synthetic construct
  source 1..75: mol_type = other DNA
gaagtggcccgcaaaaagaggcgtcgtttttcggtattgttcattgactgggaagcacaatatcaatgcaccatt

SEQ ID NO: 94675 - DNA, 75 bp, synthetic construct
  source 1..75: mol_type = other DNA
gccttcctttgcgaatgcgtttacagaagccgggtttgcaacgattacttttgattatcgtggattcggtgagag

SEQ ID NO: 94676 - DNA, 75 bp, synthetic construct
  source 1..75: mol_type = other DNA
tgaaaaaagaaaccgatatccgacgcggaaggcattgtgttttcctgaagcatgttcacctagtcttcgttacta

SEQ ID NO: 94677 - DNA, 75 bp, synthetic construct
  source 1..75: mol_type = other DNA
tgcgctggcacagtgggctgatctgctggtggaactggaaagcggaaatgactacaacgtaacgccattcgataa

SEQ ID NO: 94678 - DNA, 75 bp, synthetic construct
  source 1..75: mol_type = other DNA
ttaatcctccggaacagggaagagcattatatgatgcagttgcttctggtactaaggaattatacgaggaagccg

SEQ ID NO: 94679 - DNA, 75 bp, synthetic construct
  source 1..75: mol_type = other DNA
tcgaaagcccggttcagtttccaggaggcgagaacagcctgggggaatgccaactggattggctctggtcgaatg

SEQ ID NO: 94680 - DNA, 75 bp, synthetic construct
  source 1..75: mol_type = other DNA
gcttaatatatccgaaagcactgtatatcccagcatggagaaaacggcagcagaaattacaaaaaagtttttatc

SEQ ID NO: 94681 - DNA, 75 bp, synthetic construct
  source 1..75: mol_type = other DNA
aacggctggtgtgatcacgcgcacattaatgaaggcataaaaaaagccggcatcatgccggcccaaaaaatataa

SEQ ID NO: 94682 - DNA, 75 bp, synthetic construct
  source 1..75: mol_type = other DNA
ccacatctgctggcaatccacttcacacttcattcgacagaaggcgtctgtggtcaacagattcagacattctgt

SEQ ID NO: 94683 - DNA, 75 bp, synthetic construct
  source 1..75: mol_type = other DNA
gggggaactgttggtgtaactcaatatactgacaaatcggctgtagcaagtagcgtagatattctaaatgctgtt

SEQ ID NO: 94684 - DNA, 75 bp, synthetic construct
  source 1..75: mol_type = other DNA
ggcacctggagcgtgaccgttcccgccgccaacgttgacgcactggctgacggcaacgctacggtcaccgccagc

SEQ ID NO: 94685 - DNA, 75 bp, synthetic construct
  source 1..75: mol_type = other DNA
taccggtaacttaactaaaaataatgctggtggtgatacacaagctactttggctaaacttgctactgctactgg

SEQ ID NO: 94686 - DNA, 75 bp, synthetic construct
  source 1..75: mol_type = other DNA
aatcagtgaaaatactgtaaataaagccctgagggtgatggggtatgacacaacccaggaagtctgtggccatgg

SEQ ID NO: 94687 - DNA, 75 bp, synthetic construct
  source 1..75: mol_type = other DNA
cgggatgcggtaagtccacctttgctcgcgccatcatcggtttggtcaaggcgaccgacggtcatgttgcctggt

SEQ ID NO: 94688 - DNA, 75 bp, synthetic construct
  source 1..75: mol_type = other DNA
tgtaaagtatgtgaatactggtgagggaattaatccgggtacggttaacggaatatcaacatttacgttttccta

SEQ ID NO: 94689 - DNA, 75 bp, synthetic construct
  source 1..75: mol_type = other DNA
ctggtcatcgcgggatggtcggttctgccatcaagcggcagctcgaacagcgcggtgatgtggagctggtattac

SEQ ID NO: 94690 - DNA, 75 bp, synthetic construct
  source 1..75: mol_type = other DNA
gccgtggtaaaacacatttccgatcgtgtgttggtgatgtatctcggccatgcggtagaactggggacctatgat

SEQ ID NO: 94691 - DNA, 75 bp, synthetic construct
  source 1..75: mol_type = other DNA
tacttgtggtggccaagaccaacggggagaatcaaaaggagatggtctatgggggccaggtaaagcaagtaatga

SEQ ID NO: 94692 - DNA, 75 bp, synthetic construct
  source 1..75: mol_type = other DNA
acggaaacagacaacgcctggttgtactcgctgtcacaccagaccagtgacttcggcgaatcagaatggattcat

SEQ ID NO: 94693 - DNA, 75 bp, synthetic construct
  source 1..75: mol_type = other DNA
ctggcgcagttgcaatggctctggtttcttttggtgctaatgctgcaggcaataatgcaaatcagggacagggta

SEQ ID NO: 94694 - DNA, 75 bp, synthetic construct
  source 1..75: mol_type = other DNA
cggcaattgatgcgcatgatgatgcagtccaggccgtttaccgtaaagcatatttcagcggcggtgggtcgcccg

SEQ ID NO: 94695 - DNA, 75 bp, synthetic construct
  source 1..75: mol_type = other DNA
gtactgatgcgtggtcgtacccggttctgcggcttaaacgtctgggcatgtcaaaaatgttccgtcgtctggttg

SEQ ID NO: 94696 - DNA, 75 bp, synthetic construct
  source 1..75: mol_type = other DNA
tgcccgtaccgcacagactgcaccttacgatcgctacacttgccacctttgcggcagtgcgctcagataccaccc

SEQ ID NO: 94697 - DNA, 75 bp, synthetic construct
  source 1..75: mol_type = other DNA
cagatccacgcccggcaattccgcacgacgaagtaatggcaaaaatggaaaaaatcatcaatcaaattgccacgg

SEQ ID NO: 94698 - DNA, 75 bp, synthetic construct
  source 1..75: mol_type = other DNA
acttttggccgctatggtgttggagggatcacgcttgcagaagcgcgtgaacggctcaatgaagctaaaaaaatg

SEQ ID NO: 94699 - DNA, 75 bp, synthetic construct
  source 1..75: mol_type = other DNA
cgatcaataatggagtgctacaggtttatggcgcggcgaatgatcccacgattaaaggcgggcgcttaattgttg

SEQ ID NO: 94700 - DNA, 75 bp, synthetic construct
  source 1..75: mol_type = other DNA
aaaaaagcaaaacctgattgcaaattacctgatagggcgatggattatcttttgcgaaacggactggtaagtgcg

SEQ ID NO: 94701 - DNA, 75 bp, synthetic construct
  source 1..75: mol_type = other DNA
ggccgcaccggatggcggtgattcgctgctggtttcggcggtaaaacgcctgagcgatcgcctcggtatcactgt

SEQ ID NO: 94702 - DNA, 75 bp, synthetic construct
  source 1..75: mol_type = other DNA
aacaacgtcacgattaacgagaactgtcgggttctgggaaaactgtccgcgaaccagattgaaggcgatctcgtt

SEQ ID NO: 94703 - DNA, 75 bp, synthetic construct
  source 1..75: mol_type = other DNA
accggaacgaatgtttcactttcaggggataacaaagccggaggaaatctcagcgttaccgggacaacgggactg

SEQ ID NO: 94704 - DNA, 75 bp, synthetic construct
  source 1..75: mol_type = other DNA
gcgcaatggtgtatcacggtgagatgatgccccttgatgcgaaacttatcactatttctgaccctcaatttacaa

SEQ ID NO: 94705 - DNA, 75 bp, synthetic construct
  source 1..75: mol_type = other DNA
acgccgccgaagccggagcggcgctgaccatcactggcagcagcacggcggaagcggggcagacggtgaccgtca

SEQ ID NO: 94706 - DNA, 75 bp, synthetic construct
  source 1..75: mol_type = other DNA
ttatgctggttatgggatttaacggggcaaaagccgatgctgttaaagaagcctatatcaatgcgtttaactgga

SEQ ID NO: 94707 - DNA, 75 bp, synthetic construct
  source 1..75: mol_type = other DNA
cattaaataccagtttaccgcaatggagcgacaataacgttatggtcccttccccgacagttaacagtaaatgga

SEQ ID NO: 94708 - DNA, 75 bp, synthetic construct
  source 1..75: mol_type = other DNA
cgtgacatacttccggttcttggcaacaaaatgatggctgaaattaccacatcgatggttcgtgatttgtgtgac

SEQ ID NO: 94709 - DNA, 75 bp, synthetic construct
  source 1..75: mol_type = other DNA
tcgatgtcaaatattcacgctgtcaatgaaaaaggccagcaatcggtggatattgaccgtattgatcagcacgtt

SEQ ID NO: 94710 - DNA, 75 bp, synthetic construct
  source 1..75: mol_type = other DNA
atgcgccatattttattttttgtcgcttttctggcaggaatggcccttcctgcgcaggctgaagtcggacacggt

SEQ ID NO: 94711 - DNA, 75 bp, synthetic construct
  source 1..75: mol_type = other DNA
aaccttatgcaatagcaaaaattgcaggtataaaattatgcgaatcatataacagacaatataatcgcgattacc

SEQ ID NO: 94712 - DNA, 75 bp, synthetic construct
  source 1..75: mol_type = other DNA
atgcctaccccgattacaccggcgatgatcaccgccctgatgacgggctaccgttctgattttcaggccgggatg

SEQ ID NO: 94713 - DNA, 75 bp, synthetic construct
  source 1..75: mol_type = other DNA
tactgctgattctcctgctgacgggagcaccaatactcgctcaggaaccttctgacgttgcgaaaaacgtgcgta

SEQ ID NO: 94714 - DNA, 75 bp, synthetic construct
  source 1..75: mol_type = other DNA
tttgaacacactgacgacgggctgacagcgcacggtcagcagtgtccttatgtcagaccggaacgcagggagata

SEQ ID NO: 94715 - DNA, 75 bp, synthetic construct
  source 1..75: mol_type = other DNA
gcttaaccgggcgatcaatgatgcggagttggtactggggacaacccgccgtcgccgtcgtccgctgggagtgag

SEQ ID NO: 94716 - DNA, 75 bp, synthetic construct
  source 1..75: mol_type = other DNA
atgaaaacggggatgaacagcgttatctgccggaaggcacactgattctggggaacactcaggcggaaggcgtcc

SEQ ID NO: 94717 - DNA, 75 bp, synthetic construct
  source 1..75: mol_type = other DNA
accatagcacctgactatccggtttatatgctggggagggccctgattggtatcgtcattggagggttctggtca

SEQ ID NO: 94718 - DNA, 75 bp, synthetic construct
  source 1..75: mol_type = other DNA
gtggaactgaagcgccagccgcgcgtggaaaatctgctttattttgtgcagaacacacgcaagcggtttgagccg

SEQ ID NO: 94719 - DNA, 75 bp, synthetic construct
  source 1..75: mol_type = other DNA
tccccgttgttccaggagatggggcgcgctgctgcggcacaaccggatgaactggtctttgctgctcttcgtgac

SEQ ID NO: 94720 - DNA, 75 bp, synthetic construct
  source 1..75: mol_type = other DNA
ttctgaccagtacgcgccatttcacaccaaggtcgtgaacgtcggcgtgcgcgattcgacctacgtgctcgacgg

SEQ ID NO: 94721 - DNA, 75 bp, synthetic construct
  source 1..75: mol_type = other DNA
cggtgatgctctataacttcccggcgctgaccgggcaggatctgactccggcgctggtgaaaaccctcgccgact

SEQ ID NO: 94722 - DNA, 75 bp, synthetic construct
  source 1..75: mol_type = other DNA
tgccctgccggatttcagtccgttgtcacaggacagactcgccattcagttgatccgcgaacgcggtgcgctgga

SEQ ID NO: 94723 - DNA, 75 bp, synthetic construct
  source 1..75: mol_type = other DNA
ttcattgtctaccggtattgacagcaaagggaggccaaaacgtcaccgcctgccaattgaagtggtgaaaatagc

SEQ ID NO: 94724 - DNA, 75 bp, synthetic construct
  source 1..75: mol_type = other DNA
actcgacagcctgctcatatcagagggtgaacaaccttcccgtctggcatggctgctacagcctccgggtaaaat

SEQ ID NO: 94725 - DNA, 75 bp, synthetic construct
  source 1..75: mol_type = other DNA
gcagtcgcttggcaagttcggaccgcacgacttgcggcgtacagccagcacgctgctgcatgaggcaggctataa

SEQ ID NO: 94726 - DNA, 75 bp, synthetic construct
  source 1..75: mol_type = other DNA
atggcaataaaaggtctggcgcaggccatgaaaaatctggatgcaattgatcgccgtgccgttccccgggcctct

SEQ ID NO: 94727 - DNA, 75 bp, synthetic construct
  source 1..75: mol_type = other DNA
cacaccaagttcgaatctgaagtgtacattctgtccaaagatgaaggcggtcgtcatactccgttcttcaaaggc

SEQ ID NO: 94728 - DNA, 75 bp, synthetic construct
  source 1..75: mol_type = other DNA
tgggcaaaacgctctggaacatagctgatcaattacgcggtgctatgaatgctgatgattttcgcgattatatgc

SEQ ID NO: 94729 - DNA, 75 bp, synthetic construct
  source 1..75: mol_type = other DNA
aaacaaactgccttatttcactggtaaggatacggtagcgcagactgatttaacgtcagtcggtcgcgatattct

SEQ ID NO: 94730 - DNA, 75 bp, synthetic construct
  source 1..75: mol_type = other DNA
aatcagtgctgttagccctggccgctgaaaaagggcaggcatgggtagccaatgcaattactgaagaatatctgc

SEQ ID NO: 94731 - DNA, 75 bp, synthetic construct
  source 1..75: mol_type = other DNA
gtgaattcctgcacgtcgatgatatggcggcggcgagcattcatgtgatggagctggcgcacgaagtctggctgg

SEQ ID NO: 94732 - DNA, 75 bp, synthetic construct
  source 1..75: mol_type = other DNA
agtatctctgacgttttcaggtgttcaggctggtacagatatgctacaaacggttggttcaactaataccgcaat

SEQ ID NO: 94733 - DNA, 75 bp, synthetic construct
  source 1..75: mol_type = other DNA
agttaacggcgtcagcaaaattatctccctgacggcagataccctcaccgttgagcgcgaactggaagatgaaac

SEQ ID NO: 94734 - DNA, 75 bp, synthetic construct
  source 1..75: mol_type = other DNA
ttgatcgtgttaatgcccagcaggcgcgtcgctttatggaccgcgtggtggggtatatggtttcgccgctgctat

SEQ ID NO: 94735 - DNA, 75 bp, synthetic construct
  source 1..75: mol_type = other DNA
atccccgtgtacaggaaatggtggataactggcagaagagtgtaaggagtcgtgcgctcccggaagaggcgatga

SEQ ID NO: 94736 - DNA, 75 bp, synthetic construct
  source 1..75: mol_type = other DNA
cgccgatgaactggcaaaattaaaacaaaatgataacgcaccttgcccgcccggttggcagttaagtttgcctgc

SEQ ID NO: 94737 - DNA, 75 bp, synthetic construct
  source 1..75: mol_type = other DNA
ctggcaggcaagatggcgctgtatgccgatgttgagccaacggagtccctggtggaactggtgaaaaaaggccag

SEQ ID NO: 94738 - DNA, 75 bp, synthetic construct
  source 1..75: mol_type = other DNA
tattttttccattgtcgattcctctggcataacgattttatgatggcatgtgacatgtatttccgttgggggcat

SEQ ID NO: 94739 - DNA, 75 bp, synthetic construct
  source 1..75: mol_type = other DNA
gcgcctgccaatgacaccaatcaccgacagtggtcgtgagacggtcagagcggcgcttaagcatgccggtttgct

SEQ ID NO: 94740 - DNA, 75 bp, synthetic construct
  source 1..75: mol_type = other DNA
aatcttttacacgtcgatttaagtacatttttaaggttacaccaagttattatcggcgtaataaattatgggaat

SEQ ID NO: 94741 - DNA, 75 bp, synthetic construct
  source 1..75: mol_type = other DNA
gggaaggtgacaggctggggaatatcaccatcacccggattgaaccgtccagccgctcagtcatcacctctgccg

SEQ ID NO: 94742 - DNA, 75 bp, synthetic construct
  source 1..75: mol_type = other DNA
agattgctcagatagatgtagtgattatattaatccagagcataaaaaaacgataaaggctttacaagatgctgg

SEQ ID NO: 94743 - DNA, 75 bp, synthetic construct
  source 1..75: mol_type = other DNA
cggaatacagaccgtatcgttaccatactgctggcactgattattgtggtcctgctgactactgtcagcgtcagt

SEQ ID NO: 94744 - DNA, 75 bp, synthetic construct
  source 1..75: mol_type = other DNA
ggcaaaatggtgaaaatactgtgggccgatcgtgacgggttatgcctgttcgccaaacgtctggccggtgacccg

SEQ ID NO: 94745 - DNA, 75 bp, synthetic construct
  source 1..75: mol_type = other DNA
attcctcatgaaaacatcttggttaaatatatttatcatatgattgggtctagggggagtgatattctgcgagca

SEQ ID NO: 94746 - DNA, 75 bp, synthetic construct
  source 1..75: mol_type = other DNA
tggcctcacggtaaatttattggtgctccggtgtggcacatgaacgaaccagatgagcgatttattcgtctgtgc

SEQ ID NO: 94747 - DNA, 75 bp, synthetic construct
  source 1..75: mol_type = other DNA
tttcgcgcctgccggcaggcacgtgaagcatcagagtatttactgatgcagcgggcttcgcaggcgcggggcgca

SEQ ID NO: 94748 - DNA, 75 bp, synthetic construct
  source 1..75: mol_type = other DNA
tcattaacagtcatgagaaaggctgggctgcaatcgtcccctgcacaattacatacaagttggcgaaagaggttc

SEQ ID NO: 94749 - DNA, 75 bp, synthetic construct
  source 1..75: mol_type = other DNA
atgtcatttggtagttatgatcttgtaagcctcgcggaagcacgtgagaaacgcgatacggcacgtaaacaggtt

SEQ ID NO: 94750 - DNA, 75 bp, synthetic construct
  source 1..75: mol_type = other DNA
tacgactgtgtaacgcctgtatatcagttccggcgtgatttctccctgatgaaggccgcgccccgcagtaaacct

SEQ ID NO: 94751 - DNA, 75 bp, synthetic construct
  source 1..75: mol_type = other DNA
tatgactgcgtgatgcctgcttatcagttccggcgtgatttttcactgatacaggccacaccacgcaaacagccc

SEQ ID NO: 94752 - DNA, 75 bp, synthetic construct
  source 1..75: mol_type = other DNA
atgatttaaatgaagacgcggaatttgatgagaacggagttgaggtttttgacgagaaagccttagttgaagagg

SEQ ID NO: 94753 - DNA, 75 bp, synthetic construct
  source 1..75: mol_type = other DNA
caggaagaacgcctgtctgcgctggagactgccctgcaggcacagcaaaccgcctttaacgaactggtggacaag

SEQ ID NO: 94754 - DNA, 75 bp, synthetic construct
  source 1..75: mol_type = other DNA
ccgccagatacgccgctacttcatcgagtgcgaaaagaaacttcgcaacattcagccagtacaagcagaaccaca

SEQ ID NO: 94755 - DNA, 75 bp, synthetic construct
  source 1..75: mol_type = other DNA
ccagcgttaccatttgctttcgcatttaaccgccgagcagaacgttgaagtacccgccgtctatgccggtcttga

SEQ ID NO: 94756 - DNA, 75 bp, synthetic construct
  source 1..75: mol_type = other DNA
tatctgccggacagcacctttaaccgctacggcaaggtgacggcgctgtttgctgaagaaatcacggaaggtccg

SEQ ID NO: 94757 - DNA, 75 bp, synthetic construct
  source 1..75: mol_type = other DNA
atgaaacttaaatattctggcttaactgccagtggcaaaactcgcactaaattcatgcgcggtgatatttaccgc

SEQ ID NO: 94758 - DNA, 75 bp, synthetic construct
  source 1..75: mol_type = other DNA
aggcccgggaaatattcctcaccattaacagcgcgcctgaacacggctggacatgttatgaaccgccctcgttta

SEQ ID NO: 94759 - DNA, 75 bp, synthetic construct
  source 1..75: mol_type = other DNA
gaaaaattcacccctgcgcagaacatgattttttcgcgtaaaagtgcgcaactggcatcacgtcagtctgtgtaa

SEQ ID NO: 94760 - DNA, 75 bp, synthetic construct
  source 1..75: mol_type = other DNA
caatgtcaccacgattattatggggagcagtactgcacacactgtcatacagggcatttcagtgaggaggcagtg

SEQ ID NO: 94761 - DNA, 75 bp, synthetic construct
  source 1..75: mol_type = other DNA
aggcagatatatgtgaatcgcttcacgaccacgccgatgagctttaccgcagctgcctctcacgcttcggggatg

SEQ ID NO: 94762 - DNA, 75 bp, synthetic construct
  source 1..75: mol_type = other DNA
ttcagcaatgggcagattctattcctgcaaaagttatttttccagcactaatcgctgatcttatacgtgcaacgg

SEQ ID NO: 94763 - DNA, 75 bp, synthetic construct
  source 1..75: mol_type = other DNA
cggttttcacagcctcgaatcgctctcgccaaccttatgtcagccgtttggtcgtgaccgcgcaggtatcaccat

SEQ ID NO: 94764 - DNA, 75 bp, synthetic construct
  source 1..75: mol_type = other DNA
aatgtgctgttgattgtcaatgtcgcctcaaagtgtggcttaacgccgcaatatgagcagttggagaatattcag

SEQ ID NO: 94765 - DNA, 75 bp, synthetic construct
  source 1..75: mol_type = other DNA
tttgaacacaccgacgaagggctgactgagcacggtcagcagtgtccttacgtcaggccggatcgcagggaagta

SEQ ID NO: 94766 - DNA, 75 bp, synthetic construct
  source 1..75: mol_type = other DNA
ttaatattcgggaatatcatgatattcctgctgaaacgccgtatgcgccgggagaacaaattaagggagggtggc

SEQ ID NO: 94767 - DNA, 75 bp, synthetic construct
  source 1..75: mol_type = other DNA
caaatggtaatgtgtggatgagtccagaatttacaccgcaaaatttgattaatagggggacaatgtccacgtcta

SEQ ID NO: 94768 - DNA, 75 bp, synthetic construct
  source 1..75: mol_type = other DNA
ggtttatgcgccagacggaatgaatattaatcagtttatggtccgggccggggctgcctgggtatatgagcagta

SEQ ID NO: 94769 - DNA, 75 bp, synthetic construct
  source 1..75: mol_type = other DNA
gcgcagcttcctcggcaacagcggcaggaaattccgcgaaggcggcaaaaacgtcagagacgaacgccaggtctt

SEQ ID NO: 94770 - DNA, 75 bp, synthetic construct
  source 1..75: mol_type = other DNA
agctggagcgtcagcgtgccgacggcggatctcagcaatctgaccgccagccagtacacggtcagcgcctcggta

SEQ ID NO: 94771 - DNA, 75 bp, synthetic construct
  source 1..75: mol_type = other DNA
aatacaaaaaggaacaggaaaagtatggtaccggcagcgatatgcagcgcggtatccaggctgcaacggctgcac

SEQ ID NO: 94772 - DNA, 75 bp, synthetic construct
  source 1..75: mol_type = other DNA
gtggcagtgcactcagataccatccgcaatacgacactgaacttccctggtttgaacacactgacgacaggctga

SEQ ID NO: 94773 - DNA, 75 bp, synthetic construct
  source 1..75: mol_type = other DNA
cggaagccatggtgaagggatatatcacccgtctggaaaatcagccggtgcagggcgaagcgtcgtctccggtaa

SEQ ID NO: 94774 - DNA, 75 bp, synthetic construct
  source 1..75: mol_type = other DNA
cggtcactgccgggaacagtctgatgctttccgccggtcgtgatgtgaacagccaggctgccggtattacggctg

SEQ ID NO: 94775 - DNA, 75 bp, synthetic construct
  source 1..75: mol_type = other DNA
ttatcgcttccacggcgacggcagataaaaacagcctcgataccgggacgctcggcttcagcgatattcacaacg

SEQ ID NO: 94776 - DNA, 75 bp, synthetic construct
  source 1..75: mol_type = other DNA
gagcgtaatatttacgaccttatcgtaagaacataccttgctcaattttatccagtacatgaatataaagcgaca

SEQ ID NO: 94777 - DNA, 75 bp, synthetic construct
  source 1..75: mol_type = other DNA
caatgtcaccacgattattatggggagcggtactgcacacactgccatacagggcacttcagtgaggagggagtg

SEQ ID NO: 94778 - DNA, 75 bp, synthetic construct
  source 1..75: mol_type = other DNA
ataacggctacaccctgaccgccacggtcagcgatctggcgggtaaccctggcagcgccagcaaaggcgtgaccg

SEQ ID NO: 94779 - DNA, 75 bp, synthetic construct
  source 1..75: mol_type = other DNA
gcgtacttgccaccggcagtgccgacgttaaaggaaccacgctgaataataccggtacgcttcagggtgcggacc

SEQ ID NO: 94780 - DNA, 75 bp, synthetic construct
  source 1..75: mol_type = other DNA
gcccggaaaaatgtcagagagccagttctggttattagctgaaatatctccggttcacagtgaaaaggttcttaa

SEQ ID NO: 94781 - DNA, 75 bp, synthetic construct
  source 1..75: mol_type = other DNA
cggtaaaacagcttccgtgcctcaggcggtcgttgcctctgacggtaataaggcaatcactgaaacagagcatga

SEQ ID NO: 94782 - DNA, 75 bp, synthetic construct
  source 1..75: mol_type = other DNA
tcgctttccttctgattgccgcatggggaacatccatgcgtctgtcatggtcgctgggccgggagaacgccagaa

SEQ ID NO: 94783 - DNA, 75 bp, synthetic construct
  source 1..75: mol_type = other DNA
tggctgttttacctgacgcgaggccgcgccaggctttacgccacgctagctaatggtcgcgtgtcgctgatcgat

SEQ ID NO: 94784 - DNA, 75 bp, synthetic construct
  source 1..75: mol_type = other DNA
cgctcaccgtggaagctttgaaagcttcgcccaggcggtgcgtgacatcgctcgtaatgctatgccgggcaaagt

SEQ ID NO: 94785 - DNA, 75 bp, synthetic construct
  source 1..75: mol_type = other DNA
gtgcagtgggacgactacgcccagctctttaccctgattaaagatggcgcgtacgtgaaagtgaagcctggtgcg

SEQ ID NO: 94786 - DNA, 75 bp, synthetic construct
  source 1..75: mol_type = other DNA
aaaatataacactgggcaactcttcgggttagatggtataaaagcagataatccaataaaagcaaagcaagggag

SEQ ID NO: 94787 - DNA, 75 bp, synthetic construct
  source 1..75: mol_type = other DNA
cgcgtgcagaaggacacaaatgatgaccttgctgcactttacatgctgaaggtacagaaaacaaaaaatggcata

SEQ ID NO: 94788 - DNA, 75 bp, synthetic construct
  source 1..75: mol_type = other DNA
gcggagcttaagctgatcgcagagaaaacgaaaaaaggctatgtggaaaatgcttcagcaaacgtgcatatcccc

SEQ ID NO: 94789 - DNA, 75 bp, synthetic construct
  source 1..75: mol_type = other DNA
atggcaattaatggcgctgcggcgactgttccattaagcccaggtgaacgcctgaatggacttaatcatattgcg

SEQ ID NO: 94790 - DNA, 75 bp, synthetic construct
  source 1..75: mol_type = other DNA
tcagatttggaacgctacatcttgaaaattccgatttttctattggtcgtaatgcaaatgtaatcggggacattc

SEQ ID NO: 94791 - DNA, 75 bp, synthetic construct
  source 1..75: mol_type = other DNA
tatgactgcgtgatgcctgtttatcagttccggcgtgatttcacgctggtgggccatcgtaaagccgtaaatcag

SEQ ID NO: 94792 - DNA, 75 bp, synthetic construct
  source 1..75: mol_type = other DNA
cttcgaacgtctgatggaaggcgctaacctgctgaaatgcagcgagtttggtgacgcgatcatcaaaaatatgta

SEQ ID NO: 94793 - DNA, 75 bp, synthetic construct
  source 1..75: mol_type = other DNA
tcaccgtcagagcttcagatatcgcccagaccgacgaattcccgctgtttatgcgttacttccggctgcattgcc

SEQ ID NO: 94794 - DNA, 75 bp, synthetic construct
  source 1..75: mol_type = other DNA
tggacgatgccacttcaggactggcggatagccatgagtcgctttattatcgagttcggtgaccgccttgacggt

SEQ ID NO: 94795 - DNA, 75 bp, synthetic construct
  source 1..75: mol_type = other DNA
atgcctgctcgccaagtatgtcagaattttttccgcggtgctttagcaccatttcacaaataccgacaaaatgct

SEQ ID NO: 94796 - DNA, 75 bp, synthetic construct
  source 1..75: mol_type = other DNA
gcgtgactcaagaagggcctgacggcttgtctcgttactgtcctgtccgggttatctgtctggagattcaactct

SEQ ID NO: 94797 - DNA, 75 bp, synthetic construct
  source 1..75: mol_type = other DNA
atgccaatccagaactggcggctggcaatgagccgttttattatcgagtttggtgaccgccttagcgagcacctt

SEQ ID NO: 94798 - DNA, 75 bp, synthetic construct
  source 1..75: mol_type = other DNA
acgctgacccgcaccggctttgtcatcgaccacatccactactacgccgatgcgctcaagccgtggattgcgcgg

SEQ ID NO: 94799 - DNA, 75 bp, synthetic construct
  source 1..75: mol_type = other DNA
gtatgcgggtggttattcgtgatgccgaatggcgtattcgccgggcggatgacagtggtgatggtgggtatttgc

SEQ ID NO: 94800 - DNA, 75 bp, synthetic construct
  source 1..75: mol_type = other DNA
atcatccggggaaatctgcgcgtcaggcaggcgctggaaaaagtggccgccacgggagactgccggcaggtggct

SEQ ID NO: 94801 - DNA, 75 bp, synthetic construct
  source 1..75: mol_type = other DNA
ggccgtgggcgaaaaactcgatcaccaggtactgatggataaggtcgtgcattacacggcggcggtgccagcccg

SEQ ID NO: 94802 - DNA, 75 bp, synthetic construct
  source 1..75: mol_type = other DNA
gctgaagcagcagaaagagcaactggcactggtggggcagaatacagagctggcgaagctgaaataccagactgc

SEQ ID NO: 94803 - DNA, 75 bp, synthetic construct
  source 1..75: mol_type = other DNA
gaagagtgcaggtcgtttaactcagaggttatcaagcgcctgatagacagcctgaagagagagggggtaacggtg

SEQ ID NO: 94804 - DNA, 75 bp, synthetic construct
  source 1..75: mol_type = other DNA
atttgaaaaactctaaccaaaataataagcgttacgaaagtgcattatttgagattcaagtagcatcggttctta

SEQ ID NO: 94805 - DNA, 75 bp, synthetic construct
  source 1..75: mol_type = other DNA
ttttcataaacgttggttttggagaaggtgctaactgggttatgttacctggaggaatgataattcagcgtgttt

SEQ ID NO: 94806 - DNA, 75 bp, synthetic construct
  source 1..75: mol_type = other DNA
aacgacagtgatattttgatatctgaccatgtcatcgagcgcatcaactgtactaacggcaaaatcaactggggc

SEQ ID NO: 94807 - DNA, 75 bp, synthetic construct
  source 1..75: mol_type = other DNA
ctgttccattaagccccggtgaacgcctgaatggacttaatcatattgcggagttaagggcgaaagtttttggcc

SEQ ID NO: 94808 - DNA, 75 bp, synthetic construct
  source 1..75: mol_type = other DNA
gatgggttataggacatgatatctaccagcaacaggagcttgcccgtctgtgtgggattaagcctgacaactgga

SEQ ID NO: 94809 - DNA, 75 bp, synthetic construct
  source 1..75: mol_type = other DNA
ggttttatgtgcgcagcgtcaacctggtggggaaatctgcgtttgtggaagccagtggccgggccagcaatgatg

SEQ ID NO: 94810 - DNA, 75 bp, synthetic construct
  source 1..75: mol_type = other DNA
cgcggttgtgttcagtgcgaaaaaacgccagtggggaagtcaggaagatttggcgtgcgcacagtggatctgggg

SEQ ID NO: 94811 - DNA, 75 bp, synthetic construct
  source 1..75: mol_type = other DNA
gcagagtatcctggtgaacaaaaccccgctgacggacacggacggtaatcccgtgatacacggtgtgacagcggt

SEQ ID NO: 94812 - DNA, 75 bp, synthetic construct
  source 1..75: mol_type = other DNA
aaacagggagaaaacgacacccgaattggtatggagttgacgttgcaacccggtcattcactgcaaaaacagctc

SEQ ID NO: 94813 - DNA, 75 bp, synthetic construct
  source 1..75: mol_type = other DNA
tttgtgcgtgaaggcgacactgtggtggtgcacagtatggaccgcctggcgcgtaacctagacgatctgcgccgt

SEQ ID NO: 94814 - DNA, 75 bp, synthetic construct
  source 1..75: mol_type = other DNA
tcgccgtgaacagtctggatggtgccctgaccaataatgagcagaccgcctccggcggtgtggtggttgccaccg

SEQ ID NO: 94815 - DNA, 75 bp, synthetic construct
  source 1..75: mol_type = other DNA
taccgcttcagcaatctgcgatcaggctgaatcttcagtaccctgccaaatccggctttaaaggcgaacccgata

SEQ ID NO: 94816 - DNA, 75 bp, synthetic construct
  source 1..75: mol_type = other DNA
gaaaatacatcatcgccatatcagcagattgcccgggaagtgaaagtgccccgtgaacggctgaagtatgcgctg

SEQ ID NO: 94817 - DNA, 75 bp, synthetic construct
  source 1..75: mol_type = other DNA
gtgaccgtctctaccgttttcaggtagcaggtcgtcctgaactgaatcagatgcataccgcaatcaatatgggcg

SEQ ID NO: 94818 - DNA, 75 bp, synthetic construct
  source 1..75: mol_type = other DNA
gacgtccagtttggtctggcgacgatgtgtatcggtctgggtcagggtattgcgacggtgtttgagcgggtttaa

SEQ ID NO: 94819 - DNA, 75 bp, synthetic construct
  source 1..75: mol_type = other DNA
tcgaattattcattaaaaatccgcttgataacggacttacccgtggcgaacaaatggaactggcacggattgcac

SEQ ID NO: 94820 - DNA, 75 bp, synthetic construct
  source 1..75: mol_type = other DNA
cacaccatattaatgcatcgtccacatccggaaagttatatcaaaggtggtacgctgaaagcaattaaacagaat

SEQ ID NO: 94821 - DNA, 75 bp, synthetic construct
  source 1..75: mol_type = other DNA
ctaaagcaatactaatgttgaaagcagatgttgattatacaaaagattatgtattccctattgcattatcttttt

SEQ ID NO: 94822 - DNA, 75 bp, synthetic construct
  source 1..75: mol_type = other DNA
gtaatacacaactgtccatgcagggacatgccactgaacatgccatttatcgggatggtgctttctcttgttcac

SEQ ID NO: 94823 - DNA, 75 bp, synthetic construct
  source 1..75: mol_type = other DNA
aaattccgatttttctattggtcgtaatgcaaatgtaatcggggacattcaggccagtaaatcaaacattactat

SEQ ID NO: 94824 - DNA, 75 bp, synthetic construct
  source 1..75: mol_type = other DNA
aggcgctggaaaaggtggtggggaagggcgagtgcagggatgaggcgcaacagctgcttaataaaggagatgccc

SEQ ID NO: 94825 - DNA, 75 bp, synthetic construct
  source 1..75: mol_type = other DNA
atgaaatggtctatatgcatgatattgtaaattcggactcgaaaaagaaaccaaggattccgttaaaaaattcct

SEQ ID NO: 94826 - DNA, 75 bp, synthetic construct
  source 1..75: mol_type = other DNA
gtgacggtagtcgaggctaagggcttttttaacctcgcatccgcgcccgcggtaacactgaatgagccattcagc

SEQ ID NO: 94827 - DNA, 75 bp, synthetic construct
  source 1..75: mol_type = other DNA
aatattctggggcgcagttggactatttttgctcacgctgtttcgtatccggtactggatgatctccaacattcc

SEQ ID NO: 94828 - DNA, 75 bp, synthetic construct
  source 1..75: mol_type = other DNA
acaacatcatcagtgctgcggaacataacgtcgcgctggtactgagcggcacgtcgaatgcagaagcggggcaaa

SEQ ID NO: 94829 - DNA, 75 bp, synthetic construct
  source 1..75: mol_type = other DNA
aaacggcaaactcaacgttcctgaaaatccgattatcccttacattgaaggtgatggaatcggtgtagatgtaac

SEQ ID NO: 94830 - DNA, 75 bp, synthetic construct
  source 1..75: mol_type = other DNA
tcattgccgatgagcagttgcaaacgctcggttttgaaggccagcaggtgagttgggaaaccgcgcaccgctggc

SEQ ID NO: 94831 - DNA, 75 bp, synthetic construct
  source 1..75: mol_type = other DNA
acagattatcgaccatcaggctgtacaggcctgggcggacagcctcagtactgacaatccgttaccggtgccacg

SEQ ID NO: 94832 - DNA, 75 bp, synthetic construct
  source 1..75: mol_type = other DNA
acgacagcacagaaagggatagttcagcttagcaacgcgaccaacagcacatctgaaatgctggcggcaacgcca

SEQ ID NO: 94833 - DNA, 75 bp, synthetic construct
  source 1..75: mol_type = other DNA
acacactcaaatatcaacttcgttataagtccacaaaggcgggagcaacgggcggtaatgcgacggcggttctct

SEQ ID NO: 94834 - DNA, 75 bp, synthetic construct
  source 1..75: mol_type = other DNA
tcatcctccacaccttatgctgcgcgcagctattgaatcagtttgggataactacgatgttatcgttatagatag

SEQ ID NO: 94835 - DNA, 75 bp, synthetic construct
  source 1..75: mol_type = other DNA
accggttatacggtaactggggcgggcacttatagtggcggttctgtggttcttccgtctccgcttgctactgga

SEQ ID NO: 94836 - DNA, 75 bp, synthetic construct
  source 1..75: mol_type = other DNA
ctgcattcgctggccaccgtcgtatccagtcaactctgctctatattcatctcagcgcacgtgatctgagtagtc

SEQ ID NO: 94837 - DNA, 75 bp, synthetic construct
  source 1..75: mol_type = other DNA
aaagtatcaatattcaccgactggttgattatggcgattttgatctggcatatcagcaatcagttatatttctgg

SEQ ID NO: 94838 - DNA, 75 bp, synthetic construct
  source 1..75: mol_type = other DNA
cggttggggagataaggatgtatgtaattcaatggaactgtctgaatctcaattagctaatgggtattctaaccg

SEQ ID NO: 94839 - DNA, 75 bp, synthetic construct
  source 1..75: mol_type = other DNA
atcaaaggggaaaagtactcaattaagcatgatagtttagatgaaaaaacacgtaatcagttaaataccatattg

SEQ ID NO: 94840 - DNA, 75 bp, synthetic construct
  source 1..75: mol_type = other DNA
ctggcgcggggaacacctttgaccgagtctgatattgcccgtgcctgccggtttatccccgctggcgcggggaac

SEQ ID NO: 94841 - DNA, 75 bp, synthetic construct
  source 1..75: mol_type = other DNA
agtttttggcaacccaaaccaacgaccacaagataaaaaccctgttgtgcttgccgttatgtcacacaaaggcgg

SEQ ID NO: 94842 - DNA, 75 bp, synthetic construct
  source 1..75: mol_type = other DNA
atgaataattcaatcccagagagatttatttttcaatgtgctttgtttaaaaatctcgagagggaggtgttcatg

SEQ ID NO: 94843 - DNA, 75 bp, synthetic construct
  source 1..75: mol_type = other DNA
ggcgcatttcgcccaggggatcaccataataaaatgctgaggcctggcctttgcgtagtgcacgcatcacctcaa

SEQ ID NO: 94844 - DNA, 75 bp, synthetic construct
  source 1..75: mol_type = other DNA
gattttaaaaaatggacatggacaattccttcagaccgcatgaagggaagccgggcgcatgttatttacctgcct

SEQ ID NO: 94845 - DNA, 75 bp, synthetic construct
  source 1..75: mol_type = other DNA
cgggcgatcaatgatgcggagtcggtactggggacaacccgacgtcgccgtcgtccgctgggagtgaggttatga

SEQ ID NO: 94846 - DNA, 75 bp, synthetic construct
  source 1..75: mol_type = other DNA
tatttaaaggcagcagaggccggggaccgacgcgcacaatattttcttgccgacagctggtttagctccggcgat

SEQ ID NO: 94847 - DNA, 75 bp, synthetic construct
  source 1..75: mol_type = other DNA
tccccgttgttccaggagatggggcgcgctgcggcggtacaaccggatgagctggtctttgctgccctgcgtgac

SEQ ID NO: 94848 - DNA, 75 bp, synthetic construct
  source 1..75: mol_type = other DNA
gggcgtactggttggtgaaaaactgatgattacccgtaacccatggcgcagcgatgtggcacaggtggttctgac

SEQ ID NO: 94849 - DNA, 75 bp, synthetic construct
  source 1..75: mol_type = other DNA
atgacagcagaagaaaaaagcgtcctgtcgcttttcatgattggggtgctgattgttgtcggcaaggtgcttgcc

SEQ ID NO: 94850 - DNA, 75 bp, synthetic construct
  source 1..75: mol_type = other DNA
tatcacggaacgatgagtcaaatcagaattgtctataacggtcacaatcaccggggcgacagtggtggcagcacc

SEQ ID NO: 94851 - DNA, 75 bp, synthetic construct
  source 1..75: mol_type = other DNA
tccaagatgagaactccgcatcttgttcccctcagcaagcaggctgtagctatacttacagaacttcagacatgg

SEQ ID NO: 94852 - DNA, 75 bp, synthetic construct
  source 1..75: mol_type = other DNA
ggaagaaacaaaaaaatacattggatcaaatatttaaaactcctgttcctcaagggattaagtggtctgatatag

SEQ ID NO: 94853 - DNA, 75 bp, synthetic construct
  source 1..75: mol_type = other DNA
tggtcgttaaccttgacgttaactcgtcgaaattcagcgagcagcttaactacgtcaaaaaagaattaaaacaga

SEQ ID NO: 94854 - DNA, 75 bp, synthetic construct
  source 1..75: mol_type = other DNA
tgattttatgccaacagccccctgtgactgacaggctgcctcgtcattccattcgtatctccagtaacagggggt

SEQ ID NO: 94855 - DNA, 75 bp, synthetic construct
  source 1..75: mol_type = other DNA
ctgatgcgaatggtaacgcgacgttgaatatgagaaataaacaggttcagagcgccatgctggcgcgaatgaggg

SEQ ID NO: 94856 - DNA, 75 bp, synthetic construct
  source 1..75: mol_type = other DNA
aagagtggtggtcaaaatacaaaagcccgttcacggaagacgacgggttaaaagagtttgcctgggtgatatggc

SEQ ID NO: 94857 - DNA, 75 bp, synthetic construct
  source 1..75: mol_type = other DNA
tggacgcgagacggccttcactggtttgcttcatccggtactgaaattgaacctcctgacagcgttacattccac

SEQ ID NO: 94858 - DNA, 75 bp, synthetic construct
  source 1..75: mol_type = other DNA
tatctggggcgacaccgttgtcgagtgcgtgcttaacaaactctgcccttcgcatacctacgtaatttttaaata

SEQ ID NO: 94859 - DNA, 75 bp, synthetic construct
  source 1..75: mol_type = other DNA
gtgaacgatagctaccgacagtttgaaaactggtggtcaaaagacaaaagccagtttacagaagacgatgaatta

SEQ ID NO: 94860 - DNA, 75 bp, synthetic construct
  source 1..75: mol_type = other DNA
ccgcgtctgtcgtggtgctatgtacggcaccagatgaagcgacagcccaggatttagccgccaaagtgctggcgg

SEQ ID NO: 94861 - DNA, 75 bp, synthetic construct
  source 1..75: mol_type = other DNA
tcgacggcactgtggtgcgtctccatcagggcgattacggcaaacaacgcgattacggtaacgacccgctgccgc

SEQ ID NO: 94862 - DNA, 75 bp, synthetic construct
  source 1..75: mol_type = other DNA
acgaaaaagtcaggccacttactgataccgtgcgggctaaaacacctctgcaggtggattacaccattgaagcca

SEQ ID NO: 94863 - DNA, 75 bp, synthetic construct
  source 1..75: mol_type = other DNA
atacggtcatcgacctgatcgtggtcgatgaccgcgaccggcaacctattggccgcccgtacctgaccctcgcca

SEQ ID NO: 94864 - DNA, 75 bp, synthetic construct
  source 1..75: mol_type = other DNA
ttttgcattcccgacgaagaaacttgccattgaaagtttattgcgccgaaagaaataccatttgatgagaatcaa

SEQ ID NO: 94865 - DNA, 75 bp, synthetic construct
  source 1..75: mol_type = other DNA
accggaaaaagaagccatcgtggataacggagcgcactttgacggcgaccagagcggcaccctgaacagcgttat

SEQ ID NO: 94866 - DNA, 75 bp, synthetic construct
  source 1..75: mol_type = other DNA
gttgtgcgcgaaacaaaccagcagtggatcaataccacgccccttccggaaaaaaccgttacccgggcaataccg

SEQ ID NO: 94867 - DNA, 75 bp, synthetic construct
  source 1..75: mol_type = other DNA
atgttgacctcaataacaggccacgacagcgtattgctgcgtgtcgacgatcccctgatcgacatgaactacatc

SEQ ID NO: 94868 - DNA, 75 bp, synthetic construct
  source 1..75: mol_type = other DNA
gcgcgatgcgtttactgggctgttttcagatacagctttaaatatccatggcacagaggatacagcaaaacaatt

SEQ ID NO: 94869 - DNA, 75 bp, synthetic construct
  source 1..75: mol_type = other DNA
tcgctgtgtgagttcaccgtaaaggaacgtaatattgagtttaaggttgttctcgcttacgaaccgaagaagtag

SEQ ID NO: 94870 - DNA, 75 bp, synthetic construct
  source 1..75: mol_type = other DNA
cacatctttaacttctcttaaatccctgagccctcaggatctttaccaacagctttgtcattaccgtgtggccca

SEQ ID NO: 94871 - DNA, 75 bp, synthetic construct
  source 1..75: mol_type = other DNA
gtcgggttctgggaaaactgtccgcgaaccagattgaaggcgatctcgttaaaacagtgggcaaagctttccccc

SEQ ID NO: 94872 - DNA, 75 bp, synthetic construct
  source 1..75: mol_type = other DNA
gcggggatagcgtcgtcactcggggataactatctcaatactgcgatagcggttaccgcctttatctggatgctg

SEQ ID NO: 94873 - DNA, 75 bp, synthetic construct
  source 1..75: mol_type = other DNA
aaccactccctggaagtcttaccagcatgaaaaaaacagaaatggacttatgcctttgattagaaggcgcacaat

SEQ ID NO: 94874 - DNA, 75 bp, synthetic construct
  source 1..75: mol_type = other DNA
tacaacgccgttagtactgacccgctgtacaaacacattccattcaccatcacccgccgcgatgacattagcttc

SEQ ID NO: 94875 - DNA, 75 bp, synthetic construct
  source 1..75: mol_type = other DNA
ccgctcaggctgagcgcctgttgattgacctgtgggcataccgcgaaatgctggtcagggtggcggcgcaggaag

SEQ ID NO: 94876 - DNA, 75 bp, synthetic construct
  source 1..75: mol_type = other DNA
gcgatatttttgattctgttcgcttcagcggtgtgcggttgtttcgtgatatgcagatgttgcctaactcgaaac

SEQ ID NO: 94877 - DNA, 75 bp, synthetic construct
  source 1..75: mol_type = other DNA
tgccgaagtgttgcacctggtggatctgaccggggcaaaagatccggctaaacgtcaaatcccgctgattaaaac

SEQ ID NO: 94878 - DNA, 75 bp, synthetic construct
  source 1..75: mol_type = other DNA
ggcaggcgctggagaaagtggccaccgcaggagactgccggcaggtggctcagggactgctggatggcaccgggg

SEQ ID NO: 94879 - DNA, 75 bp, synthetic construct
  source 1..75: mol_type = other DNA
aggaagagcatgccattgtccaggtggaagaaatgcaggcggtgaatgccgtgctgtatggcaaatacaccatgg

SEQ ID NO: 94880 - DNA, 75 bp, synthetic construct
  source 1..75: mol_type = other DNA
ctcggtgaactggttggtgtataccgactggccgcgcagcctgccaccaccacgctccagttctccgtggatgag

SEQ ID NO: 94881 - DNA, 75 bp, synthetic construct
  source 1..75: mol_type = other DNA
ctggggccggacagcattcgcctgttatttcaggtgatggccgaacaggcaaaaggtgcccagaaaaacgccatg

SEQ ID NO: 94882 - DNA, 75 bp, synthetic construct
  source 1..75: mol_type = other DNA
ttatggaagaatctgcggcgctggcagcaggccttacccccctggctcgcattaaaagttatgccagcggtggcg

SEQ ID NO: 94883 - DNA, 75 bp, synthetic construct
  source 1..75: mol_type = other DNA
gctactgctgcacgtaaacgttacgatgaattgtactttatatctaccgagctagtttttctgctggagcgtttt

SEQ ID NO: 94884 - DNA, 75 bp, synthetic construct
  source 1..75: mol_type = other DNA
gataacgggagtgcctgctgcctcgctgacggcaaaaggcaccgtacagctgagcagtgccacggacagtcaatc

SEQ ID NO: 94885 - DNA, 75 bp, synthetic construct
  source 1..75: mol_type = other DNA
gccggtgcctttgccaccggacacctgatttcactggctgatgagtggagttccgtgaatgcccgtctgaaacag

SEQ ID NO: 94886 - DNA, 75 bp, synthetic construct
  source 1..75: mol_type = other DNA
tatcggccacgttgaccaaggtaaaaccactctgaccgctgcaatcacaaccgtactggctaaaacctacggcgg

SEQ ID NO: 94887 - DNA, 75 bp, synthetic construct
  source 1..75: mol_type = other DNA
caacgatgaactgttcgggatcatctataccgttgacgaaggtgacgactggaccgacccgcaggtgctggaaaa

SEQ ID NO: 94888 - DNA, 75 bp, synthetic construct
  source 1..75: mol_type = other DNA
aaagtaacggacgcgcaggtttcccagaatacccagagcattactaacctgaacactcaggtcactaatctggat

SEQ ID NO: 94889 - DNA, 75 bp, synthetic construct
  source 1..75: mol_type = other DNA
gttacggcgaacggttacgggaagttcatgctgcctgccgccggcgcaaggcgcatatccgcgtacagttcaggg

SEQ ID NO: 94890 - DNA, 75 bp, synthetic construct
  source 1..75: mol_type = other DNA
cactgatgttaaatcgacttccaccacatgatatctattcaggaaccgttaacgctttaattaaaatgcttgata

SEQ ID NO: 94891 - DNA, 75 bp, synthetic construct
  source 1..75: mol_type = other DNA
gactatggcggcgataaggtgtttgcggggaattaccgtagcgattatttgtggtacgcaattctgggtggaaca

SEQ ID NO: 94892 - DNA, 75 bp, synthetic construct
  source 1..75: mol_type = other DNA
catgctggcgaacacctgtatgtgggattaccggggagatgaatgcggttatcacggtcctgcggtggcggatga

SEQ ID NO: 94893 - DNA, 75 bp, synthetic construct
  source 1..75: mol_type = other DNA
caccgctattatgacccgctgcaggggcggtatatcactcaggatccgattgggctgaaggggggatggaatttt

SEQ ID NO: 94894 - DNA, 75 bp, synthetic construct
  source 1..75: mol_type = other DNA
acgacgttgcagtaaaagacagtctttataccgccgggcggcgcggcgttgccaacaccgtattaattgaaaaac

SEQ ID NO: 94895 - DNA, 75 bp, synthetic construct
  source 1..75: mol_type = other DNA
tggcttgatgaacgtcaggcagcaagcccggcagagttccagggtaaaaagcctcctgttcagcaacgtgtatat

SEQ ID NO: 94896 - DNA, 75 bp, synthetic construct
  source 1..75: mol_type = other DNA
tatcggccacgttgaccaaggtaaaacaactctgaccgctgcaatcaccaccgtactggctaaaacctacggcgg

SEQ ID NO: 94897 - DNA, 75 bp, synthetic construct
  source 1..75: mol_type = other DNA
tgaacaggcataatggagggaaaaccgcagaaattgcggaggcgctggcggtaacggattaccaggcccgctatt

SEQ ID NO: 94898 - DNA, 75 bp, synthetic construct
  source 1..75: mol_type = other DNA
ctgattttcatttgttgtggctcatcagcacaggggggctagggggcattatcggtagttttcttaacgttgtga

SEQ ID NO: 94899 - DNA, 75 bp, synthetic construct
  source 1..75: mol_type = other DNA
cttctaaggaaggatatggcgcaggtgcgtttcaaaaaaatggtactggatttatctggtaaacccgcccccgga

SEQ ID NO: 94900 - DNA, 75 bp, synthetic construct
  source 1..75: mol_type = other DNA
gcgttatgcattgatcgggtgattagtgaagtgttggcagagcatccaggattgattcacgtacttcgacaacgg

SEQ ID NO: 94901 - DNA, 75 bp, synthetic construct
  source 1..75: mol_type = other DNA
ctgtggtaaggcaaggctggtgctgacgaaggacggacaaatttttctcaacggcacaaaaattcatttgcaggg

SEQ ID NO: 94902 - DNA, 75 bp, synthetic construct
  source 1..75: mol_type = other DNA
agaaggtgttcagtggtgaaatgccggctcacatcctcccgaaaagtgccgttgaaccgtcggtcatcgcgcagg

SEQ ID NO: 94903 - DNA, 75 bp, synthetic construct
  source 1..75: mol_type = other DNA
tgagtcattcaaccgggaaaaaaacaaaaccacttaaagtggggatacctgacgacctgatacaggatatcgcca

SEQ ID NO: 94904 - DNA, 75 bp, synthetic construct
  source 1..75: mol_type = other DNA
atgtatatctttgaaacgtggctaacaagtgatttgcattatcctgtgccttctaaagggatcgagtcagtcggt

SEQ ID NO: 94905 - DNA, 75 bp, synthetic construct
  source 1..75: mol_type = other DNA
aatgaagggcagacagagaagcaactgacgctatttgacattgcaccatggccggattcgatgcgggcattacct

SEQ ID NO: 94906 - DNA, 75 bp, synthetic construct
  source 1..75: mol_type = other DNA
tctgacgagtaaacaacagctggctggccagcggctttccgttttatcccgactaaacagcaccagtggccggat

SEQ ID NO: 94907 - DNA, 75 bp, synthetic construct
  source 1..75: mol_type = other DNA
cgcaaagaagaacgccggggacgcgcagatgtgatggctgcgcgtctggattctttagctgctcgtatcgtgtca

SEQ ID NO: 94908 - DNA, 75 bp, synthetic construct
  source 1..75: mol_type = other DNA
cacagtattggcactcaggctgtcagcgattacgaatggtatcgcatgaggatgggcactggtccacagggtgcc

SEQ ID NO: 94909 - DNA, 75 bp, synthetic construct
  source 1..75: mol_type = other DNA
ttaatctgattaaatctgcccgtgttggctatacaaagatgttgctgggggtggtcgggtattttattgagcata

SEQ ID NO: 94910 - DNA, 75 bp, synthetic construct
  source 1..75: mol_type = other DNA
cgataggattcgacaccaaaaaagacctgcttatctcggttggcgatttggttgatcgcggtacagagaacgtcg

SEQ ID NO: 94911 - DNA, 75 bp, synthetic construct
  source 1..75: mol_type = other DNA
acgtccagccacaggcgcaaatcacctggatgggtgtgaaagattccgaccatacccggaaagacggaacgcgca

SEQ ID NO: 94912 - DNA, 75 bp, synthetic construct
  source 1..75: mol_type = other DNA
tggcagatgaggaaggtattacccaggcgcagatgcttgaaaaactgattgaatcagagctgaaacgtagagcga

SEQ ID NO: 94913 - DNA, 75 bp, synthetic construct
  source 1..75: mol_type = other DNA
tatgctggcgaatacctgtatgtgggattaccggggagatgaatgcgggtataacggtccggcagtggcggatga

SEQ ID NO: 94914 - DNA, 75 bp, synthetic construct
  source 1..75: mol_type = other DNA
agtctctcccgccattggtgcactggttgcatcagtaatcagcgttacatcactgttgcggatcatgtcacaagc

SEQ ID NO: 94915 - DNA, 75 bp, synthetic construct
  source 1..75: mol_type = other DNA
cgattatctctaatcaggtgaatgtacagataggtgcgctggcgaacgtcatcattatgctgtgcatgaccgtct

SEQ ID NO: 94916 - DNA, 75 bp, synthetic construct
  source 1..75: mol_type = other DNA
gttgcatcagtaatcagcgttacatcactgttgcggatcatgtcacaagctcgtttatggaaatcagataagggg

SEQ ID NO: 94917 - DNA, 75 bp, synthetic construct
  source 1..75: mol_type = other DNA
cggagattctgcgctgaaaacactgaaaagtacaaacagcatggtctatttcactgacagcgcaaacaataagaa

SEQ ID NO: 94918 - DNA, 75 bp, synthetic construct
  source 1..75: mol_type = other DNA
cagggcgatgatgcccgccttccacaagcccatcagcagcagtttcgtgaacgactgatgcaggaacttcttgcg

SEQ ID NO: 94919 - DNA, 75 bp, synthetic construct
  source 1..75: mol_type = other DNA
gctagttggaaatccaggtgattgtgtagttgtagaaccatatatggcgggatggaatgcagcaagagccttggc

SEQ ID NO: 94920 - DNA, 75 bp, synthetic construct
  source 1..75: mol_type = other DNA
atgagttctttaacttgttttaaagcttacgacattcgcgggaaattaggtgaagaactgaatgaagatatcgcc

SEQ ID NO: 94921 - DNA, 75 bp, synthetic construct
  source 1..75: mol_type = other DNA
gttaagacgcagccgtgtgcatgttgtggaaagccagctgatgatccgcatcatctgattggtcacggccagggt

SEQ ID NO: 94922 - DNA, 75 bp, synthetic construct
  source 1..75: mol_type = other DNA
caggcctggtatatgttccctgttgccatcttcggtggaatactcacagcctttctgctgtcccgccgtcgtcca

SEQ ID NO: 94923 - DNA, 75 bp, synthetic construct
  source 1..75: mol_type = other DNA
cgaaatggttcaaagatacgcccacctttcagccgggcatctcaccgagcacgcgagcaaaatcgatgcgattat

SEQ ID NO: 94924 - DNA, 75 bp, synthetic construct
  source 1..75: mol_type = other DNA
attgagggctcggtatggccaaaatccattcgcggctcgacgcctaaaatcaaaggcacctgccagatcgaaaaa

SEQ ID NO: 94925 - DNA, 75 bp, synthetic construct
  source 1..75: mol_type = other DNA
gcagacggcaccatcactgcgccgacgtacaccattgctaatgctgattacgataatgtcggtgatgccctgaat

SEQ ID NO: 94926 - DNA, 75 bp, synthetic construct
  source 1..75: mol_type = other DNA
atgcgtaatattgaaaccctcacgactaaaaccggaccggatgatgctgggcttaatattttactgacagaggct

SEQ ID NO: 94927 - DNA, 75 bp, synthetic construct
  source 1..75: mol_type = other DNA
gggtgatgagccgattctttttattgatggagtccatccgactcaggccactaaaatcagctatggctggatacg

SEQ ID NO: 94928 - DNA, 75 bp, synthetic construct
  source 1..75: mol_type = other DNA
caccttgcacctaatcatttgacagagcacgcgaggaaaattgacgacatattgggtgacgatgtcccaaatttg

SEQ ID NO: 94929 - DNA, 75 bp, synthetic construct
  source 1..75: mol_type = other DNA
catgattcacgtcatgttgatcacgttaccgataagaacggtacgcgcaatgttatccgtacgccggcaaataac

SEQ ID NO: 94930 - DNA, 75 bp, synthetic construct
  source 1..75: mol_type = other DNA
gaagatgaagagaatttcgaccgtttacgtgcctgccgtaccgagcaggaagtactggatctcattgaccgcacc

SEQ ID NO: 94931 - DNA, 75 bp, synthetic construct
  source 1..75: mol_type = other DNA
aaactatctctgcttccctgaatcgttaccatttaattattccctcctgcccgtcaccactggatgttgagcatt

SEQ ID NO: 94932 - DNA, 75 bp, synthetic construct
  source 1..75: mol_type = other DNA
gccgtattgtctcaggaacaggacggcattaaatcgcacacccacagcgccagcgcatccagtacggatttgggg

SEQ ID NO: 94933 - DNA, 75 bp, synthetic construct
  source 1..75: mol_type = other DNA
acgctgggtgaagacacagccgtgtgcgtgttgtggtaagccagccgacgatccccatcacctgattggtcatgg

SEQ ID NO: 94934 - DNA, 75 bp, synthetic construct
  source 1..75: mol_type = other DNA
ccttcgagcgcattcgaaaatttgctttaaccgaagggaaaaaccaagcatttctttgggatgcggatgtaacaa

SEQ ID NO: 94935 - DNA, 75 bp, synthetic construct
  source 1..75: mol_type = other DNA
tgcgccatcttaaatcctgccagtggccacacggcgattatcaccacagtgaaaccgtcattcaccgttatggta

SEQ ID NO: 94936 - DNA, 75 bp, synthetic construct
  source 1..75: mol_type = other DNA
ccttttggacgctggtcaactagtcagcttaaaactctggttgcaggtaaacaggtgacagtctcttattcacat

SEQ ID NO: 94937 - DNA, 75 bp, synthetic construct
  source 1..75: mol_type = other DNA
cgccggtcgtcaggagtgggagcgaagacttacggcgatggtgaaccgcagacgcggggagcccgggtttaaact

SEQ ID NO: 94938 - DNA, 75 bp, synthetic construct
  source 1..75: mol_type = other DNA
catcaccatgctgaaaaatcagcttcatgttgcgctcaccagggcagacaaaaacgagctggcgcaggtggcact

SEQ ID NO: 94939 - DNA, 75 bp, synthetic construct
  source 1..75: mol_type = other DNA
atcaccactgtgctggacaaccgcctgatggggctgacgctgacggataaccggggctttgaagcggaccagctt

SEQ ID NO: 94940 - DNA, 75 bp, synthetic construct
  source 1..75: mol_type = other DNA
gacccaaagccaaccagcgaatgcatgtacaaccgcaaagcggtagacgcatggattcaggcgcaaaagcaacca

SEQ ID NO: 94941 - DNA, 75 bp, synthetic construct
  source 1..75: mol_type = other DNA
ccgtgaaaagtcgtggcacaagaccactgtcggggaagtggtgaaggaaatagctgtgcggcacaaactgaagat

SEQ ID NO: 94942 - DNA, 75 bp, synthetic construct
  source 1..75: mol_type = other DNA
ttctgaacaccattcttacccgtgtcggcggaccgggaaatatcgccagttgtggtaactgtatgacgcgcctgc

SEQ ID NO: 94943 - DNA, 75 bp, synthetic construct
  source 1..75: mol_type = other DNA
caatgccggattcaggaaaaccgaacgccagaaccagagacgtcttgcctacgcatcagatgtttaccggattta

SEQ ID NO: 94944 - DNA, 75 bp, synthetic construct
  source 1..75: mol_type = other DNA
gagtgattaacgcgatggcgcggcggagtgccaatttcattgctcgtctctcctgtgaagcgccgattctgttta

SEQ ID NO: 94945 - DNA, 75 bp, synthetic construct
  source 1..75: mol_type = other DNA
gagcaatgtttcaggtggggtaattatactctattgtttgaaaattatggggcttatgataagacggggtctatc

SEQ ID NO: 94946 - DNA, 75 bp, synthetic construct
  source 1..75: mol_type = other DNA
tcatggcgggaagataccggtattcacattccactggcgggatgatcctcgcaaggatgaagagtggtatcgcag

SEQ ID NO: 94947 - DNA, 75 bp, synthetic construct
  source 1..75: mol_type = other DNA
tgaggcttctcggtgctctgtggatggtggcgacgttcattgtggttgctgtctgttttgtccggttggtaggcg

SEQ ID NO: 94948 - DNA, 75 bp, synthetic construct
  source 1..75: mol_type = other DNA
tcatgggttatggattctgcaaatgaagttgatgctgatatcattttgcaacttgcaataaatgctcgtactggt

SEQ ID NO: 94949 - DNA, 75 bp, synthetic construct
  source 1..75: mol_type = other DNA
gtgctggtgcagatgctcgaccggctggaaagtgaaatcctggctgaccgggtgagtgaggaaagccgccgctgg

SEQ ID NO: 94950 - DNA, 75 bp, synthetic construct
  source 1..75: mol_type = other DNA
tggtggagccggaaccgaaaagcatgcgcggtctgccgtccggagtcgttcctgccgttcgccagccattggcgg

SEQ ID NO: 94951 - DNA, 75 bp, synthetic construct
  source 1..75: mol_type = other DNA
ggtctgttctaccgttcttcaagagacggttatggttttgaggaagactgggcagaagtttatacctcgaaaaat

SEQ ID NO: 94952 - DNA, 75 bp, synthetic construct
  source 1..75: mol_type = other DNA
atacatcccttacgggaaaatggcttcctggctggttgagtggaaaaacgccactgaaacgcaatggcttaaaga

SEQ ID NO: 94953 - DNA, 75 bp, synthetic construct
  source 1..75: mol_type = other DNA
gctcatcagcccggaaggggaaacggcgtggtgcggagagtatgatgagtggggcaaccagcttaatgaggagaa

SEQ ID NO: 94954 - DNA, 75 bp, synthetic construct
  source 1..75: mol_type = other DNA
atgaaaaaagaaaccgatatccggcgtggaaggcattgtgttttcctgatgcatgttcacctggtctttgtcgcc

SEQ ID NO: 94955 - DNA, 75 bp, synthetic construct
  source 1..75: mol_type = other DNA
gtcgccgctgggttaacgagaaatacacacgctgggtgaagacacagccgtgtgcgtgttgtggtaagccagccg

SEQ ID NO: 94956 - DNA, 75 bp, synthetic construct
  source 1..75: mol_type = other DNA
ctcctgtaacatatataactacaccgggaactccagctatacccggaacccccggatatggaatttatgcttgtg

SEQ ID NO: 94957 - DNA, 75 bp, synthetic construct
  source 1..75: mol_type = other DNA
gtaatgccgggcgacaacatcaaaatggttgttaccctgatccacccgatcgcgatggacgacggtctgcgtttc

SEQ ID NO: 94958 - DNA, 75 bp, synthetic construct
  source 1..75: mol_type = other DNA
actgattgcagccgcctgtctttactggaatcactgaaaaagggccctgtgaccatcagtggtccggcgtttaat

SEQ ID NO: 94959 - DNA, 75 bp, synthetic construct
  source 1..75: mol_type = other DNA
atgcaatcccaggtcatgaaaaatgtccgcatgatctcgccgcaggaaacagaagtggcaagtatgatggaggga

SEQ ID NO: 94960 - DNA, 75 bp, synthetic construct
  source 1..75: mol_type = other DNA
agctgaaatggcgacgatggagaaaaaaggcgtcgatactggctttaaagcggttcacccattaacgggcgaaga

SEQ ID NO: 94961 - DNA, 75 bp, synthetic construct
  source 1..75: mol_type = other DNA
ttgaacgttacggcgcggacaccgttcgtctgtttatgatgtttgcttctccggctgatatgactctcgaatggc

SEQ ID NO: 94962 - DNA, 75 bp, synthetic construct
  source 1..75: mol_type = other DNA
cagttttatgaaaggactgttcagaattgtggatatgaagcggtggtatctgtgtccgcaggtacgggtcgcgga

SEQ ID NO: 94963 - DNA, 75 bp, synthetic construct
  source 1..75: mol_type = other DNA
attttctgaaaagcctgataccaggtttcattattcttacagttttttatctgggatggaaagataaccaggaaa

SEQ ID NO: 94964 - DNA, 75 bp, synthetic construct
  source 1..75: mol_type = other DNA
cattcattctgcttctggcaggggaattaatcggtcgcggcgtattctatggtttgcatatgaccgtggggatgg

SEQ ID NO: 94965 - DNA, 75 bp, synthetic construct
  source 1..75: mol_type = other DNA
gagctggaagcgtttttgcgagagatgatcaacggcaagcaaaagagctggctggcgcattgtactgatgcagag

SEQ ID NO: 94966 - DNA, 75 bp, synthetic construct
  source 1..75: mol_type = other DNA
tttttgatctcaaggcgtactgggcttataaatgcgtcacgaagaatatcgatttttcgtggtttaagaaaaagc

SEQ ID NO: 94967 - DNA, 75 bp, synthetic construct
  source 1..75: mol_type = other DNA
ttctgggcccggctcgatcacgagcgttttctggctgagcaaacacgtatcacaggtaaaagcaccgatgccagt

SEQ ID NO: 94968 - DNA, 75 bp, synthetic construct
  source 1..75: mol_type = other DNA
accgggactaactctgattcggatctggactccattcaggacgaaatcaaatcccgtctcgacgaaattgaccgc

SEQ ID NO: 94969 - DNA, 75 bp, synthetic construct
  source 1..75: mol_type = other DNA
tggactccatccaggacgaaatcaaatctcgtcttgatgaaattgaccgcgtatccggccagacccagttcaacg

SEQ ID NO: 94970 - DNA, 75 bp, synthetic construct
  source 1..75: mol_type = other DNA
gctctctcagacgacccgctgccgtatagacctctcatccgtcaacggcatgaataacccgtttgcccgtaagcg

SEQ ID NO: 94971 - DNA, 75 bp, synthetic construct
  source 1..75: mol_type = other DNA
gcaactctacaacaggaagctcgctcacaaaaacgaggtttatgggctgaccccaatcccgttccaccgtgggaa

SEQ ID NO: 94972 - DNA, 75 bp, synthetic construct
  source 1..75: mol_type = other DNA
tcacgcagcgaccagcaaatatcatttggattaaatgtgccgtttggtgatattacgacttcgctgaattacagc

SEQ ID NO: 94973 - DNA, 75 bp, synthetic construct
  source 1..75: mol_type = other DNA
gtatccggtcagacccagttcaacggcgtgaacgtactggcaaaagacggttcgatgaaaattcaggttggtgcg

SEQ ID NO: 94974 - DNA, 75 bp, synthetic construct
  source 1..75: mol_type = other DNA
actttcgggaaagcaagaattcgtcaaccaataattttcgggaaatcccggaagcgtcaaccagctctccggtaa

SEQ ID NO: 94975 - DNA, 75 bp, synthetic construct
  source 1..75: mol_type = other DNA
gggaacgagcggattcacccaaggtgattatagaaatttcactttccactattactactatggggactcgtcaag

SEQ ID NO: 94976 - DNA, 75 bp, synthetic construct
  source 1..75: mol_type = other DNA
aattatcagacgccatcagagtttgcagcacggtggcgaaatggaaaatgtgaaggtaaacaaaccgaccttact

SEQ ID NO: 94977 - DNA, 75 bp, synthetic construct
  source 1..75: mol_type = other DNA
gaatgattttaatcagatattcaaatcctccacatcaccgatggaggaaaaaaataataccgccggtggtaatta

SEQ ID NO: 94978 - DNA, 75 bp, synthetic construct
  source 1..75: mol_type = other DNA
tacaaaattcactaatgcagacggtaatcacctgcatgaggtattatcaggtgatcttggagtattacaggataa

SEQ ID NO: 94979 - DNA, 75 bp, synthetic construct
  source 1..75: mol_type = other DNA
atgattatcggtatcgacctgggtacaactaacagtttggcagctgtctggcgaaatggacaaagtgaactgatc

SEQ ID NO: 94980 - DNA, 75 bp, synthetic construct
  source 1..75: mol_type = other DNA
cggcgaaatagagccggaagagcgcaaggtgctggaagagattgccggtgttctgggccttcgtctggagaatca

SEQ ID NO: 94981 - DNA, 75 bp, synthetic construct
  source 1..75: mol_type = other DNA
acatctcgaagaagaaaataggaatttaaaagaacaatttatcaaatggcaattcaatgcatataaatacgatat

SEQ ID NO: 94982 - DNA, 75 bp, synthetic construct
  source 1..75: mol_type = other DNA
aacatcaaaatggttgttaccctgatccacccgatcgcgatggacgacggtctgcgtttcgcaatccgtgaaggc

SEQ ID NO: 94983 - DNA, 75 bp, synthetic construct
  source 1..75: mol_type = other DNA
aatgcagacgcaagggcatcaaatgacgctgagctgctggggtacgggcagggtgagcgggtccgtgaacggatg

SEQ ID NO: 94984 - DNA, 75 bp, synthetic construct
  source 1..75: mol_type = other DNA
gcggcacgcactggatgttcatccccgtctgacggcattgcgggttgatctgcgtctcccggatgtaccggcagc

SEQ ID NO: 94985 - DNA, 75 bp, synthetic construct
  source 1..75: mol_type = other DNA
aacggtctgaaaaaaatccgtttccccgagaagagcggcaagatgcaggatcacggcgtgattgccgttgatacc

SEQ ID NO: 94986 - DNA, 75 bp, synthetic construct
  source 1..75: mol_type = other DNA
gctctcagcagtgaagccggaaagaaactctatgatccgatactggatggtctgcgaagcgcggtacgttatgat

SEQ ID NO: 94987 - DNA, 75 bp, synthetic construct
  source 1..75: mol_type = other DNA
tcatgcgtcagagtggataaccctttccggtcagcagataacgcgactgacagaattaccgccggcatacaacct

SEQ ID NO: 94988 - DNA, 75 bp, synthetic construct
  source 1..75: mol_type = other DNA
cctgactggttagatggaatcctgctcggcgttatagaattcggcgttctgattgccgggattatattctttgtc

SEQ ID NO: 94989 - DNA, 75 bp, synthetic construct
  source 1..75: mol_type = other DNA
gatttttccctgaaaattaatcagggccgtcacctggtggatgcgggcggacgtatgagccagcagcgtacgaag

SEQ ID NO: 94990 - DNA, 75 bp, synthetic construct
  source 1..75: mol_type = other DNA
gaagatgctgaacgtgaagcggctgaacgagcagagcgtgaacggaaacgtcaggaactgcttcagttaatcgcc

SEQ ID NO: 94991 - DNA, 75 bp, synthetic construct
  source 1..75: mol_type = other DNA
gccggataacctggtcttcagccagcacacacttcaccgtacggatgatcgcactcaaaccaaccacggtatcgg

SEQ ID NO: 94992 - DNA, 75 bp, synthetic construct
  source 1..75: mol_type = other DNA
gctagctcgccacggtgaattggcttgcggttatgtacgtactgactcagggtgtggttttctgaataccgatac

SEQ ID NO: 94993 - DNA, 75 bp, synthetic construct
  source 1..75: mol_type = other DNA
ctcagggaggcgacacgacttgaccagacaagcgcccttttcgaacgggcaagaccaatgttgaaaagccttcgg

SEQ ID NO: 94994 - DNA, 75 bp, synthetic construct
  source 1..75: mol_type = other DNA
tgtcgatctgcaaatcctgcttgctgatggaaaatcaacctcaacgctgacctataccgcgcgagattccagcgg

SEQ ID NO: 94995 - DNA, 75 bp, synthetic construct
  source 1..75: mol_type = other DNA
tgaggcgatacctgaaccagtaaaacaacttcctgttatgggcgggagaccgcttaatcgtgttcaggctctggc

SEQ ID NO: 94996 - DNA, 75 bp, synthetic construct
  source 1..75: mol_type = other DNA
agcgcgcaaaatattagccgtaaagtggtgattagtccctccgctgtcgaacgtatgttagtcactcttgccacc

SEQ ID NO: 94997 - DNA, 75 bp, synthetic construct
  source 1..75: mol_type = other DNA
aaaagcaacgtaattgatgtttctatggagacaggtacaggtaaaacttatacttacaccaaaacaatttttgac

SEQ ID NO: 94998 - DNA, 75 bp, synthetic construct
  source 1..75: mol_type = other DNA
gcagtgctctgcatcttgagccctggcagggtaatggactggttcatttttccaggcggacgcctttccgtaaac

SEQ ID NO: 94999 - DNA, 75 bp, synthetic construct
  source 1..75: mol_type = other DNA
ttattgcattaataattgccctcattgtcgtcttatttaatgttttcagtgccaccggagttatcagggatttct

SEQ ID NO: 95000 - DNA, 75 bp, synthetic construct
  source 1..75: mol_type = other DNA
tcgcctacgtaaggataaaaagcgtgaaaaagtgatgattaacattgctgcgatgacgatcgatgccctctctga

SEQ ID NO: 95001 - DNA, 75 bp, synthetic construct
  source 1..75: mol_type = other DNA
ggtcaaaggttctggtatcagagaataacctgacggcaaccacgaaagaggtcgctgctgcaaccaatattgacc

SEQ ID NO: 95002 - DNA, 75 bp, synthetic construct
  source 1..75: mol_type = other DNA
gattcagcggtgatttctcgttttttcgaatccctgaaagcaaaaattcaggcttaccagcgacataaacgacgt

SEQ ID NO: 95003 - DNA, 75 bp, synthetic construct
  source 1..75: mol_type = other DNA
tcctctggcgtcgcccagtaataatgaaattgatttacttaatctaatcgaagttttatggcgggccaaaaaaac

SEQ ID NO: 95004 - DNA, 75 bp, synthetic construct
  source 1..75: mol_type = other DNA
aaaaacagagcattacctaatgaacgatcacgtgttttcattcttaatgaaagagatataaataatattagaaaa

SEQ ID NO: 95005 - DNA, 75 bp, synthetic construct
  source 1..75: mol_type = other DNA
gcggtatcatcaaagttggtgaagaagttgaaatcgttggtatcaaagagactcagaagtctacctgtactggcg

SEQ ID NO: 95006 - DNA, 75 bp, synthetic construct
  source 1..75: mol_type = other DNA
ggttttaaattactgctgaccgagactgataaagacagtttactggcgttaataaaacaaagaccaatgccagaa

SEQ ID NO: 95007 - DNA, 75 bp, synthetic construct
  source 1..75: mol_type = other DNA
cgttatatgcctgggataacattgacaaaaaatgggtattagccggagttactctgcataattatggagtaaaag

SEQ ID NO: 95008 - DNA, 75 bp, synthetic construct
  source 1..75: mol_type = other DNA
cagcagcaaaaacaggctgaaatggcactgaatcagctgattaatcgttatcagatggaacacacaggcaatcag

SEQ ID NO: 95009 - DNA, 75 bp, synthetic construct
  source 1..75: mol_type = other DNA
atgcctcacacgataaaaaagatgagtctgataggactcatattgatgatctttacttccgtatttggatttgcc

SEQ ID NO: 95010 - DNA, 75 bp, synthetic construct
  source 1..75: mol_type = other DNA
cggcaggaacgccaccgggtacatctcagggacgagggcaacgttttatgaactttcttaccggggtaaatccgg

SEQ ID NO: 95011 - DNA, 75 bp, synthetic construct
  source 1..75: mol_type = other DNA
accgtgatgaattaattgatacaactcaggcaaggccaattcagtattgcattaatgggacgtggtataacgcgg

SEQ ID NO: 95012 - DNA, 75 bp, synthetic construct
  source 1..75: mol_type = other DNA
ctggtccgaattttacaccaccaccagaaaaccttcagcaggagatgttggtgcatatactaaagcggaatgtaa

SEQ ID NO: 95013 - DNA, 75 bp, synthetic construct
  source 1..75: mol_type = other DNA
cagcagcaaaaacaggctgaaatggcactgaatcagctgattaatcgttatcaggtggaacacgctggcaaaccg

SEQ ID NO: 95014 - DNA, 75 bp, synthetic construct
  source 1..75: mol_type = other DNA
tctcaaatccacgcagatgatgagcgtgattgacgccattggtgaagggccgattgaaggtccggtgaaggggct

SEQ ID NO: 95015 - DNA, 75 bp, synthetic construct
  source 1..75: mol_type = other DNA
ttaacagtagctgccgatattttaaaacaggaacttgctataaataatagggatgataggtattctttacagtca

SEQ ID NO: 95016 - DNA, 75 bp, synthetic construct
  source 1..75: mol_type = other DNA
atgaaatacaataacattattttcctcggtttatgtctggggttaaccacctattctgctttatccgcagatagc

SEQ ID NO: 95017 - DNA, 75 bp, synthetic construct
  source 1..75: mol_type = other DNA
aaagtatatatacaacttaaaagaagaggtaatcaatgagttaatatatgatattgatagtgatgaacaacacat

SEQ ID NO: 95018 - DNA, 75 bp, synthetic construct
  source 1..75: mol_type = other DNA
cgctgatgctggcagacaatggcgagtttaagccgtgggatggtcaggaatctggcaaggctgtttatctgacct

SEQ ID NO: 95019 - DNA, 75 bp, synthetic construct
  source 1..75: mol_type = other DNA
tcagaaacagtgggaatcctgggccgaaaggtatcttgttattactgccagttgtgtttatttgcctgataaaat

SEQ ID NO: 95020 - DNA, 75 bp, synthetic construct
  source 1..75: mol_type = other DNA
ttaagtatctggtggttttcattaactccacctggaatctggtttttgttatttcttttacgttgttggcagtgg

SEQ ID NO: 95021 - DNA, 75 bp, synthetic construct
  source 1..75: mol_type = other DNA
ccttctctgattgctgattttactggtgagctgcatagactaatttctgaacatttgcagtgtaagcgacgtaaa

SEQ ID NO: 95022 - DNA, 75 bp, synthetic construct
  source 1..75: mol_type = other DNA
gtgcctgaacgcggattcacacttctggaaatcatgctggtgattttccttatcggccttgccagtgcgggcgtg

SEQ ID NO: 95023 - DNA, 75 bp, synthetic construct
  source 1..75: mol_type = other DNA
ccgcctgccggggtgttcagacagaaactgcagtacgcccgggatgtccgtgacggcaaaattcatgatccgcac

SEQ ID NO: 95024 - DNA, 75 bp, synthetic construct
  source 1..75: mol_type = other DNA
tggcagagtcggcagtatcaggcctatcccattcaggggagtggatttgagatgaacggcaaaggtgccagtgca

SEQ ID NO: 95025 - DNA, 75 bp, synthetic construct
  source 1..75: mol_type = other DNA
atgaacttcagagcacgtcttttttattatttttctttaaaaaaagaagaggaggataaaggtttaaccttaatg

SEQ ID NO: 95026 - DNA, 75 bp, synthetic construct
  source 1..75: mol_type = other DNA
ctctggcaggagaaagtggatgcaatgcaggagtctgccacccgtcagcgtgaacaggatactattcggaagttt

SEQ ID NO: 95027 - DNA, 75 bp, synthetic construct
  source 1..75: mol_type = other DNA
atgatttcagacgcacagaaggcagctaatgcagccggtgcgatagcaacagggcttgtatctctcaatattccg

SEQ ID NO: 95028 - DNA, 75 bp, synthetic construct
  source 1..75: mol_type = other DNA
ctgtcgccatcgcttttactcccttcggcaaaaaggttcgggattcgatgcgtaataccaaccagccatcacgcc

SEQ ID NO: 95029 - DNA, 75 bp, synthetic construct
  source 1..75: mol_type = other DNA
gggactgtggtaacgcgattactcataatacggtgtgttgtccgtactgtggttctgtcgatcccttcggctatt

SEQ ID NO: 95030 - DNA, 75 bp, synthetic construct
  source 1..75: mol_type = other DNA
aaacaacatcacgggcttgttgtcgttgatgcctttaatcatgagcaaacgccggtgaaggccagcagcattcat

SEQ ID NO: 95031 - DNA, 75 bp, synthetic construct
  source 1..75: mol_type = other DNA
actgtgttgagctgattaacagtctgcgcagttcatccatgttcacaaaaatcaaaggtcagacacctgccagtg

SEQ ID NO: 95032 - DNA, 75 bp, synthetic construct
  source 1..75: mol_type = other DNA
taaatggtaaggatacatggtctgtaaaaggattaaaaagtcataaaggtgtatatgattattcaaatctgattc

SEQ ID NO: 95033 - DNA, 75 bp, synthetic construct
  source 1..75: mol_type = other DNA
aactcatattattaatacctgataattatgaagctcagggcgtgggtattaatgagttggtcaaagctgctgatg

SEQ ID NO: 95034 - DNA, 75 bp, synthetic construct
  source 1..75: mol_type = other DNA
aggcacctacattgttgatgaggtcgctcatgaaggacctccggatcggctgacactgagtgcaaacagcgcaga

SEQ ID NO: 95035 - DNA, 75 bp, synthetic construct
  source 1..75: mol_type = other DNA
cggaagaattgggtgggaagatccttgaactctgtgttgaagtaggcggcagtatcagtggggaacatggcatcg

SEQ ID NO: 95036 - DNA, 75 bp, synthetic construct
  source 1..75: mol_type = other DNA
atacattgagattttctacaatcgtcagcgtcgtcactctcgtctggggaatatctccccggcagccttcaggga

SEQ ID NO: 95037 - DNA, 75 bp, synthetic construct
  source 1..75: mol_type = other DNA
taccttttaccggaaactcaggcagtgttacagcgcctggggcaacaggacttgatatctattctggagggaaaa

SEQ ID NO: 95038 - DNA, 75 bp, synthetic construct
  source 1..75: mol_type = other DNA
aagcatatcttcctgaccatgttatcaatttcttgggtggtagagatggtgtaaatactcttggcaacctcacct

SEQ ID NO: 95039 - DNA, 75 bp, synthetic construct
  source 1..75: mol_type = other DNA
agcaccgatgccattaacggctcacaactttatggcgtagcggattcatttacgtcatatcttggtggtggtgct

SEQ ID NO: 95040 - DNA, 75 bp, synthetic construct
  source 1..75: mol_type = other DNA
acgctgaccgctgcaatcactaccgtactggctaaaacctacggcggtgctgctcgcgcattcgaccagatcgat

SEQ ID NO: 95041 - DNA, 75 bp, synthetic construct
  source 1..75: mol_type = other DNA
ggcgagaaattagtcaattcgcaattctcccagcgccaggaagcagaagccgatgattattcttacgatcttctg

SEQ ID NO: 95042 - DNA, 75 bp, synthetic construct
  source 1..75: mol_type = other DNA
ggcgaagttttttcccgtctttcactgctggataatgtctgggggtatcagcatgaaggatatgagcatacagtc

SEQ ID NO: 95043 - DNA, 75 bp, synthetic construct
  source 1..75: mol_type = other DNA
ttattaagtatcgcagcaggcatcgttgtattatggttattttcaattatctatatttatttttgtgagctattc

SEQ ID NO: 95044 - DNA, 75 bp, synthetic construct
  source 1..75: mol_type = other DNA
gggaacgccagcaacttctgtttgtggctctgacgctacattcgccggtagttaaggattttctggctgaagtgg

SEQ ID NO: 95045 - DNA, 75 bp, synthetic construct
  source 1..75: mol_type = other DNA
tggcaggggcgtgaatatcaggcgtacccgattgaggggagtggctttgagatgagcgggaagggcagcagtgcc

SEQ ID NO: 95046 - DNA, 75 bp, synthetic construct
  source 1..75: mol_type = other DNA
cggattatggtgacagggttgttttccgtaatcaccatgaccgcaatgcgctggcagataaactggatttgattg

SEQ ID NO: 95047 - DNA, 75 bp, synthetic construct
  source 1..75: mol_type = other DNA
caccctgctcccgaaactcatctccggtgagctatccctggaagatcttccggatctcaccaccgatacagaagc

SEQ ID NO: 95048 - DNA, 75 bp, synthetic construct
  source 1..75: mol_type = other DNA
gccagaattaaggtgacagccccgcaggacgtgagtgatatgccggtgaaggaagtggaagtttgcccgtggatc

SEQ ID NO: 95049 - DNA, 75 bp, synthetic construct
  source 1..75: mol_type = other DNA
cgttagccttgatcaaattgccacccatttcggctcttatttgagctacctgacagccgcattcaatgaagacgt

SEQ ID NO: 95050 - DNA, 75 bp, synthetic construct
  source 1..75: mol_type = other DNA
cggaacataaagctattcagattggtgctaaccaaaatgctggtgttacacaggtaggcggtcaggcagagtcag

SEQ ID NO: 95051 - DNA, 75 bp, synthetic construct
  source 1..75: mol_type = other DNA
actcaacttagtcagagcaaaagcaatactaacgacagtggtgtggctgaagttacccttaagggcacggttttg

SEQ ID NO: 95052 - DNA, 75 bp, synthetic construct
  source 1..75: mol_type = other DNA
gcctgacggtgttgaggcggatcgctccggtgatgatttaattctgcgtaaaaaggaagaagatactgaggtccg

SEQ ID NO: 95053 - DNA, 75 bp, synthetic construct
  source 1..75: mol_type = other DNA
aatgttttgcttaacacatctgcaattccggataattacaaagatacaacaaaccaaaaaataaccaacccattt

SEQ ID NO: 95054 - DNA, 75 bp, synthetic construct
  source 1..75: mol_type = other DNA
ataattcgcccaccgataagatgaacgtgaaaggcgatacccaagggaacactcgcgttcgggttgataacattg

SEQ ID NO: 95055 - DNA, 75 bp, synthetic construct
  source 1..75: mol_type = other DNA
gaagcgtcagcgcaggtcggttccattgttaactgtatgttcaaccgtgactgcatgacgcatacccatatcaat

SEQ ID NO: 95056 - DNA, 75 bp, synthetic construct
  source 1..75: mol_type = other DNA
ctggagatacctgaaggtcaggtaatggtcgcacaagacgtagcagttaaagctcacgttaacgaccagtttggc

SEQ ID NO: 95057 - DNA, 75 bp, synthetic construct
  source 1..75: mol_type = other DNA
tatttctcttggctctaatattagtacttctggtgattttttaagtttaaagacaggttcaattgatgcaattta

SEQ ID NO: 95058 - DNA, 75 bp, synthetic construct
  source 1..75: mol_type = other DNA
attttatatggattaaatagaaaaaatgatgcggtaaaggctctggaggactttatggatgatgagacaagccag

SEQ ID NO: 95059 - DNA, 75 bp, synthetic construct
  source 1..75: mol_type = other DNA
aaccatccgcaatggctggcagagcgccgggcggatgtggcaaccattgttgaagaattggggtgcggagattac

SEQ ID NO: 95060 - DNA, 75 bp, synthetic construct
  source 1..75: mol_type = other DNA
tggcaatgattatcctactaatgatggaacaggtgtaagagattttattcatgttgttgacttagcgaaaggtca

SEQ ID NO: 95061 - DNA, 75 bp, synthetic construct
  source 1..75: mol_type = other DNA
aagcccattttctcgaacatcttcacccgctgtgcccgcagctgggcaacgatccgcaaaatatgcgctatgtgg

SEQ ID NO: 95062 - DNA, 75 bp, synthetic construct
  source 1..75: mol_type = other DNA
tcaatccggatgctccggatgagcgttgggtaacggacataacctacataaggacccacgaaggctggctgtatc

SEQ ID NO: 95063 - DNA, 72 bp, synthetic construct
  source 1..72: mol_type = other DNA
gcgtcgcatcaggcattgtgcgccaactgccggatgcggcgtaaacgccttatccggcctacggcacgttaa

SEQ ID NO: 95064 - DNA, 75 bp, synthetic construct
  source 1..75: mol_type = other DNA
cttggtcacaaaacacagcaacaaaccgatcgttatcatgatgaccgtgggaaaggctggagcaaagtagctttg

SEQ ID NO: 95065 - DNA, 75 bp, synthetic construct
  source 1..75: mol_type = other DNA
catgctggcgaatacctgtatgtggacttaccgttctgatgagtgtggttacacgggcagggcagtggctgacga

SEQ ID NO: 95066 - DNA, 75 bp, synthetic construct
  source 1..75: mol_type = other DNA
tatcggccacgttgaccaaggtaaaactacgctgaccgctgcaatcaccaccgtactggctaaaacctacggcgg

SEQ ID NO: 95067 - DNA, 75 bp, synthetic construct
  source 1..75: mol_type = other DNA
cggcaactgttatccggtcgataaagttattcacatggacaataacgaaatcccggcggggcttaaaacagcacc

SEQ ID NO: 95068 - DNA, 75 bp, synthetic construct
  source 1..75: mol_type = other DNA
ttaatgatgcaatagatgagtattatcttaaggcattttcaccagaaataattcaagccctcagttttgttcaag

SEQ ID NO: 95069 - DNA, 75 bp, synthetic construct
  source 1..75: mol_type = other DNA
ccggtttatctggtgcaggcgcgtgggatgtcgattctgaaagcgggctttgtggcttccgttccggcggtttgc

SEQ ID NO: 95070 - DNA, 75 bp, synthetic construct
  source 1..75: mol_type = other DNA
aggtgctgcgtgcaccgcacgtttctgaaaaagcgtctactgcgatggaaaaatccaacaccatcgtactcaaag

SEQ ID NO: 95071 - DNA, 75 bp, synthetic construct
  source 1..75: mol_type = other DNA
cgagcctggttgcttcatctcctgaagacagaggtaacacggcaggctgatgtgagcaggatacagccgttgatt

SEQ ID NO: 95072 - DNA, 75 bp, synthetic construct
  source 1..75: mol_type = other DNA
gatattcacggtaatccacacatggggacgagaccagcagtggcatccgcacattcacctgtcgacaacagccgg

SEQ ID NO: 95073 - DNA, 75 bp, synthetic construct
  source 1..75: mol_type = other DNA
aaactatcgacatggagtagcgcgcagcaatccgatgcgtatgccatccgcgaaagcggagctgtgctggcttat

SEQ ID NO: 95074 - DNA, 75 bp, synthetic construct
  source 1..75: mol_type = other DNA
gtcctggcacgcctggaggacatcccggaagaccagcggattgagtccggtatttcttccgctgcggtgatggag

SEQ ID NO: 95075 - DNA, 75 bp, synthetic construct
  source 1..75: mol_type = other DNA
acagatgcactcagcgaaaatgaaagtgaactgctgcagccggaaggcccgccctttcatctctgtgccttctgc

SEQ ID NO: 95076 - DNA, 75 bp, synthetic construct
  source 1..75: mol_type = other DNA
gacggtcgaacagaatttacgctttttctctggtgtgtatggcttacgcggtcgggcgcagaacgaaaaaatctc

SEQ ID NO: 95077 - DNA, 75 bp, synthetic construct
  source 1..75: mol_type = other DNA
atgtacggaacatgcgaaacgctctgccgtgagctggcagcaaagtatccgggaaacacgccgctgatgctgctt

SEQ ID NO: 95078 - DNA, 75 bp, synthetic construct
  source 1..75: mol_type = other DNA
ttaatttgcacagcttcctggtggcggtggtgggcgctatcctggtgctgggcgtattccgcctcctgcgaagag

SEQ ID NO: 95079 - DNA, 75 bp, synthetic construct
  source 1..75: mol_type = other DNA
gcggctactgtcccggaaatacccggagctggtaataccggatgaactggcagtggaaggaaacagcaaacggga

SEQ ID NO: 95080 - DNA, 75 bp, synthetic construct
  source 1..75: mol_type = other DNA
cgtgcgttcctgctccagttcctgcgaaaggaagtcacaagacaggccgatgtgaaccggatacaaccgctgatt

SEQ ID NO: 95081 - DNA, 75 bp, synthetic construct
  source 1..75: mol_type = other DNA
atcataatctgccttgaaaggcaagggggctttctcaacccaatgactttctgtattatatctgtctttttcttt

SEQ ID NO: 95082 - DNA, 75 bp, synthetic construct
  source 1..75: mol_type = other DNA
gtttatgtactcacctaacggcaaaaaggatggtcttcagattatcccgttgtcagaagtcgcggcgaaggatga

SEQ ID NO: 95083 - DNA, 75 bp, synthetic construct
  source 1..75: mol_type = other DNA
aaagccagatgatacttaccgaatatcagctcgaccacaaaaccaataaatcacgttcagtatatttgcttcgcc

SEQ ID NO: 95084 - DNA, 75 bp, synthetic construct
  source 1..75: mol_type = other DNA
tgccgatccgattacccgcgaagggtgggcgatcccggcggctactgacattgcctttgcacttggtgtgctggc

SEQ ID NO: 95085 - DNA, 75 bp, synthetic construct
  source 1..75: mol_type = other DNA
ttccatgagcaactggacgaactgctgaaggcggcgctggcgatgcttatctggggcggtaaagtgcgcgttatc

SEQ ID NO: 95086 - DNA, 75 bp, synthetic construct
  source 1..75: mol_type = other DNA
gagattcaattagcccatgtagataaaaatagtattcgtggaacttataatcatgcgctgtatttagaaaagcga

SEQ ID NO: 95087 - DNA, 75 bp, synthetic construct
  source 1..75: mol_type = other DNA
ggcgaagttaatgctcctcatgtgataaattatagaaaaatgctcatgaaaaactacatagggaatttgacagga

SEQ ID NO: 95088 - DNA, 75 bp, synthetic construct
  source 1..75: mol_type = other DNA
caccggaggcagactggcgttgtttgtgaaggcgaaggactgtgcgtcctgtgatatccgcctgagtaaggtgct

SEQ ID NO: 95089 - DNA, 75 bp, synthetic construct
  source 1..75: mol_type = other DNA
ggggagccagtcatctgtggctggacctgcagtggtatattcatcaggcgctgttgcagaccggaaaagaaaatt

SEQ ID NO: 95090 - DNA, 75 bp, synthetic construct
  source 1..75: mol_type = other DNA
ggcgttatcaggcactgatggcgggaccccgcgggatacagtcgccgggtctggacccgctgacagcactgggta

SEQ ID NO: 95091 - DNA, 75 bp, synthetic construct
  source 1..75: mol_type = other DNA
gctgaaaggcaagccgggcgaggttaaatcgctggtttcttccttacaaaccaaatacgcgctgaaaggttatga

SEQ ID NO: 95092 - DNA, 75 bp, synthetic construct
  source 1..75: mol_type = other DNA
gagagtgcagcggagctgctgtcacggctggaatatcgtgtccagtaccctccgttcggcggtaatcagtttgat

SEQ ID NO: 95093 - DNA, 75 bp, synthetic construct
  source 1..75: mol_type = other DNA
gaaaaacaggagcacttaccggagatacggggggacggctggcgctgtttgtgaaggcgaaggaatgtggcacct

SEQ ID NO: 95094 - DNA, 75 bp, synthetic construct
  source 1..75: mol_type = other DNA
gctgatgcaaatccccggcggctggctgcttgataagtttggctcgaaaaaagtttacacctacagcctcttttt

SEQ ID NO: 95095 - DNA, 75 bp, synthetic construct
  source 1..75: mol_type = other DNA
tggcatcacaatgatgccggtaccgtccagcaacagcgatgaaaacagtaacgccgctaatactaacgtcaacgg

SEQ ID NO: 95096 - DNA, 75 bp, synthetic construct
  source 1..75: mol_type = other DNA
aacagccgcctgctgaccaccgccatcactgccgatacggagcaccgtttcagtggcctgcctcccggggaatac

SEQ ID NO: 95097 - DNA, 75 bp, synthetic construct
  source 1..75: mol_type = other DNA
caggctactgaggataaaagccaggggataccgaaatcgggagcgctttaagctgggcgtgatgttccactacgg

SEQ ID NO: 95098 - DNA, 75 bp, synthetic construct
  source 1..75: mol_type = other DNA
agcgtgcagtaaggctgaatatggcaacggatgaggaccacagccgactggaagcatgggaacgctacagcgttc

SEQ ID NO: 95099 - DNA, 75 bp, synthetic construct
  source 1..75: mol_type = other DNA
tccaccagcaggttgtggcaccatctgatgattgaccttgaaacaatgggcaaaaatcctgatgcgccaatagcc

SEQ ID NO: 95100 - DNA, 75 bp, synthetic construct
  source 1..75: mol_type = other DNA
tctcctaaggcatttttggagtttctggcatggatatttaccttgggacatgtagattttagtgaaagccgcaat

SEQ ID NO: 95101 - DNA, 75 bp, synthetic construct
  source 1..75: mol_type = other DNA
tgtcgcaacaagggaatcattacaggaactcgcagaacgtgccggaatgattaacgcgaatattcaggggggacg

SEQ ID NO: 95102 - DNA, 75 bp, synthetic construct
  source 1..75: mol_type = other DNA
aggctactgttatgacaatgcctgtgtggaaagcttctttcattcgctgaaggtggaatatatccacggggaacg

SEQ ID NO: 95103 - DNA, 75 bp, synthetic construct
  source 1..75: mol_type = other DNA
ttaattccgggtattgcaatgatgatcgcaaacaaacttgaaaattttggggtaacagatgatgagcacatgccc

SEQ ID NO: 95104 - DNA, 75 bp, synthetic construct
  source 1..75: mol_type = other DNA
ggcgcagaaactgctcaggctacagtgagggtctggatgagattccggcgagatgtaacagcaacttcatgtctg

SEQ ID NO: 95105 - DNA, 75 bp, synthetic construct
  source 1..75: mol_type = other DNA
gatgatgggcgaggaattgatgcggcacgcgctttattgagcattcaaaacgggatgttggaaaaacaccgccat

SEQ ID NO: 95106 - DNA, 75 bp, synthetic construct
  source 1..75: mol_type = other DNA
ccgccggtcaacttctcaggtctggcaaaaagtctgcgcgccgcagtgcatcacagctcgccgatttacgtaaaa

SEQ ID NO: 95107 - DNA, 75 bp, synthetic construct
  source 1..75: mol_type = other DNA
cttcaccggatattccgtggcagagcctgccagcgtcacaccgtggtgatgcgcagatgtcgctgccacttccgg

SEQ ID NO: 95108 - DNA, 75 bp, synthetic construct
  source 1..75: mol_type = other DNA
ctacggtctctattcaacagatacagtccgaacgatacagacagcctcttttttttcgggtggaaaaacagcaac

SEQ ID NO: 95109 - DNA, 75 bp, synthetic construct
  source 1..75: mol_type = other DNA
agactggcagatgatgtaaggctcttgcgccaggaggaacgggaaaggcggagaaatatagaaaagctaattcag

SEQ ID NO: 95110 - DNA, 75 bp, synthetic construct
  source 1..75: mol_type = other DNA
ggtgaacaggtcaattttagcgggtctggaataactgttggaaatgataaatggatagaaataaccggttgtcag

SEQ ID NO: 95111 - DNA, 75 bp, synthetic construct
  source 1..75: mol_type = other DNA
ttcgttgagccaggccgagaacctgatgcaagtttatcagcaagcacgccttagtaacccggaattgcgtaagtc

SEQ ID NO: 95112 - DNA, 75 bp, synthetic construct
  source 1..75: mol_type = other DNA
atgcagcagaaaaaatattcctttaattatctgatttttaatgatgatttcataaaaagaagaatactcgttaat

SEQ ID NO: 95113 - DNA, 75 bp, synthetic construct
  source 1..75: mol_type = other DNA
taagacagactttaccacaaatgaaaataatgaagttattgtgagtagatcctttaatctctacacgggggctac

SEQ ID NO: 95114 - DNA, 75 bp, synthetic construct
  source 1..75: mol_type = other DNA
tttcatttgcagggccttcacgaggtgatggggttaattatgtaaccattcgtcctcgtaacattgcgtttaatt

SEQ ID NO: 95115 - DNA, 75 bp, synthetic construct
  source 1..75: mol_type = other DNA
tgaccgaaaccgatcactctaacccggatccggaaatcgtggaaattgcctgcggtcgctcatcagccccgatgc

SEQ ID NO: 95116 - DNA, 75 bp, synthetic construct
  source 1..75: mol_type = other DNA
ttcgacgagaaatacaaacatcacgccacaccagaacaacgcaaggacgtgatccgcatcgaaatggatatggaa

SEQ ID NO: 95117 - DNA, 75 bp, synthetic construct
  source 1..75: mol_type = other DNA
ctcagcagcttggaaattacggtacgacatttttcagtgccagtcgccaaagttactggaacacgtcacgcagcg

SEQ ID NO: 95118 - DNA, 75 bp, synthetic construct
  source 1..75: mol_type = other DNA
cgccagcgccccgaaaatggaagcattcacctttggcgagccggtgccggtactcgaccgccgtgacattctgga

SEQ ID NO: 95119 - DNA, 75 bp, synthetic construct
  source 1..75: mol_type = other DNA
tgaacaactggatatcatcaacaccgcgttcagggtaatcgaaacggttcgcccaaaactggcctgcagccggtg

SEQ ID NO: 95120 - DNA, 75 bp, synthetic construct
  source 1..75: mol_type = other DNA
aggtgtctcaccgacatttaccgaagccgagcataacagcttgcgggctgcctcgctggcacagattaacaatcc

SEQ ID NO: 95121 - DNA, 75 bp, synthetic construct
  source 1..75: mol_type = other DNA
atggtacatgaccgcatagcggaggaactcgaggcaaaaggcttttaccggagggcggcggcacgatggggtgaa

SEQ ID NO: 95122 - DNA, 75 bp, synthetic construct
  source 1..75: mol_type = other DNA
gtggccaaagcacttgcggcacttgcaggcagcgcccctgagacactggatacgcttaaagagctggctgacgct

SEQ ID NO: 95123 - DNA, 75 bp, synthetic construct
  source 1..75: mol_type = other DNA
tcaaaagtggtgatcaagaagttgatatggagtatggccttgataccctctctggaacggctgaggtgacatgca

SEQ ID NO: 95124 - DNA, 75 bp, synthetic construct
  source 1..75: mol_type = other DNA
ataaatatcttgagttaggtttgaaaaaattattgagcaggcattctattactattggtgctgatttttttatac

SEQ ID NO: 95125 - DNA, 75 bp, synthetic construct
  source 1..75: mol_type = other DNA
aagaatgctgttgatttatatgtcgatagtatctctgagaatgaaatagaagctttaaacagagaatctttaaaa

SEQ ID NO: 95126 - DNA, 75 bp, synthetic construct
  source 1..75: mol_type = other DNA
atggctgacagttttcagctgaaggcgatcatcactgccgtggataaggtgtcggcaccgctgaagggaatgcag

SEQ ID NO: 95127 - DNA, 75 bp, synthetic construct
  source 1..75: mol_type = other DNA
cttgtggagcaagagctgtggggtgtcttactggcttataatctggtgagatatcagatgattaaaatggcggaa

SEQ ID NO: 95128 - DNA, 75 bp, synthetic construct
  source 1..75: mol_type = other DNA
ccggaatcagattggcgataagtttgctcaacgtcttctcgggcataaatcagattcaatggcggcgcggtatag

SEQ ID NO: 95129 - DNA, 75 bp, synthetic construct
  source 1..75: mol_type = other DNA
ctgcagtctcggcagccatgtcgtctatggcgttggccgctccattaaccgtaggattttcgcaggtcggatcgg

SEQ ID NO: 95130 - DNA, 75 bp, synthetic construct
  source 1..75: mol_type = other DNA
acaagaagggaaagggccttcccgagagtggtaaaggagaggccctggaaataccccacagccccgaaaaagagc

SEQ ID NO: 95131 - DNA, 75 bp, synthetic construct
  source 1..75: mol_type = other DNA
tagtggatctgatgtaccaacgaggctcaatcatcgtagtgagccagttgccggtggaaaactggtacaaaatga

SEQ ID NO: 95132 - DNA, 75 bp, synthetic construct
  source 1..75: mol_type = other DNA
caccgacgcatcaggccgcaaactcccttgttaccaaatcacccgcgacggttttgcatttcttgctatgggttt

SEQ ID NO: 95133 - DNA, 75 bp, synthetic construct
  source 1..75: mol_type = other DNA
atgaaaattattcctgcaacgacgctgcgggcgacgacgtcatatctgtcgcccgtcgtggtctggcaaacatta

SEQ ID NO: 95134 - DNA, 75 bp, synthetic construct
  source 1..75: mol_type = other DNA
tgttcctgagccatgagaattcagtgggcctggttgaaaatacggctgctcaggcgatgctccagaacgtgtctc

SEQ ID NO: 95135 - DNA, 75 bp, synthetic construct
  source 1..75: mol_type = other DNA
acaaaaggccgcgttactttcagaagctgaatcagtcatccagtttctggaacgtgctgtcaggctgaatatggc

SEQ ID NO: 95136 - DNA, 75 bp, synthetic construct
  source 1..75: mol_type = other DNA
aacagacgccttatcttcgtgcggtcgatattttacgggcgcgacaggctacaggtctgctgcgccgctgccata

SEQ ID NO: 95137 - DNA, 75 bp, synthetic construct
  source 1..75: mol_type = other DNA
atgtctgatcccttttcccggctggcagcgcgtatggatgcgatcacggtcagaaagatgggaaagacagcctcg

SEQ ID NO: 95138 - DNA, 75 bp, synthetic construct
  source 1..75: mol_type = other DNA
tttgcaaaaattgatgcaagcgcttaattgttggctagatgaaaatataattacatttaataaatatattttgta

SEQ ID NO: 95139 - DNA, 75 bp, synthetic construct
  source 1..75: mol_type = other DNA
gcagttgctaactactttactaaacggcatgagcgggttttagatagaattcgaaaccttgaatgctccgctgaa

SEQ ID NO: 95140 - DNA, 75 bp, synthetic construct
  source 1..75: mol_type = other DNA
taacttttttctttgttatcttttcagttaatgtggttgcgaaggaatttaccttagacttctcgactgcaaaga

SEQ ID NO: 95141 - DNA, 75 bp, synthetic construct
  source 1..75: mol_type = other DNA
tcccgcacctacagcagttaccggacaaaaacgcccgcgccggtggggagcctcggccccggctggaaaatgcct

SEQ ID NO: 95142 - DNA, 75 bp, synthetic construct
  source 1..75: mol_type = other DNA
atgaaaaacttgttagacaccgagggaacggttctattcccattccagactgaaatccattttatttggacgatt

SEQ ID NO: 95143 - DNA, 75 bp, synthetic construct
  source 1..75: mol_type = other DNA
acgaacagcaacaacaggccgaatcacaaaaggccgcattgctttccgaagctgaatcagtcatccagccgctgg

SEQ ID NO: 95144 - DNA, 75 bp, synthetic construct
  source 1..75: mol_type = other DNA
tccttgagcgccagtagtgcagcctcctcggcaacagcggcaggcaattccgcgaaggcggcaaaaacgtccgag

SEQ ID NO: 95145 - DNA, 75 bp, synthetic construct
  source 1..75: mol_type = other DNA
cggctggcggtcaggccgggattgcacgtgatgaactgatgcagtttgccactgatgcggtgaagatgggcgtgg

SEQ ID NO: 95146 - DNA, 75 bp, synthetic construct
  source 1..75: mol_type = other DNA
atgaaaaatttgttcgacaccgagggaacggttctattcccattccagactgaaatccattttatctggacgatt

SEQ ID NO: 95147 - DNA, 75 bp, synthetic construct
  source 1..75: mol_type = other DNA
tttgagcaggatctcgttgctcgctttggcacaaatcagctcgaaatgacagccattggttgtacccggcagtca

SEQ ID NO: 95148 - DNA, 75 bp, synthetic construct
  source 1..75: mol_type = other DNA
gaaggattctgggaagaggacgacgacgacaaacacatcaggacttacaccatcaaatttcctgactccggcttt

SEQ ID NO: 95149 - DNA, 75 bp, synthetic construct
  source 1..75: mol_type = other DNA
cagcggtgatgcctccggtcgctacggtctgcaacgggggcagcgtgttcgcctgcgctgtcatctgattcaggg

SEQ ID NO: 95150 - DNA, 75 bp, synthetic construct
  source 1..75: mol_type = other DNA
cgccatgcagcgctacggctccggccgggttcagcaggtgatgccaaccgaaggctggtaccgggagcatatgcc

SEQ ID NO: 95151 - DNA, 75 bp, synthetic construct
  source 1..75: mol_type = other DNA
tgaataaaatcggcgtggtttctgccgatggcgcatccaccctcgatgccctggaagcgaaactggctgagaaag

SEQ ID NO: 95152 - DNA, 75 bp, synthetic construct
  source 1..75: mol_type = other DNA
gatgagacgtatcaggtgatgagcgcgtgcaaaccgcatgactgtggctcgcaacgtatcgctgtgatgtggtcc

SEQ ID NO: 95153 - DNA, 75 bp, synthetic construct
  source 1..75: mol_type = other DNA
attacattcctgattatggcgttaatgcctgcattgatggtgaatgggatttcttcagctcatttaatgagctgt

SEQ ID NO: 95154 - DNA, 75 bp, synthetic construct
  source 1..75: mol_type = other DNA
gctcttttatccttgcgggtatcctgctgtatggcctctggcagggtacacggcgacgccggcgccggcacgaac

SEQ ID NO: 95155 - DNA, 75 bp, synthetic construct
  source 1..75: mol_type = other DNA
ggccatatgcgattaaaaaaggtattcgtgacgtttttaattcgtgtgatgtgcgtcgcgtgaccagtcacgaca

SEQ ID NO: 95156 - DNA, 75 bp, synthetic construct
  source 1..75: mol_type = other DNA
acatgcattactgactgcatgattaaagtcttcctcggtcgtgatggtttacctgtaaaggcggagtcatggtga

SEQ ID NO: 95157 - DNA, 75 bp, synthetic construct
  source 1..75: mol_type = other DNA
atgaaataccacgtcagtgcgtgacacctggcgattatgttcttcatgaaggccgcacatatatcgcttcagcaa

SEQ ID NO: 95158 - DNA, 75 bp, synthetic construct
  source 1..75: mol_type = other DNA
ggacagcaccggcaacagtggccggctgacattcgggacttaccgcaagtccacgggggcgtctgtgcctccgcg

SEQ ID NO: 95159 - DNA, 75 bp, synthetic construct
  source 1..75: mol_type = other DNA
gaagcatgggaacgctacagtgttctggtcagccgtgtggatacggcaaagccagaatggccacaaaaaccagag

SEQ ID NO: 95160 - DNA, 75 bp, synthetic construct
  source 1..75: mol_type = other DNA
ccgcgagccttgatctaacaagggctgcagcctttgcgattcgccttgtggcggtcgctattatgatttgggctg

SEQ ID NO: 95161 - DNA, 75 bp, synthetic construct
  source 1..75: mol_type = other DNA
attcccgacgcgtccgcaggaccgctttgctatcagcgaagaagataaacgtatctaccgcgaagagttgttccc

SEQ ID NO: 95162 - DNA, 75 bp, synthetic construct
  source 1..75: mol_type = other DNA
ccctgcggcatttattgaaaccaatattgttggtacttatgtccttttggaagccgctcgcaattactggtctgc

SEQ ID NO: 95163 - DNA, 75 bp, synthetic construct
  source 1..75: mol_type = other DNA
atggtcggttgctatagcggtaaaccgctgaatacgcaaaatattgatagtctggcggcggaaggtattcgcttt

SEQ ID NO: 95164 - DNA, 75 bp, synthetic construct
  source 1..75: mol_type = other DNA
atggacgtgcaaaaagtggatagcgcacgctcccttattgccggggtgatgcactgggcggtcactaccggcggc

SEQ ID NO: 95165 - DNA, 75 bp, synthetic construct
  source 1..75: mol_type = other DNA
gtctgtatgcactgatattgcttgcacaatatcataatataactgtcaatgctgaaactataaggcatcagtata

SEQ ID NO: 95166 - DNA, 75 bp, synthetic construct
  source 1..75: mol_type = other DNA
atcaagcaaactcaggctgggttgcgctatgagcgtagcctgagcgcgcaagatgatatgagtgtgatgatgtat

SEQ ID NO: 95167 - DNA, 75 bp, synthetic construct
  source 1..75: mol_type = other DNA
attgagatcggcagtaaaacgcgtattggtgatgggctgcttagtctcgcattgttccagaccgacaccgatgat

SEQ ID NO: 95168 - DNA, 75 bp, synthetic construct
  source 1..75: mol_type = other DNA
cccctgcgtaagcagattgctgaactccctgagaatcagcgatggatggtcaccagtgaaggggctttttcttat

SEQ ID NO: 95169 - DNA, 75 bp, synthetic construct
  source 1..75: mol_type = other DNA
aacggacggattgccaagttcgtaactgtgcaaggccattctatggctgtgtacgatgcgtatggcgtacagcag

SEQ ID NO: 95170 - DNA, 75 bp, synthetic construct
  source 1..75: mol_type = other DNA
atcggtatcggcatcctcgggggtaaattcctggaaggcgcagcgcgtcaacctgatctgattcctctgctgcgt

SEQ ID NO: 95171 - DNA, 75 bp, synthetic construct
  source 1..75: mol_type = other DNA
gtcgccatcggtgtaggggctgcagcagcgaccgacaattctgtcgctatcggcgcaggatcgaccacagatgca

SEQ ID NO: 95172 - DNA, 75 bp, synthetic construct
  source 1..75: mol_type = other DNA
tgcgacgacttgagtcagcaggtgcagagattagccgggcaggtggaccgcttgagtcggttatttatcacgaac

SEQ ID NO: 95173 - DNA, 75 bp, synthetic construct
  source 1..75: mol_type = other DNA
actaaccaatggttggattgctattggccatgattcgattgcatcgtcagtagtgcaatcaggagctgctgccgc

SEQ ID NO: 95174 - DNA, 75 bp, synthetic construct
  source 1..75: mol_type = other DNA
attcagcataaagccattcttcttgatgagctgaagagtgcccgggagcaacaaaaaaggcgcgatgaacgcgct

SEQ ID NO: 95175 - DNA, 75 bp, synthetic construct
  source 1..75: mol_type = other DNA
ggggcgactaatgctcaaggtgagtattctgtggcaatagggcgggctgctactacagatagcaactacgcgctt

SEQ ID NO: 95176 - DNA, 75 bp, synthetic construct
  source 1..75: mol_type = other DNA
accatttaccgtggtggggagcagagtattactaatgcaggccttgctaccgggaccatcattcgtggcggggag

SEQ ID NO: 95177 - DNA, 75 bp, synthetic construct
  source 1..75: mol_type = other DNA
tcacacattcgtgcgcagtacgatgatccggcattacgtaagctgcattatcacattgcagaagttcagcgaatg

SEQ ID NO: 95178 - DNA, 75 bp, synthetic construct
  source 1..75: mol_type = other DNA
aacgtcaacgggtggattttcaatcgcacttggtcgttatgcgaactcagtaggtgaattttctattgcacaagg

SEQ ID NO: 95179 - DNA, 75 bp, synthetic construct
  source 1..75: mol_type = other DNA
gtaagcggaacattgctgatttgaagacgcgggatcttcttgtacccatcaaagcggtggaatcatccggacgac

SEQ ID NO: 95180 - DNA, 75 bp, synthetic construct
  source 1..75: mol_type = other DNA
ccgctgggcgcagtgattatgtcgatcgttatggctggtttgcgcatcgcctattttggcggtggtggtggctgg

SEQ ID NO: 95181 - DNA, 75 bp, synthetic construct
  source 1..75: mol_type = other DNA
atacgtctgaaggttgttttgaaattggtgtcactatcagcaatcagatatttactgaagatgccattaataaaa

SEQ ID NO: 95182 - DNA, 75 bp, synthetic construct
  source 1..75: mol_type = other DNA
atcctctggagattaaaaaggctgaagctgaaaaagttgttatcccaacatttgccgatgcagccaggtgtgtac

SEQ ID NO: 95183 - DNA, 75 bp, synthetic construct
  source 1..75: mol_type = other DNA
cctcgaaagaatattctatggcgctgggagtaagtagcgccgcatctgcggctaacgcgattgccgtaggccgca

SEQ ID NO: 95184 - DNA, 75 bp, synthetic construct
  source 1..75: mol_type = other DNA
gcttaaccgtgcgatcaatgatgcggagtcggtactggggacaacccgccgtcgccgtcgtccgctgggagtgag

SEQ ID NO: 95185 - DNA, 75 bp, synthetic construct
  source 1..75: mol_type = other DNA
tatggcgcaactttttgggccagtcccccgactggtacaaactcgccctcattattttcttaattcttaatccgt

SEQ ID NO: 95186 - DNA, 75 bp, synthetic construct
  source 1..75: mol_type = other DNA
cgaatataatggtgggttacccccaaacgaatcggaaaatcgatactggaaaaactctaacgcggtggccagttt

SEQ ID NO: 95187 - DNA, 75 bp, synthetic construct
  source 1..75: mol_type = other DNA
gaaattctactctgtggcgctctgacgctgacttttgcatccgctcttgagtatgtcggatggcctaaatcacta

SEQ ID NO: 95188 - DNA, 75 bp, synthetic construct
  source 1..75: mol_type = other DNA
gattgctaacattcagaaagtacttgatgtaggctttgactctgtacattttgattgtggtgcgccgatcgttga

SEQ ID NO: 95189 - DNA, 75 bp, synthetic construct
  source 1..75: mol_type = other DNA
ctggaatgaggagcccccaccggaggtgagttacagtacaacattttcattttttcaatgtagctaccctgattc

SEQ ID NO: 95190 - DNA, 75 bp, synthetic construct
  source 1..75: mol_type = other DNA
tatgccattgatgcttcgaaaattgcccgtgaacttggctggctgccgcaggaaacctttgaaagtggaatgcgt

SEQ ID NO: 95191 - DNA, 75 bp, synthetic construct
  source 1..75: mol_type = other DNA
atgagaaatcgattgattgcggcgatattgggcttgtgtggtgcggttactggcgttcaggcagctcctaacgtg

SEQ ID NO: 95192 - DNA, 75 bp, synthetic construct
  source 1..75: mol_type = other DNA
cgaccatctggtgcgcgcctggctgcggacctatggtctgccgacgcttatcaccaactgctcgaataactacgg

SEQ ID NO: 95193 - DNA, 75 bp, synthetic construct
  source 1..75: mol_type = other DNA
aactggcgcaatataattcgtggctggattatctggacgcactggagctagtcgatactaccggtgcgccagata

SEQ ID NO: 95194 - DNA, 75 bp, synthetic construct
  source 1..75: mol_type = other DNA
caatattgttactggcgataaggttcacataaccccggaaagtgcaagcgctgatgattgggagtttgtacattg

SEQ ID NO: 95195 - DNA, 75 bp, synthetic construct
  source 1..75: mol_type = other DNA
tcggggcaattttgtgtgggcgagacgccgacgctggcagattgctgccttgtcccgcagtgggcgaacgcgcta

SEQ ID NO: 95196 - DNA, 75 bp, synthetic construct
  source 1..75: mol_type = other DNA
ctggtggataagctgaatctgattgctcctgtattgtttgatcgtgagccaggaatgggttttgaaccggaaggc

SEQ ID NO: 95197 - DNA, 75 bp, synthetic construct
  source 1..75: mol_type = other DNA
aataatggatatatgtggtatgaatgttcgtatcctgacctccaacaaacctgtacagctaatggaaatatatcg

SEQ ID NO: 95198 - DNA, 75 bp, synthetic construct
  source 1..75: mol_type = other DNA
tcaatgcgggggtacatgtctgtgtcgataaaccgctggcagaaaatctgcgcgatgctgaacggctggtggaac

SEQ ID NO: 95199 - DNA, 75 bp, synthetic construct
  source 1..75: mol_type = other DNA
gtgaatctggcaccggaaaatcaaccagcatgagaaatatcaatccagaggaagcaatacttataaaaccaatag

SEQ ID NO: 95200 - DNA, 75 bp, synthetic construct
  source 1..75: mol_type = other DNA
attgacttcttcgttgctcctgaagtcctgatggaaggcgcgcaacaacggaaagtcattcataacgggaaatga

SEQ ID NO: 95201 - DNA, 75 bp, synthetic construct
  source 1..75: mol_type = other DNA
cgtggtaaaaaaagcgggcgcagtaagctgttaatttctgcactggttgcgggtgggttgttgtcgtcgtttggg

SEQ ID NO: 95202 - DNA, 75 bp, synthetic construct
  source 1..75: mol_type = other DNA
tcagcatggtgggtaaatggctggtatcccacagcaagtatcagcgatttgctggttgttgtgatgaagaaagcc

SEQ ID NO: 95203 - DNA, 75 bp, synthetic construct
  source 1..75: mol_type = other DNA
taacaggagtttttgtttgccaaaaatggaaaggagaacccggtggcgtgattgcagaatgtcatgttaactgcc

SEQ ID NO: 95204 - DNA, 75 bp, synthetic construct
  source 1..75: mol_type = other DNA
tcgcgctgggtgcatcttcagtagcaactggcggtcgttcgatggctcttggtcgttacgcaaagacgaatggtt

SEQ ID NO: 95205 - DNA, 75 bp, synthetic construct
  source 1..75: mol_type = other DNA
aaaattcagaagattctttggtttgtaccttatttgattcggtttctttttctcatttggttcgtgacggtggga

SEQ ID NO: 95206 - DNA, 75 bp, synthetic construct
  source 1..75: mol_type = other DNA
cgctggggcgttatatgctgacggtccgggctgtaaatgcccgggggcagcagggtgatccggcgtcggtatcgt

SEQ ID NO: 95207 - DNA, 75 bp, synthetic construct
  source 1..75: mol_type = other DNA
agccgcaagaatccgtttggcgatatcaaatcggatggcacggtgaaaacagctctcgaaaaccttggtttggga

SEQ ID NO: 95208 - DNA, 75 bp, synthetic construct
  source 1..75: mol_type = other DNA
gatggttgtcgtggcgtgaatatccagccacaggacagtgcgcacgcgtttatggagatgtcagcagctggggca

SEQ ID NO: 95209 - DNA, 75 bp, synthetic construct
  source 1..75: mol_type = other DNA
atgagcaaaatatcagatttgaattattctcaacacattacattagccgacaattttaaacaaaaaaatgaagtc

SEQ ID NO: 95210 - DNA, 75 bp, synthetic construct
  source 1..75: mol_type = other DNA
tgcggttttatactggcgataacacagagcgcggcataatctatgctggtcctaacactgattcgcttggcgaag

SEQ ID NO: 95211 - DNA, 75 bp, synthetic construct
  source 1..75: mol_type = other DNA
cgacctcggtcaatgatgtgctgcgccgtcttccgggcgtcgatatcacccaaaacggcggttcaggtcagctct

SEQ ID NO: 95212 - DNA, 75 bp, synthetic construct
  source 1..75: mol_type = other DNA
gcccacttgattttgatgattattctgtatcttctaatccaaatggatattttgtcgggaatcagagaacaacag

SEQ ID NO: 95213 - DNA, 75 bp, synthetic construct
  source 1..75: mol_type = other DNA
aggttacatgaaggcgtttgttcaatatgggctacgcaatctgaaagaaggtgctaagttccgtagagggattga

SEQ ID NO: 95214 - DNA, 75 bp, synthetic construct
  source 1..75: mol_type = other DNA
ttttgatgcatcacgtgttgccagaacatcaacggaaacacgtgcgcgaaatattgcatttaactttatcgtgag

SEQ ID NO: 95215 - DNA, 75 bp, synthetic construct
  source 1..75: mol_type = other DNA
aattaaagttctcttatacaattggttatgagggcgataccagggaagactcagagtttactaatatgtttgata

SEQ ID NO: 95216 - DNA, 75 bp, synthetic construct
  source 1..75: mol_type = other DNA
tggtgaagagttgctgcaactggactatctggccaacatcttccgcgtcggtggcgttgatcaactgactgacta

SEQ ID NO: 95217 - DNA, 75 bp, synthetic construct
  source 1..75: mol_type = other DNA
gttcacacggaccgtggaggccagtactgttcagcagattatcaggcgcaactgaagcggcataatctgcgtgga

SEQ ID NO: 95218 - DNA, 75 bp, synthetic construct
  source 1..75: mol_type = other DNA
cggtgaatttattcgtggatgggatgatgggcgtggggtggattcctctcgtggtttgttgacatctcaagacca

SEQ ID NO: 95219 - DNA, 75 bp, synthetic construct
  source 1..75: mol_type = other DNA
ggttgaaggtggtgcgcgcatgaacgtggcaaaccctgacgacagctgggaagaccagaaacgtgacctgctggc

SEQ ID NO: 95220 - DNA, 75 bp, synthetic construct
  source 1..75: mol_type = other DNA
ggctctcgaaaaccttggtttgggagaaggctctgcattaccggttggggtgcctgttccgtggccttcagccac

SEQ ID NO: 95221 - DNA, 75 bp, synthetic construct
  source 1..75: mol_type = other DNA
gacgaagaccgcagcgtgcagacgcgtctgggtcgtgaagacagcgagtatctcgcccgctcggtgccgttctac

SEQ ID NO: 95222 - DNA, 75 bp, synthetic construct
  source 1..75: mol_type = other DNA
atggttataaaaaaggttggtttgggagaaggttcggcattacccgttggcgtgcctgttccgtggccttccgcc

SEQ ID NO: 95223 - DNA, 75 bp, synthetic construct
  source 1..75: mol_type = other DNA
ggcattgtttactatcaggagattcagccgcttacattcgattgccacgccatgtacctgccagaggttcgtgga

SEQ ID NO: 95224 - DNA, 75 bp, synthetic construct
  source 1..75: mol_type = other DNA
atgccgggacggcaatgcgtgccagcctggctcgtctggcatcaccgccaaaggcggcagcagaagcgctgaaag

SEQ ID NO: 95225 - DNA, 75 bp, synthetic construct
  source 1..75: mol_type = other DNA
aatggcgtctggcaccagaacgtgttcgcttattatctctccatctcctgtaaccattgcgatgaccccgcatgt

SEQ ID NO: 95226 - DNA, 75 bp, synthetic construct
  source 1..75: mol_type = other DNA
gatttgaagttttatggtgatgtggagtttaatatagatgctgccagtaaacccggtcagttagtaatgataagt

SEQ ID NO: 95227 - DNA, 75 bp, synthetic construct
  source 1..75: mol_type = other DNA
ctgcccgcatgatgctctctattgacagggtccggatttgcgaagctctgctcaataaccgccagttgcagtcca

SEQ ID NO: 95228 - DNA, 75 bp, synthetic construct
  source 1..75: mol_type = other DNA
cattgaagccgcctccctgcaatcagcgggcggaaaagtagctgtttccggcaaggatattcaggtcactattcc

SEQ ID NO: 95229 - DNA, 75 bp, synthetic construct
  source 1..75: mol_type = other DNA
tcagagtgaccgcgataccctgaaaaacctcggcgatcgcctgaaaatgctggtcttcggtcaggataaagccat

SEQ ID NO: 95230 - DNA, 75 bp, synthetic construct
  source 1..75: mol_type = other DNA
catactcgcaaaggtgaaagaggcactatcaacatagtgaacggaacgccaatccacgaacgttcccggcatatc

SEQ ID NO: 95231 - DNA, 75 bp, synthetic construct
  source 1..75: mol_type = other DNA
tgcttcaggcatcaagagaacgcaacaagcacaactcctacgcttacacaaacaaccccaccagctacgaagtcc

SEQ ID NO: 95232 - DNA, 75 bp, synthetic construct
  source 1..75: mol_type = other DNA
aaacaatcagtggctggtttaggtgccgcagcctcagaaacgcgtccgcgtaatattgcatttaactatatcgtg

SEQ ID NO: 95233 - DNA, 75 bp, synthetic construct
  source 1..75: mol_type = other DNA
cgatcctgaaatgctggcgaaagctaaagcagcggctgctgcactcgcaaaatctgatcctgatcgttacggcaa

SEQ ID NO: 95234 - DNA, 75 bp, synthetic construct
  source 1..75: mol_type = other DNA
aggggcaaacatcagataacctcaatgtctgatattgtcagggacctgtcacgcctgggctggacggatgaacgc

SEQ ID NO: 95235 - DNA, 75 bp, synthetic construct
  source 1..75: mol_type = other DNA
tatccggaactggcaaaagtttatccgacaaataaattgccagatttacgcggcgaattcattcgtgggtgggat

SEQ ID NO: 95236 - DNA, 75 bp, synthetic construct
  source 1..75: mol_type = other DNA
cgaaccacggccactggaaaattgccgtatggcagccggaactctacacgctggactggctggctgactttctcg

SEQ ID NO: 95237 - DNA, 75 bp, synthetic construct
  source 1..75: mol_type = other DNA
ttttcaggtgcaacgtctggtgattactccggcagatgacagcactatcccgcccacaccggcggtgtatgaagg

SEQ ID NO: 95238 - DNA, 75 bp, synthetic construct
  source 1..75: mol_type = other DNA
atgagaccatcaattatctttgcaacggctgaatatgtaaagcgtctgcgtgaagagtgcctgcgggagaacaaa

SEQ ID NO: 95239 - DNA, 75 bp, synthetic construct
  source 1..75: mol_type = other DNA
tcagaaccctggagcagggagaaccagctgagcctgtgcattcacaggaaagcagttcagccgtcacgacagata

SEQ ID NO: 95240 - DNA, 75 bp, synthetic construct
  source 1..75: mol_type = other DNA
ctttcgaacaatggcctgtagttcattggtcgaatcaggtttgtggtctcgtgatgctgttgaacgtcagatgag

SEQ ID NO: 95241 - DNA, 75 bp, synthetic construct
  source 1..75: mol_type = other DNA
tttatcttcttatcggttatagcaatatggcaattcagacggatgaaatcatttaaagatgatgtagggatgtga

SEQ ID NO: 95242 - DNA, 75 bp, synthetic construct
  source 1..75: mol_type = other DNA
tgcgccaactctggtaatgacatttgcatacaacttcaataattttggtgcaatttatcttctgactgaaggtgg

SEQ ID NO: 95243 - DNA, 75 bp, synthetic construct
  source 1..75: mol_type = other DNA
gtgagcagaagcgggtgcgtatccctgccatgaaagtcagcgagtgggggcatctgctccgcgcgcttgaaattg

SEQ ID NO: 95244 - DNA, 75 bp, synthetic construct
  source 1..75: mol_type = other DNA
ctggttactgtggctgcacggctcgatgagactgtccgacaagccctggtcgtagatctcttggaaatttctgcc

SEQ ID NO: 95245 - DNA, 75 bp, synthetic construct
  source 1..75: mol_type = other DNA
ggttggtaaagctgatggtattcttaaagttgataaatacatagctatgcccggtcagaacataacactacatat

SEQ ID NO: 95246 - DNA, 75 bp, synthetic construct
  source 1..75: mol_type = other DNA
aggtcgtactggcacgccttcgggaacagtgtggagacagcgccacgttttttgacgggcttccggcatttgttg

SEQ ID NO: 95247 - DNA, 75 bp, synthetic construct
  source 1..75: mol_type = other DNA
ttacagcgcatcaatgaagtgatggattttgctgccaacagtggactgattgacatcaacaccgccgcgaacgtt

SEQ ID NO: 95248 - DNA, 75 bp, synthetic construct
  source 1..75: mol_type = other DNA
gggctatatgcaagcgttcgtgaagtatgggctgcgcaacctaaaggaaggtgcgaaatttctcaagaatattga

SEQ ID NO: 95249 - DNA, 75 bp, synthetic construct
  source 1..75: mol_type = other DNA
aaacgattcttataaggagaaaagcgtccagaaatacttataaaactcgggtaaatcaactggagacaataaaag

SEQ ID NO: 95250 - DNA, 75 bp, synthetic construct
  source 1..75: mol_type = other DNA
ttctggcacgggacaaaaagggcaaactagtccagtgggaaaataaaggtggcgatgaattctctttgcaggatg

SEQ ID NO: 95251 - DNA, 75 bp, synthetic construct
  source 1..75: mol_type = other DNA
ctggccctcggcgtctatcccgacgtctcccttgctgaggccagaatcaaacgcgacgatgcccgaaaaatcatc

SEQ ID NO: 95252 - DNA, 75 bp, synthetic construct
  source 1..75: mol_type = other DNA
cctttggcacttcccgcgaaaggcggcgaagcgatggtgagtcgtgcagccactgtgccgcccgttcaccggatt

SEQ ID NO: 95253 - DNA, 75 bp, synthetic construct
  source 1..75: mol_type = other DNA
attgaaatccgtggctgcctgacccagatgggcgacattccgctggatatcaaagactggtcgcaggtcgagcaa

SEQ ID NO: 95254 - DNA, 75 bp, synthetic construct
  source 1..75: mol_type = other DNA
cttttatgaacaggttaagcgtgaaaatccgccagtcgaaaccggagcatggaaagacgctgttgactgggtatt

SEQ ID NO: 95255 - DNA, 75 bp, synthetic construct
  source 1..75: mol_type = other DNA
atgcactcaataaaaaaagtaaccatgctcttggggtgcctcgccctcacctgctcgatcgcatttcaggcaagt

SEQ ID NO: 95256 - DNA, 75 bp, synthetic construct
  source 1..75: mol_type = other DNA
gcataaaccatgagcaaatagctatggtgttcagtgaaaacgaatctcgtgatgctgaattcatcgccgcagcca

SEQ ID NO: 95257 - DNA, 75 bp, synthetic construct
  source 1..75: mol_type = other DNA
gggtaaacccaaactcacgctgcgtcgcattggtgcggggatcctcgatgcgctgatcggcaccatgtcaccgct

SEQ ID NO: 95258 - DNA, 75 bp, synthetic construct
  source 1..75: mol_type = other DNA
agcacccatttgaacatatcaatagattggctacttactggtaaaggggaagctgttggggtagagaaagcacag

SEQ ID NO: 95259 - DNA, 75 bp, synthetic construct
  source 1..75: mol_type = other DNA
caaacggtaatggcatacaaagtttctgaagtcatcgctgcaatccgcgccgctggcattcgcatcaaaggagag

SEQ ID NO: 95260 - DNA, 75 bp, synthetic construct
  source 1..75: mol_type = other DNA
atgccatttgctcgttatttctgcattttcataaacgttggtttgggagaaggctcagcattacccgttggtgtg

SEQ ID NO: 95261 - DNA, 75 bp, synthetic construct
  source 1..75: mol_type = other DNA
ccaacgccggatgagaccagccgcttcccaagtcatcctaaaaaagaactgcctgaaagcgatcatagtctggat

SEQ ID NO: 95262 - DNA, 75 bp, synthetic construct
  source 1..75: mol_type = other DNA
cccgtggccatctgccactcctccacaaggctatctgttgatgaacggccagtcgttttcctgttcccggtatcc

SEQ ID NO: 95263 - DNA, 75 bp, synthetic construct
  source 1..75: mol_type = other DNA
gaagataaatataaagatttcaagacgttaaatagagccctcataaaaccggcagtggcggaactgaatcaaaaa

SEQ ID NO: 95264 - DNA, 75 bp, synthetic construct
  source 1..75: mol_type = other DNA
ggcgttccagtatgtagcgccatatgacgaccgtaacctattctaccagcgtcacgagcttctccctggtgttag

SEQ ID NO: 95265 - DNA, 75 bp, synthetic construct
  source 1..75: mol_type = other DNA
tgatccgcgagcttgggatgtggcaagcctgatggattttgctgtgccggtggtggcgtgtctgctggtctggct

SEQ ID NO: 95266 - DNA, 75 bp, synthetic construct
  source 1..75: mol_type = other DNA
accgtttgatgccatcgtttctaacccgccgtattcggtgaaatggattggcagcgatgacccgacgctgattaa

SEQ ID NO: 95267 - DNA, 75 bp, synthetic construct
  source 1..75: mol_type = other DNA
tattcgtatcgacaagccagtgaggcgatgaatgtcggttctaccacgcttgagagctgggtacgtcagctcagg

SEQ ID NO: 95268 - DNA, 75 bp, synthetic construct
  source 1..75: mol_type = other DNA
caacagccgcaacagccgcaacagccgcaacagccgcaacagccgcaacagccggtgtctcctgccatcaacgat

SEQ ID NO: 95269 - DNA, 75 bp, synthetic construct
  source 1..75: mol_type = other DNA
atgagtatggttgaaactgccccgagtaaaattcaggttcgtaatttgaacttctactacggcaaattccatgcc

SEQ ID NO: 95270 - DNA, 75 bp, synthetic construct
  source 1..75: mol_type = other DNA
tcagtggtacaaaggatatgcagacgtaattgataaactagtaacaaagtgctggcaggaagaagcatatgctga

SEQ ID NO: 95271 - DNA, 75 bp, synthetic construct
  source 1..75: mol_type = other DNA
gtacctcaagcgtctggtggtcggtggcttcgagcgtgtattcgaaatcaaccgtaacttccgtaacgaaggtat

SEQ ID NO: 95272 - DNA, 75 bp, synthetic construct
  source 1..75: mol_type = other DNA
atatttggtcatattgatacggtgtcacccaaagataagaaattgataaaaatccttaaggatgaaattaggacc

SEQ ID NO: 95273 - DNA, 75 bp, synthetic construct
  source 1..75: mol_type = other DNA
cagagcattgaccgtaaatggtggagccactcagggaaccattcaggcagtgattagcatcacctatacctacag

SEQ ID NO: 95274 - DNA, 75 bp, synthetic construct
  source 1..75: mol_type = other DNA
ggagaatggtattaccgaaaaatcccgtgaaatggggctcagttggaccgcgatcggactggcctgctcgctttg

SEQ ID NO: 95275 - DNA, 75 bp, synthetic construct
  source 1..75: mol_type = other DNA
cgtgcgaaaacctccaaccgcagcgaaaacccgctgctgcaggatgtgaacaaaggctggttgcagaaaatccgt

SEQ ID NO: 95276 - DNA, 75 bp, synthetic construct
  source 1..75: mol_type = other DNA
gatctatgcgctgattgttgcaggaatggtggtgttgtttttacgtcttccttcttacctgaagaggatcagggt

SEQ ID NO: 95277 - DNA, 75 bp, synthetic construct
  source 1..75: mol_type = other DNA
atcgttattgataaacagcctgatggaacccggtcgccaaaccttgccgactcggtgatgatcaactatgcccca

SEQ ID NO: 95278 - DNA, 75 bp, synthetic construct
  source 1..75: mol_type = other DNA
tgatgctcgggacgtacaggaacatcagcccctgccgcactcccgtctggtgtatgttgtttctgaaacaaaagc

SEQ ID NO: 95279 - DNA, 75 bp, synthetic construct
  source 1..75: mol_type = other DNA
acgtcatcgccgttttgtggttcaggtaacgggctatggcagccgtggcgaacgctggattattgatcgttacaa

SEQ ID NO: 95280 - DNA, 75 bp, synthetic construct
  source 1..75: mol_type = other DNA
gatgcatacaacagggttaagtggtctgaatgaagggctggctctgattgtggcgctgacccggcatcactggtc

SEQ ID NO: 95281 - DNA, 75 bp, synthetic construct
  source 1..75: mol_type = other DNA
actgattggtctttttaccgggaactgggcttacggggcgatagccggttgtacgttcttcattgcgcgtgaaca

SEQ ID NO: 95282 - DNA, 75 bp, synthetic construct
  source 1..75: mol_type = other DNA
caccattgataacagcggctttaccacgcagcttgagcttgaggcaaaaatcccggaatggatagcggaaacaga

SEQ ID NO: 95283 - DNA, 75 bp, synthetic construct
  source 1..75: mol_type = other DNA
cggtcatgagttctacgaagcggagctgaaatatctggtcgaccacgaatgggtccgccgcgccgacgatgccct

SEQ ID NO: 95284 - DNA, 75 bp, synthetic construct
  source 1..75: mol_type = other DNA
gtggtggtggcgcaggaacttgacctgaactacagcgcatctgcggaaggcgtcctgatcccgtccgactgggta

SEQ ID NO: 95285 - DNA, 75 bp, synthetic construct
  source 1..75: mol_type = other DNA
atggatataacaccttttcttcatgcgctttgtgctgtggctgcgcaggtaatgattggtctttttgccggaaac

SEQ ID NO: 95286 - DNA, 75 bp, synthetic construct
  source 1..75: mol_type = other DNA
cgcaggttacaacctggagtcagtgtacgcgtttttgcgttcccgcctgtcgattccactcattaccggcctcga

SEQ ID NO: 95287 - DNA, 75 bp, synthetic construct
  source 1..75: mol_type = other DNA
aactgtatgggctgctgataatgcaccggtagcggcacaacagcaaactcagcaagttcagcaaacccagaaaac

SEQ ID NO: 95288 - DNA, 75 bp, synthetic construct
  source 1..75: mol_type = other DNA
cgaaactggtcggtgaaatggtcagggcagagatggaacggcgcgcccgtgccggacgtggcagtttttacgata

SEQ ID NO: 95289 - DNA, 75 bp, synthetic construct
  source 1..75: mol_type = other DNA
cactggacgcacaggccgcagacctgtggcgcgatgtgagctgggccatctctgacattctggggcgaccacgaa

SEQ ID NO: 95290 - DNA, 75 bp, synthetic construct
  source 1..75: mol_type = other DNA
accacgtcgcgcctgatgcacgcggcaaccgaagccgtggcacacgtcaccggtgagctgcgcaactggcagacg

SEQ ID NO: 95291 - DNA, 75 bp, synthetic construct
  source 1..75: mol_type = other DNA
atgccgggacggcaatgcgtgccagcctggctcgtctggcatcaccgccaaaggcggcggcagaagctctgaaag

SEQ ID NO: 95292 - DNA, 75 bp, synthetic construct
  source 1..75: mol_type = other DNA
catatgaaacgcagaagaaggttgctatgcaggctgatattgagcagttagtgaagatttctcagaaatacgcaa

SEQ ID NO: 95293 - DNA, 75 bp, synthetic construct
  source 1..75: mol_type = other DNA
atgaccatctataccttatctcacggaccgctaaagctggatgtctctgaccagggcggtgtcatcgaaggtttc

SEQ ID NO: 95294 - DNA, 75 bp, synthetic construct
  source 1..75: mol_type = other DNA
aacacctctttagtacggcgcctataagaccgatgcaaaaaagagatgctaatgtttttaaagaatcactattac

SEQ ID NO: 95295 - DNA, 75 bp, synthetic construct
  source 1..75: mol_type = other DNA
cacaaaggcggagttatcccgcgtagagatagtcgagctgctcagtcaggagtcggaaaaatttcacaatatcgg

SEQ ID NO: 95296 - DNA, 75 bp, synthetic construct
  source 1..75: mol_type = other DNA
tctctttgcgatgcgatccgctttcgtgatgaagagataatgcatctcaaagcaaaaattgcagagacagaagat

SEQ ID NO: 95297 - DNA, 75 bp, synthetic construct
  source 1..75: mol_type = other DNA
gtagccagttgctgctttcgacatttactccgcacacgaaaggcaaagtgctggatgtcggctgcggtgcaggcg

SEQ ID NO: 95298 - DNA, 75 bp, synthetic construct
  source 1..75: mol_type = other DNA
atgctgggcgcaatcaccacggtaaaaagcggcaatctgttattcatcatgccaggtggtggcgtgaacgcacag

SEQ ID NO: 95299 - DNA, 75 bp, synthetic construct
  source 1..75: mol_type = other DNA
gagctctggcaagacgaaaagaattacgcctgacacaacgagaagtcgcacgtctcgctggggttgctcacgtca

SEQ ID NO: 95300 - DNA, 75 bp, synthetic construct
  source 1..75: mol_type = other DNA
gcgtcatggccgaaatagcctgccgggccctttcccctgcagtgaacgatcctggaaccgccattgatgtcattg

SEQ ID NO: 95301 - DNA, 75 bp, synthetic construct
  source 1..75: mol_type = other DNA
acgtctgaacggtgtggcagttgaagaactgtccagcaagttcactgtagagccgtctgtgcagcagacgctgga

SEQ ID NO: 95302 - DNA, 75 bp, synthetic construct
  source 1..75: mol_type = other DNA
tagaagtttttcctagaccattccccttgccaattccatggcccaaaagccctgcacagcagcaagcagatgata

SEQ ID NO: 95303 - DNA, 75 bp, synthetic construct
  source 1..75: mol_type = other DNA
tcgccaacgcgtaaagccaatgccatcgagagaggaattgcttaagagaaattcttttccatcagtgaatcaaaa

SEQ ID NO: 95304 - DNA, 75 bp, synthetic construct
  source 1..75: mol_type = other DNA
agaaatatctcaaaggcttttatatatatgactgcacctatggttacgagcatggaaaagtaggtctttcattga

SEQ ID NO: 95305 - DNA, 75 bp, synthetic construct
  source 1..75: mol_type = other DNA
cgtgaacggcgaaagcgtcaacgtgcaccgcttccgtcttgcggtgtatgccgccacccgcgccctgatactgga

SEQ ID NO: 95306 - DNA, 75 bp, synthetic construct
  source 1..75: mol_type = other DNA
gctgatgttagcacggcgcaggtcgcggagctggtggtcattaaggatggttcagaggcggacggttcgacggcg

SEQ ID NO: 95307 - DNA, 75 bp, synthetic construct
  source 1..75: mol_type = other DNA
gccaggtggtggcgtgaacgcacagggccagccgttgccctcgttcgccattacacgcagcagcggcgatcgcca

SEQ ID NO: 95308 - DNA, 75 bp, synthetic construct
  source 1..75: mol_type = other DNA
atgactaaacaacgtcttatccagctcattcatattgcccgtaatgaactgggtatggatgaagacacctaccgc

SEQ ID NO: 95309 - DNA, 75 bp, synthetic construct
  source 1..75: mol_type = other DNA
ctgccgttatcggttttcaatccccaggactaccatccactgctgattaccgtttccggaaaaaacgttaactga

SEQ ID NO: 95310 - DNA, 75 bp, synthetic construct
  source 1..75: mol_type = other DNA
gaaggggcaagggaaaaagatgtcagtttttcagcaacagcttcaatgcttcttgaactggggcttcgtgtatat

SEQ ID NO: 95311 - DNA, 75 bp, synthetic construct
  source 1..75: mol_type = other DNA
atgacaacagtaatactgaatcagcccgacgaaccgcaggacataccgggcgtggtgattcccgcaccggaaacg

SEQ ID NO: 95312 - DNA, 75 bp, synthetic construct
  source 1..75: mol_type = other DNA
aagtcatcacgatggcggttccgtgcggtggcattggcgaccgtgacggctggcggttgttgaaagaccacggcc

SEQ ID NO: 95313 - DNA, 75 bp, synthetic construct
  source 1..75: mol_type = other DNA
aactggcaatgcatggccagacccacgttaacaaaatctacgacccggccgcaggttccggttcgctgttgttgc

SEQ ID NO: 95314 - DNA, 75 bp, synthetic construct
  source 1..75: mol_type = other DNA
atgacgctcgcgcagtttgccatgattttctggcacgacctggcagcaccgatcctggcgggaattattaccgca

SEQ ID NO: 95315 - DNA, 75 bp, synthetic construct
  source 1..75: mol_type = other DNA
tggggcgcaactaactggacgaaaacaggtttcgttgctcattgtaactatggctttgaaggtggagccttctac

SEQ ID NO: 95316 - DNA, 75 bp, synthetic construct
  source 1..75: mol_type = other DNA
aatgttgactacgccgccgtgacgggcttacttgttcaggtcgcccgtgaaacagatgatcgcgttaccgcgctg

SEQ ID NO: 95317 - DNA, 75 bp, synthetic construct
  source 1..75: mol_type = other DNA
atggctaaggtaaacctgtatatcagcaatgatgcttatgaaaaaataaatgctattattgaaaaacgccgacag

SEQ ID NO: 95318 - DNA, 75 bp, synthetic construct
  source 1..75: mol_type = other DNA
cgcaaggtgctgctactggattgcagatgtatgaggcatacaacaatggttatccgacgacttacgggaatgtac

SEQ ID NO: 95319 - DNA, 75 bp, synthetic construct
  source 1..75: mol_type = other DNA
gtcgatggagagaaatatgcgtttgatacacataacccatcagcaatagtcacaaccaatattgagtttcaatat

SEQ ID NO: 95320 - DNA, 75 bp, synthetic construct
  source 1..75: mol_type = other DNA
aaaggatacggtaagggcatgccgtgaacggtggcgcaacctgataccggagagttacggcgaacaggttcaccg

SEQ ID NO: 95321 - DNA, 75 bp, synthetic construct
  source 1..75: mol_type = other DNA
ccggttgcttaacgtgccgatggagaagtccacgcagtttcacgaatacagcacaggaaaggcgcacgcagacgc

SEQ ID NO: 95322 - DNA, 75 bp, synthetic construct
  source 1..75: mol_type = other DNA
aaccgtatcgcccgtgacgcgcactatctttaccggtatgaccgtcacggcaggctgacagagaaaaccgacctc

SEQ ID NO: 95323 - DNA, 75 bp, synthetic construct
  source 1..75: mol_type = other DNA
tttaaatcttgagcgaacagtagaattagccgctgggtcattgcagaaaaatcagaacggcgcggatattcctgg

SEQ ID NO: 95324 - DNA, 75 bp, synthetic construct
  source 1..75: mol_type = other DNA
atacagggctatcctggctgactggatgcagttaagcggaaaccatgaggaatggcagttaagcacaacaacggg

SEQ ID NO: 95325 - DNA, 75 bp, synthetic construct
  source 1..75: mol_type = other DNA
tgatgcgggtctcggcctctcaagccgcgcagcgggaacaagccccgctgcgccatgcaaccgcctacgagcaga

SEQ ID NO: 95326 - DNA, 75 bp, synthetic construct
  source 1..75: mol_type = other DNA
atattttgtttggcctgtactgcacacttatatatatataccttataacaaaaaacaacgaagggtattatttcc

SEQ ID NO: 95327 - DNA, 75 bp, synthetic construct
  source 1..75: mol_type = other DNA
gccatcgtaatgatgggtgatgacctgcaggaaagcgatcgcctgtatcgctttcaggtaccgggacgaccggag

SEQ ID NO: 95328 - DNA, 75 bp, synthetic construct
  source 1..75: mol_type = other DNA
gtcatgcaggcggtttacaacctggggaaaagggctgcagaagattttatgcaacaacagtcccgtgatggcggg

SEQ ID NO: 95329 - DNA, 75 bp, synthetic construct
  source 1..75: mol_type = other DNA
cgtcgtggtgctgacggtaagctgggggttgtggcggatattggtggttcaggtatggcgatgtttgccccgcag

SEQ ID NO: 95330 - DNA, 75 bp, synthetic construct
  source 1..75: mol_type = other DNA
ttgcaacagtgccgcattgggtatatcagggtcagcaccttcgaccagaacccggaacggcaactggaaggcgtc

SEQ ID NO: 95331 - DNA, 75 bp, synthetic construct
  source 1..75: mol_type = other DNA
gtgctgtctaaacataaaacggataccaaagttcagtttattgatgccagcgaactgttcaaaaaagagactaac

SEQ ID NO: 95332 - DNA, 75 bp, synthetic construct
  source 1..75: mol_type = other DNA
aatgctgcaactgctacaaaacttcagactgcaagaaaaatatccggtgttccatttgatggttctactgatatc

SEQ ID NO: 95333 - DNA, 75 bp, synthetic construct
  source 1..75: mol_type = other DNA
acagaactgcacaatccagctgaaagcaaaacgtaacagcaccacggtggtggtgaacacggtggcatctgaaaa

SEQ ID NO: 95334 - DNA, 75 bp, synthetic construct
  source 1..75: mol_type = other DNA
ggacactaaccacgaaccgacgatcaacctctatcgccgtgcgcgtgatctgaaaggcattaaaaagatcctgat

SEQ ID NO: 95335 - DNA, 75 bp, synthetic construct
  source 1..75: mol_type = other DNA
aacagccacgcggaataaaacacaaagacacagaggtaattattttcgcgggtagtgatgcctggtcgcacgcga

SEQ ID NO: 95336 - DNA, 75 bp, synthetic construct
  source 1..75: mol_type = other DNA
cgctggcaatggctttagggctggcttgcgcttcttcgtgggccgctgaactggcgaagctcttacacttgacca

SEQ ID NO: 95337 - DNA, 75 bp, synthetic construct
  source 1..75: mol_type = other DNA
ggatagctgcgacatcattttggttactggcgacgcgtatgtcgatcacccaagcttcgggatggcgatttgcgg

SEQ ID NO: 95338 - DNA, 75 bp, synthetic construct
  source 1..75: mol_type = other DNA
tgatccgcgtgcgtgggatgtggcaagcctgatggattttgctgtgccggtggtggcgtgtctgctggtctggct

SEQ ID NO: 95339 - DNA, 75 bp, synthetic construct
  source 1..75: mol_type = other DNA
atggatataacacctttccttcacgcgctttgtgctgtggctgcgcaggtactggttggtctttttaccgggaac

SEQ ID NO: 95340 - DNA, 75 bp, synthetic construct
  source 1..75: mol_type = other DNA
tgagcatggactgacagaaaaaagccgcgaaatggggctgagctggacctctatcggtctggcctgttcgctttg

SEQ ID NO: 95341 - DNA, 75 bp, synthetic construct
  source 1..75: mol_type = other DNA
accagcaacagctggagcagttgaggcgggatagtgagcagaaagggacatataacacggatgactacagaaagg

SEQ ID NO: 95342 - DNA, 75 bp, synthetic construct
  source 1..75: mol_type = other DNA
attcaggaaattccgggggatatttttgcagcggcggcaacttatgacggtgaagttattaccatttatccggac

SEQ ID NO: 95343 - DNA, 75 bp, synthetic construct
  source 1..75: mol_type = other DNA
attactccccaaaatctccaaaattgagtgatgacgcaccggcgacaggctctggtggtttaacgattacggatg

SEQ ID NO: 95344 - DNA, 75 bp, synthetic construct
  source 1..75: mol_type = other DNA
ctcacttcattgctgatgctgtggcgcagtctgcaaatggcgtctttgtgtctcttcctgacgtcgaggatgtgg

SEQ ID NO: 95345 - DNA, 75 bp, synthetic construct
  source 1..75: mol_type = other DNA
gttgtgggaactgatagataacagccagcttgcagatgagatggcggagatgaagaccagcatcacggaaacccg

SEQ ID NO: 95346 - DNA, 75 bp, synthetic construct
  source 1..75: mol_type = other DNA
ccagcaacaggagcttgcccgtctgtgtgggattaagcctgacaactggagccacaattatgtgagctactggcg

SEQ ID NO: 95347 - DNA, 75 bp, synthetic construct
  source 1..75: mol_type = other DNA
atgacggtcagaaggagggggaagaatttaaccgccagctgtcgctgacggggcattatgccggagtcactgccg

SEQ ID NO: 95348 - DNA, 75 bp, synthetic construct
  source 1..75: mol_type = other DNA
cgggctgggtggcggcactgacagcggtgacgatgacaccattctggttgtgctgatcacaccgcacgtaatctg

SEQ ID NO: 95349 - DNA, 75 bp, synthetic construct
  source 1..75: mol_type = other DNA
gcaatgatgcttatgaaaaaataaatgctattattgaaaaacgccgacaggagggagcaagagaaaaagacgtca

SEQ ID NO: 95350 - DNA, 75 bp, synthetic construct
  source 1..75: mol_type = other DNA
gtttttcagcaacagcttcaatgcttcttgaactggggcttcgtgtatatgaggctcagatggagcgtaaagagt

SEQ ID NO: 95351 - DNA, 75 bp, synthetic construct
  source 1..75: mol_type = other DNA
cgctttgtgccgtagcggtgcaggtactggctggtctttttaccggaaactgggcttacggggcgatagccggtt

SEQ ID NO: 95352 - DNA, 75 bp, synthetic construct
  source 1..75: mol_type = other DNA
gcgaatcagctcttcggtattaagtttgtcgaacgttttgatattcctgtctaccatcctgacgttcgtgtgtgg

SEQ ID NO: 95353 - DNA, 75 bp, synthetic construct
  source 1..75: mol_type = other DNA
acgctttggctgcgtgtacagcctgaaggccagcctttccggtgtgccggatacataccggtatcatctgtctca

SEQ ID NO: 95354 - DNA, 75 bp, synthetic construct
  source 1..75: mol_type = other DNA
atgaaatcattaactgcagtgcgtaaaaaaagtaagcgtaaactgaccgccgtatgtagccatcagacgagaatt

SEQ ID NO: 95355 - DNA, 75 bp, synthetic construct
  source 1..75: mol_type = other DNA
gtgttgaatgaaggtgtattctggaccgcgaatcagctcttcggtattaagtttgtcgaacgttttgatattcct

SEQ ID NO: 95356 - DNA, 75 bp, synthetic construct
  source 1..75: mol_type = other DNA
cgtaaccggttatcgtcgcaatataacttaagtaatctggagccgaatattcagatctggaacgtggatttgcgc

SEQ ID NO: 95357 - DNA, 75 bp, synthetic construct
  source 1..75: mol_type = other DNA
gggcagttccggtggttcatccggcagttccctgagtggggatgccagcaatacgcagacaaccgccgttgatat

SEQ ID NO: 95358 - DNA, 75 bp, synthetic construct
  source 1..75: mol_type = other DNA
gcgtgatgctaaaccgcagggtggcattggtctgctgacggtgaaactggatgatccgaccggttatggacgtat

SEQ ID NO: 95359 - DNA, 75 bp, synthetic construct
  source 1..75: mol_type = other DNA
aaactcagcatcagagaaacagcagatgcaacgggctacagcactttgcaggtttgccgtattcaggcactttat

SEQ ID NO: 95360 - DNA, 75 bp, synthetic construct
  source 1..75: mol_type = other DNA
gtgaagccgttctttgtgcgtaccgtggcgatccttggcggcgagtcgagcggtaaatccaccctggtaaacaaa

SEQ ID NO: 95361 - DNA, 75 bp, synthetic construct
  source 1..75: mol_type = other DNA
caacggaccagaagctgggagatcaggaggccaccatccagcagatacaaaaggttcagacggacaccagtaata

SEQ ID NO: 95362 - DNA, 75 bp, synthetic construct
  source 1..75: mol_type = other DNA
cccagaggaataacaaaagttggaaacagcgaactgagacgtctgctttacgaagccgcctggtcttatcgtaca

SEQ ID NO: 95363 - DNA, 75 bp, synthetic construct
  source 1..75: mol_type = other DNA
gccagaattatggtgggctgggcaggggagccgaaaggctcgccggtttccgtatgcgccggtagttccaaccct

SEQ ID NO: 95364 - DNA, 75 bp, synthetic construct
  source 1..75: mol_type = other DNA
gacactttccgcctttatctggagaaacagggctggactcttgtaaaccgaagcgcaattaaaaacatgaccgtc

SEQ ID NO: 95365 - DNA, 75 bp, synthetic construct
  source 1..75: mol_type = other DNA
tggtggtcgcagcctgtgtatttgcagcaaatgcaggagcaaaggaaggtaaaagtggtttttatctgaccggta

SEQ ID NO: 95366 - DNA, 75 bp, synthetic construct
  source 1..75: mol_type = other DNA
aatgatcatcgggacgcaatttctctcgccaggttactgcgggctggagaacttacccctgtctggatccctgac

SEQ ID NO: 95367 - DNA, 75 bp, synthetic construct
  source 1..75: mol_type = other DNA
tcaggtcaccataacgcaatgggcatggagcgagtttaaagatttgttaagtaacagaaaaattgcaggtaagac

SEQ ID NO: 95368 - DNA, 75 bp, synthetic construct
  source 1..75: mol_type = other DNA
gattcttctgataacttcgcatggagccttggtgctggcgtccgctatgacgtaactccagatgtcagtctggac

SEQ ID NO: 95369 - DNA, 75 bp, synthetic construct
  source 1..75: mol_type = other DNA
gcgccaggctaatggcaatgaaccctatatcgaaattatttgcatggattcagaagctgaaatccagaaagcaga

SEQ ID NO: 95370 - DNA, 75 bp, synthetic construct
  source 1..75: mol_type = other DNA
catctcaacagattgcttttcaacactattgtcagagtctggagcagattgaagatcgcatacttcaactcgacc

SEQ ID NO: 95371 - DNA, 75 bp, synthetic construct
  source 1..75: mol_type = other DNA
ttaagacgtaagatgcgaaaagcagccatggacagaaagtatctggcgtcagtccttgcggggagcgggctttcg

SEQ ID NO: 95372 - DNA, 75 bp, synthetic construct
  source 1..75: mol_type = other DNA
ctttctgaaggggaaatcacgctgttgtggtgagcgtattcctatttactatccgctggtcgagataacgagttc

SEQ ID NO: 95373 - DNA, 75 bp, synthetic construct
  source 1..75: mol_type = other DNA
acgcgagcctggcaaacttctacaccgtccacgacctgcgcaatctgaaggccgatcagacccaactctacctgc

SEQ ID NO: 95374 - DNA, 75 bp, synthetic construct
  source 1..75: mol_type = other DNA
ggcgttgtcaccttagaggaggcggtagtgggggcggtatctgggtatctctgtctgtggggactgtactggctt

SEQ ID NO: 95375 - DNA, 75 bp, synthetic construct
  source 1..75: mol_type = other DNA
gcgcactgcgccgggccattgagccgctgggatacctcattcgtgtgtctgagtggtgggagttcggcggagaac

SEQ ID NO: 95376 - DNA, 75 bp, synthetic construct
  source 1..75: mol_type = other DNA
gccgcaggatccgaatgacgaaccagcctctgaactgctcaaacgaattgcgcaggaaaaagctcaactggtgaa

SEQ ID NO: 95377 - DNA, 75 bp, synthetic construct
  source 1..75: mol_type = other DNA
aactggcggcggcgctggtgagcatgaaaattcgcggtgagcacccgaacgagatcgccggggcggcaaccgcgc

SEQ ID NO: 95378 - DNA, 75 bp, synthetic construct
  source 1..75: mol_type = other DNA
aactgattaagccagcgcgggaaaacgtccgtgtccgtaaaccggatggcgcgcatttatccccggaaggggaac

SEQ ID NO: 95379 - DNA, 75 bp, synthetic construct
  source 1..75: mol_type = other DNA
attgtacaccgctcgtggaagaaaagtttacagctaggcagttttctttgggtagttatctgcttttctatcgca

SEQ ID NO: 95380 - DNA, 75 bp, synthetic construct
  source 1..75: mol_type = other DNA
gacggcgtgtactatcaacggtgtctcgtttgacggttctaaaaatattgagctaacggcggcagatttaaatct

SEQ ID NO: 95381 - DNA, 75 bp, synthetic construct
  source 1..75: mol_type = other DNA
aatacggcgtggagcgcggaatatgatgaatggggcaaccagcttaatgaggagaacccgcatcacctgcaccag

SEQ ID NO: 95382 - DNA, 75 bp, synthetic construct
  source 1..75: mol_type = other DNA
acgtcaggttaatggcgataaaccctatctcgaaattatctgcatggattcagaagctgaaattcagaaggcaga

SEQ ID NO: 95383 - DNA, 75 bp, synthetic construct
  source 1..75: mol_type = other DNA
ggaaaattacctgcaggctggtatcaggtcccggtgacaaaagaaaccctgcagaccccggcggggctgtcttca

SEQ ID NO: 95384 - DNA, 75 bp, synthetic construct
  source 1..75: mol_type = other DNA
cattatacactggatacatggcattctccgatgggggatggtggtcgggaagacacacagaacaggctcagtgtg

SEQ ID NO: 95385 - DNA, 75 bp, synthetic construct
  source 1..75: mol_type = other DNA
tcataagagccgttttgccattcgttttatgccgctggacagtgaaaacggacaggtaccggaacgtctggattt

SEQ ID NO: 95386 - DNA, 75 bp, synthetic construct
  source 1..75: mol_type = other DNA
aaataatatccagcgcctctgcggaggaccttaccttattacaattacgtcgttccggattagtcattgctgatt

SEQ ID NO: 95387 - DNA, 75 bp, synthetic construct
  source 1..75: mol_type = other DNA
cacttgctgtggcaggcatgttttcagcccagaccctggctaatgagagcaaaacaggcttttatatgaccggta

SEQ ID NO: 95388 - DNA, 75 bp, synthetic construct
  source 1..75: mol_type = other DNA
tgttcatcggcattctggcactgctgctcgcggtcgctctctggccatccattccctggtttggtaaagccgaca

SEQ ID NO: 95389 - DNA, 75 bp, synthetic construct
  source 1..75: mol_type = other DNA
atgttgttcggtcgcagcagcgagaaaagccgcgagaagatagaaaagaagatcgcacgggcagaaacgcgtata

SEQ ID NO: 95390 - DNA, 75 bp, synthetic construct
  source 1..75: mol_type = other DNA
gaatgctctgtccggacctgcggtctctctggtggtgttttcttcgggataccgcccacggcgcggggatcgcgt

SEQ ID NO: 95391 - DNA, 75 bp, synthetic construct
  source 1..75: mol_type = other DNA
cagtgtgagttacaaggatgagtggggcgataaatataaatcagaagttgatgttaaaagtcatgacatcatgct

SEQ ID NO: 95392 - DNA, 75 bp, synthetic construct
  source 1..75: mol_type = other DNA
gacccaggctctggctgatgagagcaaaacaggcttttatgtgaccggtaaagcaggtgcttctgttatgtcact

SEQ ID NO: 95393 - DNA, 75 bp, synthetic construct
  source 1..75: mol_type = other DNA
cacgatcttgatagcgataatcctcatgctcacgttatgttgacattaaaaaccataggccctgaaggttttggt

SEQ ID NO: 95394 - DNA, 75 bp, synthetic construct
  source 1..75: mol_type = other DNA
tcctccgccgctggataaatttgataaggatttttgttctgtcacctataaaaatggtattttaattaaaagaac

SEQ ID NO: 95395 - DNA, 75 bp, synthetic construct
  source 1..75: mol_type = other DNA
aagccggtgcctctgtggtgtcactttcagaccagcgtttcctgtcaggagatgaagaagaaacgtcaaagtata

SEQ ID NO: 95396 - DNA, 75 bp, synthetic construct
  source 1..75: mol_type = other DNA
cgtccggcgcgtcacatgaacagcacttcttatttctataaccactccagccagtggcgttatgaaaccgtcacg

SEQ ID NO: 95397 - DNA, 75 bp, synthetic construct
  source 1..75: mol_type = other DNA
tcaagccggcatcgaccgcgccagcgcccagtgcggcgcggtgacgctgatccagcgtttcggcagcgcgctgaa

SEQ ID NO: 95398 - DNA, 75 bp, synthetic construct
  source 1..75: mol_type = other DNA
aagccggtgcctctgtggtgtcactttcagaccagcgtttcctgtcaggagatgaggaagaaacatcaaagtata

SEQ ID NO: 95399 - DNA, 75 bp, synthetic construct
  source 1..75: mol_type = other DNA
tccattgctttggtcagcccggttgaattctcaacctcttcatggcgccgcgcggttttgtctctcgatgaacat

SEQ ID NO: 95400 - DNA, 75 bp, synthetic construct
  source 1..75: mol_type = other DNA
ggtgagggtcacggatgcattcggtaatacgcttggcggacagacggtcagcgtgacggcagacaacagtgcaac

SEQ ID NO: 95401 - DNA, 75 bp, synthetic construct
  source 1..75: mol_type = other DNA
cagacaaacattatgcaggaaagcactggacaggaaaacatcgaacctggttagctaatcaatcatttagtcagc

SEQ ID NO: 95402 - DNA, 75 bp, synthetic construct
  source 1..75: mol_type = other DNA
aaggaatgatcaccttgaatctcaaacggatttttctcaccctcaccttacttcccttgtttgctgttgccgctg

SEQ ID NO: 95403 - DNA, 75 bp, synthetic construct
  source 1..75: mol_type = other DNA
attccgccagagcagtattcactgctggcgagccgtaaggtttccgaagcgggtaaccagtcactgctgacctat

SEQ ID NO: 95404 - DNA, 75 bp, synthetic construct
  source 1..75: mol_type = other DNA
gacatttccagctggacgaataccagcttcgccgctgcgggtactggtgcaaatccgaatggcaaaaactgggta

SEQ ID NO: 95405 - DNA, 75 bp, synthetic construct
  source 1..75: mol_type = other DNA
gaatttatactgtctattagaggaaaaccttctatgccaaagttaaaaccaactaacagaaaatctaacatcaaa

SEQ ID NO: 95406 - DNA, 75 bp, synthetic construct
  source 1..75: mol_type = other DNA
atggcgcatcggctactcattggtaaaggaatgatcaccttgaatctcaaacggatttttctcgccctcacctta

SEQ ID NO: 95407 - DNA, 75 bp, synthetic construct
  source 1..75: mol_type = other DNA
aaaagcgagattgataatcaggactggattattgcaaaagccgagcacaccattgataacagcggctttaccacg

SEQ ID NO: 95408 - DNA, 75 bp, synthetic construct
  source 1..75: mol_type = other DNA
gtcatcctgctggcaaaagatgtgatatataacgagtacttttttgatctgcggcagtcatttttcgtgagcgtt

SEQ ID NO: 95409 - DNA, 75 bp, synthetic construct
  source 1..75: mol_type = other DNA
atgacgcaatctcgattgcatgcggcgcaaaacgcactagcaaaacttcacgagcgccgggggaatactttttat

SEQ ID NO: 95410 - DNA, 75 bp, synthetic construct
  source 1..75: mol_type = other DNA
aatgcatggcacggtgacaggcttcaaaagtgacatcgacaatcaggactggattattgcaaaagccgagcacac

SEQ ID NO: 95411 - DNA, 75 bp, synthetic construct
  source 1..75: mol_type = other DNA
tgaatcaggatattgacgaactgcatttcgccgcgttgaaaatcgaccaacaacaggcaaccgtggcggtgattc

SEQ ID NO: 95412 - DNA, 75 bp, synthetic construct
  source 1..75: mol_type = other DNA
atcgtgaagccgggagaagtccacgccgtaagaccgcacccgttgccgtcagggcagcaaattatgtggatgtaa

SEQ ID NO: 95413 - DNA, 75 bp, synthetic construct
  source 1..75: mol_type = other DNA
cctgtggctgggtaaagtgaaaggtgaacagtttgatcgcctgagcctgctgaacgacattctgccggtttatca

SEQ ID NO: 95414 - DNA, 75 bp, synthetic construct
  source 1..75: mol_type = other DNA
gtaagaagcctgctggtttattctctggtagagaaagtttgttatcggtctgcttttcagtcatacatcagcctt

SEQ ID NO: 95415 - DNA, 75 bp, synthetic construct
  source 1..75: mol_type = other DNA
tttattttttaattatcaagtaaatacaaggctagctaataataaaaatcgttatgattacatttctgtttcacc

SEQ ID NO: 95416 - DNA, 75 bp, synthetic construct
  source 1..75: mol_type = other DNA
gccgcgggtggtgaagggtgtgcgcttcagtctgcgcctgaccagcggaagcggagaagacagccgtctggtgac

SEQ ID NO: 95417 - DNA, 75 bp, synthetic construct
  source 1..75: mol_type = other DNA
cagccagtaagcgaatcccgaccgttaccttcaccaacaataagtcagaatttctcccggttaatcattacaggc

SEQ ID NO: 95418 - DNA, 75 bp, synthetic construct
  source 1..75: mol_type = other DNA
cctcgaaggtcgcgatatcgcccacggcgtcagtcgttacaacagcgatgcattacgccgtattgccggacacca

SEQ ID NO: 95419 - DNA, 75 bp, synthetic construct
  source 1..75: mol_type = other DNA
gtatgaccagacctttcagcgcgccttcaaacgtgccgtagaacaagcaggcatcacgaagcccgccacaccgca

SEQ ID NO: 95420 - DNA, 75 bp, synthetic construct
  source 1..75: mol_type = other DNA
cgatgcgcgccattgtggaaatgaaactggcgcaggtggttcgtcgtcttcgtcagcactatgggctggaaacgg

SEQ ID NO: 95421 - DNA, 75 bp, synthetic construct
  source 1..75: mol_type = other DNA
aacttgatgcccgtctttacgggagagcctccacagtacctgtcgtacttactgaaaacaccgttatgtccgaag

SEQ ID NO: 95422 - DNA, 75 bp, synthetic construct
  source 1..75: mol_type = other DNA
ctgattaaaacggaactgctggagacgcagaccgtggatttcagcgtgggtgctgaagggcttcgccatgtaccg

SEQ ID NO: 95423 - DNA, 75 bp, synthetic construct
  source 1..75: mol_type = other DNA
atcgccatcagttccgcattgctgaccgcgaggcgtatacgggggtacgcgcctactggcttgatcttaattacg

SEQ ID NO: 95424 - DNA, 75 bp, synthetic construct
  source 1..75: mol_type = other DNA
atgagcactaaattaaccggctatgtatgggatggttgcgctgcatcaggcatgaaattatccagcgtggcaatt

SEQ ID NO: 95425 - DNA, 75 bp, synthetic construct
  source 1..75: mol_type = other DNA
tacaagaaaccatcgtgaaacgtctgcaacaggaatcctggttcgtgggcaccagcaactacgatctggcgcgtc

SEQ ID NO: 95426 - DNA, 75 bp, synthetic construct
  source 1..75: mol_type = other DNA
caagcctaacttaccaggatgtaacctgacagccatgggattacctgataataacggtttcccaaggcatttatt

SEQ ID NO: 95427 - DNA, 75 bp, synthetic construct
  source 1..75: mol_type = other DNA
cagagggccgccagtggcataacactaaacttgagcatatccagaataccaggttgttggctggtgggcaatgct

SEQ ID NO: 95428 - DNA, 75 bp, synthetic construct
  source 1..75: mol_type = other DNA
attccacctgtaagctgcaggtgctgaagaacggggttgagattttccatgaaccggcaacggatgtcagccggg

SEQ ID NO: 95429 - DNA, 75 bp, synthetic construct
  source 1..75: mol_type = other DNA
atgggctttccttcacccgcagcggactacgtcgagcagcgactgtccgttaactcgatatgcaatgttggtcct

SEQ ID NO: 95430 - DNA, 75 bp, synthetic construct
  source 1..75: mol_type = other DNA
actatctgccacgataaagcgtttgttcgggcgctgcgcaaagcgttcgaccttccgcatattaaaaaagccagt

SEQ ID NO: 95431 - DNA, 75 bp, synthetic construct
  source 1..75: mol_type = other DNA
tgagagtgagtcagatatattgccagttcagggaggatcaacacagccaaattatcaaccttccgctgaatatga

SEQ ID NO: 95432 - DNA, 75 bp, synthetic construct
  source 1..75: mol_type = other DNA
tgattggactgggttcaatgggcatgggcgccgcccgcgcctgcctgcaggcgggcctgaacacctggggcgttg

SEQ ID NO: 95433 - DNA, 75 bp, synthetic construct
  source 1..75: mol_type = other DNA
gttcgggactttatggttccgtgtttgcttatgaaatgaaaaaaagaggatttacggtaaaaatcatcgagaaaa

SEQ ID NO: 95434 - DNA, 75 bp, synthetic construct
  source 1..75: mol_type = other DNA
atgcactgatactcaacgacaacggcgggcggagcattcactttgagccgctgctgccgggggaggcggtgtaca

SEQ ID NO: 95435 - DNA, 75 bp, synthetic construct
  source 1..75: mol_type = other DNA
atgcagacccaggtcctttttgaacatccactaaatgaaaaaatgcgtacgtggctgcgcattgagtttttgatt

SEQ ID NO: 95436 - DNA, 75 bp, synthetic construct
  source 1..75: mol_type = other DNA
tcggaagaaaaaacagcgatcacacatatagataaaggcttcgactttttagggcagaacgtcaggaagtacaac

SEQ ID NO: 95437 - DNA, 75 bp, synthetic construct
  source 1..75: mol_type = other DNA
aaaaaattctggtcgctgacggcgaaaggctgcatgttcggcaagaacatcaccagtcctgcaaatccgcgcgag

SEQ ID NO: 95438 - DNA, 75 bp, synthetic construct
  source 1..75: mol_type = other DNA
gcatgttatgcctgaccatgttgctgaccgtctgggtgttacacgcatcaccgtgtgaattcagggtaagcttca

SEQ ID NO: 95439 - DNA, 75 bp, synthetic construct
  source 1..75: mol_type = other DNA
cggctgcctggctttttatttccatgctgttggttctggcggttattgactgccatacggcgctgctgccggatg

SEQ ID NO: 95440 - DNA, 75 bp, synthetic construct
  source 1..75: mol_type = other DNA
attgtggcggtagctggctgaaagccgggctgtatgaccgcgaaggccgggaggcaggcgtgcagcgcctgccgc

SEQ ID NO: 95441 - DNA, 75 bp, synthetic construct
  source 1..75: mol_type = other DNA
acaggtgattcgtgatgcatggctgatacaccgacacaaagggaccatcagcgcactgcgccgggccattgagcc

SEQ ID NO: 95442 - DNA, 75 bp, synthetic construct
  source 1..75: mol_type = other DNA
gatgccggaatatcagggcggcttctggcacttcatccgcctgccggacggtggcggttacatgatgccggacgg

SEQ ID NO: 95443 - DNA, 75 bp, synthetic construct
  source 1..75: mol_type = other DNA
ctatctgcagggataccgctatgcacctccactacccgctgaacagtttattgctgagtgggtatacaacagcag

SEQ ID NO: 95444 - DNA, 75 bp, synthetic construct
  source 1..75: mol_type = other DNA
cagtcgatattgaaacatccggcccggtcccgggattatttagtctgctttccattggggcctgtctggtgcatg

SEQ ID NO: 95445 - DNA, 75 bp, synthetic construct
  source 1..75: mol_type = other DNA
atggatgaactgcgtgcccagggttaccattttaaagtaaaaaccgtgacggaaagcctgcgccgtcacggactg

SEQ ID NO: 95446 - DNA, 75 bp, synthetic construct
  source 1..75: mol_type = other DNA
cgccgatcaccgacgcttgcgcactgaaagcggtgactatgattgctgaaaacctgcccttagccgttgaagatg

SEQ ID NO: 95447 - DNA, 75 bp, synthetic construct
  source 1..75: mol_type = other DNA
catgatgctggttggcgataatcttgatggaataaagggaatgattcatgacttcgatcccgacactggcgctta

SEQ ID NO: 95448 - DNA, 75 bp, synthetic construct
  source 1..75: mol_type = other DNA
cgatcgccatccgcagtccgctttgttatctgcccgacgcggttctgccacgctggaggaactttttgccgctgc

SEQ ID NO: 95449 - DNA, 75 bp, synthetic construct
  source 1..75: mol_type = other DNA
cttgatagccaagctttattgcttttaacgaaaacacgttcaaaacaaaagacgacattttcacagcaaagtatt

SEQ ID NO: 95450 - DNA, 75 bp, synthetic construct
  source 1..75: mol_type = other DNA
ctggatatccaggatacctacttcgaccgcttcgaagccagcggcatggaaaacaaaatcggctctcgcgattcg

SEQ ID NO: 95451 - DNA, 75 bp, synthetic construct
  source 1..75: mol_type = other DNA
caccgagctacgtgtgtccaggatagagcaggggatacagcccagcaccataaatcgagagattggggcgttaag

SEQ ID NO: 95452 - DNA, 75 bp, synthetic construct
  source 1..75: mol_type = other DNA
aagatgcctgcggctttactaacccgattcaggcaactcacgaagaaattgtggcgatttatcgcgcggcgatgt

SEQ ID NO: 95453 - DNA, 75 bp, synthetic construct
  source 1..75: mol_type = other DNA
ccggcgacatgacggtgatggcctccgggagcgatgccgcctttgcccgactcgcgccggtgctggacgccgtgg

SEQ ID NO: 95454 - DNA, 75 bp, synthetic construct
  source 1..75: mol_type = other DNA
caatgccggattcaaaaagagtgaacgccagaaccggaggcgtcttgcctatgcatcagacgtttaccggatcta

SEQ ID NO: 95455 - DNA, 75 bp, synthetic construct
  source 1..75: mol_type = other DNA
gcgtgttgccgagaaaatgatgcagtttatgacgatggacggaacctttggtaacccggcctcccgttctcaccg

SEQ ID NO: 95456 - DNA, 75 bp, synthetic construct
  source 1..75: mol_type = other DNA
gcgtgttgccgagaaaatgatgcagttcatgacgatggacggaacctttggtaacccggcctctcgttctcaccg

SEQ ID NO: 95457 - DNA, 75 bp, synthetic construct
  source 1..75: mol_type = other DNA
gcccagcagattcgtcgtgttggcacccggaacaaaacgattggtgtgcttgcgctggatacggtcaccactcct

SEQ ID NO: 95458 - DNA, 75 bp, synthetic construct
  source 1..75: mol_type = other DNA
gatggaaagcgatgaagcgttacgcctgcgtgtgcctgcagcctttgaagggctttctgttgcggggccaactgc

SEQ ID NO: 95459 - DNA, 75 bp, synthetic construct
  source 1..75: mol_type = other DNA
ataccctgcctggtgaccgttacggtgtcgccgcaggtggtcgccgactggctgcactcaacatgctggcagagc

SEQ ID NO: 95460 - DNA, 75 bp, synthetic construct
  source 1..75: mol_type = other DNA
cagctcccgctgcgccattatttcctgtgcagaaccagcacgagcgatttttacgtctgcctgaggtgatgcact

SEQ ID NO: 95461 - DNA, 75 bp, synthetic construct
  source 1..75: mol_type = other DNA
tggaagtggacggcctgccaccggacgcttttgcggtggtttcctttcatctcacccagtcactctcttcgctct

SEQ ID NO: 95462 - DNA, 75 bp, synthetic construct
  source 1..75: mol_type = other DNA
gggcaaagataaaaactcaaactgtattgtcgagtacaagcttcctgaagtttctcctggtaccttactgaacca

SEQ ID NO: 95463 - DNA, 75 bp, synthetic construct
  source 1..75: mol_type = other DNA
ggccgtggacgtaaggccacgcagccggagtcgcagccgcaaccgccggagagtgacgattacgggttttcagat

SEQ ID NO: 95464 - DNA, 75 bp, synthetic construct
  source 1..75: mol_type = other DNA
ggttcaacgtgtggagctgacttcaccgctggctgatgtggtcctgaacaaaacacaggccgcctcatgtacgca

SEQ ID NO: 95465 - DNA, 75 bp, synthetic construct
  source 1..75: mol_type = other DNA
cggcgggagcgtgacctgacggggtggatgtcgctgtcgcgtaaaccggaggagacatggtacggctgggacggc

SEQ ID NO: 95466 - DNA, 75 bp, synthetic construct
  source 1..75: mol_type = other DNA
tctctgtcaacgctacggcacgattctggtggtcgatgaggttcacgctgaacacattctggatggcaaattcgc

SEQ ID NO: 95467 - DNA, 75 bp, synthetic construct
  source 1..75: mol_type = other DNA
ccgtacagtccaccgccagcaagattggcctcttgggcggtgggtataatcccaaagtcagaggagcctttcaca

SEQ ID NO: 95468 - DNA, 75 bp, synthetic construct
  source 1..75: mol_type = other DNA
agcctggcgatctgcacccctactccctttacgctcaccgccgacagtgtgcaatggatcgattcagttaactga

SEQ ID NO: 95469 - DNA, 75 bp, synthetic construct
  source 1..75: mol_type = other DNA
catgatttagcggctccggtcattgctggcattcttgccagtatgatcgtgaactggctgaacaagcggaagtaa

SEQ ID NO: 95470 - DNA, 75 bp, synthetic construct
  source 1..75: mol_type = other DNA
atgaccacacaatatggattttttatcgattccagccgctgtactggctgtaaaacctgcgaactggcgtgcaaa

SEQ ID NO: 95471 - DNA, 75 bp, synthetic construct
  source 1..75: mol_type = other DNA
cccaaagtcagaggagcctttcacatggctgtatccgcacgcccttactttgtctggcgctttatgcagtgcctg

SEQ ID NO: 95472 - DNA, 75 bp, synthetic construct
  source 1..75: mol_type = other DNA
gttttattaaattatcgcgctggtggccctgtatggcgcgaatatccgcatgatgcaggaatggcaggcaaaaca

SEQ ID NO: 95473 - DNA, 75 bp, synthetic construct
  source 1..75: mol_type = other DNA
gccgaaacgggcaaacgcgccaccaccggatacaccattcaggtcgcagtagaggagcaaagccgtgaactgtgc

SEQ ID NO: 95474 - DNA, 75 bp, synthetic construct
  source 1..75: mol_type = other DNA
ggtcgggatattcgccgtagcgccatctttgccgccctgcatgttgagggggtgcagcgtgtggagctggcttct

SEQ ID NO: 95475 - DNA, 75 bp, synthetic construct
  source 1..75: mol_type = other DNA
ccgtgtttcacctgctggagccggatattaatcaggagctgtacggcctgccggaatatctcagcgcccttaatt

SEQ ID NO: 95476 - DNA, 75 bp, synthetic construct
  source 1..75: mol_type = other DNA
tgtcgttgttctggttgctgaatgccctgaacagtgcggagcctgttctgaaagagttgcttgacatgccttacc

SEQ ID NO: 95477 - DNA, 75 bp, synthetic construct
  source 1..75: mol_type = other DNA
gaatttctaaccagcaacttttcgcgggttacctatgaacacaagggtaatcagtatgttgaatatgaaatttcc

SEQ ID NO: 95478 - DNA, 75 bp, synthetic construct
  source 1..75: mol_type = other DNA
gatactttccgtttttatctggaaaagcagggatggactctcataaaccggggcgcaattaaaaatatgaccgtc

SEQ ID NO: 95479 - DNA, 75 bp, synthetic construct
  source 1..75: mol_type = other DNA
acattcgcttcttgttgcccattacctatacggtatctctaaaagaaagctcgccaaggctcgtaaaaaggatga

SEQ ID NO: 95480 - DNA, 75 bp, synthetic construct
  source 1..75: mol_type = other DNA
ttgatcagttatcaacggtgccaatggctatgggccgtgcagcatcaagaacggtgggaaatctggttaatctgg

SEQ ID NO: 95481 - DNA, 75 bp, synthetic construct
  source 1..75: mol_type = other DNA
cagtttcaccaattactgcatctacgagtgttacaaggaagatgcagaggactggctggattcattgccagaaca

SEQ ID NO: 95482 - DNA, 75 bp, synthetic construct
  source 1..75: mol_type = other DNA
ccttgccaaaggcgaagaagctctcagcttcagtgagtttatacaggcgctttccagctcggcaaaatctaacgg

SEQ ID NO: 95483 - DNA, 75 bp, synthetic construct
  source 1..75: mol_type = other DNA
cgccgttaccgctgcccgacgcaaaagtcgacatatcaacaatttgtctcatgcgttgtggcgcttatcgagcag

SEQ ID NO: 95484 - DNA, 75 bp, synthetic construct
  source 1..75: mol_type = other DNA
cgcgcctcggagtcctgtcaataactgtggaaagctcaccggtggtgatacttcgttaccggctcccacaccttc

SEQ ID NO: 95485 - DNA, 75 bp, synthetic construct
  source 1..75: mol_type = other DNA
cctgctgcctgaggtccgttaccgggcttttggtcgccacatcatcgtgtggtcatgggtggtctgggcgctggg

SEQ ID NO: 95486 - DNA, 75 bp, synthetic construct
  source 1..75: mol_type = other DNA
tgccgaacgtgaaggtggtgcactgacagaagttgcgtgctgggcccatgcccggcgaaaaatccacgatgtata

SEQ ID NO: 95487 - DNA, 75 bp, synthetic construct
  source 1..75: mol_type = other DNA
gctacttaccgcaatagtgatttcttcggtctggtggaaggtctgaactttgcattgcagtatcaaggtaacaac

SEQ ID NO: 95488 - DNA, 75 bp, synthetic construct
  source 1..75: mol_type = other DNA
cagttgatccagaaacgaaaccccgatctgttagccgaatggttaacgctttctgatttcaccattccgccagaa

SEQ ID NO: 95489 - DNA, 75 bp, synthetic construct
  source 1..75: mol_type = other DNA
gcactgaactgaacgccgagataccgctgtctgatgatctcaacgtcagcctgaatgccatgacacagcatcgta

SEQ ID NO: 95490 - DNA, 75 bp, synthetic construct
  source 1..75: mol_type = other DNA
aaagaatgtgatggataaaggcgcagtagcaggtcttaaggagtggtttgttaactgtgtaggggtagattatga

SEQ ID NO: 95491 - DNA, 75 bp, synthetic construct
  source 1..75: mol_type = other DNA
atctgtacggtaaagctgttggtctgcattatttttccaagggtaacggtgaaaacagttacggtggcaatggcg

SEQ ID NO: 95492 - DNA, 75 bp, synthetic construct
  source 1..75: mol_type = other DNA
tcttgatgccaaaccgttcgtcgccgagaaatccatcaactatgaacttggcacccgctacgaaaccgctgacgt

SEQ ID NO: 95493 - DNA, 75 bp, synthetic construct
  source 1..75: mol_type = other DNA
aatgatgaggattttcttgcagagtatgaaacctgtctcaaaaattggaaagactcacaaaaaatcatatctttt

SEQ ID NO: 95494 - DNA, 75 bp, synthetic construct
  source 1..75: mol_type = other DNA
tcccgaatttaaacagcagctcgttgctgcctcctgtgaacccgggatatccatctcaaaacttgctcttgaaaa

SEQ ID NO: 95495 - DNA, 75 bp, synthetic construct
  source 1..75: mol_type = other DNA
aacgttggggggcatgggcagctagtgatagctcaggagtggactattcgcctatagctgctgggtttaagggac

SEQ ID NO: 95496 - DNA, 75 bp, synthetic construct
  source 1..75: mol_type = other DNA
caccgaatataggtggtcaggaattacaggctgttgctcaaatgaaggccctgaaaaaaatggggcattcagttc

SEQ ID NO: 95497 - DNA, 75 bp, synthetic construct
  source 1..75: mol_type = other DNA
tttacaggtttcgccagagatcctgcgccagcgcctggaaaaccgtggccgtgaaaacgccagtgaaattaacgc

SEQ ID NO: 95498 - DNA, 75 bp, synthetic construct
  source 1..75: mol_type = other DNA
attcagatggttcagatgtatgtactttatttgatgccgctgcattttctcgtttgactggtgaaggcttacccc

SEQ ID NO: 95499 - DNA, 75 bp, synthetic construct
  source 1..75: mol_type = other DNA
cgaccgtagattacaacgggaaaaaatttacgtatccggtcgctgatgagtggagttggttttattgttattcag

SEQ ID NO: 95500 - DNA, 75 bp, synthetic construct
  source 1..75: mol_type = other DNA
tgttacggccataccggcccggatgtgaaaccgggtatgaccctgacggatgaagaatgcctggaactactggaa

SEQ ID NO: 95501 - DNA, 75 bp, synthetic construct
  source 1..75: mol_type = other DNA
gacagtttggttattttcttgtaatacaggtaaaggacaaaattcatttgctagccaattagctaaagagttaca

SEQ ID NO: 95502 - DNA, 75 bp, synthetic construct
  source 1..75: mol_type = other DNA
actaaaccggaaaactctggggtattcgaaatccacagaaatgcacgacaaagtgattggtacatttattgagcg

SEQ ID NO: 95503 - DNA, 75 bp, synthetic construct
  source 1..75: mol_type = other DNA
gcgcaggctgtgatggtggcttacgcgatgggcggcgatcttgaccagctcgctgccaactacaacgtgaaacgc

SEQ ID NO: 95504 - DNA, 75 bp, synthetic construct
  source 1..75: mol_type = other DNA
tgttctggtttatgaggtcgatagccagtggggaaaagtgtatatcctgcgtgtattgcatactacacagaagtg

SEQ ID NO: 95505 - DNA, 75 bp, synthetic construct
  source 1..75: mol_type = other DNA
aacgctgactaatagtgtattggccagggctgagattcttaatattataatttctgctgttgaaggtgaaatcga

SEQ ID NO: 95506 - DNA, 75 bp, synthetic construct
  source 1..75: mol_type = other DNA
cttacggaatcacaagctgatcacttttctagcgccttattggttcctaggctatctttcattaaagaatttcca

SEQ ID NO: 95507 - DNA, 75 bp, synthetic construct
  source 1..75: mol_type = other DNA
caggtggtttaagcgacaagcttcgtgaatattttgccggtaatcttagcattattgatacgcttcccactgcca

SEQ ID NO: 95508 - DNA, 75 bp, synthetic construct
  source 1..75: mol_type = other DNA
acctgaaaaagccgcagattatcgcagccctgaatgaggccggactgtccggtgccgcacgggacgcggagaaga

SEQ ID NO: 95509 - DNA, 75 bp, synthetic construct
  source 1..75: mol_type = other DNA
ccagttgataccgatgctgagcagtcgtgagccgtttaatccggcatgggctatccgggcgctggtcagctatga

SEQ ID NO: 95510 - DNA, 75 bp, synthetic construct
  source 1..75: mol_type = other DNA
gtttttgaatatcaagaacgtgagccgggacgacatgatggcggcacaccgcgtgccgccgcaaatgatggggat

SEQ ID NO: 95511 - DNA, 75 bp, synthetic construct
  source 1..75: mol_type = other DNA
gttatgctatctgccgttcgatggatttaaactcatgggaatatgtgccagaccatcgcggtgaaatcgtttata

SEQ ID NO: 95512 - DNA, 75 bp, synthetic construct
  source 1..75: mol_type = other DNA
gcagcgatttttatgaagacagcgaaggcgataaagttaatgtttattattctccagggcatcctgaaaaggctg

SEQ ID NO: 95513 - DNA, 75 bp, synthetic construct
  source 1..75: mol_type = other DNA
cgctgaacgttattaatgtcggtatcgaaatgttcagcgatgacatgaaaaagcagaatgtaccggtaacccaac

SEQ ID NO: 95514 - DNA, 75 bp, synthetic construct
  source 1..75: mol_type = other DNA
gttcgcatgccccgtctctgctctgcagaacgtctctctgaaagtatggtcgatgaaatatttcagaagggggct

SEQ ID NO: 95515 - DNA, 75 bp, synthetic construct
  source 1..75: mol_type = other DNA
acccggcggcggaagtggcgaaagcgcgtgattgggtgaaagcgcgcatggccaaagctggcatggtggaggcgg

SEQ ID NO: 95516 - DNA, 75 bp, synthetic construct
  source 1..75: mol_type = other DNA
tggattccagagctaatactactgttcagaaaactctcaatctcaaagacgtgaaagaaattccattaccaattc

SEQ ID NO: 95517 - DNA, 75 bp, synthetic construct
  source 1..75: mol_type = other DNA
ccgatgactcagaatttatgatacctgatgactggtcagggctaaacgcaaaaggcattacatacgaacaagata

SEQ ID NO: 95518 - DNA, 75 bp, synthetic construct
  source 1..75: mol_type = other DNA
tcgcaacgatatcgaaatgcttcgcgaaaacatggtcaagtcgaaaggccgcaacaactttaaaaatctgtttct

SEQ ID NO: 95519 - DNA, 75 bp, synthetic construct
  source 1..75: mol_type = other DNA
ccgctgtaccgccagtctgaaatgtacggccgccagggcgtggagctgagtcgttcactgctgtcgggctgggtg

SEQ ID NO: 95520 - DNA, 75 bp, synthetic construct
  source 1..75: mol_type = other DNA
gctgggcattttcctgcgcgatttaacgacgatggatccgctcgatgcccaggcgcagtacagcgaactgttcga

SEQ ID NO: 95521 - DNA, 75 bp, synthetic construct
  source 1..75: mol_type = other DNA
tcttgcttgcttcagcggtgtgctgcaagcggatgcgtacgccgggttcaacgagctgtatcgcaatggtgggat

SEQ ID NO: 95522 - DNA, 75 bp, synthetic construct
  source 1..75: mol_type = other DNA
cgctgactaatttgagtggaaaggatgtagctggtcttctcacataccttggtttgggagaaacgataaataaag

SEQ ID NO: 95523 - DNA, 75 bp, synthetic construct
  source 1..75: mol_type = other DNA
cagatccctaccgacccccatgagttcatgaggccggatggattgttgtctcgtcgcgcaattgttgctgtggaa

SEQ ID NO: 95524 - DNA, 75 bp, synthetic construct
  source 1..75: mol_type = other DNA
tcgttcactgctgtcgggctgggtggatgcatgctgccggctactgtcaccgctggaagaagcgcttcaggacta

SEQ ID NO: 95525 - DNA, 75 bp, synthetic construct
  source 1..75: mol_type = other DNA
ctactggtttgtgcaatacggcatgaccacgcagccgtatcagttcacgaaaggcagtatctttcatctgatgga

SEQ ID NO: 95526 - DNA, 75 bp, synthetic construct
  source 1..75: mol_type = other DNA
gatggctatatcgaggttggcgggaaccgttacagcgtgccggaaagcctgtgtggccagccggtatcaatacgg

SEQ ID NO: 95527 - DNA, 75 bp, synthetic construct
  source 1..75: mol_type = other DNA
tttttcatcgtatggctaataaatgtagccttaaaaccatttccatacctgaacttgattttataattgatagtg

SEQ ID NO: 95528 - DNA, 75 bp, synthetic construct
  source 1..75: mol_type = other DNA
ccaataattttcgggaaatctcggaaacgtcaaccaactatccggtaactccggatggttggataagctgtagtg

SEQ ID NO: 95529 - DNA, 75 bp, synthetic construct
  source 1..75: mol_type = other DNA
aagagacggaggccttcctgcgctctgcactggcacgtgccgaagaaaagctcgaagaggaggagtgggaaatag

SEQ ID NO: 95530 - DNA, 75 bp, synthetic construct
  source 1..75: mol_type = other DNA
gtgacttcaccatttattcaacaaattgctgataaccgggtatgtcaggtactcacctgtcttcctgaaaaattt

SEQ ID NO: 95531 - DNA, 75 bp, synthetic construct
  source 1..75: mol_type = other DNA
actcagttcagccaggcactggcgcaaggggttctgcgcggtgaagagtttaattcagtaaatgaaagcggtgat

SEQ ID NO: 95532 - DNA, 75 bp, synthetic construct
  source 1..75: mol_type = other DNA
ttctttatcctttgcggtctggcaaacatctacatcgcattctggctgccgcaaaatatttgggtcaactttaaa

SEQ ID NO: 95533 - DNA, 75 bp, synthetic construct
  source 1..75: mol_type = other DNA
ttgtccgggaactggctggtctggcgttcgtggagcgcagcgaaaacgtgatcctgctgggacctcctggtgtcg

SEQ ID NO: 95534 - DNA, 75 bp, synthetic construct
  source 1..75: mol_type = other DNA
ttactggtgggtgccgtccttcaacgagccgacagccttcgcgcccggttccgtgtttcacctgctggagccgga

SEQ ID NO: 95535 - DNA, 75 bp, synthetic construct
  source 1..75: mol_type = other DNA
tgagcgaagtcgcgacgaaggatgatttttttaatatcaagaaagtcagcgccgctgacctgctcgacgcgcacc

SEQ ID NO: 95536 - DNA, 75 bp, synthetic construct
  source 1..75: mol_type = other DNA
ggtccaggatatcagcggcgtcctggccgtgttcgctgaacgtcgccaggaccgcaacggcccgtatgtcgttct

SEQ ID NO: 95537 - DNA, 75 bp, synthetic construct
  source 1..75: mol_type = other DNA
atcctggccgatcaggttcaccataaactgaatcatcttgaagaaaaactccaccgtgttgaccaggttcagcgg

SEQ ID NO: 95538 - DNA, 75 bp, synthetic construct
  source 1..75: mol_type = other DNA
acgacgatggatccgctcgatgcccaggcgcagtacagcgaactgttcgaccgtggccgcgccacgtcactgttg

SEQ ID NO: 95539 - DNA, 75 bp, synthetic construct
  source 1..75: mol_type = other DNA
tgatcgcgttaaatcactactccgtaaattccagaacctgggcatgatcaccaccaaatcgaacaaccgttttac

SEQ ID NO: 95540 - DNA, 75 bp, synthetic construct
  source 1..75: mol_type = other DNA
atgcttacaagcgactttttaatggtgaaagccatgcttagcccatcccaaacccttcaataccagaaagaaagc

SEQ ID NO: 95541 - DNA, 75 bp, synthetic construct
  source 1..75: mol_type = other DNA
atgggaaagagtaagaagaaccgcgctgcgtcgacgaaacagatccagcataaaagccagacttcagccgaagca

SEQ ID NO: 95542 - DNA, 75 bp, synthetic construct
  source 1..75: mol_type = other DNA
agaatttccctatccccatcccctgcccaggcaacccccaaaaatcccttgccatccagtctgaaatcgttcgga

SEQ ID NO: 95543 - DNA, 75 bp, synthetic construct
  source 1..75: mol_type = other DNA
gcaggcattattttcggtagtgtcggtctgataatcacgctcccctccaccaaaaaatctcgcaggaaacggaag

SEQ ID NO: 95544 - DNA, 75 bp, synthetic construct
  source 1..75: mol_type = other DNA
ggccgctgcggcagcccgggagcagcgacgcgccctggcagaactgaacagccagttgacggaaattcgcggttc

SEQ ID NO: 95545 - DNA, 75 bp, synthetic construct
  source 1..75: mol_type = other DNA
gaattacaacatattgattttacgtgtgccggattaagggaagacgatgagacgccagttaagaatttaattaag

SEQ ID NO: 95546 - DNA, 75 bp, synthetic construct
  source 1..75: mol_type = other DNA
gcttcacacgatccagtctgaacgattaaacaccgacttctctttattcaaaagacaaccatctattgaaagtgc

SEQ ID NO: 95547 - DNA, 75 bp, synthetic construct
  source 1..75: mol_type = other DNA
ggtcagaagtacctgaaaggcctgaatccttcatggcctatgactcctatcaacgggaactgcaagattatcggt

SEQ ID NO: 95548 - DNA, 75 bp, synthetic construct
  source 1..75: mol_type = other DNA
atgagtcagaaatacctcattcgtatcactgaactggaaaggttgctctctgagcaggctgaagccctccgtcag

SEQ ID NO: 95549 - DNA, 75 bp, synthetic construct
  source 1..75: mol_type = other DNA
cgcaactggacagcggcaaactcgattgcgtgatcctcgcgctggtgaaagagagcgaagcattcattgaagtgc

SEQ ID NO: 95550 - DNA, 75 bp, synthetic construct
  source 1..75: mol_type = other DNA
atgggaaagagtaagaagaaccgcgctgtgtcgacgaaccagattcagcataaaagccagacttcagccgaagca

SEQ ID NO: 95551 - DNA, 75 bp, synthetic construct
  source 1..75: mol_type = other DNA
aatttccgctgtcgtcggaaaccttcgttcttaaccaaatcactgcgtttattgatatgggctttgaggtggaga

SEQ ID NO: 95552 - DNA, 75 bp, synthetic construct
  source 1..75: mol_type = other DNA
tcagagttggcgaaggcgttcgcgtacgcacttaaccagtggccggcactgacgtactatgcgaacgatggctgg

SEQ ID NO: 95553 - DNA, 75 bp, synthetic construct
  source 1..75: mol_type = other DNA
cggtatttgctcccgtttaggggcaccaaacagaaaagcaaatatcattgtggatcagcagtcacagtttaatac

SEQ ID NO: 95554 - DNA, 75 bp, synthetic construct
  source 1..75: mol_type = other DNA
cagagcaacaggccgcatggcgagcggtggcggagacggaaaaacgccgccatcagggaaacacgctggcggaat

SEQ ID NO: 95555 - DNA, 75 bp, synthetic construct
  source 1..75: mol_type = other DNA
cgtggtcaggaaggaactacggcacgcgtatggtcaacgaatgacattgtcgcgaatttaatgaccgccggatca

SEQ ID NO: 95556 - DNA, 75 bp, synthetic construct
  source 1..75: mol_type = other DNA
aagatgaagctccaattcgcgaaatggtctgcttcgtgctcgaacaaaatggctttcagccggtcgaagcggaag

SEQ ID NO: 95557 - DNA, 75 bp, synthetic construct
  source 1..75: mol_type = other DNA
gcattgtatgaccatcttgttcttggcgattcaagaaaagttatctgtgagcgtcacagtgtaaataatggctat

SEQ ID NO: 95558 - DNA, 75 bp, synthetic construct
  source 1..75: mol_type = other DNA
tcgtaactacgcattccataagcgttttttcaaacttctgcaactcggattcgattactggactccggtcggtgg

SEQ ID NO: 95559 - DNA, 75 bp, synthetic construct
  source 1..75: mol_type = other DNA
gccagactggccgaaacctttttgacaaaacccagccaatcctctcctacggagtactgtcctcagaggctgacc

SEQ ID NO: 95560 - DNA, 75 bp, synthetic construct
  source 1..75: mol_type = other DNA
gttcccgccgtggcagagaatgatcctggggggaataacgatagccagctatcttctgccgcctgcgggactgct

SEQ ID NO: 95561 - DNA, 75 bp, synthetic construct
  source 1..75: mol_type = other DNA
gggaacttggacctggattgcccgtcatggatatgaagaacatgccagctgaaccacttgtcttcctgtcgggta

SEQ ID NO: 95562 - DNA, 75 bp, synthetic construct
  source 1..75: mol_type = other DNA
tgcatcccgtctttttccgttctgtaccggtaaataccgctggcacggtagcacggatacatataccggccgtga

SEQ ID NO: 95563 - DNA, 75 bp, synthetic construct
  source 1..75: mol_type = other DNA
ccagctaccgtcagtacatcctgagcctgtggctgccgttttatctctccttgccgaccctggtggtgagctacg

SEQ ID NO: 95564 - DNA, 75 bp, synthetic construct
  source 1..75: mol_type = other DNA
ggtttcaagggtggaatgaatatcattgatgcgtttcattctccgtgggagtatctgagttcaattaccatgcca

SEQ ID NO: 95565 - DNA, 75 bp, synthetic construct
  source 1..75: mol_type = other DNA
gactttaccgggcatcggcaaacggcgtttcgcgaactggaacgggtgcttaattttccgcaatcaaacttgtgc

SEQ ID NO: 95566 - DNA, 75 bp, synthetic construct
  source 1..75: mol_type = other DNA
ggttctcagtggcgtacagtcagcgtgggtgagtatgtgtcgtcaggagcttcggggtttgagtattttccatta

SEQ ID NO: 95567 - DNA, 75 bp, synthetic construct
  source 1..75: mol_type = other DNA
aaaaaatccgggaacagttgcgatcccgggaagagacactgaagaatgagaatgcggctgcgcgtgcgtcgaatg

SEQ ID NO: 95568 - DNA, 75 bp, synthetic construct
  source 1..75: mol_type = other DNA
ccatgtggtgggtgccaacacaaccactcgaagcactaaaagttgttgaagcctggggattccgtctgatgacca

SEQ ID NO: 95569 - DNA, 75 bp, synthetic construct
  source 1..75: mol_type = other DNA
gtacttaggatagccaaccatcagatgctgcatttgcatagtgcaatctccccttacttatccggaggcaattgc

SEQ ID NO: 95570 - DNA, 75 bp, synthetic construct
  source 1..75: mol_type = other DNA
accgggatgcacgatagagctgaaagcgcgccgcacaacggagacggtgattgtcaccacggtggcgtatggtca

SEQ ID NO: 95571 - DNA, 75 bp, synthetic construct
  source 1..75: mol_type = other DNA
cggtggtatctggaatctgtacacactgaacaacggtggcgcatttatagcgcccgaaccggatgacgatgatgg

SEQ ID NO: 95572 - DNA, 75 bp, synthetic construct
  source 1..75: mol_type = other DNA
cggtttatggaagataaggagctgaccaagcctcttacgcgccttgtttatacaaatcttaagactgccagaaca

SEQ ID NO: 95573 - DNA, 75 bp, synthetic construct
  source 1..75: mol_type = other DNA
tgataacgccgcaggtttaggtgtcatgctggaactggctgaacgcctgaaaaatacgcctaccgagtatggtat

SEQ ID NO: 95574 - DNA, 75 bp, synthetic construct
  source 1..75: mol_type = other DNA
tgatcggcacctgccgtctgaacggtatcgatccggaagcgtatctgcgccatatactgagcctactgccggaat

SEQ ID NO: 95575 - DNA, 75 bp, synthetic construct
  source 1..75: mol_type = other DNA
cgccattatttcgttcttcgaccaggtgtttgatcagggactgaatccggttgtgccctggagtgcctactggac

SEQ ID NO: 95576 - DNA, 75 bp, synthetic construct
  source 1..75: mol_type = other DNA
cggtatcacccgttacgtcaccgaaattcttgttaagaccacgggcaccatgcagatgctggtacgtgccgtagg

SEQ ID NO: 95577 - DNA, 75 bp, synthetic construct
  source 1..75: mol_type = other DNA
gtttcttgtccagaagagattgcgtatcggaaagggtttattagtgatgagcaaatgcagataatagcctctaaa

SEQ ID NO: 95578 - DNA, 75 bp, synthetic construct
  source 1..75: mol_type = other DNA
tccccgcagcccgccagggagatccgctgacgccgcatgctaaaccgaagcatccacctcatccccgaaaaatcg

SEQ ID NO: 95579 - DNA, 75 bp, synthetic construct
  source 1..75: mol_type = other DNA
aaaaagtaattatgcggtaaccgggctttatttctatgataacgacgttgtggaaatggcgaaaaaccttaagcc

SEQ ID NO: 95580 - DNA, 75 bp, synthetic construct
  source 1..75: mol_type = other DNA
cctgtccttctggtgtgcgctatcacaatttgctggatatcgggcgtgatattgtcgagcagaaagtgaaacgcc

SEQ ID NO: 95581 - DNA, 75 bp, synthetic construct
  source 1..75: mol_type = other DNA
gaccatggtggtgagcggggagcgctactgtacagcctgatcgggacgtgcaaactgaatgacgtggctccagaa

SEQ ID NO: 95582 - DNA, 75 bp, synthetic construct
  source 1..75: mol_type = other DNA
tccaataaacgattcatagccgcagccaatccggctaccgtgctggcactgctggatgagaacgaaagcatgtgc

SEQ ID NO: 95583 - DNA, 75 bp, synthetic construct
  source 1..75: mol_type = other DNA
aagagatgatcgaggcaattgaacagcacacaatctgtatcagcaccagggatatacctggcgttattgccaact

SEQ ID NO: 95584 - DNA, 75 bp, synthetic construct
  source 1..75: mol_type = other DNA
cgtgctgggcccatgcccggagaaaaatccacgatgtatacatcagcagcaaaagtgcgacggcagaagaagccc

SEQ ID NO: 95585 - DNA, 75 bp, synthetic construct
  source 1..75: mol_type = other DNA
gcaggtaaaagtattagccgaaccgttgaagaaaaatgcttatggtcagtatctgctcaaaatgattaaaggtta

SEQ ID NO: 95586 - DNA, 75 bp, synthetic construct
  source 1..75: mol_type = other DNA
atttatcattggtgaagaatttataggtggtgatgattgtgcgctggtacttggtgataatatcttctatggtca

SEQ ID NO: 95587 - DNA, 75 bp, synthetic construct
  source 1..75: mol_type = other DNA
ctcaaatgatttacatagtgcgctttgtttatgccggatgcggcgtgaacgccttatccggcctacaaagtcgta

SEQ ID NO: 95588 - DNA, 75 bp, synthetic construct
  source 1..75: mol_type = other DNA
atatgaagctaatctggccgatgagaacgccagccgtcggtcatcgtatcgggaagaactcacgggttacggtca

SEQ ID NO: 95589 - DNA, 75 bp, synthetic construct
  source 1..75: mol_type = other DNA
cggcgaatgaatacaacagcgcaagtactagtgatcccaaaagtgtgattctggactctgttcgaactattaaat

SEQ ID NO: 95590 - DNA, 75 bp, synthetic construct
  source 1..75: mol_type = other DNA
atgcgtaaaagcctgttagctattcttgcagtctcctcgttggtattcagttctgcgtcgtttgccgctgatctt

SEQ ID NO: 95591 - DNA, 75 bp, synthetic construct
  source 1..75: mol_type = other DNA
ctttactccggtgtgctcctgtttattctgtatttttgcttttttgccctgactgacctgcagaaagctgatgaa

SEQ ID NO: 95592 - DNA, 75 bp, synthetic construct
  source 1..75: mol_type = other DNA
atccggatgacctgtcgcgccaggcactggtcaccatttttggtgatgtggtcacaaatcccctgacagccagca

SEQ ID NO: 95593 - DNA, 75 bp, synthetic construct
  source 1..75: mol_type = other DNA
ctaaacttgcgaagatcccgaaaccaccaagccaggcagtatatgaagtgttcaaaaacgcgccattggacttca

SEQ ID NO: 95594 - DNA, 75 bp, synthetic construct
  source 1..75: mol_type = other DNA
aaaactttctgaaccaaccgcagaaatgatagaaaaagcaaatgaactcagggccgtggaagaaacgcgccgtct

SEQ ID NO: 95595 - DNA, 75 bp, synthetic construct
  source 1..75: mol_type = other DNA
agctgaaccgggcgctgacagatgcgtcagcccttatcgacagctatctgtccgcccgttacacgttgccgctgg

SEQ ID NO: 95596 - DNA, 75 bp, synthetic construct
  source 1..75: mol_type = other DNA
atcaccgacggcagtgagccgaataccgctaactttgtgcaggggtatgtcgaagggatctggcagatctggcaa

SEQ ID NO: 95597 - DNA, 75 bp, synthetic construct
  source 1..75: mol_type = other DNA
tggattctgttccgtaaattttcctctccggaacaagtcgaaaatgtggccgcgcagctgctggagtttgcgtaa

SEQ ID NO: 95598 - DNA, 75 bp, synthetic construct
  source 1..75: mol_type = other DNA
actccctggaaacaacaagtgatattctcaaagctgatgtgattagaaaaacactggaaatcgtgttgcgataca

SEQ ID NO: 95599 - DNA, 75 bp, synthetic construct
  source 1..75: mol_type = other DNA
gagatcatgaggctggcgcaggagctgcgggactttgatgaagccagacgcatgccatatgtggtgtcgggatca

SEQ ID NO: 95600 - DNA, 75 bp, synthetic construct
  source 1..75: mol_type = other DNA
gtcgcgtgcgggcgctgtgcgtcaaagagacgcggcagatcgttcgcgatccgagtagctggctgattgcggtag

SEQ ID NO: 95601 - DNA, 75 bp, synthetic construct
  source 1..75: mol_type = other DNA
ctataccgggtgtttacgacgtcagtgtttatgtaaacgaccaaccaatcattaaccaaagtattacatttgtcg

SEQ ID NO: 95602 - DNA, 75 bp, synthetic construct
  source 1..75: mol_type = other DNA
ttcgacatccgccatgtgtcctgggacagctatatcgaggttggcggtaatcgttacagcgttcccgaagcgctg

SEQ ID NO: 95603 - DNA, 75 bp, synthetic construct
  source 1..75: mol_type = other DNA
caaacggcgaggatattgccctctcactttccatcggtgccgccatgtttaatggtcatcctgactatgagcgcc

SEQ ID NO: 95604 - DNA, 75 bp, synthetic construct
  source 1..75: mol_type = other DNA
gtatctgaaagagtgcccacattgtggtgagataaaatgtaaccactgcgatatgggcgacgacactgcatgtat

SEQ ID NO: 95605 - DNA, 75 bp, synthetic construct
  source 1..75: mol_type = other DNA
tcgaggatggcgtttactggtacatatcgagctttaacaacccccaccagttcgcacccggctcggtgtttcacc

SEQ ID NO: 95606 - DNA, 75 bp, synthetic construct
  source 1..75: mol_type = other DNA
atgtatacatcagcagcaaaagtgcgatggcagaagaagccctgaagcgaatcagtgaactgtacgccatcgagg

SEQ ID NO: 95607 - DNA, 75 bp, synthetic construct
  source 1..75: mol_type = other DNA
tgatgacggcgtggtgtcccgtattgatctggatatcctccgcaccgggattaatgaactgggtaacagtatcac

SEQ ID NO: 95608 - DNA, 75 bp, synthetic construct
  source 1..75: mol_type = other DNA
gtcgctgaatttaacgccttcaagcatctgacggaagaaatgcgccgcacgctacaggatatttcaagattgtca

SEQ ID NO: 95609 - DNA, 75 bp, synthetic construct
  source 1..75: mol_type = other DNA
catattctgctggcagccgatgtgcgcctggcgctgcggcgcagcattacccatccgttcgttcgcaagcaggag

SEQ ID NO: 95610 - DNA, 75 bp, synthetic construct
  source 1..75: mol_type = other DNA
cgcagaacgcccaggttgcggcgggtcagctcggtggtacgccgccggtgaaaggccaacagcttaacgcctcta

SEQ ID NO: 95611 - DNA, 75 bp, synthetic construct
  source 1..75: mol_type = other DNA
gacgaagacaccgaaatcatctgggtggcgttcgggaacccgacgcgtaacaccgggcgtttccgtgaatgtttc

SEQ ID NO: 95612 - DNA, 75 bp, synthetic construct
  source 1..75: mol_type = other DNA
tacccagttagctgttgccgttaagggtattggccgcgagggtagcgcagtgatcggtatcgaaggcccatgggg

SEQ ID NO: 95613 - DNA, 75 bp, synthetic construct
  source 1..75: mol_type = other DNA
gtctccagagcaattgagtgcgtataaacacagcctggtattatcggtacagacaccttatatgatcatcgtggc

SEQ ID NO: 95614 - DNA, 75 bp, synthetic construct
  source 1..75: mol_type = other DNA
gcattttggcctcattccacagtgggtgcccctggagccccgtgttttcggctggatggaccgtctgtgcgaaga

SEQ ID NO: 95615 - DNA, 75 bp, synthetic construct
  source 1..75: mol_type = other DNA
atctgttattcatccggcagggacagggtaaaagcgccagcggtaaaccactaccggttatcactatcacacgta

SEQ ID NO: 95616 - DNA, 75 bp, synthetic construct
  source 1..75: mol_type = other DNA
ccgcaaggttcacactgacgacataccagtaaaagtgctggcaccgggcagaaaaaaggcaaaaacaggacgcat

SEQ ID NO: 95617 - DNA, 75 bp, synthetic construct
  source 1..75: mol_type = other DNA
atcagtgacattatcagtgaatggcagagaagtgatgtgtcagacaggttcagcgttatcaggctatatctggga

SEQ ID NO: 95618 - DNA, 75 bp, synthetic construct
  source 1..75: mol_type = other DNA
atgatgactgcagaagagcaggttgtcatggctgtgtatatgatgcgggataaaggcccggagattcctgaaaat

SEQ ID NO: 95619 - DNA, 75 bp, synthetic construct
  source 1..75: mol_type = other DNA
acttccggcagacggaacgcaggtgtctttcccgtatgccggtgagtggctggcagaggacgaaatcagggcagt

SEQ ID NO: 95620 - DNA, 75 bp, synthetic construct
  source 1..75: mol_type = other DNA
cgctggtttgaccgtggtgttctgcgggaggtggtccgggaagcccggaccgaaatccgcagcatggcggatgca

SEQ ID NO: 95621 - DNA, 75 bp, synthetic construct
  source 1..75: mol_type = other DNA
tgggttgacgcgtgctgccagttaatgacaccggtgaatgatgccctgtaccgttatgtaatgaacacccgcaag

SEQ ID NO: 95622 - DNA, 75 bp, synthetic construct
  source 1..75: mol_type = other DNA
aacacacaggtcttagggaggtttaaactgtgtattaacacctatcgtattgacgggcgtgaaatggcagaaaca

SEQ ID NO: 95623 - DNA, 75 bp, synthetic construct
  source 1..75: mol_type = other DNA
aacgtaatactatcgcaactgacatgcgcgccctgaatgaaaaaattggtgataacgcatggacggaagagcagc

SEQ ID NO: 95624 - DNA, 75 bp, synthetic construct
  source 1..75: mol_type = other DNA
gatgcattttattccgggttgggtttgtttggtcttgcaacgctaattacgcagtgtgaggagattttttcgctt

SEQ ID NO: 95625 - DNA, 75 bp, synthetic construct
  source 1..75: mol_type = other DNA
atgagtcattctttccaggagcaatacacctgcgtacctccgtcagcatttgctgcaggcaccggtaaggcgttt

SEQ ID NO: 95626 - DNA, 75 bp, synthetic construct
  source 1..75: mol_type = other DNA
ggcgacgccggagagttgtgattttctgcatcaaatcaaaataggcgagtggatacacgcagactttaagcgtgt

SEQ ID NO: 95627 - DNA, 75 bp, synthetic construct
  source 1..75: mol_type = other DNA
ctgtacattcttataattctgatactgtcattggcagtgatacggttgctatagacaaaaacgatggtaaaggaa

SEQ ID NO: 95628 - DNA, 75 bp, synthetic construct
  source 1..75: mol_type = other DNA
caaccgtaaattatgacgggaaaaaattcacctatctggtagatgaggagtggctggaggatataacggatatta

SEQ ID NO: 95629 - DNA, 75 bp, synthetic construct
  source 1..75: mol_type = other DNA
ccatgacggtccattattaccggctgcgggattacgccctgcagcatccggaatgcagcgccattatgcgcatca

SEQ ID NO: 95630 - DNA, 75 bp, synthetic construct
  source 1..75: mol_type = other DNA
cttttcgggcaaatcaaaggttatttccaggatggcattgtgctgattggtctggtgatcgccgcggctgccttt

SEQ ID NO: 95631 - DNA, 75 bp, synthetic construct
  source 1..75: mol_type = other DNA
atgcgtattgagatctgcatagccaaagaaaaaatgactaaaatgccaaacggtgctgtggatgcgttaaaggaa

SEQ ID NO: 95632 - DNA, 75 bp, synthetic construct
  source 1..75: mol_type = other DNA
atcggtatcgacaccgctaaagagaaactggatgtcgatgtgttgcgtcctgatggtcgtcatcgcaccaaaaaa

SEQ ID NO: 95633 - DNA, 75 bp, synthetic construct
  source 1..75: mol_type = other DNA
atgctcgccttgaggcaaatccttcaaaagcaagttttgagcgtctatacaaagtgttaaatattttaggggtgg

SEQ ID NO: 95634 - DNA, 75 bp, synthetic construct
  source 1..75: mol_type = other DNA
tctttctaagctgcctgtacggcagtgaacattatcgtggagtaaccaatattatttttatctttctaagctgcc

SEQ ID NO: 95635 - DNA, 75 bp, synthetic construct
  source 1..75: mol_type = other DNA
gcaagggaggccggtcatgctgtccgtgagatggagcggtggatggtgccgaacaaactccgggaggcagcgtga

SEQ ID NO: 95636 - DNA, 75 bp, synthetic construct
  source 1..75: mol_type = other DNA
tgaatatcgatagcgaggcagggccattaatatattccgcacgctatctcggaggcacgttccggcgcggaggta

SEQ ID NO: 95637 - DNA, 75 bp, synthetic construct
  source 1..75: mol_type = other DNA
cggtggtttgaccgtggtgttctgcgggaggtggtccgggaagcccgggccgaaatccgcagcatggcggatgcc

SEQ ID NO: 95638 - DNA, 75 bp, synthetic construct
  source 1..75: mol_type = other DNA
tactgctgacgtttgcgttccctgtgtcgaagcgtctgcgaattcccgggcagcagaaccagcaaggcaaggcca

SEQ ID NO: 95639 - DNA, 75 bp, synthetic construct
  source 1..75: mol_type = other DNA
caaccgtaaattatgacggaaaaaaattcacgtatctggtcgctgatgtgtggccggggttctcgttacccattt

SEQ ID NO: 95640 - DNA, 75 bp, synthetic construct
  source 1..75: mol_type = other DNA
ctgcgttacggtgaaagaggcgactgacgctctgctgcattgtgcggaacagcttcacgagggagtgcattcatg

SEQ ID NO: 95641 - DNA, 75 bp, synthetic construct
  source 1..75: mol_type = other DNA
gcagtcagtggcagtcgctgccggtacttccggcagacggaacgcaggtgtctttcccgtatgccggtgaatggc

SEQ ID NO: 95642 - DNA, 75 bp, synthetic construct
  source 1..75: mol_type = other DNA
tgcgcaagcggcgcgcaccatcgtccgtgatagtggtgatggtaaagtacagacgctgggcgcggtagagcatag

SEQ ID NO: 95643 - DNA, 75 bp, synthetic construct
  source 1..75: mol_type = other DNA
gcatcacgtaaatgtacaaacaaaggagacacacgagcaggcatagttggcgagtcaaccgcgattttcaatgta

SEQ ID NO: 95644 - DNA, 75 bp, synthetic construct
  source 1..75: mol_type = other DNA
ttctgcgggaagttgtccgggaagcccgggccgaaatccgcagcatggcggatgccctggcaaaaatcaggggct

SEQ ID NO: 95645 - DNA, 75 bp, synthetic construct
  source 1..75: mol_type = other DNA
aaggcggctgccctgcaggtactggtgaacacactaacccacacggcagcgcatgaggtgccgtaccggatggaa

SEQ ID NO: 95646 - DNA, 75 bp, synthetic construct
  source 1..75: mol_type = other DNA
gtgttaccgaaagagagagcgctctctttcctgcctgccgaccgtttaacgcggcaacttaaagctgaaatggga

SEQ ID NO: 95647 - DNA, 75 bp, synthetic construct
  source 1..75: mol_type = other DNA
caagaaaggctgggggcagttcggggccattgtcgtggtgggggtggtactgctggttgcggtcatctggctgct

SEQ ID NO: 95648 - DNA, 75 bp, synthetic construct
  source 1..75: mol_type = other DNA
ggcgattgacgccgatcttaatgccgggttgatcaatcaggcgcaggcacaaacccgacgtaaagatgttgccag

SEQ ID NO: 95649 - DNA, 75 bp, synthetic construct
  source 1..75: mol_type = other DNA
gtgatggagcgcatggatcacttcatggactggctggctaaacagtacatcactgcactgaacatcatccactac

SEQ ID NO: 95650 - DNA, 75 bp, synthetic construct
  source 1..75: mol_type = other DNA
gggccgtctgattcaggaaactgcccctgacggcgatatcacccgctaccgttatgataatccacacagtgactt

SEQ ID NO: 95651 - DNA, 75 bp, synthetic construct
  source 1..75: mol_type = other DNA
atggctacccctgtttcgctgatggatgaccagatggtcgacatggcgtttatcactcaacttaccggcttaacc

SEQ ID NO: 95652 - DNA, 75 bp, synthetic construct
  source 1..75: mol_type = other DNA
atgaacagtgcacttcccgatgacatcgagcaactgaaggccctgctggtcgcccagcaggcgattatcgttcgt

SEQ ID NO: 95653 - DNA, 75 bp, synthetic construct
  source 1..75: mol_type = other DNA
atgggcgacgccgttgaaccgcgccgtgcgtttattgaagagaacgctctgaaagcggcgaatatcgatatttaa

SEQ ID NO: 95654 - DNA, 75 bp, synthetic construct
  source 1..75: mol_type = other DNA
cgtatctgcgccatatcctgagcgtactgccggaatggccctccaaccgtgttgacgaactgctgccatggaacg

SEQ ID NO: 95655 - DNA, 75 bp, synthetic construct
  source 1..75: mol_type = other DNA
gaactgaaactggtggcgctggaagatggcgtttcgcttctcaaccgtctacggatggaaggcaaaaacagtaaa

SEQ ID NO: 95656 - DNA, 75 bp, synthetic construct
  source 1..75: mol_type = other DNA
gcgcactgcttgccggtgaggagaacgctaggttgcgtgcagcccactggttacatgagaggggcctgaaagtat

SEQ ID NO: 95657 - DNA, 75 bp, synthetic construct
  source 1..75: mol_type = other DNA
tcggcctgcgtgcctatatcgaccagaccgtcggctggcacaaaaccctgtctaacgtcggcgtgcagggtgtta

SEQ ID NO: 95658 - DNA, 75 bp, synthetic construct
  source 1..75: mol_type = other DNA
cgaagatcctctgtgtaattgtcggcatttcattttcactaatgctggttgccattttcttttccaccgcctggc

SEQ ID NO: 95659 - DNA, 75 bp, synthetic construct
  source 1..75: mol_type = other DNA
aaaaaatgtgcctggtgcacattggaaataatctaccagcagaaaaaaaagctgagtttctggcaactctgattg

SEQ ID NO: 95660 - DNA, 75 bp, synthetic construct
  source 1..75: mol_type = other DNA
aaaatagacaacgattacgggacaaaactgatccagacagtgcggggcgtgggctacatgctggagatcccggat

SEQ ID NO: 95661 - DNA, 75 bp, synthetic construct
  source 1..75: mol_type = other DNA
tcgccgctagggcgttcaatcaaccgcttttgctggagcccgcctacgcgcgggtatttttttctgcgctgagcg

SEQ ID NO: 95662 - DNA, 75 bp, synthetic construct
  source 1..75: mol_type = other DNA
ctaaaagccgatcaggcactggataaggccggaaaaattatcatggctgatgtgcaggaggtgcaccatgcataa

SEQ ID NO: 95663 - DNA, 75 bp, synthetic construct
  source 1..75: mol_type = other DNA
atgaagaattcattgttacctttgataaaggcaacaagcaagacaattcaagacgaaaacacgataattttccta

SEQ ID NO: 95664 - DNA, 75 bp, synthetic construct
  source 1..75: mol_type = other DNA
gcagaagccagcggtgatttatggcgtgacgcccgctgggccatcagccgggtacaggatgcgccgcactgcaca

SEQ ID NO: 95665 - DNA, 75 bp, synthetic construct
  source 1..75: mol_type = other DNA
ttgatttagccgaccgcgaaggcatgaccgatctcttcgcatccgggcatttcgaacgtgtgattcatctcgccg

SEQ ID NO: 95666 - DNA, 75 bp, synthetic construct
  source 1..75: mol_type = other DNA
tcagatagacggcgacaaggcggtcgtgaacaacgacggtgacaatgccatcagcaacggcggcaccggcacgca

SEQ ID NO: 95667 - DNA, 75 bp, synthetic construct
  source 1..75: mol_type = other DNA
tgagcttgttattacgggtgataatgccacagtaaacaacaatggcaaaaccatcgttgatggtaaagattccac

SEQ ID NO: 95668 - DNA, 75 bp, synthetic construct
  source 1..75: mol_type = other DNA
gctggatggaccgtctgtgtgaagactactgcggtggtatctggagtctgtacaccctgaacaacggtggcgcat

SEQ ID NO: 95669 - DNA, 75 bp, synthetic construct
  source 1..75: mol_type = other DNA
gttttcacgcatcggaccgtagcgacagcccgaaaccgcgccagcgggttcggcggagactggcaggtgcgccag

SEQ ID NO: 95670 - DNA, 75 bp, synthetic construct
  source 1..75: mol_type = other DNA
gcgcggggcggcggtgattatcgaaagtcagtttcaggttgccgatctgatggtcgatctcgtcagccgcaaagt

SEQ ID NO: 95671 - DNA, 75 bp, synthetic construct
  source 1..75: mol_type = other DNA
ctactaaagttgaaacgaatccggaagaggtttttacttccatgatggaattttttaaagaaagaattgctgctt

SEQ ID NO: 95672 - DNA, 75 bp, synthetic construct
  source 1..75: mol_type = other DNA
ccccgtgtcttcggctggatggaccgtctgtgtgaagactactgcggtggtatctggaatctgtacaccctgaac

SEQ ID NO: 95673 - DNA, 75 bp, synthetic construct
  source 1..75: mol_type = other DNA
cgcttatccgcaaagacggtttccgcttctggggttcccgctgtctgagcgatgatccgctctttgccttcgaaa

SEQ ID NO: 95674 - DNA, 75 bp, synthetic construct
  source 1..75: mol_type = other DNA
gcggcggcaaactttgccacgctgacggaacgggagattgccgaagcggaacaggtaacaaccatcaacgttaaa

SEQ ID NO: 95675 - DNA, 75 bp, synthetic construct
  source 1..75: mol_type = other DNA
tgcgcgttgttgaagtcaacgagggcacccgatctatcaccacggtgagcaccgctatcgtgggcatggtctgca

SEQ ID NO: 95676 - DNA, 75 bp, synthetic construct
  source 1..75: mol_type = other DNA
tcgtaaaagtgaagaggccttttcatcagtatataaacttattgaacaagctgctaattgctgggcggataaact

SEQ ID NO: 95677 - DNA, 75 bp, synthetic construct
  source 1..75: mol_type = other DNA
ccggcggcgtcacacccgatggatgttatgcgcaccggcgtttccgcgctcggctgcacgctgccagaaaaagag

SEQ ID NO: 95678 - DNA, 75 bp, synthetic construct
  source 1..75: mol_type = other DNA
gaccaggcaaaacccgtgaccgttgttgtgcgtgtgccgcagggggaaacggaagaagaaaccacgaccaatatc

SEQ ID NO: 95679 - DNA, 75 bp, synthetic construct
  source 1..75: mol_type = other DNA
tagaaaaagtgatgaagcttttttctcagtatataaactgattgaacaagctggaaacctttgggttcaaaaatt

SEQ ID NO: 95680 - DNA, 75 bp, synthetic construct
  source 1..75: mol_type = other DNA
acggcggcaaactttgccacgctgacagaacgggagattgccgaagcggaacaggtaacaaccatcaacgttaaa

SEQ ID NO: 95681 - DNA, 75 bp, synthetic construct
  source 1..75: mol_type = other DNA
aatcgctcctgaagttcgagggaaaactctcctgttggggcagtggttaggtggaaaagaaatccctgatccata

SEQ ID NO: 95682 - DNA, 75 bp, synthetic construct
  source 1..75: mol_type = other DNA
gtactggaaatatttgtcgttcacctattggtgaacggtttttaagacagttattaccgaataaaaaaattgact

SEQ ID NO: 95683 - DNA, 75 bp, synthetic construct
  source 1..75: mol_type = other DNA
atcgttatggtcgtattctcgggcaggtttatgcaccagacggaatgaatgttaatcagtttatggtccgggccg

SEQ ID NO: 95684 - DNA, 75 bp, synthetic construct
  source 1..75: mol_type = other DNA
gttcgcgtatttttaaatgcggcaaagactgaagtattaaatcagcgttatttccttgggccatgtccattctga

SEQ ID NO: 95685 - DNA, 75 bp, synthetic construct
  source 1..75: mol_type = other DNA
cgtgatcagtgtcatcaatacctggcctgccaaccgcgtgaaagagctgttgccctggaacgtaaccctctctgt

SEQ ID NO: 95686 - DNA, 75 bp, synthetic construct
  source 1..75: mol_type = other DNA
aatccgctcagactgggagcaggagcacaggggcaatatggatatgaaatcacaaaaggtctttcagccgttaat

SEQ ID NO: 95687 - DNA, 75 bp, synthetic construct
  source 1..75: mol_type = other DNA
ggtgatgcaggctggcatagcgtcatcacaaagctggagtacaaagcagcgggaaaaggcattcacctagtaaaa

SEQ ID NO: 95688 - DNA, 75 bp, synthetic construct
  source 1..75: mol_type = other DNA
aaacgaagggcgcggggacgacgttctggatgtataccggcaaaggggacgcctttgcggctccgttgtcagata

SEQ ID NO: 95689 - DNA, 75 bp, synthetic construct
  source 1..75: mol_type = other DNA
tggcgaagatcctctgtgtaatcgtcggcattccatttttagtcatgctggttgccattttcttttccaccgcct

SEQ ID NO: 95690 - DNA, 75 bp, synthetic construct
  source 1..75: mol_type = other DNA
gaaccatttatatccccccctgtaaaataaaaaatgatactgactttaaagtctctttcgacaagattgcgcttc

SEQ ID NO: 95691 - DNA, 75 bp, synthetic construct
  source 1..75: mol_type = other DNA
gctcactgcttgccggtgaggaaaacgccaggctgcgtgcagcccactggttacatgagaggggtctgaaagtat

SEQ ID NO: 95692 - DNA, 75 bp, synthetic construct
  source 1..75: mol_type = other DNA
tgctggcgagattgtcacgatgaagcatgagagttacctcagtgttttatataaggattcggtcctcatagtaga

SEQ ID NO: 95693 - DNA, 75 bp, synthetic construct
  source 1..75: mol_type = other DNA
gcgcctggcaacctcgattaagcaggggacagtcaccgcatcactgatgatgaaaaagttagccagttacccaaa

SEQ ID NO: 95694 - DNA, 75 bp, synthetic construct
  source 1..75: mol_type = other DNA
agtattaatatgccgactgtacccaccactgtatttgatggtaaagcgaaatattcaacttatgatggcgcggtt

SEQ ID NO: 95695 - DNA, 75 bp, synthetic construct
  source 1..75: mol_type = other DNA
aactcgaggcgaaaggcttttaccggagagcgtcggcgcgatggggtgaagtcatgctactggtggagacagaca

SEQ ID NO: 95696 - DNA, 75 bp, synthetic construct
  source 1..75: mol_type = other DNA
gcgctggtggtgttaattcgccacccgttgatgccggtgtatatcgatattttgcgtaaagtggttggggtttag

SEQ ID NO: 95697 - DNA, 75 bp, synthetic construct
  source 1..75: mol_type = other DNA
actggcggaacttctagtgcaaaaagaagagaatagttggcgcattatgctaatgacgatgcttatctcgcaacc

SEQ ID NO: 95698 - DNA, 75 bp, synthetic construct
  source 1..75: mol_type = other DNA
ggtaaaacaagaactgcccggctgtgggtctatgtccgtgatgaccgtaacgccggttcacagatgcccccggcg

SEQ ID NO: 95699 - DNA, 75 bp, synthetic construct
  source 1..75: mol_type = other DNA
gcactgaaacgtataccggtcgtgaagtgcaggatattcccggtgtgctggccgtatttgctgaacgccgtaagg

SEQ ID NO: 95700 - DNA, 75 bp, synthetic construct
  source 1..75: mol_type = other DNA
tgtcggtcagagcggcggtggctgggcgcactatgtaggtcaggaaaaactgcgtccgcaaaccggctggcagcc

SEQ ID NO: 95701 - DNA, 75 bp, synthetic construct
  source 1..75: mol_type = other DNA
ccgcgtgttaacgggaaaatactgcgaacatctgccactgtatcgtcagagtgaaatctttgcccgccagggtgt

SEQ ID NO: 95702 - DNA, 75 bp, synthetic construct
  source 1..75: mol_type = other DNA
aagctgaccctgagttaaataacttacgttatatgtggaacatcctgatgtatgccattccgtgtacgttatggg

SEQ ID NO: 95703 - DNA, 75 bp, synthetic construct
  source 1..75: mol_type = other DNA
cgccgcgtgcatgccggcctgaacaaaggtgaggcgcgcaactcgctggccagggcggtgttcttcaaccgcctt

SEQ ID NO: 95704 - DNA, 75 bp, synthetic construct
  source 1..75: mol_type = other DNA
cgtgatcagtgtcatcaacacctggccagccaaccgcgtgaaagagttgttgccctggaacgtcactctatctgt

SEQ ID NO: 95705 - DNA, 75 bp, synthetic construct
  source 1..75: mol_type = other DNA
tcgtgctgatgcgctggtggggcgaatttgtcgaggctgcggcgacgggcgtaaccctcgccagtggtaaaaggg

SEQ ID NO: 95706 - DNA, 75 bp, synthetic construct
  source 1..75: mol_type = other DNA
ggacggagcacggtatccagggcaaagacctggggcagcagggcggcgtgaagccggaagaagtggactggcagg

SEQ ID NO: 95707 - DNA, 75 bp, synthetic construct
  source 1..75: mol_type = other DNA
atttatggcgaagatagttggaacgctaatccttgggtgtgggtaatcgagtttaagcgtattcagggggcaacc

SEQ ID NO: 95708 - DNA, 75 bp, synthetic construct
  source 1..75: mol_type = other DNA
gcgcccgcgatgttattcgtcgggatgatttcgccaaaaccggcgcgacaaccatgcgcgacgtcctgaaccgta

SEQ ID NO: 95709 - DNA, 75 bp, synthetic construct
  source 1..75: mol_type = other DNA
gcccgcagcggtattaccctctctgccgacgccggtcttacgcgcggcaaacatagcactggcctgcatggcagt

SEQ ID NO: 95710 - DNA, 75 bp, synthetic construct
  source 1..75: mol_type = other DNA
gctaagatgaaatatcaggtcagtcagggcgaattatcaaccctgtcagaagcgcagaaaaaaacgcttttgcag

SEQ ID NO: 95711 - DNA, 75 bp, synthetic construct
  source 1..75: mol_type = other DNA
gctggatggaccgtctgtgtgaagactactgtggtggtatctggaatctgtaccccctgaacaacggcggggcat

SEQ ID NO: 95712 - DNA, 75 bp, synthetic construct
  source 1..75: mol_type = other DNA
tctcaggctgaaaggtgaactgacaccggcgttattacagacacttatccgcgaaatgaaagggagcagccacta

SEQ ID NO: 95713 - DNA, 75 bp, synthetic construct
  source 1..75: mol_type = other DNA
tctcaggctgaaaggtgaactgacgccggcgttattacagacacttatccgcgaaatgaaagggagcagccactg

SEQ ID NO: 95714 - DNA, 75 bp, synthetic construct
  source 1..75: mol_type = other DNA
aacagattgaagtgatggcgaaatcgccggtaaaagatgtctggacggtctaccagtgccagcattgcctctata

SEQ ID NO: 95715 - DNA, 75 bp, synthetic construct
  source 1..75: mol_type = other DNA
gtgctgctgcataagctgccggtgaaacgcctgcaactggctgatggcagcaccgccctggtgaccaccgtttat

SEQ ID NO: 95716 - DNA, 75 bp, synthetic construct
  source 1..75: mol_type = other DNA
aatggtggggtctgcacctgctgcactggatacactgaacgaactggctgcggcgctggggaatgacccgaactt

SEQ ID NO: 95717 - DNA, 75 bp, synthetic construct
  source 1..75: mol_type = other DNA
gaattgacgtcccgtatgacggatatgaaatcaagacaatcacacatccgcacttcggtgataaaccggtaaagg

SEQ ID NO: 95718 - DNA, 75 bp, synthetic construct
  source 1..75: mol_type = other DNA
tcgcggagagaaaacggaagagtatcgcctgtgtaatgactactggaataagcgaattatgttccgggagtatga

SEQ ID NO: 95719 - DNA, 75 bp, synthetic construct
  source 1..75: mol_type = other DNA
ttcctggaactgctggagatattggcggttctataggatccgagctaggtggaaaagtaacagataaagtatctg

SEQ ID NO: 95720 - DNA, 75 bp, synthetic construct
  source 1..75: mol_type = other DNA
ctggctggggggctggacattactgtactggggatggtggctttcatggtcgccgtttgtggggatgttcatcgc

SEQ ID NO: 95721 - DNA, 75 bp, synthetic construct
  source 1..75: mol_type = other DNA
gttgaccagaaaacagcacaaggttatgtcgagacgacgcagggattagaaattgcagcggcttcaatgacacca

SEQ ID NO: 95722 - DNA, 75 bp, synthetic construct
  source 1..75: mol_type = other DNA
gttccagccttacattgaagcgaactggatcaacaacagcaaagtctacgccgtgaagatgaatggtcaaaccgt

SEQ ID NO: 95723 - DNA, 75 bp, synthetic construct
  source 1..75: mol_type = other DNA
gatggctttactgctgtaacttgtttgacatcaggaaccagtagtgattcaaaagtttcaagcgctgtatttatt

SEQ ID NO: 95724 - DNA, 75 bp, synthetic construct
  source 1..75: mol_type = other DNA
ggttctgttagttctcctgcattgcgcccgtagctcgctgacgctcacacgcgcagtacagcgccccgccatgct

SEQ ID NO: 95725 - DNA, 75 bp, synthetic construct
  source 1..75: mol_type = other DNA
tggcgctgacattccgggcgtcttctccgccacaacgccatttgcagtgcatcacaggccagttgtgctgtcatt

SEQ ID NO: 95726 - DNA, 75 bp, synthetic construct
  source 1..75: mol_type = other DNA
tttaggtgagtgtaccagaggagctcatagtggactgcctttttatcgggtggatggaccgttgcagacgatgaa

SEQ ID NO: 95727 - DNA, 75 bp, synthetic construct
  source 1..75: mol_type = other DNA
ttcgggacatgaagaccggattgcctggctgcgtaaactgattgcgtggcaggaagagatggctgattccggcga

SEQ ID NO: 95728 - DNA, 75 bp, synthetic construct
  source 1..75: mol_type = other DNA
caacggcacggttaacaacaaaggagatattgttgtttccgatactggatcgattggcgtgctcatcaacggtga

SEQ ID NO: 95729 - DNA, 75 bp, synthetic construct
  source 1..75: mol_type = other DNA
tattcaaaacgttttgaatctaccggtagccagctcactttcgctggctaccgtttctctgataaaaactttgtg

SEQ ID NO: 95730 - DNA, 75 bp, synthetic construct
  source 1..75: mol_type = other DNA
tactgttcaatgccatgaacggcaaccgcgctgaaatgagcccggaagccgctggcattgctgcctgtctgatga

SEQ ID NO: 95731 - DNA, 75 bp, synthetic construct
  source 1..75: mol_type = other DNA
gatgtgcatgcaagagtgcccaccgacatcaccacggaagccctgcagcgtatcggtgaactgtatgccatcgag

SEQ ID NO: 95732 - DNA, 75 bp, synthetic construct
  source 1..75: mol_type = other DNA
tatctggaatctgtataccctgaacaatggcggggcatttatggcacccgaaccgaatgacgatgatgacgaaac

SEQ ID NO: 95733 - DNA, 75 bp, synthetic construct
  source 1..75: mol_type = other DNA
ttggcgttccgttcttctggccgtccgctgcaatgccaaatactgtaatcgacagctggtccagtatggtgtttt

SEQ ID NO: 95734 - DNA, 75 bp, synthetic construct
  source 1..75: mol_type = other DNA
tgcgttggggattcttggtgggatcccgcgccgtgaatttactcgcgacagcatcgaagagaaagtcgctgccac

SEQ ID NO: 95735 - DNA, 75 bp, synthetic construct
  source 1..75: mol_type = other DNA
atggtcacatccgacagatgatgacgagttgccggaagtcaccggacctgcgtggatagtcgacaaggtggcgca

SEQ ID NO: 95736 - DNA, 75 bp, synthetic construct
  source 1..75: mol_type = other DNA
ctggtcctgtgtctgggaccaaccgtgcttctgctgaagtcatttgtggaaaatacgggcggttatctttcggaa

SEQ ID NO: 95737 - DNA, 75 bp, synthetic construct
  source 1..75: mol_type = other DNA
gcggcagagaatgccaggtacgtatttacggcgtatgcaatggcaaccctgaaactacagttctggcacattacc

SEQ ID NO: 95738 - DNA, 75 bp, synthetic construct
  source 1..75: mol_type = other DNA
ggtgtcagccagaaagcgacgttattgcagaattaagccgccgtttcagttgcacactggagcactggtatgccg

SEQ ID NO: 95739 - DNA, 75 bp, synthetic construct
  source 1..75: mol_type = other DNA
gatccgattgggctgaaggggggatggaatttttatcagtatccgttgaatccagttacgaatacagatcctctg

SEQ ID NO: 95740 - DNA, 75 bp, synthetic construct
  source 1..75: mol_type = other DNA
tgctgaactgaataaaaaactgtcgacgctgatgccttctgaagatgaaaaaaaacgccgcgatgagcagaaatc

SEQ ID NO: 95741 - DNA, 75 bp, synthetic construct
  source 1..75: mol_type = other DNA
cgaaaggcgatgaaattgttcggggcgcactctgcgggcctgcatctcggaatgagcaccggctttgattcaggc

SEQ ID NO: 95742 - DNA, 75 bp, synthetic construct
  source 1..75: mol_type = other DNA
ggttatctctctgcggtttttccgtatgacaccgccaccggtgcggtgctgcaaatccgccttgctgcgctgacc

SEQ ID NO: 95743 - DNA, 75 bp, synthetic construct
  source 1..75: mol_type = other DNA
ctgcctcagggcgtcacactggaaggtaatgccggtcataacctgctggcgtcgttttacgtacagagcgatgcc

SEQ ID NO: 95744 - DNA, 75 bp, synthetic construct
  source 1..75: mol_type = other DNA
acacttaatggggttgctttgctattgtcaatgttcgtaatgatgccggttgggaaggaaatatataataacagt

SEQ ID NO: 95745 - DNA, 75 bp, synthetic construct
  source 1..75: mol_type = other DNA
catcacgccccgctctggcagcaggtcagtcaggtggaacatcgaccactgagtgcctatgaggagctgttgtga

SEQ ID NO: 95746 - DNA, 75 bp, synthetic construct
  source 1..75: mol_type = other DNA
cgacgaggtaagcgactgctgggcatgactgaaccgggcaaagcattactggtcattgcagaacgtattctgaat

SEQ ID NO: 95747 - DNA, 75 bp, synthetic construct
  source 1..75: mol_type = other DNA
gtaacggccatgtggtcatcgctggtgatggtcaggccacgttgggcaataccgtaatgaaaggcaacgtgaaaa

SEQ ID NO: 95748 - DNA, 75 bp, synthetic construct
  source 1..75: mol_type = other DNA
ctggtttgacgaagaggccaacagtaaagaaaccctgaaagccgggaaactgtttatcgattatgactatacgcc

SEQ ID NO: 95749 - DNA, 75 bp, synthetic construct
  source 1..75: mol_type = other DNA
attgcaaaaaagatttgaagaattgaatatatggttaggtaaaactgttatcagttttgacgcctacaaacttga

SEQ ID NO: 95750 - DNA, 75 bp, synthetic construct
  source 1..75: mol_type = other DNA
cgccaatcggcattcaggtgatgagcctctcttatgtaggtaagccagaatacccgccaacagttattgacagta

SEQ ID NO: 95751 - DNA, 75 bp, synthetic construct
  source 1..75: mol_type = other DNA
ttgagaactacacccgcaccgcgcaggtgctggccgacacgatggccgaggcgcacatgtgggcggtcgataagc

SEQ ID NO: 95752 - DNA, 75 bp, synthetic construct
  source 1..75: mol_type = other DNA
ccatcccgtcagccctgctcaacgagtccgccacactgttccgccgtaagtattacatcaacggcagccatgcag

SEQ ID NO: 95753 - DNA, 75 bp, synthetic construct
  source 1..75: mol_type = other DNA
ggatatcttcgattacattgaagtgttctacaaccgggcccggcgccacagtcacctcggcggcgtcagtccgga

SEQ ID NO: 95754 - DNA, 75 bp, synthetic construct
  source 1..75: mol_type = other DNA
gctcgcctacatggctaatgtttggtgacgaagacaaggcaccagtgccagcacaagaacttcatgtggaaaccg

SEQ ID NO: 95755 - DNA, 75 bp, synthetic construct
  source 1..75: mol_type = other DNA
aggtcgtcgaaattaacgacggcacccgcacaatctcgacggtatcaacggcggtcgttggcatggtctgcacag

SEQ ID NO: 95756 - DNA, 75 bp, synthetic construct
  source 1..75: mol_type = other DNA
agtcgcgccatcgtcgtccgttaccggcacaccttccccgtgaaatacaccgtctggagtctgaagaaagttgtt

SEQ ID NO: 95757 - DNA, 75 bp, synthetic construct
  source 1..75: mol_type = other DNA
ttgctagtgctggcgcaacaagacatgcgctaaccaaaggaatgattgaggacttacaagtcccaaaaccgcctc

SEQ ID NO: 95758 - DNA, 75 bp, synthetic construct
  source 1..75: mol_type = other DNA
ttcttttttacctgcacgagtaaaccaacatgtcgctataattcgccccaaaagtaatgagtttgactctcgttt

SEQ ID NO: 95759 - DNA, 75 bp, synthetic construct
  source 1..75: mol_type = other DNA
tgttccgcctcgaaattctggaggacattgcccgggataaagtcagaactctccattttgtggatgagatagaag

SEQ ID NO: 95760 - DNA, 75 bp, synthetic construct
  source 1..75: mol_type = other DNA
aggcgtcagcctgccaggggttttcgcgcgggctgacaggcggcctccaccgcctgccctgtatcacctgtttct

SEQ ID NO: 95761 - DNA, 75 bp, synthetic construct
  source 1..75: mol_type = other DNA
atgagaaacaaacctttttatcttctgtgcgcttttttgtggctggcggtaagtcacgctttggctgcggatagc

SEQ ID NO: 95762 - DNA, 75 bp, synthetic construct
  source 1..75: mol_type = other DNA
atgccgagaataatcgaattacgccagcagaaaaccgccattaaaaatcagatgcgcgacatgctggagaacgcg

SEQ ID NO: 95763 - DNA, 75 bp, synthetic construct
  source 1..75: mol_type = other DNA
attttgctgactggatcactgagtttggtaaggctgcccggacagataactggcgtccttttttgttaaaacaga

SEQ ID NO: 95764 - DNA, 75 bp, synthetic construct
  source 1..75: mol_type = other DNA
aactgggcgacgataaaggcgtcggtgaagtggtcggtgttgggcgctactggacgggatggaacactgaggttt

SEQ ID NO: 95765 - DNA, 75 bp, synthetic construct
  source 1..75: mol_type = other DNA
ctgcctggctgaatgagtcggccacgctgttccgccgcaagtattacgaaaacggcgcacatgccggatacatca

SEQ ID NO: 95766 - DNA, 75 bp, synthetic construct
  source 1..75: mol_type = other DNA
acgaccagatggactcagacgccgctgtggatgaggccctgctcatcaacgaatacacctttaccgaagccggtc

SEQ ID NO: 95767 - DNA, 75 bp, synthetic construct
  source 1..75: mol_type = other DNA
tttgagcgcgcccgtgacgctgtcagtaaagcggatgctggcatcgtgaaagcacgacgccagcttaacgccctt

SEQ ID NO: 95768 - DNA, 75 bp, synthetic construct
  source 1..75: mol_type = other DNA
tgcagagcttcaccgaggtgattgacgccaaactgcgctacccgaacaccgcgctgctctacgtcgaattcgact

SEQ ID NO: 95769 - DNA, 75 bp, synthetic construct
  source 1..75: mol_type = other DNA
gatttgaaagcttcatggaacagaggtacccagacctgtcgttgcaggtcaaaggtaatattggcgcatcaatga

SEQ ID NO: 95770 - DNA, 75 bp, synthetic construct
  source 1..75: mol_type = other DNA
ctcagtaaatgcccgtttgaagcaggccacgcagtccagcgatgatttccaggcatcacagcgcgaattaatggc

SEQ ID NO: 95771 - DNA, 75 bp, synthetic construct
  source 1..75: mol_type = other DNA
taagccaggtccaacagtttctcgatcgtcaacacggtctttatattgatggtcgtcctggccccgcacaaagtg

SEQ ID NO: 95772 - DNA, 75 bp, synthetic construct
  source 1..75: mol_type = other DNA
ctggccgtgtttgcagaacgccgtaaggacagttttggcccgtatgtccggctgatgagcgtcaccctgaactga

SEQ ID NO: 95773 - DNA, 75 bp, synthetic construct
  source 1..75: mol_type = other DNA
gttcagcgatgacggggacggttatgtcgaccgcgtggcgctcgatgccgccctgctggaaaaactccaggctgt

SEQ ID NO: 95774 - DNA, 75 bp, synthetic construct
  source 1..75: mol_type = other DNA
cccgaaatattgcctgtaacgatgccactgggctttatcacaacgaacaaagaaacggttaagattattggtact

SEQ ID NO: 95775 - DNA, 75 bp, synthetic construct
  source 1..75: mol_type = other DNA
gcgacaatgaacgcgacaaacaaaaatcaagaattgtcacggcattaataacgcttcttgagcctgtaataatgg

SEQ ID NO: 95776 - DNA, 75 bp, synthetic construct
  source 1..75: mol_type = other DNA
tacgccgtagtgatcaataaaaacgtggtagcgggggatgatttcaccattcgccacggcgtcactatcggcaat

SEQ ID NO: 95777 - DNA, 75 bp, synthetic construct
  source 1..75: mol_type = other DNA
tcagataaaaatggttttccagcatggcaggatgcgccaccacttaccagcgaagaattaatctcaatctctgaa

SEQ ID NO: 95778 - DNA, 75 bp, synthetic construct
  source 1..75: mol_type = other DNA
gaacagcaccgcgctctgggtcagatgaaagaaatggctgcgaaatacggctacgacatctctggtccggctacc

SEQ ID NO: 95779 - DNA, 75 bp, synthetic construct
  source 1..75: mol_type = other DNA
cgacgagggtggctatgtggactgcgtggcgctcgatgccgccctgctggaaaaactccaggctgttgctgaaca

SEQ ID NO: 95780 - DNA, 75 bp, synthetic construct
  source 1..75: mol_type = other DNA
tggatgtgtacaccacgtccacaggcagagacggaaaccacggaataccgtgacaaccaggccgatgccgcctga

SEQ ID NO: 95781 - DNA, 75 bp, synthetic construct
  source 1..75: mol_type = other DNA
actgattaaatcaccgctgaatgtgcgcacggtgccgtattctgcggagtccgtcagcgaactggcggactccat

SEQ ID NO: 95782 - DNA, 75 bp, synthetic construct
  source 1..75: mol_type = other DNA
agcctggtcagtcaggggtatctcattggtggtgattgctggctggacgagtcggtgaacgacaaagacactctg

SEQ ID NO: 95783 - DNA, 75 bp, synthetic construct
  source 1..75: mol_type = other DNA
atggaggcctgtgaaggttctcagcactgggcacgtgaactgacaaagcttggtcataaagtccggttgtgtagt

SEQ ID NO: 95784 - DNA, 75 bp, synthetic construct
  source 1..75: mol_type = other DNA
gaaaatataaccactatcaccccgttaacaccatatgataaatgggatggtgagaaatgggtgacggatactgag

SEQ ID NO: 95785 - DNA, 75 bp, synthetic construct
  source 1..75: mol_type = other DNA
tctggccgaagttaaaatcgttcctcagagaatatcccgaaatcaatgtcgaactggtggtggataacggttttg

SEQ ID NO: 95786 - DNA, 75 bp, synthetic construct
  source 1..75: mol_type = other DNA
gcggcgttcgcaccagctcttaactgtcacactcgggagtcttttttttcatgcatcgcagcgcaactccgccaa

SEQ ID NO: 95787 - DNA, 75 bp, synthetic construct
  source 1..75: mol_type = other DNA
gtatcagcagctgttccagcgcggcgacatgatgctgcccatcagcgacctgtgggccggacgcctcaaaaagat

SEQ ID NO: 95788 - DNA, 75 bp, synthetic construct
  source 1..75: mol_type = other DNA
ggcaaaacatcttgccgcaccggacccgcattcacagtacgcgccaaaagccagcccgacatttaccggaacccc

SEQ ID NO: 95789 - DNA, 75 bp, synthetic construct
  source 1..75: mol_type = other DNA
gcgaacactgtctgaacccggcatgtgtggcgacctgcccgagcggtgcgatttacaagcgtgaagaagatggca

SEQ ID NO: 95790 - DNA, 75 bp, synthetic construct
  source 1..75: mol_type = other DNA
tcagatcaccaacgtcgcggctggttcagcggataccgatgcggttaacgtaggtcagttgaaagtcactgatga

SEQ ID NO: 95791 - DNA, 75 bp, synthetic construct
  source 1..75: mol_type = other DNA
ccggagtgcgttgcccaggccgtaaaaacccgtttcgagctgtggcgaggtcagtggtttctcgacctgacagaa

SEQ ID NO: 95792 - DNA, 75 bp, synthetic construct
  source 1..75: mol_type = other DNA
gtgatgtgggcgctctcctcgaaagtgaacccggcaggggatttggtgcagttgccgaatatgtccgtgctggaa

SEQ ID NO: 95793 - DNA, 75 bp, synthetic construct
  source 1..75: mol_type = other DNA
ggctcagatactggtgaaaccaccgaaaccaccgaaaccactgaaacccggcatcccgccgacaaggaaaaagca

SEQ ID NO: 95794 - DNA, 75 bp, synthetic construct
  source 1..75: mol_type = other DNA
ggccgtggacgtaaggccgcgcagccggagcctcagccgccgtctgaacccgagtataacttcgatgacgacatc

SEQ ID NO: 95795 - DNA, 75 bp, synthetic construct
  source 1..75: mol_type = other DNA
agcggatatctggttaagggtcgttatttatatgggtataacaaagtaccagaggacagtgcatttatcatattt

SEQ ID NO: 95796 - DNA, 75 bp, synthetic construct
  source 1..75: mol_type = other DNA
atgtcagttacagagtctaagacaaaaacggagcgtaaatccagccgtaaacctgcaaaaacgcaggaaactgca

SEQ ID NO: 95797 - DNA, 75 bp, synthetic construct
  source 1..75: mol_type = other DNA
gcccagacatttaccctaatccgaccgacggtttacctgtcgagtgtcaggctaacacacaaccagagacggggg

SEQ ID NO: 95798 - DNA, 75 bp, synthetic construct
  source 1..75: mol_type = other DNA
agggagtgctgcgcggtgaagaatttaactctgtgaatgagaacggcgatcgtgttattcgtgcgctggctgcgg

SEQ ID NO: 95799 - DNA, 75 bp, synthetic construct
  source 1..75: mol_type = other DNA
ccgacgaaaacggtcagtacaccggactgaaagccctgatgggggcggagtcggttaccggcgttaaaccacgca

SEQ ID NO: 95800 - DNA, 75 bp, synthetic construct
  source 1..75: mol_type = other DNA
gaggtgacaacggataaaaccagcgagaacgtgctgaactgcacgcttaccctgcgtgaagtgatcatgtcgcag

SEQ ID NO: 95801 - DNA, 75 bp, synthetic construct
  source 1..75: mol_type = other DNA
aacagtgagcagcagtacgacaatattgctggcaccacaaatctggggtatcagaaacagtttggcgaagcacgg

SEQ ID NO: 95802 - DNA, 75 bp, synthetic construct
  source 1..75: mol_type = other DNA
acacaggcacagcgggcggaagaggcccgcacctcttcgctatcttcttctgacagttcccgccctctctcagcc

SEQ ID NO: 95803 - DNA, 75 bp, synthetic construct
  source 1..75: mol_type = other DNA
ctacaccgctaccgtgcaggggaatttaagctggagcgtggacgttccggcggcggatattcaggccatcggtaa

SEQ ID NO: 95804 - DNA, 75 bp, synthetic construct
  source 1..75: mol_type = other DNA
tgacaaacagacaggggagatgcgggagcagacagaatggcatcgcgtggtgctgttcggcaagctcgcggaagt

SEQ ID NO: 95805 - DNA, 75 bp, synthetic construct
  source 1..75: mol_type = other DNA
gcgtacagtaaaccagcacaaatcagcctggaatgtaaacattattcgctgaccagcgatgcgccgtcagggaag

SEQ ID NO: 95806 - DNA, 75 bp, synthetic construct
  source 1..75: mol_type = other DNA
agtcaggcgtcactacgctgattcgccgcgacggtttccgcttctggggtaaccgtacctgctctgatgacccgc

SEQ ID NO: 95807 - DNA, 75 bp, synthetic construct
  source 1..75: mol_type = other DNA
gtttgcttaatggacctcaggtcgataccagcaaagccggtgtggtagccagtcaggatcaggtggacgatttgt

SEQ ID NO: 95808 - DNA, 75 bp, synthetic construct
  source 1..75: mol_type = other DNA
atgtcacttgcaaccacagtgaaggagagcaagttacagagacgcatgtacacgcagaaagctctctggtatcgc

SEQ ID NO: 95809 - DNA, 75 bp, synthetic construct
  source 1..75: mol_type = other DNA
gatcagccacaaaatccggcgttacgcctgcaggtcatgtcggctgtgtatgtggcactgagtcgctgggagcca

SEQ ID NO: 95810 - DNA, 75 bp, synthetic construct
  source 1..75: mol_type = other DNA
tataccggtcgtgaagtgcaggatattcccggtgtgctggccgtgtttgctgaacgccgtaaggacagttttggt

SEQ ID NO: 95811 - DNA, 75 bp, synthetic construct
  source 1..75: mol_type = other DNA
aggtcatcgaaatcaatgacggtacgcgtgttatttctacggtcgcgactgcaattgtcggcatggtctgcacgg

SEQ ID NO: 95812 - DNA, 75 bp, synthetic construct
  source 1..75: mol_type = other DNA
tcgggacgaatatgaaaaatattttgactcgttaaataatggcgaggagtatttgagttttaaagaatatatcgg

SEQ ID NO: 95813 - DNA, 75 bp, synthetic construct
  source 1..75: mol_type = other DNA
aaaagctactgaagccatgacggtagagtctgtgatccgtgcttggtatgaagcatattgtgtaaaaaataaaaa

SEQ ID NO: 95814 - DNA, 75 bp, synthetic construct
  source 1..75: mol_type = other DNA
gaaatgaagggaacagcggagcgatttgcagtagcatcaacagggattattaataatggagtattgacagctttg

SEQ ID NO: 95815 - DNA, 75 bp, synthetic construct
  source 1..75: mol_type = other DNA
cgcagtgaagatgacgcgactgatgacgctgaccgcacggaacaggtgcaggagaaagcgtcagtggaggaaatc

SEQ ID NO: 95816 - DNA, 75 bp, synthetic construct
  source 1..75: mol_type = other DNA
ggcgcagaaaccgcacctgcaacgattcgggtatgggttcgctatcgtggcgacatatccgccgccagtcgactg

SEQ ID NO: 95817 - DNA, 75 bp, synthetic construct
  source 1..75: mol_type = other DNA
cgctgactcatttgagtggaaaggatgtagcaggtcttctcgcataccttggtttgggagaaggtgctccagcta

SEQ ID NO: 95818 - DNA, 75 bp, synthetic construct
  source 1..75: mol_type = other DNA
gtgacgagctggaacaatataatttatggctggattatctggacgcactggaactggttgatatctccagtgctc

SEQ ID NO: 95819 - DNA, 75 bp, synthetic construct
  source 1..75: mol_type = other DNA
caaagaggtggctgttgcactggcatcagtctgtcagaagctgcgcgctttcggatatatcagcgcatggggctg

SEQ ID NO: 95820 - DNA, 75 bp, synthetic construct
  source 1..75: mol_type = other DNA
tggagcggtggatggtgccgaacaaactccgggaggcggcgtgaagtggcgttactcactgcgctggaaactgcc

SEQ ID NO: 95821 - DNA, 75 bp, synthetic construct
  source 1..75: mol_type = other DNA
tttccactacattctttcctggcctgcgcatgaaagcccgcgtcctgagcagctttttgactgtgtgcgtcacac

SEQ ID NO: 95822 - DNA, 75 bp, synthetic construct
  source 1..75: mol_type = other DNA
catcatgcctgtcgtacggagtgttatgccatgacggtccattattaccggctgcgggattacgccctgcagcat

SEQ ID NO: 95823 - DNA, 75 bp, synthetic construct
  source 1..75: mol_type = other DNA
aactggtaagtgagctcacggtgaaatgccaggaaggccccctggcgaaagccctgaccggcctgcgctgtctgt

SEQ ID NO: 95824 - DNA, 75 bp, synthetic construct
  source 1..75: mol_type = other DNA
agcagctgcctgtcggagtcgggcctgacgaccggatgccgccaggcagccgggagccgaaggtgcgcccggcag

SEQ ID NO: 95825 - DNA, 75 bp, synthetic construct
  source 1..75: mol_type = other DNA
cgcccatcggtattcaggtaatgagcctctcatatgtgggtaagccggagtacccgcctactgttatcgacagca

SEQ ID NO: 95826 - DNA, 75 bp, synthetic construct
  source 1..75: mol_type = other DNA
tgcgcgcgtcaaactgaatgtcgataaagatttctcgctgaaggattcttcgctggaaatgctttatccgattta

SEQ ID NO: 95827 - DNA, 75 bp, synthetic construct
  source 1..75: mol_type = other DNA
tcagcaaagcaactcacggactgaaaaatgtgcagtgggaagcgccgtcattactggctgaaggtggcaaaatta

SEQ ID NO: 95828 - DNA, 75 bp, synthetic construct
  source 1..75: mol_type = other DNA
cccccatcggcgttcaggtaatgagcctctcttatgtaggtaaaccggaatacccgccaaccgttatcgacagca

SEQ ID NO: 95829 - DNA, 75 bp, synthetic construct
  source 1..75: mol_type = other DNA
ggagccgcatccagacgatttatcagccggggagcttcacaccactcatcagagttgaaactgccaccggtgaac

SEQ ID NO: 95830 - DNA, 75 bp, synthetic construct
  source 1..75: mol_type = other DNA
gacctcacttctgctgccggtaagcttctgttgtctatgctggcagccgttgcggaaatggagcgtgacctactt

SEQ ID NO: 95831 - DNA, 75 bp, synthetic construct
  source 1..75: mol_type = other DNA
agcgcgcgtttatctgggcaaaaccgactcgttacggaaggcgggattattgttgcgggcagtcttcttctgacc

SEQ ID NO: 95832 - DNA, 75 bp, synthetic construct
  source 1..75: mol_type = other DNA
atgaaaacactggttgtggctcttgggggcaacgccttactccagcgcggtgaggcgctgacggcagaaaatcaa

SEQ ID NO: 95833 - DNA, 75 bp, synthetic construct
  source 1..75: mol_type = other DNA
gtaaagcgggtgagtccggcacgttggccagttcgctggatgccatttctgaccaggcaaaacccgtgaccgttg

SEQ ID NO: 95834 - DNA, 75 bp, synthetic construct
  source 1..75: mol_type = other DNA
tcgtcgttctcaacgtggtgctggtgatccatatacaggtgaagtcgttggttgtgagacaaatgaatcaggaat

SEQ ID NO: 95835 - DNA, 75 bp, synthetic construct
  source 1..75: mol_type = other DNA
atcggcgctgtgactgctgaaggtaaaaaaacaggcatgaaagccctgctagctgcccagtcacagctcggcgtt

SEQ ID NO: 95836 - DNA, 75 bp, synthetic construct
  source 1..75: mol_type = other DNA
aggtgcaggtgtttgaagccgcctgccagtcgggatggggcggtaaaccggaagtacagaccattcgtcgtctgg

SEQ ID NO: 95837 - DNA, 75 bp, synthetic construct
  source 1..75: mol_type = other DNA
ccagcctggcgattagcctgatgctgtgctgcacggcgcaggcaaacgaccataaaatcctcggcgtcattgcaa

SEQ ID NO: 95838 - DNA, 75 bp, synthetic construct
  source 1..75: mol_type = other DNA
ctcagtcaggaggtgctgttatccctgctcagtttctgcaccgcatgcagccttaacggtgtccagacccgtgag

SEQ ID NO: 95839 - DNA, 75 bp, synthetic construct
  source 1..75: mol_type = other DNA
gcaggaaagccggattgcggcgaacatcctggctatcagggaccaggaagagacgctggcgaaactccgggaaaa

SEQ ID NO: 95840 - DNA, 75 bp, synthetic construct
  source 1..75: mol_type = other DNA
agggagagatcaccagaaaaattgaggctatgctgaattcatcgacagtgagcacgactatagaaagaggatctg

SEQ ID NO: 95841 - DNA, 75 bp, synthetic construct
  source 1..75: mol_type = other DNA
atgctatcaccatcttctgtaaatttggggtgttcatggaattctttaaccagaaacctgacttctcctgacagt

SEQ ID NO: 95842 - DNA, 75 bp, synthetic construct
  source 1..75: mol_type = other DNA
tcaatgtatgtgattcagtcatcgatgatttttgtttatagcctggtctttactgtgttgctggcaatcccgttg

SEQ ID NO: 95843 - DNA, 75 bp, synthetic construct
  source 1..75: mol_type = other DNA
agtaaatctgcaacagaaatcattgctgtttccgggtcgcgctgctggatgggatttgatccttcgcgtggcgtg

SEQ ID NO: 95844 - DNA, 75 bp, synthetic construct
  source 1..75: mol_type = other DNA
tcgcggcggggcgtggggagcgcttcctcacctccgggggaaatacccataaattaagagaaaaatctgcagtag

SEQ ID NO: 95845 - DNA, 75 bp, synthetic construct
  source 1..75: mol_type = other DNA
tggagcaccacgcacaatggcattgagtacacgccaccagtagcaggggaaaacatccgcgataatgcgccaaat

SEQ ID NO: 95846 - DNA, 75 bp, synthetic construct
  source 1..75: mol_type = other DNA
cagaaagctgacacaacacgaatgatggtgccttttttccggcagttctgggatatgggcgcaaaggataaagcg

SEQ ID NO: 95847 - DNA, 75 bp, synthetic construct
  source 1..75: mol_type = other DNA
gattatgattttaaatacagattactgttctggtgtatttctctctgcggaatggttttgtatccggttgccaga

SEQ ID NO: 95848 - DNA, 75 bp, synthetic construct
  source 1..75: mol_type = other DNA
gaaataaaaccgccattatgccagaactgaaaaaacaccttcctgctggcctgcgactggttgaacctttcgcgg

SEQ ID NO: 95849 - DNA, 75 bp, synthetic construct
  source 1..75: mol_type = other DNA
gccatcaccggaaaaaatgaagctgctggctgacacgatttctgcggtttatctcgatggctacgagggaagaca

SEQ ID NO: 95850 - DNA, 75 bp, synthetic construct
  source 1..75: mol_type = other DNA
ggtatcctttggtaaatgggttggtgttctgctttcagctgataataagcagcagttgtggataccaaaagggtt

SEQ ID NO: 95851 - DNA, 75 bp, synthetic construct
  source 1..75: mol_type = other DNA
ggttaacccgggtatttccgtatcccgtgttggtggtgcagcacagaccaagatcatgaaaaaactgtccggtgg

SEQ ID NO: 95852 - DNA, 75 bp, synthetic construct
  source 1..75: mol_type = other DNA
atggagttaacacagatttcattgcgaacgtcgcgagagcaagtcgagcgcatcaaaacctatgcaaaagcaagt

SEQ ID NO: 95853 - DNA, 75 bp, synthetic construct
  source 1..75: mol_type = other DNA
tggctgggggcgctttgtcctgcaggagggcagcaaagtcatcggtgagggcgaaggccgtaccgaaaatattac

SEQ ID NO: 95854 - DNA, 75 bp, synthetic construct
  source 1..75: mol_type = other DNA
cttacgccagggatttcataaccagattatcggtgccaacatcaccaattgtaagttcagtgatttacagggcga

SEQ ID NO: 95855 - DNA, 75 bp, synthetic construct
  source 1..75: mol_type = other DNA
aaggtcatcgtgttcttttggttgaaggtaacgatcctcaaggcacggcctctatgtatcacggttatgttcctg

SEQ ID NO: 95856 - DNA, 75 bp, synthetic construct
  source 1..75: mol_type = other DNA
ataaggatgagatgcggggtgttccgccagcagatgcgcttcgggcggtgcagttgctctggaacgaaatgagca

SEQ ID NO: 95857 - DNA, 75 bp, synthetic construct
  source 1..75: mol_type = other DNA
aagtacatactgtaagtgggtaggtgtctttctttcagcgcaaaataaaaaacaattatggatacctgaaggttt

SEQ ID NO: 95858 - DNA, 75 bp, synthetic construct
  source 1..75: mol_type = other DNA
tcacgttcatcaaaaaatgtactcagaggccttcactttcaacgcggcgagtacgcacaagataaacttgtacgc

SEQ ID NO: 95859 - DNA, 75 bp, synthetic construct
  source 1..75: mol_type = other DNA
aaagcgtccaccatttctaacgtggtacgtaaactggaagagcacggcgcactggctaacaccatcgttgtggta

SEQ ID NO: 95860 - DNA, 75 bp, synthetic construct
  source 1..75: mol_type = other DNA
ctgcacgttatcagcaagcgttacactcagcgcattgagcgacataatctgaatctgagacaacatctggcaagg

SEQ ID NO: 95861 - DNA, 75 bp, synthetic construct
  source 1..75: mol_type = other DNA
ccggccaccggcaacgcctacctcacccgcaagggtttccccgaccgggaatgtctgatgctcacagccatacat

SEQ ID NO: 95862 - DNA, 75 bp, synthetic construct
  source 1..75: mol_type = other DNA
gtgcgggtattacttcgacctgttctggtaccggaactcgggctggtggtccttaagccgggccgtgaatccatg

SEQ ID NO: 95863 - DNA, 75 bp, synthetic construct
  source 1..75: mol_type = other DNA
tgtaccgtgaaagcgacatcgtaccgggagagcagaccgccaccagcatactgaagcagcgcacaaaaaatcttg

SEQ ID NO: 95864 - DNA, 75 bp, synthetic construct
  source 1..75: mol_type = other DNA
aatatgatgaatccggccgtctgattcaggaaactgcccctgacggcgatatcacccgctaccgttatgataatc

SEQ ID NO: 95865 - DNA, 75 bp, synthetic construct
  source 1..75: mol_type = other DNA
tcttttgataaagaaaagagtattgagaaggcgcgccatctggtggacttgtatcagcaacaaggcgttgagaaa

SEQ ID NO: 95866 - DNA, 75 bp, synthetic construct
  source 1..75: mol_type = other DNA
ctgattgaccagtacgggccaatctcgcggattcagattgccgagcaaagtcagcttgcccccgccagcgtaacc

SEQ ID NO: 95867 - DNA, 75 bp, synthetic construct
  source 1..75: mol_type = other DNA
tcagtattccataacggcagaatattggtggagccggaaccgaaaaacatgcgcggtctgccgtccggagtcgtt

SEQ ID NO: 95868 - DNA, 75 bp, synthetic construct
  source 1..75: mol_type = other DNA
ttggccatgaattattccccgtgacaaacaaatataatgcttggagatggaaaaataaaaaaataatagatattt

SEQ ID NO: 95869 - DNA, 75 bp, synthetic construct
  source 1..75: mol_type = other DNA
acagatgcaggacaggcaggtgtcgctgcaatgattatctatgatgccatgtaccacagtgaaaaaactgacccc

SEQ ID NO: 95870 - DNA, 75 bp, synthetic construct
  source 1..75: mol_type = other DNA
ggaacaaacagtcgcgcaaaagccgaattaaacggagcattctttaacataacccgcccccgcaatatcgcgttt

SEQ ID NO: 95871 - DNA, 75 bp, synthetic construct
  source 1..75: mol_type = other DNA
attttcgccagtggtagtgcgggctatcagctggaaatcttcgagcgccgcagcttttttcagttgctgcaaaag

SEQ ID NO: 95872 - DNA, 75 bp, synthetic construct
  source 1..75: mol_type = other DNA
cggcgacgccctgacggtttatccctacaccccggaggccattattgtcggaggggattatttcccggcctcggc

SEQ ID NO: 95873 - DNA, 75 bp, synthetic construct
  source 1..75: mol_type = other DNA
cggttcagtaccacggaacgcagcaattgcgggagaaaattgccagagcagtgaacaactcaattagatcagaaa

SEQ ID NO: 95874 - DNA, 75 bp, synthetic construct
  source 1..75: mol_type = other DNA
cgtctaaacgacagtaaccatactgtcaggctgaataacgagcaacggtcagcagtacgcgaacgtctctctgag

SEQ ID NO: 95875 - DNA, 75 bp, synthetic construct
  source 1..75: mol_type = other DNA
agtacacgccaccagcaccaggggagaacatccgcgataacgcgccaaactttcataaatggcttgagcacgcag

SEQ ID NO: 95876 - DNA, 75 bp, synthetic construct
  source 1..75: mol_type = other DNA
cccgccgaaaaatccacgatgttcacgtccgtaccccgtcagtcctgacggaggaggcgctgaaacggatcggcg

SEQ ID NO: 95877 - DNA, 75 bp, synthetic construct
  source 1..75: mol_type = other DNA
ccgtgaaggctgcccgcggtcactgggctcagattctgccagcgctgggcgtgaatatattgaaaaatcgccatc

SEQ ID NO: 95878 - DNA, 75 bp, synthetic construct
  source 1..75: mol_type = other DNA
cagcaaagtcacctcgaacggtgaaatggcgctcagtgcactgaatttaagcaacagcggacaatggattgcaaa

SEQ ID NO: 95879 - DNA, 75 bp, synthetic construct
  source 1..75: mol_type = other DNA
ggagagcaggttaaagagatgatacgaaaaaatatatctcctcttgagcgttaccgtaagaacaaagagcgatag

SEQ ID NO: 95880 - DNA, 75 bp, synthetic construct
  source 1..75: mol_type = other DNA
aaaaaggacaaagttcagtcgatatcgacaggattaatcaccatgtcgttaatgtggaaaatattaactttaagc

SEQ ID NO: 95881 - DNA, 75 bp, synthetic construct
  source 1..75: mol_type = other DNA
gccggaacgtacccagcagacgctggaacatgccctgctgaatgccattgctcagtttattgatagctaccagcg

SEQ ID NO: 95882 - DNA, 75 bp, synthetic construct
  source 1..75: mol_type = other DNA
aaatacaacccgaccaacaaactcgctatttgactttagctgaggagttaagaccactattaagtcatgtagctg

SEQ ID NO: 95883 - DNA, 75 bp, synthetic construct
  source 1..75: mol_type = other DNA
attgacgtgcgtgtctccaccatgccttctgcctggggcgagcgcgtggtgctgcgactgctggacaaaaaccag

SEQ ID NO: 95884 - DNA, 75 bp, synthetic construct
  source 1..75: mol_type = other DNA
gaacgcctgaagcaacttgagaaagagcggttagcggctcaggagcagaaaaagcaggctgaagaagccgcaaaa

SEQ ID NO: 95885 - DNA, 75 bp, synthetic construct
  source 1..75: mol_type = other DNA
ttacgggctgcatgacccgaacgccccggagaaccgcaggacgctgacactccctgataatctgccggaaacgaa

SEQ ID NO: 95886 - DNA, 75 bp, synthetic construct
  source 1..75: mol_type = other DNA
cagacagcgttaacgtgcaggcactgaacatggggcgaattgtcgttgacgtcgatggtattgaccccgctgagt

SEQ ID NO: 95887 - DNA, 75 bp, synthetic construct
  source 1..75: mol_type = other DNA
gtggcgcacgttttcggtgaacgcactctggccacactggagcgtcttctgagcctgctgtcaccctttgacgtg

SEQ ID NO: 95888 - DNA, 75 bp, synthetic construct
  source 1..75: mol_type = other DNA
tgggcgatcaaaccgtaaatacactgtcggcattgcttatccagcgaggtttcaaggcaggctcatttgctggtg

SEQ ID NO: 95889 - DNA, 75 bp, synthetic construct
  source 1..75: mol_type = other DNA
tgccggtgcaaaagacagtgcccgcgttaccgtcagcggtacactcgaaaaccgcggcagactcgtcagcgatga

SEQ ID NO: 95890 - DNA, 75 bp, synthetic construct
  source 1..75: mol_type = other DNA
atatggcctcctccatcggtatctctgttcaggcatttgataaatggggcgttcctcctgtcgagcgtcggggga

SEQ ID NO: 95891 - DNA, 75 bp, synthetic construct
  source 1..75: mol_type = other DNA
ctggctccaggccatgcctacgggatgtttatggaacgttttaacgagttatcggagttacgcaaatgcgcatga

SEQ ID NO: 95892 - DNA, 75 bp, synthetic construct
  source 1..75: mol_type = other DNA
caggtaaagagggcatattgtctgagaaggcatcccggggactcgcggtaggattactgagtggttttaatacgg

SEQ ID NO: 95893 - DNA, 75 bp, synthetic construct
  source 1..75: mol_type = other DNA
tccgtcacttttgccgaacttgatgtgtttgatttgagtgaggcgttaagcgcacctgacgtcattttccattaa

SEQ ID NO: 95894 - DNA, 75 bp, synthetic construct
  source 1..75: mol_type = other DNA
gttgcgataacgacaggttaaaactatttatattcgcttggtttcagaacttacacagattagtgaagaaactat

SEQ ID NO: 95895 - DNA, 75 bp, synthetic construct
  source 1..75: mol_type = other DNA
atgaaaatgaacgtaacggaaaccgtaaaacaggcgtgcggtcactggccgcgtattctcccggcgctgggtgtg

SEQ ID NO: 95896 - DNA, 75 bp, synthetic construct
  source 1..75: mol_type = other DNA
gccttacgtccgcacttcaattaatcgagcaagcagcggctgtcctggttgctgtcagtctttcggctgaagaaa

SEQ ID NO: 95897 - DNA, 75 bp, synthetic construct
  source 1..75: mol_type = other DNA
gggtcgtatctactctgacgttctgcgtaaagaacgccgcggtgactacctcggcgcaaccgtacaggttattcc

SEQ ID NO: 95898 - DNA, 75 bp, synthetic construct
  source 1..75: mol_type = other DNA
aagccagcggcaaaagtttacggacatgaatatattacgcggagagttaagggagtaacgcagaccaacgcaatt

SEQ ID NO: 95899 - DNA, 75 bp, synthetic construct
  source 1..75: mol_type = other DNA
tgccaggacattcccgcaccactgaaacgccttcttcctgactataaacaaatggaagaaaaaatagacgccgta

SEQ ID NO: 95900 - DNA, 75 bp, synthetic construct
  source 1..75: mol_type = other DNA
tgggtgccaaagacgttgaacgccagtcgcctaacgttttccggatgcgcttaatgggtgcggaagtgatcccgg

SEQ ID NO: 95901 - DNA, 75 bp, synthetic construct
  source 1..75: mol_type = other DNA
acaacccatgcgtcagtgggtgttgagcttcccgtttcagctgcgtttcctgtttggggtcgtttgcgggaaggg

SEQ ID NO: 95902 - DNA, 75 bp, synthetic construct
  source 1..75: mol_type = other DNA
tgccgttattaccctgttttacttgtccagagtgtctgaaagggttttattcccagtgcgcaaaatatgatttta

SEQ ID NO: 95903 - DNA, 75 bp, synthetic construct
  source 1..75: mol_type = other DNA
ggcatgccgtgggataacagcccatgtttttacaatctggaagaaattgatcgctggatcgagcgtcaggcatcg

SEQ ID NO: 95904 - DNA, 75 bp, synthetic construct
  source 1..75: mol_type = other DNA
gttagctgccacagattacgctgtcgggataatcaaacctattttgccggatacacgtgaatttttacggggaac

SEQ ID NO: 95905 - DNA, 75 bp, synthetic construct
  source 1..75: mol_type = other DNA
gaacgccgcgatctcgggcttgatgatggctctttctggcctgtactggaaggcatcccggcaacagagatgttc

SEQ ID NO: 95906 - DNA, 75 bp, synthetic construct
  source 1..75: mol_type = other DNA
atgtcacaaactggcctgcggggacggtcaatattgccgtctctggcactaacactgccggaaccacaaccagca

SEQ ID NO: 95907 - DNA, 75 bp, synthetic construct
  source 1..75: mol_type = other DNA
agcaactttgtcgtcacctgtgctctggcaaacaagctggccagaatagcctgggcactgacggcgcgacagcaa

SEQ ID NO: 95908 - DNA, 75 bp, synthetic construct
  source 1..75: mol_type = other DNA
gaataaagaaaaagcaattgggttatatacacagatgaaaatgcaggaaagcgatcttttatcatatatatatca

SEQ ID NO: 95909 - DNA, 75 bp, synthetic construct
  source 1..75: mol_type = other DNA
aaaatcggcgtcgccaaaggtaaaaacagcacgataaacgttcagatatcaaagaacgcgaatggcaggtggata

SEQ ID NO: 95910 - DNA, 75 bp, synthetic construct
  source 1..75: mol_type = other DNA
cggtaagccccggataaaatgtggggactgcgctcaccgtcagttgattcctgtatccgatctcgtcatctacca

SEQ ID NO: 95911 - DNA, 75 bp, synthetic construct
  source 1..75: mol_type = other DNA
cccgacacaaggtatgttgtccagctttgttccgactgacagtcagattatcggtcaggtatataagtgcccgaa

SEQ ID NO: 95912 - DNA, 75 bp, synthetic construct
  source 1..75: mol_type = other DNA
attacaaagtcatgccctatctgatgggactgaccagccagttcaccacgtattcactctatgactgcggaaaaa

SEQ ID NO: 95913 - DNA, 75 bp, synthetic construct
  source 1..75: mol_type = other DNA
ctggtgggctgtctgcaatcaggtggcggacgcgctaccggaggcagtattgcgtcgttcgctgggattacgtgc

SEQ ID NO: 95914 - DNA, 75 bp, synthetic construct
  source 1..75: mol_type = other DNA
cacgatattttcacgctaccgctgtgtcgggagcatcacaacgagcttcatgcggatcctctggcgttcgaagaa

SEQ ID NO: 95915 - DNA, 75 bp, synthetic construct
  source 1..75: mol_type = other DNA
ggggacaccgttaaaattctttgggctgatgctgatggtctgtgcctgttcaccaaacgcctggaggaaggccag

SEQ ID NO: 95916 - DNA, 75 bp, synthetic construct
  source 1..75: mol_type = other DNA
ttttagctgcagcaatattttattcattgccggggatggcatcaccatcctcttcagaaggtggtgcttttacag

SEQ ID NO: 95917 - DNA, 75 bp, synthetic construct
  source 1..75: mol_type = other DNA
ccagtaacagcctgactcgctgggaaggtaaatccgctaccgttgggcagcttatgggaatgcgatacaaaggct

SEQ ID NO: 95918 - DNA, 75 bp, synthetic construct
  source 1..75: mol_type = other DNA
catgagcaccggaagaaattcggcactccctataatcagttgaatgggaaaaaggctctggttcaccttattctg

SEQ ID NO: 95919 - DNA, 75 bp, synthetic construct
  source 1..75: mol_type = other DNA
taccagaacccgtactcaacacatattccggcagtgattctggccgtgaacaacaacccgatgcgcttcaccgac

SEQ ID NO: 95920 - DNA, 75 bp, synthetic construct
  source 1..75: mol_type = other DNA
gtttatctactgggggccgtcaggaatggtggcaggtgaggccattattataagtatcacgggtggttttttgtt

SEQ ID NO: 95921 - DNA, 75 bp, synthetic construct
  source 1..75: mol_type = other DNA
gggtgatattcaatttttcggaagttgtaccggagaacgaacgcgatccaatgctggcggaaaaaatagaaggtg

SEQ ID NO: 95922 - DNA, 75 bp, synthetic construct
  source 1..75: mol_type = other DNA
cggcaggcgaatcgctgcatcgtatacccacaggaatgtaacagtccgcgtgaggagtggcgccgctggcggcgt

SEQ ID NO: 95923 - DNA, 75 bp, synthetic construct
  source 1..75: mol_type = other DNA
gtttatcaatatctttgaacggctgggaattggttatgtggagctgttagaacggcaaccggatatcgactggga

SEQ ID NO: 95924 - DNA, 75 bp, synthetic construct
  source 1..75: mol_type = other DNA
cagcgtatttattgaagataagaattcgccgtatgtgaatattttggtggcacgggaagataataagaatgcaga

SEQ ID NO: 95925 - DNA, 75 bp, synthetic construct
  source 1..75: mol_type = other DNA
tggtggaaatatatgaccgatgttatgcccgctaacccggataacagcccggtgagtagcgagctgcaagaagtg

SEQ ID NO: 95926 - DNA, 75 bp, synthetic construct
  source 1..75: mol_type = other DNA
agcggcataacctgaatctgaggcagcacctggcacggctgggacggcagggacggaagtcgctgtcgttctcaa

SEQ ID NO: 95927 - DNA, 75 bp, synthetic construct
  source 1..75: mol_type = other DNA
gcagccagtcattgaccgtcacggtcaataccgccgcgccccttatcggcattaacagcattgcgggcgatgatg

SEQ ID NO: 95928 - DNA, 75 bp, synthetic construct
  source 1..75: mol_type = other DNA
caatatcacgttaattgatatgggcatggaatatgagcagcgcaaaggagaactcacccgcctgtcgcaacgctg

SEQ ID NO: 95929 - DNA, 75 bp, synthetic construct
  source 1..75: mol_type = other DNA
tgtacgcagggtgaccgctatctggagctggcagagaaacgggaggctaacgagtcatttgtctacggctggatg

SEQ ID NO: 95930 - DNA, 75 bp, synthetic construct
  source 1..75: mol_type = other DNA
ggtggttacggcaacatcttccaggatgagcgtgacgtgaaatttatggtaatcgcaccattcaccatcttctga

SEQ ID NO: 95931 - DNA, 75 bp, synthetic construct
  source 1..75: mol_type = other DNA
tgtgcgtgttgtggtaagcctgctgacgatccgcatcacctgattggtcatggtcaggggggaatggggacaaag

SEQ ID NO: 95932 - DNA, 75 bp, synthetic construct
  source 1..75: mol_type = other DNA
taagtcctgcggtatataacggcagaatagggctgttgttgtgctgccctatgacaacgaaaataaaaggttatc

SEQ ID NO: 95933 - DNA, 75 bp, synthetic construct
  source 1..75: mol_type = other DNA
ctgcggcagaagatttcatgaaatctcatgttgagccaacgatcagggatgtccctgcattgctggagctggctc

SEQ ID NO: 95934 - DNA, 75 bp, synthetic construct
  source 1..75: mol_type = other DNA
atggctaaaccagcgcgaaggaaatgcaaaatctgtaaggaatggtttcacccggcattctcaaatcagtggtgg

SEQ ID NO: 95935 - DNA, 75 bp, synthetic construct
  source 1..75: mol_type = other DNA
agagccggtggcgtgagctggcgcgccggtgaccttgtggtgccactgtatgacgacagcggcgaactggttaac

SEQ ID NO: 95936 - DNA, 75 bp, synthetic construct
  source 1..75: mol_type = other DNA
agatcgacctgtgggaggtcagtctggtgacgtttccttccaatgatgaagcacgcatcagcgatgtgaaaaatg

SEQ ID NO: 95937 - DNA, 75 bp, synthetic construct
  source 1..75: mol_type = other DNA
agaagtcgtcagccgttggtgccgctgttactgaaggtgccttctcagcagttgcgaatttcaacctgacttatc

SEQ ID NO: 95938 - DNA, 75 bp, synthetic construct
  source 1..75: mol_type = other DNA
aagcgtatgcttcagcgcgtctggcaaaaattcgtcgccagaaccggagaaaagccgaacttcaggccgtgctgg

SEQ ID NO: 95939 - DNA, 75 bp, synthetic construct
  source 1..75: mol_type = other DNA
tttccctggttaccctggccctgctggccgggtgtaacagcccacaaaaacttcagcaacgtgcgccggccatgc

SEQ ID NO: 95940 - DNA, 75 bp, synthetic construct
  source 1..75: mol_type = other DNA
taacactgggcaactcttcgggttagatggtataaaagcagataatccaataaaaacaaagcaagggagttcaga

SEQ ID NO: 95941 - DNA, 75 bp, synthetic construct
  source 1..75: mol_type = other DNA
gcgcacaaaaaatcttgcgccgctgcctcacgcccaccagcaaaacccgccacaggaagagacggtggtcagcat

SEQ ID NO: 95942 - DNA, 75 bp, synthetic construct
  source 1..75: mol_type = other DNA
acctacccgacccggagctgtgtgcaggttgcgcgtttgccgaaagatgtgaagctggaaattgaagctatcgca

SEQ ID NO: 95943 - DNA, 75 bp, synthetic construct
  source 1..75: mol_type = other DNA
accatggaagttgagatcctcaaagaagcggtggagtatgcacaatcgcgaaaatggatagcgcatgtgcccttg

SEQ ID NO: 95944 - DNA, 75 bp, synthetic construct
  source 1..75: mol_type = other DNA
aggcgtatgcggtggagcgtctggcgaaaatccgccgacagaaccggataaaagcagagcttcaggctgtgcttg

SEQ ID NO: 95945 - DNA, 75 bp, synthetic construct
  source 1..75: mol_type = other DNA
tttctattatatgggcaagtgcttcatgggcatcagaaggaaaggtggaaccaacaaatatcagttctactgata

SEQ ID NO: 95946 - DNA, 75 bp, synthetic construct
  source 1..75: mol_type = other DNA
accccattcagggaagcggctttgagatgaacggtaagggcagcagcgcacgtcccacacttaaggtatctaacc

SEQ ID NO: 95947 - DNA, 75 bp, synthetic construct
  source 1..75: mol_type = other DNA
atgctgacgaaatatgcccttgtggcagtcatagtgctgtgtttaacggtgctgggatttacgcttctggtcggg

SEQ ID NO: 95948 - DNA, 75 bp, synthetic construct
  source 1..75: mol_type = other DNA
taaaaccaggcgtttacagcgccacggtttcttcgacccgtgccggaaacgttgttgtgcgtgctttcagcgagc

SEQ ID NO: 95949 - DNA, 75 bp, synthetic construct
  source 1..75: mol_type = other DNA
gatattgagttagttaattgtgatattactgcattcaaaaaaccaagtgctgtaggtggtactgcaaaagcaggg

SEQ ID NO: 95950 - DNA, 75 bp, synthetic construct
  source 1..75: mol_type = other DNA
ccgcactggcgcgaagggcaaagtggatatcatggccagtgggaaactgaccagtacaggtttgctggtgagcga

SEQ ID NO: 95951 - DNA, 75 bp, synthetic construct
  source 1..75: mol_type = other DNA
aatccctcttggataagggatacattcgcatcaagctaagtcgttctcagcataaggccatttttagggtaagga

SEQ ID NO: 95952 - DNA, 75 bp, synthetic construct
  source 1..75: mol_type = other DNA
gcccacgatattttcacgctaccgttgtgccgggagcaccacaacgaacttcatgcagacccgctggagtttgag

SEQ ID NO: 95953 - DNA, 75 bp, synthetic construct
  source 1..75: mol_type = other DNA
gtattaggtgatgataaatcggctacggacagacttattgttgagggtaatacttcgggttcaactaccgtctat

SEQ ID NO: 95954 - DNA, 75 bp, synthetic construct
  source 1..75: mol_type = other DNA
ggccatcggcccggagtggtttaccgatatcatcgccccgttcaccgacacgaaaagcctgaacaccctgcgtga

SEQ ID NO: 95955 - DNA, 75 bp, synthetic construct
  source 1..75: mol_type = other DNA
tcacttcatttaagggggtgggaggagccccggcagcaaaaaaagggactgtgaagctggcttttagtggtccaa

SEQ ID NO: 95956 - DNA, 75 bp, synthetic construct
  source 1..75: mol_type = other DNA
tcattatggggcgtcccgatgaggaagagacgctgttacgtgtggatgcggcgatcaacaaaaaataccgccatg

SEQ ID NO: 95957 - DNA, 75 bp, synthetic construct
  source 1..75: mol_type = other DNA
atcgttaacgtcgccgccaggcgaggtgaaattaacgttggccgagtgtggcgaaagaaacgcgcagggcatgtg

SEQ ID NO: 95958 - DNA, 75 bp, synthetic construct
  source 1..75: mol_type = other DNA
ccgcaatcagcatcgacaacgtgaaacctggtgtcactacagactggaaagaaaccacagatggcgtctataagg

SEQ ID NO: 95959 - DNA, 75 bp, synthetic construct
  source 1..75: mol_type = other DNA
atttaatggtgagggttttattcttcacgtaaatgtcgctccatctctattgcataataaaaaattcatatctac

SEQ ID NO: 95960 - DNA, 75 bp, synthetic construct
  source 1..75: mol_type = other DNA
agacggtatacgagccgggaagcttcacaccactcatccgcatcgaaacagacaacggcgagcgggagaaaacgc

SEQ ID NO: 95961 - DNA, 75 bp, synthetic construct
  source 1..75: mol_type = other DNA
ttataccggtgcgtattacctggcaatagcgttcaaaaagtggggcgtaacgtggcgggctgtcggtgcttacaa

SEQ ID NO: 95962 - DNA, 75 bp, synthetic construct
  source 1..75: mol_type = other DNA
atgaagataagaaaaggtgacagacaatattatctgaataaagaaggtgatacgtttcatctggtgaagcgagta

SEQ ID NO: 95963 - DNA, 75 bp, synthetic construct
  source 1..75: mol_type = other DNA
gaatcctatgttcctgccactggcccggaacggatccgtatggaaaacaagatcggcgtatgggtttcaggcttc

SEQ ID NO: 95964 - DNA, 75 bp, synthetic construct
  source 1..75: mol_type = other DNA
attatcagttgaataatgacaactttgcaccaggaaaaacggcggctgcttattcgtttcaaactcggcctcttg

SEQ ID NO: 95965 - DNA, 75 bp, synthetic construct
  source 1..75: mol_type = other DNA
ttcagatcaggtagccgctgaaatggctgaacaacccagtcctgcagagatcgcagaggttttgatgagaaaatt

SEQ ID NO: 95966 - DNA, 75 bp, synthetic construct
  source 1..75: mol_type = other DNA
tatgataaatattccgatatggttaaaaagcatgtaatagatggtgaggaattcataattaaatattatatgtaa

SEQ ID NO: 95967 - DNA, 75 bp, synthetic construct
  source 1..75: mol_type = other DNA
cgaagaactggtcagaacgggcggtctgtcaggtggtgcggctgacaccatcaaacgtgaacttctggggattag

SEQ ID NO: 95968 - DNA, 75 bp, synthetic construct
  source 1..75: mol_type = other DNA
atgacaagccttttggccgcagaggtagcgaaaagaagaacctttgcaattatttctcacccggacgccggtaag

SEQ ID NO: 95969 - DNA, 75 bp, synthetic construct
  source 1..75: mol_type = other DNA
gcgcccgccgttcccttgtccgtgactatgtgctctcccttgctgcccgtctgccggtggtggaggtgtcccgtg

SEQ ID NO: 95970 - DNA, 75 bp, synthetic construct
  source 1..75: mol_type = other DNA
ggaaagttattcgcgttctcgatggcgacaccatagaaattaaaacactacccgcaaaaattgttgtgtatgaag

SEQ ID NO: 95971 - DNA, 75 bp, synthetic construct
  source 1..75: mol_type = other DNA
ttacagcattacgccgcgacgacgccgattgtcgacatggtgcgtttctctccggcgcaactggatgccgaagcg

SEQ ID NO: 95972 - DNA, 75 bp, synthetic construct
  source 1..75: mol_type = other DNA
atgaaaatcttattaacaatatttatttatctgcttaccgcttttcagtctgcaaatgcaggtggaataccttat

SEQ ID NO: 95973 - DNA, 75 bp, synthetic construct
  source 1..75: mol_type = other DNA
ccatcaccgcccgcgatcatgatgacgttcaacagcatgttgatgtcttactggctgacggaaaaacacgcctga

SEQ ID NO: 95974 - DNA, 75 bp, synthetic construct
  source 1..75: mol_type = other DNA
gtactgttttatcaatcgctagttgtcatgccctggctgtaggtaattctcaaatagcgctatctaaccttcatg

SEQ ID NO: 95975 - DNA, 75 bp, synthetic construct
  source 1..75: mol_type = other DNA
tgcggagagtgaggcatggcttgcgcagtgcgggctgacggcggaacagatggccgcgcagatggaggatgcata

SEQ ID NO: 95976 - DNA, 75 bp, synthetic construct
  source 1..75: mol_type = other DNA
tgagaaccaactcttcaggtcaggctccagtcgttctgaccagcaataaagtcggtacatatacggtgactgcat

SEQ ID NO: 95977 - DNA, 75 bp, synthetic construct
  source 1..75: mol_type = other DNA
catctgcccatattcagatgttaaaccgttctttaagcaatgcttacaggcggcatggagtcagcggtccactat

SEQ ID NO: 95978 - DNA, 75 bp, synthetic construct
  source 1..75: mol_type = other DNA
aagtgtatgcggcagcgcgtctggataaaatccgccgccagaacaggataaaggcagagcttcaggccgtgcttg

SEQ ID NO: 95979 - DNA, 75 bp, synthetic construct
  source 1..75: mol_type = other DNA
agcgtcactgtaagcacagtcacaagcgcaggtggaatgcaaacagtagatatatcgctagtggcaggcccagca

SEQ ID NO: 95980 - DNA, 75 bp, synthetic construct
  source 1..75: mol_type = other DNA
gggagcttcacgccactcatcagggtcgaaactgccaccggtgagctggcgaaaacgcagcgccgcagcctggcg

SEQ ID NO: 95981 - DNA, 75 bp, synthetic construct
  source 1..75: mol_type = other DNA
tggtgtcagtgatacgaaacaggtgacgttgattggcgatccgggtaccgctcaactgacctccttaacctctgt

SEQ ID NO: 95982 - DNA, 75 bp, synthetic construct
  source 1..75: mol_type = other DNA
gcgactgggcgcgatggacgtcgccgacgaaggccgggacaaaaatgccttttcgacccgtcacggcttccttct

SEQ ID NO: 95983 - DNA, 75 bp, synthetic construct
  source 1..75: mol_type = other DNA
tgagcaatatcatccgcaccgggatcatctctgaagttgatgaggaatcctggtgcgtgcgcgttcgcagcggcg

SEQ ID NO: 95984 - DNA, 75 bp, synthetic construct
  source 1..75: mol_type = other DNA
gatggcgcggtgttccgctacgacgcagacgctggcgcactgagcgccagcggcatgaaaacagccaccctgcag

SEQ ID NO: 95985 - DNA, 75 bp, synthetic construct
  source 1..75: mol_type = other DNA
tggtcagggcggaatggggacaaaatctcacgatattttcacgctaccgctgtgtcgggagcatcacaacgagct

SEQ ID NO: 95986 - DNA, 75 bp, synthetic construct
  source 1..75: mol_type = other DNA
gggattgcgcctgtaagcgtccgaagaaatcaacagcgaccaaaggcgtcaacctaaacgtacaacgaaaacata

SEQ ID NO: 95987 - DNA, 75 bp, synthetic construct
  source 1..75: mol_type = other DNA
cacctcaaacggcattaccgtgcatacgcataaacacggtggcgtgaaaggtggcagcgattcgacaggaggccc

SEQ ID NO: 95988 - DNA, 75 bp, synthetic construct
  source 1..75: mol_type = other DNA
cagcaagtccacactggccgccgggatcatgatgacggcgctgttactgaactggcggcaggcggcgggttacac

SEQ ID NO: 95989 - DNA, 75 bp, synthetic construct
  source 1..75: mol_type = other DNA
gccagacgatgagctggaaaccgtcatgcagcgactggacgatgcctttgagcatggtgcggatgtcagcattgt

SEQ ID NO: 95990 - DNA, 75 bp, synthetic construct
  source 1..75: mol_type = other DNA
ccactacttcgacggtaaccaccgagccaaaagacccaataccatggtttggattaacagctcaagtagttcgta

SEQ ID NO: 95991 - DNA, 75 bp, synthetic construct
  source 1..75: mol_type = other DNA
aataccaaatatgccgttcttaccaatgcacttgcgaatgcagctggtgctgcagggggatatactctatctcaa

SEQ ID NO: 95992 - DNA, 75 bp, synthetic construct
  source 1..75: mol_type = other DNA
tgctgatttaaaaatgaatggtggttccataacaactaatggcattaatagctatggtgcttatgctaatgggaa

SEQ ID NO: 95993 - DNA, 75 bp, synthetic construct
  source 1..75: mol_type = other DNA
cctcatttacattacgagctggtcatcaataacaatcctgttaattcactggcgttccgggcatcggcacccgct

SEQ ID NO: 95994 - DNA, 75 bp, synthetic construct
  source 1..75: mol_type = other DNA
gatcgatggttgttaccctatcgaaaaagaaaaacaaattacaacttatctcgataaagggaaaatgcaattatc

SEQ ID NO: 95995 - DNA, 75 bp, synthetic construct
  source 1..75: mol_type = other DNA
aagcgtctcagaatgcgattgaagcgttcggcccgctgttgccggaattcctcggcggctctgctgacctggcac

SEQ ID NO: 95996 - DNA, 75 bp, synthetic construct
  source 1..75: mol_type = other DNA
cctgaaagactgggagtacgaccgggaaaaaggggtattcctgctgaaagagatcgacctgtgggaggtcagtct

SEQ ID NO: 95997 - DNA, 75 bp, synthetic construct
  source 1..75: mol_type = other DNA
cgctttctgatttggcgcggttatatgattttctggtgctggccagtaaacctgctgccgccagaacggtacagt

SEQ ID NO: 95998 - DNA, 75 bp, synthetic construct
  source 1..75: mol_type = other DNA
ttgctggcgcgaaaaatggtatccgtgaagccgaacaggatcgccagatgaacatactgacgggggcttctgcac

SEQ ID NO: 95999 - DNA, 75 bp, synthetic construct
  source 1..75: mol_type = other DNA
cacaaaatgggtcagtacataaggtagtgtctgcggccagtgtgaatacaagtgctgcaggagcgcacactcata

SEQ ID NO: 96000 - DNA, 75 bp, synthetic construct
  source 1..75: mol_type = other DNA
gtggccggcgctgacccgctatgcagaagatggctgggtggaggtggataataacattgccgaaaacgccctacg

SEQ ID NO: 96001 - DNA, 75 bp, synthetic construct
  source 1..75: mol_type = other DNA
actacgacaggtaatggattgcttatctatctttacaacagaaatcaaaatggttctattggttcacctatagtt

SEQ ID NO: 96002 - DNA, 75 bp, synthetic construct
  source 1..75: mol_type = other DNA
atatcacgcacagcggcggcgatttcacctcaaacggcatcacagtgcatacgcataagcacggtggcgttaaag

SEQ ID NO: 96003 - DNA, 75 bp, synthetic construct
  source 1..75: mol_type = other DNA
cgccgtgttccagtttggtgttgataacggttacctggcagataatccgtttaaggggatctcgccattaaagga

SEQ ID NO: 96004 - DNA, 75 bp, synthetic construct
  source 1..75: mol_type = other DNA
gactgccggaccgctggcagaaacctttgaacgtgaacgggaccggatgtaccgggaaaaattaccggcgcagat

SEQ ID NO: 96005 - DNA, 75 bp, synthetic construct
  source 1..75: mol_type = other DNA
gtcttcaggagctgggtgagcaattgaaccgcgatgtcagtttgacgggaacgaaagaagaactggcgcttcgtg

SEQ ID NO: 96006 - DNA, 75 bp, synthetic construct
  source 1..75: mol_type = other DNA
ctgatagctcgtaatggtgagattgaagggcttcgggagtgggcagaagaactggaggcacgggaggtggctttg

SEQ ID NO: 96007 - DNA, 75 bp, synthetic construct
  source 1..75: mol_type = other DNA
tgatgatgataccgggctggtgagttatcacgatcagcaaggtaacgcgatgcaaattaaccgtgatgatgtttc

SEQ ID NO: 96008 - DNA, 75 bp, synthetic construct
  source 1..75: mol_type = other DNA
tcggtttactcatttccatcaccgcgactgccgaatcgctgggtcagtttgaagaggatatcaccggttttccgc

SEQ ID NO: 96009 - DNA, 75 bp, synthetic construct
  source 1..75: mol_type = other DNA
acgaaaagtttgttgtgcgtttccctgacgggatgagggacgcgattgcggagagagccaaacgaaacgggcgct

SEQ ID NO: 96010 - DNA, 75 bp, synthetic construct
  source 1..75: mol_type = other DNA
aggtcagacggatttttgctggcgagtacgaaatccgttacgaaattaatggccagactatttatgtattgcgtc

SEQ ID NO: 96011 - DNA, 75 bp, synthetic construct
  source 1..75: mol_type = other DNA
cctttgcaaggctatcagagttttttaaaaaatacatctcaagatgttagcgagttactctcaaagagtttgaat

SEQ ID NO: 96012 - DNA, 75 bp, synthetic construct
  source 1..75: mol_type = other DNA
cctcgccgcttatgccagaggtctttttccgatcaccattggtgcggtgctcatggcgtttgttatttggctcat

SEQ ID NO: 96013 - DNA, 75 bp, synthetic construct
  source 1..75: mol_type = other DNA
gaaggtaccctgagtcaggacagtggcaccctgatattccagggacatccggttatccatgcctccatcagtggc

SEQ ID NO: 96014 - DNA, 75 bp, synthetic construct
  source 1..75: mol_type = other DNA
aggttcaccggggggattgacgcttatgacagtgccgtcagcatcacctctccggacgtcctgttgacagccccg

SEQ ID NO: 96015 - DNA, 75 bp, synthetic construct
  source 1..75: mol_type = other DNA
tttaccggtgtcacgatgacctataccgacagcagtgcagacagccatgcattcagcggaaagacgaaatcggtg

SEQ ID NO: 96016 - DNA, 75 bp, synthetic construct
  source 1..75: mol_type = other DNA
agcattttagtaaatgatatttttttgaaggattttttcatgaagcaacctgattttgcgaagtggtacttctat

SEQ ID NO: 96017 - DNA, 75 bp, synthetic construct
  source 1..75: mol_type = other DNA
atgctgcaagctataaaaaaaatcataataatgacaatcgtaaatattatatttttctattcctttcaatcgact

SEQ ID NO: 96018 - DNA, 75 bp, synthetic construct
  source 1..75: mol_type = other DNA
cacctcaaacggcatcacagtgcatacgcataaacacggtggcgtgaaaggcggcagcgattcgacaggaggccc

SEQ ID NO: 96019 - DNA, 75 bp, synthetic construct
  source 1..75: mol_type = other DNA
gcatgaaagacagggattataatcctctgattggtcgaagcggtgttgatatgggaaaagtcttctccggaggtg

SEQ ID NO: 96020 - DNA, 75 bp, synthetic construct
  source 1..75: mol_type = other DNA
atattccaaacaaagataaatttacgcaaacaataggtgcttgccgctcttttcatggtgctattagcacaggtg

SEQ ID NO: 96021 - DNA, 75 bp, synthetic construct
  source 1..75: mol_type = other DNA
tccccacctcctttctggatgataacccgctgacccgtcagaaggcggcgtatgaacagcaggtgaagggataca

SEQ ID NO: 96022 - DNA, 75 bp, synthetic construct
  source 1..75: mol_type = other DNA
ggctgatgtccgcaaagtggtggacggtctggatacgccggatgcgtttaaggccatgacggagcaggtgcgtga

SEQ ID NO: 96023 - DNA, 75 bp, synthetic construct
  source 1..75: mol_type = other DNA
aacgaaaactcgcacctcaaagaagcaaacttccccgctatgttgtaaaacttcacgaagatgatttttttgacg

SEQ ID NO: 96024 - DNA, 75 bp, synthetic construct
  source 1..75: mol_type = other DNA
accacgaaagcgtcagaagctgccacctcagcccgggatgcgtcggcttcaaaagaagcggcaaaatcatcagaa

SEQ ID NO: 96025 - DNA, 75 bp, synthetic construct
  source 1..75: mol_type = other DNA
tcgtatattggggatagtgtcagacctgctaaatttaaagtagtatattcgatagatggaggtcgcccgattgaa

SEQ ID NO: 96026 - DNA, 75 bp, synthetic construct
  source 1..75: mol_type = other DNA
agttaaatattaatcaactggcatccctttcaggcctgcaccggcagactgttaccgcaagaatggcagatgttc

SEQ ID NO: 96027 - DNA, 75 bp, synthetic construct
  source 1..75: mol_type = other DNA
caactgggctggaaatatgcgccgttcgaaatcccgtctgaaatctatgctcagtgggatgcgaaagaagcaggc

SEQ ID NO: 96028 - DNA, 75 bp, synthetic construct
  source 1..75: mol_type = other DNA
atgaaaaaattattatttgctatttttatcatacttccgcttggtggctgtaccgttcatggtaataaatcccta

SEQ ID NO: 96029 - DNA, 75 bp, synthetic construct
  source 1..75: mol_type = other DNA
aatgaaatcgaacaacgtctgaaaccacactacccggaaatctggctgcgtatagaccagggcagcgccccgtct

SEQ ID NO: 96030 - DNA, 75 bp, synthetic construct
  source 1..75: mol_type = other DNA
aaaatgatccgcaacgcgcatctgaagcgggtaaaaaaggcggtcaacaaagcggtggtaataaatcaggaaaat

SEQ ID NO: 96031 - DNA, 75 bp, synthetic construct
  source 1..75: mol_type = other DNA
aggcagtgctggctactggtttttacagtggcttgatcaggtcagtccttcacagtgggctgcgattggtgtact

SEQ ID NO: 96032 - DNA, 75 bp, synthetic construct
  source 1..75: mol_type = other DNA
tggcgtcagcaatcctgcttaacgtcggccgcacgctgccatttattgcgggtacagagccggaacgcgtggcaa

SEQ ID NO: 96033 - DNA, 75 bp, synthetic construct
  source 1..75: mol_type = other DNA
acctgacagtattgtctacgccccggaacgttctgatgcaccgatatcgctcaacatggacgaaattcttaaaga

SEQ ID NO: 96034 - DNA, 75 bp, synthetic construct
  source 1..75: mol_type = other DNA
atgtccgatccgatttccggtactgggctggctggtggtgccctgacgggtgccagtgtttatggactgctgacc

SEQ ID NO: 96035 - DNA, 75 bp, synthetic construct
  source 1..75: mol_type = other DNA
gatactggggtggtctgagcgggtgccgggtgctgaggacgtactgccagcgccgctgccgccgtaccgggtgct

SEQ ID NO: 96036 - DNA, 75 bp, synthetic construct
  source 1..75: mol_type = other DNA
cagcgtatccgtgaaatgtctgataacgatccgcgcgtggtggcgctggtcattcgccagtggataaataacgat

SEQ ID NO: 96037 - DNA, 75 bp, synthetic construct
  source 1..75: mol_type = other DNA
cctattatatgaaagcggcagcgacacagttcccgctgccggaggggatgaatctgcccctgaccctgcgccatt

SEQ ID NO: 96038 - DNA, 75 bp, synthetic construct
  source 1..75: mol_type = other DNA
gtgttctggcaaaatatctgcgtgaccagcctgagggctggctggcggctcatcgactgatgaaaagcgtccggc

SEQ ID NO: 96039 - DNA, 75 bp, synthetic construct
  source 1..75: mol_type = other DNA
gtaatatcacgcaagtttctgtaggtaatttctttaagcaatctctgccactgctggtagccctgctgctgatgc

SEQ ID NO: 96040 - DNA, 75 bp, synthetic construct
  source 1..75: mol_type = other DNA
agtaccgaatcagccgggaaaattcagacgttacagcactggtggcggcgtgtacgaagatgaaggacgcagagg

SEQ ID NO: 96041 - DNA, 75 bp, synthetic construct
  source 1..75: mol_type = other DNA
tgaaaaacaaactggaagtgaacgatctggaaagcggtcgttatggtggagatttttacccgttgactggccgtg

SEQ ID NO: 96042 - DNA, 75 bp, synthetic construct
  source 1..75: mol_type = other DNA
gagaatctgaatcaggcacagcaacagattgcggttttccaggggcaggtaaaggtccagcaggatgcattgctg

SEQ ID NO: 96043 - DNA, 75 bp, synthetic construct
  source 1..75: mol_type = other DNA
gcagttgatactgcatactatgcaacaaggagtttcactgctgaggctatgcaaattttatctaaagagctttct

SEQ ID NO: 96044 - DNA, 75 bp, synthetic construct
  source 1..75: mol_type = other DNA
cagcgaaattacgcaagattcgctggtgcaggggctgggtaaagagttgcctgcggcactggctcccatggcgaa

SEQ ID NO: 96045 - DNA, 75 bp, synthetic construct
  source 1..75: mol_type = other DNA
atggcgaaccagatcacgtccatttgttaattaactatcctcccaaactggcgatatccagtctggtaaacagcc

SEQ ID NO: 96046 - DNA, 75 bp, synthetic construct
  source 1..75: mol_type = other DNA
actacaaaagtggaaaataaagccgcaacactctctgatctggatcttaatgcagccaagaaaacaggtagcact

SEQ ID NO: 96047 - DNA, 75 bp, synthetic construct
  source 1..75: mol_type = other DNA
actatcgcgagcagagcgttgcattgcctaaggcatctgatcctcgctacattgaaatgactgagcaaaatgcaa

SEQ ID NO: 96048 - DNA, 75 bp, synthetic construct
  source 1..75: mol_type = other DNA
atgcttaagcgttcgaataagtcagcatcaagacgaagctgtacggaaaacctttcctttttgttgtcattggtt

SEQ ID NO: 96049 - DNA, 75 bp, synthetic construct
  source 1..75: mol_type = other DNA
tcccgattgcatttccaaacagatgtctgcgtgttttggtctcacaagactacacaccagatagcggggctgttg

SEQ ID NO: 96050 - DNA, 75 bp, synthetic construct
  source 1..75: mol_type = other DNA
cggtaaaagataagtttggcccgggcaagaacggatttactgatggaaatcttcgcacaggacgtcttgccacct

SEQ ID NO: 96051 - DNA, 75 bp, synthetic construct
  source 1..75: mol_type = other DNA
tgacacctgttctgggatcagtggataaggatacgcgtgaactcaacctgctacttgtccagagtgccgatgaac

SEQ ID NO: 96052 - DNA, 75 bp, synthetic construct
  source 1..75: mol_type = other DNA
attgattgtggtgatattagtgctaaagatgcaaaaagcacacagaaagcctggaattgtcgtcactccagacag

SEQ ID NO: 96053 - DNA, 75 bp, synthetic construct
  source 1..75: mol_type = other DNA
ctgggaccggatgaaagcctgcttaaatccacgcttaccgccgcaatcgccaacggtggccagaactggtttgcc

SEQ ID NO: 96054 - DNA, 75 bp, synthetic construct
  source 1..75: mol_type = other DNA
tattcctgcctgcgggccttacgcatggatttcttctacaggaaagatacgcctgatttcttacaacctgatcat

SEQ ID NO: 96055 - DNA, 75 bp, synthetic construct
  source 1..75: mol_type = other DNA
tggatttcttctacaggaaagatacgcccgatttcttacaacctgatcatcgctggcttgaattgcagttgcgta

SEQ ID NO: 96056 - DNA, 75 bp, synthetic construct
  source 1..75: mol_type = other DNA
tgccagcgccgccgcgctcggtgtgccgctaaaaattacccatatggcggtgggcgatggcggcggagcattgcc

SEQ ID NO: 96057 - DNA, 75 bp, synthetic construct
  source 1..75: mol_type = other DNA
atgagcgagattaattatcaggaagggcatgaaacggtagggcaggcaaaaccagttgcatggcgatatcgctat

SEQ ID NO: 96058 - DNA, 75 bp, synthetic construct
  source 1..75: mol_type = other DNA
catggcgaatatcacacgcatattctggtgtggggggatcgtaatggcgaggacagagagaaaatttcacactgc

SEQ ID NO: 96059 - DNA, 75 bp, synthetic construct
  source 1..75: mol_type = other DNA
aagaagaacaaaaagacgggctgtgtgcctacggctgcaatgaagttcctgaacgtcctgctgcagggcgtcctc

SEQ ID NO: 96060 - DNA, 75 bp, synthetic construct
  source 1..75: mol_type = other DNA
tcctcgatccgaatgatggcttatagctttaccgcgatggatataatgcaggcgctggtcaaagctaaaaatcgc

SEQ ID NO: 96061 - DNA, 75 bp, synthetic construct
  source 1..75: mol_type = other DNA
aatggttcagtggtgggccgattatcttgatgctaacactcaggaatatataaccccctacgactttgcaaaaaa

SEQ ID NO: 96062 - DNA, 75 bp, synthetic construct
  source 1..75: mol_type = other DNA
gacggcacatggcaggtggcgctgcctgccgcagaagtgcaggcgctggcagatggtaactacgccgtaaatgcc

SEQ ID NO: 96063 - DNA, 75 bp, synthetic construct
  source 1..75: mol_type = other DNA
cccccgttccagcccaggagttgcgggtccggatcacctcgggcggccaggtggatgcttcggcgtttcgcctgt

SEQ ID NO: 96064 - DNA, 75 bp, synthetic construct
  source 1..75: mol_type = other DNA
acatcaccagtacgccccaggcggaaagcgatggccgtactccactggctgcggtctccgccgatatggtggcag

SEQ ID NO: 96065 - DNA, 75 bp, synthetic construct
  source 1..75: mol_type = other DNA
tcgcatggctaatcctgccaaactacgcgcgagaattatttcactgggtcgagagtacccagtagatcaattgat

SEQ ID NO: 96066 - DNA, 75 bp, synthetic construct
  source 1..75: mol_type = other DNA
ccaacgcccgtggctggctgatgatgcagttattccggtaactgacgatattaaccgatttgcttttcctcatcg

SEQ ID NO: 96067 - DNA, 75 bp, synthetic construct
  source 1..75: mol_type = other DNA
gctgaacgtcagcgaaaaacgaaaccgctgttgaaatccctggaaagctggttgcgtgaaaagatgaagaccctg

SEQ ID NO: 96068 - DNA, 75 bp, synthetic construct
  source 1..75: mol_type = other DNA
tcggaatggcatcagacatcagtccgattagcagggcttttaagtatgcattggatggaatcacaaagaaaaaat

SEQ ID NO: 96069 - DNA, 75 bp, synthetic construct
  source 1..75: mol_type = other DNA
cgaaaatgacaggcgtgactggggattctatggattgattgccgaggaagtaggagaaattgcccctcagtttgt

SEQ ID NO: 96070 - DNA, 75 bp, synthetic construct
  source 1..75: mol_type = other DNA
gggtagcctggtatttggcctgctgacgtacctgacaaacctttatttcaagattaaagaagataagcgtaaggc

SEQ ID NO: 96071 - DNA, 75 bp, synthetic construct
  source 1..75: mol_type = other DNA
atgcactcgataaaaaaagtaaccatgctcttggggggcctcgcactcacctgctcgatcgcatttcaggcaagt

SEQ ID NO: 96072 - DNA, 75 bp, synthetic construct
  source 1..75: mol_type = other DNA
gcgcggggaacacactcacgggaaggaagtgcccagcggcggcaccggtttatccccgctggcgcggggaacacc

SEQ ID NO: 96073 - DNA, 75 bp, synthetic construct
  source 1..75: mol_type = other DNA
gtagtgtcagtgggtcgtctgagacgctgcatgagttatcagagccatcagtagttaactggtggcttttttatt

SEQ ID NO: 96074 - DNA, 75 bp, synthetic construct
  source 1..75: mol_type = other DNA
caaattcgcgataatctggagattaagtcttacatgattacctccaatggcgcgcgcgttcacgatctggatggc

SEQ ID NO: 96075 - DNA, 75 bp, synthetic construct
  source 1..75: mol_type = other DNA
aaaattccatcatgggtttatgagaaaggtttaattttcgattataaccgtatttcacatgccagtaactggcat

SEQ ID NO: 96076 - DNA, 75 bp, synthetic construct
  source 1..75: mol_type = other DNA
caacgatactcacgcctacgagttatttagcgcctactgttcgctggtgtatgtcacgccaatcctcggtggctt

SEQ ID NO: 96077 - DNA, 75 bp, synthetic construct
  source 1..75: mol_type = other DNA
cagaagagattaaatttcggattcaatatcttcaggatgaagaacaaaaaagagttttaagtgaactggtaaatg

SEQ ID NO: 96078 - DNA, 75 bp, synthetic construct
  source 1..75: mol_type = other DNA
cgccggatattcacatgaatcattaaattatgcggattcaaatccaggtaaaataaaatttacgcctggtggagt

SEQ ID NO: 96079 - DNA, 75 bp, synthetic construct
  source 1..75: mol_type = other DNA
ataatgctgcggaaagagcgcttcgtgcagtctgtctcggaaagaaaaactttatgttctttggcagcgatcacg

SEQ ID NO: 96080 - DNA, 75 bp, synthetic construct
  source 1..75: mol_type = other DNA
gaaagatccacgatgtgcacgtccgcatcccgtcagcactgacggaagaagccctggagcagatcggtcagttgt

SEQ ID NO: 96081 - DNA, 75 bp, synthetic construct
  source 1..75: mol_type = other DNA
attataaatcgaagataccaaagaaaattagtatggtccctcgaagagaaaacagcactgatttcaggtgatgct

SEQ ID NO: 96082 - DNA, 75 bp, synthetic construct
  source 1..75: mol_type = other DNA
ataacgagcggcgtataaaattatcgccgggtgcagtcagccccaaaatgtaccgccaacaatgcgggctggaat

SEQ ID NO: 96083 - DNA, 75 bp, synthetic construct
  source 1..75: mol_type = other DNA
gcgcaggtggaatgcaaacagtagatatatcgctagtggcaggcccagcagacgcctcgcagtccatccttaaga

SEQ ID NO: 96084 - DNA, 75 bp, synthetic construct
  source 1..75: mol_type = other DNA
aaaagaataccgaacaactgaaatgggcatgggaatatattgatgcacgtatctcacccacatatctttcctggt

SEQ ID NO: 96085 - DNA, 75 bp, synthetic construct
  source 1..75: mol_type = other DNA
atgataggcgataagaaaactgtagcttgtaataaaggtaatttgatgaaaacaaaaaaattgatgatggttacc

SEQ ID NO: 96086 - DNA, 75 bp, synthetic construct
  source 1..75: mol_type = other DNA
cagttccggatgcgcacccgtgtccggcgcacgcactccacctcacccgtggagaactccttaattactaacctt

SEQ ID NO: 96087 - DNA, 75 bp, synthetic construct
  source 1..75: mol_type = other DNA
gttcctgcacgtccttatatggggctggataagagcggtgagcaggaaatttatgatgccatcagaaaacgcgta

SEQ ID NO: 96088 - DNA, 75 bp, synthetic construct
  source 1..75: mol_type = other DNA
ggggcgagttgccacggcacatggttttcgctcaacattcagggactggtgtagcgaacaggggtattcgcggga

SEQ ID NO: 96089 - DNA, 75 bp, synthetic construct
  source 1..75: mol_type = other DNA
cgtaaccggcacactgcgcgcctcttttgcgccatataatacaaagagtgatgtggatgcgctggtgaatgccgt

SEQ ID NO: 96090 - DNA, 75 bp, synthetic construct
  source 1..75: mol_type = other DNA
gcggcgcgaagtggtcggccatggcgaccgtgatcatcatcggcctggggctggtgcagatgacggtgctggcgc

SEQ ID NO: 96091 - DNA, 75 bp, synthetic construct
  source 1..75: mol_type = other DNA
cgtaatccctcgccactggccacgccggaagcgctgaaccagagctggtctgtcgattttatgcatgatgcccta

SEQ ID NO: 96092 - DNA, 75 bp, synthetic construct
  source 1..75: mol_type = other DNA
gggctaccttcgtctgaacctggcctgcggtcgagaaaaattatatatggggcttacgcgtcttgtgagtgtaat

SEQ ID NO: 96093 - DNA, 75 bp, synthetic construct
  source 1..75: mol_type = other DNA
ctgctcgggctgatggtggtgagcaacaattttgtgccgctggtttttggtgagaagtgggtaagcatcattccg

SEQ ID NO: 96094 - DNA, 75 bp, synthetic construct
  source 1..75: mol_type = other DNA
caccatgaccatcggtgccgatggcgaggtgatgcacagcctgcacgccgataagtcaggcaccattacggtgac

SEQ ID NO: 96095 - DNA, 75 bp, synthetic construct
  source 1..75: mol_type = other DNA
gtcgatggtattaagctcgcagaactgattaacaaagtcgctgaaaacggttattcactccgcgtggtggatgaa

SEQ ID NO: 96096 - DNA, 75 bp, synthetic construct
  source 1..75: mol_type = other DNA
tcactgagctggaaaggctgctctctgagcaggctgaagccctccgtcagaaagatcagcaactgagtctggttg

SEQ ID NO: 96097 - DNA, 75 bp, synthetic construct
  source 1..75: mol_type = other DNA
acgaatggcaacgcctcaaaaattactggcatttcgcgcaatgctctcgccgtctgctgtgctggcactgctgga

SEQ ID NO: 96098 - DNA, 75 bp, synthetic construct
  source 1..75: mol_type = other DNA
aatcagccagagaacggggacggcgttttctgataacgccagcctttttgcccgctctgcagcttccatgcggga

SEQ ID NO: 96099 - DNA, 75 bp, synthetic construct
  source 1..75: mol_type = other DNA
cgcttcgggctgacctggataccggcagtggtgcgtcaggacgggagttcactggttgtcacgtcagcagcgatg

SEQ ID NO: 96100 - DNA, 75 bp, synthetic construct
  source 1..75: mol_type = other DNA
atgggtgtcagaatataactgtgaacgcccgtatgaatcactaaacaatatgatgccagaggaatatcgtcagca

SEQ ID NO: 96101 - DNA, 75 bp, synthetic construct
  source 1..75: mol_type = other DNA
cgtgcggctgacaaaaatacagatgctgttttaccttggctggcgaaagatattgctgtcgtttttccgcccgaa

SEQ ID NO: 96102 - DNA, 75 bp, synthetic construct
  source 1..75: mol_type = other DNA
catttccagctaggtctttccggagaacgggagtggctggctcgcaatgttgatcttaaagaaacgctaaatcgt

SEQ ID NO: 96103 - DNA, 75 bp, synthetic construct
  source 1..75: mol_type = other DNA
ctgactacgcgaccgaagtgtctaacatgtctcgtgcgcagatcctgcaacaagcaggtacttctgttctggcac

SEQ ID NO: 96104 - DNA, 75 bp, synthetic construct
  source 1..75: mol_type = other DNA
aaatcttatcggatatccaggcaactgggagatatctggaggcggatcacggaaggggagggttattttcacctg

SEQ ID NO: 96105 - DNA, 75 bp, synthetic construct
  source 1..75: mol_type = other DNA
atgagcaaaagagctttgatggattatcgttccatgcgactacgtgatggtatcagtgccgcaacgataaaccgt

SEQ ID NO: 96106 - DNA, 75 bp, synthetic construct
  source 1..75: mol_type = other DNA
aaaacaaaaagcgctggaatcaaaatttcataaagagattcgtgccggtaaagattacaaggcaacagaatcaga

SEQ ID NO: 96107 - DNA, 75 bp, synthetic construct
  source 1..75: mol_type = other DNA
taaacataatgtttaccgactattatcaagatatggcccgcgggcattttattattaaaagactcgaaaaaaagt

SEQ ID NO: 96108 - DNA, 75 bp, synthetic construct
  source 1..75: mol_type = other DNA
acgcagcacagtttggtgcgctggttgataaattccgtgcagacctggcggatatggcaggccagtgcgtcagtg

SEQ ID NO: 96109 - DNA, 75 bp, synthetic construct
  source 1..75: mol_type = other DNA
acagaaataacgttaatgttacgggcgtgctgactccagtatttttcctggacagatttacagcggagtctggct

SEQ ID NO: 96110 - DNA, 75 bp, synthetic construct
  source 1..75: mol_type = other DNA
gacacaaacaggaaaatggttagccactttaatcgaaaaagttgcaacaagatttggtatagttattacggaaaa

SEQ ID NO: 96111 - DNA, 75 bp, synthetic construct
  source 1..75: mol_type = other DNA
ctctcgccgttggaggataaaacggcgttaacgtttcgccaggtattggttcatttcaggcaaaaaaaatatgcc

SEQ ID NO: 96112 - DNA, 75 bp, synthetic construct
  source 1..75: mol_type = other DNA
ggcggtgatgcttataccgttaacgtagatagcggtgcagtcaaggataaagataataaagatgtttttgttagc

SEQ ID NO: 96113 - DNA, 75 bp, synthetic construct
  source 1..75: mol_type = other DNA
tggtgaaggcctgccgctgccggagacatatgaccgtccggacccgcgtattaaacagctggcgcgtcgcagtac

SEQ ID NO: 96114 - DNA, 75 bp, synthetic construct
  source 1..75: mol_type = other DNA
gctaatgaaccgcatccgattgatggcctgtccggtgaatatgcggagaaatcccttgaagaatgggcggaacag

SEQ ID NO: 96115 - DNA, 75 bp, synthetic construct
  source 1..75: mol_type = other DNA
ggaagtgtccaaatattttcttgccggattggagcaacttgatcaatgaagtttcaaaaggtagacgtttaataa

SEQ ID NO: 96116 - DNA, 75 bp, synthetic construct
  source 1..75: mol_type = other DNA
tatcgcggagatttccggtgtactggcggtttatgcagaacgtcgttgtgacaaccatggcccgtatacacgcct

SEQ ID NO: 96117 - DNA, 75 bp, synthetic construct
  source 1..75: mol_type = other DNA
tagcaaatcagtatgtcattgcactttactggccggtttcctctctgccgcagggtgtcaccctgacaggggatg

SEQ ID NO: 96118 - DNA, 75 bp, synthetic construct
  source 1..75: mol_type = other DNA
gtttcatttttagttttgcggcccatgccaacaatattattgttaacggtacccgctttatttatccaggaaatg

SEQ ID NO: 96119 - DNA, 75 bp, synthetic construct
  source 1..75: mol_type = other DNA
atacgctcctaccagcgcattccggtcaccggcgggaaggatgcccgcatcctgaaagattccgagaaaaccggt

SEQ ID NO: 96120 - DNA, 75 bp, synthetic construct
  source 1..75: mol_type = other DNA
cacgcagcgctggcggcattagcagaacttctggcacaaaaagatgaaaagcgctggcgcatgatgctaatgacg

SEQ ID NO: 96121 - DNA, 75 bp, synthetic construct
  source 1..75: mol_type = other DNA
tctcaagctgaaagcccagcatcccgagatcctgctgttctatcggatgggtgacttttacgaactgttttatga

SEQ ID NO: 96122 - DNA, 75 bp, synthetic construct
  source 1..75: mol_type = other DNA
accacgaagaaatcaccggatggccttgaagaattccgtaaggcacgcgcattgaaaatgaccgtcgacacaatg

SEQ ID NO: 96123 - DNA, 75 bp, synthetic construct
  source 1..75: mol_type = other DNA
gaaaaacttccggcgctggctgtacaagctggaaaaagatggggttattcgtatcgatggggatgatgtagcgcc

SEQ ID NO: 96124 - DNA, 75 bp, synthetic construct
  source 1..75: mol_type = other DNA
gcgtaaaagtattagcatctcaacagactatgaaaattcaggttggtgctaacgacggcgaaacaattacgattg

SEQ ID NO: 96125 - DNA, 75 bp, synthetic construct
  source 1..75: mol_type = other DNA
cgtaacacatttagcacatctgatctagctgcaactgcaactactgaactagctccggctaaaacagatgttaaa

SEQ ID NO: 96126 - DNA, 75 bp, synthetic construct
  source 1..75: mol_type = other DNA
tttaacaacgaatttggtcgtccggcactgaacggctacttccgtacttatgaagaaaaagtgaacagccacaat

SEQ ID NO: 96127 - DNA, 75 bp, synthetic construct
  source 1..75: mol_type = other DNA
ttctctgtcatggccattacctgctgatatatcccatgacacgctggagaaactcatttttccgcccaaagacac

SEQ ID NO: 96128 - DNA, 75 bp, synthetic construct
  source 1..75: mol_type = other DNA
tctgactggctcaaaacctgtcatattacaaccgtcgccatggagtccaccggcgtttactggttgcctgctttt

SEQ ID NO: 96129 - DNA, 75 bp, synthetic construct
  source 1..75: mol_type = other DNA
tattgacttactgctgatagccgatgatgaacgggctgacagccacagctatatgcgtctggtcgaaagccgccg

SEQ ID NO: 96130 - DNA, 75 bp, synthetic construct
  source 1..75: mol_type = other DNA
ggtttaataaaacgaccgtggcggtcactaacaagaacgcgagaataatctggtcgatgctgagaaatgataccg

SEQ ID NO: 96131 - DNA, 75 bp, synthetic construct
  source 1..75: mol_type = other DNA
ggcggtcatgacgataacgattctgcgcttgatatctcgtacatgagtaacggaaataatattgactatggcggc

SEQ ID NO: 96132 - DNA, 75 bp, synthetic construct
  source 1..75: mol_type = other DNA
ggcagcacccaaacgcccgccagggccaacgccaattgaattgctgaaacaggaatatgagcgccggaaggcggc

SEQ ID NO: 96133 - DNA, 75 bp, synthetic construct
  source 1..75: mol_type = other DNA
gacgaggtaattcatcaatcatttccaaaagcaacaattatctcttttacaaatttatatcaggcattagcatcc

SEQ ID NO: 96134 - DNA, 75 bp, synthetic construct
  source 1..75: mol_type = other DNA
ggctggtgttgctgcaatgattatcaacgatgccctacaccacagcgaaactccagctaccgatgctttcctgtc

SEQ ID NO: 96135 - DNA, 75 bp, synthetic construct
  source 1..75: mol_type = other DNA
gagtgacggcagttatctggaagatcaggatatgtggcggatgagcggcattttccgtgacgtctcgttgctgca

SEQ ID NO: 96136 - DNA, 75 bp, synthetic construct
  source 1..75: mol_type = other DNA
gcgtgatgaatatgcagcaatgcctgatacggtttcatcctctgcaaccaaagttgaaaacgcctttatggcctg

SEQ ID NO: 96137 - DNA, 75 bp, synthetic construct
  source 1..75: mol_type = other DNA
gtttaaagccagtccgtcaggaaaaatgacggccaggatccgcgttaaccggggcaatctgcccgccattaagct

SEQ ID NO: 96138 - DNA, 75 bp, synthetic construct
  source 1..75: mol_type = other DNA
atcaaaaaaaatgctgatcgtgttggtttcatctctaattttaaattatttattgatagcaaaatttggtattat

SEQ ID NO: 96139 - DNA, 75 bp, synthetic construct
  source 1..75: mol_type = other DNA
cggcaggtcgtgctcccgcaggcagtcaggtccatcgtcttgttccgctttccgatcaccactacgtcagccagc

SEQ ID NO: 96140 - DNA, 75 bp, synthetic construct
  source 1..75: mol_type = other DNA
atgatgattgtgctcaggtaagggaattattaaaacaatcaaacggtaatattacggatgataagattgatgaaa

SEQ ID NO: 96141 - DNA, 75 bp, synthetic construct
  source 1..75: mol_type = other DNA
gcgccaaagatgcggtgaggtctttcgttatgcaatcataactggccgagctgaatacaacccagcacctgattt

SEQ ID NO: 96142 - DNA, 75 bp, synthetic construct
  source 1..75: mol_type = other DNA
gatggagaaatacgtcgctacgacagtcgtctaaacataatctgtcgcgagtgccggaagagcgaagttatgcag

SEQ ID NO: 96143 - DNA, 75 bp, synthetic construct
  source 1..75: mol_type = other DNA
agtctgctgacactggctacctgcgtcggcgtagtgatggcactgacgatttgggggctacgcggatgggtgtga

SEQ ID NO: 96144 - DNA, 75 bp, synthetic construct
  source 1..75: mol_type = other DNA
cgtgattaatcaacaaacgcgcatgcgtcagggattttacgaacgtaatcactgtgaaatattgcaggggaacgc

SEQ ID NO: 96145 - DNA, 75 bp, synthetic construct
  source 1..75: mol_type = other DNA
ctccacgcacttctttgcaagtattacgtgatgtagtatttggcttattaattcgtgagctaaaaacaagatttg

SEQ ID NO: 96146 - DNA, 75 bp, synthetic construct
  source 1..75: mol_type = other DNA
ggacgggtcagggccgtactcctaaagcaatcgccgctgctatcgaagctggtaaaacgctggaagactttgcga

SEQ ID NO: 96147 - DNA, 75 bp, synthetic construct
  source 1..75: mol_type = other DNA
ccggtccaggtactgctgccgggtaataagaagacgaagaccgggcggttgtgggcgtatgttcgtgatgaccgc

SEQ ID NO: 96148 - DNA, 75 bp, synthetic construct
  source 1..75: mol_type = other DNA
aaaaatcacataaattctgggcggtggagcagcaagacaacgaactgcatattacctggggtaaagtcggtacca

SEQ ID NO: 96149 - DNA, 75 bp, synthetic construct
  source 1..75: mol_type = other DNA
atggggctggcgaataaaggctggataaagggcaccccgcaggatgcaggctggatcggctggatgatcaaacct

SEQ ID NO: 96150 - DNA, 75 bp, synthetic construct
  source 1..75: mol_type = other DNA
ccacacataacgaagaactgattgaattatacaaatcaaaaaacattcctttgtttatggaaaaatgcgtggagt

SEQ ID NO: 96151 - DNA, 75 bp, synthetic construct
  source 1..75: mol_type = other DNA
cggatattcaggccatcggtaatggcgacctgacagttaacgcctcggtaaccaacggcgtgggtaatactggca

SEQ ID NO: 96152 - DNA, 75 bp, synthetic construct
  source 1..75: mol_type = other DNA
cacacgctgggtaaagacacagccgtgttcgtgttgtggtaagccagcggacgatcctcatcatctgattggtca

SEQ ID NO: 96153 - DNA, 75 bp, synthetic construct
  source 1..75: mol_type = other DNA
ccttcggtgaatctgctccggcagagctgctgtttgaagagttcggcttcactgttgataacgttgttgcgaaag

SEQ ID NO: 96154 - DNA, 75 bp, synthetic construct
  source 1..75: mol_type = other DNA
gctggtcaatgaagaggtggaaaacaatgctgcgaccgataaagcgccatccactcatacttcaccggtcgtgcc

SEQ ID NO: 96155 - DNA, 75 bp, synthetic construct
  source 1..75: mol_type = other DNA
caccacagcgaaaccgtcatacatcgttacggtaccggcgcgatggtgttgtgctggcactgcgacaaccagctg

SEQ ID NO: 96156 - DNA, 75 bp, synthetic construct
  source 1..75: mol_type = other DNA
tatcccgatgaaccggaatcatggagtgaagccgggttaaacgccctggctgagtgggaaaaatcagaccatcaa

SEQ ID NO: 96157 - DNA, 75 bp, synthetic construct
  source 1..75: mol_type = other DNA
aaaattacgcgcgtgtggtggctgaggtgatgcgccgtgacggtattgagcttaacggcgtggatatgcgcgaca

SEQ ID NO: 96158 - DNA, 75 bp, synthetic construct
  source 1..75: mol_type = other DNA
cagaatacgacatatcattatctgacgatgaaaactatgacgatgactattatcgtgaacgcccgtgccggggga

SEQ ID NO: 96159 - DNA, 75 bp, synthetic construct
  source 1..75: mol_type = other DNA
tggtcgtaaaacccgtcgatatgcgccggggtatcgacacactgacacagtacgtccagaacgaacttaacgctg

SEQ ID NO: 96160 - DNA, 75 bp, synthetic construct
  source 1..75: mol_type = other DNA
gattatacgaaaatcgcgacgcaatctgatgtcgaaatggaaggataaaaaacataattctttgatggtttttga

SEQ ID NO: 96161 - DNA, 75 bp, synthetic construct
  source 1..75: mol_type = other DNA
aacactatcgcgggcgatgatgtgatcaacgccagcgaaaaaggagccgatctccagattaccggcaccagcgat

SEQ ID NO: 96162 - DNA, 75 bp, synthetic construct
  source 1..75: mol_type = other DNA
caactattacaccaattccggccgtggtgtaaccggagaaaacggggaattttcctttagttggggggaaaccat

SEQ ID NO: 96163 - DNA, 75 bp, synthetic construct
  source 1..75: mol_type = other DNA
gatgcgccgtgacggtattgagcttaacggcgtggatatgcgcaacatacgaaccagagtccttgagttgctggc

SEQ ID NO: 96164 - DNA, 75 bp, synthetic construct
  source 1..75: mol_type = other DNA
cgaagatggcccgactcaccagccggtagagcaggtcgcttctctgcgcgtaaccccgaacatgtctacatggcg

SEQ ID NO: 96165 - DNA, 75 bp, synthetic construct
  source 1..75: mol_type = other DNA
agcagcaaaacaaactccattaattcctgttccgggcctttcctgcaccttgcggcgggaggccttcgcacatct

SEQ ID NO: 96166 - DNA, 75 bp, synthetic construct
  source 1..75: mol_type = other DNA
caacaaatcaactggcagttgaacagtcccgtctcactcaaatgcagggcaaagcgcaatccattcaggatgtgc

SEQ ID NO: 96167 - DNA, 75 bp, synthetic construct
  source 1..75: mol_type = other DNA
ttaacgccgcagaaaaaggcgctgatttaaccctttccggcaccaccactaacgtagaacccggtcaaaccgtca

SEQ ID NO: 96168 - DNA, 75 bp, synthetic construct
  source 1..75: mol_type = other DNA
gagtgaacgtctgaaagagcaggaagccttttatgccgaatcggatgtgcagcgtgcggactggcagaaagggct

SEQ ID NO: 96169 - DNA, 75 bp, synthetic construct
  source 1..75: mol_type = other DNA
gaaaaaattgtctcgctgaaagaacttctttccggcgctaatgagctggacagtatcgttcgtcgcccccgcagg

SEQ ID NO: 96170 - DNA, 75 bp, synthetic construct
  source 1..75: mol_type = other DNA
cgccggcaacgctgggtttaaaagccagtcgctcggcaaattatcagcgcaaaaaacaaggtttttatgcgcgct

SEQ ID NO: 96171 - DNA, 75 bp, synthetic construct
  source 1..75: mol_type = other DNA
atgaccgaatctgaaatactgcgattaatccgctgtgctggtggaattagccagttggctgacgaacaggccgcg

SEQ ID NO: 96172 - DNA, 75 bp, synthetic construct
  source 1..75: mol_type = other DNA
gtggcgcacgtattcggtgaacgcacgttggccacgctggagcgtcttcttggcctgctgtcggcctttgaggtc

SEQ ID NO: 96173 - DNA, 75 bp, synthetic construct
  source 1..75: mol_type = other DNA
ctcgcacgcgatttggggctaaaagagctttatctgtggccgattaatgccgatcaacaaggaacaccgcagcag

SEQ ID NO: 96174 - DNA, 75 bp, synthetic construct
  source 1..75: mol_type = other DNA
catgacggttttgtgctggagaaccgccggggccgcacgtcccatgagcattttccggcactgattgccggtgcc

SEQ ID NO: 96175 - DNA, 75 bp, synthetic construct
  source 1..75: mol_type = other DNA
atgaagctcagcgccagacaggtcgagaccgcaaaaccaaaagataaaacctacaaaatggccgatggcggcggt

SEQ ID NO: 96176 - DNA, 75 bp, synthetic construct
  source 1..75: mol_type = other DNA
cgtcatcggcatcatctgcgtctgcttcaaaagatgaggcgaccagacaggcgtcagcagcgaagggcagcgcca

SEQ ID NO: 96177 - DNA, 75 bp, synthetic construct
  source 1..75: mol_type = other DNA
aacggcagcgagcagcgctgttcgatctgcccacggacgaactgtcgctactgaagttctacacgctgggcgatg

SEQ ID NO: 96178 - DNA, 75 bp, synthetic construct
  source 1..75: mol_type = other DNA
gccaacaccgtattaattgaaaaactcgtaggtgcagcggcggagcgtggcgactcactggacgcctgtgcggaa

SEQ ID NO: 96179 - DNA, 75 bp, synthetic construct
  source 1..75: mol_type = other DNA
tgcctgtaccgttcctgccgcgggcaaaccttcttttaccctggcggataatgagatggagtttggcgtcggcat

SEQ ID NO: 96180 - DNA, 75 bp, synthetic construct
  source 1..75: mol_type = other DNA
ggctttttactggcactgtttatcggcttacgcagccgccggcatcactcgctaaaggaaaatgtcgctccgggt

SEQ ID NO: 96181 - DNA, 75 bp, synthetic construct
  source 1..75: mol_type = other DNA
tggcaataggtgtgctggggagtctgctgtttggcctgctgacgtatctgacaaacctttatttcaagattaaag

SEQ ID NO: 96182 - DNA, 75 bp, synthetic construct
  source 1..75: mol_type = other DNA
gttattacaacgtttatcgacctcacacgaacaacgatggtttaccgccttgcttacatgaagaaaagtggaaac

SEQ ID NO: 96183 - DNA, 75 bp, synthetic construct
  source 1..75: mol_type = other DNA
ggttatcaatttctccaatatgatgtttattgttaccgtcgccttactggtcgtgcgggataagcgtctggggaa

SEQ ID NO: 96184 - DNA, 75 bp, synthetic construct
  source 1..75: mol_type = other DNA
gatcgcctcgcttttggtgtttggcctacggtgacgcttgctcaggcaagagctaagcgcgatgaagctaaaaag

SEQ ID NO: 96185 - DNA, 75 bp, synthetic construct
  source 1..75: mol_type = other DNA
tttttccaggggatcatgacgcaacaaaggttatgagtgaaaacacagtgaacagcgctttacgtgcaatgggct

SEQ ID NO: 96186 - DNA, 75 bp, synthetic construct
  source 1..75: mol_type = other DNA
actcaaatccagccagcgatatggccggtgcactatcgacaaccaaagcgcgacattaccctgctttaccctcaa

SEQ ID NO: 96187 - DNA, 75 bp, synthetic construct
  source 1..75: mol_type = other DNA
agaggaatgaagatgaaggaagagcatctcgttccacttagtaggcaagcgatagggttgttggagcagttaaag

SEQ ID NO: 96188 - DNA, 75 bp, synthetic construct
  source 1..75: mol_type = other DNA
gttaaagccgtgcgcttttatgaacaggtaaagcgtgagaatccgccagtcgaaacaggagcatggaaggatgct

SEQ ID NO: 96189 - DNA, 75 bp, synthetic construct
  source 1..75: mol_type = other DNA
cgagaattcgggggcatatacattcgaaaccattgctcgtgaatggcacgccagtaacaaacgctggagtgaaga

SEQ ID NO: 96190 - DNA, 75 bp, synthetic construct
  source 1..75: mol_type = other DNA
tcatcagaagggcactggtgcaacggaaattgctcatcagctcagtattgcccgctccacggtttataaaattct

SEQ ID NO: 96191 - DNA, 75 bp, synthetic construct
  source 1..75: mol_type = other DNA
tccttagcatcggtccacatgaaaatttttataccgatcagaaaaaacaccgaaaagctgatttaaaactcatcg

SEQ ID NO: 96192 - DNA, 75 bp, synthetic construct
  source 1..75: mol_type = other DNA
tgataagctgaagtcattaccaagcacgaaaaactggacttacgcaacatattttcgatttataattgcagatta

SEQ ID NO: 96193 - DNA, 75 bp, synthetic construct
  source 1..75: mol_type = other DNA
gggccgtggtgcccgtgatctgcgggagtggactttcggccaggccgaagatgccagatcaaacgaggatcttgc

SEQ ID NO: 96194 - DNA, 75 bp, synthetic construct
  source 1..75: mol_type = other DNA
tatcggtgccatcaaaaacggttatgtcacgctttcaccgttaacgccatatgataaatgggatggtgagaaatg

SEQ ID NO: 96195 - DNA, 75 bp, synthetic construct
  source 1..75: mol_type = other DNA
atgtcatttggtagttacgaacttgttagcctcgcagaagcacgagagaaacgtgatactgcacgtaagcaggta

SEQ ID NO: 96196 - DNA, 75 bp, synthetic construct
  source 1..75: mol_type = other DNA
atgttggaacaaggcctgtgggagagattaaaccgctagagctgctgaacgtactgcgtaaaattgagaaacgtg

SEQ ID NO: 96197 - DNA, 75 bp, synthetic construct
  source 1..75: mol_type = other DNA
ctgaaaaaagatgcgcgtaccgtcgccgcccagcaggtagcaaggctggaatccgccatgtgcctgcgccgccgc

SEQ ID NO: 96198 - DNA, 75 bp, synthetic construct
  source 1..75: mol_type = other DNA
tttccatcctgattttagatatcgcattaataaaacagcggatgttagccaatatcgaaaccagtaacccgtatc

SEQ ID NO: 96199 - DNA, 75 bp, synthetic construct
  source 1..75: mol_type = other DNA
tcagcgagaatcggaaattcgtcaggaatttaatctgagttccgatcaggctcagcgctttattcaacgcacctc

SEQ ID NO: 96200 - DNA, 75 bp, synthetic construct
  source 1..75: mol_type = other DNA
gatggtacagtggtgggctgactaccttgatagaaactcaaatgggtatgttacaccttatgattttgccaaaac

SEQ ID NO: 96201 - DNA, 75 bp, synthetic construct
  source 1..75: mol_type = other DNA
atctcgcttggtgtctatccaacgatcacacttgctgaagctcgttctcgccgtgatgaggcacgaaaaatagtg

SEQ ID NO: 96202 - DNA, 75 bp, synthetic construct
  source 1..75: mol_type = other DNA
tacgagccaagacattaacaagacaaataatgttggagtccaaaaatatcgtgctctaactgaatgggttaaata

SEQ ID NO: 96203 - DNA, 75 bp, synthetic construct
  source 1..75: mol_type = other DNA
gcataacctgaatctgagacaacatctggcaaggctgggacggaagtcactgtcgttctcaaaatcggtggagct

SEQ ID NO: 96204 - DNA, 75 bp, synthetic construct
  source 1..75: mol_type = other DNA
ataaacaatgggcacaatcacacagcgataaagtactcaaaagcctcgagactcacgttttcccctttatcggca

SEQ ID NO: 96205 - DNA, 75 bp, synthetic construct
  source 1..75: mol_type = other DNA
acatacgttccgccattcctatgcgatgcacatgctgtatgccggtataccgctgaaggtcctgcagagcctgat

SEQ ID NO: 96206 - DNA, 75 bp, synthetic construct
  source 1..75: mol_type = other DNA
tcgaagagttgccttattttattcgggatttggaggcatactccggcagcataatcaccaaaaatgcaactaaga

SEQ ID NO: 96207 - DNA, 75 bp, synthetic construct
  source 1..75: mol_type = other DNA
accgtaagatgctgctggccaccctctggaatacgggcgcccgcattaacgaggcactggcgcttactcgagggg

SEQ ID NO: 96208 - DNA, 75 bp, synthetic construct
  source 1..75: mol_type = other DNA
tatctaaagaaagtgtatcccaagtgatagaattacttggctataaaggaagagccacaggccatggattccgtc

SEQ ID NO: 96209 - DNA, 75 bp, synthetic construct
  source 1..75: mol_type = other DNA
gattatcaccatcactgaaggcatcccgacgctggatatgctgactgtgaaagtgaaactggacgaagccggcgt

SEQ ID NO: 96210 - DNA, 75 bp, synthetic construct
  source 1..75: mol_type = other DNA
gtcgtcgggaagataaacagaacgatctctggacaacctggcagcgggttcaggagaatatgataaaaggtggat

SEQ ID NO: 96211 - DNA, 75 bp, synthetic construct
  source 1..75: mol_type = other DNA
atttagccagttataccttatatggctatatctcaatggcaacgttttatctggttagccagtggctggcacagt

SEQ ID NO: 96212 - DNA, 75 bp, synthetic construct
  source 1..75: mol_type = other DNA
tttgcagcttctgagtggtgcggaaaataaccgggtgctgcgtgaggcaacccgtgcgggtgcgaatgtgctgaa

SEQ ID NO: 96213 - DNA, 75 bp, synthetic construct
  source 1..75: mol_type = other DNA
agcgtggcggcgaagttcagggggtttttgacgatccggagtcgctgggttttgccggtggcggggtccgtattg

SEQ ID NO: 96214 - DNA, 75 bp, synthetic construct
  source 1..75: mol_type = other DNA
aagctgctcatccccgataacctcagaagcgcagtgaaaaaggccgatcgctatgagcctgtcatcaacgacagt

SEQ ID NO: 96215 - DNA, 75 bp, synthetic construct
  source 1..75: mol_type = other DNA
atcctcatatgttaaggcatgcttgtggttatgaactggcggagcgtggtgcagatacccgtttaattcaggatt

SEQ ID NO: 96216 - DNA, 75 bp, synthetic construct
  source 1..75: mol_type = other DNA
atgttcgcgctgatggcgattatctctctatccgtgttcgcgataccggcgtggggattccggcgaaagaagtgg

SEQ ID NO: 96217 - DNA, 75 bp, synthetic construct
  source 1..75: mol_type = other DNA
tcagtcttgcagaggccagagaaaaacgagaagtcgcgcgcagacaggttgcgaatggtatcgatccagtacaag

SEQ ID NO: 96218 - DNA, 75 bp, synthetic construct
  source 1..75: mol_type = other DNA
ctcgctgcgctccggcgacatctgggtgcagggatcgcgccagttcaaggactttgaggactacctgttgccgcc

SEQ ID NO: 96219 - DNA, 75 bp, synthetic construct
  source 1..75: mol_type = other DNA
ggccattgtgtttaaggatgataatgtggttggtttttatgatgatgttcaggagggaatagaggagtatcgtgt

SEQ ID NO: 96220 - DNA, 75 bp, synthetic construct
  source 1..75: mol_type = other DNA
gaggaaagatcatcaccaataaaacgatatcatggcccattgggctcgccggtggattccagggcagtttaaccg

SEQ ID NO: 96221 - DNA, 75 bp, synthetic construct
  source 1..75: mol_type = other DNA
cgctccagaccgggcaggtgctgaaactcctcttgttcttactgatatgactggaggagtgactatttattatga

SEQ ID NO: 96222 - DNA, 75 bp, synthetic construct
  source 1..75: mol_type = other DNA
tggtgcggtactgggcttccgttgctggtttgatccggcccgcaatccggagacggagctggccgccgggcacct

SEQ ID NO: 96223 - DNA, 75 bp, synthetic construct
  source 1..75: mol_type = other DNA
tcaatttcattatgggaaagtgaccatacagccccgcgcgggcaaaatttgcatagactcgccgaggtattacaa

SEQ ID NO: 96224 - DNA, 75 bp, synthetic construct
  source 1..75: mol_type = other DNA
caacaaccgcagggccacaaaagttgcggtcactgtcgtggatgtcagttgatgcaggctggcacgcatcccgat

SEQ ID NO: 96225 - DNA, 75 bp, synthetic construct
  source 1..75: mol_type = other DNA
gccggcgatctgctggacatgtgggagaggcgcgtcaccgagggcaaaccagtaccgcctgtgcgccgggcgatt

SEQ ID NO: 96226 - DNA, 75 bp, synthetic construct
  source 1..75: mol_type = other DNA
caaatatacgccgcctccgccgctggaacggctgacgtttgagacggaaatcacttcggaatatctggttaatct

SEQ ID NO: 96227 - DNA, 75 bp, synthetic construct
  source 1..75: mol_type = other DNA
caccctgctgggcgaagaaaacttccagaaagggatgcagctctatttcgagcgccatgatggcagcgcggcaac

SEQ ID NO: 96228 - DNA, 75 bp, synthetic construct
  source 1..75: mol_type = other DNA
tacagccccgcgtgggcaaaatttgcatcgcctggctgaggtattgcaatgttcaccaacttggatactgtttgg

SEQ ID NO: 96229 - DNA, 75 bp, synthetic construct
  source 1..75: mol_type = other DNA
tctctctttaacaaagagacaagccgttttagttctgaacacaatgttactaagcgagaacaaggtaaagaatgg

SEQ ID NO: 96230 - DNA, 75 bp, synthetic construct
  source 1..75: mol_type = other DNA
ccagaaatgacggtcagatattatatcagttctgctgatttaaccgcagagaagttcgccacagcaatccgaaac

SEQ ID NO: 96231 - DNA, 75 bp, synthetic construct
  source 1..75: mol_type = other DNA
cgtgcagtttattgactctggctggggcgtcactgcccctcagtggctgtatttccagaggccaggagtctatat

SEQ ID NO: 96232 - DNA, 75 bp, synthetic construct
  source 1..75: mol_type = other DNA
cagacgatggcctatgcgcaccttgcgcctgactatctgcaaaatgccgtcgctctgaatccactaaaaggcgga

SEQ ID NO: 96233 - DNA, 75 bp, synthetic construct
  source 1..75: mol_type = other DNA
gccaaaatcctgattgctccggtattctgcacccagaacagcgtctcggttgagcttatcgccatggctgagaaa

SEQ ID NO: 96234 - DNA, 75 bp, synthetic construct
  source 1..75: mol_type = other DNA
ccgcatagtgcactgggttatcgctcgccacgggaatatctacggcagcaggccagtaatgggttaagtgataac

SEQ ID NO: 96235 - DNA, 75 bp, synthetic construct
  source 1..75: mol_type = other DNA
tcgaaaccattgaggtggaaaacggtgcccgcccggttaaaacggtgaaatccgccgtcattggcctgattggta

SEQ ID NO: 96236 - DNA, 75 bp, synthetic construct
  source 1..75: mol_type = other DNA
aaaaaagccgacacgaaagacctcaatgtgccaccaccggtttatggtccgccgcaggtgatatttcgcattgat

SEQ ID NO: 96237 - DNA, 75 bp, synthetic construct
  source 1..75: mol_type = other DNA
aatcatatcgtacgccaaaagggcggcattatgtttttaaaaatttaagtattgaatttcctacagggaaaagta

SEQ ID NO: 96238 - DNA, 75 bp, synthetic construct
  source 1..75: mol_type = other DNA
ggtgtgtattcgtcttactgggaagaatggaaaaaagtcagggaggtggtaaaagttgcctgtccggagtgtggc

SEQ ID NO: 96239 - DNA, 75 bp, synthetic construct
  source 1..75: mol_type = other DNA
gcgaactccgcgcccgcgttgagaattttaatcgcctgttcaccgagctattagaggctcgcaaacgcaacaagc

SEQ ID NO: 96240 - DNA, 75 bp, synthetic construct
  source 1..75: mol_type = other DNA
ccaccaccgctggagcgactgacgtttgagaccgagatcacctcggaatatctgttaaccctgaaggggaatagc

SEQ ID NO: 96241 - DNA, 75 bp, synthetic construct
  source 1..75: mol_type = other DNA
catggccaacggtcacccatatgcgcaactttgagaacgttcgccgtaccggtgatgtgatcaacgagtccctgc

SEQ ID NO: 96242 - DNA, 75 bp, synthetic construct
  source 1..75: mol_type = other DNA
gctggatgcgatttatgaccatggtgcaggtaccgttctggtcattaacgtcctcgacccggcgaaacataaaac

SEQ ID NO: 96243 - DNA, 75 bp, synthetic construct
  source 1..75: mol_type = other DNA
aatgtgccgcgtgctccgggtggcccgcagcggctggtatacgtggtgtcagcggcggacaaggataagcacgcg

SEQ ID NO: 96244 - DNA, 75 bp, synthetic construct
  source 1..75: mol_type = other DNA
ttccggtggcgatccctggctcgcaatagaaaacatactcccatgggctgaatttgtcgccagtctggatgaaac

SEQ ID NO: 96245 - DNA, 75 bp, synthetic construct
  source 1..75: mol_type = other DNA
gtcgttgaaaagggtggcgagtggctaataaaaaataatgattcctcaattgaatttcaaattggtaatcaagga

SEQ ID NO: 96246 - DNA, 75 bp, synthetic construct
  source 1..75: mol_type = other DNA
cgcgcaccgataaaggcattctcctagccgaagagttacttgtctatctccggcagaacaacgtgataatccccg

SEQ ID NO: 96247 - DNA, 75 bp, synthetic construct
  source 1..75: mol_type = other DNA
cagtgagctgcatattgccccgtcaacgtattaccactgtcagcaacagcgacatcatcctgataaacgcagtgc

SEQ ID NO: 96248 - DNA, 75 bp, synthetic construct
  source 1..75: mol_type = other DNA
aaagcacaggggctaaagttaaaacgattattcatacggatttatctgcaccatggcgtcttaaggatatatcat

SEQ ID NO: 96249 - DNA, 75 bp, synthetic construct
  source 1..75: mol_type = other DNA
acgcgctggcgcgtgcggtatttatgcaccgactgggagaaatcagggacagaaaaccggaaaatcagagctatc

SEQ ID NO: 96250 - DNA, 75 bp, synthetic construct
  source 1..75: mol_type = other DNA
atgaccggtgataaacccggagaagctcattcatcagcctggaccctggctgcaaaacgtgggcgggatgcagga

SEQ ID NO: 96251 - DNA, 75 bp, synthetic construct
  source 1..75: mol_type = other DNA
cggcgggaaatgacatccagcctcattgccgtctgcctctacccccttctgctgctttcgctctgtgtggtgaat

SEQ ID NO: 96252 - DNA, 75 bp, synthetic construct
  source 1..75: mol_type = other DNA
gtgattatgatccggaggtgctgctgagggcggtgaatgacgctgtcggaaaacttccggtaccggcagatggaa

SEQ ID NO: 96253 - DNA, 75 bp, synthetic construct
  source 1..75: mol_type = other DNA
atccggttctgcaggcgatggtggatgacgctgtgggggccattccggtaccgcgtgatggtcgtgattatgatc

SEQ ID NO: 96254 - DNA, 75 bp, synthetic construct
  source 1..75: mol_type = other DNA
gacgccgacagagtggaaactgctgtgggttaagctggaaggaaaacagcttccgtcacagacgccgacactgaa

SEQ ID NO: 96255 - DNA, 75 bp, synthetic construct
  source 1..75: mol_type = other DNA
tcacactcttgacgcccatggaatatattagagaacaaaaatttcaatatgtggtggacgcatacagaggattga

SEQ ID NO: 96256 - DNA, 75 bp, synthetic construct
  source 1..75: mol_type = other DNA
tggtatgaaatgcgccgccagcttgcgtacaagcagctctggcgtggcggtcaggtgcttgctgttccgccagcg

SEQ ID NO: 96257 - DNA, 75 bp, synthetic construct
  source 1..75: mol_type = other DNA
cctgtgggctggctgggtgccgcggctgtatcgggcatgtatgcggcaggggccagtatgatcctgggtggtgtg

SEQ ID NO: 96258 - DNA, 75 bp, synthetic construct
  source 1..75: mol_type = other DNA
aaaaggatgtcgccgcaggctccgctttacccggccatgcggggcatggccttgtgggttttcagttatgtggcc

SEQ ID NO: 96259 - DNA, 75 bp, synthetic construct
  source 1..75: mol_type = other DNA
cagctattggtcgcgctattatcgctatgggcagtataaaagaagtcctcaattaccttggtttgggggaaggct

SEQ ID NO: 96260 - DNA, 75 bp, synthetic construct
  source 1..75: mol_type = other DNA
cgggcgttaggtgttgagcttgagacagagcggtttaatcagaccatccaggaaatcagtatgttatcagcaaat

SEQ ID NO: 96261 - DNA, 75 bp, synthetic construct
  source 1..75: mol_type = other DNA
taaggctattattcacacggatatatctgcagcatggagactttgtgatatatcttcaagactgtatctgagtga

SEQ ID NO: 96262 - DNA, 75 bp, synthetic construct
  source 1..75: mol_type = other DNA
gtaaaccgcaggttgcttaccgtgaaactatccgccagaaagttaccgatgttgaaggtaaacacgcgaaacagt

SEQ ID NO: 96263 - DNA, 75 bp, synthetic construct
  source 1..75: mol_type = other DNA
tttttctgccggtccccggacagagcacaaaggaagtcgccgccggctccgctttatccggccatgcaggcatgg

SEQ ID NO: 96264 - DNA, 75 bp, synthetic construct
  source 1..75: mol_type = other DNA
atggctcgtacaacacccatcgcacgctaccgtaacatcggtatcagtgcgcacatcgacgccggtaaaaccact

SEQ ID NO: 96265 - DNA, 75 bp, synthetic construct
  source 1..75: mol_type = other DNA
ttgccgcactggttatgggttttagtggtgcagcactggcattacccaatatcaccattttagcaaccggcggga

SEQ ID NO: 96266 - DNA, 75 bp, synthetic construct
  source 1..75: mol_type = other DNA
acttcttcgacaaggagcatccggtatatccgaatgtggacggcacgggcagcgcggttaatacctccaacatcg

SEQ ID NO: 96267 - DNA, 75 bp, synthetic construct
  source 1..75: mol_type = other DNA
gtggtgagttctacacgcccaaatgtgtggttacgctgttaactgaaatgctcgaacccttccagggcaaaattt

SEQ ID NO: 96268 - DNA, 75 bp, synthetic construct
  source 1..75: mol_type = other DNA
cccggccgtgccgccgattcccggcctgaaagacactccgtactggacttccactgaagcgctggtcagcgagac

SEQ ID NO: 96269 - DNA, 75 bp, synthetic construct
  source 1..75: mol_type = other DNA
ataatgataccggagatatcagttcgctcggctctacacaatacggatttggtgacgctttaacctctaatcaac

SEQ ID NO: 96270 - DNA, 75 bp, synthetic construct
  source 1..75: mol_type = other DNA
gagttttcgcccgatctgaaagcattaccccccggtgaacatggcttccatattcatgccaaaggaagctgccag

SEQ ID NO: 96271 - DNA, 75 bp, synthetic construct
  source 1..75: mol_type = other DNA
acaacggttatcgttatcgatataaaaaagaaatttagatatatcagaagtcgtatcgaaaaaattcaaaaagat

SEQ ID NO: 96272 - DNA, 75 bp, synthetic construct
  source 1..75: mol_type = other DNA
gggcgctggccacacagcttccgtcgtttcgccagaaactgaatgagggctggtatcaggtgcgcatttccgggc

SEQ ID NO: 96273 - DNA, 75 bp, synthetic construct
  source 1..75: mol_type = other DNA
cagcgaagccaacctgaagtacatggacctggagaaaaagtcgaagacctcctatgccaaatggtttccgtccgt

SEQ ID NO: 96274 - DNA, 75 bp, synthetic construct
  source 1..75: mol_type = other DNA
tcaatacattaaaaatagtgtcagcagagcaagacaagctgtccagggcagcccagaaagataatcaacatatgg

SEQ ID NO: 96275 - DNA, 75 bp, synthetic construct
  source 1..75: mol_type = other DNA
tgggccaggcgcggtaatgaatttgtgacggtgaaatcgctgaacgagcagggccagccggtgggcgtggagata

SEQ ID NO: 96276 - DNA, 75 bp, synthetic construct
  source 1..75: mol_type = other DNA
gactggaagaccgtccgtcactgctggttgcggtgatgttctccctgattatctacatcgagaacaggatgtacc

SEQ ID NO: 96277 - DNA, 75 bp, synthetic construct
  source 1..75: mol_type = other DNA
gtcagtcacagattcacctgacaccagtcccccgtcagaaaacccgatcgccagtaagcctgaattcccgggacg

SEQ ID NO: 96278 - DNA, 75 bp, synthetic construct
  source 1..75: mol_type = other DNA
tcattaaacattttatgcgtaacgaacataaagcagttgaagaagttattgattcccctctttcggaggtcgcaa

SEQ ID NO: 96279 - DNA, 75 bp, synthetic construct
  source 1..75: mol_type = other DNA
catttatcgacctgaaaaatggtcgtattgatggggtatttggtgatacagcggtagttaatgagtggctgaaaa

SEQ ID NO: 96280 - DNA, 75 bp, synthetic construct
  source 1..75: mol_type = other DNA
agcgacagcaaaaccatttcctcgcgaaccggttatcgtgcaaaagcgagtgtgaacggatatagcacaggcctc

SEQ ID NO: 96281 - DNA, 75 bp, synthetic construct
  source 1..75: mol_type = other DNA
atccggcattacgtaagctgcattatcacattgcagaagttcagcgaatgcaggcattgatcaggctgaaagaag

SEQ ID NO: 96282 - DNA, 75 bp, synthetic construct
  source 1..75: mol_type = other DNA
gcagtcagtgatgacactgagcccacggaggctgatgtggcagaacctgttgaaaataaagagacagtttctgat

SEQ ID NO: 96283 - DNA, 75 bp, synthetic construct
  source 1..75: mol_type = other DNA
ggcgtcagaacataatctgtcgcgagtgccggaaaagcaaggttatgcagcgtgtgctggcgttttatcagggta

SEQ ID NO: 96284 - DNA, 75 bp, synthetic construct
  source 1..75: mol_type = other DNA
gaatatacaagtttcagtaagcagttgcattaaactattcgttcgtccggcagatgtgaaagggcaaccagatga

SEQ ID NO: 96285 - DNA, 75 bp, synthetic construct
  source 1..75: mol_type = other DNA
atgactattgctgaacggctacggcaggaaggacatcaaattggctggcaagaaggtaaaattgaaggtttgcat

SEQ ID NO: 96286 - DNA, 75 bp, synthetic construct
  source 1..75: mol_type = other DNA
tctgcgccagcgcattaacgaagctgcgcaggcggtgatggtggcttatgccatagggggcgatctggaccagct

SEQ ID NO: 96287 - DNA, 75 bp, synthetic construct
  source 1..75: mol_type = other DNA
ccgtgcgcagcgcgataactggctgaagaaagagatacagcgtgtatacgatgaaaatcacaaggtatacggtgt

SEQ ID NO: 96288 - DNA, 75 bp, synthetic construct
  source 1..75: mol_type = other DNA
tatgggcttctctgaaacgcatctacgtgcatacgtgcttcatgatgataaagatggccaacatatccatatagt

SEQ ID NO: 96289 - DNA, 75 bp, synthetic construct
  source 1..75: mol_type = other DNA
tttctcctcactggataacatggttgctcagggcaatgttttgcctgttctgtacggtgaaatgcgtgtggggtc

SEQ ID NO: 96290 - DNA, 75 bp, synthetic construct
  source 1..75: mol_type = other DNA
aactgaaaaatgaccctgatgcaaaattttatcatcttcatgaaacgtacaatgatttttcaaaagcttatcctc

SEQ ID NO: 96291 - DNA, 75 bp, synthetic construct
  source 1..75: mol_type = other DNA
cttcactggataatatggttgcccagggcaatgtcctgcccgttctgtacggtgaaatgcgtgtggggtcgcggg

SEQ ID NO: 96292 - DNA, 75 bp, synthetic construct
  source 1..75: mol_type = other DNA
ggccggatggtggcgcaccgttatgcgggaaggccggagatgcgctaccgctacgacgatgcggggcgggtggtg

SEQ ID NO: 96293 - DNA, 75 bp, synthetic construct
  source 1..75: mol_type = other DNA
gcttgaccggctggtacagcagcgcggctttgacgggcggacgcaacgttaccactatgacctgaccggaaaact

SEQ ID NO: 96294 - DNA, 75 bp, synthetic construct
  source 1..75: mol_type = other DNA
gttgctgagctacaaatacacgccgccaccgtcgctggagcggctgacgtttgagaccgagatcacctcggaata

SEQ ID NO: 96295 - DNA, 75 bp, synthetic construct
  source 1..75: mol_type = other DNA
catattcctgttccgcgcgacggtcgtgactacgatccggatgttctgcagaaggcggtgaatgatgcggtcgcg

SEQ ID NO: 96296 - DNA, 75 bp, synthetic construct
  source 1..75: mol_type = other DNA
ttccgcattccaaaacacacctggagttttgtgcgccagtcatggctgacgcaccagccatcgctttattcgcgt

SEQ ID NO: 96297 - DNA, 75 bp, synthetic construct
  source 1..75: mol_type = other DNA
tttatgctgtcggttgagcacctgacgtcctggcaccgcctgttcgtcgatccgctcagccgggcaatgtactcc

SEQ ID NO: 96298 - DNA, 75 bp, synthetic construct
  source 1..75: mol_type = other DNA
tttatcctgacgctggtccttagcgtggaagaccaggtaaaggcgcagaacgaggccaacctgaagttcatggat

SEQ ID NO: 96299 - DNA, 75 bp, synthetic construct
  source 1..75: mol_type = other DNA
catcgttcagcgatatgttgtccggcttcaaagataaggtgacatcatcccttaacagcgcggccagctcagtta

SEQ ID NO: 96300 - DNA, 75 bp, synthetic construct
  source 1..75: mol_type = other DNA
gtaatggaggccgaggaccaggtggcaacgcaaggggaggccacacgaaagtatctcgaccgggacaaaaaagcg

SEQ ID NO: 96301 - DNA, 75 bp, synthetic construct
  source 1..75: mol_type = other DNA
ggcttacggcgcagacggacgcggcgggacggcggacagagtacggtctgaatgtggtgtcaggcgatatcacgg

SEQ ID NO: 96302 - DNA, 75 bp, synthetic construct
  source 1..75: mol_type = other DNA
aaacgtggtatgcctgttatcagagactgccagcgttgtggtggtcgtggctatgaaagattgccgtcaacagag

SEQ ID NO: 96303 - DNA, 75 bp, synthetic construct
  source 1..75: mol_type = other DNA
gtgacaaatggctgggatcctaagtacgatccaacatggataaaatatgctgaagtaaatcgtaacgatatcatt

SEQ ID NO: 96304 - DNA, 75 bp, synthetic construct
  source 1..75: mol_type = other DNA
gccactggtcgagagccgctacctctacgacccgctgggacggcgaatggcgaaacgggtatggcggcgggagcg

SEQ ID NO: 96305 - DNA, 75 bp, synthetic construct
  source 1..75: mol_type = other DNA
catcgttcagtgatatgctgtccggcttcaaagataaggtgacatcatctcttaacagcgcggccagttcagtta

SEQ ID NO: 96306 - DNA, 75 bp, synthetic construct
  source 1..75: mol_type = other DNA
tggaaggcccggtgaccagtacccgtaacccgtgggtatggaaagtcgggcagggaaatggaggtctggaggtta

SEQ ID NO: 96307 - DNA, 75 bp, synthetic construct
  source 1..75: mol_type = other DNA
tggcggagcttgctacatcagcagataaactcccatattttacaggggcagatcgtgccgcgttaaccgcgttga

SEQ ID NO: 96308 - DNA, 75 bp, synthetic construct
  source 1..75: mol_type = other DNA
atgaatgacgttacagttgttacatcggttacttacccatcatccgagtcgttggctctggtggccgatgtgcaa

SEQ ID NO: 96309 - DNA, 75 bp, synthetic construct
  source 1..75: mol_type = other DNA
ttaacgggcaattgcatgccgtgaacgccgagaaacagcaagtgacccagaccatgaatgcgggcgtcgtttcca

SEQ ID NO: 96310 - DNA, 75 bp, synthetic construct
  source 1..75: mol_type = other DNA
gtacagtggcacgtctcatggcggttatgggacttgccggtgttctccggggtaaaaaggtccgtacgaccatca

SEQ ID NO: 96311 - DNA, 75 bp, synthetic construct
  source 1..75: mol_type = other DNA
caccgccgggcagaaacaggatattgatgtgaccacgctctgctccacagagcaggagaacatcaatggtctggg

SEQ ID NO: 96312 - DNA, 75 bp, synthetic construct
  source 1..75: mol_type = other DNA
aaattacaggtggcgaagtgtcgctgtcgctgctgaccacgcaggcgtatacaggacgaccctggcctttgattg

SEQ ID NO: 96313 - DNA, 75 bp, synthetic construct
  source 1..75: mol_type = other DNA
cgccgagaaacagcaagtgacccagaccatgaatgcgggcgtcgtttccaatagcgaagttacatcgacggagcc

SEQ ID NO: 96314 - DNA, 75 bp, synthetic construct
  source 1..75: mol_type = other DNA
ccaggataaatcagcttttctggacaatgttggcgttaccagcctgacgtttatgaaaaacaatggcgaaatgcc

SEQ ID NO: 96315 - DNA, 75 bp, synthetic construct
  source 1..75: mol_type = other DNA
gataatgtcagtgagatctatggtgcggcactccgggggatccctttgatcccggtgagcagggttccggctgcg

SEQ ID NO: 96316 - DNA, 75 bp, synthetic construct
  source 1..75: mol_type = other DNA
acatgcgaaaagcgaattgctaattggttggctgttgctgagtatgccctatatattcccatgcgagaatcattt

SEQ ID NO: 96317 - DNA, 75 bp, synthetic construct
  source 1..75: mol_type = other DNA
atttggattaggctgccagcaatgttatgaaacaggtgaaaaaatagcatgcgcaagagctgaagaatgccgtaa

SEQ ID NO: 96318 - DNA, 75 bp, synthetic construct
  source 1..75: mol_type = other DNA
aaaccatcgtcagggatgctgttgccaaatggcgtaaaggctggatcccaccggttactactgccgcaagacttc

SEQ ID NO: 96319 - DNA, 75 bp, synthetic construct
  source 1..75: mol_type = other DNA
tcggcctttccacaatgacaagatgggtcaaacaactgcgtgatgagcgtcagggcaaaacaccaaaagcctctc

SEQ ID NO: 96320 - DNA, 75 bp, synthetic construct
  source 1..75: mol_type = other DNA
ggccagacggtagagacctggaaccgggacggcggcacaagtactgaacaggcgtataaaaatatcccgttctat

SEQ ID NO: 96321 - DNA, 75 bp, synthetic construct
  source 1..75: mol_type = other DNA
caggttcgccgcctggaggaacacaatacgatattaaaaaaggctaccgcgctcttgatgtccgactcgctgaac

SEQ ID NO: 96322 - DNA, 75 bp, synthetic construct
  source 1..75: mol_type = other DNA
aaggtgctggctggaacgtgatcaaagtgatgtggggtagccgttgggatgaactgctgcgtaaagataccagcg

SEQ ID NO: 96323 - DNA, 75 bp, synthetic construct
  source 1..75: mol_type = other DNA
gaacatcagtccacgctgagcgcggggtatcttcatgcctcgacgaacgttcccggcagtgatgatctgaacggg

SEQ ID NO: 96324 - DNA, 75 bp, synthetic construct
  source 1..75: mol_type = other DNA
atgaaaataaaatggttattattgactgcggggaatatgatgaataccttcgtaacgcgtggttccgaggttttc

SEQ ID NO: 96325 - DNA, 75 bp, synthetic construct
  source 1..75: mol_type = other DNA
ggaaaactgcgcatgtgggggcgctggtcatatattggcggcggtaagacgggaaatatgtttaaccagttgctg

SEQ ID NO: 96326 - DNA, 75 bp, synthetic construct
  source 1..75: mol_type = other DNA
ggcggctcaatcatctctacaaaatacagaacgaaaaaggtgaactggtcaccttcagaatgcgaccggcgcagc

SEQ ID NO: 96327 - DNA, 75 bp, synthetic construct
  source 1..75: mol_type = other DNA
gccattgtgttatatagcggtgaatttttctgccgaataacaaccagagatggctggcacataatgattattccg

SEQ ID NO: 96328 - DNA, 75 bp, synthetic construct
  source 1..75: mol_type = other DNA
gggcattatcttacgtgatcagaataaacaaccctctttaagcggctgcctgcgaattaccgtcggaacccgtga

SEQ ID NO: 96329 - DNA, 75 bp, synthetic construct
  source 1..75: mol_type = other DNA
gatgtactgaatatcgccgccgattatgcggaatatgtggcagaggcgcgttatagaagaaaatttcctgaggat

SEQ ID NO: 96330 - DNA, 75 bp, synthetic construct
  source 1..75: mol_type = other DNA
aggcctgcgcgtgggttgggtcgcaccggggcgttatcacgataaactgatgcatatgaaatacgccatcagcag

SEQ ID NO: 96331 - DNA, 75 bp, synthetic construct
  source 1..75: mol_type = other DNA
ataaacctcctgtagtcccttactcagggacgcacgcgaaaatatttaaatacattgaaatccctctgccgtttt

SEQ ID NO: 96332 - DNA, 75 bp, synthetic construct
  source 1..75: mol_type = other DNA
attccctgaaacaggaattttccggcgttcctgatgatgcggctgatgcgctttcgtcaatgccagaacttatta

SEQ ID NO: 96333 - DNA, 75 bp, synthetic construct
  source 1..75: mol_type = other DNA
tgcatatgaaatacgccatcagcagctttaatgtaccgtccacgcaaatggcggcggcaacgtttgtgctggaag

SEQ ID NO: 96334 - DNA, 75 bp, synthetic construct
  source 1..75: mol_type = other DNA
atcaatcggcgctgctgcccatttgcttacaggtttcgccggagatcctgcgccagcgcctggaaaaccgtggcc

SEQ ID NO: 96335 - DNA, 75 bp, synthetic construct
  source 1..75: mol_type = other DNA
gaactcggtacgctggcgctggtgtggtatatcggtactcgcggtgccagttccagtgctaatctacaaacagtt

SEQ ID NO: 96336 - DNA, 75 bp, synthetic construct
  source 1..75: mol_type = other DNA
agcgtctggctgccgcctgccgtgggcgaacaggtcatgattgcctgcatcggtggcgaccccgcgaccgcgtcc

SEQ ID NO: 96337 - DNA, 75 bp, synthetic construct
  source 1..75: mol_type = other DNA
atggtcgttgggtctacaaattacaaggtagtaccaatagccagggtgaatactccgccgcgctcggtgccggta

SEQ ID NO: 96338 - DNA, 75 bp, synthetic construct
  source 1..75: mol_type = other DNA
cagcaatagtcgcgttattgctcggcattgaagcacatgcagcagaagaaacctttgacacccattttatgatgg

SEQ ID NO: 96339 - DNA, 75 bp, synthetic construct
  source 1..75: mol_type = other DNA
aatcgacgattgctggaaaggctgggccatactcctccggcagaagcagaaaaagcttattatgcttccatcgga

SEQ ID NO: 96340 - DNA, 75 bp, synthetic construct
  source 1..75: mol_type = other DNA
cagggcaggtaggttgggaactgcagcgtgctctggcaccgctgggtaatctgattgctcttgatgttcactcca

SEQ ID NO: 96341 - DNA, 75 bp, synthetic construct
  source 1..75: mol_type = other DNA
atgagtggtaagcgttatcccgaagagtttaaaattgaagcagtcaaacaggttgttgatcgcggttattccgtt

SEQ ID NO: 96342 - DNA, 75 bp, synthetic construct
  source 1..75: mol_type = other DNA
tttcaggctgcccggggtgatacatccggccagtatattgcgttaaaaacagttgcattgtctctggggttaccg

SEQ ID NO: 96343 - DNA, 75 bp, synthetic construct
  source 1..75: mol_type = other DNA
ctttggatgctttagccaatcatctgtttgctaatccgcaacgctcgctgccatgtcttgcctggacattactga

SEQ ID NO: 96344 - DNA, 75 bp, synthetic construct
  source 1..75: mol_type = other DNA
tccttaaacaggttcacaagcttagtggcgagcgcgattttgttttcattggcgatcataatccgcgtaaaccga

SEQ ID NO: 96345 - DNA, 75 bp, synthetic construct
  source 1..75: mol_type = other DNA
gttgttgtcgtccggattcaccgcttgctgatagtaagcagcgtaaccagaagttaccgcaacaagactttgagg

SEQ ID NO: 96346 - DNA, 75 bp, synthetic construct
  source 1..75: mol_type = other DNA
agcaaagctagcaaagaaagtagccatggtgctgacaaaagaaaagcctcaagactgctgcaacagttttgaggc

SEQ ID NO: 96347 - DNA, 75 bp, synthetic construct
  source 1..75: mol_type = other DNA
tggtgatcccgattcaggcctatgcataccggatgaatacccgcatgaatccagttgccgaacgcttctggcgtg

SEQ ID NO: 96348 - DNA, 75 bp, synthetic construct
  source 1..75: mol_type = other DNA
tacacatcgaaggccgcatatgtgggctatcgccacgaatgcgcctacatcctggcaaaaggccgtccacgtctg

SEQ ID NO: 96349 - DNA, 75 bp, synthetic construct
  source 1..75: mol_type = other DNA
gaagtcttcaaatacttttgagctagatttagcaagacttctaagcatcaagattcacaagttatctatgggggt

SEQ ID NO: 96350 - DNA, 75 bp, synthetic construct
  source 1..75: mol_type = other DNA
caggcatcttttgccgtccgtcttgccgcgccagacatgctttgcgggaaaacgtctccttctacgcaaatgcca

SEQ ID NO: 96351 - DNA, 75 bp, synthetic construct
  source 1..75: mol_type = other DNA
ctcatcgtctatggaaacgacattcgtgttggatgctctggagcaggcgttatgggcccgtcgaccgtccggcac

SEQ ID NO: 96352 - DNA, 75 bp, synthetic construct
  source 1..75: mol_type = other DNA
tattagaagccaacctggcgctgccaaaacacaacctggtcacgctcacctggggcaacgtcagcgccgttgatc

SEQ ID NO: 96353 - DNA, 75 bp, synthetic construct
  source 1..75: mol_type = other DNA
tgctgaagttgctgaatgggataagttacggcaacgattgcttgatgccagaaataaaatcacctctgctgaatc

SEQ ID NO: 96354 - DNA, 75 bp, synthetic construct
  source 1..75: mol_type = other DNA
gaaaaaagcgggaatagagaaacctgagctggaagcgtttttgcgagagatgatcaatggcaagcaaaagacctg

SEQ ID NO: 96355 - DNA, 75 bp, synthetic construct
  source 1..75: mol_type = other DNA
ctctgcccatagtcctctcctgtaattatcagtctgatattacttatcctgggcaaaaacagtttgattgcggta

SEQ ID NO: 96356 - DNA, 75 bp, synthetic construct
  source 1..75: mol_type = other DNA
tactcatcggctggagtggtacaagcggtgctcatgctccggcatttattcgttcacgacgggatacgaccgacg

SEQ ID NO: 96357 - DNA, 75 bp, synthetic construct
  source 1..75: mol_type = other DNA
ttttgccgatttaaacacgcaggttgagcagctcagcaagcgttgttcagaggcgttctccagaggagcgtctga

SEQ ID NO: 96358 - DNA, 75 bp, synthetic construct
  source 1..75: mol_type = other DNA
gcatccaaaacacttacaaaaactgcgatcaatgaagctctgcgcagaataaaaaaatcagggattgataaaact

SEQ ID NO: 96359 - DNA, 75 bp, synthetic construct
  source 1..75: mol_type = other DNA
tactcacccggaatggtgtttcagcacatgtgagaaacgtattgcaggttggttagccgtggctgaacacatgct

SEQ ID NO: 96360 - DNA, 75 bp, synthetic construct
  source 1..75: mol_type = other DNA
tgaacgcggctggctgacacaaatcagccatctcagcgaaggccaccgggtgacggtgcattacgggtatgatga

SEQ ID NO: 96361 - DNA, 75 bp, synthetic construct
  source 1..75: mol_type = other DNA
atgaaagcaaaaggcatcccgtttaacgaagtaaaggaaaaactactcaacactccagaagctatcaaaggatat

SEQ ID NO: 96362 - DNA, 75 bp, synthetic construct
  source 1..75: mol_type = other DNA
ggaagtgatgacggtcgccacagcaacacgtctctggcgtggggagctggcgtgcagtttaacccgaccgaatcc

SEQ ID NO: 96363 - DNA, 75 bp, synthetic construct
  source 1..75: mol_type = other DNA
acttgtagaaatcgcattgatgtttggttggcgatggctgaaaccatgcttttccttccaatgtgcgtggcactt

SEQ ID NO: 96364 - DNA, 75 bp, synthetic construct
  source 1..75: mol_type = other DNA
atatattcagaggacttcttttcggggtaacgacacgctatacaatgaaaaggttcagtttaaactcacttatcc

SEQ ID NO: 96365 - DNA, 75 bp, synthetic construct
  source 1..75: mol_type = other DNA
ggggccagatgtgtcaggtcagaattcctgggtactgcaatcacaatcccgaaacttccgtgctggcgcattaca

SEQ ID NO: 96366 - DNA, 75 bp, synthetic construct
  source 1..75: mol_type = other DNA
tttttccgccgtcgcaatgccttttaaaactattgaacgtgagagtttcaatggggtatggccatttaatactga

SEQ ID NO: 96367 - DNA, 75 bp, synthetic construct
  source 1..75: mol_type = other DNA
gcgattgcctgtagctcatgccacgatctaatcgacgggcgggtaaaaaccatcgattacaccaaagaagaatta

SEQ ID NO: 96368 - DNA, 75 bp, synthetic construct
  source 1..75: mol_type = other DNA
agcatatcattgatgttcacctcagagagtatggcagaacagaaaaacataaatgcacctttgtttttcaacctg

SEQ ID NO: 96369 - DNA, 75 bp, synthetic construct
  source 1..75: mol_type = other DNA
aagaccgttttacagtaccaaaaacacaggcgggaaccaatcgtgtgattcaccttattaagcccgcaatcgacg

SEQ ID NO: 96370 - DNA, 75 bp, synthetic construct
  source 1..75: mol_type = other DNA
tcggtgccagtatgacgcttggcggtgttgcacagatgctggcccctaaacccaaaaccccccgcacacagacaa

SEQ ID NO: 96371 - DNA, 75 bp, synthetic construct
  source 1..75: mol_type = other DNA
attaacgtgaaataccgttatgaatttacggacacgctggggctgattacgtcattcagttatgccaacgctgaa

SEQ ID NO: 96372 - DNA, 75 bp, synthetic construct
  source 1..75: mol_type = other DNA
tgatggctgcgcaggggatggtgcagtcgaaagcaccgcttgggtttgccttattcctggcaaaagttggtgttc

SEQ ID NO: 96373 - DNA, 75 bp, synthetic construct
  source 1..75: mol_type = other DNA
ccctggctactgcaatcacaatcccgaaacttctgtgctggcgcattacaggttggcagggacgtgcggaacagc

SEQ ID NO: 96374 - DNA, 75 bp, synthetic construct
  source 1..75: mol_type = other DNA
atgaaccttgaagccttaccaaaatattactccccaaaatctccaaaattgagcgatgacgctccagcgacaggc

SEQ ID NO: 96375 - DNA, 75 bp, synthetic construct
  source 1..75: mol_type = other DNA
ggagtctgtcaggaaaacgatgcagaaaaaatatcctaatcaccgttttgttcttggataccactgtgacaagaa

SEQ ID NO: 96376 - DNA, 75 bp, synthetic construct
  source 1..75: mol_type = other DNA
caatgatcaaatgattggttttggtcactgggaatatgattttaaaggctataacgatgaagccaacggctcgcg

SEQ ID NO: 96377 - DNA, 75 bp, synthetic construct
  source 1..75: mol_type = other DNA
aaacgcggaattacgttgaaaattgccgatggtcagcaaaagcaggaaaaccagattaaagcggtacgttccttc

SEQ ID NO: 96378 - DNA, 75 bp, synthetic construct
  source 1..75: mol_type = other DNA
agagtacagcccggatgtggtgacgggcctcatcacgcgcataaccacgccggatggcagggcatcggcgtttta

SEQ ID NO: 96379 - DNA, 75 bp, synthetic construct
  source 1..75: mol_type = other DNA
tctggtgagcgtgctgcccaacggcccggactatcacccgaccgtgcgcgccttcctcgcgggcggcgtgccgga

SEQ ID NO: 96380 - DNA, 75 bp, synthetic construct
  source 1..75: mol_type = other DNA
gggatgggctgggacgccaacaagctcaccggcaaagaggtgctgattatcggcactcagggcggcatccgcgcc

SEQ ID NO: 96381 - DNA, 75 bp, synthetic construct
  source 1..75: mol_type = other DNA
ttaccgcaagcggcgctggaatatgtcattgacggcgaccgtgaatatcgtcaactagaagcgcagctacacgac

SEQ ID NO: 96382 - DNA, 75 bp, synthetic construct
  source 1..75: mol_type = other DNA
tgttgaataatatccttaattcccgcgccccagacgtgccccaaagtgatcaggaggatgaaataaaattatatt

SEQ ID NO: 96383 - DNA, 75 bp, synthetic construct
  source 1..75: mol_type = other DNA
tccagattacgcagttacgcctctggctggaagacggaacacttattgatgctcaaaggagcgatctgcctccgg

SEQ ID NO: 96384 - DNA, 75 bp, synthetic construct
  source 1..75: mol_type = other DNA
tggtggcatcttatgattcactgaatcgcaaatattctgaattgctggatgagtttaaatctctccggcgctatt

SEQ ID NO: 96385 - DNA, 75 bp, synthetic construct
  source 1..75: mol_type = other DNA
tagttatcagtgggctgttagcttgggtgcttgggaaatacctagcgcctatggctcactctgatatcttaagta

SEQ ID NO: 96386 - DNA, 75 bp, synthetic construct
  source 1..75: mol_type = other DNA
cagagattgaagagctacagcgtaacgctgcactttccgctcaccgcatcaaccgcaacgccgtatcagctgaac

SEQ ID NO: 96387 - DNA, 75 bp, synthetic construct
  source 1..75: mol_type = other DNA
ttcgacggacacagcgtcagcgccgattttatggataacagggaacagcccggcatgcaggaaagggagtcattc

SEQ ID NO: 96388 - DNA, 75 bp, synthetic construct
  source 1..75: mol_type = other DNA
ttgtggggtggcgggtctcatcgtccatggagacgacattcgtgctggatgcactggagcaggcgttatgggccc

SEQ ID NO: 96389 - DNA, 75 bp, synthetic construct
  source 1..75: mol_type = other DNA
attacaggaacggcggtattttttatcgttcagcgcgtgatggttatggatttgaggctgactggtcagagtttt

SEQ ID NO: 96390 - DNA, 75 bp, synthetic construct
  source 1..75: mol_type = other DNA
cgtgatggttatccgcagggagaactgaaggtgtcgcgtatcagtgaagcgatttccggtgcgaacggggaatac

SEQ ID NO: 96391 - DNA, 75 bp, synthetic construct
  source 1..75: mol_type = other DNA
atgactaagaaaataaaatgtgcttatcacctttgcaataaagaaattgaagaaagcaaaatcattacaagacca

SEQ ID NO: 96392 - DNA, 75 bp, synthetic construct
  source 1..75: mol_type = other DNA
cagccggaaagccgttgccgcaggcgaccgcgtaaaccgtcagtttgtggcagaacgtcctgaccagttgtgggt

SEQ ID NO: 96393 - DNA, 75 bp, synthetic construct
  source 1..75: mol_type = other DNA
ggctgattttacttacggtgtgcccggagttcagggcgggcatggatgcttaaatgaaccgcgagtctgtctgga

SEQ ID NO: 96394 - DNA, 75 bp, synthetic construct
  source 1..75: mol_type = other DNA
ggtatgagataaatcatcatggtatagcggcgtattgctcccatcttcctgatgacgttgacattgatgaaatgg

SEQ ID NO: 96395 - DNA, 75 bp, synthetic construct
  source 1..75: mol_type = other DNA
tttgcaggtcaggtttggtgacgggccgtggcaggatgtcaaggggctggatgaagtgggcagtgatacaggcag

SEQ ID NO: 96396 - DNA, 75 bp, synthetic construct
  source 1..75: mol_type = other DNA
gctgtttccggcatatttcagaagtgactctggtcttattggtgcaactctttgggaccgggattgtattactta

SEQ ID NO: 96397 - DNA, 75 bp, synthetic construct
  source 1..75: mol_type = other DNA
ctttcctcgcctaattcaggagaagcgtaaggagtgggagcagattgcaggcatgcctgtagccgaagtatttta

SEQ ID NO: 96398 - DNA, 75 bp, synthetic construct
  source 1..75: mol_type = other DNA
gcacgcaatggcaagtcgaggatatgattaccctgtcgactttcctcgcctgattcaggaaaagcgtaaggagtg

SEQ ID NO: 96399 - DNA, 75 bp, synthetic construct
  source 1..75: mol_type = other DNA
cagcaaaatcagcagacgtcttctgaacgtgaactggagatgtctaccgagattgcacgtctcaaacgccagctg

SEQ ID NO: 96400 - DNA, 75 bp, synthetic construct
  source 1..75: mol_type = other DNA
taccactgtcagcaacagcgacatcatcctgataaacgcagtgcccgtgcgcagcgcgatgactggctgaagaga

SEQ ID NO: 96401 - DNA, 75 bp, synthetic construct
  source 1..75: mol_type = other DNA
tcccgctttgcgccgctgatcccatccgttggcagcgccgtacacccgacgtggagcacggcatctggcctgacg

SEQ ID NO: 96402 - DNA, 75 bp, synthetic construct
  source 1..75: mol_type = other DNA
tcctgctgaccggctggggtgtaggagaaaaacattggggtgggctttccgaaaaagcgcgggtaaagggagact

SEQ ID NO: 96403 - DNA, 75 bp, synthetic construct
  source 1..75: mol_type = other DNA
gttttagggggaacctcggtagtaacttataaaaaagttgatagtgataattttattaaattgtttacccaaaat

SEQ ID NO: 96404 - DNA, 75 bp, synthetic construct
  source 1..75: mol_type = other DNA
atcgcagtcaggccgtcagattaccgaaagcggtcgctctgccagaagacgttaagaaagtagaaattattgcga

SEQ ID NO: 96405 - DNA, 75 bp, synthetic construct
  source 1..75: mol_type = other DNA
tcaaagaaaacgcaggtatttttcgcacaaacttttctcgcaacacatccgaccacttaagcaaaaaagcggcat

SEQ ID NO: 96406 - DNA, 75 bp, synthetic construct
  source 1..75: mol_type = other DNA
gcggttatgcaacttagtgctgatatggcgctgaatgaggccaaagccatcctgattgctgattgtgaaaatggg

SEQ ID NO: 96407 - DNA, 75 bp, synthetic construct
  source 1..75: mol_type = other DNA
ccccataattacctttttattcttgtttgcgcaaataacgcatggcaaaacattcctgccgagcggcttcgctca

SEQ ID NO: 96408 - DNA, 75 bp, synthetic construct
  source 1..75: mol_type = other DNA
gatgcgcgacaatcccgccctgcgcgatatccctattgctattggcggcagccgcgaacgtcggggggtgatcag

SEQ ID NO: 96409 - DNA, 75 bp, synthetic construct
  source 1..75: mol_type = other DNA
ccgaacctgtaagtaatagtgatgagttaccgctggactatctgcaaggacacaaagacggcctggagtgggctg

SEQ ID NO: 96410 - DNA, 75 bp, synthetic construct
  source 1..75: mol_type = other DNA
gggggggaaattctctccggctgactcgactcgcagtttctgacagcggtggcgaacatgcggcggtgttgtact

SEQ ID NO: 96411 - DNA, 75 bp, synthetic construct
  source 1..75: mol_type = other DNA
ggtccatcacagtgataaaggttctcagtatgtatcgctggcctacacacagcggcttaaggaagccggattact

SEQ ID NO: 96412 - DNA, 75 bp, synthetic construct
  source 1..75: mol_type = other DNA
ggctgttcgcgtcaaacttaacgctcaggcgattgccgccctcggcctgaccagcgaaaccgtgcgcaccgccat

SEQ ID NO: 96413 - DNA, 75 bp, synthetic construct
  source 1..75: mol_type = other DNA
ggtatgaacgacagcaccgtgctgggcggcgtacgcgcgacggaaggtcagggctttaaagcggccgatatcatc

SEQ ID NO: 96414 - DNA, 75 bp, synthetic construct
  source 1..75: mol_type = other DNA
acccgggaaaaagaatcacttatcgcagtaaggtcaaagaccaaaattactattctgttgcagtcaatgcaggtt

SEQ ID NO: 96415 - DNA, 75 bp, synthetic construct
  source 1..75: mol_type = other DNA
agaagctgaccctgaaagaaacgctcacgctgctcgacggtgcgctgcgccataacgtccagctgctgattgccg

SEQ ID NO: 96416 - DNA, 75 bp, synthetic construct
  source 1..75: mol_type = other DNA
aggtcctgcgggcccgcgaggtgaaaccggagccagaggtgaaaaaggagaccccggggaccccggcggcccacc

SEQ ID NO: 96417 - DNA, 75 bp, synthetic construct
  source 1..75: mol_type = other DNA
atacattgccgctccaattttcctatcatctatagctttattaaccagtgtatacataggatatcgtgatttatt

SEQ ID NO: 96418 - DNA, 75 bp, synthetic construct
  source 1..75: mol_type = other DNA
cgggatacgcgcaacgagcaggtcacactgaaccagatagtcgaccgcagaacggcttcgatgcgtagtgtcgga

SEQ ID NO: 96419 - DNA, 75 bp, synthetic construct
  source 1..75: mol_type = other DNA
aagcatctaatgtacccagaagcttatgcaatgattcatcagcgtttcaatgtggaaagtattgaagagcttgat

SEQ ID NO: 96420 - DNA, 75 bp, synthetic construct
  source 1..75: mol_type = other DNA
aagatccggcattgtttctgcctttcctgtcgtggccggttgattctgcagacagatgctcagggggcgtggtat

SEQ ID NO: 96421 - DNA, 75 bp, synthetic construct
  source 1..75: mol_type = other DNA
ttgcacaaaatgctgccattaacggtggtatcaatattggtgctcaaggcgttctttcaggtgtcgggcgcgtta

SEQ ID NO: 96422 - DNA, 75 bp, synthetic construct
  source 1..75: mol_type = other DNA
aacaacagcctgacgctgcgcaacgcccagggtgagacgcgggtgacccgcctgtctgaactcaacagcagctgg

SEQ ID NO: 96423 - DNA, 75 bp, synthetic construct
  source 1..75: mol_type = other DNA
tcgctgttgcgacacgtttcccgggtttacgtcgtgacctcccagtacggctttgaagccttgctggcaggaaaa

SEQ ID NO: 96424 - DNA, 75 bp, synthetic construct
  source 1..75: mol_type = other DNA
cagcagctgcgcggcggcgaacgaacggacttcagcaacgtgctgtttctcgtggatgaaagctcaatggtcggt

SEQ ID NO: 96425 - DNA, 75 bp, synthetic construct
  source 1..75: mol_type = other DNA
gcgttgaaaaccatggtggatcactccgcatatggtttcactataacggcaaacgtgtcagagaaaacctcggtg

SEQ ID NO: 96426 - DNA, 75 bp, synthetic construct
  source 1..75: mol_type = other DNA
ccaaccgggtgtgtggagagaagctgccgcaggtgtaccgtgctctggggatggataaaccggaagcagtggaga

SEQ ID NO: 96427 - DNA, 75 bp, synthetic construct
  source 1..75: mol_type = other DNA
tgattaaagaaatcaaagagcgaatcggcagcctggacgtgcgagacgatattgagcgccgtgcttatgaaatcg

SEQ ID NO: 96428 - DNA, 75 bp, synthetic construct
  source 1..75: mol_type = other DNA
ccattttaaaccagaaattgagtgagtttgccccatccatgccccacgctgtgggatcagatgtaattaaacaag

SEQ ID NO: 96429 - DNA, 75 bp, synthetic construct
  source 1..75: mol_type = other DNA
gccgcaggtgtaccgtgctctggggatggataaaccggaaccagtggcgaaagtgtgctatgcacaaatggtgaa

SEQ ID NO: 96430 - DNA, 75 bp, synthetic construct
  source 1..75: mol_type = other DNA
gagggagcaaaagagaaagatgttagttattcaagcattgcctctatgttgcttgagttaggattgcgagtttat

SEQ ID NO: 96431 - DNA, 75 bp, synthetic construct
  source 1..75: mol_type = other DNA
tgtatctgattattcaggcgctggacggcaacctgttagtaccggtgttgttctccgaagcggttaacctgcatc

SEQ ID NO: 96432 - DNA, 75 bp, synthetic construct
  source 1..75: mol_type = other DNA
agacggcagatcccttaattacggtgaacagtcatcacgttatcacatccaccagcaggacgtgtgaccatctaa

SEQ ID NO: 96433 - DNA, 75 bp, synthetic construct
  source 1..75: mol_type = other DNA
cgctgaaccagatagtcgaccgcagaacggcttcgatgcgtagtgtcggaatgctgacgaacctgaatcacgcag

SEQ ID NO: 96434 - DNA, 75 bp, synthetic construct
  source 1..75: mol_type = other DNA
gacgccggatggcattcagctacaggtcggggaatcgacggtaatcaggctgtcgaaggatggcatcaccatcgt

SEQ ID NO: 96435 - DNA, 75 bp, synthetic construct
  source 1..75: mol_type = other DNA
tcgccagcctgtcagcccgtgttgtccgtgaaggtgacgagtttaatttcgaatttggccttgatgaaaagttaa

SEQ ID NO: 96436 - DNA, 75 bp, synthetic construct
  source 1..75: mol_type = other DNA
ggattcaccggtgttattggtggcctgatcagtatcgaaagtggattcagtatttacatgattctcgcgacagcg

SEQ ID NO: 96437 - DNA, 75 bp, synthetic construct
  source 1..75: mol_type = other DNA
gttaagttgcgtaaaatgaaggacaaattcaactgtagagatatctctatggttgccgctgatggcaagttacgt

SEQ ID NO: 96438 - DNA, 75 bp, synthetic construct
  source 1..75: mol_type = other DNA
tgggacaaacggcacaacaatctgatgtatatcgtggaaaatcaggatggcagtgtgcagattgccgttaatgca

SEQ ID NO: 96439 - DNA, 75 bp, synthetic construct
  source 1..75: mol_type = other DNA
aaaccggcaccgggaaaaatcaccttgcagcggcgatgggcaaccggctgatggcgaaggggagcagcgtgatta

SEQ ID NO: 96440 - DNA, 75 bp, synthetic construct
  source 1..75: mol_type = other DNA
atgaatacccaatatttacagtatgtccgcgagcaactcattgtggctaccgctgatttgagcggagcaacgaaa

SEQ ID NO: 96441 - DNA, 75 bp, synthetic construct
  source 1..75: mol_type = other DNA
tttgcaacttcaggaaatggcccgcagcagcaaagtagtaaccagcagaacactcctgaatacgacgattcaatt

SEQ ID NO: 96442 - DNA, 75 bp, synthetic construct
  source 1..75: mol_type = other DNA
gcctactacgacagctaccgtgcagccgtattgccggctaacctgatccaggctcaacgtgactactttggtgcg

SEQ ID NO: 96443 - DNA, 75 bp, synthetic construct
  source 1..75: mol_type = other DNA
ggcgtttccggtggtgaagagggggcgctgaaagggccttctatcatgccgggcggtcagaaagaagcctacgag

SEQ ID NO: 96444 - DNA, 75 bp, synthetic construct
  source 1..75: mol_type = other DNA
tgctcattcttttggtggctttcatgaggccatcaaacatgatgttgagagaagtccaggtatcctctgttccat

SEQ ID NO: 96445 - DNA, 75 bp, synthetic construct
  source 1..75: mol_type = other DNA
ggcaaaataccgggcaggctccaataaccgtgaaggcgtactggatgtgatcgataaagttcttaaacacgaagc

SEQ ID NO: 96446 - DNA, 75 bp, synthetic construct
  source 1..75: mol_type = other DNA
ggctgattggtgtcgatgcaattcgtggggctgcaatgagagtgatcggtaacaagtttggtggctctaaggagt

SEQ ID NO: 96447 - DNA, 75 bp, synthetic construct
  source 1..75: mol_type = other DNA
agtgaaagcatttggcgaagtggctgaactgctgcccgtcgatcccggttgtgtggtaccgaagcttaacagtag

SEQ ID NO: 96448 - DNA, 75 bp, synthetic construct
  source 1..75: mol_type = other DNA
aaaggtattcaacgtacactttaataataatcacgagttagttagttctggtgagcctgacgtaatatgtttaag

SEQ ID NO: 96449 - DNA, 75 bp, synthetic construct
  source 1..75: mol_type = other DNA
ttatcctgcgccatttgtggtcgatgatgaatgggaagacgatgtcggtctggtgcataaccaacgtattgttca

SEQ ID NO: 96450 - DNA, 75 bp, synthetic construct
  source 1..75: mol_type = other DNA
ggctgacacgattgcagaggggcatatgtgggcggtggataagccactgaatccgtcactggcccgcgacattat

SEQ ID NO: 96451 - DNA, 75 bp, synthetic construct
  source 1..75: mol_type = other DNA
ccgtcgatggtatcgtggttaacgacaagaaaaccgatctggcaaagctgcgttcccgcgtcgggatggtattcc

SEQ ID NO: 96452 - DNA, 75 bp, synthetic construct
  source 1..75: mol_type = other DNA
ccctgattcatggttcaatcacttcaatgctgcctatgggtgaaagcagtgatggtcattatgtctatcagttct

SEQ ID NO: 96453 - DNA, 75 bp, synthetic construct
  source 1..75: mol_type = other DNA
gaagagcgagcgggaaaatcacccatagcttcacccatgacacctgagcagattgaaatacgtgagttgaagaaa

SEQ ID NO: 96454 - DNA, 75 bp, synthetic construct
  source 1..75: mol_type = other DNA
gccagcgttaaaggaatgaatgaacctgctgatggtgccatgaatcttgttaaaaccagtaatggttggaaagcc

SEQ ID NO: 96455 - DNA, 75 bp, synthetic construct
  source 1..75: mol_type = other DNA
tacattgaggatatggcgatgtttttatcgccattaccggtcgtgctggagtggcattgtgtgatgtgtgagcag

SEQ ID NO: 96456 - DNA, 75 bp, synthetic construct
  source 1..75: mol_type = other DNA
acatcctcgagtatgccaggcagcagaggcgctttggccagctttgtaaaattctgccaggagatatggttgaaa

SEQ ID NO: 96457 - DNA, 75 bp, synthetic construct
  source 1..75: mol_type = other DNA
atacgtggaagctggttgacgttccgggctggattgacaaaaaagcattcgccagcgttaaaggaatgaatgaac

SEQ ID NO: 96458 - DNA, 75 bp, synthetic construct
  source 1..75: mol_type = other DNA
ggggctgttctatatgggcgcaccgctggcgttaacactgggatcaccgctttccggcgcgctgctggagatgca

SEQ ID NO: 96459 - DNA, 75 bp, synthetic construct
  source 1..75: mol_type = other DNA
agcacacaaatgagacatttgatacaagtgaaggcgttgctgttaatcttgatgtagaaagtaacatcaatattt

SEQ ID NO: 96460 - DNA, 75 bp, synthetic construct
  source 1..75: mol_type = other DNA
aacccattactggcctgctgccgcagatattcccgtggcgagcgataacccagtgcactatgcggatgccattcg

SEQ ID NO: 96461 - DNA, 75 bp, synthetic construct
  source 1..75: mol_type = other DNA
gccgggcgattaattgcatcaggcgttcctcgccagaaggtggcgatcatctatgatgttggtatatcgacactg

SEQ ID NO: 96462 - DNA, 75 bp, synthetic construct
  source 1..75: mol_type = other DNA
ggaagcacgccagcaatccccggctggctgtgtgatggtattcgccgcccgtattcgtcagggggtgcgccatgt

SEQ ID NO: 96463 - DNA, 75 bp, synthetic construct
  source 1..75: mol_type = other DNA
aggtgattggcagcaagagctatattcgtgtgtatgagcgcgttggtgattctgatgaataccgcgcaatcccgc

SEQ ID NO: 96464 - DNA, 75 bp, synthetic construct
  source 1..75: mol_type = other DNA
gctgctccaagaaactttaacaaagctaattataagattaaaaaccctttagctaatgaaattattgacatggtt

SEQ ID NO: 96465 - DNA, 75 bp, synthetic construct
  source 1..75: mol_type = other DNA
atgtacagcaaatacgacgaggcgcagtttcacttgagacttccgcatgaactccacgcgaaaattaaacagcgt

SEQ ID NO: 96466 - DNA, 75 bp, synthetic construct
  source 1..75: mol_type = other DNA
gcaaagcggcaatctgcatagcctgcgaacgtggatcaaagagcgcggtcaggattaccccgcccagacactcac

SEQ ID NO: 96467 - DNA, 75 bp, synthetic construct
  source 1..75: mol_type = other DNA
tgaggacgaacgctggaataacgccatgtcgctgattggtgaagccgtccaggtgattggcagcaagagctatat

SEQ ID NO: 96468 - DNA, 75 bp, synthetic construct
  source 1..75: mol_type = other DNA
gcgtttctggcgttcaaatttcagcgtaccgggaaaggtgtttccgaggtgctggatgatagcaccgccgatgct

SEQ ID NO: 96469 - DNA, 75 bp, synthetic construct
  source 1..75: mol_type = other DNA
tggtttatttatctcatcccggcgctggtggcatttgccctgccaccacgcgcaggggcgacagcgtctcgctcc

SEQ ID NO: 96470 - DNA, 75 bp, synthetic construct
  source 1..75: mol_type = other DNA
ttacccaactgtcaggataccggcaccgcaactattgttgccagtaaagggcaacagatatggaccggaggtaac

SEQ ID NO: 96471 - DNA, 75 bp, synthetic construct
  source 1..75: mol_type = other DNA
gtcattcagtgaccgcagcggggggatctcacgtcgtcgggtgatattcaatttttcggaggttgtaccggaaaa

SEQ ID NO: 96472 - DNA, 75 bp, synthetic construct
  source 1..75: mol_type = other DNA
ttgataattcaatcatggttaaatattttaaagatgagaagccaacttatgctcgaatgacagcacatctcccga

SEQ ID NO: 96473 - DNA, 75 bp, synthetic construct
  source 1..75: mol_type = other DNA
gtacgttcttcattgcgcgtgaacacacccaggcagaatatcgctggattgaaatgttcgggcatggcaagcgta

SEQ ID NO: 96474 - DNA, 75 bp, synthetic construct
  source 1..75: mol_type = other DNA
cactggctgactggttttatctctgtcctgaatggatgaacggctcggtacgttatccgctgtctcgtccggggg

SEQ ID NO: 96475 - DNA, 75 bp, synthetic construct
  source 1..75: mol_type = other DNA
aaacacaaacacaacaagatcaggcagaattgatattgccatattggacagcagaccatttttcgacattccaat

SEQ ID NO: 96476 - DNA, 75 bp, synthetic construct
  source 1..75: mol_type = other DNA
ttgttccctccggtattcaccatcacctgtttgagaaccttcgccgcaaggggcatcactgccacggccggaaac

SEQ ID NO: 96477 - DNA, 75 bp, synthetic construct
  source 1..75: mol_type = other DNA
atgagaccatcaattatcttcgcaaccgccgagtatgtaaagcgtctgcgtgaagagtgcctgcgggagaacaaa

SEQ ID NO: 96478 - DNA, 75 bp, synthetic construct
  source 1..75: mol_type = other DNA
agtacgtcccttcaaaccataaagataagcattcagataaagttaataatcatcaacaccatagcaaggttgata

SEQ ID NO: 96479 - DNA, 75 bp, synthetic construct
  source 1..75: mol_type = other DNA
gtagcaagtctgatggattttgctgtgccggtggtggcgtgtctgctggtctggctgttggttaatcgtgggtga

SEQ ID NO: 96480 - DNA, 75 bp, synthetic construct
  source 1..75: mol_type = other DNA
gcagcggaagaaatcgggcaacttgtcaccgttgcacgcgaagaactccagcgtcgcaaggccaaagaagcggaa

SEQ ID NO: 96481 - DNA, 75 bp, synthetic construct
  source 1..75: mol_type = other DNA
ggaagcccggctgcaatccccaactggctacgtgatgatattcgccgcccgtattcgtcaggaggtgtgccatga

SEQ ID NO: 96482 - DNA, 75 bp, synthetic construct
  source 1..75: mol_type = other DNA
acaaccagcgggtaggcgagttaacgaagttagccaacggcgcgcacacctttaagtatgcagctgagtggttag

SEQ ID NO: 96483 - DNA, 75 bp, synthetic construct
  source 1..75: mol_type = other DNA
caagcagaaggaagaggagaaaaccccctggtttcttcgctcgatgcactggcgcaggtggaaaaaatcggagtc

SEQ ID NO: 96484 - DNA, 75 bp, synthetic construct
  source 1..75: mol_type = other DNA
ggaagcgcgtcagcaatctcctgatggctgcgtgatggtattcgccgcccgtattcgtcaggaggtgcgccatgt

SEQ ID NO: 96485 - DNA, 75 bp, synthetic construct
  source 1..75: mol_type = other DNA
ctggaccgtcatcttcatgaacccggcgtggccttcacctccacccgtgcggcacgggaatggctgattctgaac

SEQ ID NO: 96486 - DNA, 75 bp, synthetic construct
  source 1..75: mol_type = other DNA
atgcaaattggctatattcgcgtatcaacaaatgaccagaacacggatttgcaacgcaatgcgctcaatagcgca

SEQ ID NO: 96487 - DNA, 75 bp, synthetic construct
  source 1..75: mol_type = other DNA
gcaaatgcattcaatcgctatgaatccgttgcaagaacgatggttccgaaaattggaggcagcagactggtgtca

SEQ ID NO: 96488 - DNA, 75 bp, synthetic construct
  source 1..75: mol_type = other DNA
ccatgtctccgggaatccaaagtttgaatatgccaatatggttgaagatattcgtgagaaggtgtcatctgagat

SEQ ID NO: 96489 - DNA, 75 bp, synthetic construct
  source 1..75: mol_type = other DNA
aaaatcctgtcgatgcagataaattactggctgcttctcgcggagaatttgttgaagggattagcgacccgaatg

SEQ ID NO: 96490 - DNA, 75 bp, synthetic construct
  source 1..75: mol_type = other DNA
cagaaagcagacaccatacgaatgatgatcccattctttcagcagttccgggatatgggggtgaaagacaaagca

SEQ ID NO: 96491 - DNA, 75 bp, synthetic construct
  source 1..75: mol_type = other DNA
gctttgagttcggttgcgatgatggcgaaaaactgcgtgttacgttcgtcctggactgttgcgatcgtgaagcca

SEQ ID NO: 96492 - DNA, 75 bp, synthetic construct
  source 1..75: mol_type = other DNA
ccgatgggatttaatgtaccctttgccgtgtcacagaacagtgccgatgcctcttatttacagcagatggcactg

SEQ ID NO: 96493 - DNA, 75 bp, synthetic construct
  source 1..75: mol_type = other DNA
tattccgttgcgtgaggttgctggctgggaacacgatcttcatgctgcaatgaacaacattcaggaagaaatcga

SEQ ID NO: 96494 - DNA, 75 bp, synthetic construct
  source 1..75: mol_type = other DNA
atcactaccagcggcagcgcgggctaccaactggaaatttttgagcgtcgcagcttttttcagttgctgcaaaag

SEQ ID NO: 96495 - DNA, 75 bp, synthetic construct
  source 1..75: mol_type = other DNA
cagtaattaaaaacatgttgccaatgttaggtgaaaaaagactggtttcatctgtaacaaaagaggatttgcttt

SEQ ID NO: 96496 - DNA, 75 bp, synthetic construct
  source 1..75: mol_type = other DNA
agaccagctgcgcctgcttaagcgtttgatcaaggcgatgaacctcgacgagaagcagtggccgccgcgccaggc

SEQ ID NO: 96497 - DNA, 75 bp, synthetic construct
  source 1..75: mol_type = other DNA
gcgcacatgtgggcggtcgataagcccatcaccgcatcacttatccgtgacattgtcgacggcattaacgccaaa

SEQ ID NO: 96498 - DNA, 75 bp, synthetic construct
  source 1..75: mol_type = other DNA
aggccggtaaaaaaggcacgctggcggcatcgttgcaggccatcgccgaccagtcaaaaccggtcaccgttgtcg

SEQ ID NO: 96499 - DNA, 75 bp, synthetic construct
  source 1..75: mol_type = other DNA
tataaaaaaagcagcgttgttagttctttcatttgcagcattatttgattttataatactttttggtttgattgc

SEQ ID NO: 96500 - DNA, 75 bp, synthetic construct
  source 1..75: mol_type = other DNA
ttcagactacagcaaaaatggagcaggtatagaaaactataacttcatcactactgctggtcttaagtacacatt

SEQ ID NO: 96501 - DNA, 75 bp, synthetic construct
  source 1..75: mol_type = other DNA
attggcgtgatgatgagccatgtcagctatgccggtcatctggcgcaggccggtgtggatatcacgctgatttat

SEQ ID NO: 96502 - DNA, 75 bp, synthetic construct
  source 1..75: mol_type = other DNA
gctgaatccggaaaagtcccacccttacattgaggatatggagatgtttttatcgccattaccggtcgtgctgga

SEQ ID NO: 96503 - DNA, 75 bp, synthetic construct
  source 1..75: mol_type = other DNA
tttcaccattaagaaaaatagtagataagagcggtaattctattaatgtatatgatataaaagatgtcgatgcac

SEQ ID NO: 96504 - DNA, 75 bp, synthetic construct
  source 1..75: mol_type = other DNA
cggcatcgtccaggaatgcggcgaaaacatcagagacgaatgcaggtaacagcgcgaaagcggcagcttcttcaa

SEQ ID NO: 96505 - DNA, 75 bp, synthetic construct
  source 1..75: mol_type = other DNA
cgcgtcggtgttgaccctaacaacgttgctcagatgtatcagcagaatccttcaggatttggtgagtttgttgat

SEQ ID NO: 96506 - DNA, 75 bp, synthetic construct
  source 1..75: mol_type = other DNA
gcgaagcatgaaacatctgatttctctcgtcggggaactacgggagcgagggattaattttcgcagtctgaccga

SEQ ID NO: 96507 - DNA, 75 bp, synthetic construct
  source 1..75: mol_type = other DNA
aggctgctgcagctcagaatgtggatacagttgctattaatgatgcaaatgtgacattgcgttataacgcgcagt

SEQ ID NO: 96508 - DNA, 75 bp, synthetic construct
  source 1..75: mol_type = other DNA
ggcgctggtgatgatggtcttttttgccgttgcaagggaagggctggagtcggtctttttcctgctggcggcatt

SEQ ID NO: 96509 - DNA, 75 bp, synthetic construct
  source 1..75: mol_type = other DNA
acgactacacaccagtgccgccacttgaaaacctgatgctgcgtcagcgcatcaccgatcagtacctggtgaatt

SEQ ID NO: 96510 - DNA, 75 bp, synthetic construct
  source 1..75: mol_type = other DNA
gtaaggagttaattacccggccttatttaacgttaggaattatcagctgggttattttgcttgctttagcgttca

SEQ ID NO: 96511 - DNA, 75 bp, synthetic construct
  source 1..75: mol_type = other DNA
caccgtacgaatacgtcacgttctgccatacctgccgtcgttttgatttatacgaaactgaagcggagatgaagg

SEQ ID NO: 96512 - DNA, 75 bp, synthetic construct
  source 1..75: mol_type = other DNA
gatttatggctctgacaaacgggccacgccgcccctggatgatgatctggtggtgaacttatgcaccagcgaaca

SEQ ID NO: 96513 - DNA, 75 bp, synthetic construct
  source 1..75: mol_type = other DNA
ccaaccaacgccgtatcaccaacgtagctgccggtgttaatgccaccgatgcggttaacgtgtcgcagctgaaat

SEQ ID NO: 96514 - DNA, 75 bp, synthetic construct
  source 1..75: mol_type = other DNA
ccgcattcacagtatgcacccaaagaaagcccgacattgaccggaacacccaaagcgccaacgccagcggagggg

SEQ ID NO: 96515 - DNA, 75 bp, synthetic construct
  source 1..75: mol_type = other DNA
gttgccagtggtgatgtatacaactctgtctacgggttatttccgtctgaacaggctcgtaaggactggcaaaat

SEQ ID NO: 96516 - DNA, 75 bp, synthetic construct
  source 1..75: mol_type = other DNA
tttatatacatggtggttatacctccgccaccagcggtcgcaccttcgagaccattaacccggccaacggtaacg

SEQ ID NO: 96517 - DNA, 75 bp, synthetic construct
  source 1..75: mol_type = other DNA
gggcgcagcagcatgaaacgtgttgtgatgccggtacgctggcagtgtgcaaaatgccggcgctggtattgtgga

SEQ ID NO: 96518 - DNA, 75 bp, synthetic construct
  source 1..75: mol_type = other DNA
acgtaacacctaacgcaaaagtttatgttgaaggcgcatggaatcgggttacgaataagaaaggtgatacttcac

SEQ ID NO: 96519 - DNA, 75 bp, synthetic construct
  source 1..75: mol_type = other DNA
ttttatgaatacaaaccgggtgactggtatcagcgttcggtcggggataaagcgccaaagtggacaccactctac

SEQ ID NO: 96520 - DNA, 75 bp, synthetic construct
  source 1..75: mol_type = other DNA
tggcatcactggcagcagtatcggatgaacgagcagcctatgaattatttatggagaagcgtttcggggaatctg

SEQ ID NO: 96521 - DNA, 75 bp, synthetic construct
  source 1..75: mol_type = other DNA
ttcagagatgatatcggctccttcccgaatggagaaagagcaatcggctacaaacaacgttttaaaatgccatac

SEQ ID NO: 96522 - DNA, 75 bp, synthetic construct
  source 1..75: mol_type = other DNA
aactatcaacaatgccttggctctcaaagcgcctttggcaagccctgcattaacgggtgtccctactgcgcctac

SEQ ID NO: 96523 - DNA, 75 bp, synthetic construct
  source 1..75: mol_type = other DNA
gataataagtggtggtcccgggttaccaggcataaatccttatattaactttgactggccagtcacaaatcttcg

SEQ ID NO: 96524 - DNA, 75 bp, synthetic construct
  source 1..75: mol_type = other DNA
aaacaaactgatcagcctcttccgtcagtttggcggcacggagttacgtctcaaactggtctggctctgctggct

SEQ ID NO: 96525 - DNA, 75 bp, synthetic construct
  source 1..75: mol_type = other DNA
tgacgggggaatagttaaaacggacgaacccggtcttaaggtgccttcctcactacgagctattagctctcgtag

SEQ ID NO: 96526 - DNA, 75 bp, synthetic construct
  source 1..75: mol_type = other DNA
gccgttcttgcctgtggagagatggtgcagtcaggccgctcgttgaagcaggaacccaccgaaatgattcaggcg

SEQ ID NO: 96527 - DNA, 75 bp, synthetic construct
  source 1..75: mol_type = other DNA
cctcattcgcaatatgcaccaaaagacagtccgactctgacaggcatgcctaaaacgccaacgccaccggcagga

SEQ ID NO: 96528 - DNA, 75 bp, synthetic construct
  source 1..75: mol_type = other DNA
ccgcagccattaacaatgacccgaaattcagtaccaccattaatgatgcgctggcactcaaagcgccgctgtcga

SEQ ID NO: 96529 - DNA, 75 bp, synthetic construct
  source 1..75: mol_type = other DNA
ttccggaatgaaacgggagcgttacctgataaaataaaagtgattggttataaacaacattttaaaattccttat

SEQ ID NO: 96530 - DNA, 75 bp, synthetic construct
  source 1..75: mol_type = other DNA
tttaccggatttataccgggataaaaagcagtaaaggtatccggattccggccacgaagaaatcacttccggaaa

SEQ ID NO: 96531 - DNA, 75 bp, synthetic construct
  source 1..75: mol_type = other DNA
aaagaatgatttccttatacaaggaagataactgccaaaaagttcctgaaaacatcgcagagttaatggaattgg

SEQ ID NO: 96532 - DNA, 75 bp, synthetic construct
  source 1..75: mol_type = other DNA
aaacgtcaggcaccgtttcagactggatgactcatggccactcagacagcttaccgacacaatcagtgacacacg

SEQ ID NO: 96533 - DNA, 75 bp, synthetic construct
  source 1..75: mol_type = other DNA
agcggtgaatatgcgttgggagcagattaatggcaaccgctggacaatacctgaaaccaaaaacggtaaaagtca

SEQ ID NO: 96534 - DNA, 75 bp, synthetic construct
  source 1..75: mol_type = other DNA
ttcatgtgctcgatgaactgtcagtccgggcactcagtcgcgatatcatgaaacagaaccgggtgaccgtacatc

SEQ ID NO: 96535 - DNA, 75 bp, synthetic construct
  source 1..75: mol_type = other DNA
agcgagaaaaaattaaagggcagattgttgatctcgtacgccagagcgggcgagagacgttacgacaactggaag

SEQ ID NO: 96536 - DNA, 75 bp, synthetic construct
  source 1..75: mol_type = other DNA
ccgctggcggatgtggttctgaacaaaacgcaggcggcatcatgtacgcagtggagcgtgaccaacggaggaacg

SEQ ID NO: 96537 - DNA, 75 bp, synthetic construct
  source 1..75: mol_type = other DNA
gcgcagaaatcatcccgtaccgtgtggaagccaccatttttctctatccggggccggaagcagagccggtaatgg

SEQ ID NO: 96538 - DNA, 75 bp, synthetic construct
  source 1..75: mol_type = other DNA
gtttctttttggtctcaatgtaatatgctatatagaaacaaccgaagataataataggtttatacgttggtgttt

SEQ ID NO: 96539 - DNA, 75 bp, synthetic construct
  source 1..75: mol_type = other DNA
tcggcaggtttgtcgttagtggctcgtgctggagggatgattgttgggagcattaaacttgatgacagtgaaatt

SEQ ID NO: 96540 - DNA, 75 bp, synthetic construct
  source 1..75: mol_type = other DNA
gattttgtcgttgatgaatatcgctgcgtgatatttacccacggctgcttctggcatcatcatcactgctatctg

SEQ ID NO: 96541 - DNA, 75 bp, synthetic construct
  source 1..75: mol_type = other DNA
tctttgccgccctgcatgttgagggggtgcagcgtgtggagctggcttcgccgctggcggatgtggtcctgaaca

SEQ ID NO: 96542 - DNA, 75 bp, synthetic construct
  source 1..75: mol_type = other DNA
gacggtaataaggccataagcgaaacagagcgtgatgcggtgaaggcgatgttcagggggatactgcgaaaatga

SEQ ID NO: 96543 - DNA, 75 bp, synthetic construct
  source 1..75: mol_type = other DNA
ttctgtgggggccgctctccgaccgttatggtcgtaaaccggtattattaatcggcctgacaatttttgcgttag

SEQ ID NO: 96544 - DNA, 75 bp, synthetic construct
  source 1..75: mol_type = other DNA
ccggagattttgcggccagcgtgaaagccggagaagagagcgtggcacaggtcagcggggtacgggaacaggcca

SEQ ID NO: 96545 - DNA, 75 bp, synthetic construct
  source 1..75: mol_type = other DNA
gatggagaaatacgtcgctacgacagtcgcctaaacataatctgtcgcgagtgccggatgagtgaagttatgcag

SEQ ID NO: 96546 - DNA, 75 bp, synthetic construct
  source 1..75: mol_type = other DNA
aaaacattttccctgccggtgatgctctaccgcggtgtgttcagagccggtgaaacctaccaccccggcgatacg

SEQ ID NO: 96547 - DNA, 75 bp, synthetic construct
  source 1..75: mol_type = other DNA
acgcaacagttatgtgaaaacatggggttgcggaggttttttgaatgagacgaacatttacagcagaggaaaaag

SEQ ID NO: 96548 - DNA, 75 bp, synthetic construct
  source 1..75: mol_type = other DNA
cactggccgccgccgagcgcctgaccgcccacaaaaatgccgttactttgcgtgttaacgcccttaaggagcaag

SEQ ID NO: 96549 - DNA, 75 bp, synthetic construct
  source 1..75: mol_type = other DNA
gtgactgcgctggaatatggtctgccgccaaccgctggtctgggtattggtatcgaccgaatgattatgctgttt

SEQ ID NO: 96550 - DNA, 75 bp, synthetic construct
  source 1..75: mol_type = other DNA
cgttctgccgacttacggttacaccgccacctgttccagcctcgggctggcagatttccagaagcgcatgaccgt

SEQ ID NO: 96551 - DNA, 75 bp, synthetic construct
  source 1..75: mol_type = other DNA
gaggcgctttgatggtgttaacgtatggcagcgttatacaactgccggaacaggtgcaacccttaaaggtcgcac

SEQ ID NO: 96552 - DNA, 75 bp, synthetic construct
  source 1..75: mol_type = other DNA
ggcgtcagaacataatctgtcgcgagtgccggaagagcgaagttatgcagcgcatattgtcgttttatcagggga

SEQ ID NO: 96553 - DNA, 75 bp, synthetic construct
  source 1..75: mol_type = other DNA
aaggtagatgttaattctgcgacgattaccagtcaggagatacctgaaggtcaggtcatggtcgcacaagacata

SEQ ID NO: 96554 - DNA, 75 bp, synthetic construct
  source 1..75: mol_type = other DNA
acaggcccgtaaggactggcaaaacgcccgcaaaaaactatccagggcaaaggtgaaaaaaacggttgtggttga

SEQ ID NO: 96555 - DNA, 75 bp, synthetic construct
  source 1..75: mol_type = other DNA
ctggcgtggaagaagtcagggccggagatggcttcgctggaagcctggctggaagaacatgagaaatacaggagt

SEQ ID NO: 96556 - DNA, 75 bp, synthetic construct
  source 1..75: mol_type = other DNA
cattttaaagacaagtcggatttgttcagtgagatctgggaactgtcagaatccaatattggtgaactagagctt

SEQ ID NO: 96557 - DNA, 75 bp, synthetic construct
  source 1..75: mol_type = other DNA
atgacccctaacatttcaataactctgaatacgccacacgtcacaatcgagcgttatagcgaacttactggtctt

SEQ ID NO: 96558 - DNA, 75 bp, synthetic construct
  source 1..75: mol_type = other DNA
gcactgagcgccagccgcctgatcgtgactaaagatttagcgcagtgcgtagagatctccaaccagtacggcccg

SEQ ID NO: 96559 - DNA, 75 bp, synthetic construct
  source 1..75: mol_type = other DNA
cgggaactggggccatccatacgccaggtttcccgcatcagtgatttgttattagagaacgagttaaaggtaaaa

SEQ ID NO: 96560 - DNA, 75 bp, synthetic construct
  source 1..75: mol_type = other DNA
tcgcgccttagattcatggatgcgagatgggtatagtgctgcgcaaatttatgacttagcaatatcaaaaggcga

SEQ ID NO: 96561 - DNA, 75 bp, synthetic construct
  source 1..75: mol_type = other DNA
gacggagaaatacgccgctacgacaggcgtctgaacataatctgtcgcgagtgccggaagagcgaagttatgcag

SEQ ID NO: 96562 - DNA, 75 bp, synthetic construct
  source 1..75: mol_type = other DNA
cagaaccggaggcgtcttgcctatgcatcagacgtttaccggatttataccgggataaagagcagtaaaggcatc

SEQ ID NO: 96563 - DNA, 75 bp, synthetic construct
  source 1..75: mol_type = other DNA
tatttatctggctgatgacggcggtgtggcggtggatatgtcccgtgaagcgtcactggagatgcagtctgaacc

SEQ ID NO: 96564 - DNA, 75 bp, synthetic construct
  source 1..75: mol_type = other DNA
aatgcagcaacagcggcagaacgttcagagacaaatgcccgtgcgtcagaggaagcctccgcagacagtgaagag

SEQ ID NO: 96565 - DNA, 75 bp, synthetic construct
  source 1..75: mol_type = other DNA
tactggtgcgtcgtttaacaaatccgcgtatcagggcgacgtcttctggtgcggatatcctgatcctcgccattt

SEQ ID NO: 96566 - DNA, 75 bp, synthetic construct
  source 1..75: mol_type = other DNA
ggatgtgagctgatttttgaagacaagataagcggtacaaagtccgacagaccaggactgaaaaagctgctcagg

SEQ ID NO: 96567 - DNA, 75 bp, synthetic construct
  source 1..75: mol_type = other DNA
tgggaaaaactgtttaacggtgaaatcgactgcctggtttccgaccactctccatgcccgccggaaatgaaagcc

SEQ ID NO: 96568 - DNA, 75 bp, synthetic construct
  source 1..75: mol_type = other DNA
tgaactctgctatgttgcaggtgattatcctgatgaacttgaatcatggagcgaggcaggactaaacgccctggc

SEQ ID NO: 96569 - DNA, 75 bp, synthetic construct
  source 1..75: mol_type = other DNA
ccggctggatgaggcctgggctgccattaagaccgggctggtcagggggctttctgtgggcttccggccccatga

SEQ ID NO: 96570 - DNA, 75 bp, synthetic construct
  source 1..75: mol_type = other DNA
gaccaaagccgcagaggaagggcgcacgctggatgtggaggaggaagagcattacgacaacaccgcagcggaaat

SEQ ID NO: 96571 - DNA, 75 bp, synthetic construct
  source 1..75: mol_type = other DNA
agcttattaagtctgtttgtgagaacttaaagcttcagactaaaccaaagctacgaattaaaaatcagcatcaag

SEQ ID NO: 96572 - DNA, 75 bp, synthetic construct
  source 1..75: mol_type = other DNA
acatggtgcagaacaccgatcgcgccaccttcaacaatatcgaagagctggggctgggatttatcaactattcac

SEQ ID NO: 96573 - DNA, 75 bp, synthetic construct
  source 1..75: mol_type = other DNA
ctcgtttccggcctgatgcatcacgatattctgaccggaagcgcaaaatcttttgctgatttaaacgcgcaggtt

SEQ ID NO: 96574 - DNA, 75 bp, synthetic construct
  source 1..75: mol_type = other DNA
atgcctcataacccaaatacctggccagactggctggagttgtttcagagctggtggcgtggagatacgccactg

SEQ ID NO: 96575 - DNA, 75 bp, synthetic construct
  source 1..75: mol_type = other DNA
gcccgcaaaaaactatctagggcaaaggtgaagaaaccatctgtggttgatccggaccttatctggtcattacct

SEQ ID NO: 96576 - DNA, 75 bp, synthetic construct
  source 1..75: mol_type = other DNA
gctgtcggatcaggcttatgagcgcctgaagaaagattttgaggagcgtcacaccgggcttggcaatgctcaccg

SEQ ID NO: 96577 - DNA, 75 bp, synthetic construct
  source 1..75: mol_type = other DNA
cggactggctggagttgtttcagagctggtggcgtggagacacaccgctgggggcagtgattatgtcgatcgtta

SEQ ID NO: 96578 - DNA, 75 bp, synthetic construct
  source 1..75: mol_type = other DNA
ttttgcgccagcagaaaaacctgcatcgcattgtggtgcaaccgcaatatctgggcgacgggctgaacaatacgc

SEQ ID NO: 96579 - DNA, 75 bp, synthetic construct
  source 1..75: mol_type = other DNA
cccgaagagggactgaaacggatgctgggagaaacccggcactacggtattccggccacactgcggggcatggtg

SEQ ID NO: 96580 - DNA, 75 bp, synthetic construct
  source 1..75: mol_type = other DNA
gtaccagaaaaattgcagtgaaaacgctggagcgtgtgaagaagttgatctggctggcggcacaggatgtcagag

SEQ ID NO: 96581 - DNA, 75 bp, synthetic construct
  source 1..75: mol_type = other DNA
gtttattgtcgaacgtactagggcggctttgccgcagcacgacaagaagggaggaacggtgggcgaaagccaaag

SEQ ID NO: 96582 - DNA, 75 bp, synthetic construct
  source 1..75: mol_type = other DNA
atgattttgctcgtaatgccgaggggcaggatagcagaaggaatattctatctcctggagcatttttggagtttt

SEQ ID NO: 96583 - DNA, 75 bp, synthetic construct
  source 1..75: mol_type = other DNA
atgtaccgcacgccgcgtaacctcaagaaactgaacgtcattgatgaaggctggcgtctgctggacttcaaaaat

SEQ ID NO: 96584 - DNA, 75 bp, synthetic construct
  source 1..75: mol_type = other DNA
gccattaaggccacccacaaagggaaagagctgacaaaacggcaggttaaagcgatgggagaagtccccaccttt

SEQ ID NO: 96585 - DNA, 75 bp, synthetic construct
  source 1..75: mol_type = other DNA
acatattgacctggcctatgccatcaccgcccacggtgcgcagggggcgagtgaaacctttgccatcgcgcttga

SEQ ID NO: 96586 - DNA, 75 bp, synthetic construct
  source 1..75: mol_type = other DNA
attttccagcccgttactaacaataaatggtgatgggcatacattagctctcaccggagttaatttatgtgtaga

SEQ ID NO: 96587 - DNA, 75 bp, synthetic construct
  source 1..75: mol_type = other DNA
tgaacaattgccacaatggcgagcactccatatgtcaaaagccctggaagaaaaatacaaagctcaagccgggaa

SEQ ID NO: 96588 - DNA, 75 bp, synthetic construct
  source 1..75: mol_type = other DNA
aacggttctttgcaacttacttcatgattaattacgaaacaggaatgcttgaatggattgatggtggagaggtta

SEQ ID NO: 96589 - DNA, 75 bp, synthetic construct
  source 1..75: mol_type = other DNA
agggcatcatagtggtatgccatactgggcacaggggagtaccacagaaatgcgtcccaaaaatattgcattcaa

SEQ ID NO: 96590 - DNA, 75 bp, synthetic construct
  source 1..75: mol_type = other DNA
aattcttcgtgcttatgtgctttgcactcaagaagaaaggccaaaagtgttaggatattacactttgtcaggtag

SEQ ID NO: 96591 - DNA, 75 bp, synthetic construct
  source 1..75: mol_type = other DNA
aagttttacatgaataatcctgaaggggagcgagcggatttatctaaggtgaagatagaaattacacttgcctca

SEQ ID NO: 96592 - DNA, 75 bp, synthetic construct
  source 1..75: mol_type = other DNA
agaaaatcgcctgtcacaaagtaaattcagatgccaggtatgtggatatacagcgaacgccgatgtaaatggcgc

SEQ ID NO: 96593 - DNA, 75 bp, synthetic construct
  source 1..75: mol_type = other DNA
atggcgacgcgtaccggcatgggcggtttcccggaaggttgggcgccaggtgaacactatcccgaaaaatgggcg

SEQ ID NO: 96594 - DNA, 75 bp, synthetic construct
  source 1..75: mol_type = other DNA
ttgatgcgttaagtccagatggcaacgtgaataactggctaatgaatggcggacaatggttcttcatgctggaca

SEQ ID NO: 96595 - DNA, 75 bp, synthetic construct
  source 1..75: mol_type = other DNA
ggaacccggagacacgcagtcatgaccgctatgttatcgaccgggtgacggcgcagagtcacagcctgaccctgc

SEQ ID NO: 96596 - DNA, 75 bp, synthetic construct
  source 1..75: mol_type = other DNA
atcggcattaaccctgttacgggatatggctccggcctgatgcaaatcgactcccagcattttaaggagttgtca

SEQ ID NO: 96597 - DNA, 75 bp, synthetic construct
  source 1..75: mol_type = other DNA
gcaacgatattgcaaaagatgaatgcgcccacgctttgcctgacgctcgttttactgacaggctgcgcaggcacg

SEQ ID NO: 96598 - DNA, 75 bp, synthetic construct
  source 1..75: mol_type = other DNA
actggtctttgctgcactgcgtgatggtctgaatgcggcctgctatgacggccagaacttctttgataccgaaca

SEQ ID NO: 96599 - DNA, 75 bp, synthetic construct
  source 1..75: mol_type = other DNA
gaaagaggcgaaggagtggggggaactgcgtcagcggctgggctccggtcagtcctctgtcgtgtcctacttcct

SEQ ID NO: 96600 - DNA, 75 bp, synthetic construct
  source 1..75: mol_type = other DNA
ccctggtgggatggtacaacctgcgctttatcagccaggtggaaaaagacaacactcaggcattgattcctacca

SEQ ID NO: 96601 - DNA, 75 bp, synthetic construct
  source 1..75: mol_type = other DNA
attgtttacgatgaaaataatattattgtcgccatcaccagagatgcctccacgcttaatcccgaaggttttagc

SEQ ID NO: 96602 - DNA, 75 bp, synthetic construct
  source 1..75: mol_type = other DNA
cgtgagacgttacggcaactggaagctaaaacaggtgcgacaagatatctgatgagcgttctcgccagagagctg

SEQ ID NO: 96603 - DNA, 75 bp, synthetic construct
  source 1..75: mol_type = other DNA
acagtacagatcgtcggggctgtcacccgcaggggcatctggcggagtggaaaggtatcctgcaggcagatgcgt

SEQ ID NO: 96604 - DNA, 75 bp, synthetic construct
  source 1..75: mol_type = other DNA
gtcgccgctcagtactttccttattgatatctgccttgatatatgccccgcccgggatggcggccttcactcctg

SEQ ID NO: 96605 - DNA, 75 bp, synthetic construct
  source 1..75: mol_type = other DNA
agcgggaaaaaattaaagggcaggttattgaactcgtgcgccagagtgggcgcgagacgttacggcaactggaag

SEQ ID NO: 96606 - DNA, 75 bp, synthetic construct
  source 1..75: mol_type = other DNA
gaccaggcaaaacccgtgaccgttgttgtgcgtgtaccgcagggtgaaacggaagaagaaaccacgaccaatatc

SEQ ID NO: 96607 - DNA, 75 bp, synthetic construct
  source 1..75: mol_type = other DNA
acacaggaagaaatgaaaacagaaatcgtggaagacattgtgaagttacagccatcggtcaccgaaacgaaagca

SEQ ID NO: 96608 - DNA, 75 bp, synthetic construct
  source 1..75: mol_type = other DNA
tggagccgccgagcatcttggtttatggcgtaacagtagctcggctatagcttcatatgaacgcaattatccaga

SEQ ID NO: 96609 - DNA, 75 bp, synthetic construct
  source 1..75: mol_type = other DNA
gtaccgaatgccatcgccagaagtcagtcagtgaaacggcgagtggtatgccggacccgacgctgccggaggtca

SEQ ID NO: 96610 - DNA, 75 bp, synthetic construct
  source 1..75: mol_type = other DNA
cccgcgtggatgaaacctttgaggccatccgcgacagcctgaatcagcaggccatcaataacatcgccagaaagc

SEQ ID NO: 96611 - DNA, 75 bp, synthetic construct
  source 1..75: mol_type = other DNA
atctgccgtggagccacccgggtggatggtaagcctgttattcctggcatgaagctgtcgaaggggaaatgcgac

SEQ ID NO: 96612 - DNA, 75 bp, synthetic construct
  source 1..75: mol_type = other DNA
gccggtgccggatgccggtcagacgaaactggtgcatgaggtctggcgtcacgctctgaataaagtcagcgtgga

SEQ ID NO: 96613 - DNA, 75 bp, synthetic construct
  source 1..75: mol_type = other DNA
actcggcaaacactggcaacagttgcataacttcgtctatcttgtcgcgatcctggccccaatacattatctgtg

SEQ ID NO: 96614 - DNA, 75 bp, synthetic construct
  source 1..75: mol_type = other DNA
cgacgccgaagcgcagacaatttccaatatcatcggcggaacggatgagaacggtaaatacaccggcattaaagc

SEQ ID NO: 96615 - DNA, 75 bp, synthetic construct
  source 1..75: mol_type = other DNA
acgctgagcctggtgtactggaacagacggcccgggcttacattgaatcctatggtgccattgaacgtcatcttg

SEQ ID NO: 96616 - DNA, 75 bp, synthetic construct
  source 1..75: mol_type = other DNA
ccgtgctaaacagcaggtgaaataccagctcgactggcagttgtatgacttcgactggggtattacttatcagta

SEQ ID NO: 96617 - DNA, 75 bp, synthetic construct
  source 1..75: mol_type = other DNA
ctggctgaacctgcaggatattccgccggctctggagggcagcggtattgcggtggcgctgcgcacgaagctgaa

SEQ ID NO: 96618 - DNA, 75 bp, synthetic construct
  source 1..75: mol_type = other DNA
gagaaaagcgtactgctggctccttactggctggatggtcactgcctttctgcacagacggcgctgcgtctgggt

SEQ ID NO: 96619 - DNA, 75 bp, synthetic construct
  source 1..75: mol_type = other DNA
ccgcattaacctggaacatctgcgcggcatcctgcctgacggtatttttaagcgttatggcgatgtggtcgaact

SEQ ID NO: 96620 - DNA, 75 bp, synthetic construct
  source 1..75: mol_type = other DNA
ggctttatgggatatctgaaagggaaaagcagtctgatgccttacgagcagtttggtgatttgaaattcaaatac

SEQ ID NO: 96621 - DNA, 75 bp, synthetic construct
  source 1..75: mol_type = other DNA
tctgtatgatttgatgtaccgtgcaggcattcctctacataatatgcgtgtctgtgagccttttggcccggaaca

SEQ ID NO: 96622 - DNA, 75 bp, synthetic construct
  source 1..75: mol_type = other DNA
atgaacgggttattcttcctgactacagaattacatcgctccttcagttcatacatcacttttacatcacttata

SEQ ID NO: 96623 - DNA, 75 bp, synthetic construct
  source 1..75: mol_type = other DNA
ccttcggggccgttcgacggctgcatgacgttcccggttatcccgtcaaagaaaatgcacccgaccggaaaacca

SEQ ID NO: 96624 - DNA, 75 bp, synthetic construct
  source 1..75: mol_type = other DNA
ttgaccatgcgccgatgctgtggattggcgaagaggtgggcaaaggcgatgggccagaagtcgatatcgcggttg

SEQ ID NO: 96625 - DNA, 75 bp, synthetic construct
  source 1..75: mol_type = other DNA
acgtgctgaaagttatggctgagaaagatattgactggagctggatggtgctggatcgtactttagctatacgaa

SEQ ID NO: 96626 - DNA, 75 bp, synthetic construct
  source 1..75: mol_type = other DNA
aatttcgttactgcataccgggcgctgatttaccggcagagccggaagctgcatcggtaacggaaaccgatggta

SEQ ID NO: 96627 - DNA, 75 bp, synthetic construct
  source 1..75: mol_type = other DNA
gacgagttcgttgatgaggacacctgggaggcggtactgcatatcgaggtgtttctcagggcgaaagaaacggat

SEQ ID NO: 96628 - DNA, 75 bp, synthetic construct
  source 1..75: mol_type = other DNA
ggtggagccggaatacacaccggcgcgaaaagttcatttttaccactgcgaccaccggggcctgccgctggcgct

SEQ ID NO: 96629 - DNA, 75 bp, synthetic construct
  source 1..75: mol_type = other DNA
agatcgtgtttacgcgccgttacgtttttaacactattattgcactaattcgccctttgcaatccatcaatgagt

SEQ ID NO: 96630 - DNA, 75 bp, synthetic construct
  source 1..75: mol_type = other DNA
gtctgcgctgcgctggaactgaccaattcgcgtacggcgttgcagatgcttgatgatgatgaaaagggagtaaat

SEQ ID NO: 96631 - DNA, 75 bp, synthetic construct
  source 1..75: mol_type = other DNA
aatcccggataatggtgcgctgaccgaaaaagtgaaagagcagattgccggtcagctgaaacaggtggggcagta

SEQ ID NO: 96632 - DNA, 75 bp, synthetic construct
  source 1..75: mol_type = other DNA
cctgtccggggcgacaggtttgcaggtgacacaggggcaggtactgaccggcagtggctgtactgctaacggtaa

SEQ ID NO: 96633 - DNA, 75 bp, synthetic construct
  source 1..75: mol_type = other DNA
tgatgaattaatagttatgctctgggcaaacgaaattttcaatcgtgatgagcctgatactattgcgagacctct

SEQ ID NO: 96634 - DNA, 75 bp, synthetic construct
  source 1..75: mol_type = other DNA
atggaaaccgtttttgacgcactgaaagcaatgggcaaagccacgtcggtagagctggctgcgcgacttgatatc

SEQ ID NO: 96635 - DNA, 75 bp, synthetic construct
  source 1..75: mol_type = other DNA
aagatggtgttccttatgatgataaggggcaggtaatcattactcttttgaatgataatccagacgggagtggct

SEQ ID NO: 96636 - DNA, 75 bp, synthetic construct
  source 1..75: mol_type = other DNA
acagcatgttttaggtttaaaaatgttttaacaggagaacgatatgagattaatgttgcgtcagatgaatataaa

SEQ ID NO: 96637 - DNA, 75 bp, synthetic construct
  source 1..75: mol_type = other DNA
cgcctatttgggaaaggatttagtacagccgctgatttagcttttgaagtggaaacacgtccaggtagttttttg

SEQ ID NO: 96638 - DNA, 75 bp, synthetic construct
  source 1..75: mol_type = other DNA
atgtcattgcacgggctgcatatgaacccgaatctgtgggtaaagatccgacacttccagaatattgccggtgga

SEQ ID NO: 96639 - DNA, 75 bp, synthetic construct
  source 1..75: mol_type = other DNA
tcgcacgccgtatgtgattgccggactggaatacgcacgccagctcggctgccgcacagtgggaatttcctgtaa

SEQ ID NO: 96640 - DNA, 75 bp, synthetic construct
  source 1..75: mol_type = other DNA
atcactgatgtgctgactgcaagcggtaaagcgggtgagtccggcacattggcccgctcgttggatgccatcgct

SEQ ID NO: 96641 - DNA, 75 bp, synthetic construct
  source 1..75: mol_type = other DNA
tggctgacgagtgaggcaactgaagcggccccaaaaaccactgcagagatgctgattaacgcgattgaacagcat

SEQ ID NO: 96642 - DNA, 75 bp, synthetic construct
  source 1..75: mol_type = other DNA
attgcgcttataccactttccgggctctgtgctgacggattaccgaatactgaagaactacatcaaaaccatagg

SEQ ID NO: 96643 - DNA, 75 bp, synthetic construct
  source 1..75: mol_type = other DNA
ggcgcaatatcgggtaccggtagtcgtggaagttattctcgagcgtgtgaccaatatttcgatgggcagtgaact

SEQ ID NO: 96644 - DNA, 75 bp, synthetic construct
  source 1..75: mol_type = other DNA
ggggaaacacatcccgactcaacaatgcatagtctggtcctcggacagatcaagacggatgagaaatccaatgag

SEQ ID NO: 96645 - DNA, 75 bp, synthetic construct
  source 1..75: mol_type = other DNA
accggtacagtggaaagtgcatcattgtctgtatacgccgcttttttcttcctgaattctcgttataccttcatg

SEQ ID NO: 96646 - DNA, 75 bp, synthetic construct
  source 1..75: mol_type = other DNA
aaagacattctgtcaccggatgcaccgttcattcagaccggcagggatgtggtgaaccgggctgacagcattgtg

SEQ ID NO: 96647 - DNA, 75 bp, synthetic construct
  source 1..75: mol_type = other DNA
tggctgagctgggcgacaagattgaacaccagaaacggctgaatgagctggcacagcaggcggcgcggtttgaac

SEQ ID NO: 96648 - DNA, 75 bp, synthetic construct
  source 1..75: mol_type = other DNA
gcagggagcggggacggcgctggagaaccattttgcggtgatcccggcagacagaacatggcgaccacagccgtt

SEQ ID NO: 96649 - DNA, 75 bp, synthetic construct
  source 1..75: mol_type = other DNA
accaacccacaaagcgccatcgcaaaagccggtactaaaggtaccctggcaaaatccttacagctcatcgctaac

SEQ ID NO: 96650 - DNA, 75 bp, synthetic construct
  source 1..75: mol_type = other DNA
aaatacgtgataaatggtgggggcttccgctgttcctgccttctttaatcttgcccattttcgcccacattaata

SEQ ID NO: 96651 - DNA, 75 bp, synthetic construct
  source 1..75: mol_type = other DNA
gtgaacagcgacatgaatcagttctttaataagctgggatttgcttccaataccacacagccgggcgtctggcag

SEQ ID NO: 96652 - DNA, 75 bp, synthetic construct
  source 1..75: mol_type = other DNA
aagtccggcgcagatgcggcgggcggaaggtattaattttaatcagaacaatcacgtggtgattcagaacgacgg

SEQ ID NO: 96653 - DNA, 75 bp, synthetic construct
  source 1..75: mol_type = other DNA
gggtgtggcttacagccgtgtgtcgacttttgcgtattttcatgaaaggagatcactcaataacttccatcgaga

SEQ ID NO: 96654 - DNA, 75 bp, synthetic construct
  source 1..75: mol_type = other DNA
tgctttcccgctttaataaactgaatgtgccactctatcttcatcccgggttaccgcttaaaagcgtacagcagg

SEQ ID NO: 96655 - DNA, 75 bp, synthetic construct
  source 1..75: mol_type = other DNA
gtggtgtttgacgccgcacccggtctggattccgaagctggttaccgccaccatgaggcacagcggaaaaaaagt

SEQ ID NO: 96656 - DNA, 75 bp, synthetic construct
  source 1..75: mol_type = other DNA
gagaatatgctgaaaggcggaatttccggtcgcagtgccagagggaaacgtatccatacccgtgccattcacagc

SEQ ID NO: 96657 - DNA, 75 bp, synthetic construct
  source 1..75: mol_type = other DNA
atgggggattctgtgacaccggagatactgagcaacatgattcgtcagtacttcagccaggaacgaccagaagaa

SEQ ID NO: 96658 - DNA, 75 bp, synthetic construct
  source 1..75: mol_type = other DNA
atgaatggtgataattcttttggatggaaccatgaagctacattagataatattcacgcccagaaatacaataaa

SEQ ID NO: 96659 - DNA, 75 bp, synthetic construct
  source 1..75: mol_type = other DNA
ctataccggccaaacgataggatacgttgtaacccttcctgcccaaatgcctaattgctggtcatctgaactacc

SEQ ID NO: 96660 - DNA, 75 bp, synthetic construct
  source 1..75: mol_type = other DNA
agtgacgagcaacatttatttggcagagctgcactgatggtcaggtatgaagatgaaaataaaacgccagtgaca

SEQ ID NO: 96661 - DNA, 75 bp, synthetic construct
  source 1..75: mol_type = other DNA
gtgtttcccgtcgacgttttataaacgaattaatgcaggcgatcgccggggtgcatgcgaggcgattcgctggtg

SEQ ID NO: 96662 - DNA, 75 bp, synthetic construct
  source 1..75: mol_type = other DNA
cctgaatggcgaggacgtcaggccggtggccgaccgcgtgaccgtgcagtctgccgccatcgttgaataccagat

SEQ ID NO: 96663 - DNA, 75 bp, synthetic construct
  source 1..75: mol_type = other DNA
tgatggcaagtggtaacaccacggttaaggcgaccttcggtaaggactccagtgttgttaaatgggttgttctgg

SEQ ID NO: 96664 - DNA, 75 bp, synthetic construct
  source 1..75: mol_type = other DNA
tgactgggaggcccagtatcagtgcaccattgaacatattcagaaaatgcgggaaatgtaccgggatgtgacgga

SEQ ID NO: 96665 - DNA, 75 bp, synthetic construct
  source 1..75: mol_type = other DNA
gtcattcagctatgcaggagacaagaatcgccagctgacccattacagcgatacccgctggcatgaagattccgt

SEQ ID NO: 96666 - DNA, 75 bp, synthetic construct
  source 1..75: mol_type = other DNA
atggcaatgccgcgcaaactcaaatacatgaatgtctttctgaacggctacagctatcagggcgttgcaaattcc

SEQ ID NO: 96667 - DNA, 75 bp, synthetic construct
  source 1..75: mol_type = other DNA
agaggctggcgattcggctgtccctcattatcagccgcctgattgctggcgaaacgctggatatggaccttcttg

SEQ ID NO: 96668 - DNA, 75 bp, synthetic construct
  source 1..75: mol_type = other DNA
tgatcccggtattccctcgcctttttcatcatttctgccgttggctcctgcagtttgtcgagaaactccttagat

SEQ ID NO: 96669 - DNA, 75 bp, synthetic construct
  source 1..75: mol_type = other DNA
ttcgttttcttctttatctggatttgatggtaatatttggattgccattttttcagatatatggaataagcggtg

SEQ ID NO: 96670 - DNA, 75 bp, synthetic construct
  source 1..75: mol_type = other DNA
ctcggcctcgatgacgatgcgctgtcggctgaaatctctctcggcggcttccccgatgacgctatctggtcgtta

SEQ ID NO: 96671 - DNA, 75 bp, synthetic construct
  source 1..75: mol_type = other DNA
gagcgactggccccgtgccggttacttatccaccagcagacctggtatctggtcgccgagcatggcggacatatt

SEQ ID NO: 96672 - DNA, 75 bp, synthetic construct
  source 1..75: mol_type = other DNA
catcacgggcagttcaggaaattcgggcagcacgtgaacagtgggaacgtgaaaacggatttatcagcaacggaa

SEQ ID NO: 96673 - DNA, 75 bp, synthetic construct
  source 1..75: mol_type = other DNA
tgccgcaggggcgcctgcgcctgatattctcgaccagtttctggatgaaaaagaaggtaaccacaccacggcata

SEQ ID NO: 96674 - DNA, 75 bp, synthetic construct
  source 1..75: mol_type = other DNA
tggtgccggaccctctccttcagtccgaacaaaccccggcactatgaacgttatctgcagcgtatgaaagaaagg

SEQ ID NO: 96675 - DNA, 75 bp, synthetic construct
  source 1..75: mol_type = other DNA
acgaagttctgggaaaagagggaggttacgttaaccatcctgatgataaaggtgggccgacaaagtggggaatta

SEQ ID NO: 96676 - DNA, 75 bp, synthetic construct
  source 1..75: mol_type = other DNA
catttcattacggaacatgcgtgtctgtgaaccctttggccctgaacagcgtaagggattatggctttaccatgt

SEQ ID NO: 96677 - DNA, 75 bp, synthetic construct
  source 1..75: mol_type = other DNA
tggcgaagaggtgggcaaaggcgatgggccagaagtcgatatcgcggttgatcccattgaaggcacgcggatggt

SEQ ID NO: 96678 - DNA, 75 bp, synthetic construct
  source 1..75: mol_type = other DNA
ggcagagcagggctgttatccgctatgacatggcagtgccgctcaatttgtcagaacgcagcgcccggcaatcca

SEQ ID NO: 96679 - DNA, 75 bp, synthetic construct
  source 1..75: mol_type = other DNA
taacggacaggaagttcctgaaattatcctgcttaattcacatgatggttcatccagttatcagatgatccccgg

SEQ ID NO: 96680 - DNA, 75 bp, synthetic construct
  source 1..75: mol_type = other DNA
ctgattggttttcaaattgccagttcgcttgggattgtgctgctttcaacgccgactgggatactctttgaccac

SEQ ID NO: 96681 - DNA, 75 bp, synthetic construct
  source 1..75: mol_type = other DNA
ttaaccgatgcgtttcaggccagcggttttacatggcgtggaatcattgcgtggaacaaaggaagggggtcacga

SEQ ID NO: 96682 - DNA, 75 bp, synthetic construct
  source 1..75: mol_type = other DNA
atgacagtaaaaatttctggcgtgcttaaagacggcacaggaaaaccggtagagaactgcaccattcaactgaaa

SEQ ID NO: 96683 - DNA, 75 bp, synthetic construct
  source 1..75: mol_type = other DNA
gtgtttcccgtcgacgttttacagacgaattaatgcaggtgatcgaaaaggtgcctgcgaagcgattcgctggtg

SEQ ID NO: 96684 - DNA, 75 bp, synthetic construct
  source 1..75: mol_type = other DNA
aatgagcggcccggcgctggcagtgattgagaatctggagaaggcatcgactcaggagctggaagatatggccag

SEQ ID NO: 96685 - DNA, 75 bp, synthetic construct
  source 1..75: mol_type = other DNA
cggtaattttgtcaatgatttgtcgggcagacgtggaatatataaggcaggtattaaagcctcattcagcagttc

SEQ ID NO: 96686 - DNA, 75 bp, synthetic construct
  source 1..75: mol_type = other DNA
aactcactttgcaaaatggtgataatattcatgtcaaagattatgactatttcttcttatcagaatcagcacatg

SEQ ID NO: 96687 - DNA, 75 bp, synthetic construct
  source 1..75: mol_type = other DNA
aagcactgaaaagagcctcttcacaggaggtgtcggcccgccttggaatcagccgcgaagatgctgtcaacgagc

SEQ ID NO: 96688 - DNA, 75 bp, synthetic construct
  source 1..75: mol_type = other DNA
gctgggaacatgaaagtggtttctatctggacggtatcgtgaagctgaaccgctttgaaagtaacgtagccggta

SEQ ID NO: 96689 - DNA, 75 bp, synthetic construct
  source 1..75: mol_type = other DNA
cggactttttccctttttatcagtatgccatgacatttgaagaattcattccggctttttcatcctggatggcca

SEQ ID NO: 96690 - DNA, 75 bp, synthetic construct
  source 1..75: mol_type = other DNA
actacacccgcacggcgcaagtacttatggacacaatggcagaagcgcatatgtgggcggtggacaaaccgctga

SEQ ID NO: 96691 - DNA, 75 bp, synthetic construct
  source 1..75: mol_type = other DNA
ctcacccgcgttgatgaatcactggccgcgctttatggcgatatcggtaaacaggcggaatcgctcatcggtaag

SEQ ID NO: 96692 - DNA, 75 bp, synthetic construct
  source 1..75: mol_type = other DNA
atgcgattagcttcccgttttggtcgatataattctattcgccgtgagcgcccgttaacggatgacgaattaatg

SEQ ID NO: 96693 - DNA, 75 bp, synthetic construct
  source 1..75: mol_type = other DNA
ggaacctggtgtgatgtgggttcgccagccaccggaagacgctattatggatatgacgtatttccccttttaccg

SEQ ID NO: 96694 - DNA, 75 bp, synthetic construct
  source 1..75: mol_type = other DNA
accgtgagacggtgcgcagcttcggcagcatggcaggcagtaatgccgcatacgaactgaccagcacatacaccc

SEQ ID NO: 96695 - DNA, 75 bp, synthetic construct
  source 1..75: mol_type = other DNA
atcatctgcgcagggtacttcatgaagtcagcccttttgcacaggagcctgtggactgtgtgctgtgggtgaaag

SEQ ID NO: 96696 - DNA, 75 bp, synthetic construct
  source 1..75: mol_type = other DNA
tcttcagttcagcccggcagaaacggtgactattgaccttgcttatgaaggctccggcagtggtgactggcgcac

SEQ ID NO: 96697 - DNA, 75 bp, synthetic construct
  source 1..75: mol_type = other DNA
tatcaatcatccgttcgcattgacactgcttatacgtgtagccgggcaaactaaacgctgtcacgatcggatgac

SEQ ID NO: 96698 - DNA, 75 bp, synthetic construct
  source 1..75: mol_type = other DNA
ggcgacaactggcggcaccaaaacgcccgtcgggaccaacgccaatcgagttgctgaaacaggaatatgaacgcc

SEQ ID NO: 96699 - DNA, 75 bp, synthetic construct
  source 1..75: mol_type = other DNA
atgcgattagcaagtcgttttggttatgctgcaaaccagatacgccgtgaccgtccactgacacatgaagagctg

SEQ ID NO: 96700 - DNA, 75 bp, synthetic construct
  source 1..75: mol_type = other DNA
ttccggttcgtacagaactggagttttatgctcgtggaaatgctgacacgaaatataatctttataaagacgact

SEQ ID NO: 96701 - DNA, 75 bp, synthetic construct
  source 1..75: mol_type = other DNA
ggctgattgccgatgcaaagccagccagtcgccatcttatcggcctgaatattattcaggacatcccgggttatc

SEQ ID NO: 96702 - DNA, 75 bp, synthetic construct
  source 1..75: mol_type = other DNA
agaaactgtggcggacattgagcagtcgttgtcattgctcaccgaaacgcaagcggatggcatggttttaccatc

SEQ ID NO: 96703 - DNA, 75 bp, synthetic construct
  source 1..75: mol_type = other DNA
cgcattgctgaacattcttgaatctcagttcaggctttctgtcgtgccggaaggaaaaaccatgtatgttctgct

SEQ ID NO: 96704 - DNA, 75 bp, synthetic construct
  source 1..75: mol_type = other DNA
cgtggggggctggcgtgcagtttaacccgaccgaatccgtggccattgatattgcttatgaaggttccggcagtg

SEQ ID NO: 96705 - DNA, 75 bp, synthetic construct
  source 1..75: mol_type = other DNA
gtttattgcgggctggacgcgagcggaaaaaaatgatgccaatgatacccgcgctatcattcaacgtctggtgga

SEQ ID NO: 96706 - DNA, 75 bp, synthetic construct
  source 1..75: mol_type = other DNA
tgggcggtgagattttttccggctggctgacggtgagtgttcgtcgctctcttgaacatctggcgggctcctttg

SEQ ID NO: 96707 - DNA, 75 bp, synthetic construct
  source 1..75: mol_type = other DNA
ctcacggttatttccagccatataaaagcttaagcgatatcaccaaagcggatttcctctcagatacgaacaaaa

SEQ ID NO: 96708 - DNA, 75 bp, synthetic construct
  source 1..75: mol_type = other DNA
acggagtgtagattagtcaactttcctgagacacctatttttggcaattcatttaaatatgatattgaagtgtcg

SEQ ID NO: 96709 - DNA, 75 bp, synthetic construct
  source 1..75: mol_type = other DNA
agcaggctcgtctgccgtgggtcaaaacgctggagcagttcgactttaccttccagccgggcatcgaccgtaagg

SEQ ID NO: 96710 - DNA, 75 bp, synthetic construct
  source 1..75: mol_type = other DNA
aagcaccacctacaacgacgtctatgcgggaagatttacgtgatatctggcaaaacgaccagtggcggattgtcg

SEQ ID NO: 96711 - DNA, 75 bp, synthetic construct
  source 1..75: mol_type = other DNA
agagtgaatcgcagctaaaacttgttggtatggggtctgtgagttccaggctaaatgctctgtttatttcgctac

SEQ ID NO: 96712 - DNA, 75 bp, synthetic construct
  source 1..75: mol_type = other DNA
tggatgggcaattttgttgagcaatcaacgcttaatgaaacgcatccggtaatttataacgtctgcaattatcag

SEQ ID NO: 96713 - DNA, 75 bp, synthetic construct
  source 1..75: mol_type = other DNA
atgatgcgctcggttccatgcagaaagaatccgacatcaacaaggactcactttctgctcagtggttgctggtca

SEQ ID NO: 96714 - DNA, 75 bp, synthetic construct
  source 1..75: mol_type = other DNA
gtcgcaaatcctgacgacagctgggaagaccagaaacgtgacctgctggccttcgccagcacggcagcaaaggcg

SEQ ID NO: 96715 - DNA, 75 bp, synthetic construct
  source 1..75: mol_type = other DNA
aagcatccctgccgaatggagcctcacttgagaaacaactggaggctattgatgaaaaactgacactcacggcgt

SEQ ID NO: 96716 - DNA, 75 bp, synthetic construct
  source 1..75: mol_type = other DNA
caacggcgattaatcagtcttcatcacaggttgcccgggagaccagggtgagccggaaactggtaaaggaacggt

SEQ ID NO: 96717 - DNA, 75 bp, synthetic construct
  source 1..75: mol_type = other DNA
gggcagaccgcgtgagcagtgaaagccgggcgtggcttgcgcagtgcgggctgacggtggagcaactggccagac

SEQ ID NO: 96718 - DNA, 75 bp, synthetic construct
  source 1..75: mol_type = other DNA
tgaggattctcggtgctatgtggatggtgtcgacgttcattgcggttgtcggaagttttgtccggttggtaggcg

SEQ ID NO: 96719 - DNA, 75 bp, synthetic construct
  source 1..75: mol_type = other DNA
tgaggattctcggtgctatgtggatggtggcgacgttcattgttgttgccagcagttttgtccggttggtaggcg

SEQ ID NO: 96720 - DNA, 75 bp, synthetic construct
  source 1..75: mol_type = other DNA
tatgcgcgtcgatgtagtagtcgctttctttgtgcgggtaaaaccttcagtagaagggattgccaccgctgccca

SEQ ID NO: 96721 - DNA, 75 bp, synthetic construct
  source 1..75: mol_type = other DNA
tcaggccgcggaggatggtaatgccgcttttgcgctctggcaaccctacagttgctgcaagaaacggggacagac

SEQ ID NO: 96722 - DNA, 75 bp, synthetic construct
  source 1..75: mol_type = other DNA
cctctatacccgcttatggcatgacagcgtcagcagtactgcgctccatcgccagcacaacatgaaggaggaaac

SEQ ID NO: 96723 - DNA, 75 bp, synthetic construct
  source 1..75: mol_type = other DNA
aggtttggtgacgggccgtggcaggatgtcaaggggctggatgaagtgggcagtgatacaggcagaacaggagaa

SEQ ID NO: 96724 - DNA, 75 bp, synthetic construct
  source 1..75: mol_type = other DNA
atcgaaccgtttgatgagaaccgagtgaaaatcaaacacaaactctcatatgttcgcccgactaaccgcgggaaa

SEQ ID NO: 96725 - DNA, 75 bp, synthetic construct
  source 1..75: mol_type = other DNA
gtattttttatcgtctggaaggggagagtgcggaagacggcagcgtgatgacactgcgcagttttctcgataaag

SEQ ID NO: 96726 - DNA, 75 bp, synthetic construct
  source 1..75: mol_type = other DNA
gtgtgtccttgcaactctgtatcgggctgcagctacacatcctgaaattaaattattacaatttaaattaatacc

SEQ ID NO: 96727 - DNA, 75 bp, synthetic construct
  source 1..75: mol_type = other DNA
ccacacagcctgtcaatcagcagatttatcgtattcttcgtcgcgacattgtccattgcctgattgcaccaggca

SEQ ID NO: 96728 - DNA, 75 bp, synthetic construct
  source 1..75: mol_type = other DNA
tttgaagtcgaagtcgaagtcgttaacaccctggtagttaaagggaaagttaaacgtcacggacagcgtatcggt

SEQ ID NO: 96729 - DNA, 75 bp, synthetic construct
  source 1..75: mol_type = other DNA
taacgccgctcagtgcttttgtgcgcggtattctcgggaaaaacacagccggtgaaattatcgacgcgcttttat

SEQ ID NO: 96730 - DNA, 75 bp, synthetic construct
  source 1..75: mol_type = other DNA
tgcgtgaggcagcagtagcaattgaaacagtagcaacgcctcaaaaattgctggcatttcgtatgaaagtcacac

SEQ ID NO: 96731 - DNA, 75 bp, synthetic construct
  source 1..75: mol_type = other DNA
tggcaggttgttaaggcaggtggtactgccggtaacaccaccataaatcagaacggcgagctgaaggttcatgcc

SEQ ID NO: 96732 - DNA, 75 bp, synthetic construct
  source 1..75: mol_type = other DNA
ctggtgcctgagaacgatgcccgtgcactggcgcaacgactggcggcgtttagccaactggacaccgacgaactg

SEQ ID NO: 96733 - DNA, 75 bp, synthetic construct
  source 1..75: mol_type = other DNA
cctgcgcaccctcatcgaacaatatcaactggaagatgtggtggagatgccgggctttaaaccgagccacgaagt

SEQ ID NO: 96734 - DNA, 75 bp, synthetic construct
  source 1..75: mol_type = other DNA
atttaaagattttgcgtataacaagctgaaaactatccgaaaactgaacggtatgctggttgttggcacgcaatc

SEQ ID NO: 96735 - DNA, 75 bp, synthetic construct
  source 1..75: mol_type = other DNA
cttcgtcgcagttaatcaacagcattgatattctccgggcacgccgggcaacaggtctgatgacccgcagcaact

SEQ ID NO: 96736 - DNA, 75 bp, synthetic construct
  source 1..75: mol_type = other DNA
aaccgctgacgttgacgaccgggcgggtgatttttgctattgccggcgtctatgtgacgcagagtctggtatcgg

SEQ ID NO: 96737 - DNA, 75 bp, synthetic construct
  source 1..75: mol_type = other DNA
aatttccgctgtcgtcggaaaccttcgtcctcaatcaaattaccgcgtttattgatatgggctttgaggtggaga

SEQ ID NO: 96738 - DNA, 75 bp, synthetic construct
  source 1..75: mol_type = other DNA
gcgagcgcggagctctgctgtacggactaacagggaactgtcggttgaacggtatcgatccagaagcgtatctgc

SEQ ID NO: 96739 - DNA, 75 bp, synthetic construct
  source 1..75: mol_type = other DNA
aacccggcaactatccggtaactccggatggttggataagctgtagtgagcgaatgccagaaatgggagagcgac

SEQ ID NO: 96740 - DNA, 75 bp, synthetic construct
  source 1..75: mol_type = other DNA
aaaaggaagatgatacagaaatccggattgagggattctgggaagaatgccagccgggtgaaacacagtgtacag

SEQ ID NO: 96741 - DNA, 75 bp, synthetic construct
  source 1..75: mol_type = other DNA
ctcgttgaaaccgataatagttgtgtggagaactgtttaaaagggaagtttaaagaggtaaggccgcgttattct

SEQ ID NO: 96742 - DNA, 75 bp, synthetic construct
  source 1..75: mol_type = other DNA
cgtgcagcgggatgagcgtaaggggcactacaggataagtcgttctgatgttgatcaactgagggtcagtagtga

SEQ ID NO: 96743 - DNA, 75 bp, synthetic construct
  source 1..75: mol_type = other DNA
gtcaaacacgcatatttaactcaattaactatgacacaaaatataaaatatgcgtttttactccaaaaaacatta

SEQ ID NO: 96744 - DNA, 75 bp, synthetic construct
  source 1..75: mol_type = other DNA
aagatgtggtatcagtactggaagagtacaaggccagaggacataacagaatgggacaaattttcaggaaggtac

SEQ ID NO: 96745 - DNA, 75 bp, synthetic construct
  source 1..75: mol_type = other DNA
gggcaccctggtggtggcttccgaactggcgcgctcacggggaaaacgcaccggtgtggcggttgcgctgtctct

SEQ ID NO: 96746 - DNA, 75 bp, synthetic construct
  source 1..75: mol_type = other DNA
agccactaccacggctgcagggctggcaatgggtgcgccagtgatggcagcagtaaaaagctataccagcatgga

SEQ ID NO: 96747 - DNA, 75 bp, synthetic construct
  source 1..75: mol_type = other DNA
agaaggtttccgggaaatgacaaaggcacagtgggccgccctgccccgggactgtaaggccgtgcgcagtgtggc

SEQ ID NO: 96748 - DNA, 75 bp, synthetic construct
  source 1..75: mol_type = other DNA
aacggaatgttgaaggattaacaggtgccagagaaataattctgaatgagttaacaaagcgagtgcaccggatct

SEQ ID NO: 96749 - DNA, 75 bp, synthetic construct
  source 1..75: mol_type = other DNA
aggacttcacattttttgaagccttaagaacggcagacagattaatcagcggcctgcgttttcaatatccgggaa

SEQ ID NO: 96750 - DNA, 75 bp, synthetic construct
  source 1..75: mol_type = other DNA
aataacgactggacagtgacctacccgtcttatcagcgactggttcagtacaaaacggacggtgataaaggctca

SEQ ID NO: 96751 - DNA, 75 bp, synthetic construct
  source 1..75: mol_type = other DNA
gacctgaatgatattgaaagaataaagtatataaaagcagggagatggtttcttgctcaaatggatggaagacaa

SEQ ID NO: 96752 - DNA, 75 bp, synthetic construct
  source 1..75: mol_type = other DNA
gtggcaacggacaaggcagttccatgatcatgaagatgaaagtggaccagtttttaacccaatcaaacattgacc

SEQ ID NO: 96753 - DNA, 75 bp, synthetic construct
  source 1..75: mol_type = other DNA
tgcaaaagatatcattttgggcgagttaaccaagagggttcaccggatctttcccgatgctgatgttcgggttaa

SEQ ID NO: 96754 - DNA, 75 bp, synthetic construct
  source 1..75: mol_type = other DNA
acgtatccggcgtgaacgcctgccagaagaactggcatacgcgctgaaacaacaactgaggattgcgataaaacg

SEQ ID NO: 96755 - DNA, 75 bp, synthetic construct
  source 1..75: mol_type = other DNA
caaaaagccgagggggtggtggaaggaatgttgatgatgttgggtgtccggttagaaatggacaaatatattgaa

SEQ ID NO: 96756 - DNA, 75 bp, synthetic construct
  source 1..75: mol_type = other DNA
ggaagaaaattcagcccgtaaagaacaagaagaacgtcaggctaaactggaagccttccgccagaaactgttaga

SEQ ID NO: 96757 - DNA, 75 bp, synthetic construct
  source 1..75: mol_type = other DNA
ggcggcgaatatgccattcagcacgcggtggaaggcgcggaagatagccgggaaggcggtgttaatgatctgaaa

SEQ ID NO: 96758 - DNA, 75 bp, synthetic construct
  source 1..75: mol_type = other DNA
cctaccttcatctgggcatattttcagaacgggaacttgttggcgtaatgcaatggggttacgcccttaacccaa

SEQ ID NO: 96759 - DNA, 75 bp, synthetic construct
  source 1..75: mol_type = other DNA
cgcgttactgcgcttaccggtacaacgcaaggtgctgctactggattgcagatgtatgaggcatacaacaatggt

SEQ ID NO: 96760 - DNA, 75 bp, synthetic construct
  source 1..75: mol_type = other DNA
tgtcagcggccgttctggcgctgattggagcaggcgcatctgctcctgagatacttgaccagtttctggatgaaa

SEQ ID NO: 96761 - DNA, 75 bp, synthetic construct
  source 1..75: mol_type = other DNA
cataacttcgtctatcttgtcgcgatcctggccccaatacattatttgtggtcagtgaagattatttcaccgcag

SEQ ID NO: 96762 - DNA, 75 bp, synthetic construct
  source 1..75: mol_type = other DNA
tcacggcagaagacggcagcggctgcctgcatgaatacgcgacgtactcctgtgaaacacgtacttccggccagg

SEQ ID NO: 96763 - DNA, 75 bp, synthetic construct
  source 1..75: mol_type = other DNA
ctgacttcggcatttacaatgcaggggaaaaagttactttgttgaatgggcaggaagattgttataatccgagca

SEQ ID NO: 96764 - DNA, 75 bp, synthetic construct
  source 1..75: mol_type = other DNA
tatccgtcgagaacgcctgcccaaagaactggcatatgcgctgaaacaacaactgaggattgcgataaaacgatg

SEQ ID NO: 96765 - DNA, 75 bp, synthetic construct
  source 1..75: mol_type = other DNA
aagcagatgacctgattctaccatcgctgcatgtggctaaccgcgagctgcgccgggcgaaaagtgatgtccaga

SEQ ID NO: 96766 - DNA, 75 bp, synthetic construct
  source 1..75: mol_type = other DNA
tttatcgcgcctgttcagccgtcttgcccgtacaaaacaacttcgcaaggccaaaaaggcggatgtgctggctat

SEQ ID NO: 96767 - DNA, 75 bp, synthetic construct
  source 1..75: mol_type = other DNA
gtaaatacatattattctgaagatttggcattgtggtatatattgctggcaaatggatataaatttgcaaatatc

SEQ ID NO: 96768 - DNA, 75 bp, synthetic construct
  source 1..75: mol_type = other DNA
agcttcatcgtcaaatctggcaaattgctaacgatgtcagaggttcggtcgatggatgggattttaagcaatacg

SEQ ID NO: 96769 - DNA, 75 bp, synthetic construct
  source 1..75: mol_type = other DNA
ggctacaaaagccgtcaccgactcgtttgttaacaacccgaaggagcccatttcgcccgacgcgccgtttattaa

SEQ ID NO: 96770 - DNA, 75 bp, synthetic construct
  source 1..75: mol_type = other DNA
atggcgcaaaaagaaatgaccagaatcactgaagagcgcatatcagagattatttcccgtatcgaaatgtatggt

SEQ ID NO: 96771 - DNA, 75 bp, synthetic construct
  source 1..75: mol_type = other DNA
gtgaatggttaccgtatcgaactgggggaagtcaaaagccaccttgaacagctcgacagcgtagggagtgccgcc

SEQ ID NO: 96772 - DNA, 75 bp, synthetic construct
  source 1..75: mol_type = other DNA
cggatgattacacgatcctgggcgtggtgctttctgaagatgtcatcacccggcaggctaactttttgcataacc

SEQ ID NO: 96773 - DNA, 75 bp, synthetic construct
  source 1..75: mol_type = other DNA
atgaaggtcggcttctttttactgaaattcccgctgtcgtcggaaaccttcgtcctcaaccaaattaccgcgttt

SEQ ID NO: 96774 - DNA, 75 bp, synthetic construct
  source 1..75: mol_type = other DNA
tacgtgtgtggaatcaccgtttacgatctctgtcatatcggtcacgggcgtacctttgttgcctttgacgtggtt

SEQ ID NO: 96775 - DNA, 75 bp, synthetic construct
  source 1..75: mol_type = other DNA
taataatcatcatcctggcggttattctttatcttgcatacatcaccgccgctctctacctgtcagcagtacacg

SEQ ID NO: 96776 - DNA, 75 bp, synthetic construct
  source 1..75: mol_type = other DNA
cctgtaaccacactcagcgggacaattattcttcaactggcactgttcaacattctgcttcctttcgtcatcgtc

SEQ ID NO: 96777 - DNA, 75 bp, synthetic construct
  source 1..75: mol_type = other DNA
ttttgtgatggtaatcgttatcaatcattagactctagaattatatcactggacggccatgccgacgatctctta

SEQ ID NO: 96778 - DNA, 75 bp, synthetic construct
  source 1..75: mol_type = other DNA
ctgggcgtctggtatcagaacgatccggcactggtgaaagaacttgtcgaactgctgtggctgaaaggcgatgaa

SEQ ID NO: 96779 - DNA, 75 bp, synthetic construct
  source 1..75: mol_type = other DNA
gtggttgagcatccgcatattctcgatatcgcccagcaggcgatgcgtgactgcgatattgaaccggaactgaaa

SEQ ID NO: 96780 - DNA, 75 bp, synthetic construct
  source 1..75: mol_type = other DNA
tttacctggggagagctgctggggattatcggccttatcggtcatctgatgcgcgcccgggcagaaggacgtcac

SEQ ID NO: 96781 - DNA, 75 bp, synthetic construct
  source 1..75: mol_type = other DNA
ctccagtgccctcgaagtacatcaatctaatcatttcccgtttctaaaagctgatgagataccggatttcctacg

SEQ ID NO: 96782 - DNA, 75 bp, synthetic construct
  source 1..75: mol_type = other DNA
tcaaatcattttcctttcttaaaatcagatgagatacctgattttctgcgtgctttagatagttatgcaggaagc

SEQ ID NO: 96783 - DNA, 75 bp, synthetic construct
  source 1..75: mol_type = other DNA
ggacggcaccgccgttgccgcgaatagactcgccaccccaagaaatattaatggggttccctttgacgggacgca

SEQ ID NO: 96784 - DNA, 75 bp, synthetic construct
  source 1..75: mol_type = other DNA
gttgcaggaacggggtttgcgccggtgctggaagaggcgactagggtgaacacggaacaattggtccgtctggtg

SEQ ID NO: 96785 - DNA, 75 bp, synthetic construct
  source 1..75: mol_type = other DNA
gtaccacgcgatttttgccgaaaggatgattcagcaccctgcagtacagcgtatctgcaatacagactattctgc

SEQ ID NO: 96786 - DNA, 75 bp, synthetic construct
  source 1..75: mol_type = other DNA
ccatgcgttatatttggaagggcgtagggagatgatgcagtggtatgcggattatattgataacattggaaaata

SEQ ID NO: 96787 - DNA, 75 bp, synthetic construct
  source 1..75: mol_type = other DNA
acagcatactcaaagccggtcagcatcgttatcagcgggcatttatccagcgattaaataatgggcgctggcatg

SEQ ID NO: 96788 - DNA, 75 bp, synthetic construct
  source 1..75: mol_type = other DNA
tctgtgaagagtttgcaacctcgcgcaacatcatccgtgaggtgttccgttcgctgatggcgaagcggctgattg

SEQ ID NO: 96789 - DNA, 75 bp, synthetic construct
  source 1..75: mol_type = other DNA
tttgattcctgggcgacgttcaatgttagggcgcaaattgcttaactggtttaactcccagggattaaacgtaga

SEQ ID NO: 96790 - DNA, 75 bp, synthetic construct
  source 1..75: mol_type = other DNA
tccgccttcacatgccggggctatcaccgtgtatgaggattctaagccggggacattgaatgattttctgggcgc

SEQ ID NO: 96791 - DNA, 75 bp, synthetic construct
  source 1..75: mol_type = other DNA
atggatgtcgagtatggccagtacagcgttatcctgctggttgaaggttttccgccttcacatgccggggctatc

SEQ ID NO: 96792 - DNA, 75 bp, synthetic construct
  source 1..75: mol_type = other DNA
tgctgatgctgtttaccgcaagtgtcagtgccgcgttacctgcccgttatatgcaaaccatcgaaaatgctgcgg

SEQ ID NO: 96793 - DNA, 75 bp, synthetic construct
  source 1..75: mol_type = other DNA
tggaggccgtgaagcgcgaaatcgaccgtcgcgtgaaggaacgcatgataatgtcgcggaacaacaactacacac

SEQ ID NO: 96794 - DNA, 75 bp, synthetic construct
  source 1..75: mol_type = other DNA
attccgatggcggccccactgaagcaggcttttgatgagaacgttaaccgtatccggcgagaacgtctgccaaaa

SEQ ID NO: 96795 - DNA, 75 bp, synthetic construct
  source 1..75: mol_type = other DNA
atggaatttaaagatttaccagtaccattccaggatatggcagcgaatatagttcgttctcaactggcgactctt

SEQ ID NO: 96796 - DNA, 75 bp, synthetic construct
  source 1..75: mol_type = other DNA
aaaaacccaaagggacaggaaaggctccccctttccatatgcgtatagctccagaactgaaagaacagtttgata

SEQ ID NO: 96797 - DNA, 75 bp, synthetic construct
  source 1..75: mol_type = other DNA
cgtatccgctcaaataactgctacggtcaggtatcccggcgtgaccaggagagtgcgctggcgtgctggggtatc

SEQ ID NO: 96798 - DNA, 75 bp, synthetic construct
  source 1..75: mol_type = other DNA
gtgaaaatcgaactgacggtgaatggactaaaggtacaggcgcagtactctgatgatgaaattgagaatgttcat

SEQ ID NO: 96799 - DNA, 75 bp, synthetic construct
  source 1..75: mol_type = other DNA
agggcaccttgtgttcaccaaaaactacacatccaaatctgcgtatgtcgcgtaccgccacgaatgcgcctacat

SEQ ID NO: 96800 - DNA, 75 bp, synthetic construct
  source 1..75: mol_type = other DNA
aaagcatgtccagaaaaggcaattgtctggataatgctgtggtggagtgtttctttggaaccttaaagtcggagt

SEQ ID NO: 96801 - DNA, 75 bp, synthetic construct
  source 1..75: mol_type = other DNA
gagaagtcgcgctggcacttgagctcaatcctgaccatttgcgtaaatggatacggttgtataagcaggaatttc

SEQ ID NO: 96802 - DNA, 75 bp, synthetic construct
  source 1..75: mol_type = other DNA
actattaccaggacatggcggactccttgacaggattgactcattaattttcaccgctccggtatttttttattt

SEQ ID NO: 96803 - DNA, 75 bp, synthetic construct
  source 1..75: mol_type = other DNA
ctggcattgctcacaccctttaatatcggaatgctgaccactgatgagtgggggagctatactagggcgcttccg

SEQ ID NO: 96804 - DNA, 75 bp, synthetic construct
  source 1..75: mol_type = other DNA
tatattgaatactacaacagcagaagaattagcctgaaattaaaaggtctgactccaattgaatatcggaattag

SEQ ID NO: 96805 - DNA, 75 bp, synthetic construct
  source 1..75: mol_type = other DNA
cacgtatggcaacgtattgcacatgaaaggtgcgagtgctgctggtgagggcgagttgcttattggctggagtgg

SEQ ID NO: 96806 - DNA, 75 bp, synthetic construct
  source 1..75: mol_type = other DNA
accttgtgttcaccaaaaactacacatccaaatctgcgtatgtcgcgtaccgccacgaatgcgcttacatcctgg

SEQ ID NO: 96807 - DNA, 75 bp, synthetic construct
  source 1..75: mol_type = other DNA
atacccgctggcatgaagattcagtgcgtaaccgctggttcagcatgatggcggggccgtctgtacgcgtgaatg

SEQ ID NO: 96808 - DNA, 75 bp, synthetic construct
  source 1..75: mol_type = other DNA
aaatcgtcgtaagcgtaaacctgagctgaagccatccgaaataccaacactgctcgggtataccgccagcctggt

SEQ ID NO: 96809 - DNA, 75 bp, synthetic construct
  source 1..75: mol_type = other DNA
ccactacacaaacgagagcaatatgatttctcgtatcgttcttggtgggctaactgctaagcagtgggcgcggat

SEQ ID NO: 96810 - DNA, 75 bp, synthetic construct
  source 1..75: mol_type = other DNA
tgctgcagacctgacgctggatataccggacatccgcaacagcgggcttatcaccggtgataatggtttaacgtt

SEQ ID NO: 96811 - DNA, 75 bp, synthetic construct
  source 1..75: mol_type = other DNA
cttgatcccgatctgatcctgttagatctcaatatgcccggcatgaacggtctggaaacgctggataaactgcgc

SEQ ID NO: 96812 - DNA, 75 bp, synthetic construct
  source 1..75: mol_type = other DNA
gtggcaacctatcacctcagcgttaaatttggtggcaaggggcaggctgcaaaccacgccgattacatcgagcgc

SEQ ID NO: 96813 - DNA, 75 bp, synthetic construct
  source 1..75: mol_type = other DNA
agaatacggcttcacggaaggcgtggattatgaggttgttgaatatttgagccgacccgatccggtgagcgcaaa

SEQ ID NO: 96814 - DNA, 75 bp, synthetic construct
  source 1..75: mol_type = other DNA
aaatgagcagcagagatctggcaaaattcaccgatatcagacgttacgctacgctggtttgtgtcattcaggaag

SEQ ID NO: 96815 - DNA, 75 bp, synthetic construct
  source 1..75: mol_type = other DNA
tcacgcatcactcgcacggcttccggtgctaatgctggcggcgggaacctcacagatcgcggcgaaggtttcgtc

SEQ ID NO: 96816 - DNA, 75 bp, synthetic construct
  source 1..75: mol_type = other DNA
ctggaccgccatcttcatgaacccggtgtggccttcacctccacccgtgcggcacgagaatggctgattctgaac

SEQ ID NO: 96817 - DNA, 75 bp, synthetic construct
  source 1..75: mol_type = other DNA
gtggcaacctatcacctcagcgttaagtttggaggtaagggacaggctgcaaaccacgccgattacatcgggcgc

SEQ ID NO: 96818 - DNA, 75 bp, synthetic construct
  source 1..75: mol_type = other DNA
acctttcacgcgaacgttgccagttaatactgacccagcttgttatggcgggtctggcagattatcagttcggtt

SEQ ID NO: 96819 - DNA, 75 bp, synthetic construct
  source 1..75: mol_type = other DNA
ctgggaatgccggtaaatacccatcctgatgcgcaatttgctggcgcaattggcgcggcggtaattggtcaacga

SEQ ID NO: 96820 - DNA, 75 bp, synthetic construct
  source 1..75: mol_type = other DNA
tcagatgccgctaatgcgcaagcttcaaaagtgcttaagtcgggtaatgctttacggaagtttagtgtgaatccg

SEQ ID NO: 96821 - DNA, 75 bp, synthetic construct
  source 1..75: mol_type = other DNA
gtgacatattcgattggcattgattctggttctaccgccaccaaagggatcttactggcagacggcgtgattacg

SEQ ID NO: 96822 - DNA, 75 bp, synthetic construct
  source 1..75: mol_type = other DNA
tccatcatgatggtggcgttttatcgccatgccgggcgcatgtggccgggaattgcgctgagctgctcgctggga

SEQ ID NO: 96823 - DNA, 75 bp, synthetic construct
  source 1..75: mol_type = other DNA
tccggccccctgaaggccgcgccgtcgctgtcctttctcgggctggttgtgatggatgaactctgtgcccgtcac

SEQ ID NO: 96824 - DNA, 75 bp, synthetic construct
  source 1..75: mol_type = other DNA
agaaactgaaagaaaaacttcaggaattgctggtgactactaatggcaatcctgaaaacgatgaaagtaaggaat

SEQ ID NO: 96825 - DNA, 75 bp, synthetic construct
  source 1..75: mol_type = other DNA
cctctggctgacattgtgctcaacagtacgcaggcgtctttctgcaccgaatacagcgtcgtgaccggaggctcg

SEQ ID NO: 96826 - DNA, 75 bp, synthetic construct
  source 1..75: mol_type = other DNA
ggtgcagactcccacgcttgcgatggtggtcagacgggatgcggaaattaaaaattttatcccggtaccttactg

SEQ ID NO: 96827 - DNA, 75 bp, synthetic construct
  source 1..75: mol_type = other DNA
cgtcatcatggaggcgtctcattgaaaaaacatttaatgcaaaatgcgctttcgcaacaagagtatgtcgatatg

SEQ ID NO: 96828 - DNA, 75 bp, synthetic construct
  source 1..75: mol_type = other DNA
ggcgtttcatcagcatgagcgtggggaaattagcgacgaagcgttcgcagaggcgctgtgtcatgagatggctct

SEQ ID NO: 96829 - DNA, 75 bp, synthetic construct
  source 1..75: mol_type = other DNA
gcgcggctatgcggaaggtggttatgtgggtggtgccggaagtccggcgcagatgcggcgggcggaaggcattaa

SEQ ID NO: 96830 - DNA, 75 bp, synthetic construct
  source 1..75: mol_type = other DNA
tgccgccacgcaacagcaactggataatctggttagcgaacagcctggcgtgaccttaattcgcctggcagaaaa

SEQ ID NO: 96831 - DNA, 75 bp, synthetic construct
  source 1..75: mol_type = other DNA
gcaacttctggtgatgactacaacatgtatgatcaggataattggaggcattctgtaaaatacgctggtgagagg

SEQ ID NO: 96832 - DNA, 75 bp, synthetic construct
  source 1..75: mol_type = other DNA
ggcataatccctcttaatcttattgaagtcagttcaggggattatttgggagaggatgatattataagacagaaa

SEQ ID NO: 96833 - DNA, 75 bp, synthetic construct
  source 1..75: mol_type = other DNA
attaagtgccaccgaaccggcgacagtcggggagattgcacagaatacgtacctttcacgcgaacgctgccagct

SEQ ID NO: 96834 - DNA, 75 bp, synthetic construct
  source 1..75: mol_type = other DNA
aaaaactgaaggaaaaacttcaggaattagtgacaaatactatgagcaatcctgaaaataatgaaggtaaagaat

SEQ ID NO: 96835 - DNA, 75 bp, synthetic construct
  source 1..75: mol_type = other DNA
gtgagtaatacacaacacaaacttgataagtctcgccccccgagagtacagataacctacgatgttgaaactgga

SEQ ID NO: 96836 - DNA, 75 bp, synthetic construct
  source 1..75: mol_type = other DNA
agagaacgaaaattcatcagtatagacaaagataattttgatgaagttatgacatcaatgagtccgaaggctcat

SEQ ID NO: 96837 - DNA, 75 bp, synthetic construct
  source 1..75: mol_type = other DNA
ttttctcctgatcatgtgattcaacaagtcgagtgtcttaaaaaattatctgaattgaggtctcacctttgtgac

SEQ ID NO: 96838 - DNA, 75 bp, synthetic construct
  source 1..75: mol_type = other DNA
gatatccagccggagttcccgccgtggcagagaatgatcctggggggaataacgatagccagctatcttctgccg

SEQ ID NO: 96839 - DNA, 75 bp, synthetic construct
  source 1..75: mol_type = other DNA
agtctgcagccagggtaccggcagtgtattctgccggacagtctccacaacttcctgttgtcattgattatccgg

SEQ ID NO: 96840 - DNA, 75 bp, synthetic construct
  source 1..75: mol_type = other DNA
ggaaaatattttcacccatgagcagttgctgcgctatttcccttattacctgctggttaactccacttttgctgt

SEQ ID NO: 96841 - DNA, 75 bp, synthetic construct
  source 1..75: mol_type = other DNA
cgcgcgcgtagcctacgacttcggttcgcagatggccaatctcaacctcgccctaggggtaaaaaatatcttcga

SEQ ID NO: 96842 - DNA, 75 bp, synthetic construct
  source 1..75: mol_type = other DNA
cgtggggagctggcgtgcagtttaacccgatcgaatccgtggccattgatattgcttatgaaggctccggcagtg

SEQ ID NO: 96843 - DNA, 75 bp, synthetic construct
  source 1..75: mol_type = other DNA
gcgctttccgttgaccgctgggatgaaacatggagtgaagaggcacgtcgtcagatcatccgtgactcgtggcat

SEQ ID NO: 96844 - DNA, 75 bp, synthetic construct
  source 1..75: mol_type = other DNA
ccgatcacacacgtttcgcgggacgaactgcgcgcattacataacgcacaggatgaaaaacttcccgccgttacc

SEQ ID NO: 96845 - DNA, 75 bp, synthetic construct
  source 1..75: mol_type = other DNA
ctctggtgatggcaatccatttaagcctgctgctgttagttgggttgactgccgcgtcagcctttgccgccacgc

SEQ ID NO: 96846 - DNA, 75 bp, synthetic construct
  source 1..75: mol_type = other DNA
cgtaccgccacgaatgcgcttacatcctggcaaagggcagtccggcccggccccgtaaccctctgccggatgtgc

SEQ ID NO: 96847 - DNA, 75 bp, synthetic construct
  source 1..75: mol_type = other DNA
tcaaaagtatcataatcactatttttatcaacaatgtgaatatctatagctttttatcctcatttcatcaggtcg

SEQ ID NO: 96848 - DNA, 75 bp, synthetic construct
  source 1..75: mol_type = other DNA
ctggggggaataacgatagccagctatcttctgccgccagcgggactgctgggaaaactgaagaatctggcgaga

SEQ ID NO: 96849 - DNA, 75 bp, synthetic construct
  source 1..75: mol_type = other DNA
gatggctgggccgggctgctcgatcttaacggcaacatcatgcaggaaagtctgtttgccctgcgtgaaaatctg

SEQ ID NO: 96850 - DNA, 75 bp, synthetic construct
  source 1..75: mol_type = other DNA
atgtcaattgagcatattttaatcgggaaacatcatgggggttctgattgctggagaactccatttttgttattt

SEQ ID NO: 96851 - DNA, 75 bp, synthetic construct
  source 1..75: mol_type = other DNA
ttgctcataagattgatatctgtgcggcggcaaaactctggcgaaccgataacggacatgttcatgccgatttta

SEQ ID NO: 96852 - DNA, 75 bp, synthetic construct
  source 1..75: mol_type = other DNA
tttactcagttaagcaatgcgaccaacagcacgtctgaaacactggccgcaacgccgaaagcggtaaaggccgcg

SEQ ID NO: 96853 - DNA, 75 bp, synthetic construct
  source 1..75: mol_type = other DNA
tacacatccaaatctgcgtatgtcgcgtaccgccacgaatgcgcttacatcctggcaaagggcagtccggcccgg

SEQ ID NO: 96854 - DNA, 75 bp, synthetic construct
  source 1..75: mol_type = other DNA
gcggggccgtctgtgcgcgtgaatgaatggttcagcgcgtatgcgatggcgggtatggcttacagccgtgtttcg

SEQ ID NO: 96855 - DNA, 75 bp, synthetic construct
  source 1..75: mol_type = other DNA
ggtaacagtgcatgggtagctggttgcagccaaaacaccaaccagaatcagtattattcagtcactacttatgca

SEQ ID NO: 96856 - DNA, 75 bp, synthetic construct
  source 1..75: mol_type = other DNA
accgacccgccatatctcgtcggttttcgtgaccgacaggggcgtaccatcgccggcgataaaaccgatgaatgg

SEQ ID NO: 96857 - DNA, 75 bp, synthetic construct
  source 1..75: mol_type = other DNA
cgaagcgccagagccattaagcgcccctgtaatgagttgcccttccctcttgaggatgcgggatcagtacattct

SEQ ID NO: 96858 - DNA, 75 bp, synthetic construct
  source 1..75: mol_type = other DNA
gctgacacactgaaaataaataattttctggctgaaacagaccagcgttacttcgattccttaccatctgaggat

SEQ ID NO: 96859 - DNA, 75 bp, synthetic construct
  source 1..75: mol_type = other DNA
tgtccgcagccatttgtctggccgtatcaggtgcgcctgcatgggcgtctgaacatcagtccacgctgagcgcgg

SEQ ID NO: 96860 - DNA, 75 bp, synthetic construct
  source 1..75: mol_type = other DNA
gctggacccgtttgcaggcagcggctcaacctgcgtcgccgccctccagtccggacgccggtatatcggtatcga

SEQ ID NO: 96861 - DNA, 75 bp, synthetic construct
  source 1..75: mol_type = other DNA
aagtactgactgaaactgatcatgccaaccctgatccagaaatcgtggatattgcctgcggtcgttcctctgccc

SEQ ID NO: 96862 - DNA, 75 bp, synthetic construct
  source 1..75: mol_type = other DNA
agcaaagcctgcaatggtttgctgaactgggctgggaagtattgcacgggccggatattgcgccagatggcaaca

SEQ ID NO: 96863 - DNA, 75 bp, synthetic construct
  source 1..75: mol_type = other DNA
cattgaccttgcttatgaaggttccggtagtggcgactggcgaacggatgcatttattgttggtatcggataccg

SEQ ID NO: 96864 - DNA, 75 bp, synthetic construct
  source 1..75: mol_type = other DNA
cggctcgttatggctcatcgcgcctgccgggtaagccactgctcgatattgttggtaaaccgatgatccagcatg

SEQ ID NO: 96865 - DNA, 75 bp, synthetic construct
  source 1..75: mol_type = other DNA
gaagggtatctggggctgtttcgggaaaaaataggaaaactgcatctggctcaggggctgtgggagctgatagac

SEQ ID NO: 96866 - DNA, 75 bp, synthetic construct
  source 1..75: mol_type = other DNA
tggttcggtggctcgtctggcggcggaaagaggcattccggtttatgcgccggataacgttaatcatccgctgtg

SEQ ID NO: 96867 - DNA, 75 bp, synthetic construct
  source 1..75: mol_type = other DNA
caaaacagttataacaaccagttaattaatcgccttgatgcattagcacatcgtgatcctttaactgggatagca

SEQ ID NO: 96868 - DNA, 75 bp, synthetic construct
  source 1..75: mol_type = other DNA
caaaaacaagtgcaacttgccgtgacaaataatgatgaaaatagcacctatttaattcaatcatgggtagaaaat

SEQ ID NO: 96869 - DNA, 75 bp, synthetic construct
  source 1..75: mol_type = other DNA
ggtatccgttttgccgccgagatcatcgtgccgtttattctcgcattatttattgctgttattcttaacccgctg

SEQ ID NO: 96870 - DNA, 75 bp, synthetic construct
  source 1..75: mol_type = other DNA
gcacaacatggtgcgtgccgttgccgatccgtggccgggtgccttcagctatgttggtaatcagaaatttaccgt

SEQ ID NO: 96871 - DNA, 75 bp, synthetic construct
  source 1..75: mol_type = other DNA
gccaaaggcgggagtgtgatccgcacctcggtctccacatttatggagttcatcggtaataatcctaacgccttc

SEQ ID NO: 96872 - DNA, 75 bp, synthetic construct
  source 1..75: mol_type = other DNA
ggaaacgcgccggattcagcgtggttggccacctggtcttcaccaaaaactacacatccaaatctgcgtatgtcg

SEQ ID NO: 96873 - DNA, 75 bp, synthetic construct
  source 1..75: mol_type = other DNA
gactggcatcaaaatatggacacttaaataatggcggatatggagcgagacccaacaaaccgcctacgcccgatc

SEQ ID NO: 96874 - DNA, 75 bp, synthetic construct
  source 1..75: mol_type = other DNA
ctgtgcgcctgaagaaataccggtcttatcgggggaacatgggactcgctgcagaaaatatccttcagcgacagt

SEQ ID NO: 96875 - DNA, 75 bp, synthetic construct
  source 1..75: mol_type = other DNA
gtttcaatacctgaaacacttaccgatttaccgaaagatattgatgccatcatttttacactcggctccgatggt

SEQ ID NO: 96876 - DNA, 75 bp, synthetic construct
  source 1..75: mol_type = other DNA
cacttcatatgacttcgaaaaaagtagtgcccttccaacaagttttaacaaaaaaaatagttgttgtttcgttga

SEQ ID NO: 96877 - DNA, 75 bp, synthetic construct
  source 1..75: mol_type = other DNA
ataattacgaaggcatttgtctggagcctgattcatttgcggtaaatgtttatcatttattgcatgcaacacagg

SEQ ID NO: 96878 - DNA, 75 bp, synthetic construct
  source 1..75: mol_type = other DNA
gtacgacgctgcggaccggatcatccgctggtccgataacgaccagacgtggagccgtttcacctacgatgaaca

SEQ ID NO: 96879 - DNA, 75 bp, synthetic construct
  source 1..75: mol_type = other DNA
tctggattcggtgcgcatgatggcgctggcggcgcgctggcgcaaagtgcatggtgatatcgactttgtcatgct

SEQ ID NO: 96880 - DNA, 75 bp, synthetic construct
  source 1..75: mol_type = other DNA
cggatattcaacgattcaaaacggcttattacgactaccgctatcacgttcaggatgcattctacagtgacggtt

SEQ ID NO: 96881 - DNA, 75 bp, synthetic construct
  source 1..75: mol_type = other DNA
ataccccctggcatatcaagggtgtaacgcgttcgctcacggacgcctatcgtcgccacaatgtgggggccacac

SEQ ID NO: 96882 - DNA, 75 bp, synthetic construct
  source 1..75: mol_type = other DNA
ttaatatttttggttttgtcattccgctggtgaatgaagagaccggggaagttgtcatgcgcagcgatggcagcg

SEQ ID NO: 96883 - DNA, 75 bp, synthetic construct
  source 1..75: mol_type = other DNA
acaccagagactctgcgtgtgtgggttcgtcagcatgagcgggataccgggagtggtgatggtggactcaccacc

SEQ ID NO: 96884 - DNA, 75 bp, synthetic construct
  source 1..75: mol_type = other DNA
ctgacgctgattaacccgacaccctattacctgacggtaacagagttgaatgccggaactcgggttcttgaaaat

SEQ ID NO: 96885 - DNA, 75 bp, synthetic construct
  source 1..75: mol_type = other DNA
acccagcctgcggcacctcgcgtaatacgctggagatgatccgcaacagcggtaccgagccgaccattattcttt

SEQ ID NO: 96886 - DNA, 75 bp, synthetic construct
  source 1..75: mol_type = other DNA
attgctttgatattaaatttttattttactactgtttttctttagctgagtggtgccgaaaaaacacaacgatgt

SEQ ID NO: 96887 - DNA, 75 bp, synthetic construct
  source 1..75: mol_type = other DNA
gcactgtttctgttggcgatgtgtttgtatcttcctggggatatgagcaaacgaacgttaatttctaccaggtta

SEQ ID NO: 96888 - DNA, 75 bp, synthetic construct
  source 1..75: mol_type = other DNA
gaagagaatagttggcgcattatgctaatgacgatgcttatctcgcaacctacactagcagaacaggtcattccc

SEQ ID NO: 96889 - DNA, 75 bp, synthetic construct
  source 1..75: mol_type = other DNA
aaggccatatgtgtacagtcagaatccccggttactgcaatcacaatcctgaaacatctgtgctggcgcactaca

SEQ ID NO: 96890 - DNA, 75 bp, synthetic construct
  source 1..75: mol_type = other DNA
ggctgtcgttactgccatatggcctgcccgtatggcgcaccgcagtacaacgcaaccaaaggtcatatgaccaaa

SEQ ID NO: 96891 - DNA, 75 bp, synthetic construct
  source 1..75: mol_type = other DNA
atggctattgaaggcgctgcggcgactgttccattaagccccggtcaacgcctgaatggacttaatcacattgcg

SEQ ID NO: 96892 - DNA, 75 bp, synthetic construct
  source 1..75: mol_type = other DNA
caacaaatctcagcgctcactgaacgaagatgacctacttgaaaccatgataaagcttcagggaagctctgaggc

SEQ ID NO: 96893 - DNA, 75 bp, synthetic construct
  source 1..75: mol_type = other DNA
gtgttttccgtcgacgttttataaacgaattaatgcaggtgatcgcaggggagcgtgtgaggcgattcgctggtg

SEQ ID NO: 96894 - DNA, 75 bp, synthetic construct
  source 1..75: mol_type = other DNA
cacgaccggaagctgtcctcagccatgagccagcgcacgaaaggcatggtgcgtatggtcagccagacgtggctg

SEQ ID NO: 96895 - DNA, 75 bp, synthetic construct
  source 1..75: mol_type = other DNA
ggcgactccgtttccggcaccctgcatgtgcgtattgaagagcagaacggtcaggtgcaggaatatgacatcagc

SEQ ID NO: 96896 - DNA, 75 bp, synthetic construct
  source 1..75: mol_type = other DNA
aaaattgaagcctggatgcatgggccagtagttcctgaattgtatcgtaaatatagggactgtggtaacggagct

SEQ ID NO: 96897 - DNA, 75 bp, synthetic construct
  source 1..75: mol_type = other DNA
ctgcccgccttactggaagaagaactgaaccaggatatcgatgaactgcatttcgccccgttgaaaatcgaccag

SEQ ID NO: 96898 - DNA, 75 bp, synthetic construct
  source 1..75: mol_type = other DNA
tttaccaaaccgaatattgtgatcaaacccaatgccaacagccgcccaaccggggataccactggctatctggca

SEQ ID NO: 96899 - DNA, 75 bp, synthetic construct
  source 1..75: mol_type = other DNA
tccacaggggcttgatattccggacactccggaaaagcaacaacagcctgcagcaaaaccggaaaactatgctca

SEQ ID NO: 96900 - DNA, 75 bp, synthetic construct
  source 1..75: mol_type = other DNA
tgaaccaggatatcgatgaactgcatttcgccccgttgaaaatcgaccagcaactggcaaccgtagctgtgattc

SEQ ID NO: 96901 - DNA, 75 bp, synthetic construct
  source 1..75: mol_type = other DNA
gttgttgaccgccagatgagctacatgcgccagcaggtctcggcacgcatgctgcagcgctaccagaacaactat

SEQ ID NO: 96902 - DNA, 75 bp, synthetic construct
  source 1..75: mol_type = other DNA
tgcataagcgtgaagatggctttgtggtggttgatgaagatgtttgtatcggctgccgctactgccacatggctt

SEQ ID NO: 96903 - DNA, 75 bp, synthetic construct
  source 1..75: mol_type = other DNA
ggtgaagacagtgagattacccctcttcctgcacgaaccactgaccgcgatattgtccgggcgattatggaaggg

SEQ ID NO: 96904 - DNA, 75 bp, synthetic construct
  source 1..75: mol_type = other DNA
acaatctgaatcttaataatgcggacttcagtctgtcccgtaatgcatttatgaacgggaatatcagggccgtta

SEQ ID NO: 96905 - DNA, 75 bp, synthetic construct
  source 1..75: mol_type = other DNA
tgatattcctgaatttgttcgcggtatggtaatggttaaaaaagccgcagctatggcaaacaaagagctgcaaac

SEQ ID NO: 96906 - DNA, 75 bp, synthetic construct
  source 1..75: mol_type = other DNA
gacggaacaggtaatgatgtcatcagtgttgaagggaaatctgctgccgcaggaacatcctcctatacagggcat

SEQ ID NO: 96907 - DNA, 75 bp, synthetic construct
  source 1..75: mol_type = other DNA
gtgatcgctggcgcaaagaccgcgaaaaccgaagacattttgttcaacctgattacccagtacgttaaccaacaa

SEQ ID NO: 96908 - DNA, 75 bp, synthetic construct
  source 1..75: mol_type = other DNA
ctgacgagaaaaaggcgcttattacagcgatgaatcattttcgtgcagtagtgagcttatttcccaaacggctaa

SEQ ID NO: 96909 - DNA, 75 bp, synthetic construct
  source 1..75: mol_type = other DNA
cgtttatgggcttcgacgttccggcaatcctcggcgatcacgttaccctggatgccggtaccggtgccgttcaca

SEQ ID NO: 96910 - DNA, 75 bp, synthetic construct
  source 1..75: mol_type = other DNA
aaacgccacgctttacctttaccctggtcccgaaagcgaacccatccgcgctgctgccgtgaaaaaactggaagc

SEQ ID NO: 96911 - DNA, 75 bp, synthetic construct
  source 1..75: mol_type = other DNA
caggttttgaggtggtccgcaccacaaaaaacagtatcagcattgccgacccggacggggggcgaaacatccgac

SEQ ID NO: 96912 - DNA, 75 bp, synthetic construct
  source 1..75: mol_type = other DNA
gggtgtgacttacagccgtgtgtcgactttttccggggattatcttcaggtgaccgacaacaagggggatacgca

SEQ ID NO: 96913 - DNA, 75 bp, synthetic construct
  source 1..75: mol_type = other DNA
acgcgccttcgcgggatgataatcgtgaaaaattcacccctgcacagaacatgatttacacccgtcgacgcgccg

SEQ ID NO: 96914 - DNA, 75 bp, synthetic construct
  source 1..75: mol_type = other DNA
accggtgcctcctcttgaaaacctgaccctgcgccagcgtattaccgataaatacctggcaaatctggtcacctc

SEQ ID NO: 96915 - DNA, 75 bp, synthetic construct
  source 1..75: mol_type = other DNA
atcccagtggtttttacgcctggcttcagcagccgcattcacaacgccatcaggcagacctgagactgacaggac

SEQ ID NO: 96916 - DNA, 75 bp, synthetic construct
  source 1..75: mol_type = other DNA
tgctggtcggtgcggtcatgtacatgatgaccaaaaacgtcaagttcctggtcggctttgccatactctctgtat

SEQ ID NO: 96917 - DNA, 75 bp, synthetic construct
  source 1..75: mol_type = other DNA
gacttacagcgtgacgatacgtgttcgtaaatgtgaacacccatctttaaaagcctttctggaacggcacggtgg

SEQ ID NO: 96918 - DNA, 75 bp, synthetic construct
  source 1..75: mol_type = other DNA
cggcacgttgcccacaccagacagtaagcagacccgtctggtgcatgaggtgtggcgacatactgttaatcgcgt

SEQ ID NO: 96919 - DNA, 75 bp, synthetic construct
  source 1..75: mol_type = other DNA
ttttttagtacccgcattattaaccctgggggtctggataatcgcgctgcatctggcagattatcaatttcgcca

SEQ ID NO: 96920 - DNA, 75 bp, synthetic construct
  source 1..75: mol_type = other DNA
acagacgaagggcaactgatgaacgtcaatgccgaccaggcggcgacggcgctggcggcaacgctgggcgcggat

SEQ ID NO: 96921 - DNA, 75 bp, synthetic construct
  source 1..75: mol_type = other DNA
aaatcctcactctgtaatgcactgtttcagggggaggtcaccccggtcagtgatgttcacgccggcacccgggaa

SEQ ID NO: 96922 - DNA, 75 bp, synthetic construct
  source 1..75: mol_type = other DNA
tggcgatgccaacgtgcaaaaaatgcgctttgacttactgcctgcatatgtgtgctttaaccctcacatgggcgg

SEQ ID NO: 96923 - DNA, 75 bp, synthetic construct
  source 1..75: mol_type = other DNA
tgtacgcagggtgaccgttatctggagctggcagagaaacgcgaggccaacgagtcgtttgtctatggctggatg

SEQ ID NO: 96924 - DNA, 75 bp, synthetic construct
  source 1..75: mol_type = other DNA
accggcttgccgtcagactgtcgatgattattggtcgtctggtggcaggcgaaacgctggatatgcgcaaactgg

SEQ ID NO: 96925 - DNA, 75 bp, synthetic construct
  source 1..75: mol_type = other DNA
actactcgcttgatgcacagaccggagtgattaccaaccttggtaagagcattgccgcagatgcaacggtgaagg

SEQ ID NO: 96926 - DNA, 75 bp, synthetic construct
  source 1..75: mol_type = other DNA
ccatacaaatttcccggaaataaaccataattcatcagggataaaaacggaattgaagtcagaaaaagacgaaca

SEQ ID NO: 96927 - DNA, 75 bp, synthetic construct
  source 1..75: mol_type = other DNA
ggatacgagaaaacgtctgaagggctggctgccagtggcctgtattaatccagagagaaagggacaggcatcacg

SEQ ID NO: 96928 - DNA, 75 bp, synthetic construct
  source 1..75: mol_type = other DNA
agggattatggctttaccatgttctggagcctgaaacctgggccagaatgtgtgcccgggtctcaggagcagcca

SEQ ID NO: 96929 - DNA, 75 bp, synthetic construct
  source 1..75: mol_type = other DNA
tcggggagataaaaggccgtcaggatgtgattcaggcgctcacagaggcagggcttgaagtggtcagggtgacgc

SEQ ID NO: 96930 - DNA, 75 bp, synthetic construct
  source 1..75: mol_type = other DNA
aaagcgcagccagcagtcagtgacgcagagaaggaaatgttcatcaacaatctccgcgccgtctgtcataacttc

SEQ ID NO: 96931 - DNA, 75 bp, synthetic construct
  source 1..75: mol_type = other DNA
tgttagtggtggtgggattatttctcaggttccgaaaggggcggcaaggctggctgccgccgcagggcttggtgc

SEQ ID NO: 96932 - DNA, 75 bp, synthetic construct
  source 1..75: mol_type = other DNA
tttgcgcccggtattacgggcgcactgagggcgtcgttgaaacggtgctgcaggcgaatccggggctgtcggagc

SEQ ID NO: 96933 - DNA, 75 bp, synthetic construct
  source 1..75: mol_type = other DNA
taccggagagctacggcgaacaggttcaccgcgtaggggaacgattcgccatactggaggccgcgcttgtgctgt

SEQ ID NO: 96934 - DNA, 75 bp, synthetic construct
  source 1..75: mol_type = other DNA
caatcgtcacaaccgatgcgtggcatctggctggccacggtgtctcgcctcgactggccaccggtttcctcggtt

SEQ ID NO: 96935 - DNA, 75 bp, synthetic construct
  source 1..75: mol_type = other DNA
acttccttttaccgacaggtgcatgaacgtattactgagcgtaatcacatggccagtccgtcctcgccggtggtg

SEQ ID NO: 96936 - DNA, 75 bp, synthetic construct
  source 1..75: mol_type = other DNA
ccgccggtaatgaccttgatgtgattggtgccaattacaacaccacgcgcctgactatcaccccggcagatgatt

SEQ ID NO: 96937 - DNA, 75 bp, synthetic construct
  source 1..75: mol_type = other DNA
ttgccgttcaggcaatcacaacggggaaaaatatcattgagggcgatggtattgaacgttatgagctggactgga

SEQ ID NO: 96938 - DNA, 75 bp, synthetic construct
  source 1..75: mol_type = other DNA
atgaacgcaaaaatcagatacagcctgtcggctactgtactagtgctgattggtgcaggcgcgtctgctcctcaa

SEQ ID NO: 96939 - DNA, 75 bp, synthetic construct
  source 1..75: mol_type = other DNA
tatctggaggatatggaataaaacaagggggagatgctatttctggaaatcaaatcactttgaataataacggta

SEQ ID NO: 96940 - DNA, 75 bp, synthetic construct
  source 1..75: mol_type = other DNA
ttgacatccgggtgccggaccatctgataatcggtggcagccaggttttctcctttgcggaacacggtctgcttt

SEQ ID NO: 96941 - DNA, 75 bp, synthetic construct
  source 1..75: mol_type = other DNA
taatggtgatattaaactagctagtatacctgttaatggtacaaatgaattaattattaaaaacatcaataacgc

SEQ ID NO: 96942 - DNA, 75 bp, synthetic construct
  source 1..75: mol_type = other DNA
tcttgggctaatttccatcgttgcaatttatccgcgtcagacggtgaattttttctattcgacagcagttcagat

SEQ ID NO: 96943 - DNA, 75 bp, synthetic construct
  source 1..75: mol_type = other DNA
acggtcagggtgttgattacggtagtggatcagctggcgacggctgggttgctataggcaaaggggcgaaagcaa

SEQ ID NO: 96944 - DNA, 75 bp, synthetic construct
  source 1..75: mol_type = other DNA
ggtgacaccacgctgaacgcagccaccacggacaaccggggcagtctgctttcggccggcacgctctcccttgat

SEQ ID NO: 96945 - DNA, 75 bp, synthetic construct
  source 1..75: mol_type = other DNA
caaccaataattttcgggaaatcgcggaaacgtcaaccaactatccggtaattcctagtgaggtgttgtccgcaa

SEQ ID NO: 96946 - DNA, 75 bp, synthetic construct
  source 1..75: mol_type = other DNA
aaggtgcaactacgtgaatatggacgttcagtgaaccatgaatgtactttcgtgtttaaccctcaagtggttaga

SEQ ID NO: 96947 - DNA, 75 bp, synthetic construct
  source 1..75: mol_type = other DNA
ttggtgagcgtgaagttccggatgattgctattatggtgttcagacacttcgtggtgaggataatttccatatta

SEQ ID NO: 96948 - DNA, 75 bp, synthetic construct
  source 1..75: mol_type = other DNA
ctcgccgtcacctcaaccgccatgccgatgacgcaagtggaagatatggtggaaacccgcgtcgcgcagaaaatc

SEQ ID NO: 96949 - DNA, 75 bp, synthetic construct
  source 1..75: mol_type = other DNA
ctgccgttatcggttttcgatccccaggactaccatccactgctaattaccgtttccggaaaaaacgttaactga

SEQ ID NO: 96950 - DNA, 75 bp, synthetic construct
  source 1..75: mol_type = other DNA
cgatatatcactcaggatccgattggactgaaggggggatggaacctgtatggatatcaattgaatccgatatca

SEQ ID NO: 96951 - DNA, 75 bp, synthetic construct
  source 1..75: mol_type = other DNA
tcgatgagcttaacgccctgctggccggagaatcgctgccggctatcgacacccgctatgatttccgctcgtatt

SEQ ID NO: 96952 - DNA, 75 bp, synthetic construct
  source 1..75: mol_type = other DNA
tttcagatatctggttgacccactgatgctgggcgtatccaacagtgttctctaccagctgacggactatatcgg

SEQ ID NO: 96953 - DNA, 75 bp, synthetic construct
  source 1..75: mol_type = other DNA
atgaaagtgttagccgtgctgttagtgttgtccgtgctcgggctgctgtggttgcgccatgagaacggcaattta

SEQ ID NO: 96954 - DNA, 75 bp, synthetic construct
  source 1..75: mol_type = other DNA
ggaaaatctggctaaggctggagttttccgatgggttacaaatgtccatgaacacaaaaggtattactatacctt

SEQ ID NO: 96955 - DNA, 75 bp, synthetic construct
  source 1..75: mol_type = other DNA
cgatgatttccaccgggaactacccgcaggcggtcctggacagtgtgctcgataaccttaatcaggcgcagcaac

SEQ ID NO: 96956 - DNA, 75 bp, synthetic construct
  source 1..75: mol_type = other DNA
gcggattttggcgctgagtttattagtcgctatttgaaagctaataacttaagggatatttctgattgtagggaa

SEQ ID NO: 96957 - DNA, 75 bp, synthetic construct
  source 1..75: mol_type = other DNA
cgcgttctgctgcaactggctctgacgcaaaccaaagatccgcagcagatccagcagatcttcaatcagtactaa

SEQ ID NO: 96958 - DNA, 75 bp, synthetic construct
  source 1..75: mol_type = other DNA
gttgaagtgaaaagcgttacgacagttgaagaactgcttgcccagcaaaaagcgtgcgatgctgcgccgaccctg

SEQ ID NO: 96959 - DNA, 75 bp, synthetic construct
  source 1..75: mol_type = other DNA
cgctggcttatcgtggcgaaaaagcacgcctccagcattatctcaatgaaaataagccgctgtttaccacggacg

SEQ ID NO: 96960 - DNA, 75 bp, synthetic construct
  source 1..75: mol_type = other DNA
ggctgcacacccgcaccgcctgtgccagcgccggtgattgtggtcagcggatgcccgagggtgagcctttgcccg

SEQ ID NO: 96961 - DNA, 75 bp, synthetic construct
  source 1..75: mol_type = other DNA
ctcttccagcgggcctgacagtagcggcggttggtaaaatgtctgccagcgagttgtcagagttgaaggctctaa

SEQ ID NO: 96962 - DNA, 75 bp, synthetic construct
  source 1..75: mol_type = other DNA
tagttatggccggtggtacaggcagtcgtctttggccactttctcgtgaactatatccaaagcagtttttacaac

SEQ ID NO: 96963 - DNA, 75 bp, synthetic construct
  source 1..75: mol_type = other DNA
atccgtgcgaaaaaccggcagaaatgctgcagcagataatcagcgcaagtagtcgtcctggtgatctggttgcgg

SEQ ID NO: 96964 - DNA, 75 bp, synthetic construct
  source 1..75: mol_type = other DNA
gtcagttccggcagcctgaacaacggtgggacactggttgccgggcgcgatgccacggtgaaaaccgggacattc

SEQ ID NO: 96965 - DNA, 75 bp, synthetic construct
  source 1..75: mol_type = other DNA
acaaccccgaccacatagaagctctgcgagcgacaaaggaagttatccctgctcctgctcctgctcctgctcctg

SEQ ID NO: 96966 - DNA, 75 bp, synthetic construct
  source 1..75: mol_type = other DNA
acaacgccaacaacaactcggctggacgctgatggaggacgccgggcgtggttggcggcgtacagttccctctcc

SEQ ID NO: 96967 - DNA, 75 bp, synthetic construct
  source 1..75: mol_type = other DNA
gtcagtctgccgttatcggttttcgatccccaggactaccatccactgctgattaccgtttccggaaaaaatgtt

SEQ ID NO: 96968 - DNA, 75 bp, synthetic construct
  source 1..75: mol_type = other DNA
ttgagtaaaggtgcagacatactgcgtcagctcgacgacgaagtcgaaagcatttataccaactggtacttatat

SEQ ID NO: 96969 - DNA, 75 bp, synthetic construct
  source 1..75: mol_type = other DNA
accgcggcagacttgtcagcgatgacgtgctgacgctcagtgccacgcagataaacaacagcggtaccctctccg

SEQ ID NO: 96970 - DNA, 75 bp, synthetic construct
  source 1..75: mol_type = other DNA
gtgcttccgcaatgctatagcatgttgcatcgcgtcgattttgacgagccttaccacactgaaatggtttacagg

SEQ ID NO: 96971 - DNA, 75 bp, synthetic construct
  source 1..75: mol_type = other DNA
ttgagggggaccgcatccgctggggataccggggaggcacgcttgatatcaacggcaatgatatgaccttccacc

SEQ ID NO: 96972 - DNA, 75 bp, synthetic construct
  source 1..75: mol_type = other DNA
gaagctgacgaaggaaaaatgcgctcaggttaatgccattgaacgtgacagggcgctggcgtgggtggagaaaaa

SEQ ID NO: 96973 - DNA, 75 bp, synthetic construct
  source 1..75: mol_type = other DNA
ccgccgagcaataccacagcatttcgccgaaaggcgaagctgccagcaacccggaagtgatcgcccgcaccctgc

SEQ ID NO: 96974 - DNA, 75 bp, synthetic construct
  source 1..75: mol_type = other DNA
ctcgtttccggcctgatgcatcacgatattctgaccggaagcgcaaaatcttttgccgatttaaacacgcaggtt

SEQ ID NO: 96975 - DNA, 75 bp, synthetic construct
  source 1..75: mol_type = other DNA
caggccgccggctatgcttacggtggctccctgtatgcccgtactcaggtcaaaaatgttcagctgatttccatg

SEQ ID NO: 96976 - DNA, 75 bp, synthetic construct
  source 1..75: mol_type = other DNA
atggctcaggttatcgattatgccattgatgactggcgtggttttgtcgataccacggttactgaaggccagccc

SEQ ID NO: 96977 - DNA, 75 bp, synthetic construct
  source 1..75: mol_type = other DNA
tcgcctccatgcgcctgtttgcccgattatctctggatagcgccctgccggatcgcaccaccatcatgaatttcc

SEQ ID NO: 96978 - DNA, 75 bp, synthetic construct
  source 1..75: mol_type = other DNA
cctatagctgctgggtttaagggacttcttccctataccagcaagaaacgcttggcttgttcggatagtgatgca

SEQ ID NO: 96979 - DNA, 75 bp, synthetic construct
  source 1..75: mol_type = other DNA
tcgcatggcacagacgccaaataaattaaaacacggtcatgttgatgacgatgcgctgacctttgccatctttac

SEQ ID NO: 96980 - DNA, 75 bp, synthetic construct
  source 1..75: mol_type = other DNA
ctgacggtgacacctgctgatgatgacgctgtgccgcccgttgcggcagtgatggaaagcgatgaagcgttgcgc

SEQ ID NO: 96981 - DNA, 75 bp, synthetic construct
  source 1..75: mol_type = other DNA
gtgaaaaaagcagctgcgatggctaataaggagttaggtacaattcctgctgatgttgcggatgctttaatctgg

SEQ ID NO: 96982 - DNA, 75 bp, synthetic construct
  source 1..75: mol_type = other DNA
agaggcacatcgtgagcaggaacgggcggcgcagcatcagaaagcgctggagctggaacgatctcagcgacagcg

SEQ ID NO: 96983 - DNA, 75 bp, synthetic construct
  source 1..75: mol_type = other DNA
ctcccgaactcaggatgcctcactggaacatgaatgtgtggaaaacgtcagttccgtcgaaatcatgaaggcgac

SEQ ID NO: 96984 - DNA, 75 bp, synthetic construct
  source 1..75: mol_type = other DNA
taccagcagtattgtgatgatatgcgtcacgaagcccagcgttacatatacagtcgcggcttaaatccaaccgta

SEQ ID NO: 96985 - DNA, 75 bp, synthetic construct
  source 1..75: mol_type = other DNA
tcaacgtgggtcagttgaaagtaacggatgcgcaggtttcccagaatacccagagcattactaacctggataatc

SEQ ID NO: 96986 - DNA, 75 bp, synthetic construct
  source 1..75: mol_type = other DNA
gcattcgcttcttgtggcacattatttatacagaatatccaagcgtaagattgcaaaggcgcgtggaaaggatga

SEQ ID NO: 96987 - DNA, 75 bp, synthetic construct
  source 1..75: mol_type = other DNA
gcagaacgcacagcagctccctgccctaagtcactgttgcaggccctgctcgacaatgcattaacacaccatccc

SEQ ID NO: 96988 - DNA, 75 bp, synthetic construct
  source 1..75: mol_type = other DNA
atgagcgaacagctttccctctccgtctctgacctgacgcgtatcctggtcgaagaggcattaagtgagatgttt

SEQ ID NO: 96989 - DNA, 75 bp, synthetic construct
  source 1..75: mol_type = other DNA
catgggattacagaaccaataatccctgccgtctgggtaagaaaatcattattgaaaacctgctgtaccgctgga

SEQ ID NO: 96990 - DNA, 75 bp, synthetic construct
  source 1..75: mol_type = other DNA
gataaaccggaagaagcgaaaaggaatatcacccgtcttgccgaccgtaaaatctgggaccgcctgatgacggat

SEQ ID NO: 96991 - DNA, 75 bp, synthetic construct
  source 1..75: mol_type = other DNA
tggttcacaatggtattgaatacggagatatgcagctcattgctgaagcgtattctctgctcaaaggtggcctga

SEQ ID NO: 96992 - DNA, 75 bp, synthetic construct
  source 1..75: mol_type = other DNA
aagcgatgggaaaagccaattctgttgaactggcggcgcggcttgatatcagccgtgaagaagttcttaacgaac

SEQ ID NO: 96993 - DNA, 75 bp, synthetic construct
  source 1..75: mol_type = other DNA
cccaaattttccatcaaagacacccaaaaacggatcacggaacccaaaggaacccaaagatctaaaccccacaca

SEQ ID NO: 96994 - DNA, 75 bp, synthetic construct
  source 1..75: mol_type = other DNA
aagaccgtgaacgcttcctgaacgcccgcgacaccctgcgagcgttgctcgataacaatatcgttccggtaatca

SEQ ID NO: 96995 - DNA, 75 bp, synthetic construct
  source 1..75: mol_type = other DNA
aatgcctggctgaccacacagcgcaaggcgtgggatgttctcagtgatttctgctcggcgatgcgctgtatgccg

SEQ ID NO: 96996 - DNA, 75 bp, synthetic construct
  source 1..75: mol_type = other DNA
ccgaaaggagaaacaggtgcggctggcccggtgggggcaaccggacctcagggaccgaagggcgacccgggggag

SEQ ID NO: 96997 - DNA, 75 bp, synthetic construct
  source 1..75: mol_type = other DNA
gacctttcttgaccccaaagatgccacacaggttcaggggctgtttcagcatttgcaggtcaggtttggtgacgg

SEQ ID NO: 96998 - DNA, 75 bp, synthetic construct
  source 1..75: mol_type = other DNA
tttggaaaattcatagcagataacgaagatgaaatgcgtcgcttgggaatttctcctgagtctgttgccgaaatg

SEQ ID NO: 96999 - DNA, 75 bp, synthetic construct
  source 1..75: mol_type = other DNA
gaccatcagccaggctgtccgtggcggaaaattacctgcaggctggtatcaggttcctgtgacaaaggaaaccct

SEQ ID NO: 97000 - DNA, 75 bp, synthetic construct
  source 1..75: mol_type = other DNA
cgtcacgggattttcgacgacgggctgcgttgtgggggatggctttgccggagacagaatttacacctgctgaac

SEQ ID NO: 97001 - DNA, 75 bp, synthetic construct
  source 1..75: mol_type = other DNA
taactacggtgtagcatacgacatcggtgcgtggactgacgttctgccagaattcggtggtgatacctggaccca

SEQ ID NO: 97002 - DNA, 75 bp, synthetic construct
  source 1..75: mol_type = other DNA
catggcaagctaaagcggatcatcagggccacattaggattcaaatctatgaagacggcttatgccacaattaaa

SEQ ID NO: 97003 - DNA, 75 bp, synthetic construct
  source 1..75: mol_type = other DNA
ctgaaaatgaaccttcaggggtacgactaccgccgcgatgatgagtttatgatgtggggatcggcagatctccgg

SEQ ID NO: 97004 - DNA, 75 bp, synthetic construct
  source 1..75: mol_type = other DNA
accggactgcaactggacgaagaaaggaagcaagtgatgaaaattatgcagaaggtgtgggaagacgacagctgg

SEQ ID NO: 97005 - DNA, 75 bp, synthetic construct
  source 1..75: mol_type = other DNA
cttagaaagtcagagtgttaatgtcaaaagtaataatgcaaataactggcatctgaccattatcgatgaccatgg

SEQ ID NO: 97006 - DNA, 75 bp, synthetic construct
  source 1..75: mol_type = other DNA
gaaaaattagcccggcaaaaaatgacccgttaacagttgacccgtcaaatattgccccctcaacggttgacccgt

SEQ ID NO: 97007 - DNA, 75 bp, synthetic construct
  source 1..75: mol_type = other DNA
ggctatcgagacgatgcggaacgcatcgctgatgagcagtcagagcttgttaagaagatggtgtttgatacgctg

SEQ ID NO: 97008 - DNA, 75 bp, synthetic construct
  source 1..75: mol_type = other DNA
gcctaataaattacccagtaataaggaaagtattttttatcttaatgttctggatattccaccgaatagcccaga

SEQ ID NO: 97009 - DNA, 75 bp, synthetic construct
  source 1..75: mol_type = other DNA
caaccgcctgacagaaaatgtctcaatgacggtggccgggctacaggtaccaggcccgctgatgggcggtccggc

SEQ ID NO: 97010 - DNA, 75 bp, synthetic construct
  source 1..75: mol_type = other DNA
ggtgcagtggtgtccggtactgcgagtggtgactggacgctctcctgtgtccgtgggcaggtgaacagcatcacg

SEQ ID NO: 97011 - DNA, 75 bp, synthetic construct
  source 1..75: mol_type = other DNA
gcaaaaagtttcgcgtggctgtctccggtgtgacggcagacgggcgcgaaatcaacggcgacatgctgaaagctg

SEQ ID NO: 97012 - DNA, 75 bp, synthetic construct
  source 1..75: mol_type = other DNA
gctgaattgtcaagaaagacggcagaaagtgcagccggtaatgcagccagggatgcaacgaccgcaacagaaaaa

SEQ ID NO: 97013 - DNA, 75 bp, synthetic construct
  source 1..75: mol_type = other DNA
ggcgatgtcatgaccacgcgactggaagacggttgggtgaaaagtgaagtaaaagggatcacatctgcaaagaga

SEQ ID NO: 97014 - DNA, 75 bp, synthetic construct
  source 1..75: mol_type = other DNA
atttcgtgaatgaactttgcgataaagcagatgaagatatggtccaggatatgattgacgccattcgacgccatc

SEQ ID NO: 97015 - DNA, 75 bp, synthetic construct
  source 1..75: mol_type = other DNA
ggtgcgcagaatatgatgaatggggcaacctgctgaatgaagagaacccgcatcagctgcagcagcttatccggc

SEQ ID NO: 97016 - DNA, 75 bp, synthetic construct
  source 1..75: mol_type = other DNA
cacggtgctgcgagtactggcatctggtccactggcgatgctgcgcgttgccctgtatgccatatctggtctgtt

SEQ ID NO: 97017 - DNA, 75 bp, synthetic construct
  source 1..75: mol_type = other DNA
tgttggaagaagcggcgcgtcacgctgaggaggcgaagaagaatgccggagaggcggagacgtccgcgaggaatg

SEQ ID NO: 97018 - DNA, 75 bp, synthetic construct
  source 1..75: mol_type = other DNA
ttggaacattgaaatcagaatgttattacctcaatgaatataaaaatgtggaggacttaaagcgagacatcattg

SEQ ID NO: 97019 - DNA, 75 bp, synthetic construct
  source 1..75: mol_type = other DNA
acccgcatccagacgatttatcagccggggagcttcacgccactcatcagagttgaaaccgccaccggtgagctg

SEQ ID NO: 97020 - DNA, 75 bp, synthetic construct
  source 1..75: mol_type = other DNA
attaatcccttccctactggagaaattcaattcagaaattatttaatctgtcgccttcttttgaattatggtttg

SEQ ID NO: 97021 - DNA, 75 bp, synthetic construct
  source 1..75: mol_type = other DNA
acgcgggggttttacttaatggtaaaaccgtcagaaaactgatgaaggaactgggtattagcagcctgatccgcg

SEQ ID NO: 97022 - DNA, 75 bp, synthetic construct
  source 1..75: mol_type = other DNA
tgttccgtttggtaatgccgggatcggttacgtcaacgaatacggctcaccagcgcaaaacatccccccacgccc

SEQ ID NO: 97023 - DNA, 75 bp, synthetic construct
  source 1..75: mol_type = other DNA
tatccccgctggcgcggggaacacaattgagacgttccacgcaattaaacaagccgcggtttatccccgctggcg

SEQ ID NO: 97024 - DNA, 75 bp, synthetic construct
  source 1..75: mol_type = other DNA
caggttcatgatggataatgagcaggagatgcgtcgtttaggtatccctccagaaactattgctgaaatgcaggt

SEQ ID NO: 97025 - DNA, 75 bp, synthetic construct
  source 1..75: mol_type = other DNA
caaagatgccacacaggttcaggggctgtttcagcatttgcaggtcaggtttggtgacgggccgtggcaggatgt

SEQ ID NO: 97026 - DNA, 75 bp, synthetic construct
  source 1..75: mol_type = other DNA
gaagaagtatagagttttattgaaccgcattgacacatcaacggcaccggatattgactggccaacaataccagc

SEQ ID NO: 97027 - DNA, 75 bp, synthetic construct
  source 1..75: mol_type = other DNA
atgacagcccgccggttcaggcgggcttttttgtgcacagaaaacccccagctaggctgggggttccggaaagct

SEQ ID NO: 97028 - DNA, 75 bp, synthetic construct
  source 1..75: mol_type = other DNA
caaaatggcgattgtcacggcgcgtcacgaaatgtcacgcacatgtcacgacaagtcacgacagataaagataca

SEQ ID NO: 97029 - DNA, 75 bp, synthetic construct
  source 1..75: mol_type = other DNA
ggcgttaagcaatgccggttttgttaagcgcagccttaaggaactggaaaatggcaacgtcccggaaatcagtca

SEQ ID NO: 97030 - DNA, 75 bp, synthetic construct
  source 1..75: mol_type = other DNA
ttatggcggagtggtgaaacagacgattgctgcgcgtgtcaatgtagaaacaggtgaggttgtatcaattataag

SEQ ID NO: 97031 - DNA, 75 bp, synthetic construct
  source 1..75: mol_type = other DNA
cagaacagatggagacgttgtcggtgcatgcagagctggggaaagcgttcagctatatgctgaaccaccgtgaat

SEQ ID NO: 97032 - DNA, 75 bp, synthetic construct
  source 1..75: mol_type = other DNA
tatgtgaactgctgacgaaagaaaccacattttcagatatcgtgaatatattgagatcgctatttccaaaagaga

SEQ ID NO: 97033 - DNA, 75 bp, synthetic construct
  source 1..75: mol_type = other DNA
aatcattcagtcctcttcacaatcggagcaaaaaagtgatgaggagacaaaaaagaatgcgatgaagttaataaa

SEQ ID NO: 97034 - DNA, 75 bp, synthetic construct
  source 1..75: mol_type = other DNA
agcagccaaaaggagccggcaaagcccctgcgtttcagatccgaatcaatcctgaactcaaagaacagatggctg

SEQ ID NO: 97035 - DNA, 75 bp, synthetic construct
  source 1..75: mol_type = other DNA
gaatggttgttacacggtcaggaacagacgatgcaggtattttccgctatccgtgccgcaaatcgtgccgcgcgg

SEQ ID NO: 97036 - DNA, 75 bp, synthetic construct
  source 1..75: mol_type = other DNA
tccacctgtaccactgcgaccatcgcggcctgccgctggcccttatcagcaaggaagggacaacagaatggtgcg

SEQ ID NO: 97037 - DNA, 75 bp, synthetic construct
  source 1..75: mol_type = other DNA
aagcgggtcaggccgtgaacaacctgcaaaaaatctttgatgacaagccggacagggctatcgcttcacttaata

SEQ ID NO: 97038 - DNA, 75 bp, synthetic construct
  source 1..75: mol_type = other DNA
gtcaatctcaggcaagccctgaaaagagttaaagccaacaaaggtgcagcgggagtcgatggtatgcgcgtaagc

SEQ ID NO: 97039 - DNA, 75 bp, synthetic construct
  source 1..75: mol_type = other DNA
aagaactgtgtcatcagagggaaactgtctgcaaaccagattgaaggcgatctcgttaaaacagtgggtaaggct

SEQ ID NO: 97040 - DNA, 75 bp, synthetic construct
  source 1..75: mol_type = other DNA
atgtctaaagaattttatttaaaaccgatggccacgattttaatttctgcggttattgctaccgctgcctcggcg

SEQ ID NO: 97041 - DNA, 75 bp, synthetic construct
  source 1..75: mol_type = other DNA
ttgaccgcctgcgggttaccttcggggtgcagtcactggtggagaccacctcaaagggtgaccgtaacccggcaa

SEQ ID NO: 97042 - DNA, 75 bp, synthetic construct
  source 1..75: mol_type = other DNA
ccgctgcgaccctgactgctctttctttttctgctcatgcggtagaaaaaggaaccattatgattatggtcaatt

SEQ ID NO: 97043 - DNA, 75 bp, synthetic construct
  source 1..75: mol_type = other DNA
caaccagccgtgacggcattcactttgagaaacagggctgcgtgctgacgccaccggaaggcatcatgcatttcc

SEQ ID NO: 97044 - DNA, 75 bp, synthetic construct
  source 1..75: mol_type = other DNA
gtggatttgcccctatatttccagacatctgttatcacttaacccattacaagcccgctgccgcagatattcccg

SEQ ID NO: 97045 - DNA, 75 bp, synthetic construct
  source 1..75: mol_type = other DNA
tgtattgcgagagtacatcaatttgggttggctgataagcctagttacaacagtaaggctgtggtttatcctgtt

SEQ ID NO: 97046 - DNA, 75 bp, synthetic construct
  source 1..75: mol_type = other DNA
ggaacccggattgccatccctctggctctgcgttgcgataaattaaatctcaccctagatgatgtggtgtcatcc

SEQ ID NO: 97047 - DNA, 75 bp, synthetic construct
  source 1..75: mol_type = other DNA
tggtggtgattgacgttccccgcgcccctgctgaactggagcgcatagaggaggccgggaacaagacggaaaatc

SEQ ID NO: 97048 - DNA, 75 bp, synthetic construct
  source 1..75: mol_type = other DNA
agggacagctaagcgcggcgggatggttaagccagcaacattaaccgttgcatttaaaaaagcccgggattctgt

SEQ ID NO: 97049 - DNA, 75 bp, synthetic construct
  source 1..75: mol_type = other DNA
gcgtaattctatcggcaccttagcggctggcgcacgccttgcgtcatcgtctccagaagcaatgcaatcatggct

SEQ ID NO: 97050 - DNA, 75 bp, synthetic construct
  source 1..75: mol_type = other DNA
acgaacagcacgtctgaaacgctggcagcgacaccaaaagctgttaaggcggtaatggatgaaacgaacaagaaa

SEQ ID NO: 97051 - DNA, 75 bp, synthetic construct
  source 1..75: mol_type = other DNA
tgccctggctatagggtatctggccgttgccaaagaaaagtggacttccacagctatcgttactcaacctgatgt

SEQ ID NO: 97052 - DNA, 75 bp, synthetic construct
  source 1..75: mol_type = other DNA
gagagaatgctaagtatgctttcggactcaggtgaagcacaatcgcaagagagtattcagaacaaaatatctcaa

SEQ ID NO: 97053 - DNA, 75 bp, synthetic construct
  source 1..75: mol_type = other DNA
tgcgtcgacgcatgccaccggtactgcgtcgccgggccattgatgcgctgctgcaggggctgtgttttcactatg

SEQ ID NO: 97054 - DNA, 75 bp, synthetic construct
  source 1..75: mol_type = other DNA
cgcgaaattaaccaggcgcgagtgaagaagttttaccagtacctcgtcaatgcataccaaaataaagagcccttc

SEQ ID NO: 97055 - DNA, 75 bp, synthetic construct
  source 1..75: mol_type = other DNA
atagtttaggaagcaaagttaaggctattattcactcggacatatctgcagcatggagactttgtgatatttctt

SEQ ID NO: 97056 - DNA, 75 bp, synthetic construct
  source 1..75: mol_type = other DNA
acctctactgagtttatggctaatgcgcgggaaggcgattttgaccgctcattctctgatggcgttctcgaagat

SEQ ID NO: 97057 - DNA, 75 bp, synthetic construct
  source 1..75: mol_type = other DNA
gcttgctctggccccgcgtctggataaacgagcggtggatgcactctctgtggctgtggagcacctgtgtaaact

SEQ ID NO: 97058 - DNA, 75 bp, synthetic construct
  source 1..75: mol_type = other DNA
aattttcggatatccgggatggttatcttcatgtcgaacagcaaaaaacaggaacccggattgccatccctctgg

SEQ ID NO: 97059 - DNA, 75 bp, synthetic construct
  source 1..75: mol_type = other DNA
gtcgaactacacccagccgcacccgttcgcacccgattccgttttccatctgcttgagcccgatatcaatcagga

SEQ ID NO: 97060 - DNA, 75 bp, synthetic construct
  source 1..75: mol_type = other DNA
agggaccattaccgtcagggtttatgacgatcagccgtttgaccggcaaattgttattccggcggtggcattcag

SEQ ID NO: 97061 - DNA, 75 bp, synthetic construct
  source 1..75: mol_type = other DNA
tgttcgttttgatggtggtcacaaaagagctgactttttaatggacaaattagtggaatgggtaacattcagacc

SEQ ID NO: 97062 - DNA, 75 bp, synthetic construct
  source 1..75: mol_type = other DNA
taccgcaatctgtgccccctgtatcccaaaacggtaattcgcattcgcaaaggtagctctaacggtgtggaacta

SEQ ID NO: 97063 - DNA, 75 bp, synthetic construct
  source 1..75: mol_type = other DNA
ctatataattctttaccgtgtagccactttaagcattgagatcgtgagtgtagtacacgccagacgccaattccc

SEQ ID NO: 97064 - DNA, 75 bp, synthetic construct
  source 1..75: mol_type = other DNA
cattgaaacgccgaacctgggcgctgtttatgttcttctttttgccgggcctgttaatggcgtcctgggcaaccc

SEQ ID NO: 97065 - DNA, 75 bp, synthetic construct
  source 1..75: mol_type = other DNA
gtccgggagttatctgaggaatttaacgtttgcgaaaaaactatccgtcgtgatcttactcagcgcctgtcctat

SEQ ID NO: 97066 - DNA, 75 bp, synthetic construct
  source 1..75: mol_type = other DNA
ggtcgcaggccctatccgctggaaaccatgctgcgtattcactgcatgcagcaatggtacaacctgagcgatgag

SEQ ID NO: 97067 - DNA, 75 bp, synthetic construct
  source 1..75: mol_type = other DNA
caaaaacggtaattcgtatccgcaaaggtagctctaacggtgtggaacttaccggactgcaactggacgaagaaa

SEQ ID NO: 97068 - DNA, 75 bp, synthetic construct
  source 1..75: mol_type = other DNA
gtaccgcccgggagacatgatttttgtcgatcctgaagtacctgcctgccacggtgacgacgttattgcattgat

SEQ ID NO: 97069 - DNA, 75 bp, synthetic construct
  source 1..75: mol_type = other DNA
gggtggtggcacatggtacacaggtacgcaaattcagcctggtgtcgaaaagtttattaaagattttaacgatgc

SEQ ID NO: 97070 - DNA, 75 bp, synthetic construct
  source 1..75: mol_type = other DNA
taccgcaatctgcgctccctgtatcccaaaacggtaattcgtatccgcaaaggtagctctaacggtgtggaactg

SEQ ID NO: 97071 - DNA, 75 bp, synthetic construct
  source 1..75: mol_type = other DNA
caatgcaacagccgcctactcagcaatcagcaggaggtagctacacgtcaaaatcaggcattcaatttacggtgg

SEQ ID NO: 97072 - DNA, 75 bp, synthetic construct
  source 1..75: mol_type = other DNA
gcaggtgattcgacacagcatcgccaacgaataccagggcttgttcgcgccgaaaggtgttcgacctgagacgtt

SEQ ID NO: 97073 - DNA, 75 bp, synthetic construct
  source 1..75: mol_type = other DNA
ggccaggcactgaaagagcgcattgatgcttcagcgctgcgtacggaggtcacgcaactggaagaagacatccgt

SEQ ID NO: 97074 - DNA, 75 bp, synthetic construct
  source 1..75: mol_type = other DNA
gctgcacggtgaagcgaaccataatgccgaagaaggcacggtcgatattgaatttcacggtgaagaaggggatta

SEQ ID NO: 97075 - DNA, 75 bp, synthetic construct
  source 1..75: mol_type = other DNA
aaatacaaccagcgacggcttgagtataacgatatgctggcgcgcgatcagcctgtgatggcggcgctgggaaaa

SEQ ID NO: 97076 - DNA, 75 bp, synthetic construct
  source 1..75: mol_type = other DNA
tgaacgaatgatgtacagacatatacctctgatacgtcttgttgccagtgagttgtcaccaaagaaatcacctga

SEQ ID NO: 97077 - DNA, 75 bp, synthetic construct
  source 1..75: mol_type = other DNA
tattcgactgtggcgtggtcccgcgcagcgttgcgtgaatcatatttctgaaccggataccgaaattccgccggg

SEQ ID NO: 97078 - DNA, 75 bp, synthetic construct
  source 1..75: mol_type = other DNA
gcagcagaagggcttatctccaacgtgctgcgtgtggagcggtcactggaaaggtgtgtgaagcaacagccaccg

SEQ ID NO: 97079 - DNA, 75 bp, synthetic construct
  source 1..75: mol_type = other DNA
gatgtagtccgtaatggtgatgaatttttcgaaacacagagccgcaatgtaaccgactggatgccgctaccagaa

SEQ ID NO: 97080 - DNA, 75 bp, synthetic construct
  source 1..75: mol_type = other DNA
tgccgggagtggagcgtcacagataacgccaggtacagtgatttcagttgtacgattgagcaggtggtgaactga

SEQ ID NO: 97081 - DNA, 75 bp, synthetic construct
  source 1..75: mol_type = other DNA
ctggcacccacacggaccgccgccaccgccgcgccaccataagaaagctcctcatgatcatcacggcggtcatgg

SEQ ID NO: 97082 - DNA, 75 bp, synthetic construct
  source 1..75: mol_type = other DNA
catcccccgagatttaaaggttaacgaaacaaacgctgaatatctggtgcgtaaatttgctgaagcggaggccaa

SEQ ID NO: 97083 - DNA, 75 bp, synthetic construct
  source 1..75: mol_type = other DNA
ttgctatggaaaaccgcccgcgatcaggacgaatttctgctgttgacgcgcaccggtgaaaaaatctggattaaa

SEQ ID NO: 97084 - DNA, 75 bp, synthetic construct
  source 1..75: mol_type = other DNA
cgctggatattctgattgcgtggctgcaggacaatatcgactgcgaatcgggaattatctttgacaacgatgagg

SEQ ID NO: 97085 - DNA, 75 bp, synthetic construct
  source 1..75: mol_type = other DNA
actgctttttgataaacagaaagcactgaaaagaattgaggagctggagggcgaacaaatcaaaaccgcccgcag

SEQ ID NO: 97086 - DNA, 75 bp, synthetic construct
  source 1..75: mol_type = other DNA
ccttttgatgaatacgcagaagtgcagaaactgccggtgatcgacgtggaattcagccatctggtggggatggat

SEQ ID NO: 97087 - DNA, 75 bp, synthetic construct
  source 1..75: mol_type = other DNA
aggagaaatcgggaagacacatctggcacaggggatgtgggagctgattgataacagccagcttgatgatgagat

SEQ ID NO: 97088 - DNA, 75 bp, synthetic construct
  source 1..75: mol_type = other DNA
ctgaaacccagaatatgactgtatttgctgatcacttcgttgctaataaagctcaaaacttcgaagctgttgcac

SEQ ID NO: 97089 - DNA, 75 bp, synthetic construct
  source 1..75: mol_type = other DNA
atgaagaaattaatcgaactccgccagcaaaaaaccgccctgaaaaaccagatgcgatccctgctggaaaaagcc

SEQ ID NO: 97090 - DNA, 75 bp, synthetic construct
  source 1..75: mol_type = other DNA
gtcatttcttcccaagctgactcgctgattaaaatttcgcggatctgggccgatttttttcccgcaaacacatcg

SEQ ID NO: 97091 - DNA, 75 bp, synthetic construct
  source 1..75: mol_type = other DNA
agtagctaaaaaacagtttattcaatatcactatgaactatcagaagcattaagaaatatccgaggtgaatatgt

SEQ ID NO: 97092 - DNA, 75 bp, synthetic construct
  source 1..75: mol_type = other DNA
gctggatgtggctgcacggcaccgggtgcagtttgcgatgccggaatctgatgcggttgtgatgctgaaacaatt

SEQ ID NO: 97093 - DNA, 75 bp, synthetic construct
  source 1..75: mol_type = other DNA
ctggtgaagcatgaccgatggggctacagcctgaactggggctggcggcgcgatcagttagccgatctggaacgt

SEQ ID NO: 97094 - DNA, 75 bp, synthetic construct
  source 1..75: mol_type = other DNA
gcatccgtcagcgtgacactggatacgcccgtcgtggaatgcacaaaccttctgaaaacagccgagattgacgtc

SEQ ID NO: 97095 - DNA, 75 bp, synthetic construct
  source 1..75: mol_type = other DNA
gtttgtacgcctgcacgcgccggactattcaccggtatctacgctaaccagtccggcccgtggaccaacaacgtc

SEQ ID NO: 97096 - DNA, 75 bp, synthetic construct
  source 1..75: mol_type = other DNA
atggacgttgagtacggtcagtacagcgtcattctgttggtggagggattcccgccgtcacatgccgggaccatc

SEQ ID NO: 97097 - DNA, 75 bp, synthetic construct
  source 1..75: mol_type = other DNA
cgatttgatgctgaagtccggcatgatggccttgatggatgcgcaggctcgtgaccagtggcataagaacttgga

SEQ ID NO: 97098 - DNA, 75 bp, synthetic construct
  source 1..75: mol_type = other DNA
gctacatgaatggatggtggagaagaatggcacgctgccgaaaaaatccagactggcgaaacgttcagctatatc

SEQ ID NO: 97099 - DNA, 75 bp, synthetic construct
  source 1..75: mol_type = other DNA
caatgtcaccacgattattatggggagcggtactgcacacactgccagaccgggcgtttcagtgaggagggggta

SEQ ID NO: 97100 - DNA, 75 bp, synthetic construct
  source 1..75: mol_type = other DNA
ggacgccgacaacatacatcagtgatttactggttgtggtcatgaaaaaatccacggcgggtatcagtatttcgt

SEQ ID NO: 97101 - DNA, 75 bp, synthetic construct
  source 1..75: mol_type = other DNA
aatcgggggcatgtactaatggtctttgcggcacactatccgctatgataggtccagataaatttgattctatag

SEQ ID NO: 97102 - DNA, 75 bp, synthetic construct
  source 1..75: mol_type = other DNA
gttggcgatctaaaaataatatttaatcgacaagatgataatgaaagcgtattaactgttaaatataaagataaa

SEQ ID NO: 97103 - DNA, 75 bp, synthetic construct
  source 1..75: mol_type = other DNA
acaaaaccaataatccctgttatttcggtaagaagattatcgttaacaatctggtgaagcatgacagatggggct

SEQ ID NO: 97104 - DNA, 75 bp, synthetic construct
  source 1..75: mol_type = other DNA
ccttctcttcatattggacagtggctggcgaaagtccaaaataagaaaagttttcaggacaaaagcctgtgtgat

SEQ ID NO: 97105 - DNA, 75 bp, synthetic construct
  source 1..75: mol_type = other DNA
atgtacgcaaaatcctttattgcatttgatggcaacggacgtctgacgggcgcccgtactgcacaggccgcacct

SEQ ID NO: 97106 - DNA, 75 bp, synthetic construct
  source 1..75: mol_type = other DNA
cgtttccgccgcgctggagctggaatcggaacccctgaacgttatcgctcaaaccatgtcgtttcgtgaaatgct

SEQ ID NO: 97107 - DNA, 75 bp, synthetic construct
  source 1..75: mol_type = other DNA
ataaggccatgctgctttgtaagtggggggtatttaacatgtgttgtcgctgtaatgtttgtattcgcagcgata

SEQ ID NO: 97108 - DNA, 75 bp, synthetic construct
  source 1..75: mol_type = other DNA
atgtgagcggcggcggtcacggtattgatatcaccggcgacagcgcgacggtggacaacaaaggcggcatgactg

SEQ ID NO: 97109 - DNA, 75 bp, synthetic construct
  source 1..75: mol_type = other DNA
atgatcaccccagtttcactgatggatgaccagatggtcgacatggcatttatcactcaactgaccggcctgacc

SEQ ID NO: 97110 - DNA, 75 bp, synthetic construct
  source 1..75: mol_type = other DNA
cattgagcgacataatctgaatctgagacaacatctggcaaggctgggacggaagtcactgtcgttctcaaaatc

SEQ ID NO: 97111 - DNA, 75 bp, synthetic construct
  source 1..75: mol_type = other DNA
tgattacagatgttcagattgccgagcgaaccagaaccagcgtcagaacggataatgttgcagctttgcgtcagg

SEQ ID NO: 97112 - DNA, 75 bp, synthetic construct
  source 1..75: mol_type = other DNA
gcgccgttaagtggaacggaaacaaccctgcccgcgccaccgcgtggcgtcgtgcagcgacgtttaacctttacc

SEQ ID NO: 97113 - DNA, 75 bp, synthetic construct
  source 1..75: mol_type = other DNA
cgtacatctggccgcaggctgttgagcaacaggttgccgggctgaaagaagaagtgccggaagaagcaaaagcgg

SEQ ID NO: 97114 - DNA, 75 bp, synthetic construct
  source 1..75: mol_type = other DNA
tccatttgcgccgctgtggctgcgtctgacgcttatcggcctgatccttctgtcttatgcgctgtatggcctgta

SEQ ID NO: 97115 - DNA, 75 bp, synthetic construct
  source 1..75: mol_type = other DNA
gtggcctggaaggagcctggtcgacatcgccaacccagttcacaatgcagtatctgaagaatttatataaatatg

SEQ ID NO: 97116 - DNA, 75 bp, synthetic construct
  source 1..75: mol_type = other DNA
aggaaccattaccgtcagggtttatgacgatcagccgtttgaccggcagattgttattccggcggtggcattcag

SEQ ID NO: 97117 - DNA, 75 bp, synthetic construct
  source 1..75: mol_type = other DNA
cagcgtaacgacgcacacaagttaattgaagagtgcatgattctggcgaatatctcggcggcgcgtttcgttgag

SEQ ID NO: 97118 - DNA, 75 bp, synthetic construct
  source 1..75: mol_type = other DNA
gaagttgaggacaatcgtaaagaagccaatgcgggaactgcatctgccatcgctatcgcctcacaaccacaggtg

SEQ ID NO: 97119 - DNA, 75 bp, synthetic construct
  source 1..75: mol_type = other DNA
taaccgtcacggtttacgatgaccagggcttcgaccggcagattatcattccaccggtactgtttcgcgggacga

SEQ ID NO: 97120 - DNA, 75 bp, synthetic construct
  source 1..75: mol_type = other DNA
actaattcttgatttacagaaacaatttggtgaaaaccgtatttcaattaaagatgttaactctttaacctctct

SEQ ID NO: 97121 - DNA, 75 bp, synthetic construct
  source 1..75: mol_type = other DNA
gatgcggtcattgacccgtatatgctggaacgcgctgaaattatgcgtggcccggtttccgtgctttacggtaaa

SEQ ID NO: 97122 - DNA, 75 bp, synthetic construct
  source 1..75: mol_type = other DNA
caaggcaaaaacgatcgtagcgatttcgataactacaccgaaggtaacggtgatggcttcggtttctctgctacc

SEQ ID NO: 97123 - DNA, 75 bp, synthetic construct
  source 1..75: mol_type = other DNA
cgcccgtactgtacaggccgcaccttatgctcactacacctgccacttgtgtggcagtgcactcagataccatcc

SEQ ID NO: 97124 - DNA, 75 bp, synthetic construct
  source 1..75: mol_type = other DNA
cgggcgtacgacggcctgagtgttgctggcccgtcaggcgcatacgagtattttgcacgcagcgccagcggtctg

SEQ ID NO: 97125 - DNA, 75 bp, synthetic construct
  source 1..75: mol_type = other DNA
acaatgccaatattccggtgctcggagatgcagaaaatgtctgtgcctgtgaatattcagacggaaagatccaga

SEQ ID NO: 97126 - DNA, 75 bp, synthetic construct
  source 1..75: mol_type = other DNA
attgtatggcgggaagccgtaccagacagtacttcccgccacaaacgtcctcctctggaggttcttaatagtcag

SEQ ID NO: 97127 - DNA, 75 bp, synthetic construct
  source 1..75: mol_type = other DNA
tggcttgcagagaaagaagaacgagagcgaatttaccagacatcaatccgaccattccgcaaagccacatatacc

SEQ ID NO: 97128 - DNA, 75 bp, synthetic construct
  source 1..75: mol_type = other DNA
ctgccggactgcctctggtttacccggactggcttgcccctgaccatctcacggtttactggcgcgttgccgtcg

SEQ ID NO: 97129 - DNA, 75 bp, synthetic construct
  source 1..75: mol_type = other DNA
tgaacgcattagagcaactgcaacaggactatatgcagcggctgaacgaatgggagagcgccttcgtggaattgc

SEQ ID NO: 97130 - DNA, 75 bp, synthetic construct
  source 1..75: mol_type = other DNA
gaagggagataaaggagagcgtggcgacaccggcccggcaggggcaactggtgaacgggggccggcaggtgatgc

SEQ ID NO: 97131 - DNA, 75 bp, synthetic construct
  source 1..75: mol_type = other DNA
gtttatgcgcaaattcttaaatatcacagccccacaattattcagtttctgacagatgaacttcagggttccatg

SEQ ID NO: 97132 - DNA, 75 bp, synthetic construct
  source 1..75: mol_type = other DNA
tatccccgctggcgcggggaacactcgatcaggcggttttgttcttccagcgacgccggtttatccccgctggcg

SEQ ID NO: 97133 - DNA, 75 bp, synthetic construct
  source 1..75: mol_type = other DNA
gcagaaagcgcacagtcagcggaacaaagcaggatagcggcggaagaagccgtaaaccgaatccccaccgtggtg

SEQ ID NO: 97134 - DNA, 75 bp, synthetic construct
  source 1..75: mol_type = other DNA
caggcccacagggaccgaaaggagaaacaggtgcggctggcccggtgggggcaaccggacctcagggaccgaagg

SEQ ID NO: 97135 - DNA, 75 bp, synthetic construct
  source 1..75: mol_type = other DNA
tctcctgaaagatggtgataatgtactgcattatacagctgttgttaagaaatcatctgatggtaatgctcaaat

SEQ ID NO: 97136 - DNA, 75 bp, synthetic construct
  source 1..75: mol_type = other DNA
ccgaagctgagccgacgcatcgtagaactggccgttaaagaaatggaagaaagtggctatgaatttaataaaaag

SEQ ID NO: 97137 - DNA, 75 bp, synthetic construct
  source 1..75: mol_type = other DNA
atgaacggtataaaaacggggctggggatcacgccgggtgaacacataatcagtgctgattctgcactcagcaga

SEQ ID NO: 97138 - DNA, 75 bp, synthetic construct
  source 1..75: mol_type = other DNA
cttatgaatgccgcgattgtcaacgggatcaagacggcggcaaacagtatgtccggagcgggaggatttatcggc

SEQ ID NO: 97139 - DNA, 75 bp, synthetic construct
  source 1..75: mol_type = other DNA
gcgttaaaagcgcaattgcaggagatgtgtgaagctgagggcgttacccaggctgagatgattgccgaactgata

SEQ ID NO: 97140 - DNA, 75 bp, synthetic construct
  source 1..75: mol_type = other DNA
cagaactacaatcaatgaatatcactgaagataatattagcaaacttaagtcattgtttcctgaagcatttaatg

SEQ ID NO: 97141 - DNA, 75 bp, synthetic construct
  source 1..75: mol_type = other DNA
tgggaagccacagcagaaaccctttcagaacagattgatgcctatgtaagcccaatccttgaaggccgtagtgaa

SEQ ID NO: 97142 - DNA, 75 bp, synthetic construct
  source 1..75: mol_type = other DNA
atgctactagagatacctcacctacatccagatgataaagaaagatttaaaagaagcggaatgttatttctggct

SEQ ID NO: 97143 - DNA, 75 bp, synthetic construct
  source 1..75: mol_type = other DNA
aatcgcgccctaacctgaccattcgtactcacgctatgaccgatcacatcatttttgacggcaaacgcgcggtgg

SEQ ID NO: 97144 - DNA, 75 bp, synthetic construct
  source 1..75: mol_type = other DNA
tttcacattgcagaacagcaagttgacggcacaagtgactacatcaaggatggggagtggcctattgataatggg

SEQ ID NO: 97145 - DNA, 75 bp, synthetic construct
  source 1..75: mol_type = other DNA
acaaatatggggagcgccgttaatgaaatcaaaacggtttatccccgctggcgcggggaacaccgccgcggactc

SEQ ID NO: 97146 - DNA, 75 bp, synthetic construct
  source 1..75: mol_type = other DNA
gcggagctgaagtctgtgcaccctcaaccattcggagcagagatgatgaaggctcttgatgagtatgagaagcat

SEQ ID NO: 97147 - DNA, 75 bp, synthetic construct
  source 1..75: mol_type = other DNA
aaaccagaaagaaaccacgaataaaaaagacactggaacagcaattagcatctgctcagatgcgtttaaatcgtt

SEQ ID NO: 97148 - DNA, 75 bp, synthetic construct
  source 1..75: mol_type = other DNA
caggactccatccgctcgcttgaacggcagagtgaagcctttgctgcggcacagactaaatttgacgaagccacc

SEQ ID NO: 97149 - DNA, 75 bp, synthetic construct
  source 1..75: mol_type = other DNA
gataatccggtcaaaacgtcaatctcctgcttcagctggacagatgctatcgatcatggtccgcaaatgacggca

SEQ ID NO: 97150 - DNA, 75 bp, synthetic construct
  source 1..75: mol_type = other DNA
acctattgccgccaacatcgaccagattgtcattgtctccgccattttgccggagctgtcgctcaatattatcga

SEQ ID NO: 97151 - DNA, 75 bp, synthetic construct
  source 1..75: mol_type = other DNA
aattaatgattttttaagccagtcacaatctaccaactttatagtatcacacaaacaacacatccattatgttaa

SEQ ID NO: 97152 - DNA, 75 bp, synthetic construct
  source 1..75: mol_type = other DNA
cgctacccgtctgactgaagatccgaacacaaccgtgctgctgcttgaagcaggcggcccggactatcgctttga

SEQ ID NO: 97153 - DNA, 75 bp, synthetic construct
  source 1..75: mol_type = other DNA
gtggtggcaagtgaactgcacggcgaacagccacaggcggtgccaggacggcagggagcggggacggcgctggag

SEQ ID NO: 97154 - DNA, 75 bp, synthetic construct
  source 1..75: mol_type = other DNA
ttgcagcattacctgtttcaccatcgcaattttccctgatgtcatctgtgactgagcaaggaataaatccttttg

SEQ ID NO: 97155 - DNA, 75 bp, synthetic construct
  source 1..75: mol_type = other DNA
atcgataaactatctaccacccgacttatcttcattaagtatggttggatgctcatcattagaggctataaattg

SEQ ID NO: 97156 - DNA, 75 bp, synthetic construct
  source 1..75: mol_type = other DNA
gaccacgcatgtcgaatgggatgcggtggacttcatcgccaagctggcggcactggtcccgccacctcgcgcgca

SEQ ID NO: 97157 - DNA, 75 bp, synthetic construct
  source 1..75: mol_type = other DNA
aagcgggtcttttccatcgacgtcaccacctgtgcccactgcggcggcgcggtgcggatcgtcgccagcatcgaa

SEQ ID NO: 97158 - DNA, 75 bp, synthetic construct
  source 1..75: mol_type = other DNA
tggggcgctggctgagccattatctgtatgagtacctgatggccacagtatatgtcacggtggtcacactgatac

SEQ ID NO: 97159 - DNA, 75 bp, synthetic construct
  source 1..75: mol_type = other DNA
gagaccatacaggcccttaatcacctgcgcagagtgcttcatgaagtcagtccttttgcacatgagccagtggac

SEQ ID NO: 97160 - DNA, 75 bp, synthetic construct
  source 1..75: mol_type = other DNA
gctggtggccgcggtaaagcgggcggtgtgaaagtggtaaacagcaaagaagacatccgtgcttttgcagaaaac

SEQ ID NO: 97161 - DNA, 75 bp, synthetic construct
  source 1..75: mol_type = other DNA
agagagcgcggcaaatgctgacacttcagcaggggatgcatcggagtcagcccggcaggcggcagaaagtgcagc

SEQ ID NO: 97162 - DNA, 75 bp, synthetic construct
  source 1..75: mol_type = other DNA
tctgctggttccctgctgccgtggtggttctgcattcacggcgggtgctgacggcacgtacagtgacagcacggg

SEQ ID NO: 97163 - DNA, 75 bp, synthetic construct
  source 1..75: mol_type = other DNA
atgaaaatatactcaattctcacagttttccttaccacacttcttttaaccgcatgtaacagtgaaccatcgcaa

SEQ ID NO: 97164 - DNA, 75 bp, synthetic construct
  source 1..75: mol_type = other DNA
atgaaaaagatatgcaaaagtctaatcgtaatttttactgtgtcctggctgacagcacctgcgtatgcatctgac

SEQ ID NO: 97165 - DNA, 75 bp, synthetic construct
  source 1..75: mol_type = other DNA
catccttagcaaacttggactttttgccgctgaggaagtatttactgatagtgatataaaactaccattatccta

SEQ ID NO: 97166 - DNA, 75 bp, synthetic construct
  source 1..75: mol_type = other DNA
tcattctttcaacttttttattaacagcctgtaattctgaaccttccgataaagacatctataatgtattcaaaa

SEQ ID NO: 97167 - DNA, 75 bp, synthetic construct
  source 1..75: mol_type = other DNA
cctgtcggccttcgccgcgctcagggatccgatctccagggcttactacacccgcaaaatgagtcagggaaaacg

SEQ ID NO: 97168 - DNA, 75 bp, synthetic construct
  source 1..75: mol_type = other DNA
ggccgcgcattttgcgaaaaactggcacagcaggcgggcatcgatcagtcacatccggcgctgcaacgctggtat

SEQ ID NO: 97169 - DNA, 75 bp, synthetic construct
  source 1..75: mol_type = other DNA
cccgctgccgtggattgacgatgacaaacctcgcctcggggatttccgtcgtcagcttatcggtcaggtgaaaga

SEQ ID NO: 97170 - DNA, 75 bp, synthetic construct
  source 1..75: mol_type = other DNA
acgtaaagccagctggcactgcaggcaatgtcaccacgattattatggggagcggtactgcacacactgccagac

SEQ ID NO: 97171 - DNA, 75 bp, synthetic construct
  source 1..75: mol_type = other DNA
caccaccgttaacaacccttaccggcatacgttgcagtaccgcacatatcacggaaacggacaacgcctggctgt

SEQ ID NO: 97172 - DNA, 75 bp, synthetic construct
  source 1..75: mol_type = other DNA
acccaactgagcagtgccaccaacagcacctctgaaacgctggccgccacaccaaaagcggtcaaggctgcatac

SEQ ID NO: 97173 - DNA, 75 bp, synthetic construct
  source 1..75: mol_type = other DNA
cgcctcggcttcggaaatcgcccgcgtgctggaaagcctgacgaaaaacagcggcgagaaccagcctgcgacgct

SEQ ID NO: 97174 - DNA, 75 bp, synthetic construct
  source 1..75: mol_type = other DNA
cagcggttacagcgctgggctgtacgcgacctggtatcagaacgatgcgaataagaccggcgcttatgttgacag

SEQ ID NO: 97175 - DNA, 75 bp, synthetic construct
  source 1..75: mol_type = other DNA
ccataagctggggcgcaaagtgctgtatatgcgcactgatctcgatgcttatcttgcatccactcgcagaacgca

SEQ ID NO: 97176 - DNA, 75 bp, synthetic construct
  source 1..75: mol_type = other DNA
aatttacaccggtgaaaaatccacacaggtttatggtcaggacgtctggttgcctgctgaaacccttgatctgat

SEQ ID NO: 97177 - DNA, 75 bp, synthetic construct
  source 1..75: mol_type = other DNA
ccggggcagcagtatgatgaggagtccggcctgtattacaaccgccaccgctattatgacccgctgcaggggcga

SEQ ID NO: 97178 - DNA, 75 bp, synthetic construct
  source 1..75: mol_type = other DNA
attacctatggctgataaagtcgaccagatggccgccagactggaacgttcccggggctgggttatcaaacaggc

SEQ ID NO: 97179 - DNA, 75 bp, synthetic construct
  source 1..75: mol_type = other DNA
ccatgcgcgctcacgctgccggtgagtctgtggatacccgcctgctgacggagacccttgaactgaccgccacgg

SEQ ID NO: 97180 - DNA, 75 bp, synthetic construct
  source 1..75: mol_type = other DNA
gtcggccgtctctaccgtgcttcggagcgtatttgccatgcaaaggtcgcagacgaagcgggggtggtgcgtgac

SEQ ID NO: 97181 - DNA, 75 bp, synthetic construct
  source 1..75: mol_type = other DNA
cagtaccggcgatatcatgagccagggtgacaccacgctgaaagcagccaccacggacaaccggggcagtctgct

SEQ ID NO: 97182 - DNA, 75 bp, synthetic construct
  source 1..75: mol_type = other DNA
aaaaccgttgttgggcattccaggcatctgttcactggcgctgattgctaacctgcaaaacaccgatgccgccgc

SEQ ID NO: 97183 - DNA, 75 bp, synthetic construct
  source 1..75: mol_type = other DNA
atgcgtggattacgtccggcattatcgacatttctctttctgttattgattactggcggcgtttacccgctgctg

SEQ ID NO: 97184 - DNA, 75 bp, synthetic construct
  source 1..75: mol_type = other DNA
agatgtctggcttactaggtcccggcgctatggcgatctgaaacacgcactcgttccggcacaatccatcgcgga

SEQ ID NO: 97185 - DNA, 75 bp, synthetic construct
  source 1..75: mol_type = other DNA
gaccgcctgctgatggagcaactgccgcacctgctggtggaaggtatgctcatctccgcgtttgcgctgaaagct

SEQ ID NO: 97186 - DNA, 75 bp, synthetic construct
  source 1..75: mol_type = other DNA
acgcgcactatctttaccggtatgaccgtcacggcaggctgacagagaaaaccgacctcatcccggaaggggtta

SEQ ID NO: 97187 - DNA, 75 bp, synthetic construct
  source 1..75: mol_type = other DNA
tccggcggcgaagacggtggcagtgtggtgttcccgccggtgctggtgcagatgctcgaccggctggaaagtgaa

SEQ ID NO: 97188 - DNA, 75 bp, synthetic construct
  source 1..75: mol_type = other DNA
atgagaacactagaggttcgcgctgaagacgtaatccctggtgatgtgctcataacatctaaaggtcaacaatgt

SEQ ID NO: 97189 - DNA, 75 bp, synthetic construct
  source 1..75: mol_type = other DNA
tggcgatccgatattaaccagcggcgaaacgggcattgcgtacggttcatcgaccggcagtaccggcccggtaag

SEQ ID NO: 97190 - DNA, 75 bp, synthetic construct
  source 1..75: mol_type = other DNA
gcttgaatttaaaagcctgaaggattttgaacccgaacaggtagcaaaaaatattccgcaacttcgtgtattact

SEQ ID NO: 97191 - DNA, 75 bp, synthetic construct
  source 1..75: mol_type = other DNA
gggctatatgcaggcgtttgtgaagtatggactacgcaacctgaaagaaggggcgaagttccgtctctttattca

SEQ ID NO: 97192 - DNA, 75 bp, synthetic construct
  source 1..75: mol_type = other DNA
tatagccaggaggagcgcattgagattatatcctcacttaagtttgtagatcatgtctttatagaagaatcttta

SEQ ID NO: 97193 - DNA, 75 bp, synthetic construct
  source 1..75: mol_type = other DNA
ataatattgaaaccaaatggctttatgattttctgaccctggaaaaatgccgcaatttttcccaggcggcagtca

SEQ ID NO: 97194 - DNA, 75 bp, synthetic construct
  source 1..75: mol_type = other DNA
ctgcaactccccttctcagcatactcctgttccgcgtaactacggtgctgcctctgatgtggcggttacccggca

SEQ ID NO: 97195 - DNA, 75 bp, synthetic construct
  source 1..75: mol_type = other DNA
gagaggtgctgcgctgacaggtactgcagtggcaaataacgaaggaacctggaacctcggaagtagtagtgaggg

SEQ ID NO: 97196 - DNA, 75 bp, synthetic construct
  source 1..75: mol_type = other DNA
atgagtaagtacaacgaattagttaagaagctaaaagaaatttttcagattgatcgaccagaactggatttcggt

SEQ ID NO: 97197 - DNA, 75 bp, synthetic construct
  source 1..75: mol_type = other DNA
caggcgctgatcaggctgaaggaaagcgtcagggaagagcgactgtcgctgatggcggaaggtaagtggtacccg

SEQ ID NO: 97198 - DNA, 75 bp, synthetic construct
  source 1..75: mol_type = other DNA
aataacgaaggcgagagcaccatcaccaacggtggcaccggcacccagattaatggtgatgacgccacggcaaac

SEQ ID NO: 97199 - DNA, 75 bp, synthetic construct
  source 1..75: mol_type = other DNA
cgcatcagagcaatacaactgggatttgaactacggtgaaatcgcgaaaattttccgcgcaggctgcattattcg

SEQ ID NO: 97200 - DNA, 75 bp, synthetic construct
  source 1..75: mol_type = other DNA
ggaaaacatttctttaagttggaagggaatgaactacgtgagttcaagcacagactatctttaagcgagtctgtt

SEQ ID NO: 97201 - DNA, 75 bp, synthetic construct
  source 1..75: mol_type = other DNA
gacaggtcgatgtcctggctggcctgggagccatgtctgacaaattcggtaaatccagtgacaaattgacattct

SEQ ID NO: 97202 - DNA, 75 bp, synthetic construct
  source 1..75: mol_type = other DNA
taatggtgatgacgccacggcaaacaacaacggcaaaaccaccgttgacggcaaggattccaccggtacggaaat

SEQ ID NO: 97203 - DNA, 75 bp, synthetic construct
  source 1..75: mol_type = other DNA
aatcgtacagtaatgggagttctgcattcgttatacttaatagcgggcagattgatgactttgaaattaatgtag

SEQ ID NO: 97204 - DNA, 75 bp, synthetic construct
  source 1..75: mol_type = other DNA
tgcgctttcaacgatttgttaaaccgatggtatttggtaatacacagattaactgggaagaagcctattccagtt

SEQ ID NO: 97205 - DNA, 75 bp, synthetic construct
  source 1..75: mol_type = other DNA
acctacgtttggtaaatgggttggagtgaatttatctgctgagaataaacgtcagctatggatccctgagggttt

SEQ ID NO: 97206 - DNA, 75 bp, synthetic construct
  source 1..75: mol_type = other DNA
gttgcaatcccccagacgcttccagaagctctgcgcctggctgccgagttggctgaacaaaagcagctactggaa

SEQ ID NO: 97207 - DNA, 75 bp, synthetic construct
  source 1..75: mol_type = other DNA
taccctgcggtggtgttcgacgaccgggaagtggtatacggcaccaccgatgtggcacaggctgagcggctcagg

SEQ ID NO: 97208 - DNA, 75 bp, synthetic construct
  source 1..75: mol_type = other DNA
ggcgctgttggtccacaaggccctgcgggtgaaaaaggggaagcaggtcccccgggtccgcaggggccagcggga

SEQ ID NO: 97209 - DNA, 75 bp, synthetic construct
  source 1..75: mol_type = other DNA
ctgcgtcttaactacaacggcataactgcactgttagtagaaggctttaaagcacttcgtcatgagattaaagag

SEQ ID NO: 97210 - DNA, 75 bp, synthetic construct
  source 1..75: mol_type = other DNA
gtgccatgcctgaaagatctttccccgtggctgggtcgtaaacatcgtgacaatactctcacgctgaaacgcttt

SEQ ID NO: 97211 - DNA, 75 bp, synthetic construct
  source 1..75: mol_type = other DNA
gtgaacaccgttggcaaatcggcattcgtggaggctgttggccagccgagtgatgatgcatccggctatctggat

SEQ ID NO: 97212 - DNA, 75 bp, synthetic construct
  source 1..75: mol_type = other DNA
atcttcatcggcccgaaagcagaaaccattcgcctgatgggcgacaaagtatccgcaatcgcggcgatgaaaaaa

SEQ ID NO: 97213 - DNA, 75 bp, synthetic construct
  source 1..75: mol_type = other DNA
tcctattccggaagcccggcggaaaatatttcccggtgtgacgttatgtgttgaatgtcaggcgtatcaggaaag

SEQ ID NO: 97214 - DNA, 75 bp, synthetic construct
  source 1..75: mol_type = other DNA
tccaacatttggacaatggtttggcgtgaatttatctgatgaaaataaaaaacaattatggataccagaaggatt

SEQ ID NO: 97215 - DNA, 75 bp, synthetic construct
  source 1..75: mol_type = other DNA
ccgcactggctgccggtgaggcaggaaataccggtgagaatacccttttaacgttgatcaccccggttgcctgtg

SEQ ID NO: 97216 - DNA, 75 bp, synthetic construct
  source 1..75: mol_type = other DNA
aatgaggcacggaaattatgtagcgaaaaaccagttcgcaacaatgatttcattgccagagttaaggatgagctt

SEQ ID NO: 97217 - DNA, 75 bp, synthetic construct
  source 1..75: mol_type = other DNA
acctggcgctatgtgaagggaaaaattgaattccactggcttgacacccgtacattcccggtcacctacatggac

SEQ ID NO: 97218 - DNA, 75 bp, synthetic construct
  source 1..75: mol_type = other DNA
ggcaaataaggcaacgggtacactggcgatgattattcacgccccgacccaacgaaaaattaaaaacgcagacgg

SEQ ID NO: 97219 - DNA, 75 bp, synthetic construct
  source 1..75: mol_type = other DNA
ggcagcggtaagccggtgagtgtggacatcacggcacagcctgctcctgaccggatacaggtcagcgccctgcct

SEQ ID NO: 97220 - DNA, 75 bp, synthetic construct
  source 1..75: mol_type = other DNA
atgtgtgcgctggatcgtagagaaagcccacttcacagtcaatctgtaaataattacatccttaatattcaggat

SEQ ID NO: 97221 - DNA, 75 bp, synthetic construct
  source 1..75: mol_type = other DNA
gggaatcagtgcagtcactgccagcatcaacagcagcagtcagagccggaacgtgacgtttatcgccgatgtcag

SEQ ID NO: 97222 - DNA, 75 bp, synthetic construct
  source 1..75: mol_type = other DNA
ttgctgttagtatggcttttgattttgatatatatcttaccgatgaaattacctcagtaggtgatgcacgtttta

SEQ ID NO: 97223 - DNA, 75 bp, synthetic construct
  source 1..75: mol_type = other DNA
gtttacggttacatcgattatctggcaatgaacatactgcctgaccggtgtgatgaatcctggctggcgcgacat

SEQ ID NO: 97224 - DNA, 75 bp, synthetic construct
  source 1..75: mol_type = other DNA
tgttgaagaccatcggggtaaaacagtttatgacgtggcatcaggggacgcgttatttatttctgaactcggctc

SEQ ID NO: 97225 - DNA, 75 bp, synthetic construct
  source 1..75: mol_type = other DNA
gatacaaccaggtgcagcggcaaaaactcaatcaacgattgtcgcggacaaaacgatatatatcgctggggatag

SEQ ID NO: 97226 - DNA, 75 bp, synthetic construct
  source 1..75: mol_type = other DNA
atgacggcagggttcaactttaactatgcagcaggtttttgttccgctaccccggcgttaaggggaaatgaggtc

SEQ ID NO: 97227 - DNA, 75 bp, synthetic construct
  source 1..75: mol_type = other DNA
aagcgcggggattatgagcacaacaagcggtagtggccagactcgtaatgcagggaagacatcatcagatggtgc

SEQ ID NO: 97228 - DNA, 75 bp, synthetic construct
  source 1..75: mol_type = other DNA
ccctggtttcttcgctcgatgcactggcgcaggtggaaaaaatcggagtcaaagcagccgaggagatcgggcaac

SEQ ID NO: 97229 - DNA, 75 bp, synthetic construct
  source 1..75: mol_type = other DNA
acggcccggaagagttccatctcgtcattgttgacaatgggcgttcagaggttctcggctcagaattcagcgatg

SEQ ID NO: 97230 - DNA, 75 bp, synthetic construct
  source 1..75: mol_type = other DNA
aggcattacctcatttccggttcattggcgaagtgctttccggcttcgtccctgaaccacatcaacccgcaacag

SEQ ID NO: 97231 - DNA, 75 bp, synthetic construct
  source 1..75: mol_type = other DNA
atgtgttttgatgtcgtcaatgcgaaaaatgtcaatgatatcaaatggttttgtaaaaacacatggttgttgtat

SEQ ID NO: 97232 - DNA, 75 bp, synthetic construct
  source 1..75: mol_type = other DNA
atgccagctaggggggaaaactacattttcttaaacgttggtttgggagaaggttcggcattacccgttggtgtg

SEQ ID NO: 97233 - DNA, 75 bp, synthetic construct
  source 1..75: mol_type = other DNA
gtcccatgaaatgatgcaaaacggcaacgcttctgcccaccaggacatggcggagatgcataaaaaaatgatgaa

SEQ ID NO: 97234 - DNA, 75 bp, synthetic construct
  source 1..75: mol_type = other DNA
cgccaacaggctggctgaaatgcaacggtgcgcctttttctgccgaagagtatccggaactggcaaaagtttacc

SEQ ID NO: 97235 - DNA, 75 bp, synthetic construct
  source 1..75: mol_type = other DNA
tgtggacgcccgcgccgtcgccacggtggtggcggactggaccggcatcccgctctcttccctgctcagggacga

SEQ ID NO: 97236 - DNA, 75 bp, synthetic construct
  source 1..75: mol_type = other DNA
caaacttatattgaacgaacccaacgtttagaaccatcgtatggtgatattctttatagcagggaaggtggaata

SEQ ID NO: 97237 - DNA, 75 bp, synthetic construct
  source 1..75: mol_type = other DNA
ttaatttattgcgataaattacgcaaaaatatccagaccgcccaacaaacccaactgcaccttgcagatgcacta

SEQ ID NO: 97238 - DNA, 75 bp, synthetic construct
  source 1..75: mol_type = other DNA
cagtcgccagccaggaacatatgatttctttccctcactcaaggaagaaaaacaaggggaaggaatgcatttcat

SEQ ID NO: 97239 - DNA, 75 bp, synthetic construct
  source 1..75: mol_type = other DNA
atcccatcaccgacacttcattcacgagggagtatcggtaatactggcgggagtgaaacccgtccacgaaatatt

SEQ ID NO: 97240 - DNA, 75 bp, synthetic construct
  source 1..75: mol_type = other DNA
ttgccatgatggctgtcgcttcatctgcctgggctgcagagacaatgaacatgcatgaccaggtaaataatgccc

SEQ ID NO: 97241 - DNA, 75 bp, synthetic construct
  source 1..75: mol_type = other DNA
tcaccaaaacggtgacagcgctgtcaccaaaacagggacacacaaaagaaactattacaaaagaaaaaagaaaag

SEQ ID NO: 97242 - DNA, 75 bp, synthetic construct
  source 1..75: mol_type = other DNA
tgtatttttgccctcagcaagctggcaatggcgttatccagtacgcttgattccatccctttatccatgcagcga

SEQ ID NO: 97243 - DNA, 75 bp, synthetic construct
  source 1..75: mol_type = other DNA
tttcttccatctgtttttgttcaccatgctgctggttgttaccagcaataacctgattgtgatgtgggcgacgat

SEQ ID NO: 97244 - DNA, 75 bp, synthetic construct
  source 1..75: mol_type = other DNA
cggaaaatgcaggtcgttccggtaatgccccagcaggtacccccctgacgttcgtcaccccgcaggcgggtataa

SEQ ID NO: 97245 - DNA, 75 bp, synthetic construct
  source 1..75: mol_type = other DNA
taccctgaacgccagtgaaaagctcacccacagcgggaaaagcagtgccccgtcgctcagcctcagtgcgccgga

SEQ ID NO: 97246 - DNA, 75 bp, synthetic construct
  source 1..75: mol_type = other DNA
ttcgcctgcaacttacagcagaggaacttgaagcgttaacggcggattttatttcctataagcgtgacggtgttt

SEQ ID NO: 97247 - DNA, 75 bp, synthetic construct
  source 1..75: mol_type = other DNA
gaagcatgcactgaaaatcagtttgccagagtctgttcagggggagggggaatcaatcatccctgtaacactgac

SEQ ID NO: 97248 - DNA, 75 bp, synthetic construct
  source 1..75: mol_type = other DNA
cgaagaaatcggcgtcaaccatgtgttgcaggatgccggaatccaggtgatcgaaaccgatctcggggaatatat

SEQ ID NO: 97249 - DNA, 75 bp, synthetic construct
  source 1..75: mol_type = other DNA
ttttcataaacgttggtttgggagaaggttctgcattacctgttggggtgcctgttccgtggccttcagccactc

SEQ ID NO: 97250 - DNA, 75 bp, synthetic construct
  source 1..75: mol_type = other DNA
aacgtttccaactatgccgtgatgaatattagcgttactgatagtggtgtctcgacggctgattcgtcttttaca

SEQ ID NO: 97251 - DNA, 75 bp, synthetic construct
  source 1..75: mol_type = other DNA
gactaaatttaacgatcccacaggcgtatatcattgaacttgaaagaggctacgttcccccagaaagttgggatc

SEQ ID NO: 97252 - DNA, 75 bp, synthetic construct
  source 1..75: mol_type = other DNA
cgtcgactggttgcaacaatatggcaatgcgcgcatcaagcttaatgtcgatgattctttttccttgaaggattc
